United States Patent Application Publication US 2005/0244851 A1 - sequence listing, part 17

SEQ ID NO: 638905 - DNA, 25 bp, Homo sapien
ctcactcttactgatctgctcttct

SEQ ID NO: 638906 - DNA, 25 bp, Homo sapien
tgctcttctcctgtccttgcttgct

SEQ ID NO: 638907 - DNA, 25 bp, Homo sapien
actctcactcttactgatctgctct

SEQ ID NO: 638908 - DNA, 25 bp, Homo sapien
gtgcattttcatgagtgagatgttg

SEQ ID NO: 638909 - DNA, 25 bp, Homo sapien
tgtgcattttcatgagtgagatgtt

SEQ ID NO: 638910 - DNA, 25 bp, Homo sapien
ctgtgcattttcatgagtgagatgt

SEQ ID NO: 638911 - DNA, 25 bp, Homo sapien
ctgagagtcagagtattcatagatc

SEQ ID NO: 638912 - DNA, 25 bp, Homo sapien
gagagtcagagtattcatagatctg

SEQ ID NO: 638913 - DNA, 25 bp, Homo sapien
tgagagtcagagtattcatagatct

SEQ ID NO: 638914 - DNA, 25 bp, Homo sapien
agagtcagagtattcatagatctgg

SEQ ID NO: 638915 - DNA, 25 bp, Homo sapien
ggcttgctcttctacggtccgccac

SEQ ID NO: 638916 - DNA, 25 bp, Homo sapien
tgggcttgctcttctacggtccgcc

SEQ ID NO: 638917 - DNA, 25 bp, Homo sapien
gggcttgctcttctacggtccgcca

SEQ ID NO: 638918 - DNA, 25 bp, Homo sapien
ctccagcatgggtcagagcgctgct

SEQ ID NO: 638919 - DNA, 25 bp, Homo sapien
caagcctaaagctaagagagcagat

SEQ ID NO: 638920 - DNA, 25 bp, Homo sapien
atttcaagcctaaagctaagagagc

SEQ ID NO: 638921 - DNA, 25 bp, Homo sapien
gaggagaaggcggagaggtcaagat

SEQ ID NO: 638922 - DNA, 25 bp, Homo sapien
tttcgcccatccaggaaggtcacat

SEQ ID NO: 638923 - DNA, 25 bp, Homo sapien
gcccatccaggaaggtcacattctc

SEQ ID NO: 638924 - DNA, 25 bp, Homo sapien
ctttcgcccatccaggaaggtcaca

SEQ ID NO: 638925 - DNA, 25 bp, Homo sapien
tcgcccatccaggaaggtcacattc

SEQ ID NO: 638926 - DNA, 25 bp, Homo sapien
tgatcttggagaggctttactctat

SEQ ID NO: 638927 - DNA, 25 bp, Homo sapien
tcaaactcagcctgaatcttcccaa

SEQ ID NO: 638928 - DNA, 25 bp, Homo sapien
caaactcagcctgaatcttcccaaa

SEQ ID NO: 638929 - DNA, 25 bp, Homo sapien
tcttcccaaaaagttcattctgatc

SEQ ID NO: 638930 - DNA, 25 bp, Homo sapien
tctttaggaatgtcaaataattggt

SEQ ID NO: 638931 - DNA, 25 bp, Homo sapien
ctttaggaatgtcaaataattggtc

SEQ ID NO: 638932 - DNA, 25 bp, Homo sapien
agatggacaggtatgtgatataatc

SEQ ID NO: 638933 - DNA, 25 bp, Homo sapien
gacaggtatgtgatataatccagct

SEQ ID NO: 638934 - DNA, 25 bp, Homo sapien
tgtgaactccaccaagttttgtgcc

SEQ ID NO: 638935 - DNA, 25 bp, Homo sapien
ctgtgaactccaccaagttttgtgc

SEQ ID NO: 638936 - DNA, 25 bp, Homo sapien
ctccaccaagttttgtgcctcttca

SEQ ID NO: 638937 - DNA, 25 bp, Homo sapien
gaactccaccaagttttgtgcctct

SEQ ID NO: 638938 - DNA, 25 bp, Homo sapien
gaattcctttatttactcgagtcta

SEQ ID NO: 638939 - DNA, 25 bp, Homo sapien
ctgaaatggcattgagttcctcctt

SEQ ID NO: 638940 - DNA, 25 bp, Homo sapien
ctcgagtctattatagaattcagca

SEQ ID NO: 638941 - DNA, 25 bp, Homo sapien
tcatcatacagatccctcaggttcc

SEQ ID NO: 638942 - DNA, 25 bp, Homo sapien
ctgagtgcggtgatcagaattgagc

SEQ ID NO: 638943 - DNA, 25 bp, Homo sapien
ctatcttgcatggcctgagtgcggt

SEQ ID NO: 638944 - DNA, 25 bp, Homo sapien
tcttgcatggcctgagtgcggtgat

SEQ ID NO: 638945 - DNA, 25 bp, Homo sapien
catggcctgagtgcggtgatcagaa

SEQ ID NO: 638946 - DNA, 25 bp, Homo sapien
gctgctgctccagtattgtctccat

SEQ ID NO: 638947 - DNA, 25 bp, Homo sapien
tctcctcatgatagcgccgctgctg

SEQ ID NO: 638948 - DNA, 25 bp, Homo sapien
tcttagtgagcatctctttggccat

SEQ ID NO: 638949 - DNA, 25 bp, Homo sapien
catgacgtccatgagcctttccttc

SEQ ID NO: 638950 - DNA, 25 bp, Homo sapien
ttaagaccatgcacatatgctgctg

SEQ ID NO: 638951 - DNA, 25 bp, Homo sapien
aacctttgagatacagctaatggca

SEQ ID NO: 638952 - DNA, 25 bp, Homo sapien
gcagctgtagtttgccggtccctga

SEQ ID NO: 638953 - DNA, 25 bp, Homo sapien
tcttagatctggaggcatacgttgc

SEQ ID NO: 638954 - DNA, 25 bp, Homo sapien
caggatgttggcaatccagttgagg

SEQ ID NO: 638955 - DNA, 25 bp, Homo sapien
ataacgggacccagcactgcattcg

SEQ ID NO: 638956 - DNA, 25 bp, Homo sapien
tgtgggaatgactgattcactaaga

SEQ ID NO: 638957 - DNA, 25 bp, Homo sapien
tccagttgagggacgtggtataacg

SEQ ID NO: 638958 - DNA, 25 bp, Homo sapien
gaaattaagcaacatctaaattaca

SEQ ID NO: 638959 - DNA, 25 bp, Homo sapien
tctaaattacacataggtcaaagga

SEQ ID NO: 638960 - DNA, 25 bp, Homo sapien
tctgttacatttgtggaatgcagct

SEQ ID NO: 638961 - DNA, 25 bp, Homo sapien
tgttacatttgtggaatgcagctaa

SEQ ID NO: 638962 - DNA, 25 bp, Homo sapien
ccatctgggaacattgcctttggct

SEQ ID NO: 638963 - DNA, 25 bp, Homo sapien
catctgggaacattgcctttggctg

SEQ ID NO: 638964 - DNA, 25 bp, Homo sapien
caccatctgggaacattgcctttgg

SEQ ID NO: 638965 - DNA, 25 bp, Homo sapien
tctgggaacattgcctttggctgga

SEQ ID NO: 638966 - DNA, 25 bp, Homo sapien
ggtgttggaggtgtgcccatgcatt

SEQ ID NO: 638967 - DNA, 25 bp, Homo sapien
gtgttggaggtgtgcccatgcattc

SEQ ID NO: 638968 - DNA, 25 bp, Homo sapien
cttgcgttttctcggagcctgacag

SEQ ID NO: 638969 - DNA, 25 bp, Homo sapien
tcggagcctgacaggtgctgccttg

SEQ ID NO: 638970 - DNA, 25 bp, Homo sapien
cttgaagcggaaagacttcacctca

SEQ ID NO: 638971 - DNA, 25 bp, Homo sapien
ggaaagacttcacctcacagggtgg

SEQ ID NO: 638972 - DNA, 25 bp, Homo sapien
ggatagatagacatctccatggtag

SEQ ID NO: 638973 - DNA, 25 bp, Homo sapien
gataatggatagatagacatctcca

SEQ ID NO: 638974 - DNA, 25 bp, Homo sapien
tagacatctccatggtagaaataat

SEQ ID NO: 638975 - DNA, 25 bp, Homo sapien
atctccatggtagaaataatgcagc

SEQ ID NO: 638976 - DNA, 25 bp, Homo sapien
cagttttatccttccgaccagaacg

SEQ ID NO: 638977 - DNA, 25 bp, Homo sapien
ggaaactctggtattgacttagaaa

SEQ ID NO: 638978 - DNA, 25 bp, Homo sapien
ctgaaaaggaaactctggtattgac

SEQ ID NO: 638979 - DNA, 25 bp, Homo sapien
tatccttccgaccagaacgcaagtc

SEQ ID NO: 638980 - DNA, 25 bp, Homo sapien
ggtttcacgcatccactgggaggct

SEQ ID NO: 638981 - DNA, 25 bp, Homo sapien
tcggtgatatcaaccaactgactgc

SEQ ID NO: 638982 - DNA, 25 bp, Homo sapien
caattactcagggtcaaccgtggtc

SEQ ID NO: 638983 - DNA, 25 bp, Homo sapien
tgcttcatgagcgagactcttccag

SEQ ID NO: 638984 - DNA, 25 bp, Homo sapien
cagactgtattacgggtggacccaa

SEQ ID NO: 638985 - DNA, 25 bp, Homo sapien
tgagtgacaccagggtcctcgcctc

SEQ ID NO: 638986 - DNA, 25 bp, Homo sapien
agcagcggcaggctcttgaccaact

SEQ ID NO: 638987 - DNA, 25 bp, Homo sapien
gaccaacttagaagctgttgccgtt

SEQ ID NO: 638988 - DNA, 25 bp, Homo sapien
tggggaagccgctgaatccacctgc

SEQ ID NO: 638989 - DNA, 25 bp, Homo sapien
tgacccacagccatctggttatgtc

SEQ ID NO: 638990 - DNA, 25 bp, Homo sapien
aaatatcatgcaccatgacccacag

SEQ ID NO: 638991 - DNA, 25 bp, Homo sapien
cccatgttagtcctatgccttgaaa

SEQ ID NO: 638992 - DNA, 25 bp, Homo sapien
caggatggacattcatgagccgtga

SEQ ID NO: 638993 - DNA, 25 bp, Homo sapien
catgagccgtgaagtttccagtaat

SEQ ID NO: 638994 - DNA, 25 bp, Homo sapien
taatcaccgggctccacaccaggat

SEQ ID NO: 638995 - DNA, 25 bp, Homo sapien
cgggctccacaccaggatggacatt

SEQ ID NO: 638996 - DNA, 25 bp, Homo sapien
taaagggacttacaaccaagatgcc

SEQ ID NO: 638997 - DNA, 25 bp, Homo sapien
tggctgtgctatccgaggtcgctgt

SEQ ID NO: 638998 - DNA, 25 bp, Homo sapien
tctcaaggtctgtgaataaagggac

SEQ ID NO: 638999 - DNA, 25 bp, Homo sapien
cacaggtggctacaatggtgggtaa

SEQ ID NO: 639000 - DNA, 25 bp, Homo sapien
ggagagcagggagcgtctctccagg

SEQ ID NO: 639001 - DNA, 25 bp, Homo sapien
caggacaggaagtatggagagcagg

SEQ ID NO: 639002 - DNA, 25 bp, Homo sapien
agccaggacaggaagtatggagagc

SEQ ID NO: 639003 - DNA, 25 bp, Homo sapien
gggagagccaggacaggaagtatgg

SEQ ID NO: 639004 - DNA, 25 bp, Homo sapien
ccaagtgcagacttgaggcaaaagc

SEQ ID NO: 639005 - DNA, 25 bp, Homo sapien
agtgcagacttgaggcaaaagcctg

SEQ ID NO: 639006 - DNA, 25 bp, Homo sapien
caagtgcagacttgaggcaaaagcc

SEQ ID NO: 639007 - DNA, 25 bp, Homo sapien
gcagacttgaggcaaaagcctgtct

SEQ ID NO: 639008 - DNA, 25 bp, Homo sapien
aggaggctgtgctccgggtctccct

SEQ ID NO: 639009 - DNA, 25 bp, Homo sapien
tgggggccacccgctggcaaaggcc

SEQ ID NO: 639010 - DNA, 25 bp, Homo sapien
tgctccgggtctccctgggggttca

SEQ ID NO: 639011 - DNA, 25 bp, Homo sapien
gttcccgctggctccgcagtcgcac

SEQ ID NO: 639012 - DNA, 25 bp, Homo sapien
ccccggaaggcttcgcagtcctcac

SEQ ID NO: 639013 - DNA, 25 bp, Homo sapien
ctggctccgcagtcgcaccagggcg

SEQ ID NO: 639014 - DNA, 25 bp, Homo sapien
aggcttcgcagtcctcacgccggtt

SEQ ID NO: 639015 - DNA, 25 bp, Homo sapien
cacgttgtccacgtagttaggggtg

SEQ ID NO: 639016 - DNA, 25 bp, Homo sapien
cacgtagttaggggtgacggcggtg

SEQ ID NO: 639017 - DNA, 25 bp, Homo sapien
tgtccacgtagttaggggtgacggc

SEQ ID NO: 639018 - DNA, 25 bp, Homo sapien
ctgggcgctggggtgcacgagacct

SEQ ID NO: 639019 - DNA, 25 bp, Homo sapien
cgctggggtgcacgagacctgaaag

SEQ ID NO: 639020 - DNA, 25 bp, Homo sapien
tggggtgcacgagacctgaaaggcc

SEQ ID NO: 639021 - DNA, 25 bp, Homo sapien
ggtgcacgagacctgaaaggccagg

SEQ ID NO: 639022 - DNA, 25 bp, Homo sapien
gagccggagagaggccccgtcccca

SEQ ID NO: 639023 - DNA, 25 bp, Homo sapien
ggcggtgagccggagagaggccccg

SEQ ID NO: 639024 - DNA, 25 bp, Homo sapien
ggagggcggtgagccggagagaggc

SEQ ID NO: 639025 - DNA, 25 bp, Homo sapien
cgggagggcggtgagccggagagag

SEQ ID NO: 639026 - DNA, 25 bp, Homo sapien
cccgaaaaggcgcaggagggcacga

SEQ ID NO: 639027 - DNA, 25 bp, Homo sapien
acccggctgcgctcgcagaagttta

SEQ ID NO: 639028 - DNA, 25 bp, Homo sapien
cgctcgcagaagtttaagggctcaa

SEQ ID NO: 639029 - DNA, 25 bp, Homo sapien
agggcacgaaggtctggcgccgacg

SEQ ID NO: 639030 - DNA, 25 bp, Homo sapien
ccgcgggcgaagaagcggcgcaggg

SEQ ID NO: 639031 - DNA, 25 bp, Homo sapien
gcccgcgggcgaagaagcggcgcag

SEQ ID NO: 639032 - DNA, 25 bp, Homo sapien
gcgggcgaagaagcggcgcagggcc

SEQ ID NO: 639033 - DNA, 25 bp, Homo sapien
ccggcccaggcactgcgccacatac

SEQ ID NO: 639034 - DNA, 25 bp, Homo sapien
acatcggttccctccgaccgagctc

SEQ ID NO: 639035 - DNA, 25 bp, Homo sapien
ttcggccgcgtccacacatcggttc

SEQ ID NO: 639036 - DNA, 25 bp, Homo sapien
cgcgtccgccgtgcaggcttcggcc

SEQ ID NO: 639037 - DNA, 25 bp, Homo sapien
tcggagcgcaaacgctggcaccgcg

SEQ ID NO: 639038 - DNA, 25 bp, Homo sapien
ggatgaacatagctcgagggcttag

SEQ ID NO: 639039 - DNA, 25 bp, Homo sapien
agctgcaagatctcctccaccttaa

SEQ ID NO: 639040 - DNA, 25 bp, Homo sapien
agcagctcatctcagctgcaagatc

SEQ ID NO: 639041 - DNA, 25 bp, Homo sapien
cagcagctcatctcagctgcaagat

SEQ ID NO: 639042 - DNA, 25 bp, Homo sapien
cagcagcagcgcaggccccaggcag

SEQ ID NO: 639043 - DNA, 25 bp, Homo sapien
agcagcagcagcgcaggccccaggc

SEQ ID NO: 639044 - DNA, 25 bp, Homo sapien
cagcgcaggccccaggcagcggacc

SEQ ID NO: 639045 - DNA, 25 bp, Homo sapien
gcgcaggccccaggcagcggaccat

SEQ ID NO: 639046 - DNA, 25 bp, Homo sapien
gcttcccagtcacttctgcgtgcct

SEQ ID NO: 639047 - DNA, 25 bp, Homo sapien
tcccagtcacttctgcgtgcctcct

SEQ ID NO: 639048 - DNA, 25 bp, Homo sapien
ctgcttcccagtcacttctgcgtgc

SEQ ID NO: 639049 - DNA, 25 bp, Homo sapien
gccaggtgatcctgggctccagaca

SEQ ID NO: 639050 - DNA, 25 bp, Homo sapien
gcctatagccaacatgtctttcttt

SEQ ID NO: 639051 - DNA, 25 bp, Homo sapien
cagaacctcaggtgtagcactggga

SEQ ID NO: 639052 - DNA, 25 bp, Homo sapien
accacgcctatagccaacatgtctt

SEQ ID NO: 639053 - DNA, 25 bp, Homo sapien
ggctgtcagattctgagctccagaa

SEQ ID NO: 639054 - DNA, 25 bp, Homo sapien
gagcccttttgggatggccagcact

SEQ ID NO: 639055 - DNA, 25 bp, Homo sapien
aggaccactagcttctggccagcag

SEQ ID NO: 639056 - DNA, 25 bp, Homo sapien
gctgggtccgtggaaattgcatgta

SEQ ID NO: 639057 - DNA, 25 bp, Homo sapien
tgtggactcagtcgaaccatagggc

SEQ ID NO: 639058 - DNA, 25 bp, Homo sapien
tcaccagaggcaggatcttggcatc

SEQ ID NO: 639059 - DNA, 25 bp, Homo sapien
cagaggcaggatcttggcatctgga

SEQ ID NO: 639060 - DNA, 25 bp, Homo sapien
caggatcttggcatctggacttgat

SEQ ID NO: 639061 - DNA, 25 bp, Homo sapien
gaggcaggatcttggcatctggact

SEQ ID NO: 639062 - DNA, 25 bp, Homo sapien
ctggtctgcatgataaccaagaggt

SEQ ID NO: 639063 - DNA, 25 bp, Homo sapien
ccagaaacctgattagggggcagca

SEQ ID NO: 639064 - DNA, 25 bp, Homo sapien
catgataaccaagaggtcataaact

SEQ ID NO: 639065 - DNA, 25 bp, Homo sapien
ggaccagtgatccaggaaaagccac

SEQ ID NO: 639066 - DNA, 25 bp, Homo sapien
gggtcaggcgagactgctggcagag

SEQ ID NO: 639067 - DNA, 25 bp, Homo sapien
ggcgagactgctggcagaggcttct

SEQ ID NO: 639068 - DNA, 25 bp, Homo sapien
tggctgctgggctcatgagagttct

SEQ ID NO: 639069 - DNA, 25 bp, Homo sapien
ctgctgggctcatgagagttctcag

SEQ ID NO: 639070 - DNA, 25 bp, Homo sapien
gagaaatggtggagggtaaatgttg

SEQ ID NO: 639071 - DNA, 25 bp, Homo sapien
tggtggagggtaaatgttgtgaata

SEQ ID NO: 639072 - DNA, 25 bp, Homo sapien
aaatggtggagggtaaatgttgtga

SEQ ID NO: 639073 - DNA, 25 bp, Homo sapien
tggagggtaaatgttgtgaatatgg

SEQ ID NO: 639074 - DNA, 25 bp, Homo sapien
cacctccccctggtgcctcactcac

SEQ ID NO: 639075 - DNA, 25 bp, Homo sapien
aggcaggaggcatgagcccttccct

SEQ ID NO: 639076 - DNA, 25 bp, Homo sapien
ctcaaggtgactgggtgctgcccat

SEQ ID NO: 639077 - DNA, 25 bp, Homo sapien
aggggcataggggactcaaggtgac

SEQ ID NO: 639078 - DNA, 25 bp, Homo sapien
aactccatggggtgaacgccgccca

SEQ ID NO: 639079 - DNA, 25 bp, Homo sapien
ggtggtccctgtgtgggccatcttt

SEQ ID NO: 639080 - DNA, 25 bp, Homo sapien
gggcccaactccatggggtgaacgc

SEQ ID NO: 639081 - DNA, 25 bp, Homo sapien
tggtccctgtgtgggccatctttgg

SEQ ID NO: 639082 - DNA, 25 bp, Homo sapien
tgagcaacgtgataagagtccagga

SEQ ID NO: 639083 - DNA, 25 bp, Homo sapien
gcatcgctcagcttccaaagaacct

SEQ ID NO: 639084 - DNA, 25 bp, Homo sapien
tcacaactcgctttgtcagggtcct

SEQ ID NO: 639085 - DNA, 25 bp, Homo sapien
tgagtgggttattgcctccccgcag

SEQ ID NO: 639086 - DNA, 25 bp, Homo sapien
tcacagagaactgggttaaggcagg

SEQ ID NO: 639087 - DNA, 25 bp, Homo sapien
gagcactcccaagaccaggctatgt

SEQ ID NO: 639088 - DNA, 25 bp, Homo sapien
gcaccgcagctgaccagtggtatgg

SEQ ID NO: 639089 - DNA, 25 bp, Homo sapien
gagtcctaggacagccatgcttagt

SEQ ID NO: 639090 - DNA, 25 bp, Homo sapien
gagggccatgccttgcggtgctggt

SEQ ID NO: 639091 - DNA, 25 bp, Homo sapien
tccaccccctcgcttgactgggagg

SEQ ID NO: 639092 - DNA, 25 bp, Homo sapien
aagctacttctttccatggcctctg

SEQ ID NO: 639093 - DNA, 25 bp, Homo sapien
tcaggaagcaggcgctcggagccta

SEQ ID NO: 639094 - DNA, 25 bp, Homo sapien
ccagctgcatcgctgcagatgggct

SEQ ID NO: 639095 - DNA, 25 bp, Homo sapien
tgcacgcagggtcccttctgcagcc

SEQ ID NO: 639096 - DNA, 25 bp, Homo sapien
ctgcatcgctgcagatgggctcctg

SEQ ID NO: 639097 - DNA, 25 bp, Homo sapien
gctgcatcgctgcagatgggctcct

SEQ ID NO: 639098 - DNA, 25 bp, Homo sapien
aggcagcaggacgctgaggagcatg

SEQ ID NO: 639099 - DNA, 25 bp, Homo sapien
aggacgctgaggagcatggccagca

SEQ ID NO: 639100 - DNA, 25 bp, Homo sapien
agaggcagcaggacgctgaggagca

SEQ ID NO: 639101 - DNA, 25 bp, Homo sapien
agcaggacgctgaggagcatggcca

SEQ ID NO: 639102 - DNA, 25 bp, Homo sapien
tgccaccaaagcctggcttgtcaca

SEQ ID NO: 639103 - DNA, 25 bp, Homo sapien
gccaccaaagcctggcttgtcacag

SEQ ID NO: 639104 - DNA, 25 bp, Homo sapien
gtggcagttatggttgctattgcaa

SEQ ID NO: 639105 - DNA, 25 bp, Homo sapien
gagcacagtggcagttatggttgct

SEQ ID NO: 639106 - DNA, 25 bp, Homo sapien
gagaagaggagggtcacgtaggatt

SEQ ID NO: 639107 - DNA, 25 bp, Homo sapien
gaagaggagggtcacgtaggattag

SEQ ID NO: 639108 - DNA, 25 bp, Homo sapien
agaggagggtcacgtaggattagga

SEQ ID NO: 639109 - DNA, 25 bp, Homo sapien
gaggagggtcacgtaggattaggaa

SEQ ID NO: 639110 - DNA, 25 bp, Homo sapien
ggcagtcaggcagcgctgaagctcc

SEQ ID NO: 639111 - DNA, 25 bp, Homo sapien
aggcagtcaggcagcgctgaagctc

SEQ ID NO: 639112 - DNA, 25 bp, Homo sapien
actggcctgcgggattcaaacggca

SEQ ID NO: 639113 - DNA, 25 bp, Homo sapien
cctgcgggattcaaacggcaaggag

SEQ ID NO: 639114 - DNA, 25 bp, Homo sapien
ctacgggcagtgcaccaggcagtga

SEQ ID NO: 639115 - DNA, 25 bp, Homo sapien
ggacactggcctgcgggattcaaac

SEQ ID NO: 639116 - DNA, 25 bp, Homo sapien
aaggctccccgacaagtcacttcct

SEQ ID NO: 639117 - DNA, 25 bp, Homo sapien
actggggagtgccaaggctccccga

SEQ ID NO: 639118 - DNA, 25 bp, Homo sapien
gccaaggctccccgacaagtcactt

SEQ ID NO: 639119 - DNA, 25 bp, Homo sapien
cactggggagtgccaaggctccccg

SEQ ID NO: 639120 - DNA, 25 bp, Homo sapien
ggtgaacggtagagtccactggcac

SEQ ID NO: 639121 - DNA, 25 bp, Homo sapien
ctaggtgaacggtagagtccactgg

SEQ ID NO: 639122 - DNA, 25 bp, Homo sapien
atgtgcggtgcgagcaggctgggct

SEQ ID NO: 639123 - DNA, 25 bp, Homo sapien
ccactggcaccatgtgcggtgcgag

SEQ ID NO: 639124 - DNA, 25 bp, Homo sapien
ggcaggaagtggccctcgctgtcct

SEQ ID NO: 639125 - DNA, 25 bp, Homo sapien
cctggccgcagtttccatgagcatc

SEQ ID NO: 639126 - DNA, 25 bp, Homo sapien
gagcatctcccgcagagttcaccac

SEQ ID NO: 639127 - DNA, 25 bp, Homo sapien
tgtcctggccgcagtttccatgagc

SEQ ID NO: 639128 - DNA, 25 bp, Homo sapien
aggggctgcgctcagcgggcctcag

SEQ ID NO: 639129 - DNA, 25 bp, Homo sapien
gctgcgctcagcgggcctcagtttc

SEQ ID NO: 639130 - DNA, 25 bp, Homo sapien
tcttccccacagtagaaaactggcc

SEQ ID NO: 639131 - DNA, 25 bp, Homo sapien
ctgaggaagcatgggccaggctggg

SEQ ID NO: 639132 - DNA, 25 bp, Homo sapien
ggcagggtgcaagggtgctcgtgtc

SEQ ID NO: 639133 - DNA, 25 bp, Homo sapien
agggtgcaagggtgctcgtgtcctc

SEQ ID NO: 639134 - DNA, 25 bp, Homo sapien
gggggcagggtgcaagggtgctcgt

SEQ ID NO: 639135 - DNA, 25 bp, Homo sapien
cagggtgcaagggtgctcgtgtcct

SEQ ID NO: 639136 - DNA, 25 bp, Homo sapien
gctccagcgtgggacatgcgccatc

SEQ ID NO: 639137 - DNA, 25 bp, Homo sapien
gagccgtccagtaggtaaacgtctg

SEQ ID NO: 639138 - DNA, 25 bp, Homo sapien
tgggacatgcgccatcccagcagta

SEQ ID NO: 639139 - DNA, 25 bp, Homo sapien
gaggtgcccgtgcaaaactcaggga

SEQ ID NO: 639140 - DNA, 25 bp, Homo sapien
gcctggcggcacagcgctccagccg

SEQ ID NO: 639141 - DNA, 25 bp, Homo sapien
ggcggcacagcgctccagccggctt

SEQ ID NO: 639142 - DNA, 25 bp, Homo sapien
ggcacagcgctccagccggcttcag

SEQ ID NO: 639143 - DNA, 25 bp, Homo sapien
ggcctggcggcacagcgctccagcc

SEQ ID NO: 639144 - DNA, 25 bp, Homo sapien
tccatgccgagagcgcggctcggag

SEQ ID NO: 639145 - DNA, 25 bp, Homo sapien
gagagaggccacgtgcagtgagagg

SEQ ID NO: 639146 - DNA, 25 bp, Homo sapien
acgtgcagtgagaggtccatgccga

SEQ ID NO: 639147 - DNA, 25 bp, Homo sapien
aggccacgtgcagtgagaggtccat

SEQ ID NO: 639148 - DNA, 25 bp, Homo sapien
tgagggcaccaattaactaaggcca

SEQ ID NO: 639149 - DNA, 25 bp, Homo sapien
ggaacctgagggcaccaattaacta

SEQ ID NO: 639150 - DNA, 25 bp, Homo sapien
attaactaaggccaacaggccggct

SEQ ID NO: 639151 - DNA, 25 bp, Homo sapien
ttaactaaggccaacaggccggctc

SEQ ID NO: 639152 - DNA, 25 bp, Homo sapien
cagtccccgtgggcgcactgggccc

SEQ ID NO: 639153 - DNA, 25 bp, Homo sapien
acgcagcagtccccgtgggcgcact

SEQ ID NO: 639154 - DNA, 25 bp, Homo sapien
agcagtccccgtgggcgcactgggc

SEQ ID NO: 639155 - DNA, 25 bp, Homo sapien
gcagcagtccccgtgggcgcactgg

SEQ ID NO: 639156 - DNA, 25 bp, Homo sapien
caaagcagcagaggtcgcggcactc

SEQ ID NO: 639157 - DNA, 25 bp, Homo sapien
cagaaaggcaagaagggcccaggtg

SEQ ID NO: 639158 - DNA, 25 bp, Homo sapien
gaaaggcaagaagggcccaggtgag

SEQ ID NO: 639159 - DNA, 25 bp, Homo sapien
ccagaaaggcaagaagggcccaggt

SEQ ID NO: 639160 - DNA, 25 bp, Homo sapien
gaccagaaaggcaagaagggcccag

SEQ ID NO: 639161 - DNA, 25 bp, Homo sapien
ggcaagtgggggccgggcgagccga

SEQ ID NO: 639162 - DNA, 25 bp, Homo sapien
gagagggcaagtgggggccgggcga

SEQ ID NO: 639163 - DNA, 25 bp, Homo sapien
ctgagcggagagggcaagtgggggc

SEQ ID NO: 639164 - DNA, 25 bp, Homo sapien
caagtgggggccgggcgagccgact

SEQ ID NO: 639165 - DNA, 25 bp, Homo sapien
agggccgcagtcacactcctcgccc

SEQ ID NO: 639166 - DNA, 25 bp, Homo sapien
aagccgttcccgcagagcgccggcg

SEQ ID NO: 639167 - DNA, 25 bp, Homo sapien
ctgcaggcgctgaacacgcgcggaa

SEQ ID NO: 639168 - DNA, 25 bp, Homo sapien
ctcgcccgcttccacgaagccgttc

SEQ ID NO: 639169 - DNA, 25 bp, Homo sapien
ctcgccaggttactcggaaaataat

SEQ ID NO: 639170 - DNA, 25 bp, Homo sapien
tcccggtgtaggagtaacctcgcca

SEQ ID NO: 639171 - DNA, 25 bp, Homo sapien
aagtcacacaacaagcgggacaggg

SEQ ID NO: 639172 - DNA, 25 bp, Homo sapien
acgatgcggccccaatagtgagcag

SEQ ID NO: 639173 - DNA, 25 bp, Homo sapien
agaaacgcagcggaggaagtcccca

SEQ ID NO: 639174 - DNA, 25 bp, Homo sapien
ctgaagcggacactatgatcattat

SEQ ID NO: 639175 - DNA, 25 bp, Homo sapien
ggacgaccaaagaaacgcagcggag

SEQ ID NO: 639176 - DNA, 25 bp, Homo sapien
gcggacactatgatcattatcccca

SEQ ID NO: 639177 - DNA, 25 bp, Homo sapien
ccgtcggggtcgtggctgaggccga

SEQ ID NO: 639178 - DNA, 25 bp, Homo sapien
atgacgcagcctccggactcggccg

SEQ ID NO: 639179 - DNA, 25 bp, Homo sapien
ctcatgggccatggtggctgcggcg

SEQ ID NO: 639180 - DNA, 25 bp, Homo sapien
gcgccgatggggagctccgagtggt

SEQ ID NO: 639181 - DNA, 25 bp, Homo sapien
tgggagggcggtcactgcggccgta

SEQ ID NO: 639182 - DNA, 25 bp, Homo sapien
gcggtcactgcggccgtagagcctc

SEQ ID NO: 639183 - DNA, 25 bp, Homo sapien
gggccgtgggagggcggtcactgcg

SEQ ID NO: 639184 - DNA, 25 bp, Homo sapien
actgcggccgtagagcctcctgtct

SEQ ID NO: 639185 - DNA, 25 bp, Homo sapien
acatgccctcgacgggcgccaggcc

SEQ ID NO: 639186 - DNA, 25 bp, Homo sapien
tcggcgcggcacatgccctcgacgg

SEQ ID NO: 639187 - DNA, 25 bp, Homo sapien
gtgctcacgcctcccgagctctcgg

SEQ ID NO: 639188 - DNA, 25 bp, Homo sapien
ctcccgagctctcggcgcggcacat

SEQ ID NO: 639189 - DNA, 25 bp, Homo sapien
gcggagcgcggcgtgaccaggcggg

SEQ ID NO: 639190 - DNA, 25 bp, Homo sapien
gggacccgcgtccgggtcagaggca

SEQ ID NO: 639191 - DNA, 25 bp, Homo sapien
ggacccgcgtccgggtcagaggcac

SEQ ID NO: 639192 - DNA, 25 bp, Homo sapien
gagcgcggcgtgaccaggcggggcc

SEQ ID NO: 639193 - DNA, 25 bp, Homo sapien
gtcccgctcggtccacacctccagg

SEQ ID NO: 639194 - DNA, 25 bp, Homo sapien
gtgagcagctgcgcggagtcgtggg

SEQ ID NO: 639195 - DNA, 25 bp, Homo sapien
cgttggcgtcctgcgtgacgcggct

SEQ ID NO: 639196 - DNA, 25 bp, Homo sapien
agcccccggcgccactgcaggaagg

SEQ ID NO: 639197 - DNA, 25 bp, Homo sapien
ccatcgcgccggtggtccttcgtgg

SEQ ID NO: 639198 - DNA, 25 bp, Homo sapien
gcgccccatcgcgccggtggtcctt

SEQ ID NO: 639199 - DNA, 25 bp, Homo sapien
ccccatcaccgctctctccccgccg

SEQ ID NO: 639200 - DNA, 25 bp, Homo sapien
gacagggcgccccatcgcgccggtg

SEQ ID NO: 639201 - DNA, 25 bp, Homo sapien
tggtccacgtagttggcgacttcca

SEQ ID NO: 639202 - DNA, 25 bp, Homo sapien
tgtggttcaagtttcggtgccgagt

SEQ ID NO: 639203 - DNA, 25 bp, Homo sapien
aggagacgctgtttggtgtggttca

SEQ ID NO: 639204 - DNA, 25 bp, Homo sapien
cgtagttggcgacttccaggagacg

SEQ ID NO: 639205 - DNA, 25 bp, Homo sapien
cacaatgtacagttccaggtacttc

SEQ ID NO: 639206 - DNA, 25 bp, Homo sapien
tccaggtacttccgggtcctgcgcg

SEQ ID NO: 639207 - DNA, 25 bp, Homo sapien
ttccaggtacttccgggtcctgcgc

SEQ ID NO: 639208 - DNA, 25 bp, Homo sapien
tgccacaatgtacagttccaggtac

SEQ ID NO: 639209 - DNA, 25 bp, Homo sapien
aaaatactgggactcgaggcctgtg

SEQ ID NO: 639210 - DNA, 25 bp, Homo sapien
ggagggctatagatacagcattccc

SEQ ID NO: 639211 - DNA, 25 bp, Homo sapien
ttctgatttggagggctatagatac

SEQ ID NO: 639212 - DNA, 25 bp, Homo sapien
gtgaattcccgtctcttctgatttg

SEQ ID NO: 639213 - DNA, 25 bp, Homo sapien
aggctggtcatgcccgctttgttcc

SEQ ID NO: 639214 - DNA, 25 bp, Homo sapien
gacgcagataatagctggcattcct

SEQ ID NO: 639215 - DNA, 25 bp, Homo sapien
tggccagggacgcagataatagctg

SEQ ID NO: 639216 - DNA, 25 bp, Homo sapien
tctcgtgggttgagaagtccttgga

SEQ ID NO: 639217 - DNA, 25 bp, Homo sapien
ctgctccatccgaaagatctcgtgg

SEQ ID NO: 639218 - DNA, 25 bp, Homo sapien
gtgagggagctctttccccatccca

SEQ ID NO: 639219 - DNA, 25 bp, Homo sapien
cgggtgtgagggagctctttcccca

SEQ ID NO: 639220 - DNA, 25 bp, Homo sapien
cagaggggtaggagcgggtgtgagg

SEQ ID NO: 639221 - DNA, 25 bp, Homo sapien
gggtaggagcgggtgtgagggagct

SEQ ID NO: 639222 - DNA, 25 bp, Homo sapien
aggtgcagaggactacccaggagtc

SEQ ID NO: 639223 - DNA, 25 bp, Homo sapien
cagaggactacccaggagtcgggga

SEQ ID NO: 639224 - DNA, 25 bp, Homo sapien
agcaggtgcagaggactacccagga

SEQ ID NO: 639225 - DNA, 25 bp, Homo sapien
ccagagcaggtgcagaggactaccc

SEQ ID NO: 639226 - DNA, 25 bp, Homo sapien
ggccagccccaaatctcagccaggg

SEQ ID NO: 639227 - DNA, 25 bp, Homo sapien
ggaaggggccagccccaaatctcag

SEQ ID NO: 639228 - DNA, 25 bp, Homo sapien
aggggccagccccaaatctcagcca

SEQ ID NO: 639229 - DNA, 25 bp, Homo sapien
gggccagccccaaatctcagccagg

SEQ ID NO: 639230 - DNA, 25 bp, Homo sapien
caaccgccccttaggaatgcaagga

SEQ ID NO: 639231 - DNA, 25 bp, Homo sapien
ggctggctccaaccgccccttagga

SEQ ID NO: 639232 - DNA, 25 bp, Homo sapien
ccgccccttaggaatgcaaggagga

SEQ ID NO: 639233 - DNA, 25 bp, Homo sapien
tccaaccgccccttaggaatgcaag

SEQ ID NO: 639234 - DNA, 25 bp, Homo sapien
cccagagcccatggaagcatctcac

SEQ ID NO: 639235 - DNA, 25 bp, Homo sapien
ggcggtgcatcccagagcccatgga

SEQ ID NO: 639236 - DNA, 25 bp, Homo sapien
tcccagagcccatggaagcatctca

SEQ ID NO: 639237 - DNA, 25 bp, Homo sapien
gcatcccagagcccatggaagcatc

SEQ ID NO: 639238 - DNA, 25 bp, Homo sapien
ggccgtagtgggtttctatgtatcc

SEQ ID NO: 639239 - DNA, 25 bp, Homo sapien
gggccgtagtgggtttctatgtatc

SEQ ID NO: 639240 - DNA, 25 bp, Homo sapien
gggctgacagcctcagcggtcctct

SEQ ID NO: 639241 - DNA, 25 bp, Homo sapien
aggcctgcgtgactctccctgtcat

SEQ ID NO: 639242 - DNA, 25 bp, Homo sapien
tcatcgccagcagggagctaacaag

SEQ ID NO: 639243 - DNA, 25 bp, Homo sapien
gcatatcttgcaaatgtccactagg

SEQ ID NO: 639244 - DNA, 25 bp, Homo sapien
tggttcttctccagctcaagcagga

SEQ ID NO: 639245 - DNA, 25 bp, Homo sapien
gagctcctggccttcagcctccagg

SEQ ID NO: 639246 - DNA, 25 bp, Homo sapien
tcttctccagctcaagcaggagctc

SEQ ID NO: 639247 - DNA, 25 bp, Homo sapien
gttcttctccagctcaagcaggagc

SEQ ID NO: 639248 - DNA, 25 bp, Homo sapien
ctgtggagggcggggagacatggca

SEQ ID NO: 639249 - DNA, 25 bp, Homo sapien
gcgccagggttgtccatccaggacc

SEQ ID NO: 639250 - DNA, 25 bp, Homo sapien
catccaggacccagtgcggggtgac

SEQ ID NO: 639251 - DNA, 25 bp, Homo sapien
cggtgcgccagggttgtccatccag

SEQ ID NO: 639252 - DNA, 25 bp, Homo sapien
ctgacggtgcgccagggttgtccat

SEQ ID NO: 639253 - DNA, 25 bp, Homo sapien
gtaaagacagagcacagggtgaggg

SEQ ID NO: 639254 - DNA, 25 bp, Homo sapien
tggagtaaagacagagcacagggtg

SEQ ID NO: 639255 - DNA, 25 bp, Homo sapien
aagacagagcacagggtgaggggga

SEQ ID NO: 639256 - DNA, 25 bp, Homo sapien
gagtaaagacagagcacagggtgag

SEQ ID NO: 639257 - DNA, 25 bp, Homo sapien
tggtgtgtgggtgctgtccacatgg

SEQ ID NO: 639258 - DNA, 25 bp, Homo sapien
cagtgtggtgtgtgggtgctgtcca

SEQ ID NO: 639259 - DNA, 25 bp, Homo sapien
gggtgcagtgtggtgtgtgggtgct

SEQ ID NO: 639260 - DNA, 25 bp, Homo sapien
gtgtgtgggtgctgtccacatggcc

SEQ ID NO: 639261 - DNA, 25 bp, Homo sapien
ataaacaacatacacactgccctgc

SEQ ID NO: 639262 - DNA, 25 bp, Homo sapien
aatataaacaacatacacactgccc

SEQ ID NO: 639263 - DNA, 25 bp, Homo sapien
ggcaacaatataaacaacatacaca

SEQ ID NO: 639264 - DNA, 25 bp, Homo sapien
aaacaaggcaacaatataaacaaca

SEQ ID NO: 639265 - DNA, 25 bp, Homo sapien
tgaagcaccccggcgcctggcactg

SEQ ID NO: 639266 - DNA, 25 bp, Homo sapien
gcagcagcaacggggtcccccgagc

SEQ ID NO: 639267 - DNA, 25 bp, Homo sapien
gcaccccggcgcctggcactggcca

SEQ ID NO: 639268 - DNA, 25 bp, Homo sapien
cttgaagcaccccggcgcctggcac

SEQ ID NO: 639269 - DNA, 25 bp, Homo sapien
ctcgctgctgaagttggccccagga

SEQ ID NO: 639270 - DNA, 25 bp, Homo sapien
taggaaggttcaggcaaccggctgc

SEQ ID NO: 639271 - DNA, 25 bp, Homo sapien
tgcagcagacggagacaacctttct

SEQ ID NO: 639272 - DNA, 25 bp, Homo sapien
caggagcgcgatcttccgtggtctc

SEQ ID NO: 639273 - DNA, 25 bp, Homo sapien
ggcgtcaccctccagaggggcatca

SEQ ID NO: 639274 - DNA, 25 bp, Homo sapien
cttgttggcgtcaccctccagaggg

SEQ ID NO: 639275 - DNA, 25 bp, Homo sapien
ctggcttgttggcgtcaccctccag

SEQ ID NO: 639276 - DNA, 25 bp, Homo sapien
tggcttgttggcgtcaccctccaga

SEQ ID NO: 639277 - DNA, 25 bp, Homo sapien
ggaggacattctggacgggctccca

SEQ ID NO: 639278 - DNA, 25 bp, Homo sapien
caagagtctggcaatggagcatgaa

SEQ ID NO: 639279 - DNA, 25 bp, Homo sapien
ttctctttaacagcccgacacaggg

SEQ ID NO: 639280 - DNA, 25 bp, Homo sapien
gggcacgtcattccttcttggtaac

SEQ ID NO: 639281 - DNA, 25 bp, Homo sapien
gaataaggatgctgacaacatctgt

SEQ ID NO: 639282 - DNA, 25 bp, Homo sapien
tgccctccactcttgtaagggccag

SEQ ID NO: 639283 - DNA, 25 bp, Homo sapien
ccactcttgtaagggccagtaaggt

SEQ ID NO: 639284 - DNA, 25 bp, Homo sapien
aataaggatgctgacaacatctgtg

SEQ ID NO: 639285 - DNA, 25 bp, Homo sapien
tgagttgcgtccaccatgggcatgg

SEQ ID NO: 639286 - DNA, 25 bp, Homo sapien
tgagacaaaacatggcctgctggtg

SEQ ID NO: 639287 - DNA, 25 bp, Homo sapien
cacattcataggctggagtcatcac

SEQ ID NO: 639288 - DNA, 25 bp, Homo sapien
cacagagctgttttcgtagaggcgg

SEQ ID NO: 639289 - DNA, 25 bp, Homo sapien
aggttgaggtctcacatgtggctgc

SEQ ID NO: 639290 - DNA, 25 bp, Homo sapien
gaggtctcacatgtggctgcatcag

SEQ ID NO: 639291 - DNA, 25 bp, Homo sapien
aggtctcacatgtggctgcatcagg

SEQ ID NO: 639292 - DNA, 25 bp, Homo sapien
ttgaggtctcacatgtggctgcatc

SEQ ID NO: 639293 - DNA, 25 bp, Homo sapien
tggcctaccaggtgaatcagctgca

SEQ ID NO: 639294 - DNA, 25 bp, Homo sapien
gggagtcagaacatacgtgtcttgg

SEQ ID NO: 639295 - DNA, 25 bp, Homo sapien
tatctgcccgtgtgtgttgaatgga

SEQ ID NO: 639296 - DNA, 25 bp, Homo sapien
gaaagtctcccctagtcctctaagc

SEQ ID NO: 639297 - DNA, 25 bp, Homo sapien
gctctgcttacaaacacgcctcctt

SEQ ID NO: 639298 - DNA, 25 bp, Homo sapien
cgaattctcgcccatgctctgctta

SEQ ID NO: 639299 - DNA, 25 bp, Homo sapien
aaaagccatctccaccgaattctcg

SEQ ID NO: 639300 - DNA, 25 bp, Homo sapien
ctgaaaagccatctccaccgaattc

SEQ ID NO: 639301 - DNA, 25 bp, Homo sapien
agaagacgaggtgggctgccttacc

SEQ ID NO: 639302 - DNA, 25 bp, Homo sapien
gaccacaagagcgtgggaacctcat

SEQ ID NO: 639303 - DNA, 25 bp, Homo sapien
cccggagtggactcagagagcctct

SEQ ID NO: 639304 - DNA, 25 bp, Homo sapien
ctgtgaacttaataggaggtcctaa

SEQ ID NO: 639305 - DNA, 25 bp, Homo sapien
gctggaactgatgcaggcggtgcag

SEQ ID NO: 639306 - DNA, 25 bp, Homo sapien
agctgctggaactgatgcaggcggt

SEQ ID NO: 639307 - DNA, 25 bp, Homo sapien
ctgctggaactgatgcaggcggtgc

SEQ ID NO: 639308 - DNA, 25 bp, Homo sapien
tgctggaactgatgcaggcggtgca

SEQ ID NO: 639309 - DNA, 25 bp, Homo sapien
tttgctttatcgctgaagctctcca

SEQ ID NO: 639310 - DNA, 25 bp, Homo sapien
tttagagtcgacaggcaaatcatgc

SEQ ID NO: 639311 - DNA, 25 bp, Homo sapien
aacacagagcgggactcagagcagc

SEQ ID NO: 639312 - DNA, 25 bp, Homo sapien
tgccccgagcaatcagtttagagtc

SEQ ID NO: 639313 - DNA, 25 bp, Homo sapien
agctgggcttttgtgcagagtggcc

SEQ ID NO: 639314 - DNA, 25 bp, Homo sapien
aagccaggacatggatgtgtggctc

SEQ ID NO: 639315 - DNA, 25 bp, Homo sapien
caccagtcgactgccaaggtggaga

SEQ ID NO: 639316 - DNA, 25 bp, Homo sapien
tcaggctccacgaagaccatcatgg

SEQ ID NO: 639317 - DNA, 25 bp, Homo sapien
ggcagaacagatgtattccccttgg

SEQ ID NO: 639318 - DNA, 25 bp, Homo sapien
attgagcagataacatgacttttgt

SEQ ID NO: 639319 - DNA, 25 bp, Homo sapien
gcagataacatgacttttgtttgaa

SEQ ID NO: 639320 - DNA, 25 bp, Homo sapien
gataacatgacttttgtttgaagca

SEQ ID NO: 639321 - DNA, 25 bp, Homo sapien
acatgacttttgtttgaagcagtaa

SEQ ID NO: 639322 - DNA, 25 bp, Homo sapien
gagggcttatcgtgtgccagacaca

SEQ ID NO: 639323 - DNA, 25 bp, Homo sapien
ggagaccaagactgatgagggctta

SEQ ID NO: 639324 - DNA, 25 bp, Homo sapien
actgatgagggcttatcgtgtgcca

SEQ ID NO: 639325 - DNA, 25 bp, Homo sapien
gacacactcagcacgctttatttct

SEQ ID NO: 639326 - DNA, 25 bp, Homo sapien
gactcaatatccgtgaagccttcac

SEQ ID NO: 639327 - DNA, 25 bp, Homo sapien
tttacaaggtcacccaaccagacag

SEQ ID NO: 639328 - DNA, 25 bp, Homo sapien
caacttgcaggatgaggcgaatgat

SEQ ID NO: 639329 - DNA, 25 bp, Homo sapien
ggtgtgtgccttcatgccgtgctaa

SEQ ID NO: 639330 - DNA, 25 bp, Homo sapien
cacgtgggtgaaggcgagagtgggc

SEQ ID NO: 639331 - DNA, 25 bp, Homo sapien
gtgcagccgccggtcattccagaac

SEQ ID NO: 639332 - DNA, 25 bp, Homo sapien
gccaggcagtggtacatcccagctt

SEQ ID NO: 639333 - DNA, 25 bp, Homo sapien
cagcttgagcacgagccacgtgggt

SEQ ID NO: 639334 - DNA, 25 bp, Homo sapien
catcatgagatagggccagctcagc

SEQ ID NO: 639335 - DNA, 25 bp, Homo sapien
cacctgcagccgtagggcgtttcgg

SEQ ID NO: 639336 - DNA, 25 bp, Homo sapien
tgtcatcacctgcaggcacatcttg

SEQ ID NO: 639337 - DNA, 25 bp, Homo sapien
cgcccgatggtgctgattgagccca

SEQ ID NO: 639338 - DNA, 25 bp, Homo sapien
tagaagtgacaccttcccaggagtc

SEQ ID NO: 639339 - DNA, 25 bp, Homo sapien
tccaggcagggcttataggactgtc

SEQ ID NO: 639340 - DNA, 25 bp, Homo sapien
gggaccttgcttaggcaccctgtac

SEQ ID NO: 639341 - DNA, 25 bp, Homo sapien
tgaggcctctggaccaatggccact

SEQ ID NO: 639342 - DNA, 25 bp, Homo sapien
taccaagtatagagtgtgggtgcgt

SEQ ID NO: 639343 - DNA, 25 bp, Homo sapien
atgagcccgcgtggccaccaggaat

SEQ ID NO: 639344 - DNA, 25 bp, Homo sapien
aagagtaggcgcctgcatgagcccg

SEQ ID NO: 639345 - DNA, 25 bp, Homo sapien
caacgaccgttgtggtaccaagtat

SEQ ID NO: 639346 - DNA, 25 bp, Homo sapien
cacagtgcacagtaccagggccagc

SEQ ID NO: 639347 - DNA, 25 bp, Homo sapien
gccaagaggcgaccggcgtggctga

SEQ ID NO: 639348 - DNA, 25 bp, Homo sapien
cgcagctccagggacgtgttggcct

SEQ ID NO: 639349 - DNA, 25 bp, Homo sapien
tagaaaccctcatccctgggctgtg

SEQ ID NO: 639350 - DNA, 25 bp, Homo sapien
gtaggtcaggcgcaggttgcggggc

SEQ ID NO: 639351 - DNA, 25 bp, Homo sapien
gaggtaggtcaggcgcaggttgcgg

SEQ ID NO: 639352 - DNA, 25 bp, Homo sapien
aggtcaggcgcaggttgcggggcgc

SEQ ID NO: 639353 - DNA, 25 bp, Homo sapien
gtcaggcgcaggttgcggggcgcgt

SEQ ID NO: 639354 - DNA, 25 bp, Homo sapien
catgagaggcttacacggagtcaca

SEQ ID NO: 639355 - DNA, 25 bp, Homo sapien
ccatgccgtgatccctgtgggcttc

SEQ ID NO: 639356 - DNA, 25 bp, Homo sapien
tagctactgggtaccgagttcccca

SEQ ID NO: 639357 - DNA, 25 bp, Homo sapien
tttgcaggtggcattcaaactcagg

SEQ ID NO: 639358 - DNA, 25 bp, Homo sapien
ggtggcatccctgactgtgacgttg

SEQ ID NO: 639359 - DNA, 25 bp, Homo sapien
gctgcccatcctggtaccatgtgta

SEQ ID NO: 639360 - DNA, 25 bp, Homo sapien
agctgggccgggtgagtggtccaca

SEQ ID NO: 639361 - DNA, 25 bp, Homo sapien
cacaccgcagcggtaggaggtggca

SEQ ID NO: 639362 - DNA, 25 bp, Homo sapien
gtggaggccacaaggcgatccccgt

SEQ ID NO: 639363 - DNA, 25 bp, Homo sapien
cagggtagtgagtgtgacgtggcgt

SEQ ID NO: 639364 - DNA, 25 bp, Homo sapien
agcatagccccgtggatctccagac

SEQ ID NO: 639365 - DNA, 25 bp, Homo sapien
cctgggagagctgccttcgggtccc

SEQ ID NO: 639366 - DNA, 25 bp, Homo sapien
aagttatggctgcaaagcggagcgt

SEQ ID NO: 639367 - DNA, 25 bp, Homo sapien
ggcttggcaatgataggccccagct

SEQ ID NO: 639368 - DNA, 25 bp, Homo sapien
ccccagcttgtgtcaaagttatggc

SEQ ID NO: 639369 - DNA, 25 bp, Homo sapien
gataccaacgatatgaggtcccctc

SEQ ID NO: 639370 - DNA, 25 bp, Homo sapien
gtcagtcatatctcgcctaccaaag

SEQ ID NO: 639371 - DNA, 25 bp, Homo sapien
cttatgggcactggacttgtgtgac

SEQ ID NO: 639372 - DNA, 25 bp, Homo sapien
tgtgcctgcatgtgttagctcctga

SEQ ID NO: 639373 - DNA, 25 bp, Homo sapien
tatgttatcttgagcgctctcgcca

SEQ ID NO: 639374 - DNA, 25 bp, Homo sapien
tcagctttagcctggaaccgaccat

SEQ ID NO: 639375 - DNA, 25 bp, Homo sapien
tgcagatgaacagagccatgtggcc

SEQ ID NO: 639376 - DNA, 25 bp, Homo sapien
tggcccatgtctaggagggctgaca

SEQ ID NO: 639377 - DNA, 25 bp, Homo sapien
agttctcggacctctaacttcaggg

SEQ ID NO: 639378 - DNA, 25 bp, Homo sapien
tcaccacattacaactgccacacta

SEQ ID NO: 639379 - DNA, 25 bp, Homo sapien
ccacattacaactgccacactatgt

SEQ ID NO: 639380 - DNA, 25 bp, Homo sapien
ccagcctagctcaccacattacaac

SEQ ID NO: 639381 - DNA, 25 bp, Homo sapien
agcctagctcaccacattacaactg

SEQ ID NO: 639382 - DNA, 25 bp, Homo sapien
gtacactcaggagcacgggagtgga

SEQ ID NO: 639383 - DNA, 25 bp, Homo sapien
tcaggagcacgggagtggagagctg

SEQ ID NO: 639384 - DNA, 25 bp, Homo sapien
agagtacactcaggagcacgggagt

SEQ ID NO: 639385 - DNA, 25 bp, Homo sapien
cactcaggagcacgggagtggagag

SEQ ID NO: 639386 - DNA, 25 bp, Homo sapien
agcaccccatttcggaaccaggaga

SEQ ID NO: 639387 - DNA, 25 bp, Homo sapien
tctgtgccctcctgaagtgtgtgtg

SEQ ID NO: 639388 - DNA, 25 bp, Homo sapien
ctcagtcaggatgcggcaggcgtaa

SEQ ID NO: 639389 - DNA, 25 bp, Homo sapien
tcccggctcacgttgcaagtcaagt

SEQ ID NO: 639390 - DNA, 25 bp, Homo sapien
agagcaggcggcacagcttactgac

SEQ ID NO: 639391 - DNA, 25 bp, Homo sapien
ggagagcaggcggcacagcttactg

SEQ ID NO: 639392 - DNA, 25 bp, Homo sapien
agcaggcggcacagcttactgacca

SEQ ID NO: 639393 - DNA, 25 bp, Homo sapien
gcaggcggcacagcttactgaccac

SEQ ID NO: 639394 - DNA, 25 bp, Homo sapien
agaaaagcaagctagctcacagggc

SEQ ID NO: 639395 - DNA, 25 bp, Homo sapien
cactgctgcacagagtggttttgcc

SEQ ID NO: 639396 - DNA, 25 bp, Homo sapien
ctgtgttgcctatccccggcctgaa

SEQ ID NO: 639397 - DNA, 25 bp, Homo sapien
tttgcctgattagatcctcctcgga

SEQ ID NO: 639398 - DNA, 25 bp, Homo sapien
cagcggcatcaaggtccagcctggt

SEQ ID NO: 639399 - DNA, 25 bp, Homo sapien
cagcaaagggttgtgaatctccaca

SEQ ID NO: 639400 - DNA, 25 bp, Homo sapien
agggaagtggccacaacacggtcct

SEQ ID NO: 639401 - DNA, 25 bp, Homo sapien
ggtcgctgtccacacggcacaaaag

SEQ ID NO: 639402 - DNA, 25 bp, Homo sapien
gaactcaagctaggctcatgctcct

SEQ ID NO: 639403 - DNA, 25 bp, Homo sapien
gaagaacatgggcactcatcccacg

SEQ ID NO: 639404 - DNA, 25 bp, Homo sapien
cctggctaggctcccagaatacact

SEQ ID NO: 639405 - DNA, 25 bp, Homo sapien
aagccagctcctgtgatactagcga

SEQ ID NO: 639406 - DNA, 25 bp, Homo sapien
ttcaggtaccaggagaagcgggcat

SEQ ID NO: 639407 - DNA, 25 bp, Homo sapien
gggaccctcgtgaagcagggctcca

SEQ ID NO: 639408 - DNA, 25 bp, Homo sapien
accacctcggctgccgggctgatga

SEQ ID NO: 639409 - DNA, 25 bp, Homo sapien
gtatgagccggcgtcagtgctggag

SEQ ID NO: 639410 - DNA, 25 bp, Homo sapien
ttgcatttccaagggagttggtggc

SEQ ID NO: 639411 - DNA, 25 bp, Homo sapien
ggctgagcacttgtactccccactg

SEQ ID NO: 639412 - DNA, 25 bp, Homo sapien
ggaccagaggtaccactgaagcgtg

SEQ ID NO: 639413 - DNA, 25 bp, Homo sapien
agcagtgaaggatgcccacaagtcc

SEQ ID NO: 639414 - DNA, 25 bp, Homo sapien
tgtgttgcagactagtgtcactgtc

SEQ ID NO: 639415 - DNA, 25 bp, Homo sapien
tatcagccctagtggccaagtgcag

SEQ ID NO: 639416 - DNA, 25 bp, Homo sapien
tcgctgccatggacgttctgcacct

SEQ ID NO: 639417 - DNA, 25 bp, Homo sapien
ctgtagcggagatcactgggtgcct

SEQ ID NO: 639418 - DNA, 25 bp, Homo sapien
tctgcacatcctacaccacccgcct

SEQ ID NO: 639419 - DNA, 25 bp, Homo sapien
tttgtcctgctcaccaggatccccc

SEQ ID NO: 639420 - DNA, 25 bp, Homo sapien
ctgcacatcctacaccacccgcctg

SEQ ID NO: 639421 - DNA, 25 bp, Homo sapien
cacatcctacaccacccgcctgctg

SEQ ID NO: 639422 - DNA, 25 bp, Homo sapien
ggttatgccagttgctggccctgcc

SEQ ID NO: 639423 - DNA, 25 bp, Homo sapien
ctggccctgccctgccctgtctccc

SEQ ID NO: 639424 - DNA, 25 bp, Homo sapien
gttatgccagttgctggccctgccc

SEQ ID NO: 639425 - DNA, 25 bp, Homo sapien
gccctgccctgccctgtctcccctc

SEQ ID NO: 639426 - DNA, 25 bp, Homo sapien
tgatggggggtgagaccaaagagcc

SEQ ID NO: 639427 - DNA, 25 bp, Homo sapien
aggtgtagacgccagcatcgctcca

SEQ ID NO: 639428 - DNA, 25 bp, Homo sapien
tagacgccagcatcgctccaggctg

SEQ ID NO: 639429 - DNA, 25 bp, Homo sapien
gtgtagacgccagcatcgctccagg

SEQ ID NO: 639430 - DNA, 25 bp, Homo sapien
tgcagcacaccagtcttggtttgga

SEQ ID NO: 639431 - DNA, 25 bp, Homo sapien
gtgcagcacaccagtcttggtttgg

SEQ ID NO: 639432 - DNA, 25 bp, Homo sapien
catccttgagccacttaatggaact

SEQ ID NO: 639433 - DNA, 25 bp, Homo sapien
tccttgagccacttaatggaactga

SEQ ID NO: 639434 - DNA, 25 bp, Homo sapien
cttgagccacttaatggaactgact

SEQ ID NO: 639435 - DNA, 25 bp, Homo sapien
ccatccttgagccacttaatggaac

SEQ ID NO: 639436 - DNA, 25 bp, Homo sapien
tggcaggtgagtgtgaccagctcac

SEQ ID NO: 639437 - DNA, 25 bp, Homo sapien
ctggcaggtgagtgtgaccagctca

SEQ ID NO: 639438 - DNA, 25 bp, Homo sapien
aaggatgttcctccccgaggggctg

SEQ ID NO: 639439 - DNA, 25 bp, Homo sapien
gggctgaggaggatcttcacaccct

SEQ ID NO: 639440 - DNA, 25 bp, Homo sapien
tgaggaggatcttcacacccttggg

SEQ ID NO: 639441 - DNA, 25 bp, Homo sapien
ctggaaggatgttcctccccgaggg

SEQ ID NO: 639442 - DNA, 25 bp, Homo sapien
caaacttctggctgttgaaggtgac

SEQ ID NO: 639443 - DNA, 25 bp, Homo sapien
ggaggtgaatctcgctctgagccct

SEQ ID NO: 639444 - DNA, 25 bp, Homo sapien
gctcctgcaggcatacgtagggagt

SEQ ID NO: 639445 - DNA, 25 bp, Homo sapien
agtccacctctgtgccctcgagaag

SEQ ID NO: 639446 - DNA, 25 bp, Homo sapien
tggcccgagtagtcgtagtaccaga

SEQ ID NO: 639447 - DNA, 25 bp, Homo sapien
gaagttgtaggaaccagagtcctcg

SEQ ID NO: 639448 - DNA, 25 bp, Homo sapien
taccagatggccgtgatgccgtcgg

SEQ ID NO: 639449 - DNA, 25 bp, Homo sapien
cactgatctcgaagcggaagttgta

SEQ ID NO: 639450 - DNA, 25 bp, Homo sapien
cctgccccgagaaatgcacacttag

SEQ ID NO: 639451 - DNA, 25 bp, Homo sapien
cccgagaaatgcacacttagagcag

SEQ ID NO: 639452 - DNA, 25 bp, Homo sapien
tgccctgccccgagaaatgcacact

SEQ ID NO: 639453 - DNA, 25 bp, Homo sapien
tgccccgagaaatgcacacttagag

SEQ ID NO: 639454 - DNA, 25 bp, Homo sapien
aggagaagcttgggcaagaagccca

SEQ ID NO: 639455 - DNA, 25 bp, Homo sapien
gggtggtgcgcactgcgctggctgg

SEQ ID NO: 639456 - DNA, 25 bp, Homo sapien
gctgctcctgttgcctaagagggtg

SEQ ID NO: 639457 - DNA, 25 bp, Homo sapien
gagggtggtgcgcactgcgctggct

SEQ ID NO: 639458 - DNA, 25 bp, Homo sapien
ctcctgttgcctaagagggtggtgc

SEQ ID NO: 639459 - DNA, 25 bp, Homo sapien
gggcagggctcttaaagacctctga

SEQ ID NO: 639460 - DNA, 25 bp, Homo sapien
acttggtggcctgcctcagaaaagc

SEQ ID NO: 639461 - DNA, 25 bp, Homo sapien
gccaacccaataagagggcagggct

SEQ ID NO: 639462 - DNA, 25 bp, Homo sapien
ggctgtgcccaggaatgccctcact

SEQ ID NO: 639463 - DNA, 25 bp, Homo sapien
ttgcccgtgagatgtgaaaagtcct

SEQ ID NO: 639464 - DNA, 25 bp, Homo sapien
cctcaaggataccaccctaaggcag

SEQ ID NO: 639465 - DNA, 25 bp, Homo sapien
gaacttgccgaagtgctgcctttaa

SEQ ID NO: 639466 - DNA, 25 bp, Homo sapien
caagacacccagctagaatgatggt

SEQ ID NO: 639467 - DNA, 25 bp, Homo sapien
tatggccagggcagctatcttgtcc

SEQ ID NO: 639468 - DNA, 25 bp, Homo sapien
agggcagctatcttgtcccagctcc

SEQ ID NO: 639469 - DNA, 25 bp, Homo sapien
cacaggggatgtcagggtcagctct

SEQ ID NO: 639470 - DNA, 25 bp, Homo sapien
cactgggggtcagatgtgtccctgg

SEQ ID NO: 639471 - DNA, 25 bp, Homo sapien
ctaggcccgggtgtaggattcagtt

SEQ ID NO: 639472 - DNA, 25 bp, Homo sapien
ctctgggcccagggaccagggacag

SEQ ID NO: 639473 - DNA, 25 bp, Homo sapien
cctctgggcccagggaccagggaca

SEQ ID NO: 639474 - DNA, 25 bp, Homo sapien
ctgggcccagggaccagggacaggg

SEQ ID NO: 639475 - DNA, 25 bp, Homo sapien
tctgggcccagggaccagggacagg

SEQ ID NO: 639476 - DNA, 25 bp, Homo sapien
agaaggaagtggctgcggcggtgct

SEQ ID NO: 639477 - DNA, 25 bp, Homo sapien
agtagagaccgggttacaacatggt

SEQ ID NO: 639478 - DNA, 25 bp, Homo sapien
gagaccgggttacaacatggtttca

SEQ ID NO: 639479 - DNA, 25 bp, Homo sapien
gcggcgcaggcggcgcggccatccg

SEQ ID NO: 639480 - DNA, 25 bp, Homo sapien
ggcgcaggcggcgcggccatccggc

SEQ ID NO: 639481 - DNA, 25 bp, Homo sapien
agcgcgggccgacccggcggcgcag

SEQ ID NO: 639482 - DNA, 25 bp, Homo sapien
atctgggccgggagcgcgggccgac

SEQ ID NO: 639483 - DNA, 25 bp, Homo sapien
acccggtgcctaggtctgaggtgga

SEQ ID NO: 639484 - DNA, 25 bp, Homo sapien
tctggtggggacagatctgcaagcc

SEQ ID NO: 639485 - DNA, 25 bp, Homo sapien
gcacttggggcagcgaccttggtct

SEQ ID NO: 639486 - DNA, 25 bp, Homo sapien
cgccccgagtggagaaaggcgagga

SEQ ID NO: 639487 - DNA, 25 bp, Homo sapien
tagcccgctgacggagtcctgttcc

SEQ ID NO: 639488 - DNA, 25 bp, Homo sapien
agcccgctgacggagtcctgttcca

SEQ ID NO: 639489 - DNA, 25 bp, Homo sapien
ttagcccgctgacggagtcctgttc

SEQ ID NO: 639490 - DNA, 25 bp, Homo sapien
gcccgctgacggagtcctgttccat

SEQ ID NO: 639491 - DNA, 25 bp, Homo sapien
tgctatatgcatgcccacaaccagc

SEQ ID NO: 639492 - DNA, 25 bp, Homo sapien
ggaagagatagaaagaatcagctcg

SEQ ID NO: 639493 - DNA, 25 bp, Homo sapien
tcccagccatgactgatttgaagct

SEQ ID NO: 639494 - DNA, 25 bp, Homo sapien
agctcgcatgagctggtgggaccca

SEQ ID NO: 639495 - DNA, 25 bp, Homo sapien
ggactcccgtgagctctcaaagaaa

SEQ ID NO: 639496 - DNA, 25 bp, Homo sapien
tgctgttcctagtgggcggcttcgc

SEQ ID NO: 639497 - DNA, 25 bp, Homo sapien
ctcaaatggctactttctagtcgcc

SEQ ID NO: 639498 - DNA, 25 bp, Homo sapien
tctagtcgccaggtaggtacaggct

SEQ ID NO: 639499 - DNA, 25 bp, Homo sapien
caacctgtactgctgcgcggcagag

SEQ ID NO: 639500 - DNA, 25 bp, Homo sapien
cgaaaagctgctggttcgcgacggc

SEQ ID NO: 639501 - DNA, 25 bp, Homo sapien
cagtttggcgacaccgaaattaagg

SEQ ID NO: 639502 - DNA, 25 bp, Homo sapien
ggtgcaccgacgtcttcgagcgctt

SEQ ID NO: 639503 - DNA, 25 bp, Homo sapien
gcatgtgaccccgaaggaagaacgc

SEQ ID NO: 639504 - DNA, 25 bp, Homo sapien
cgccaaggactgaacgggtaagaga

SEQ ID NO: 639505 - DNA, 25 bp, Homo sapien
gagtcctggtctgaacttggccgag

SEQ ID NO: 639506 - DNA, 25 bp, Homo sapien
gtgctgaccacccaaatatgactgt

SEQ ID NO: 639507 - DNA, 25 bp, Homo sapien
gttctatcccaaccagtcgcttaaa

SEQ ID NO: 639508 - DNA, 25 bp, Homo sapien
gggttctatcccaaccagtcgctta

SEQ ID NO: 639509 - DNA, 25 bp, Homo sapien
ttagggttctatcccaaccagtcgc

SEQ ID NO: 639510 - DNA, 25 bp, Homo sapien
aaaccaagtaacacagacctgaggg

SEQ ID NO: 639511 - DNA, 25 bp, Homo sapien
catttcttccggcaggagactgagg

SEQ ID NO: 639512 - DNA, 25 bp, Homo sapien
gctgaagcaaggcagcagtaatggg

SEQ ID NO: 639513 - DNA, 25 bp, Homo sapien
catcacgcagcatgtcggggggaca

SEQ ID NO: 639514 - DNA, 25 bp, Homo sapien
ggtgagaggcgtgggcaaggccact

SEQ ID NO: 639515 - DNA, 25 bp, Homo sapien
tcggcgcccacacacttgacaccat

SEQ ID NO: 639516 - DNA, 25 bp, Homo sapien
catccagcagcatgggcgtgccgtg

SEQ ID NO: 639517 - DNA, 25 bp, Homo sapien
cccacacacttgacaccatccagca

SEQ ID NO: 639518 - DNA, 25 bp, Homo sapien
ctctgagtcgtattccagctcggcg

SEQ ID NO: 639519 - DNA, 25 bp, Homo sapien
aaggcagggtgcaagtcagtgccat

SEQ ID NO: 639520 - DNA, 25 bp, Homo sapien
gcagggtgcaagtcagtgccatgct

SEQ ID NO: 639521 - DNA, 25 bp, Homo sapien
gcaaggcagggtgcaagtcagtgcc

SEQ ID NO: 639522 - DNA, 25 bp, Homo sapien
ggcagggtgcaagtcagtgccatgc

SEQ ID NO: 639523 - DNA, 25 bp, Homo sapien
ctcagggatcagctggaggtaggga

SEQ ID NO: 639524 - DNA, 25 bp, Homo sapien
ttccctcagggatcagctggaggta

SEQ ID NO: 639525 - DNA, 25 bp, Homo sapien
ccttccctcagggatcagctggagg

SEQ ID NO: 639526 - DNA, 25 bp, Homo sapien
ccccttccctcagggatcagctgga

SEQ ID NO: 639527 - DNA, 25 bp, Homo sapien
ggcaaggatcccttgttcagccttg

SEQ ID NO: 639528 - DNA, 25 bp, Homo sapien
gccgggcaaggatcccttgttcagc

SEQ ID NO: 639529 - DNA, 25 bp, Homo sapien
ctgagccgggcaaggatcccttgtt

SEQ ID NO: 639530 - DNA, 25 bp, Homo sapien
gatcccttgttcagccttggttccc

SEQ ID NO: 639531 - DNA, 25 bp, Homo sapien
cgcagtcgagcttgtgcatccctcc

SEQ ID NO: 639532 - DNA, 25 bp, Homo sapien
cctcgcagtcgagcttgtgcatccc

SEQ ID NO: 639533 - DNA, 25 bp, Homo sapien
ctcgcagtcgagcttgtgcatccct

SEQ ID NO: 639534 - DNA, 25 bp, Homo sapien
tcgcagtcgagcttgtgcatccctc

SEQ ID NO: 639535 - DNA, 25 bp, Homo sapien
atgacgcgggcctgcaccgtcacgc

SEQ ID NO: 639536 - DNA, 25 bp, Homo sapien
caccttcgcaggctagcagtatctc

SEQ ID NO: 639537 - DNA, 25 bp, Homo sapien
tcctctttgaggacgccctctttgt

SEQ ID NO: 639538 - DNA, 25 bp, Homo sapien
cgtcacgcgcacacaggtgccagtg

SEQ ID NO: 639539 - DNA, 25 bp, Homo sapien
tagttggaagtaagggagcacccca

SEQ ID NO: 639540 - DNA, 25 bp, Homo sapien
gagctcatggacttctgttcaggac

SEQ ID NO: 639541 - DNA, 25 bp, Homo sapien
aagtagggtccaattcaggcttcca

SEQ ID NO: 639542 - DNA, 25 bp, Homo sapien
ccacacggtgtgtgtagctccagca

SEQ ID NO: 639543 - DNA, 25 bp, Homo sapien
gctggggacaggtgcctcgcggaca

SEQ ID NO: 639544 - DNA, 25 bp, Homo sapien
cagggacgggcaccacgctgaggag

SEQ ID NO: 639545 - DNA, 25 bp, Homo sapien
tgcctcgcggacatccttgctcagc

SEQ ID NO: 639546 - DNA, 25 bp, Homo sapien
cttcagggacgggcaccacgctgag

SEQ ID NO: 639547 - DNA, 25 bp, Homo sapien
ccgcaaagcggatactccggactct

SEQ ID NO: 639548 - DNA, 25 bp, Homo sapien
gccgcaaagcggatactccggactc

SEQ ID NO: 639549 - DNA, 25 bp, Homo sapien
tgccgcaaagcggatactccggact

SEQ ID NO: 639550 - DNA, 25 bp, Homo sapien
aaaatccatcccctgagagtgagcg

SEQ ID NO: 639551 - DNA, 25 bp, Homo sapien
gactcagggactggctaatatgacc

SEQ ID NO: 639552 - DNA, 25 bp, Homo sapien
cactaggatcatgaggcttgaggcc

SEQ ID NO: 639553 - DNA, 25 bp, Homo sapien
ttttcagggctagatggacactagg

SEQ ID NO: 639554 - DNA, 25 bp, Homo sapien
tgtcagtgcatgaggcccctgcctg

SEQ ID NO: 639555 - DNA, 25 bp, Homo sapien
ccaaacctgaaagggcagggacagg

SEQ ID NO: 639556 - DNA, 25 bp, Homo sapien
cccatcctcatgacccaaacctgaa

SEQ ID NO: 639557 - DNA, 25 bp, Homo sapien
aagctgtgtcagtgcatgaggcccc

SEQ ID NO: 639558 - DNA, 25 bp, Homo sapien
tggcacatccacaatccctggtgag

SEQ ID NO: 639559 - DNA, 25 bp, Homo sapien
aatgctcaggctgtagaggccgaga

SEQ ID NO: 639560 - DNA, 25 bp, Homo sapien
gagccggcctcttggatactcggag

SEQ ID NO: 639561 - DNA, 25 bp, Homo sapien
tggactctgaaagaaacccaaactc

SEQ ID NO: 639562 - DNA, 25 bp, Homo sapien
aagagcttgtgcaagtcctaccacg

SEQ ID NO: 639563 - DNA, 25 bp, Homo sapien
tgcagcaatggccctcctaccaggg

SEQ ID NO: 639564 - DNA, 25 bp, Homo sapien
tcctaccacgccaggaaggcactta

SEQ ID NO: 639565 - DNA, 25 bp, Homo sapien
agggcccaccggaagagcttgtgca

SEQ ID NO: 639566 - DNA, 25 bp, Homo sapien
gccagacaccgccactcacgctcag

SEQ ID NO: 639567 - DNA, 25 bp, Homo sapien
tcctgccagacaccgccactcacgc

SEQ ID NO: 639568 - DNA, 25 bp, Homo sapien
agctcctgccagacaccgccactca

SEQ ID NO: 639569 - DNA, 25 bp, Homo sapien
tgccagacaccgccactcacgctca

SEQ ID NO: 639570 - DNA, 25 bp, Homo sapien
gctttgagagggacatgccccatgc

SEQ ID NO: 639571 - DNA, 25 bp, Homo sapien
ctttccagtgccaagattcaagaag

SEQ ID NO: 639572 - DNA, 25 bp, Homo sapien
gcttactaatggaaacacgggtcca

SEQ ID NO: 639573 - DNA, 25 bp, Homo sapien
caagaagaaaggcaagcggagactt

SEQ ID NO: 639574 - DNA, 25 bp, Homo sapien
ctccttcataccaccgggagggagg

SEQ ID NO: 639575 - DNA, 25 bp, Homo sapien
gctgcaccagctaacggtcactgcg

SEQ ID NO: 639576 - DNA, 25 bp, Homo sapien
tccaaggtcatgcagcgaggcagcg

SEQ ID NO: 639577 - DNA, 25 bp, Homo sapien
acatcactctagttcaggtgctggg

SEQ ID NO: 639578 - DNA, 25 bp, Homo sapien
cggacaatcgcttcgcggaaaacac

SEQ ID NO: 639579 - DNA, 25 bp, Homo sapien
gggcagggacgaccactgcagcggc

SEQ ID NO: 639580 - DNA, 25 bp, Homo sapien
ctcaacgccgagcacgaggaaggga

SEQ ID NO: 639581 - DNA, 25 bp, Homo sapien
agctcaacgccgagcacgaggaagg

SEQ ID NO: 639582 - DNA, 25 bp, Homo sapien
tgcaggagctcaacgccgagcacga

SEQ ID NO: 639583 - DNA, 25 bp, Homo sapien
ggagctcaacgccgagcacgaggaa

SEQ ID NO: 639584 - DNA, 25 bp, Homo sapien
tgaaccttgcttaggacgcacctcc

SEQ ID NO: 639585 - DNA, 25 bp, Homo sapien
gggatagcgcctctagccttgaacc

SEQ ID NO: 639586 - DNA, 25 bp, Homo sapien
aatgagcgggctccaaagaacggcc

SEQ ID NO: 639587 - DNA, 25 bp, Homo sapien
cagaaccgaccactcgaagagggag

SEQ ID NO: 639588 - DNA, 25 bp, Homo sapien
gggcacatcgtcgatgtcctcccta

SEQ ID NO: 639589 - DNA, 25 bp, Homo sapien
gtctccgtcgccgaggtgggtccca

SEQ ID NO: 639590 - DNA, 25 bp, Homo sapien
cctcagtaccccgtgcgcgaggagg

SEQ ID NO: 639591 - DNA, 25 bp, Homo sapien
gggcgactgctacgggcacatcgtc

SEQ ID NO: 639592 - DNA, 25 bp, Homo sapien
tctgggctctggaaagcggtccatt

SEQ ID NO: 639593 - DNA, 25 bp, Homo sapien
cccatcccaaggaaggagggcactc

SEQ ID NO: 639594 - DNA, 25 bp, Homo sapien
gggcctgcgctcctagagttcctgt

SEQ ID NO: 639595 - DNA, 25 bp, Homo sapien
caatggtctatccatcggtgggtgg

SEQ ID NO: 639596 - DNA, 25 bp, Homo sapien
gaggtcttcgatccgcacattcttg

SEQ ID NO: 639597 - DNA, 25 bp, Homo sapien
agaggtcttcgatccgcacattctt

SEQ ID NO: 639598 - DNA, 25 bp, Homo sapien
ccaggcgccttaccttcatctgcag

SEQ ID NO: 639599 - DNA, 25 bp, Homo sapien
gcaggtgctccaggcgccttacctt

SEQ ID NO: 639600 - DNA, 25 bp, Homo sapien
ggtctcttgagaggccaacagctcc

SEQ ID NO: 639601 - DNA, 25 bp, Homo sapien
cacggtctcttgagaggccaacagc

SEQ ID NO: 639602 - DNA, 25 bp, Homo sapien
ctcttgagaggccaacagctcctgc

SEQ ID NO: 639603 - DNA, 25 bp, Homo sapien
ctgcacggtctcttgagaggccaac

SEQ ID NO: 639604 - DNA, 25 bp, Homo sapien
tcgccctgcaacgcccggttatacg

SEQ ID NO: 639605 - DNA, 25 bp, Homo sapien
gtcgccctgcaacgcccggttatac

SEQ ID NO: 639606 - DNA, 25 bp, Homo sapien
ggtcgccctgcaacgcccggttata

SEQ ID NO: 639607 - DNA, 25 bp, Homo sapien
gaggccgaggcgccggcggccggtc

SEQ ID NO: 639608 - DNA, 25 bp, Homo sapien
ccgaggcgccggcggccggtcccag

SEQ ID NO: 639609 - DNA, 25 bp, Homo sapien
ctggaggccgaggcgccggcggccg

SEQ ID NO: 639610 - DNA, 25 bp, Homo sapien
gccgaggcgccggcggccggtccca

SEQ ID NO: 639611 - DNA, 25 bp, Homo sapien
aggcttggacctcgggccctacact

SEQ ID NO: 639612 - DNA, 25 bp, Homo sapien
cagggccctcgaccaggccttccct

SEQ ID NO: 639613 - DNA, 25 bp, Homo sapien
gtctcaggctcagcgtaccgtgccc

SEQ ID NO: 639614 - DNA, 25 bp, Homo sapien
ccctttcctgcctcccgtctcaggc

SEQ ID NO: 639615 - DNA, 25 bp, Homo sapien
tcacctcgggccttctgggatacac

SEQ ID NO: 639616 - DNA, 25 bp, Homo sapien
ggacaccttcacctcgggccttctg

SEQ ID NO: 639617 - DNA, 25 bp, Homo sapien
accttcacctcgggccttctgggat

SEQ ID NO: 639618 - DNA, 25 bp, Homo sapien
cttcacctcgggccttctgggatac

SEQ ID NO: 639619 - DNA, 25 bp, Homo sapien
caaggcaagtggaggaatgactgtg

SEQ ID NO: 639620 - DNA, 25 bp, Homo sapien
aaggcaagtggaggaatgactgtgc

SEQ ID NO: 639621 - DNA, 25 bp, Homo sapien
aggcaagtggaggaatgactgtgct

SEQ ID NO: 639622 - DNA, 25 bp, Homo sapien
gacagaaggaaagctccaaccggga

SEQ ID NO: 639623 - DNA, 25 bp, Homo sapien
cagaaggaaagctccaaccgggagg

SEQ ID NO: 639624 - DNA, 25 bp, Homo sapien
agctccaaccgggagggagaaatgg

SEQ ID NO: 639625 - DNA, 25 bp, Homo sapien
tcacaagtgacaggaagaaggacag

SEQ ID NO: 639626 - DNA, 25 bp, Homo sapien
cacatccatgtagccactgccatcc

SEQ ID NO: 639627 - DNA, 25 bp, Homo sapien
catccatgtagccactgccatcctg

SEQ ID NO: 639628 - DNA, 25 bp, Homo sapien
ccacatccatgtagccactgccatc

SEQ ID NO: 639629 - DNA, 25 bp, Homo sapien
tccatgtagccactgccatcctggg

SEQ ID NO: 639630 - DNA, 25 bp, Homo sapien
ggcgcactgcgcgatcttgcgcatc

SEQ ID NO: 639631 - DNA, 25 bp, Homo sapien
ttgcgcatcacgtcatccggtactg

SEQ ID NO: 639632 - DNA, 25 bp, Homo sapien
gcgatcttgcgcatcacgtcatccg

SEQ ID NO: 639633 - DNA, 25 bp, Homo sapien
cgtcatccggtactgaaaagttcag

SEQ ID NO: 639634 - DNA, 25 bp, Homo sapien
agttggcggggacataattgtgcat

SEQ ID NO: 639635 - DNA, 25 bp, Homo sapien
ggggacataattgtgcatctccacc

SEQ ID NO: 639636 - DNA, 25 bp, Homo sapien
tggcggggacataattgtgcatctc

SEQ ID NO: 639637 - DNA, 25 bp, Homo sapien
tggggaagtaaaacttgatgacctc

SEQ ID NO: 639638 - DNA, 25 bp, Homo sapien
ggatgttgtctacccacaggtacag

SEQ ID NO: 639639 - DNA, 25 bp, Homo sapien
atgttgtctacccacaggtacagct

SEQ ID NO: 639640 - DNA, 25 bp, Homo sapien
gagggatgttgtctacccacaggta

SEQ ID NO: 639641 - DNA, 25 bp, Homo sapien
ccacaggtacagctggtgcagcgcc

SEQ ID NO: 639642 - DNA, 25 bp, Homo sapien
tcacgacccttcaggcgcttccttt

SEQ ID NO: 639643 - DNA, 25 bp, Homo sapien
gcttcctttctcgccactgcagaag

SEQ ID NO: 639644 - DNA, 25 bp, Homo sapien
actgcctctgcctgcctaatccaga

SEQ ID NO: 639645 - DNA, 25 bp, Homo sapien
aatccagagactcacgtcccagctg

SEQ ID NO: 639646 - DNA, 25 bp, Homo sapien
gacaaatggaagtaattcgtcttgt

SEQ ID NO: 639647 - DNA, 25 bp, Homo sapien
tggaagtaattcgtcttgttggaac

SEQ ID NO: 639648 - DNA, 25 bp, Homo sapien
agaactgttctttttcgcaggagac

SEQ ID NO: 639649 - DNA, 25 bp, Homo sapien
tctttttcgcaggagacaaatggaa

SEQ ID NO: 639650 - DNA, 25 bp, Homo sapien
ttgttgtcacttcaaagccctcaag

SEQ ID NO: 639651 - DNA, 25 bp, Homo sapien
gggcaagcaggcaatgctcctcctg

SEQ ID NO: 639652 - DNA, 25 bp, Homo sapien
aactccagggctcggatttcgggag

SEQ ID NO: 639653 - DNA, 25 bp, Homo sapien
aagcaggcaatgctcctcctgctca

SEQ ID NO: 639654 - DNA, 25 bp, Homo sapien
catgaaggatgcacccttggctgtt

SEQ ID NO: 639655 - DNA, 25 bp, Homo sapien
aaggggagtggacagatttattgaa

SEQ ID NO: 639656 - DNA, 25 bp, Homo sapien
atgaaggatgcacccttggctgtta

SEQ ID NO: 639657 - DNA, 25 bp, Homo sapien
cccacaaaaggggagtggacagatt

SEQ ID NO: 639658 - DNA, 25 bp, Homo sapien
ctgcccacaaggaagcgcccttggt

SEQ ID NO: 639659 - DNA, 25 bp, Homo sapien
agctgcccacaaggaagcgcccttg

SEQ ID NO: 639660 - DNA, 25 bp, Homo sapien
agcgcccttggttacttccacggtg

SEQ ID NO: 639661 - DNA, 25 bp, Homo sapien
gcccacaaggaagcgcccttggtta

SEQ ID NO: 639662 - DNA, 25 bp, Homo sapien
agaaaaccaagggccaaagtcacat

SEQ ID NO: 639663 - DNA, 25 bp, Homo sapien
aaaccaagggccaaagtcacatgga

SEQ ID NO: 639664 - DNA, 25 bp, Homo sapien
caaagtcacatggacagggccagag

SEQ ID NO: 639665 - DNA, 25 bp, Homo sapien
aaagtcacatggacagggccagaga

SEQ ID NO: 639666 - DNA, 25 bp, Homo sapien
cccgcagtgagttaaactgtgcttc

SEQ ID NO: 639667 - DNA, 25 bp, Homo sapien
agtgagttaaactgtgcttctcaag

SEQ ID NO: 639668 - DNA, 25 bp, Homo sapien
gagcccgcagtgagttaaactgtgc

SEQ ID NO: 639669 - DNA, 25 bp, Homo sapien
aggagcccgcagtgagttaaactgt

SEQ ID NO: 639670 - DNA, 25 bp, Homo sapien
gggagaggcactctccggccgggaa

SEQ ID NO: 639671 - DNA, 25 bp, Homo sapien
gagcccttcccagaatggctttggg

SEQ ID NO: 639672 - DNA, 25 bp, Homo sapien
gctgtggttagtccactgagggcac

SEQ ID NO: 639673 - DNA, 25 bp, Homo sapien
gcacggtgtggtagcaccggacagc

SEQ ID NO: 639674 - DNA, 25 bp, Homo sapien
ctcagccccgggcccggccgaggtg

SEQ ID NO: 639675 - DNA, 25 bp, Homo sapien
tcagccccgggcccggccgaggtga

SEQ ID NO: 639676 - DNA, 25 bp, Homo sapien
agcgggtgcccagagagtcctctgc

SEQ ID NO: 639677 - DNA, 25 bp, Homo sapien
ctgttgcaggaccaggggaagcatt

SEQ ID NO: 639678 - DNA, 25 bp, Homo sapien
aggatctggggctctgcactctggc

SEQ ID NO: 639679 - DNA, 25 bp, Homo sapien
gggaagcattactaaaggatctggg

SEQ ID NO: 639680 - DNA, 25 bp, Homo sapien
tgatgtccaagacctcgaactcccg

SEQ ID NO: 639681 - DNA, 25 bp, Homo sapien
accagatcgtgttccaagtggagga

SEQ ID NO: 639682 - DNA, 25 bp, Homo sapien
tgcctggcgtggttcttcctggtca

SEQ ID NO: 639683 - DNA, 25 bp, Homo sapien
gatgtggctctgcacgcggtcatca

SEQ ID NO: 639684 - DNA, 25 bp, Homo sapien
tcactgtctgaatcagagtcctccc

SEQ ID NO: 639685 - DNA, 25 bp, Homo sapien
ctgtctgaatcagagtcctccccac

SEQ ID NO: 639686 - DNA, 25 bp, Homo sapien
ctgggtacaggcacctcatcaccat

SEQ ID NO: 639687 - DNA, 25 bp, Homo sapien
cttcctcactgtctgaatcagagtc

SEQ ID NO: 639688 - DNA, 25 bp, Homo sapien
atgcagagtagggcactgggcttcc

SEQ ID NO: 639689 - DNA, 25 bp, Homo sapien
ctgccaccggcctccactactccct

SEQ ID NO: 639690 - DNA, 25 bp, Homo sapien
gctgccaccggcctccactactccc

SEQ ID NO: 639691 - DNA, 25 bp, Homo sapien
aagctgccaccggcctccactactc

SEQ ID NO: 639692 - DNA, 25 bp, Homo sapien
agctgccaccggcctccactactcc

SEQ ID NO: 639693 - DNA, 25 bp, Homo sapien
ttcatcactatcaacatcaccctcc

SEQ ID NO: 639694 - DNA, 25 bp, Homo sapien
cttcatcactatcaacatcaccctc

SEQ ID NO: 639695 - DNA, 25 bp, Homo sapien
tggtggcattagggccacccccaaa

SEQ ID NO: 639696 - DNA, 25 bp, Homo sapien
gatggtggcattagggccaccccca

SEQ ID NO: 639697 - DNA, 25 bp, Homo sapien
ggtgatggtggcattagggccaccc

SEQ ID NO: 639698 - DNA, 25 bp, Homo sapien
gtgatggtggcattagggccacccc

SEQ ID NO: 639699 - DNA, 25 bp, Homo sapien
gcggctatgtccgaaggctccactg

SEQ ID NO: 639700 - DNA, 25 bp, Homo sapien
gctatgtccgaaggctccactgcct

SEQ ID NO: 639701 - DNA, 25 bp, Homo sapien
cctctagcgcggccatggccttgag

SEQ ID NO: 639702 - DNA, 25 bp, Homo sapien
aaagcaggcggctatgtccgaaggc

SEQ ID NO: 639703 - DNA, 25 bp, Homo sapien
taccatagactggtctcggtggcgc

SEQ ID NO: 639704 - DNA, 25 bp, Homo sapien
gcattggcgcatagcaggacgctca

SEQ ID NO: 639705 - DNA, 25 bp, Homo sapien
cattcgggtgtccaaggccttcaag

SEQ ID NO: 639706 - DNA, 25 bp, Homo sapien
tcttcaggatcgtgctcagcgtgga

SEQ ID NO: 639707 - DNA, 25 bp, Homo sapien
cccgcccgagacaaagcggctcgcg

SEQ ID NO: 639708 - DNA, 25 bp, Homo sapien
gcgccccgcccgagacaaagcggct

SEQ ID NO: 639709 - DNA, 25 bp, Homo sapien
gccccgcccgagacaaagcggctcg

SEQ ID NO: 639710 - DNA, 25 bp, Homo sapien
gcccgagacaaagcggctcgcgggc

SEQ ID NO: 639711 - DNA, 25 bp, Homo sapien
tttgccccaggatgggaatctcaag

SEQ ID NO: 639712 - DNA, 25 bp, Homo sapien
tgatcctgctccctaagtctgcaag

SEQ ID NO: 639713 - DNA, 25 bp, Homo sapien
gtgacctgctctcagtctgcacaag

SEQ ID NO: 639714 - DNA, 25 bp, Homo sapien
cagtggagaggtacgcccttgttcc

SEQ ID NO: 639715 - DNA, 25 bp, Homo sapien
caaggactgagcaccctctggattc

SEQ ID NO: 639716 - DNA, 25 bp, Homo sapien
gtgccttgcatacccaaaccaggtg

SEQ ID NO: 639717 - DNA, 25 bp, Homo sapien
tgcttgaaggccctgctgagtcatc

SEQ ID NO: 639718 - DNA, 25 bp, Homo sapien
gtcaaatatcagttacccactcggt

SEQ ID NO: 639719 - DNA, 25 bp, Homo sapien
gaagccgctgttttgcagccacgaa

SEQ ID NO: 639720 - DNA, 25 bp, Homo sapien
aaattggtaaatgttgctgggcgcg

SEQ ID NO: 639721 - DNA, 25 bp, Homo sapien
tttagacaaggaggtgcatggccga

SEQ ID NO: 639722 - DNA, 25 bp, Homo sapien
gcatttgggtgtcgcagactcagcc

SEQ ID NO: 639723 - DNA, 25 bp, Homo sapien
aagagcgtgttcaagccggctccag

SEQ ID NO: 639724 - DNA, 25 bp, Homo sapien
tctcctttcttgtcaccaaagagcg

SEQ ID NO: 639725 - DNA, 25 bp, Homo sapien
ggaagccatcagcactattggtgag

SEQ ID NO: 639726 - DNA, 25 bp, Homo sapien
ccggctccagtcctgtgttgtgcat

SEQ ID NO: 639727 - DNA, 25 bp, Homo sapien
tccgctgatctagggcaacgagcgg

SEQ ID NO: 639728 - DNA, 25 bp, Homo sapien
ctggggctccgctgatctagggcaa

SEQ ID NO: 639729 - DNA, 25 bp, Homo sapien
gggacgcttcgagcccgcagcgaga

SEQ ID NO: 639730 - DNA, 25 bp, Homo sapien
gcttcgagcccgcagcgagagtgac

SEQ ID NO: 639731 - DNA, 25 bp, Homo sapien
tccaagcatcgggatatgccgccag

SEQ ID NO: 639732 - DNA, 25 bp, Homo sapien
ccacgccgagggtccaagcatcggg

SEQ ID NO: 639733 - DNA, 25 bp, Homo sapien
gccgagggtccaagcatcgggatat

SEQ ID NO: 639734 - DNA, 25 bp, Homo sapien
gggtccaagcatcgggatatgccgc

SEQ ID NO: 639735 - DNA, 25 bp, Homo sapien
cgcgcgcccgcgaccgacgtgcgca

SEQ ID NO: 639736 - DNA, 25 bp, Homo sapien
aacccgacggcgtcagctggcgcgc

SEQ ID NO: 639737 - DNA, 25 bp, Homo sapien
gcgctggacatgagcgctccgccca

SEQ ID NO: 639738 - DNA, 25 bp, Homo sapien
cgcgaccgacgtgcgcaggcgccca

SEQ ID NO: 639739 - DNA, 25 bp, Homo sapien
aaggctgaggcgacgcctcgacgac

SEQ ID NO: 639740 - DNA, 25 bp, Homo sapien
tcgacgacagcggaccggagctgca

SEQ ID NO: 639741 - DNA, 25 bp, Homo sapien
ggagcgcttggtggcagtccgcggg

SEQ ID NO: 639742 - DNA, 25 bp, Homo sapien
tggctgaccggagtaagaaactaca

SEQ ID NO: 639743 - DNA, 25 bp, Homo sapien
tggctttgtgcccacttaggcagta

SEQ ID NO: 639744 - DNA, 25 bp, Homo sapien
ttaggcagtattatcaacaaggtcc

SEQ ID NO: 639745 - DNA, 25 bp, Homo sapien
aatgcatctgccaatcagcagcagg

SEQ ID NO: 639746 - DNA, 25 bp, Homo sapien
tcccacagtcatcgaaacacaaaag

SEQ ID NO: 639747 - DNA, 25 bp, Homo sapien
tctcccgcctcaggctcctgagtag

SEQ ID NO: 639748 - DNA, 25 bp, Homo sapien
ctcccagctttacgccattctcccg

SEQ ID NO: 639749 - DNA, 25 bp, Homo sapien
ttgatctcctgaccttgtgatctgc

SEQ ID NO: 639750 - DNA, 25 bp, Homo sapien
tcccagctttacgccattctcccgc

SEQ ID NO: 639751 - DNA, 25 bp, Homo sapien
gcgtgcacgtctccaggataggcat

SEQ ID NO: 639752 - DNA, 25 bp, Homo sapien
ggcccagcgtgcacgtctccaggat

SEQ ID NO: 639753 - DNA, 25 bp, Homo sapien
cccagcgtgcacgtctccaggatag

SEQ ID NO: 639754 - DNA, 25 bp, Homo sapien
cagcgtgcacgtctccaggataggc

SEQ ID NO: 639755 - DNA, 25 bp, Homo sapien
attgcttaaacccgagaagcagagg

SEQ ID NO: 639756 - DNA, 25 bp, Homo sapien
aggcatggtggcgtgtacccgtaat

SEQ ID NO: 639757 - DNA, 25 bp, Homo sapien
gcttgaatgtgggagatggaggctg

SEQ ID NO: 639758 - DNA, 25 bp, Homo sapien
agaattgcttaaacccgagaagcag

SEQ ID NO: 639759 - DNA, 25 bp, Homo sapien
gagagggctcaaaactggcacagtg

SEQ ID NO: 639760 - DNA, 25 bp, Homo sapien
tattccacatgacgctggtgcccag

SEQ ID NO: 639761 - DNA, 25 bp, Homo sapien
caggagatttggaggcctagacaca

SEQ ID NO: 639762 - DNA, 25 bp, Homo sapien
taggcactgtcttaccgcagagatc

SEQ ID NO: 639763 - DNA, 25 bp, Homo sapien
acaataacaccagaaacacattggg

SEQ ID NO: 639764 - DNA, 25 bp, Homo sapien
aagggacaagaactagagccatcag

SEQ ID NO: 639765 - DNA, 25 bp, Homo sapien
ggatatagggcgtttccactcccag

SEQ ID NO: 639766 - DNA, 25 bp, Homo sapien
gctactcctttagaggcagactcag

SEQ ID NO: 639767 - DNA, 25 bp, Homo sapien
gatgccgctcaaagccgtgacttgg

SEQ ID NO: 639768 - DNA, 25 bp, Homo sapien
gtgacttggcctactttgaacagca

SEQ ID NO: 639769 - DNA, 25 bp, Homo sapien
tctgcctggtgatagactgaagcca

SEQ ID NO: 639770 - DNA, 25 bp, Homo sapien
tcaagcagggtgtgaattggccagt

SEQ ID NO: 639771 - DNA, 25 bp, Homo sapien
gcagaaatccctgtgctaggcaaga

SEQ ID NO: 639772 - DNA, 25 bp, Homo sapien
tggaggattttgtgcctaaggccct

SEQ ID NO: 639773 - DNA, 25 bp, Homo sapien
tgaagtaacaatgaggcatccacct

SEQ ID NO: 639774 - DNA, 25 bp, Homo sapien
gatgacgtctctcaccttgaaccag

SEQ ID NO: 639775 - DNA, 25 bp, Homo sapien
cccaattgacagctggtttgcaaga

SEQ ID NO: 639776 - DNA, 25 bp, Homo sapien
tgtctgccaggcattaagctaagtg

SEQ ID NO: 639777 - DNA, 25 bp, Homo sapien
taatgaccctatgaaagagatacca

SEQ ID NO: 639778 - DNA, 25 bp, Homo sapien
gacaatgcgagggaaaactctgacc

SEQ ID NO: 639779 - DNA, 25 bp, Homo sapien
tgtaacctgaatggaccaagctggt

SEQ ID NO: 639780 - DNA, 25 bp, Homo sapien
gaaggcaccgtatctctgaagcaga

SEQ ID NO: 639781 - DNA, 25 bp, Homo sapien
ggtatgtacaccacagaaagctatg

SEQ ID NO: 639782 - DNA, 25 bp, Homo sapien
tgtgaccctgttggaaaactggcag

SEQ ID NO: 639783 - DNA, 25 bp, Homo sapien
tgctggtctacctcatctgggtgtt

SEQ ID NO: 639784 - DNA, 25 bp, Homo sapien
catctgggtgttgatttcacgagta

SEQ ID NO: 639785 - DNA, 25 bp, Homo sapien
tggagtgctggtctacctcatctgg

SEQ ID NO: 639786 - DNA, 25 bp, Homo sapien
ttcacgagtattgtcagtttgtttc

SEQ ID NO: 639787 - DNA, 25 bp, Homo sapien
ttaagacaagggcatgctctatcgc

SEQ ID NO: 639788 - DNA, 25 bp, Homo sapien
gaagctactgcagtgaagatcaaca

SEQ ID NO: 639789 - DNA, 25 bp, Homo sapien
tcacatacagctggaaatcggcttc

SEQ ID NO: 639790 - DNA, 25 bp, Homo sapien
taatggtctacaatggccagatgcc

SEQ ID NO: 639791 - DNA, 25 bp, Homo sapien
gggatacaggccagaccttggaaga

SEQ ID NO: 639792 - DNA, 25 bp, Homo sapien
taggtaaggtcttcccaagtcctca

SEQ ID NO: 639793 - DNA, 25 bp, Homo sapien
tgaaacaggcctgatctacacccct

SEQ ID NO: 639794 - DNA, 25 bp, Homo sapien
tatactatgcgtacgtatgtgcgca

SEQ ID NO: 639795 - DNA, 25 bp, Homo sapien
taaggcgggcagtagctgaacttct

SEQ ID NO: 639796 - DNA, 25 bp, Homo sapien
ttcagagctagtcctacagtgaggg

SEQ ID NO: 639797 - DNA, 25 bp, Homo sapien
tattcagcaagcacaagcgaagctc

SEQ ID NO: 639798 - DNA, 25 bp, Homo sapien
tgacctcagagtacagaacgggatg

SEQ ID NO: 639799 - DNA, 25 bp, Homo sapien
atccatgctccaaagcggcagccaa

SEQ ID NO: 639800 - DNA, 25 bp, Homo sapien
aaatccttctatggcccccaatgca

SEQ ID NO: 639801 - DNA, 25 bp, Homo sapien
cagactctcctgcaaaaggccaact

SEQ ID NO: 639802 - DNA, 25 bp, Homo sapien
cctccttcgccacaggagggtggcg

SEQ ID NO: 639803 - DNA, 25 bp, Homo sapien
cctcgagttagggagccgactggac

SEQ ID NO: 639804 - DNA, 25 bp, Homo sapien
tcacgatagcctctcattggacgga

SEQ ID NO: 639805 - DNA, 25 bp, Homo sapien
ggatcgactgggctcttacagcggc

SEQ ID NO: 639806 - DNA, 25 bp, Homo sapien
ggcacggtcaatcctcctcgagtta

SEQ ID NO: 639807 - DNA, 25 bp, Homo sapien
cacttcccgcttgttggagtggagg

SEQ ID NO: 639808 - DNA, 25 bp, Homo sapien
tcgttggtgcgtggcctgacatccg

SEQ ID NO: 639809 - DNA, 25 bp, Homo sapien
ctcgggtgctccgaaagcggtacct

SEQ ID NO: 639810 - DNA, 25 bp, Homo sapien
cacatgattttatcctcgagaaggc

SEQ ID NO: 639811 - DNA, 25 bp, Homo sapien
tactttagtacaatatgatttcacc

SEQ ID NO: 639812 - DNA, 25 bp, Homo sapien
tatgtttagtacatacgtacatact

SEQ ID NO: 639813 - DNA, 25 bp, Homo sapien
tttagtacatacgtacatactttag

SEQ ID NO: 639814 - DNA, 25 bp, Homo sapien
tacgtacatactttagtacaatatg

SEQ ID NO: 639815 - DNA, 25 bp, Homo sapien
tatgggtctacaggcattcgggacg

SEQ ID NO: 639816 - DNA, 25 bp, Homo sapien
cggtggaactctggtcaagctggta

SEQ ID NO: 639817 - DNA, 25 bp, Homo sapien
tctgtgtggacgcaaaggcaatctg

SEQ ID NO: 639818 - DNA, 25 bp, Homo sapien
taaaagcattcggaagtacctgacc

SEQ ID NO: 639819 - DNA, 25 bp, Homo sapien
gagaacattgtgagcaagaccttga

SEQ ID NO: 639820 - DNA, 25 bp, Homo sapien
gaccgtcagggtgcaatacagattg

SEQ ID NO: 639821 - DNA, 25 bp, Homo sapien
gaataagccaagatcctgaccgtca

SEQ ID NO: 639822 - DNA, 25 bp, Homo sapien
taggccggagaactgacaaatgaat

SEQ ID NO: 639823 - DNA, 25 bp, Homo sapien
tggtgttatgtgtaagaaatctaag

SEQ ID NO: 639824 - DNA, 25 bp, Homo sapien
tgtgtaagaaatctaagatcatgaa

SEQ ID NO: 639825 - DNA, 25 bp, Homo sapien
agatacataattcgcaaatgttttg

SEQ ID NO: 639826 - DNA, 25 bp, Homo sapien
tgttatgtgtaagaaatctaagatc

SEQ ID NO: 639827 - DNA, 25 bp, Homo sapien
agataaacattgctacttgtctaga

SEQ ID NO: 639828 - DNA, 25 bp, Homo sapien
taaacattgctacttgtctagaggt

SEQ ID NO: 639829 - DNA, 25 bp, Homo sapien
aacattgctacttgtctagaggtaa

SEQ ID NO: 639830 - DNA, 25 bp, Homo sapien
aagataaacattgctacttgtctag

SEQ ID NO: 639831 - DNA, 25 bp, Homo sapien
gaagtccaaagtacacaaatcccca

SEQ ID NO: 639832 - DNA, 25 bp, Homo sapien
taaaattgaagtcatctaacttagt

SEQ ID NO: 639833 - DNA, 25 bp, Homo sapien
tatttgtaaaccagcaccgaattgc

SEQ ID NO: 639834 - DNA, 25 bp, Homo sapien
ccttttcctaggtagaacatggaga

SEQ ID NO: 639835 - DNA, 25 bp, Homo sapien
atagttataagccttcgtgaaattc

SEQ ID NO: 639836 - DNA, 25 bp, Homo sapien
acaaaacaccaaaccgatatcatca

SEQ ID NO: 639837 - DNA, 25 bp, Homo sapien
caccaaaccgatatcatcataatag

SEQ ID NO: 639838 - DNA, 25 bp, Homo sapien
gatatcatcataatagttataagcc

SEQ ID NO: 639839 - DNA, 25 bp, Homo sapien
ggcaggctactatgcgttataatct

SEQ ID NO: 639840 - DNA, 25 bp, Homo sapien
gcctgtgtgtgaacttactgtaaaa

SEQ ID NO: 639841 - DNA, 25 bp, Homo sapien
cagtctaaattagcaaccaggaagg

SEQ ID NO: 639842 - DNA, 25 bp, Homo sapien
cattactctggtttgcattaagcct

SEQ ID NO: 639843 - DNA, 25 bp, Homo sapien
taccagctctgatagaattactcac

SEQ ID NO: 639844 - DNA, 25 bp, Homo sapien
agaattactcaccttgagtttccaa

SEQ ID NO: 639845 - DNA, 25 bp, Homo sapien
caatcactcagtactagttaccagc

SEQ ID NO: 639846 - DNA, 25 bp, Homo sapien
gctgtggtggcctgacacactcttc

SEQ ID NO: 639847 - DNA, 25 bp, Homo sapien
gaccaagaggcgatagttaccagca

SEQ ID NO: 639848 - DNA, 25 bp, Homo sapien
tgagatgcagatccaccaggcttgg

SEQ ID NO: 639849 - DNA, 25 bp, Homo sapien
caatacctagtgaggaaacccgagg

SEQ ID NO: 639850 - DNA, 25 bp, Homo sapien
caaagacgtctatgaaacctgaggt

SEQ ID NO: 639851 - DNA, 25 bp, Homo sapien
gttgtcccagctcccgaggcgggag

SEQ ID NO: 639852 - DNA, 25 bp, Homo sapien
tgttgtcccagctcccgaggcggga

SEQ ID NO: 639853 - DNA, 25 bp, Homo sapien
tgtcccagctcccgaggcgggagaa

SEQ ID NO: 639854 - DNA, 25 bp, Homo sapien
tcccagctcccgaggcgggagaatg

SEQ ID NO: 639855 - DNA, 25 bp, Homo sapien
gggagtagctccatgaactgacgct

SEQ ID NO: 639856 - DNA, 25 bp, Homo sapien
ggcatatccacatgagactcactgt

SEQ ID NO: 639857 - DNA, 25 bp, Homo sapien
gcctaagtgaccacaacagttgcag

SEQ ID NO: 639858 - DNA, 25 bp, Homo sapien
tgctcagtagctaagatgtctgccc

SEQ ID NO: 639859 - DNA, 25 bp, Homo sapien
tactaatggttcagccacccgtgga

SEQ ID NO: 639860 - DNA, 25 bp, Homo sapien
tgagaggctaacctgcagaagggcc

SEQ ID NO: 639861 - DNA, 25 bp, Homo sapien
tcaagaacagggtatccggcaatgg

SEQ ID NO: 639862 - DNA, 25 bp, Homo sapien
tatcaatcatgatggcagaggagcc

SEQ ID NO: 639863 - DNA, 25 bp, Homo sapien
tctggacgggccttactggtgcata

SEQ ID NO: 639864 - DNA, 25 bp, Homo sapien
gaagcagtccagttggcataccacg

SEQ ID NO: 639865 - DNA, 25 bp, Homo sapien
tctttggagccactcgagaggttca

SEQ ID NO: 639866 - DNA, 25 bp, Homo sapien
tagtgaggctagtccagaagcaagc

SEQ ID NO: 639867 - DNA, 25 bp, Homo sapien
ttagatgatttgatagcaggtgttg

SEQ ID NO: 639868 - DNA, 25 bp, Homo sapien
gacacctaggttcccagtttggctg

SEQ ID NO: 639869 - DNA, 25 bp, Homo sapien
tacaacatgagccttgtgggcactg

SEQ ID NO: 639870 - DNA, 25 bp, Homo sapien
tttcttgaggcaaacccgcaggctc

SEQ ID NO: 639871 - DNA, 25 bp, Homo sapien
tttgctgcgacaaaggcctgcatgg

SEQ ID NO: 639872 - DNA, 25 bp, Homo sapien
tggctccacacagacgtcgtgtcca

SEQ ID NO: 639873 - DNA, 25 bp, Homo sapien
gtagagagcagccatacagacacca

SEQ ID NO: 639874 - DNA, 25 bp, Homo sapien
ctaggtagagagcagccatacagac

SEQ ID NO: 639875 - DNA, 25 bp, Homo sapien
gcaacagtctgatccttgcggtaag

SEQ ID NO: 639876 - DNA, 25 bp, Homo sapien
ctgagggggtccacggtcctgctta

SEQ ID NO: 639877 - DNA, 25 bp, Homo sapien
tgagggggtccacggtcctgcttac

SEQ ID NO: 639878 - DNA, 25 bp, Homo sapien
tgcacaggggacacactttacgaac

SEQ ID NO: 639879 - DNA, 25 bp, Homo sapien
tgtagaactggcatgttgcacaggg

SEQ ID NO: 639880 - DNA, 25 bp, Homo sapien
cagctgtagaactggcatgttgcac

SEQ ID NO: 639881 - DNA, 25 bp, Homo sapien
aactgggccagctgtagaactggca

SEQ ID NO: 639882 - DNA, 25 bp, Homo sapien
tgtcacccagacaacgtctgctgta

SEQ ID NO: 639883 - DNA, 25 bp, Homo sapien
tgctgtatggtccaaggagctcccc

SEQ ID NO: 639884 - DNA, 25 bp, Homo sapien
tatgctcatggcacggctgttctgc

SEQ ID NO: 639885 - DNA, 25 bp, Homo sapien
cctcctaggtggtgaacggatgtca

SEQ ID NO: 639886 - DNA, 25 bp, Homo sapien
tggaaggcgtgcttacatgggcaaa

SEQ ID NO: 639887 - DNA, 25 bp, Homo sapien
cccaactcatctcgaggcttgaagt

SEQ ID NO: 639888 - DNA, 25 bp, Homo sapien
gcttgaagtcttctaggcacactgc

SEQ ID NO: 639889 - DNA, 25 bp, Homo sapien
gggcaaatccccaactcatctcgag

SEQ ID NO: 639890 - DNA, 25 bp, Homo sapien
atggctggcctgatgaagtttaact

SEQ ID NO: 639891 - DNA, 25 bp, Homo sapien
taagaatccattacccaatccacag

SEQ ID NO: 639892 - DNA, 25 bp, Homo sapien
aatccacagctatgaagatttatac

SEQ ID NO: 639893 - DNA, 25 bp, Homo sapien
gctggcctgatgaagtttaactatt

SEQ ID NO: 639894 - DNA, 25 bp, Homo sapien
tccactgatctatatagctatcaat

SEQ ID NO: 639895 - DNA, 25 bp, Homo sapien
atagctatcaatatacctgtgtcac

SEQ ID NO: 639896 - DNA, 25 bp, Homo sapien
aaaaactgtagctttgtatagtaag

SEQ ID NO: 639897 - DNA, 25 bp, Homo sapien
tgatctatatagctatcaatatacc

SEQ ID NO: 639898 - DNA, 25 bp, Homo sapien
gaagggtcaaggaaccagactagct

SEQ ID NO: 639899 - DNA, 25 bp, Homo sapien
tgaggttggaagaatcacactgcct

SEQ ID NO: 639900 - DNA, 25 bp, Homo sapien
gatacaaatgaccagcgaaacagga

SEQ ID NO: 639901 - DNA, 25 bp, Homo sapien
taaaaaatcaaacagtggccggctg

SEQ ID NO: 639902 - DNA, 25 bp, Homo sapien
tcatgtaaattcaattcttttactt

SEQ ID NO: 639903 - DNA, 25 bp, Homo sapien
catgtaaattcaattcttttacttt

SEQ ID NO: 639904 - DNA, 25 bp, Homo sapien
ctcatgtaaattcaattcttttact

SEQ ID NO: 639905 - DNA, 25 bp, Homo sapien
gattttggatcccacatgagacctg

SEQ ID NO: 639906 - DNA, 25 bp, Homo sapien
cagttccataacatcagcgtcagca

SEQ ID NO: 639907 - DNA, 25 bp, Homo sapien
tggcagatagatggctgtcgtccca

SEQ ID NO: 639908 - DNA, 25 bp, Homo sapien
catctagggaatgtgccagtgagct

SEQ ID NO: 639909 - DNA, 25 bp, Homo sapien
aattctttgtgtgcttgatgtctta

SEQ ID NO: 639910 - DNA, 25 bp, Homo sapien
ctgtttgtaggcataaaattctttg

SEQ ID NO: 639911 - DNA, 25 bp, Homo sapien
ttctttgtgtgcttgatgtcttagc

SEQ ID NO: 639912 - DNA, 25 bp, Homo sapien
cataaaattctttgtgtgcttgatg

SEQ ID NO: 639913 - DNA, 25 bp, Homo sapien
gctggagagcttaggttatcataaa

SEQ ID NO: 639914 - DNA, 25 bp, Homo sapien
ggagctgactccacagatctctaga

SEQ ID NO: 639915 - DNA, 25 bp, Homo sapien
ctagggtaattctggaggagctgac

SEQ ID NO: 639916 - DNA, 25 bp, Homo sapien
tcttcctatggttctgatgagtcca

SEQ ID NO: 639917 - DNA, 25 bp, Homo sapien
agtagagatggtgtttcacttgttg

SEQ ID NO: 639918 - DNA, 25 bp, Homo sapien
tagtagagatggtgtttcacttgtt

SEQ ID NO: 639919 - DNA, 25 bp, Homo sapien
gagatggtgtttcacttgttggcca

SEQ ID NO: 639920 - DNA, 25 bp, Homo sapien
tagagatggtgtttcacttgttggc

SEQ ID NO: 639921 - DNA, 25 bp, Homo sapien
gtagcaacagaagagtaaactaagg

SEQ ID NO: 639922 - DNA, 25 bp, Homo sapien
caaatatagcagtaccaaaaaccac

SEQ ID NO: 639923 - DNA, 25 bp, Homo sapien
aatccaatattaggcatcctgaagt

SEQ ID NO: 639924 - DNA, 25 bp, Homo sapien
aagttgtaatgtgggaaatccgagc

SEQ ID NO: 639925 - DNA, 25 bp, Homo sapien
ttcatcccatgtaaattcttctctg

SEQ ID NO: 639926 - DNA, 25 bp, Homo sapien
tcccatgtaaattcttctctgacag

SEQ ID NO: 639927 - DNA, 25 bp, Homo sapien
ccgggaacaaggcaggatatctgct

SEQ ID NO: 639928 - DNA, 25 bp, Homo sapien
taagaccgggaacaaggcaggatat

SEQ ID NO: 639929 - DNA, 25 bp, Homo sapien
gaccgggaacaaggcaggatatctg

SEQ ID NO: 639930 - DNA, 25 bp, Homo sapien
cctaagaccgggaacaaggcaggat

SEQ ID NO: 639931 - DNA, 25 bp, Homo sapien
tgaatcttgatcttaacctcacaca

SEQ ID NO: 639932 - DNA, 25 bp, Homo sapien
aatgtgcaatcctttctcaatggag

SEQ ID NO: 639933 - DNA, 25 bp, Homo sapien
caattagtgctggaccaatgggaca

SEQ ID NO: 639934 - DNA, 25 bp, Homo sapien
taggattaggtaaaaagctccagac

SEQ ID NO: 639935 - DNA, 25 bp, Homo sapien
aaatacatatcagccaggcgtcgtg

SEQ ID NO: 639936 - DNA, 25 bp, Homo sapien
gaatacccagcttggagcagtgagc

SEQ ID NO: 639937 - DNA, 25 bp, Homo sapien
tgagcactccaagaaaaactagctg

SEQ ID NO: 639938 - DNA, 25 bp, Homo sapien
ttagtgcaggtgcaactaactgcca

SEQ ID NO: 639939 - DNA, 25 bp, Homo sapien
tgttccacagttctaaaatccagcc

SEQ ID NO: 639940 - DNA, 25 bp, Homo sapien
tgggcttatagatgtgtggcaccat

SEQ ID NO: 639941 - DNA, 25 bp, Homo sapien
gaaacctctcagtctgtaggcaaaa

SEQ ID NO: 639942 - DNA, 25 bp, Homo sapien
tctctgggtttgtgcacagcttttc

SEQ ID NO: 639943 - DNA, 25 bp, Homo sapien
ctcagcttcccaagcagcttgggac

SEQ ID NO: 639944 - DNA, 25 bp, Homo sapien
tgcctcagcttcccaagcagcttgg

SEQ ID NO: 639945 - DNA, 25 bp, Homo sapien
gcttgggactacaggcatgtgccac

SEQ ID NO: 639946 - DNA, 25 bp, Homo sapien
agcttgggactacaggcatgtgcca

SEQ ID NO: 639947 - DNA, 25 bp, Homo sapien
catggcacttctcgaaacagtattg

SEQ ID NO: 639948 - DNA, 25 bp, Homo sapien
ttcctgtgggcagttagtatgctga

SEQ ID NO: 639949 - DNA, 25 bp, Homo sapien
cctcctttgggaattgctaggtcta

SEQ ID NO: 639950 - DNA, 25 bp, Homo sapien
tccaatctgtgacaaagaactgtgt

SEQ ID NO: 639951 - DNA, 25 bp, Homo sapien
agagttgagtttagccacgccccac

SEQ ID NO: 639952 - DNA, 25 bp, Homo sapien
tcaatgtcccatctataatataggg

SEQ ID NO: 639953 - DNA, 25 bp, Homo sapien
tctctggtgtgaggctggcattggg

SEQ ID NO: 639954 - DNA, 25 bp, Homo sapien
gggacttgtaggcaagtctcaatgt

SEQ ID NO: 639955 - DNA, 25 bp, Homo sapien
ctggcatatagtgagtgctcatcat

SEQ ID NO: 639956 - DNA, 25 bp, Homo sapien
ggctgcctggtagtttgacactggt

SEQ ID NO: 639957 - DNA, 25 bp, Homo sapien
tttgagcctgaaccacaagtggact

SEQ ID NO: 639958 - DNA, 25 bp, Homo sapien
gccactctgggttagatctacatct

SEQ ID NO: 639959 - DNA, 25 bp, Homo sapien
aattacagtcctaagcactgcctgg

SEQ ID NO: 639960 - DNA, 25 bp, Homo sapien
gaggctgtggtaagctaagattgca

SEQ ID NO: 639961 - DNA, 25 bp, Homo sapien
agttgaggctgtggtaagctaagat

SEQ ID NO: 639962 - DNA, 25 bp, Homo sapien
ggctgtggtaagctaagattgcacc

SEQ ID NO: 639963 - DNA, 25 bp, Homo sapien
gactagcctgggccacatcatgaaa

SEQ ID NO: 639964 - DNA, 25 bp, Homo sapien
agctttcccaagagtggccagccaa

SEQ ID NO: 639965 - DNA, 25 bp, Homo sapien
cagactatccttagggcacatggag

SEQ ID NO: 639966 - DNA, 25 bp, Homo sapien
tatggagggccagtgcaactctctg

SEQ ID NO: 639967 - DNA, 25 bp, Homo sapien
ccagctggcatggaacaaagtgtct

SEQ ID NO: 639968 - DNA, 25 bp, Homo sapien
agaaattcttgcaaacaatatattt

SEQ ID NO: 639969 - DNA, 25 bp, Homo sapien
taatcatgaagctcaagttagtttc

SEQ ID NO: 639970 - DNA, 25 bp, Homo sapien
tgttctgtgaagctgtgatttatgc

SEQ ID NO: 639971 - DNA, 25 bp, Homo sapien
taatatgtatccatgagataaacac

SEQ ID NO: 639972 - DNA, 25 bp, Homo sapien
ccaggatgatggctatgcagtagtc

SEQ ID NO: 639973 - DNA, 25 bp, Homo sapien
cactggaagctaatggaacaatgtc

SEQ ID NO: 639974 - DNA, 25 bp, Homo sapien
ctcaggaagctactcaagaataagg

SEQ ID NO: 639975 - DNA, 25 bp, Homo sapien
gtctgcacaggttcaagaggaggaa

SEQ ID NO: 639976 - DNA, 25 bp, Homo sapien
tttgtgagggactcaccctccagtc

SEQ ID NO: 639977 - DNA, 25 bp, Homo sapien
cgctccgccctttgtgagggactca

SEQ ID NO: 639978 - DNA, 25 bp, Homo sapien
gtgatctccaggtgacagccccgct

SEQ ID NO: 639979 - DNA, 25 bp, Homo sapien
gggcccgcggtctcctcagcatccc

SEQ ID NO: 639980 - DNA, 25 bp, Homo sapien
accgtcagcgccctgcggcgggcgg

SEQ ID NO: 639981 - DNA, 25 bp, Homo sapien
agcggcagacgtgcgggaccgtcag

SEQ ID NO: 639982 - DNA, 25 bp, Homo sapien
gcagcggcagacgtgcgggaccgtc

SEQ ID NO: 639983 - DNA, 25 bp, Homo sapien
agacgtgcgggaccgtcagcgccct

SEQ ID NO: 639984 - DNA, 25 bp, Homo sapien
agcgtccgtccggacagagcgcggc

SEQ ID NO: 639985 - DNA, 25 bp, Homo sapien
gcgagcgtccgtccggacagagcgc

SEQ ID NO: 639986 - DNA, 25 bp, Homo sapien
gtccgtccggacagagcgcggcgga

SEQ ID NO: 639987 - DNA, 25 bp, Homo sapien
cgtccggacagagcgcggcggaggt

SEQ ID NO: 639988 - DNA, 25 bp, Homo sapien
atcagcaggatcagtatctcccagg

SEQ ID NO: 639989 - DNA, 25 bp, Homo sapien
ccaggacctaatatgtgactggcac

SEQ ID NO: 639990 - DNA, 25 bp, Homo sapien
cagtatctcccaggacctaatatgt

SEQ ID NO: 639991 - DNA, 25 bp, Homo sapien
catcagcaggatcagtatctcccag

SEQ ID NO: 639992 - DNA, 25 bp, Homo sapien
gaccaaatggaaataaggctttctg

SEQ ID NO: 639993 - DNA, 25 bp, Homo sapien
caggacatcaagaagccagctgaag

SEQ ID NO: 639994 - DNA, 25 bp, Homo sapien
cttggaccaaatggaaataaggctt

SEQ ID NO: 639995 - DNA, 25 bp, Homo sapien
ttttgtcgttagctccttcttggcg

SEQ ID NO: 639996 - DNA, 25 bp, Homo sapien
ccacaggatcttcgcattgtccgta

SEQ ID NO: 639997 - DNA, 25 bp, Homo sapien
ggatcttcgcattgtccgtagctga

SEQ ID NO: 639998 - DNA, 25 bp, Homo sapien
acaggatcttcgcattgtccgtagc

SEQ ID NO: 639999 - DNA, 25 bp, Homo sapien
tgtcccacaggatcttcgcattgtc

SEQ ID NO: 640000 - DNA, 25 bp, Homo sapien
gatctcgaatccaatcatgtcctcc

SEQ ID NO: 640001 - DNA, 25 bp, Homo sapien
taggatcatttccaggtctttcagc

SEQ ID NO: 640002 - DNA, 25 bp, Homo sapien
catggcttcccattaccttaggatc

SEQ ID NO: 640003 - DNA, 25 bp, Homo sapien
ctctctggcggcatcattcctctgg

SEQ ID NO: 640004 - DNA, 25 bp, Homo sapien
tattatgcctgaattcatagggaag

SEQ ID NO: 640005 - DNA, 25 bp, Homo sapien
ctattatgcctgaattcatagggaa

SEQ ID NO: 640006 - DNA, 25 bp, Homo sapien
tatgcctgaattcatagggaagagg

SEQ ID NO: 640007 - DNA, 25 bp, Homo sapien
ttccagcagctcaggctccttctca

SEQ ID NO: 640008 - DNA, 25 bp, Homo sapien
tcacgcgtctcaggaagccatctcg

SEQ ID NO: 640009 - DNA, 25 bp, Homo sapien
acgcgtctcaggaagccatctcggc

SEQ ID NO: 640010 - DNA, 25 bp, Homo sapien
cgcgtctcaggaagccatctcggct

SEQ ID NO: 640011 - DNA, 25 bp, Homo sapien
cttcacgcgtctcaggaagccatct

SEQ ID NO: 640012 - DNA, 25 bp, Homo sapien
ggaacattgcagactcttccagttt

SEQ ID NO: 640013 - DNA, 25 bp, Homo sapien
agttttgccatggtgacacttgagg

SEQ ID NO: 640014 - DNA, 25 bp, Homo sapien
ttgccatggtgacacttgaggggca

SEQ ID NO: 640015 - DNA, 25 bp, Homo sapien
gggaacattgcagactcttccagtt

SEQ ID NO: 640016 - DNA, 25 bp, Homo sapien
tcctcttttcctctgtgttcatcat

SEQ ID NO: 640017 - DNA, 25 bp, Homo sapien
tctcctcttttcctctgtgttcatc

SEQ ID NO: 640018 - DNA, 25 bp, Homo sapien
cctctcctcttttcctctgtgttca

SEQ ID NO: 640019 - DNA, 25 bp, Homo sapien
ctcctcttttcctctgtgttcatca

SEQ ID NO: 640020 - DNA, 25 bp, Homo sapien
gttccgaagaagaccaacactaata

SEQ ID NO: 640021 - DNA, 25 bp, Homo sapien
ttctctgggccagccaacttatcag

SEQ ID NO: 640022 - DNA, 25 bp, Homo sapien
ggccagccaacttatcagcactggg

SEQ ID NO: 640023 - DNA, 25 bp, Homo sapien
gaagaagaccaacactaataatcct

SEQ ID NO: 640024 - DNA, 25 bp, Homo sapien
aatagagggtcatctattttactca

SEQ ID NO: 640025 - DNA, 25 bp, Homo sapien
tctctgtaggctgtcaactgattgg

SEQ ID NO: 640026 - DNA, 25 bp, Homo sapien
gaagaggcccaaccacctaatagag

SEQ ID NO: 640027 - DNA, 25 bp, Homo sapien
tcaaaggtccccaactgaactgtta

SEQ ID NO: 640028 - DNA, 25 bp, Homo sapien
ccaacctggctatggcccattgatc

SEQ ID NO: 640029 - DNA, 25 bp, Homo sapien
agtttggtgcaactggggtcctgca

SEQ ID NO: 640030 - DNA, 25 bp, Homo sapien
cagctggaggtagttcccatcctgt

SEQ ID NO: 640031 - DNA, 25 bp, Homo sapien
cattgatcggttcatgaagaaggga

SEQ ID NO: 640032 - DNA, 25 bp, Homo sapien
tattgtcccaacgaccaatgcagac

SEQ ID NO: 640033 - DNA, 25 bp, Homo sapien
agttctctgcaaccagtatccgcca

SEQ ID NO: 640034 - DNA, 25 bp, Homo sapien
tccaggctgaagtagcccggtgtct

SEQ ID NO: 640035 - DNA, 25 bp, Homo sapien
cctgtggttgtctcccagggacagc

SEQ ID NO: 640036 - DNA, 25 bp, Homo sapien
tgacaccttgactacttcagtggcc

SEQ ID NO: 640037 - DNA, 25 bp, Homo sapien
gccctcatgcaatctatctctaaga

SEQ ID NO: 640038 - DNA, 25 bp, Homo sapien
gactacttcagtggcccgtaactgg

SEQ ID NO: 640039 - DNA, 25 bp, Homo sapien
tctctaagacgagtcctcttgtctc

SEQ ID NO: 640040 - DNA, 25 bp, Homo sapien
cccggtattgaatatgggatggaga

SEQ ID NO: 640041 - DNA, 25 bp, Homo sapien
ttagtatagagcctggcgctccaca

SEQ ID NO: 640042 - DNA, 25 bp, Homo sapien
cagggacccggtattgaatatggga

SEQ ID NO: 640043 - DNA, 25 bp, Homo sapien
tggcgctccacagggacccggtatt

SEQ ID NO: 640044 - DNA, 25 bp, Homo sapien
gttgactctctttcgccctctcgtg

SEQ ID NO: 640045 - DNA, 25 bp, Homo sapien
gagaacggtggtgattcccatagaa

SEQ ID NO: 640046 - DNA, 25 bp, Homo sapien
aaaagatgtcccaggcccgttgact

SEQ ID NO: 640047 - DNA, 25 bp, Homo sapien
tgcttgtccaaaagcggcccgttgg

SEQ ID NO: 640048 - DNA, 25 bp, Homo sapien
gctgggcccagaatatctggaatgg

SEQ ID NO: 640049 - DNA, 25 bp, Homo sapien
ccagaatatctggaatggaacccat

SEQ ID NO: 640050 - DNA, 25 bp, Homo sapien
caaggctgggcccagaatatctgga

SEQ ID NO: 640051 - DNA, 25 bp, Homo sapien
caaccagggaagacggccaaggctg

SEQ ID NO: 640052 - DNA, 25 bp, Homo sapien
catcggtccatcctgtttacttgtt

SEQ ID NO: 640053 - DNA, 25 bp, Homo sapien
ggccagcgaggccatccaccaggac

SEQ ID NO: 640054 - DNA, 25 bp, Homo sapien
gttgctgacccagtgggttgtggcc

SEQ ID NO: 640055 - DNA, 25 bp, Homo sapien
tttggagcagccatcggtccatcct

SEQ ID NO: 640056 - DNA, 25 bp, Homo sapien
ggcaacttggccgtgattggagcca

SEQ ID NO: 640057 - DNA, 25 bp, Homo sapien
aacttggccgtgattggagccagca

SEQ ID NO: 640058 - DNA, 25 bp, Homo sapien
agtctgtgggggcaacttggccgtg

SEQ ID NO: 640059 - DNA, 25 bp, Homo sapien
tctgtgggggcaacttggccgtgat

SEQ ID NO: 640060 - DNA, 25 bp, Homo sapien
actggagtcttgagggacgagtgca

SEQ ID NO: 640061 - DNA, 25 bp, Homo sapien
agtcttgagggacgagtgcagttca

SEQ ID NO: 640062 - DNA, 25 bp, Homo sapien
ggacgagtgcagttcaggtgggtgg

SEQ ID NO: 640063 - DNA, 25 bp, Homo sapien
ttagactggagtcttgagggacgag

SEQ ID NO: 640064 - DNA, 25 bp, Homo sapien
tgaggctcctgtgttgcgggatgtg

SEQ ID NO: 640065 - DNA, 25 bp, Homo sapien
cctgtgttgcgggatgtgtagggag

SEQ ID NO: 640066 - DNA, 25 bp, Homo sapien
ctgaggctcctgtgttgcgggatgt

SEQ ID NO: 640067 - DNA, 25 bp, Homo sapien
tgcgggatgtgtagggagctgccgg

SEQ ID NO: 640068 - DNA, 25 bp, Homo sapien
gtatcttgggtgactgtatcccggg

SEQ ID NO: 640069 - DNA, 25 bp, Homo sapien
tgacatgcagacagcacggagggca

SEQ ID NO: 640070 - DNA, 25 bp, Homo sapien
cagggcctctgactgtaaggagctc

SEQ ID NO: 640071 - DNA, 25 bp, Homo sapien
ccaggaacataggtctgatttccag

SEQ ID NO: 640072 - DNA, 25 bp, Homo sapien
cactgtgggcaaccaatctggggtg

SEQ ID NO: 640073 - DNA, 25 bp, Homo sapien
gggaaacagctgatccggccctcta

SEQ ID NO: 640074 - DNA, 25 bp, Homo sapien
ctgatggttacgtgagctgctgtca

SEQ ID NO: 640075 - DNA, 25 bp, Homo sapien
tagaagacggtagtctccccagctg

SEQ ID NO: 640076 - DNA, 25 bp, Homo sapien
gctccagctgtgacgtgtcctcata

SEQ ID NO: 640077 - DNA, 25 bp, Homo sapien
cagggccctcagatgtgcccatccc

SEQ ID NO: 640078 - DNA, 25 bp, Homo sapien
ttaggatgactcaagcaggagacac

SEQ ID NO: 640079 - DNA, 25 bp, Homo sapien
agcgcacctctgatcctggcgggtg

SEQ ID NO: 640080 - DNA, 25 bp, Homo sapien
tgtgctaggccctggcagacacatg

SEQ ID NO: 640081 - DNA, 25 bp, Homo sapien
tggtggtgatactccttgcaggctg

SEQ ID NO: 640082 - DNA, 25 bp, Homo sapien
atccattgctgcggaatctccaggg

SEQ ID NO: 640083 - DNA, 25 bp, Homo sapien
ttgaatccattgctgcggaatctcc

SEQ ID NO: 640084 - DNA, 25 bp, Homo sapien
gaatccattgctgcggaatctccag

SEQ ID NO: 640085 - DNA, 25 bp, Homo sapien
ccattgctgcggaatctccaggggc

SEQ ID NO: 640086 - DNA, 25 bp, Homo sapien
ggtgactatctatctggcaagccag

SEQ ID NO: 640087 - DNA, 25 bp, Homo sapien
ttctctaggaacatctggagtggca

SEQ ID NO: 640088 - DNA, 25 bp, Homo sapien
tatcctaagggccactaaagggagc

SEQ ID NO: 640089 - DNA, 25 bp, Homo sapien
aagtgctaacagactctcccaaggc

SEQ ID NO: 640090 - DNA, 25 bp, Homo sapien
gaataacctcaaggcgtgggtgcag

SEQ ID NO: 640091 - DNA, 25 bp, Homo sapien
tattcatccgtctttggcaaccctg

SEQ ID NO: 640092 - DNA, 25 bp, Homo sapien
tctgctcagaaagtacagggtgttc

SEQ ID NO: 640093 - DNA, 25 bp, Homo sapien
ggcaggcaccgagtaccatttaagt

SEQ ID NO: 640094 - DNA, 25 bp, Homo sapien
ggccacaggacggactcatttctct

SEQ ID NO: 640095 - DNA, 25 bp, Homo sapien
tgctggctccatgggatgatatcag

SEQ ID NO: 640096 - DNA, 25 bp, Homo sapien
gtgtgctggctccatgggatgatat

SEQ ID NO: 640097 - DNA, 25 bp, Homo sapien
cagttggaccacagggtgtgctggc

SEQ ID NO: 640098 - DNA, 25 bp, Homo sapien
catggagggccttatttgacggtca

SEQ ID NO: 640099 - DNA, 25 bp, Homo sapien
cagtcttgtgacatccatggagggc

SEQ ID NO: 640100 - DNA, 25 bp, Homo sapien
tgcgtgtcattccatgtgcgatgtc

SEQ ID NO: 640101 - DNA, 25 bp, Homo sapien
tattttcatgcacgaggcccttgaa

SEQ ID NO: 640102 - DNA, 25 bp, Homo sapien
cccggcccggctggcagacatccgg

SEQ ID NO: 640103 - DNA, 25 bp, Homo sapien
cggcccggctggcagacatccggcg

SEQ ID NO: 640104 - DNA, 25 bp, Homo sapien
tcccggcccggctggcagacatccg

SEQ ID NO: 640105 - DNA, 25 bp, Homo sapien
ggcccggctggcagacatccggcgg

SEQ ID NO: 640106 - DNA, 25 bp, Homo sapien
tccccgcccgccccgtgcaggcggc

SEQ ID NO: 640107 - DNA, 25 bp, Homo sapien
cctccccgcccgccccgtgcaggcg

SEQ ID NO: 640108 - DNA, 25 bp, Homo sapien
cccgcccgccccgtgcaggcggcca

SEQ ID NO: 640109 - DNA, 25 bp, Homo sapien
gcccgccccgtgcaggcggccacat

SEQ ID NO: 640110 - DNA, 25 bp, Homo sapien
cactgtcatgcactagcggttgttg

SEQ ID NO: 640111 - DNA, 25 bp, Homo sapien
ttctacacttgctctggcggcatcc

SEQ ID NO: 640112 - DNA, 25 bp, Homo sapien
tagcggttgttggtgaggttcttca

SEQ ID NO: 640113 - DNA, 25 bp, Homo sapien
gcggcatcctcactgtcatgcacta

SEQ ID NO: 640114 - DNA, 25 bp, Homo sapien
ggagacatgggaagggctggactgg

SEQ ID NO: 640115 - DNA, 25 bp, Homo sapien
agatggagacatgggaagggctgga

SEQ ID NO: 640116 - DNA, 25 bp, Homo sapien
ctccccttctcactgtggctgggca

SEQ ID NO: 640117 - DNA, 25 bp, Homo sapien
gctggactggctccccttctcactg

SEQ ID NO: 640118 - DNA, 25 bp, Homo sapien
tctggaagcaaggacaacctcaagg

SEQ ID NO: 640119 - DNA, 25 bp, Homo sapien
tgctgcaccgagaaaatgtgtgtcc

SEQ ID NO: 640120 - DNA, 25 bp, Homo sapien
tgtcctggattctccgtgagctttt

SEQ ID NO: 640121 - DNA, 25 bp, Homo sapien
gacaacctcaagggctgatccacat

SEQ ID NO: 640122 - DNA, 25 bp, Homo sapien
cctctgggggttctgcagccctcat

SEQ ID NO: 640123 - DNA, 25 bp, Homo sapien
cacagctggcctctgggggttctgc

SEQ ID NO: 640124 - DNA, 25 bp, Homo sapien
acagctggcctctgggggttctgca

SEQ ID NO: 640125 - DNA, 25 bp, Homo sapien
tggcctctgggggttctgcagccct

SEQ ID NO: 640126 - DNA, 25 bp, Homo sapien
gattaatcaatttcacggggtatgc

SEQ ID NO: 640127 - DNA, 25 bp, Homo sapien
taatcaatttcacggggtatgccat

SEQ ID NO: 640128 - DNA, 25 bp, Homo sapien
ttaatcaatttcacggggtatgcca

SEQ ID NO: 640129 - DNA, 25 bp, Homo sapien
ccagattaatcaatttcacggggta

SEQ ID NO: 640130 - DNA, 25 bp, Homo sapien
tggcaggaataggtcaagggcttca

SEQ ID NO: 640131 - DNA, 25 bp, Homo sapien
ctggcaggaataggtcaagggcttc

SEQ ID NO: 640132 - DNA, 25 bp, Homo sapien
ggcaggaataggtcaagggcttcag

SEQ ID NO: 640133 - DNA, 25 bp, Homo sapien
cctggcaggaataggtcaagggctt

SEQ ID NO: 640134 - DNA, 25 bp, Homo sapien
cagcgggcccatggataaatacagc

SEQ ID NO: 640135 - DNA, 25 bp, Homo sapien
tgcgggcctttagttcttgacagac

SEQ ID NO: 640136 - DNA, 25 bp, Homo sapien
gagtgtaaacagtaaggcccttgag

SEQ ID NO: 640137 - DNA, 25 bp, Homo sapien
cacaggcacgatgagctatgtacag

SEQ ID NO: 640138 - DNA, 25 bp, Homo sapien
gccctcggccacctcgtgtgggacg

SEQ ID NO: 640139 - DNA, 25 bp, Homo sapien
ggttgctgtagtcggccaattcgta

SEQ ID NO: 640140 - DNA, 25 bp, Homo sapien
taaatatcggtctcccgtaggttgc

SEQ ID NO: 640141 - DNA, 25 bp, Homo sapien
cggccaattcgtaggcctggcaggt

SEQ ID NO: 640142 - DNA, 25 bp, Homo sapien
cgcgcttgaactcgcggctggaaca

SEQ ID NO: 640143 - DNA, 25 bp, Homo sapien
gatcttgtgcgacaggctggagact

SEQ ID NO: 640144 - DNA, 25 bp, Homo sapien
aagtagccgagccagaagatgacct

SEQ ID NO: 640145 - DNA, 25 bp, Homo sapien
atggcttcagctgcgggaacaagga

SEQ ID NO: 640146 - DNA, 25 bp, Homo sapien
acctgatattgaggattaccttcaa

SEQ ID NO: 640147 - DNA, 25 bp, Homo sapien
tgaggattaccttcaatgaatgtag

SEQ ID NO: 640148 - DNA, 25 bp, Homo sapien
tattgaggattaccttcaatgaatg

SEQ ID NO: 640149 - DNA, 25 bp, Homo sapien
gattaccttcaatgaatgtaggcaa

SEQ ID NO: 640150 - DNA, 25 bp, Homo sapien
tgcctgtgagaccaagcgggccagg

SEQ ID NO: 640151 - DNA, 25 bp, Homo sapien
ctgcaggtgcctgtgagaccaagcg

SEQ ID NO: 640152 - DNA, 25 bp, Homo sapien
aggtgcctgtgagaccaagcgggcc

SEQ ID NO: 640153 - DNA, 25 bp, Homo sapien
gcgggccaggggtgttccatcctgg

SEQ ID NO: 640154 - DNA, 25 bp, Homo sapien
ccaagcgggccaggggtgttccatc

SEQ ID NO: 640155 - DNA, 25 bp, Homo sapien
gggtgttccatcctggatagaggct

SEQ ID NO: 640156 - DNA, 25 bp, Homo sapien
tgttccatcctggatagaggctgca

SEQ ID NO: 640157 - DNA, 25 bp, Homo sapien
ggccaggggtgttccatcctggata

SEQ ID NO: 640158 - DNA, 25 bp, Homo sapien
atcaaggtggcattaaggaggtagt

SEQ ID NO: 640159 - DNA, 25 bp, Homo sapien
gcatcgcaggtagacaatgatggaa

SEQ ID NO: 640160 - DNA, 25 bp, Homo sapien
caatgatggaagtgttgatcaaggt

SEQ ID NO: 640161 - DNA, 25 bp, Homo sapien
tctttactgcatcgcaggtagacaa

SEQ ID NO: 640162 - DNA, 25 bp, Homo sapien
tcggagcatgcttcattctgcttac

SEQ ID NO: 640163 - DNA, 25 bp, Homo sapien
tctggagtgtgcgtgctcggagcat

SEQ ID NO: 640164 - DNA, 25 bp, Homo sapien
gcgtgctcggagcatgcttcattct

SEQ ID NO: 640165 - DNA, 25 bp, Homo sapien
tgatagcggcttctggagtgtgcgt

SEQ ID NO: 640166 - DNA, 25 bp, Homo sapien
catccatccagactgctcagaaggg

SEQ ID NO: 640167 - DNA, 25 bp, Homo sapien
cctgtatgtcctcaagggcgccttg

SEQ ID NO: 640168 - DNA, 25 bp, Homo sapien
atcaggttcagctccacgtccatcc

SEQ ID NO: 640169 - DNA, 25 bp, Homo sapien
accaggccgtgtggcatttgctggc

SEQ ID NO: 640170 - DNA, 25 bp, Homo sapien
cagagatgggcttagggactcagag

SEQ ID NO: 640171 - DNA, 25 bp, Homo sapien
agatgggcttagggactcagagact

SEQ ID NO: 640172 - DNA, 25 bp, Homo sapien
ctggggggtgcacggcaggcctggg

SEQ ID NO: 640173 - DNA, 25 bp, Homo sapien
ggcagagatgggcttagggactcag

SEQ ID NO: 640174 - DNA, 25 bp, Homo sapien
gtacttgagtgagtggcgcacgccc

SEQ ID NO: 640175 - DNA, 25 bp, Homo sapien
ttctcacgggagaacttgagcaggc

SEQ ID NO: 640176 - DNA, 25 bp, Homo sapien
tcggtgataccgcagaagcgctcgt

SEQ ID NO: 640177 - DNA, 25 bp, Homo sapien
cacgatgaccgccatgggcaggtag

SEQ ID NO: 640178 - DNA, 25 bp, Homo sapien
atacgtcgcagaaggcgcggccaaa

SEQ ID NO: 640179 - DNA, 25 bp, Homo sapien
ccacggccaggttcacgatgaaata

SEQ ID NO: 640180 - DNA, 25 bp, Homo sapien
ccgagaagggcagtacggtggcgct

SEQ ID NO: 640181 - DNA, 25 bp, Homo sapien
tgcaggtggcggttgcaggccactg

SEQ ID NO: 640182 - DNA, 25 bp, Homo sapien
cgctcaggagatcgcggaaagtcat

SEQ ID NO: 640183 - DNA, 25 bp, Homo sapien
gggtccctcgaaactgacgctcagg

SEQ ID NO: 640184 - DNA, 25 bp, Homo sapien
ggagctccggttgtcctcgccgctg

SEQ ID NO: 640185 - DNA, 25 bp, Homo sapien
aaactgacgctcaggagatcgcgga

SEQ ID NO: 640186 - DNA, 25 bp, Homo sapien
tcctgtgacgcggagcgcggctgtc

SEQ ID NO: 640187 - DNA, 25 bp, Homo sapien
cgggcgccacactccagggtagaag

SEQ ID NO: 640188 - DNA, 25 bp, Homo sapien
ggccgtggagtagcaccgaagagcc

SEQ ID NO: 640189 - DNA, 25 bp, Homo sapien
agaagggacccttcgctcaggacaa

SEQ ID NO: 640190 - DNA, 25 bp, Homo sapien
gagtctctcggtcactcgctggtgc

SEQ ID NO: 640191 - DNA, 25 bp, Homo sapien
ccttggccctcagcggcgtccctct

SEQ ID NO: 640192 - DNA, 25 bp, Homo sapien
ccccgagtctctcggtcactcgctg

SEQ ID NO: 640193 - DNA, 25 bp, Homo sapien
cccttggccctcagcggcgtccctc

SEQ ID NO: 640194 - DNA, 25 bp, Homo sapien
tcagtgactgtaacatatttgtctt

SEQ ID NO: 640195 - DNA, 25 bp, Homo sapien
tatctggagatagtgaacttcttgg

SEQ ID NO: 640196 - DNA, 25 bp, Homo sapien
gtctttttatgctcagcagccagcg

SEQ ID NO: 640197 - DNA, 25 bp, Homo sapien
tgggtttttcagtgactgtaacata

SEQ ID NO: 640198 - DNA, 25 bp, Homo sapien
tctaaactcctatgacccagtggca

SEQ ID NO: 640199 - DNA, 25 bp, Homo sapien
ctaaactcctatgacccagtggcat

SEQ ID NO: 640200 - DNA, 25 bp, Homo sapien
agtctaaactcctatgacccagtgg

SEQ ID NO: 640201 - DNA, 25 bp, Homo sapien
caagtctaaactcctatgacccagt

SEQ ID NO: 640202 - DNA, 25 bp, Homo sapien
gggctccacagaggcggcgaaatca

SEQ ID NO: 640203 - DNA, 25 bp, Homo sapien
cgcgtaggcacaaactcgagctggg

SEQ ID NO: 640204 - DNA, 25 bp, Homo sapien
tggatttgactggttgttttggcat

SEQ ID NO: 640205 - DNA, 25 bp, Homo sapien
ggttgttttggcatcgcgtaggcac

SEQ ID NO: 640206 - DNA, 25 bp, Homo sapien
catagacagaattggtattacggcg

SEQ ID NO: 640207 - DNA, 25 bp, Homo sapien
tcgttccatcctaaagcgctctgcg

SEQ ID NO: 640208 - DNA, 25 bp, Homo sapien
gaattggtattacggcgcccattgt

SEQ ID NO: 640209 - DNA, 25 bp, Homo sapien
ctaaagcgctctgcgacatagacag

SEQ ID NO: 640210 - DNA, 25 bp, Homo sapien
gactctgcagttcttagaaaattgg

SEQ ID NO: 640211 - DNA, 25 bp, Homo sapien
ccgtaaactgattcagactctgcag

SEQ ID NO: 640212 - DNA, 25 bp, Homo sapien
ttggtggcactccaattctcccttt

SEQ ID NO: 640213 - DNA, 25 bp, Homo sapien
gagatgctaaacttcccatagcagg

SEQ ID NO: 640214 - DNA, 25 bp, Homo sapien
tccttcagctcttgcagagagtctt

SEQ ID NO: 640215 - DNA, 25 bp, Homo sapien
gctccttcagctcttgcagagagtc

SEQ ID NO: 640216 - DNA, 25 bp, Homo sapien
tcagggctccttcagctcttgcaga

SEQ ID NO: 640217 - DNA, 25 bp, Homo sapien
agggctccttcagctcttgcagaga

SEQ ID NO: 640218 - DNA, 25 bp, Homo sapien
acaggtggttgcacaggaaacttct

SEQ ID NO: 640219 - DNA, 25 bp, Homo sapien
ttgctctaaacaggtggttgcacag

SEQ ID NO: 640220 - DNA, 25 bp, Homo sapien
gctctaaacaggtggttgcacagga

SEQ ID NO: 640221 - DNA, 25 bp, Homo sapien
taaacaggtggttgcacaggaaact

SEQ ID NO: 640222 - DNA, 25 bp, Homo sapien
tttgtggcataggaagcaactgtct

SEQ ID NO: 640223 - DNA, 25 bp, Homo sapien
actgtcttgcggagttgttttgggc

SEQ ID NO: 640224 - DNA, 25 bp, Homo sapien
ttttgggcgttgttgctgagtcttg

SEQ ID NO: 640225 - DNA, 25 bp, Homo sapien
caccagtaaggtgatgcgtccctgt

SEQ ID NO: 640226 - DNA, 25 bp, Homo sapien
tttgaagaccacaacaggtttgctg

SEQ ID NO: 640227 - DNA, 25 bp, Homo sapien
agaacacttcctaagaccaaatcag

SEQ ID NO: 640228 - DNA, 25 bp, Homo sapien
tctcggtgagtggaggttgtacctt

SEQ ID NO: 640229 - DNA, 25 bp, Homo sapien
cttcctaagaccaaatcagccaggg

SEQ ID NO: 640230 - DNA, 25 bp, Homo sapien
tctgtacggcttagaggagaaccgg

SEQ ID NO: 640231 - DNA, 25 bp, Homo sapien
cttagaggagaaccgggaatatgcc

SEQ ID NO: 640232 - DNA, 25 bp, Homo sapien
agaaccgggaatatgcctgtggtcc

SEQ ID NO: 640233 - DNA, 25 bp, Homo sapien
ctcttgtggactctgtacggcttag

SEQ ID NO: 640234 - DNA, 25 bp, Homo sapien
ctggctccagagcggtgagcttgct

SEQ ID NO: 640235 - DNA, 25 bp, Homo sapien
tctggctccagagcggtgagcttgc

SEQ ID NO: 640236 - DNA, 25 bp, Homo sapien
ctctggctccagagcggtgagcttg

SEQ ID NO: 640237 - DNA, 25 bp, Homo sapien
tggctccagagcggtgagcttgctg

SEQ ID NO: 640238 - DNA, 25 bp, Homo sapien
aggtacagcattccactgatgggtg

SEQ ID NO: 640239 - DNA, 25 bp, Homo sapien
cattccactgatgggtggaagccct

SEQ ID NO: 640240 - DNA, 25 bp, Homo sapien
tgggtggaagccctggcccttctca

SEQ ID NO: 640241 - DNA, 25 bp, Homo sapien
tcagccaaggccttaacagcaagca

SEQ ID NO: 640242 - DNA, 25 bp, Homo sapien
tctgtaatctctcccacttattttc

SEQ ID NO: 640243 - DNA, 25 bp, Homo sapien
tgtaatctctcccacttattttcac

SEQ ID NO: 640244 - DNA, 25 bp, Homo sapien
taatctctcccacttattttcacta

SEQ ID NO: 640245 - DNA, 25 bp, Homo sapien
ttctgtaatctctcccacttatttt

SEQ ID NO: 640246 - DNA, 25 bp, Homo sapien
tagttgttttgttgataggtctcag

SEQ ID NO: 640247 - DNA, 25 bp, Homo sapien
ctccctgtccagtgaaagttgctga

SEQ ID NO: 640248 - DNA, 25 bp, Homo sapien
ttttgttgataggtctcagctgggc

SEQ ID NO: 640249 - DNA, 25 bp, Homo sapien
aatgtgatgctgtctgcttccgcct

SEQ ID NO: 640250 - DNA, 25 bp, Homo sapien
tatggctgtaaatgtcagacctggc

SEQ ID NO: 640251 - DNA, 25 bp, Homo sapien
tctggaattgtgcagcatgtggcca

SEQ ID NO: 640252 - DNA, 25 bp, Homo sapien
cacaaggctggttggaagacaccac

SEQ ID NO: 640253 - DNA, 25 bp, Homo sapien
ggatagatcagccaaccgtatacag

SEQ ID NO: 640254 - DNA, 25 bp, Homo sapien
ccggagaccatgatcttgaagcaaa

SEQ ID NO: 640255 - DNA, 25 bp, Homo sapien
tggcaatttgcctctccggagacca

SEQ ID NO: 640256 - DNA, 25 bp, Homo sapien
tacgagtagctgagtgagactagat

SEQ ID NO: 640257 - DNA, 25 bp, Homo sapien
caatgccatcttgaagggtggacca

SEQ ID NO: 640258 - DNA, 25 bp, Homo sapien
tttcataggccagaagtttccaggt

SEQ ID NO: 640259 - DNA, 25 bp, Homo sapien
taccagggttcctcagggacatctc

SEQ ID NO: 640260 - DNA, 25 bp, Homo sapien
tcagataccagggttcctcagggac

SEQ ID NO: 640261 - DNA, 25 bp, Homo sapien
gataccagggttcctcagggacatc

SEQ ID NO: 640262 - DNA, 25 bp, Homo sapien
cagataccagggttcctcagggaca

SEQ ID NO: 640263 - DNA, 25 bp, Homo sapien
tcaggtgacatgcatactagaagtc

SEQ ID NO: 640264 - DNA, 25 bp, Homo sapien
tggaggctgtgatcctaagtgaact

SEQ ID NO: 640265 - DNA, 25 bp, Homo sapien
catgccctctgcaacaacatgagtg

SEQ ID NO: 640266 - DNA, 25 bp, Homo sapien
tgagtacacacggacagaaagttgg

SEQ ID NO: 640267 - DNA, 25 bp, Homo sapien
ctcactccctttaatgtctctgcct

SEQ ID NO: 640268 - DNA, 25 bp, Homo sapien
taataactcactccctttaatgtct

SEQ ID NO: 640269 - DNA, 25 bp, Homo sapien
cactccctttaatgtctctgcctca

SEQ ID NO: 640270 - DNA, 25 bp, Homo sapien
taactcactccctttaatgtctctg

SEQ ID NO: 640271 - DNA, 25 bp, Homo sapien
tgcagaatatgtattgccgtgttct

SEQ ID NO: 640272 - DNA, 25 bp, Homo sapien
tggccaccatagttcaggtaaagaa

SEQ ID NO: 640273 - DNA, 25 bp, Homo sapien
ctgttgagtgtgtatcttttgtgta

SEQ ID NO: 640274 - DNA, 25 bp, Homo sapien
tattgccgtgttctggccaccatag

SEQ ID NO: 640275 - DNA, 25 bp, Homo sapien
tggctccaatcagttgttcacaaac

SEQ ID NO: 640276 - DNA, 25 bp, Homo sapien
tgctggttgctataggtacatctag

SEQ ID NO: 640277 - DNA, 25 bp, Homo sapien
ttcgtttggtactatgtttttgaga

SEQ ID NO: 640278 - DNA, 25 bp, Homo sapien
tgtgccttgtgaaaccttagtggtt

SEQ ID NO: 640279 - DNA, 25 bp, Homo sapien
ccagctcggcagtcaggagctatgc

SEQ ID NO: 640280 - DNA, 25 bp, Homo sapien
ctcggcagtcaggagctatgcacag

SEQ ID NO: 640281 - DNA, 25 bp, Homo sapien
ggaaaggactggagttcttcccagc

SEQ ID NO: 640282 - DNA, 25 bp, Homo sapien
gaaaggactggagttcttcccagct

SEQ ID NO: 640283 - DNA, 25 bp, Homo sapien
tctcactgaatcagcagtcccagtg

SEQ ID NO: 640284 - DNA, 25 bp, Homo sapien
ttctcactgaatcagcagtcccagt

SEQ ID NO: 640285 - DNA, 25 bp, Homo sapien
gatctaacaagaatattctcactga

SEQ ID NO: 640286 - DNA, 25 bp, Homo sapien
atattctcactgaatcagcagtccc

SEQ ID NO: 640287 - DNA, 25 bp, Homo sapien
agatagccacgtactggtggctgtt

SEQ ID NO: 640288 - DNA, 25 bp, Homo sapien
ccacgtactggtggctgttccagat

SEQ ID NO: 640289 - DNA, 25 bp, Homo sapien
tagccacgtactggtggctgttcca

SEQ ID NO: 640290 - DNA, 25 bp, Homo sapien
gccacgtactggtggctgttccaga

SEQ ID NO: 640291 - DNA, 25 bp, Homo sapien
ctgggatgggttatttttaatggtg

SEQ ID NO: 640292 - DNA, 25 bp, Homo sapien
aaagatagagttcacgcccacactc

SEQ ID NO: 640293 - DNA, 25 bp, Homo sapien
agatagagttcacgcccacactctg

SEQ ID NO: 640294 - DNA, 25 bp, Homo sapien
cagctgggatgggttatttttaatg

SEQ ID NO: 640295 - DNA, 25 bp, Homo sapien
tctttgcttaggtttaaaggctgtc

SEQ ID NO: 640296 - DNA, 25 bp, Homo sapien
gatgctctcatgcaggatttgtagg

SEQ ID NO: 640297 - DNA, 25 bp, Homo sapien
cagatgttcagggcataggagatgc

SEQ ID NO: 640298 - DNA, 25 bp, Homo sapien
gatttgtaggaccatcagagaggtg

SEQ ID NO: 640299 - DNA, 25 bp, Homo sapien
caatgctctgctttctttattcctt

SEQ ID NO: 640300 - DNA, 25 bp, Homo sapien
ctctgctttctttattccttccttt

SEQ ID NO: 640301 - DNA, 25 bp, Homo sapien
tcaatgctctgctttctttattcct

SEQ ID NO: 640302 - DNA, 25 bp, Homo sapien
aatcactttgtgacccatagggagg

SEQ ID NO: 640303 - DNA, 25 bp, Homo sapien
gggttgattgtatgcaggtattgcc

SEQ ID NO: 640304 - DNA, 25 bp, Homo sapien
gttgattgtatgcaggtattgcctc

SEQ ID NO: 640305 - DNA, 25 bp, Homo sapien
ttgtgacccatagggaggtctctga

SEQ ID NO: 640306 - DNA, 25 bp, Homo sapien
cttggctatggttctgagaggtggc

SEQ ID NO: 640307 - DNA, 25 bp, Homo sapien
agaagtgagtggtaggaaagatgta

SEQ ID NO: 640308 - DNA, 25 bp, Homo sapien
ccttggctatggttctgagaggtgg

SEQ ID NO: 640309 - DNA, 25 bp, Homo sapien
gagtggtaggaaagatgtagactac

SEQ ID NO: 640310 - DNA, 25 bp, Homo sapien
ttttagggaatttctgtgctctcac

SEQ ID NO: 640311 - DNA, 25 bp, Homo sapien
tgatattttagggaatttctgtgct

SEQ ID NO: 640312 - DNA, 25 bp, Homo sapien
ggcctattaagtaactccttgatat

SEQ ID NO: 640313 - DNA, 25 bp, Homo sapien
cttggcctattaagtaactccttga

SEQ ID NO: 640314 - DNA, 25 bp, Homo sapien
tttcagaaatgccaggatagattag

SEQ ID NO: 640315 - DNA, 25 bp, Homo sapien
ttaaaagactagtagcaggaccaca

SEQ ID NO: 640316 - DNA, 25 bp, Homo sapien
gaacatatatatcagcccagatagt

SEQ ID NO: 640317 - DNA, 25 bp, Homo sapien
tatataaggtggataacgttgacac

SEQ ID NO: 640318 - DNA, 25 bp, Homo sapien
tctgctggcatagggcaaaagtctc

SEQ ID NO: 640319 - DNA, 25 bp, Homo sapien
tctaaccatggttaaggcactccct

SEQ ID NO: 640320 - DNA, 25 bp, Homo sapien
caccaagagcggacatggagtcttc

SEQ ID NO: 640321 - DNA, 25 bp, Homo sapien
tgtgacccgttgctggccattgaga

SEQ ID NO: 640322 - DNA, 25 bp, Homo sapien
tctctgagattcactatctattcat

SEQ ID NO: 640323 - DNA, 25 bp, Homo sapien
gattcttttcaaagacgttctctga

SEQ ID NO: 640324 - DNA, 25 bp, Homo sapien
tcatgccattgtgcgttttcctgct

SEQ ID NO: 640325 - DNA, 25 bp, Homo sapien
ctgattcttttcaaagacgttctct

SEQ ID NO: 640326 - DNA, 25 bp, Homo sapien
ctacttggctttctaccagggagac

SEQ ID NO: 640327 - DNA, 25 bp, Homo sapien
cctacttggctttctaccagggaga

SEQ ID NO: 640328 - DNA, 25 bp, Homo sapien
tacttggctttctaccagggagact

SEQ ID NO: 640329 - DNA, 25 bp, Homo sapien
acttggctttctaccagggagactt

SEQ ID NO: 640330 - DNA, 25 bp, Homo sapien
ctgctctgcatagaccctttgggcc

SEQ ID NO: 640331 - DNA, 25 bp, Homo sapien
gctgctctgcatagaccctttgggc

SEQ ID NO: 640332 - DNA, 25 bp, Homo sapien
tgctctgcatagaccctttgggcca

SEQ ID NO: 640333 - DNA, 25 bp, Homo sapien
gctctgcatagaccctttgggccat

SEQ ID NO: 640334 - DNA, 25 bp, Homo sapien
tttatcagtgtcacggcagctgtcc

SEQ ID NO: 640335 - DNA, 25 bp, Homo sapien
cagattccctatatcttcctttttc

SEQ ID NO: 640336 - DNA, 25 bp, Homo sapien
ttccggcatatttgagttggtggta

SEQ ID NO: 640337 - DNA, 25 bp, Homo sapien
ttccctggcatttatcagtgtcacg

SEQ ID NO: 640338 - DNA, 25 bp, Homo sapien
cagaaaaatcactcctccagagtgg

SEQ ID NO: 640339 - DNA, 25 bp, Homo sapien
gaaaaatcactcctccagagtggag

SEQ ID NO: 640340 - DNA, 25 bp, Homo sapien
actcctccagagtggagcaagcact

SEQ ID NO: 640341 - DNA, 25 bp, Homo sapien
aatcactcctccagagtggagcaag

SEQ ID NO: 640342 - DNA, 25 bp, Homo sapien
gcctctggcagcctgcagatactgg

SEQ ID NO: 640343 - DNA, 25 bp, Homo sapien
agctgcctctggcagcctgcagata

SEQ ID NO: 640344 - DNA, 25 bp, Homo sapien
tctggcagcctgcagatactggtcc

SEQ ID NO: 640345 - DNA, 25 bp, Homo sapien
ctgcctctggcagcctgcagatact

SEQ ID NO: 640346 - DNA, 25 bp, Homo sapien
ccaaatcacaccatttacttgtaag

SEQ ID NO: 640347 - DNA, 25 bp, Homo sapien
cttctcggtttacagccaaatcaca

SEQ ID NO: 640348 - DNA, 25 bp, Homo sapien
tcggtttacagccaaatcacaccat

SEQ ID NO: 640349 - DNA, 25 bp, Homo sapien
caaatcacaccatttacttgtaaga

SEQ ID NO: 640350 - DNA, 25 bp, Homo sapien
taacacgtgacatggttctgtcttt

SEQ ID NO: 640351 - DNA, 25 bp, Homo sapien
aacacgtgacatggttctgtctttt

SEQ ID NO: 640352 - DNA, 25 bp, Homo sapien
ttaacacgtgacatggttctgtctt

SEQ ID NO: 640353 - DNA, 25 bp, Homo sapien
ggtatctgtggtagaagatactaca

SEQ ID NO: 640354 - DNA, 25 bp, Homo sapien
ctggataactgtaccagcaatagcc

SEQ ID NO: 640355 - DNA, 25 bp, Homo sapien
taactgtaccagcaatagcccaaaa

SEQ ID NO: 640356 - DNA, 25 bp, Homo sapien
gcaatagcccaaaaggtatctgtgg

SEQ ID NO: 640357 - DNA, 25 bp, Homo sapien
gggactttgtccaagaattctccaa

SEQ ID NO: 640358 - DNA, 25 bp, Homo sapien
tcctcaggggactttgtccaagaat

SEQ ID NO: 640359 - DNA, 25 bp, Homo sapien
aagtctccttcacctagacgtctaa

SEQ ID NO: 640360 - DNA, 25 bp, Homo sapien
tccttcacctagacgtctaaatctg

SEQ ID NO: 640361 - DNA, 25 bp, Homo sapien
gaatcggcagttggctatctgcaaa

SEQ ID NO: 640362 - DNA, 25 bp, Homo sapien
tacaaccgccctgagggaggatctg

SEQ ID NO: 640363 - DNA, 25 bp, Homo sapien
tgtccatccaggtccgtgtctcaga

SEQ ID NO: 640364 - DNA, 25 bp, Homo sapien
gaaaaacaggcctctgagaactggg

SEQ ID NO: 640365 - DNA, 25 bp, Homo sapien
gccttttttagcttggtgatgcgag

SEQ ID NO: 640366 - DNA, 25 bp, Homo sapien
tttagcttggtgatgcgagccacag

SEQ ID NO: 640367 - DNA, 25 bp, Homo sapien
ttagcttggtgatgcgagccacaga

SEQ ID NO: 640368 - DNA, 25 bp, Homo sapien
agccttcgccttttttagcttggtg

SEQ ID NO: 640369 - DNA, 25 bp, Homo sapien
tccccagtgacagcagatctcatcg

SEQ ID NO: 640370 - DNA, 25 bp, Homo sapien
gatctcatcgtatctgtcgctgtaa

SEQ ID NO: 640371 - DNA, 25 bp, Homo sapien
catcgtatctgtcgctgtaattggt

SEQ ID NO: 640372 - DNA, 25 bp, Homo sapien
tctcatcgtatctgtcgctgtaatt

SEQ ID NO: 640373 - DNA, 25 bp, Homo sapien
ctcttcttgtggactagaagtccca

SEQ ID NO: 640374 - DNA, 25 bp, Homo sapien
gtggtgcctctcttcttgtggacta

SEQ ID NO: 640375 - DNA, 25 bp, Homo sapien
gcctctcttcttgtggactagaagt

SEQ ID NO: 640376 - DNA, 25 bp, Homo sapien
cagcagtggtgcctctcttcttgtg

SEQ ID NO: 640377 - DNA, 25 bp, Homo sapien
caggtcggtgattggccttcttctc

SEQ ID NO: 640378 - DNA, 25 bp, Homo sapien
ttctcttactctatgtagactccag

SEQ ID NO: 640379 - DNA, 25 bp, Homo sapien
tactctatgtagactccagcctaca

SEQ ID NO: 640380 - DNA, 25 bp, Homo sapien
gctaggaattccaggtcggtgattg

SEQ ID NO: 640381 - DNA, 25 bp, Homo sapien
tctagcccagcaggatatttcacaa

SEQ ID NO: 640382 - DNA, 25 bp, Homo sapien
tgagttagctccacggcttgctgac

SEQ ID NO: 640383 - DNA, 25 bp, Homo sapien
ttcctccaaagcagcggtcaagatc

SEQ ID NO: 640384 - DNA, 25 bp, Homo sapien
caagatctgagttagctccacggct

SEQ ID NO: 640385 - DNA, 25 bp, Homo sapien
gagcagtcaatctctcctgtggacc

SEQ ID NO: 640386 - DNA, 25 bp, Homo sapien
tgttctaaggcatcctgagatccgc

SEQ ID NO: 640387 - DNA, 25 bp, Homo sapien
tgttgggagcagtcaatctctcctg

SEQ ID NO: 640388 - DNA, 25 bp, Homo sapien
taaggcatcctgagatccgcagagg

SEQ ID NO: 640389 - DNA, 25 bp, Homo sapien
caattactcaaaggattcttgatga

SEQ ID NO: 640390 - DNA, 25 bp, Homo sapien
aattactcaaaggattcttgatgat

SEQ ID NO: 640391 - DNA, 25 bp, Homo sapien
attactcaaaggattcttgatgatg

SEQ ID NO: 640392 - DNA, 25 bp, Homo sapien
tcaattactcaaaggattcttgatg

SEQ ID NO: 640393 - DNA, 25 bp, Homo sapien
tgccacgactgtccatgtcatcatc

SEQ ID NO: 640394 - DNA, 25 bp, Homo sapien
tccaatgccacgactgtccatgtca

SEQ ID NO: 640395 - DNA, 25 bp, Homo sapien
tctccaatgccacgactgtccatgt

SEQ ID NO: 640396 - DNA, 25 bp, Homo sapien
aatgccacgactgtccatgtcatca

SEQ ID NO: 640397 - DNA, 25 bp, Homo sapien
taaaagacaggacccataaccatgg

SEQ ID NO: 640398 - DNA, 25 bp, Homo sapien
caggacccataaccatggcccagat

SEQ ID NO: 640399 - DNA, 25 bp, Homo sapien
agacaggacccataaccatggccca

SEQ ID NO: 640400 - DNA, 25 bp, Homo sapien
cttaaaagacaggacccataaccat

SEQ ID NO: 640401 - DNA, 25 bp, Homo sapien
tcatcatgcaggtttgttcttctaa

SEQ ID NO: 640402 - DNA, 25 bp, Homo sapien
ggaacaggaccccactgaggacaat

SEQ ID NO: 640403 - DNA, 25 bp, Homo sapien
acaccagtggtacgaggagacccta

SEQ ID NO: 640404 - DNA, 25 bp, Homo sapien
tgcctatgccactgatgcacaatgt

SEQ ID NO: 640405 - DNA, 25 bp, Homo sapien
gtccctccaggcacacagatactat

SEQ ID NO: 640406 - DNA, 25 bp, Homo sapien
ccatggtatgttgcccttgcaaaca

SEQ ID NO: 640407 - DNA, 25 bp, Homo sapien
actgctttgattggttgccaatctc

SEQ ID NO: 640408 - DNA, 25 bp, Homo sapien
cactgctttgattggttgccaatct

SEQ ID NO: 640409 - DNA, 25 bp, Homo sapien
ctgctttgattggttgccaatctct

SEQ ID NO: 640410 - DNA, 25 bp, Homo sapien
tcaagtggcaaagctgttgccattg

SEQ ID NO: 640411 - DNA, 25 bp, Homo sapien
caagtggcaaagctgttgccattgg

SEQ ID NO: 640412 - DNA, 25 bp, Homo sapien
agtgtcgaacctgatgaagtcagta

SEQ ID NO: 640413 - DNA, 25 bp, Homo sapien
taccagtgtcgaacctgatgaagtc

SEQ ID NO: 640414 - DNA, 25 bp, Homo sapien
gttaccagtgtcgaacctgatgaag

SEQ ID NO: 640415 - DNA, 25 bp, Homo sapien
ccagtgtcgaacctgatgaagtcag

SEQ ID NO: 640416 - DNA, 25 bp, Homo sapien
ttttgtgcgcacaaatattttttct

SEQ ID NO: 640417 - DNA, 25 bp, Homo sapien
attttttctcacttttcacaacttg

SEQ ID NO: 640418 - DNA, 25 bp, Homo sapien
ggcctcctcaggtgtaatacgatgt

SEQ ID NO: 640419 - DNA, 25 bp, Homo sapien
gtaatacgatgtacagcaaagtgac

SEQ ID NO: 640420 - DNA, 25 bp, Homo sapien
catgcaaatcttctttacttcctct

SEQ ID NO: 640421 - DNA, 25 bp, Homo sapien
atcagtgcggaccttgccatcgatc

SEQ ID NO: 640422 - DNA, 25 bp, Homo sapien
tacttcctctcctgtcagggcatac

SEQ ID NO: 640423 - DNA, 25 bp, Homo sapien
gtaggttatatcagtgcggaccttg

SEQ ID NO: 640424 - DNA, 25 bp, Homo sapien
ttggagctgctacctgctttagatg

SEQ ID NO: 640425 - DNA, 25 bp, Homo sapien
tgctttggagctgctacctgcttta

SEQ ID NO: 640426 - DNA, 25 bp, Homo sapien
tacctgctttagatgcttcttggga

SEQ ID NO: 640427 - DNA, 25 bp, Homo sapien
ctacctgctttagatgcttcttggg

SEQ ID NO: 640428 - DNA, 25 bp, Homo sapien
gggttttgtcctgatccatcagtga

SEQ ID NO: 640429 - DNA, 25 bp, Homo sapien
gggccacttctcatgccttactgaa

SEQ ID NO: 640430 - DNA, 25 bp, Homo sapien
gacagcagcccggtggtaatgcctg

SEQ ID NO: 640431 - DNA, 25 bp, Homo sapien
taaagtggccttgattgatgtttgt

SEQ ID NO: 640432 - DNA, 25 bp, Homo sapien
ctgctggaggaggtgatccaagtat

SEQ ID NO: 640433 - DNA, 25 bp, Homo sapien
acaggcaggaaaatgtccacagtgt

SEQ ID NO: 640434 - DNA, 25 bp, Homo sapien
agacaggcaggaaaatgtccacagt

SEQ ID NO: 640435 - DNA, 25 bp, Homo sapien
tgtctgctggaggaggtgatccaag

SEQ ID NO: 640436 - DNA, 25 bp, Homo sapien
ggtaatgacctgaacttagcatttc

SEQ ID NO: 640437 - DNA, 25 bp, Homo sapien
gaatatactcagcaggacggtgcat

SEQ ID NO: 640438 - DNA, 25 bp, Homo sapien
cttctatggagtgcagaagtccatg

SEQ ID NO: 640439 - DNA, 25 bp, Homo sapien
tagcatttcatcagacttggtgatg

SEQ ID NO: 640440 - DNA, 25 bp, Homo sapien
caactgatgcaagtgttcaagcgaa

SEQ ID NO: 640441 - DNA, 25 bp, Homo sapien
gagctttgggccgaatttccaatta

SEQ ID NO: 640442 - DNA, 25 bp, Homo sapien
ggtcagtgtcctttctacgcctcaa

SEQ ID NO: 640443 - DNA, 25 bp, Homo sapien
cacccgcaggcggtatcaactgatg

SEQ ID NO: 640444 - DNA, 25 bp, Homo sapien
aatacctttgcctggatacctctgg

SEQ ID NO: 640445 - DNA, 25 bp, Homo sapien
ccaggtttgttaggaggccacatga

SEQ ID NO: 640446 - DNA, 25 bp, Homo sapien
tcatgagccgttgctaatgccaggc

SEQ ID NO: 640447 - DNA, 25 bp, Homo sapien
tagacctgagatgctggtcaagccc

SEQ ID NO: 640448 - DNA, 25 bp, Homo sapien
cttttgcgtggtccttaggcttaca

SEQ ID NO: 640449 - DNA, 25 bp, Homo sapien
taggcttacaatgtgcactgaatcg

SEQ ID NO: 640450 - DNA, 25 bp, Homo sapien
tgcataggacagacttaggagtttt

SEQ ID NO: 640451 - DNA, 25 bp, Homo sapien
tggacaccattaacaggtctttgaa

SEQ ID NO: 640452 - DNA, 25 bp, Homo sapien
gaatgtgcacttgaatctgcaggtc

SEQ ID NO: 640453 - DNA, 25 bp, Homo sapien
tcatcctgaactaataaccgcgtta

SEQ ID NO: 640454 - DNA, 25 bp, Homo sapien
gcaggtcctgactgtaggtctgtgt

SEQ ID NO: 640455 - DNA, 25 bp, Homo sapien
ataaccgcgttatgtccatcctttg

SEQ ID NO: 640456 - DNA, 25 bp, Homo sapien
gccaggactggggttcacgtcactg

SEQ ID NO: 640457 - DNA, 25 bp, Homo sapien
ggttcacgtcactgccagagctaca

SEQ ID NO: 640458 - DNA, 25 bp, Homo sapien
cactgggcacatggaggagacgtcc

SEQ ID NO: 640459 - DNA, 25 bp, Homo sapien
tcgccttctgcttccacggtcctgt

SEQ ID NO: 640460 - DNA, 25 bp, Homo sapien
gtttattcctgtcgtgcccaagcca

SEQ ID NO: 640461 - DNA, 25 bp, Homo sapien
gctgaagtcatctcaaccgggaggc

SEQ ID NO: 640462 - DNA, 25 bp, Homo sapien
tctatgatgtaaatggtgacccagc

SEQ ID NO: 640463 - DNA, 25 bp, Homo sapien
tagtgtaccagctctatgcccgagt

SEQ ID NO: 640464 - DNA, 25 bp, Homo sapien
tattgcatgcctggcagtccactgg

SEQ ID NO: 640465 - DNA, 25 bp, Homo sapien
aaaaagaaaacaagactatgctgca

SEQ ID NO: 640466 - DNA, 25 bp, Homo sapien
gacatgggaattagcaagaaaggtt

SEQ ID NO: 640467 - DNA, 25 bp, Homo sapien
gtttgctagagaagggaagtctgaa

SEQ ID NO: 640468 - DNA, 25 bp, Homo sapien
tcaaggagctgcaagcggtccagta

SEQ ID NO: 640469 - DNA, 25 bp, Homo sapien
gtggattccacgatcaggcttgcat

SEQ ID NO: 640470 - DNA, 25 bp, Homo sapien
gaagcacttcgcaaaccataacggg

SEQ ID NO: 640471 - DNA, 25 bp, Homo sapien
taacgggcacacaaattccctggga

SEQ ID NO: 640472 - DNA, 25 bp, Homo sapien
catcagattggacttcgctgcaagt

SEQ ID NO: 640473 - DNA, 25 bp, Homo sapien
cactgggatctgaattcgaagttat

SEQ ID NO: 640474 - DNA, 25 bp, Homo sapien
cttccatgggaattcctaattcagc

SEQ ID NO: 640475 - DNA, 25 bp, Homo sapien
gctcttcctttgacacacagaaaat

SEQ ID NO: 640476 - DNA, 25 bp, Homo sapien
aatgttttcattctcgtgacaattc

SEQ ID NO: 640477 - DNA, 25 bp, Homo sapien
actaagagcttgatgcaataatcca

SEQ ID NO: 640478 - DNA, 25 bp, Homo sapien
aagcttgtctggattacttaatgga

SEQ ID NO: 640479 - DNA, 25 bp, Homo sapien
gtattggtgaaactggctcgaaagg

SEQ ID NO: 640480 - DNA, 25 bp, Homo sapien
gagatgtccaatgcctgtctgaggc

SEQ ID NO: 640481 - DNA, 25 bp, Homo sapien
ttgctcttggagatgtccaatgcct

SEQ ID NO: 640482 - DNA, 25 bp, Homo sapien
cactggtctatgaggagttgaactt

SEQ ID NO: 640483 - DNA, 25 bp, Homo sapien
gaggagttgaacttgttgctcttgg

SEQ ID NO: 640484 - DNA, 25 bp, Homo sapien
acaggaagcaacagggtctccaggt

SEQ ID NO: 640485 - DNA, 25 bp, Homo sapien
gaagatatggctagtatctccagag

SEQ ID NO: 640486 - DNA, 25 bp, Homo sapien
cccaaagttgtaagactgagtgcct

SEQ ID NO: 640487 - DNA, 25 bp, Homo sapien
tccagagtctactgtctcagagagg

SEQ ID NO: 640488 - DNA, 25 bp, Homo sapien
aagcccaaaaacaatccaggtggtg

SEQ ID NO: 640489 - DNA, 25 bp, Homo sapien
ggtcatggatcctcaacaaattgca

SEQ ID NO: 640490 - DNA, 25 bp, Homo sapien
ggaagaaagcgatccctaccgtcta

SEQ ID NO: 640491 - DNA, 25 bp, Homo sapien
cctttaagggcatttcaccatgcat

SEQ ID NO: 640492 - DNA, 25 bp, Homo sapien
gaggcctttcacaggctagactctg

SEQ ID NO: 640493 - DNA, 25 bp, Homo sapien
cttccataatcctgatgtgctccat

SEQ ID NO: 640494 - DNA, 25 bp, Homo sapien
tgtgaggtaactagcccccttggca

SEQ ID NO: 640495 - DNA, 25 bp, Homo sapien
acatgtcccgtagtgaactatgagc

SEQ ID NO: 640496 - DNA, 25 bp, Homo sapien
ggagaccttttctaagatcctatgt

SEQ ID NO: 640497 - DNA, 25 bp, Homo sapien
gagaatccctactcacacctcagga

SEQ ID NO: 640498 - DNA, 25 bp, Homo sapien
cctgcgtttggtcgccttgctctcc

SEQ ID NO: 640499 - DNA, 25 bp, Homo sapien
gcgtttggtcgccttgctctcctct

SEQ ID NO: 640500 - DNA, 25 bp, Homo sapien
tgcagctggcacccaatctttccag

SEQ ID NO: 640501 - DNA, 25 bp, Homo sapien
cacccaatctttccaggctgtctct

SEQ ID NO: 640502 - DNA, 25 bp, Homo sapien
cagaaatggctaatggagccccaaa

SEQ ID NO: 640503 - DNA, 25 bp, Homo sapien
ggtgttaggtcaacccaaagacaga

SEQ ID NO: 640504 - DNA, 25 bp, Homo sapien
gcaggtctgtcatcatagccgcgtt

SEQ ID NO: 640505 - DNA, 25 bp, Homo sapien
tgaccttcaccagtcaggagtctgg

SEQ ID NO: 640506 - DNA, 25 bp, Homo sapien
aacacctttccatgagagcaaagtg

SEQ ID NO: 640507 - DNA, 25 bp, Homo sapien
aggtgaggatgaagattgtccagag

SEQ ID NO: 640508 - DNA, 25 bp, Homo sapien
ccaaggcacaactgccaacaccttt

SEQ ID NO: 640509 - DNA, 25 bp, Homo sapien
tgaggatgaagattgtccagaggaa

SEQ ID NO: 640510 - DNA, 25 bp, Homo sapien
ggaaggatgttgtaagataccccac

SEQ ID NO: 640511 - DNA, 25 bp, Homo sapien
cagggaaggatgttgtaagataccc

SEQ ID NO: 640512 - DNA, 25 bp, Homo sapien
gggaaggatgttgtaagatacccca

SEQ ID NO: 640513 - DNA, 25 bp, Homo sapien
ggtgctgttgaccccatagatggct

SEQ ID NO: 640514 - DNA, 25 bp, Homo sapien
catcaagggcagcttagaggggctt

SEQ ID NO: 640515 - DNA, 25 bp, Homo sapien
caagggcagcttagaggggcttagt

SEQ ID NO: 640516 - DNA, 25 bp, Homo sapien
gagggtaggtggcatcaagggcagc

SEQ ID NO: 640517 - DNA, 25 bp, Homo sapien
taggtggcatcaagggcagcttaga

SEQ ID NO: 640518 - DNA, 25 bp, Homo sapien
gctctttggccaactcatagggtga

SEQ ID NO: 640519 - DNA, 25 bp, Homo sapien
tatggctgctgcttaaaaacttctc

SEQ ID NO: 640520 - DNA, 25 bp, Homo sapien
gccagtgggcctacctaccatttta

SEQ ID NO: 640521 - DNA, 25 bp, Homo sapien
caatccaggacttatggtctctgcc

SEQ ID NO: 640522 - DNA, 25 bp, Homo sapien
catgtaccatcgctgaaaggcaagt

SEQ ID NO: 640523 - DNA, 25 bp, Homo sapien
taagaatacttcacaaggctaaaac

SEQ ID NO: 640524 - DNA, 25 bp, Homo sapien
tgtgtaagttcagaaccaaacgttg

SEQ ID NO: 640525 - DNA, 25 bp, Homo sapien
tgaggccctgtcagattatgttaga

SEQ ID NO: 640526 - DNA, 25 bp, Homo sapien
gagttcaaaactgcaagaccatgtg

SEQ ID NO: 640527 - DNA, 25 bp, Homo sapien
tcttcacgtcatggtttggccgctg

SEQ ID NO: 640528 - DNA, 25 bp, Homo sapien
gaaatcgctgtccagtaagagctag

SEQ ID NO: 640529 - DNA, 25 bp, Homo sapien
ggaaagtgatctggccaactggaca

SEQ ID NO: 640530 - DNA, 25 bp, Homo sapien
cagcttgcagaagcccttctgggct

SEQ ID NO: 640531 - DNA, 25 bp, Homo sapien
tgtgcagcttgcagaagcccttctg

SEQ ID NO: 640532 - DNA, 25 bp, Homo sapien
cccagttctgtgcagcttgcagaag

SEQ ID NO: 640533 - DNA, 25 bp, Homo sapien
gcagaagcccttctgggcttccact

SEQ ID NO: 640534 - DNA, 25 bp, Homo sapien
gacttgctataaaacccttggcgaa

SEQ ID NO: 640535 - DNA, 25 bp, Homo sapien
caagaagccataggtatgaatcggg

SEQ ID NO: 640536 - DNA, 25 bp, Homo sapien
gtgagccttctcaagaagccatagg

SEQ ID NO: 640537 - DNA, 25 bp, Homo sapien
agtctacgttaagaccacagctgtg

SEQ ID NO: 640538 - DNA, 25 bp, Homo sapien
tcaactgcccagctctgcaaacatt

SEQ ID NO: 640539 - DNA, 25 bp, Homo sapien
taaagatcacataggtggctgctca

SEQ ID NO: 640540 - DNA, 25 bp, Homo sapien
gaaagaaagtgcctagcttcctggg

SEQ ID NO: 640541 - DNA, 25 bp, Homo sapien
tcaccaggtggcctaaagagcttcc

SEQ ID NO: 640542 - DNA, 25 bp, Homo sapien
tcaaggaagcgccatagagacaggc

SEQ ID NO: 640543 - DNA, 25 bp, Homo sapien
tgttgctggggtctcggctatctcc

SEQ ID NO: 640544 - DNA, 25 bp, Homo sapien
gcctctgtcgaatcattagccggag

SEQ ID NO: 640545 - DNA, 25 bp, Homo sapien
aatcattagccggagcacggtgtac

SEQ ID NO: 640546 - DNA, 25 bp, Homo sapien
gggtctcggctatctcctccagcct

SEQ ID NO: 640547 - DNA, 25 bp, Homo sapien
aaagccgagactcaggcccatgcag

SEQ ID NO: 640548 - DNA, 25 bp, Homo sapien
aagaaagccgagactcaggcccatg

SEQ ID NO: 640549 - DNA, 25 bp, Homo sapien
ccggcatctcgaactttatatactg

SEQ ID NO: 640550 - DNA, 25 bp, Homo sapien
gtaccggcatctcgaactttatata

SEQ ID NO: 640551 - DNA, 25 bp, Homo sapien
agcttttaagtaccggcatctcgaa

SEQ ID NO: 640552 - DNA, 25 bp, Homo sapien
ctgaatgaagcttttaagtaccggc

SEQ ID NO: 640553 - DNA, 25 bp, Homo sapien
tccattaggaacactttggagatct

SEQ ID NO: 640554 - DNA, 25 bp, Homo sapien
gtcgtaggtgacttcctccacctgg

SEQ ID NO: 640555 - DNA, 25 bp, Homo sapien
ttctccattaggaacactttggaga

SEQ ID NO: 640556 - DNA, 25 bp, Homo sapien
tggtccttctccattaggaacactt

SEQ ID NO: 640557 - DNA, 25 bp, Homo sapien
gcaatcagcgggtaatcggtggcct

SEQ ID NO: 640558 - DNA, 25 bp, Homo sapien
aggattcgggcaatcagcgggtaat

SEQ ID NO: 640559 - DNA, 25 bp, Homo sapien
gcgggtaatcggtggccttcagctt

SEQ ID NO: 640560 - DNA, 25 bp, Homo sapien
ttcgggcaatcagcgggtaatcggt

SEQ ID NO: 640561 - DNA, 25 bp, Homo sapien
tcgtatggaccacgtacaaggcaaa

SEQ ID NO: 640562 - DNA, 25 bp, Homo sapien
caccactcgtatggaccacgtacaa

SEQ ID NO: 640563 - DNA, 25 bp, Homo sapien
caaactcctctgctgaattctcaat

SEQ ID NO: 640564 - DNA, 25 bp, Homo sapien
gaccacgtacaaggcaaactcctct

SEQ ID NO: 640565 - DNA, 25 bp, Homo sapien
aagcaggagcaaaagattcttgttg

SEQ ID NO: 640566 - DNA, 25 bp, Homo sapien
tgaagcaggagcaaaagattcttgt

SEQ ID NO: 640567 - DNA, 25 bp, Homo sapien
gagcaaaagattcttgttgaaagtt

SEQ ID NO: 640568 - DNA, 25 bp, Homo sapien
caggagcaaaagattcttgttgaaa

SEQ ID NO: 640569 - DNA, 25 bp, Homo sapien
cattttatgatgacgaagcagaggc

SEQ ID NO: 640570 - DNA, 25 bp, Homo sapien
cctgcaggcttgttagacggcgtcc

SEQ ID NO: 640571 - DNA, 25 bp, Homo sapien
gaagtcaatcttcgcactgagccca

SEQ ID NO: 640572 - DNA, 25 bp, Homo sapien
tatcgtctattgcaatgtgccaggc

SEQ ID NO: 640573 - DNA, 25 bp, Homo sapien
atttgttgagcagcagcttcaggac

SEQ ID NO: 640574 - DNA, 25 bp, Homo sapien
aaatttgttgagcagcagcttcagg

SEQ ID NO: 640575 - DNA, 25 bp, Homo sapien
taaatttgttgagcagcagcttcag

SEQ ID NO: 640576 - DNA, 25 bp, Homo sapien
cttaaatttgttgagcagcagcttc

SEQ ID NO: 640577 - DNA, 25 bp, Homo sapien
tcatggtgctgttgatgcggacgtt

SEQ ID NO: 640578 - DNA, 25 bp, Homo sapien
tgcggacgttggtgacagagccata

SEQ ID NO: 640579 - DNA, 25 bp, Homo sapien
acgttggtgacagagccataggctg

SEQ ID NO: 640580 - DNA, 25 bp, Homo sapien
tgatgcggacgttggtgacagagcc

SEQ ID NO: 640581 - DNA, 25 bp, Homo sapien
tctgattcgccgctggtcactaggc

SEQ ID NO: 640582 - DNA, 25 bp, Homo sapien
caacatcactgcgtgtgcgcatcag

SEQ ID NO: 640583 - DNA, 25 bp, Homo sapien
tagaaatggccgttgatggagaagc

SEQ ID NO: 640584 - DNA, 25 bp, Homo sapien
aggcgtcctcacattgccacggcga

SEQ ID NO: 640585 - DNA, 25 bp, Homo sapien
tccggcggggcatccacctctgaga

SEQ ID NO: 640586 - DNA, 25 bp, Homo sapien
actttgggcacagtcaggggcttca

SEQ ID NO: 640587 - DNA, 25 bp, Homo sapien
acctctgagatctgaactttgggca

SEQ ID NO: 640588 - DNA, 25 bp, Homo sapien
ggcatccacctctgagatctgaact

SEQ ID NO: 640589 - DNA, 25 bp, Homo sapien
cagggtaagattccagtttagactc

SEQ ID NO: 640590 - DNA, 25 bp, Homo sapien
ggaaaactctaatagtggccattcg

SEQ ID NO: 640591 - DNA, 25 bp, Homo sapien
tcgttttgcagggtaagattccagt

SEQ ID NO: 640592 - DNA, 25 bp, Homo sapien
aatagtggccattcgttttgcaggg

SEQ ID NO: 640593 - DNA, 25 bp, Homo sapien
gaccgaaggaccctttagcagccca

SEQ ID NO: 640594 - DNA, 25 bp, Homo sapien
ggccacaggctcaaacgaaatctta

SEQ ID NO: 640595 - DNA, 25 bp, Homo sapien
aggaccagcttgatgccgcagagaa

SEQ ID NO: 640596 - DNA, 25 bp, Homo sapien
tcaggatccttcttaagacagcagt

SEQ ID NO: 640597 - DNA, 25 bp, Homo sapien
gggaacttagactaccaccatctca

SEQ ID NO: 640598 - DNA, 25 bp, Homo sapien
ccagcccttctggtgggaacttaga

SEQ ID NO: 640599 - DNA, 25 bp, Homo sapien
catttggcggcgcatttggcggctt

SEQ ID NO: 640600 - DNA, 25 bp, Homo sapien
gcggcttattcagccatggaggata

SEQ ID NO: 640601 - DNA, 25 bp, Homo sapien
taggttcccccaagattcagagagc

SEQ ID NO: 640602 - DNA, 25 bp, Homo sapien
gttagaaatatacaggctgggcctc

SEQ ID NO: 640603 - DNA, 25 bp, Homo sapien
cagagagctttggtcagaaggttca

SEQ ID NO: 640604 - DNA, 25 bp, Homo sapien
gatctcgcttggctgactctgacag

SEQ ID NO: 640605 - DNA, 25 bp, Homo sapien
cgaatgcgttcgttgtcatcctgca

SEQ ID NO: 640606 - DNA, 25 bp, Homo sapien
ccaggagatgttcaggagcccctcc

SEQ ID NO: 640607 - DNA, 25 bp, Homo sapien
aggagcccctccacaatgaactcgt

SEQ ID NO: 640608 - DNA, 25 bp, Homo sapien
gcatctgcaggcgaatgggccggcg

SEQ ID NO: 640609 - DNA, 25 bp, Homo sapien
ggactctcactagcaacctaaataa

SEQ ID NO: 640610 - DNA, 25 bp, Homo sapien
aggacacatggtgacaagccctgga

SEQ ID NO: 640611 - DNA, 25 bp, Homo sapien
aggcagggttctcttgggacctcag

SEQ ID NO: 640612 - DNA, 25 bp, Homo sapien
aaactgggcctggagtcttcttcca

SEQ ID NO: 640613 - DNA, 25 bp, Homo sapien
gtgccggagctgtaaattctggcct

SEQ ID NO: 640614 - DNA, 25 bp, Homo sapien
tgccggagctgtaaattctggcctt

SEQ ID NO: 640615 - DNA, 25 bp, Homo sapien
cggtgccggagctgtaaattctggc

SEQ ID NO: 640616 - DNA, 25 bp, Homo sapien
ggtgccggagctgtaaattctggcc

SEQ ID NO: 640617 - DNA, 25 bp, Homo sapien
cttcagatgcaagagaagttcattt

SEQ ID NO: 640618 - DNA, 25 bp, Homo sapien
taatgataggccttcacaagactca

SEQ ID NO: 640619 - DNA, 25 bp, Homo sapien
tcaagcacgctgtgagtgaggaaag

SEQ ID NO: 640620 - DNA, 25 bp, Homo sapien
tggattcactgaggcgagcacttca

SEQ ID NO: 640621 - DNA, 25 bp, Homo sapien
tcaaagtcaagagtgagcaccaccc

SEQ ID NO: 640622 - DNA, 25 bp, Homo sapien
gtttggtacttttgaacacacagat

SEQ ID NO: 640623 - DNA, 25 bp, Homo sapien
cgtttggtacttttgaacacacaga

SEQ ID NO: 640624 - DNA, 25 bp, Homo sapien
gccgtttggtacttttgaacacaca

SEQ ID NO: 640625 - DNA, 25 bp, Homo sapien
ccgtttggtacttttgaacacacag

SEQ ID NO: 640626 - DNA, 25 bp, Homo sapien
ctgatatacagtggggggccctctg

SEQ ID NO: 640627 - DNA, 25 bp, Homo sapien
ggagccccaccagtctgatatacag

SEQ ID NO: 640628 - DNA, 25 bp, Homo sapien
aagtccaagttcagctgcttggctc

SEQ ID NO: 640629 - DNA, 25 bp, Homo sapien
gccccaccagtctgatatacagtgg

SEQ ID NO: 640630 - DNA, 25 bp, Homo sapien
ccacatgggactagggacgtttggt

SEQ ID NO: 640631 - DNA, 25 bp, Homo sapien
aaatgtatttatcttgtccacatgg

SEQ ID NO: 640632 - DNA, 25 bp, Homo sapien
ttgtccacatgggactagggacgtt

SEQ ID NO: 640633 - DNA, 25 bp, Homo sapien
aatgtatttatcttgtccacatggg

SEQ ID NO: 640634 - DNA, 25 bp, Homo sapien
ctttctcttttcatcggaaggagag

SEQ ID NO: 640635 - DNA, 25 bp, Homo sapien
tttctcttttcatcggaaggagagg

SEQ ID NO: 640636 - DNA, 25 bp, Homo sapien
aaaaaaggaaagtcgagctagtgag

SEQ ID NO: 640637 - DNA, 25 bp, Homo sapien
ataatctgatcatgaaaaccggagt

SEQ ID NO: 640638 - DNA, 25 bp, Homo sapien
aagtcgagctagtgagaaagctttc

SEQ ID NO: 640639 - DNA, 25 bp, Homo sapien
gtacacatgtaacgcgcaaaaagaa

SEQ ID NO: 640640 - DNA, 25 bp, Homo sapien
ttggggaaagggtgtgctgccggat

SEQ ID NO: 640641 - DNA, 25 bp, Homo sapien
aaagggtgtgctgccggatgaaacg

SEQ ID NO: 640642 - DNA, 25 bp, Homo sapien
ggtgtgctgccggatgaaacgtggg

SEQ ID NO: 640643 - DNA, 25 bp, Homo sapien
gggaaagggtgtgctgccggatgaa

SEQ ID NO: 640644 - DNA, 25 bp, Homo sapien
gaggtgccaccttcacagttgctga

SEQ ID NO: 640645 - DNA, 25 bp, Homo sapien
aacttccagtgcagataaccagaag

SEQ ID NO: 640646 - DNA, 25 bp, Homo sapien
cagtgcagataaccagaagtacagc

SEQ ID NO: 640647 - DNA, 25 bp, Homo sapien
ctgctggcgaggaccgcaacgtagg

SEQ ID NO: 640648 - DNA, 25 bp, Homo sapien
ctttgcctccaacataacctatcat

SEQ ID NO: 640649 - DNA, 25 bp, Homo sapien
aggactctctctttcgttctttgcc

SEQ ID NO: 640650 - DNA, 25 bp, Homo sapien
ctctttcgttctttgcctccaacat

SEQ ID NO: 640651 - DNA, 25 bp, Homo sapien
caattgaattttctccaggactctc

SEQ ID NO: 640652 - DNA, 25 bp, Homo sapien
aggtgtgagctatctctcaaaaatc

SEQ ID NO: 640653 - DNA, 25 bp, Homo sapien
ggtgtgagctatctctcaaaaatca

SEQ ID NO: 640654 - DNA, 25 bp, Homo sapien
cagcagttgcatgaaggatcctttc

SEQ ID NO: 640655 - DNA, 25 bp, Homo sapien
gattgaagcaactactgggtctgtc

SEQ ID NO: 640656 - DNA, 25 bp, Homo sapien
aattctcaggaaacgtgtgccgcta

SEQ ID NO: 640657 - DNA, 25 bp, Homo sapien
cactctcaagttgggaggaaacagc

SEQ ID NO: 640658 - DNA, 25 bp, Homo sapien
aaattcagagcgcttagccactaat

SEQ ID NO: 640659 - DNA, 25 bp, Homo sapien
tagccactaatcagagaggcagggc

SEQ ID NO: 640660 - DNA, 25 bp, Homo sapien
gagcgcttagccactaatcagagag

SEQ ID NO: 640661 - DNA, 25 bp, Homo sapien
ctttaggatggatgttgcagaagga

SEQ ID NO: 640662 - DNA, 25 bp, Homo sapien
ataagttaaagcctgtcttaggttg

SEQ ID NO: 640663 - DNA, 25 bp, Homo sapien
cccaaaagtagatcgtgaaacaaga

SEQ ID NO: 640664 - DNA, 25 bp, Homo sapien
tggtttcacccaaaagtagatcgtg

SEQ ID NO: 640665 - DNA, 25 bp, Homo sapien
aactataagttaaagcctgtcttag

SEQ ID NO: 640666 - DNA, 25 bp, Homo sapien
ttcggtcctgcaagggaattcttag

SEQ ID NO: 640667 - DNA, 25 bp, Homo sapien
cactatgagcaattgagattcggtc

SEQ ID NO: 640668 - DNA, 25 bp, Homo sapien
aattgagattcggtcctgcaaggga

SEQ ID NO: 640669 - DNA, 25 bp, Homo sapien
aagtgagcaagctaacactatgagc

SEQ ID NO: 640670 - DNA, 25 bp, Homo sapien
cattcatcatttacaaggtacttac

SEQ ID NO: 640671 - DNA, 25 bp, Homo sapien
ccaggacaaattgttgtttgtcagc

SEQ ID NO: 640672 - DNA, 25 bp, Homo sapien
ctccaggacaaattgttgtttgtca

SEQ ID NO: 640673 - DNA, 25 bp, Homo sapien
aggacaaattgttgtttgtcagctg

SEQ ID NO: 640674 - DNA, 25 bp, Homo sapien
tatatccccaggctgccgtagacac

SEQ ID NO: 640675 - DNA, 25 bp, Homo sapien
ttctaggcgccgggattccagatac

SEQ ID NO: 640676 - DNA, 25 bp, Homo sapien
agcctttgctctcccgaaaaacacg

SEQ ID NO: 640677 - DNA, 25 bp, Homo sapien
ccaggctgccgtagacacagccttt

SEQ ID NO: 640678 - DNA, 25 bp, Homo sapien
tcctatcactgaggcgcagaggtgc

SEQ ID NO: 640679 - DNA, 25 bp, Homo sapien
tgggaaatagagtgcacgcagctgt

SEQ ID NO: 640680 - DNA, 25 bp, Homo sapien
gaggcctcgcgcttggcttctccta

SEQ ID NO: 640681 - DNA, 25 bp, Homo sapien
gcgcccgaggtgaaacagaaccctc

SEQ ID NO: 640682 - DNA, 25 bp, Homo sapien
cccgcgccagtgcctcgctcccagt

SEQ ID NO: 640683 - DNA, 25 bp, Homo sapien
ccgcgccagtgcctcgctcccagtg

SEQ ID NO: 640684 - DNA, 25 bp, Homo sapien
ttgcgccgggcatcccgcgccagtg

SEQ ID NO: 640685 - DNA, 25 bp, Homo sapien
cttgcgccgggcatcccgcgccagt

SEQ ID NO: 640686 - DNA, 25 bp, Homo sapien
atcggcgggccgggctcaaatccag

SEQ ID NO: 640687 - DNA, 25 bp, Homo sapien
caggaaccgtggagttggaaagtgg

SEQ ID NO: 640688 - DNA, 25 bp, Homo sapien
tgcgcctcggccagcgatcggcggg

SEQ ID NO: 640689 - DNA, 25 bp, Homo sapien
cccgcgccgcaggaaccgtggagtt

SEQ ID NO: 640690 - DNA, 25 bp, Homo sapien
ccttcgccttgccttcgcctttctt

SEQ ID NO: 640691 - DNA, 25 bp, Homo sapien
ccaccccttcgccttgccttcgcct

SEQ ID NO: 640692 - DNA, 25 bp, Homo sapien
tttctctcgctcttcatatcactct

SEQ ID NO: 640693 - DNA, 25 bp, Homo sapien
ggatctgctcgtccgctgtcctctc

SEQ ID NO: 640694 - DNA, 25 bp, Homo sapien
caggagagcttttatttgtacggaa

SEQ ID NO: 640695 - DNA, 25 bp, Homo sapien
agagcttttatttgtacggaacagt

SEQ ID NO: 640696 - DNA, 25 bp, Homo sapien
ccaggagagcttttatttgtacgga

SEQ ID NO: 640697 - DNA, 25 bp, Homo sapien
ggagagcttttatttgtacggaaca

SEQ ID NO: 640698 - DNA, 25 bp, Homo sapien
tgcctggaaacacgcacagcaatgc

SEQ ID NO: 640699 - DNA, 25 bp, Homo sapien
ccaaccagaaaggacgggaatgtct

SEQ ID NO: 640700 - DNA, 25 bp, Homo sapien
taggcatccccactgttttaagaac

SEQ ID NO: 640701 - DNA, 25 bp, Homo sapien
actgtcagtaagatggcaacgtggg

SEQ ID NO: 640702 - DNA, 25 bp, Homo sapien
cgttcttgcactactcgggttctga

SEQ ID NO: 640703 - DNA, 25 bp, Homo sapien
tttgcgaatgctcaggcccggagcc

SEQ ID NO: 640704 - DNA, 25 bp, Homo sapien
ggacagagtacaacaggcagcacgt

SEQ ID NO: 640705 - DNA, 25 bp, Homo sapien
aggcagcacgttaagtccctgggct

SEQ ID NO: 640706 - DNA, 25 bp, Homo sapien
caaagccaagaggaggctccctgga

SEQ ID NO: 640707 - DNA, 25 bp, Homo sapien
gtgtgcacagctggcgtccagcgac

SEQ ID NO: 640708 - DNA, 25 bp, Homo sapien
tgcacagctggcgtccagcgacagc

SEQ ID NO: 640709 - DNA, 25 bp, Homo sapien
acagctggcgtccagcgacagccat

SEQ ID NO: 640710 - DNA, 25 bp, Homo sapien
ctgggtgtgcacagctggcgtccag

SEQ ID NO: 640711 - DNA, 25 bp, Homo sapien
tatgcctatagcgagtgtacacccc

SEQ ID NO: 640712 - DNA, 25 bp, Homo sapien
gagtgtacaccccatgcacggccat

SEQ ID NO: 640713 - DNA, 25 bp, Homo sapien
tatagcgagtgtacaccccatgcac

SEQ ID NO: 640714 - DNA, 25 bp, Homo sapien
ccgggcctatgcctatagcgagtgt

SEQ ID NO: 640715 - DNA, 25 bp, Homo sapien
tgaggcttctgctactgctccatat

SEQ ID NO: 640716 - DNA, 25 bp, Homo sapien
cagatgggttctggaatgaggcttc

SEQ ID NO: 640717 - DNA, 25 bp, Homo sapien
cgtattactgaagatgagacttgcc

SEQ ID NO: 640718 - DNA, 25 bp, Homo sapien
cactcccatggcatccgtattactg

SEQ ID NO: 640719 - DNA, 25 bp, Homo sapien
tgtcatgacacagaccgcgagtggc

SEQ ID NO: 640720 - DNA, 25 bp, Homo sapien
gcaacgcaggccaatgatgtgaatg

SEQ ID NO: 640721 - DNA, 25 bp, Homo sapien
gaatatggcatcacctcctgtccgt

SEQ ID NO: 640722 - DNA, 25 bp, Homo sapien
tgtggaaactggagactaaccggcc

SEQ ID NO: 640723 - DNA, 25 bp, Homo sapien
caccttgagtgttatgcagcggaag

SEQ ID NO: 640724 - DNA, 25 bp, Homo sapien
tgtgtgaaggcctacagagggcacc

SEQ ID NO: 640725 - DNA, 25 bp, Homo sapien
cactcaaggctgtgcagaaagtacc

SEQ ID NO: 640726 - DNA, 25 bp, Homo sapien
ggaagacgcccagtcaagctgaaga

SEQ ID NO: 640727 - DNA, 25 bp, Homo sapien
gatctaacggacgtgcgacatggca

SEQ ID NO: 640728 - DNA, 25 bp, Homo sapien
cagtcagtcatgatagcgcaaggca

SEQ ID NO: 640729 - DNA, 25 bp, Homo sapien
caagagaaggtgcagccgagaatca

SEQ ID NO: 640730 - DNA, 25 bp, Homo sapien
aatggacactctcaaagggcaagga

SEQ ID NO: 640731 - DNA, 25 bp, Homo sapien
tgccaaatggcaaattgtacgactc

SEQ ID NO: 640732 - DNA, 25 bp, Homo sapien
tctgaactccggctgttgtcgctct

SEQ ID NO: 640733 - DNA, 25 bp, Homo sapien
gaggcctttccatgtgtagcccaca

SEQ ID NO: 640734 - DNA, 25 bp, Homo sapien
gctgatgggtaagtagctgaagcat

SEQ ID NO: 640735 - DNA, 25 bp, Homo sapien
gatggtgttatccaggataaaagcc

SEQ ID NO: 640736 - DNA, 25 bp, Homo sapien
aacacttgatcgattcctgttatcc

SEQ ID NO: 640737 - DNA, 25 bp, Homo sapien
cagttgtgagaaggacgttcaacac

SEQ ID NO: 640738 - DNA, 25 bp, Homo sapien
ggtgttatccaggataaaagccaca

SEQ ID NO: 640739 - DNA, 25 bp, Homo sapien
gcccaaagaagatcgaaaatccaag

SEQ ID NO: 640740 - DNA, 25 bp, Homo sapien
aatcaatgaactgcaggttagagag

SEQ ID NO: 640741 - DNA, 25 bp, Homo sapien
tctgaggtaacttggaaggacgagc

SEQ ID NO: 640742 - DNA, 25 bp, Homo sapien
gaccagagggttctgtctgaggtaa

SEQ ID NO: 640743 - DNA, 25 bp, Homo sapien
atgagggctgctccgcactgtatca

SEQ ID NO: 640744 - DNA, 25 bp, Homo sapien
acaggatccggaagggacgcaaaga

SEQ ID NO: 640745 - DNA, 25 bp, Homo sapien
ctgaacttcccgatcatgcccagag

SEQ ID NO: 640746 - DNA, 25 bp, Homo sapien
caaagagcgtgcagaacagggctcc

SEQ ID NO: 640747 - DNA, 25 bp, Homo sapien
catctccatgcaaaatcaccgtaag

SEQ ID NO: 640748 - DNA, 25 bp, Homo sapien
tctgtgtctcaaatgcaaaggccac

SEQ ID NO: 640749 - DNA, 25 bp, Homo sapien
agagatacccatggcctggctcgct

SEQ ID NO: 640750 - DNA, 25 bp, Homo sapien
tcaccgtaagttactaaagaacaca

SEQ ID NO: 640751 - DNA, 25 bp, Homo sapien
tgggactatgggcaccagccaccaa

SEQ ID NO: 640752 - DNA, 25 bp, Homo sapien
actatgggcaccagccaccaagcct

SEQ ID NO: 640753 - DNA, 25 bp, Homo sapien
ggactatgggcaccagccaccaagc

SEQ ID NO: 640754 - DNA, 25 bp, Homo sapien
tggctgggactatgggcaccagcca

SEQ ID NO: 640755 - DNA, 25 bp, Homo sapien
ccattcccagtaccaaatatgccat

SEQ ID NO: 640756 - DNA, 25 bp, Homo sapien
taccaaatatgccatcaagaacaca

SEQ ID NO: 640757 - DNA, 25 bp, Homo sapien
tatgccatcaagaacacaggagagg

SEQ ID NO: 640758 - DNA, 25 bp, Homo sapien
tcccagtaccaaatatgccatcaag

SEQ ID NO: 640759 - DNA, 25 bp, Homo sapien
gagtgtttttaaatcaccgcaaatg

SEQ ID NO: 640760 - DNA, 25 bp, Homo sapien
gaagcacatctctaaatcacacgtt

SEQ ID NO: 640761 - DNA, 25 bp, Homo sapien
caaacatgggccgtctatggaaata

SEQ ID NO: 640762 - DNA, 25 bp, Homo sapien
atgaaagcaaaggattttagccaga

SEQ ID NO: 640763 - DNA, 25 bp, Homo sapien
gaacaaagtaacaaggtgctgggac

SEQ ID NO: 640764 - DNA, 25 bp, Homo sapien
ggaattccgttccacgtcatggacg

SEQ ID NO: 640765 - DNA, 25 bp, Homo sapien
taaggcttacagtggtttcgcagag

SEQ ID NO: 640766 - DNA, 25 bp, Homo sapien
tgcatcaaacagtcgctagagtcct

SEQ ID NO: 640767 - DNA, 25 bp, Homo sapien
aggaacttgtcttctcaggaacgta

SEQ ID NO: 640768 - DNA, 25 bp, Homo sapien
tcaggaacttgtcttctcaggaacg

SEQ ID NO: 640769 - DNA, 25 bp, Homo sapien
caggaacttgtcttctcaggaacgt

SEQ ID NO: 640770 - DNA, 25 bp, Homo sapien
ggaacttgtcttctcaggaacgtac

SEQ ID NO: 640771 - DNA, 25 bp, Homo sapien
tcaccaatagactcgatgatgctgg

SEQ ID NO: 640772 - DNA, 25 bp, Homo sapien
gtgcacaggcgtagtagtcaccaat

SEQ ID NO: 640773 - DNA, 25 bp, Homo sapien
atgatgctggcgaccacggcactga

SEQ ID NO: 640774 - DNA, 25 bp, Homo sapien
ggcactgagcatgccgatgacaccg

SEQ ID NO: 640775 - DNA, 25 bp, Homo sapien
aaacaaccatgaatgctcctagaga

SEQ ID NO: 640776 - DNA, 25 bp, Homo sapien
ccatgaatgctcctagagaggcagg

SEQ ID NO: 640777 - DNA, 25 bp, Homo sapien
acaaccatgaatgctcctagagagg

SEQ ID NO: 640778 - DNA, 25 bp, Homo sapien
aaccatgaatgctcctagagaggca

SEQ ID NO: 640779 - DNA, 25 bp, Homo sapien
gccctgccacgttgggaaatttgta

SEQ ID NO: 640780 - DNA, 25 bp, Homo sapien
taaataacaactgaaagtgccctgc

SEQ ID NO: 640781 - DNA, 25 bp, Homo sapien
tttatagccctgctgtacagagcag

SEQ ID NO: 640782 - DNA, 25 bp, Homo sapien
taaggtatggacagtccttctctac

SEQ ID NO: 640783 - DNA, 25 bp, Homo sapien
tcagtccagaccatgcctagtgtac

SEQ ID NO: 640784 - DNA, 25 bp, Homo sapien
gcactgctcaggtattcaaaagccc

SEQ ID NO: 640785 - DNA, 25 bp, Homo sapien
tagctatggagctctggtaccccac

SEQ ID NO: 640786 - DNA, 25 bp, Homo sapien
tagtacgactatatccctggaggtg

SEQ ID NO: 640787 - DNA, 25 bp, Homo sapien
ggttgcttgctaatccccaggctgt

SEQ ID NO: 640788 - DNA, 25 bp, Homo sapien
tcctagcagatccaaaagagacagc

SEQ ID NO: 640789 - DNA, 25 bp, Homo sapien
cagtctgggacaaagacggctgttc

SEQ ID NO: 640790 - DNA, 25 bp, Homo sapien
tggcaaggccttcaggagacagtct

SEQ ID NO: 640791 - DNA, 25 bp, Homo sapien
gggctaccagaagcacgccttgcct

SEQ ID NO: 640792 - DNA, 25 bp, Homo sapien
agcatagaagccatactttgtgctg

SEQ ID NO: 640793 - DNA, 25 bp, Homo sapien
catctgtcaccgtgaagatgaagca

SEQ ID NO: 640794 - DNA, 25 bp, Homo sapien
gcctggcatctgtgcgagcatagaa

SEQ ID NO: 640795 - DNA, 25 bp, Homo sapien
tttgaacagctgtaacttgtacgca

SEQ ID NO: 640796 - DNA, 25 bp, Homo sapien
aatttaacatttctggcgtattgag

SEQ ID NO: 640797 - DNA, 25 bp, Homo sapien
ttgtacgcagtccatcctttcttgg

SEQ ID NO: 640798 - DNA, 25 bp, Homo sapien
tggatttataaatcgggagaggaaa

SEQ ID NO: 640799 - DNA, 25 bp, Homo sapien
catgacatcggtctggtgtcccacg

SEQ ID NO: 640800 - DNA, 25 bp, Homo sapien
cagtccatgacatcggtctggtgtc

SEQ ID NO: 640801 - DNA, 25 bp, Homo sapien
agtccatgacatcggtctggtgtcc

SEQ ID NO: 640802 - DNA, 25 bp, Homo sapien
tccatgacatcggtctggtgtccca

SEQ ID NO: 640803 - DNA, 25 bp, Homo sapien
tggttaaattccagagtaatggaac

SEQ ID NO: 640804 - DNA, 25 bp, Homo sapien
attccagagtaatggaaccatatac

SEQ ID NO: 640805 - DNA, 25 bp, Homo sapien
taaattccagagtaatggaaccata

SEQ ID NO: 640806 - DNA, 25 bp, Homo sapien
gttaaattccagagtaatggaacca

SEQ ID NO: 640807 - DNA, 25 bp, Homo sapien
tacacataatcaactcttaaacatg

SEQ ID NO: 640808 - DNA, 25 bp, Homo sapien
acacataatcaactcttaaacatgc

SEQ ID NO: 640809 - DNA, 25 bp, Homo sapien
cacataatcaactcttaaacatgct

SEQ ID NO: 640810 - DNA, 25 bp, Homo sapien
ctacacataatcaactcttaaacat

SEQ ID NO: 640811 - DNA, 25 bp, Homo sapien
cagacacatagagaatgtgggctct

SEQ ID NO: 640812 - DNA, 25 bp, Homo sapien
catagagaatgtgggctctgtgtta

SEQ ID NO: 640813 - DNA, 25 bp, Homo sapien
gagaatgtgggctctgtgttacaaa

SEQ ID NO: 640814 - DNA, 25 bp, Homo sapien
gacacatagagaatgtgggctctgt

SEQ ID NO: 640815 - DNA, 25 bp, Homo sapien
catgaacatgagacttggcaagacc

SEQ ID NO: 640816 - DNA, 25 bp, Homo sapien
tacaaaaggacaggcactgactagc

SEQ ID NO: 640817 - DNA, 25 bp, Homo sapien
tccccagcacgaagcaaataaagtt

SEQ ID NO: 640818 - DNA, 25 bp, Homo sapien
tgtgtgaatgttcctaaaggctgcc

SEQ ID NO: 640819 - DNA, 25 bp, Homo sapien
gccaattagggccaccgtgggtgta

SEQ ID NO: 640820 - DNA, 25 bp, Homo sapien
ccgatgtacttcagtagagccccag

SEQ ID NO: 640821 - DNA, 25 bp, Homo sapien
cgctgcctggaaaccagagaggcca

SEQ ID NO: 640822 - DNA, 25 bp, Homo sapien
ccgaggaggccgatgactacttcta

SEQ ID NO: 640823 - DNA, 25 bp, Homo sapien
ggatccggggataccagatgtgttc

SEQ ID NO: 640824 - DNA, 25 bp, Homo sapien
cggatccggggataccagatgtgtt

SEQ ID NO: 640825 - DNA, 25 bp, Homo sapien
ctctcggatccggggataccagatg

SEQ ID NO: 640826 - DNA, 25 bp, Homo sapien
ctcggatccggggataccagatgtg

SEQ ID NO: 640827 - DNA, 25 bp, Homo sapien
gatggctcgagcaggggccaaaaat

SEQ ID NO: 640828 - DNA, 25 bp, Homo sapien
tgcaaaagcactggcctgaaacagg

SEQ ID NO: 640829 - DNA, 25 bp, Homo sapien
tctaaagacaggatggctcgagcag

SEQ ID NO: 640830 - DNA, 25 bp, Homo sapien
gctcgagcaggggccaaaaatgcaa

SEQ ID NO: 640831 - DNA, 25 bp, Homo sapien
tacagcacatgagtaaatgcaggca

SEQ ID NO: 640832 - DNA, 25 bp, Homo sapien
gaaacgagaccaaaaccatgatcac

SEQ ID NO: 640833 - DNA, 25 bp, Homo sapien
taccgaggtagttcactatttgaca

SEQ ID NO: 640834 - DNA, 25 bp, Homo sapien
catgatcacggcatcgggaactacc

SEQ ID NO: 640835 - DNA, 25 bp, Homo sapien
cccgtggtcagtgccaacaccccaa

SEQ ID NO: 640836 - DNA, 25 bp, Homo sapien
gggccccgtggtcagtgccaacacc

SEQ ID NO: 640837 - DNA, 25 bp, Homo sapien
gtggtcagtgccaacaccccaacac

SEQ ID NO: 640838 - DNA, 25 bp, Homo sapien
ggccccgtggtcagtgccaacaccc

SEQ ID NO: 640839 - DNA, 25 bp, Homo sapien
cctgatggcgctgcccttcgtgctg

SEQ ID NO: 640840 - DNA, 25 bp, Homo sapien
caagccatgtgcttcgatgtcacca

SEQ ID NO: 640841 - DNA, 25 bp, Homo sapien
gatgtcaccattgcgccccacaatg

SEQ ID NO: 640842 - DNA, 25 bp, Homo sapien
tggaggatgcactgtgtctccctga

SEQ ID NO: 640843 - DNA, 25 bp, Homo sapien
tgggtgtggggcacaaagtgagtcc

SEQ ID NO: 640844 - DNA, 25 bp, Homo sapien
ctgaggagggtgtggaagtagaaag

SEQ ID NO: 640845 - DNA, 25 bp, Homo sapien
ggcacaaagtgagtccaagagcagt

SEQ ID NO: 640846 - DNA, 25 bp, Homo sapien
tgtggggcacaaagtgagtccaaga

SEQ ID NO: 640847 - DNA, 25 bp, Homo sapien
tctgtagcaaagtagtgattcccac

SEQ ID NO: 640848 - DNA, 25 bp, Homo sapien
ctgcatccaaacgttgtctgtagca

SEQ ID NO: 640849 - DNA, 25 bp, Homo sapien
gaaaatggtcccaatgagctggctg

SEQ ID NO: 640850 - DNA, 25 bp, Homo sapien
caaacgttgtctgtagcaaagtagt

SEQ ID NO: 640851 - DNA, 25 bp, Homo sapien
ggcatcggccaacaggaagggcact

SEQ ID NO: 640852 - DNA, 25 bp, Homo sapien
acacacatggcatcggccaacagga

SEQ ID NO: 640853 - DNA, 25 bp, Homo sapien
cactgcgatcgtgccgctgaagcat

SEQ ID NO: 640854 - DNA, 25 bp, Homo sapien
aagggcactgcgatcgtgccgctga

SEQ ID NO: 640855 - DNA, 25 bp, Homo sapien
tggtaatccattctacctgttcttt

SEQ ID NO: 640856 - DNA, 25 bp, Homo sapien
ttccctggtaatccattctacctgt

SEQ ID NO: 640857 - DNA, 25 bp, Homo sapien
tttccctggtaatccattctacctg

SEQ ID NO: 640858 - DNA, 25 bp, Homo sapien
cctactcatcactcttaaaagagga

SEQ ID NO: 640859 - DNA, 25 bp, Homo sapien
ttccagatggtagacaatgcaaaca

SEQ ID NO: 640860 - DNA, 25 bp, Homo sapien
tgtgctcagcccctactcatcactc

SEQ ID NO: 640861 - DNA, 25 bp, Homo sapien
ctggtagttacacatcctacaggaa

SEQ ID NO: 640862 - DNA, 25 bp, Homo sapien
tatccagggtctcagcgagagagct

SEQ ID NO: 640863 - DNA, 25 bp, Homo sapien
gtataaatcatgtctgatcgctggg

SEQ ID NO: 640864 - DNA, 25 bp, Homo sapien
agaaatatacacaggtaccagggag

SEQ ID NO: 640865 - DNA, 25 bp, Homo sapien
aacatcttctatggtataaatcatg

SEQ ID NO: 640866 - DNA, 25 bp, Homo sapien
tgttagctcggccatgtacaggcca

SEQ ID NO: 640867 - DNA, 25 bp, Homo sapien
gtgctcattaaacgtgaagaccagt

SEQ ID NO: 640868 - DNA, 25 bp, Homo sapien
catgtacaggccactattacagaaa

SEQ ID NO: 640869 - DNA, 25 bp, Homo sapien
acgtgaagaccagtgttagctcggc

SEQ ID NO: 640870 - DNA, 25 bp, Homo sapien
cttttctgcaatgccgttttccgta

SEQ ID NO: 640871 - DNA, 25 bp, Homo sapien
tgtcctcattgtcctgctcaccgct

SEQ ID NO: 640872 - DNA, 25 bp, Homo sapien
tggaggtggcgcctccatttatcac

SEQ ID NO: 640873 - DNA, 25 bp, Homo sapien
agtgtagatcgccatgagctcagtg

SEQ ID NO: 640874 - DNA, 25 bp, Homo sapien
gagacaatccacttagaggctgttt

SEQ ID NO: 640875 - DNA, 25 bp, Homo sapien
acttagaggctgtttcagcgtgaac

SEQ ID NO: 640876 - DNA, 25 bp, Homo sapien
tgcagagacaatccacttagaggct

SEQ ID NO: 640877 - DNA, 25 bp, Homo sapien
tgtttcagcgtgaaccacattttcc

SEQ ID NO: 640878 - DNA, 25 bp, Homo sapien
tgcagtatctttgatcaccagtatt

SEQ ID NO: 640879 - DNA, 25 bp, Homo sapien
agtattactccgcaggaataaaggg

SEQ ID NO: 640880 - DNA, 25 bp, Homo sapien
tgatcaccagtattactccgcagga

SEQ ID NO: 640881 - DNA, 25 bp, Homo sapien
tgttctgtatgatgcagtatctttg

SEQ ID NO: 640882 - DNA, 25 bp, Homo sapien
gaatttgcctaactagagtcctgtg

SEQ ID NO: 640883 - DNA, 25 bp, Homo sapien
tactttgacctagtggacattctac

SEQ ID NO: 640884 - DNA, 25 bp, Homo sapien
acaagcctggttctcagcaacggcc

SEQ ID NO: 640885 - DNA, 25 bp, Homo sapien
cacaggatgcctaagagaatctcta

SEQ ID NO: 640886 - DNA, 25 bp, Homo sapien
gctctaggagcaccgcagttcaaat

SEQ ID NO: 640887 - DNA, 25 bp, Homo sapien
caaggcactagcatgcagcaatgtc

SEQ ID NO: 640888 - DNA, 25 bp, Homo sapien
gatctctatgtgtgtcaagtcccac

SEQ ID NO: 640889 - DNA, 25 bp, Homo sapien
gtcactcatgtgtgggtatacccaa

SEQ ID NO: 640890 - DNA, 25 bp, Homo sapien
agtgaagaaagctgggtgctttgcc

SEQ ID NO: 640891 - DNA, 25 bp, Homo sapien
ttccagcctccattgatttggatgt

SEQ ID NO: 640892 - DNA, 25 bp, Homo sapien
gggtgctttgcctcgtcttcgtatt

SEQ ID NO: 640893 - DNA, 25 bp, Homo sapien
cctcgtcttcgtatttgccttctgt

SEQ ID NO: 640894 - DNA, 25 bp, Homo sapien
gcttattcaagctaggagcccagga

SEQ ID NO: 640895 - DNA, 25 bp, Homo sapien
gatgaggcctgcaaacggcatctct

SEQ ID NO: 640896 - DNA, 25 bp, Homo sapien
gatcagccggctcttctagtgcctg

SEQ ID NO: 640897 - DNA, 25 bp, Homo sapien
gagaaacgagtagtttacacagccg

SEQ ID NO: 640898 - DNA, 25 bp, Homo sapien
cagaccatgtcattctccaaggacc

SEQ ID NO: 640899 - DNA, 25 bp, Homo sapien
tctccaaggaccaaagccaaatttc

SEQ ID NO: 640900 - DNA, 25 bp, Homo sapien
cctctctgtgatctgctcttcagac

SEQ ID NO: 640901 - DNA, 25 bp, Homo sapien
ccctctctgtgatctgctcttcaga

SEQ ID NO: 640902 - DNA, 25 bp, Homo sapien
gatgaataagtccacccatgctgct

SEQ ID NO: 640903 - DNA, 25 bp, Homo sapien
gattgtcctggtactcagcatgaga

SEQ ID NO: 640904 - DNA, 25 bp, Homo sapien
ggtgtctgtgcaaccctgcgattgt

SEQ ID NO: 640905 - DNA, 25 bp, Homo sapien
gaaatgtcctctaatcagtgcgtca

SEQ ID NO: 640906 - DNA, 25 bp, Homo sapien
tatatatacatgtgcgattgagctt

SEQ ID NO: 640907 - DNA, 25 bp, Homo sapien
ggtaacaatgtgagattctgtctga

SEQ ID NO: 640908 - DNA, 25 bp, Homo sapien
aaaaaatggctatgcaccaagcagc

SEQ ID NO: 640909 - DNA, 25 bp, Homo sapien
ccaagcagcttatggtggtaatctc

SEQ ID NO: 640910 - DNA, 25 bp, Homo sapien
tcaaagccgtatgagaagtccccgt

SEQ ID NO: 640911 - DNA, 25 bp, Homo sapien
gcaccaaggtccaagttcaaagccg

SEQ ID NO: 640912 - DNA, 25 bp, Homo sapien
aagtgatgtggcgtagacctgtcca

SEQ ID NO: 640913 - DNA, 25 bp, Homo sapien
gagttacatttgcttatgcaccaag

SEQ ID NO: 640914 - DNA, 25 bp, Homo sapien
tgagtagccggaaatacaggcatgc

SEQ ID NO: 640915 - DNA, 25 bp, Homo sapien
ctgagtagccggaaatacaggcatg

SEQ ID NO: 640916 - DNA, 25 bp, Homo sapien
gagtagccggaaatacaggcatgcg

SEQ ID NO: 640917 - DNA, 25 bp, Homo sapien
cgccgcgcctcggcgccgcagtgcc

SEQ ID NO: 640918 - DNA, 25 bp, Homo sapien
tgcagctcgcgtggttcccgtcctg

SEQ ID NO: 640919 - DNA, 25 bp, Homo sapien
gcctcggcgccgcagtgcccgctgc

SEQ ID NO: 640920 - DNA, 25 bp, Homo sapien
ctggctgcagctcgcgtggttcccg

SEQ ID NO: 640921 - DNA, 25 bp, Homo sapien
gctggtggtgtccttcaccctgagt

SEQ ID NO: 640922 - DNA, 25 bp, Homo sapien
tggtgtccttcaccctgagtctgaa

SEQ ID NO: 640923 - DNA, 25 bp, Homo sapien
agctggggaacctggaaagctggtg

SEQ ID NO: 640924 - DNA, 25 bp, Homo sapien
cttcaccctgagtctgaagatctga

SEQ ID NO: 640925 - DNA, 25 bp, Homo sapien
aatagatcatctcacttgcccattc

SEQ ID NO: 640926 - DNA, 25 bp, Homo sapien
gggagaatagatcatctcacttgcc

SEQ ID NO: 640927 - DNA, 25 bp, Homo sapien
gaatagatcatctcacttgcccatt

SEQ ID NO: 640928 - DNA, 25 bp, Homo sapien
gagaatagatcatctcacttgccca

SEQ ID NO: 640929 - DNA, 25 bp, Homo sapien
gccattaaacctgctcgtgacttta

SEQ ID NO: 640930 - DNA, 25 bp, Homo sapien
tcagccacatttatccggatggagg

SEQ ID NO: 640931 - DNA, 25 bp, Homo sapien
tatacgtccacaaactcactagcat

SEQ ID NO: 640932 - DNA, 25 bp, Homo sapien
ctggtggagcatttcatatacgtcc

SEQ ID NO: 640933 - DNA, 25 bp, Homo sapien
ccagaatcggtaagtgtaatgcaca

SEQ ID NO: 640934 - DNA, 25 bp, Homo sapien
gacaaactttttcctcgaagatcag

SEQ ID NO: 640935 - DNA, 25 bp, Homo sapien
cacttccataccacgtagtcttgga

SEQ ID NO: 640936 - DNA, 25 bp, Homo sapien
taagagacctaaccctgggagtgtg

SEQ ID NO: 640937 - DNA, 25 bp, Homo sapien
taatgaaatgtctagggataggcag

SEQ ID NO: 640938 - DNA, 25 bp, Homo sapien
tttaaaggtcatcctccaaaatgga

SEQ ID NO: 640939 - DNA, 25 bp, Homo sapien
agtgccctcggctttttcatcatcg

SEQ ID NO: 640940 - DNA, 25 bp, Homo sapien
aactttcctctaacttatcctgctg

SEQ ID NO: 640941 - DNA, 25 bp, Homo sapien
catttatatacatgagtctgttgta

SEQ ID NO: 640942 - DNA, 25 bp, Homo sapien
ctttatggaagtaatcaggcttacc

SEQ ID NO: 640943 - DNA, 25 bp, Homo sapien
caggcttaccaatttcctgtgtctc

SEQ ID NO: 640944 - DNA, 25 bp, Homo sapien
agcctctgtcattcagataccccaa

SEQ ID NO: 640945 - DNA, 25 bp, Homo sapien
gcacatgttgtatatagtacctaga

SEQ ID NO: 640946 - DNA, 25 bp, Homo sapien
tctgtgcctccctgaacatagccag

SEQ ID NO: 640947 - DNA, 25 bp, Homo sapien
tagtgatagccatatccttgccttt

SEQ ID NO: 640948 - DNA, 25 bp, Homo sapien
catagccagcttattcctaaacatg

SEQ ID NO: 640949 - DNA, 25 bp, Homo sapien
gagtgcagatgtagcctcagatccc

SEQ ID NO: 640950 - DNA, 25 bp, Homo sapien
tgtagtttccgaactggcagcatca

SEQ ID NO: 640951 - DNA, 25 bp, Homo sapien
gacttgtagggcaaagatggcacat

SEQ ID NO: 640952 - DNA, 25 bp, Homo sapien
caatgcagtgctctagtaccttgct

SEQ ID NO: 640953 - DNA, 25 bp, Homo sapien
caggagtatacttgaaaatagggca

SEQ ID NO: 640954 - DNA, 25 bp, Homo sapien
ttcacagcatctgttccggaacagg

SEQ ID NO: 640955 - DNA, 25 bp, Homo sapien
gaacataggtcataggctgatctga

SEQ ID NO: 640956 - DNA, 25 bp, Homo sapien
atgatacaaacccactgagaggatg

SEQ ID NO: 640957 - DNA, 25 bp, Homo sapien
ggaatacaatgtgggaaacactggc

SEQ ID NO: 640958 - DNA, 25 bp, Homo sapien
tagtcctaggtcgagcacagtggct

SEQ ID NO: 640959 - DNA, 25 bp, Homo sapien
cctggatgcccatggtaaagaagta

SEQ ID NO: 640960 - DNA, 25 bp, Homo sapien
taaataatcagcagtccctaaacag

SEQ ID NO: 640961 - DNA, 25 bp, Homo sapien
tgctccctgcattctgagcaccata

SEQ ID NO: 640962 - DNA, 25 bp, Homo sapien
catattgccttcataagttacgagg

SEQ ID NO: 640963 - DNA, 25 bp, Homo sapien
caccatattgccttcataagttacg

SEQ ID NO: 640964 - DNA, 25 bp, Homo sapien
ctgagcaccatattgccttcataag

SEQ ID NO: 640965 - DNA, 25 bp, Homo sapien
taaaccacgtgggtgatgcatcatt

SEQ ID NO: 640966 - DNA, 25 bp, Homo sapien
ggtcaggttagtcaaggccagtaaa

SEQ ID NO: 640967 - DNA, 25 bp, Homo sapien
tgttggacatgaagggcttttttgt

SEQ ID NO: 640968 - DNA, 25 bp, Homo sapien
tcagggtgagtcactcttctttgga

SEQ ID NO: 640969 - DNA, 25 bp, Homo sapien
ctgagcaagtctcagtggtgctgga

SEQ ID NO: 640970 - DNA, 25 bp, Homo sapien
tgcagtgggaacatgtcaggtgtcc

SEQ ID NO: 640971 - DNA, 25 bp, Homo sapien
tatgtccaggctactctacacaggc

SEQ ID NO: 640972 - DNA, 25 bp, Homo sapien
gtgctggagaaacccgtgtggtttc

SEQ ID NO: 640973 - DNA, 25 bp, Homo sapien
tctttcttgcttcaccatccattat

SEQ ID NO: 640974 - DNA, 25 bp, Homo sapien
gcttcaccatccattatcaaggtcg

SEQ ID NO: 640975 - DNA, 25 bp, Homo sapien
ctcttcaagtttgcaaggcacactg

SEQ ID NO: 640976 - DNA, 25 bp, Homo sapien
tatcaaggtcgttctcttcaagttt

SEQ ID NO: 640977 - DNA, 25 bp, Homo sapien
ttcacagcgcaccaggacagagtga

SEQ ID NO: 640978 - DNA, 25 bp, Homo sapien
taggccaagattatccagcggtttt

SEQ ID NO: 640979 - DNA, 25 bp, Homo sapien
aatcatatcaccatgttaggccaag

SEQ ID NO: 640980 - DNA, 25 bp, Homo sapien
tactcatccagctaaggttcagtgg

SEQ ID NO: 640981 - DNA, 25 bp, Homo sapien
gggaacactctcattatgacgagga

SEQ ID NO: 640982 - DNA, 25 bp, Homo sapien
tgcttgctgtcagaaaggggaacac

SEQ ID NO: 640983 - DNA, 25 bp, Homo sapien
catcacctgggagaatggtcactca

SEQ ID NO: 640984 - DNA, 25 bp, Homo sapien
tatgacgaggagtaaatttccatca

SEQ ID NO: 640985 - DNA, 25 bp, Homo sapien
ctctttacatctttacccaaaggag

SEQ ID NO: 640986 - DNA, 25 bp, Homo sapien
tctaatcttgtagtcccagacaaaa

SEQ ID NO: 640987 - DNA, 25 bp, Homo sapien
gaatcttttcatgagccaagttcct

SEQ ID NO: 640988 - DNA, 25 bp, Homo sapien
gtcaggagttgtgatatgggtttcc

SEQ ID NO: 640989 - DNA, 25 bp, Homo sapien
cctgatcattgctaggtctttgcca

SEQ ID NO: 640990 - DNA, 25 bp, Homo sapien
gccaggctttgtacactccaggtgc

SEQ ID NO: 640991 - DNA, 25 bp, Homo sapien
ggtgctttccagatttagatgatga

SEQ ID NO: 640992 - DNA, 25 bp, Homo sapien
ttaaactttgggacctgatcattgc

SEQ ID NO: 640993 - DNA, 25 bp, Homo sapien
cagctggtacaggtaggtcatgaac

SEQ ID NO: 640994 - DNA, 25 bp, Homo sapien
caccgcaaccttagcctgccgggtt

SEQ ID NO: 640995 - DNA, 25 bp, Homo sapien
gttggtcaggacggtcaaactccca

SEQ ID NO: 640996 - DNA, 25 bp, Homo sapien
gctcaccgcaaccttagcctgccgg

SEQ ID NO: 640997 - DNA, 25 bp, Homo sapien
ccatgttggtcaggacggtcaaact

SEQ ID NO: 640998 - DNA, 25 bp, Homo sapien
tccaagatcagatgaggtcgggagc

SEQ ID NO: 640999 - DNA, 25 bp, Homo sapien
aggcctgacccggattagcttccaa

SEQ ID NO: 641000 - DNA, 25 bp, Homo sapien
tgaggtcgggagcattcagggtagt

SEQ ID NO: 641001 - DNA, 25 bp, Homo sapien
gatgaggtcgggagcattcagggta

SEQ ID NO: 641002 - DNA, 25 bp, Homo sapien
gatactgtccaaatgctgactccca

SEQ ID NO: 641003 - DNA, 25 bp, Homo sapien
caatgccagctacctagaaactaag

SEQ ID NO: 641004 - DNA, 25 bp, Homo sapien
agttgagtgtgacccacaatgccag

SEQ ID NO: 641005 - DNA, 25 bp, Homo sapien
gcaactcagctgatggcatgtccag

SEQ ID NO: 641006 - DNA, 25 bp, Homo sapien
taatttctttggaatataagtcact

SEQ ID NO: 641007 - DNA, 25 bp, Homo sapien
tccggccgttaaaggaataatctgc

SEQ ID NO: 641008 - DNA, 25 bp, Homo sapien
gaatgatgacatactacaaggtgct

SEQ ID NO: 641009 - DNA, 25 bp, Homo sapien
ccttggaatcatgagcagaatgatg

SEQ ID NO: 641010 - DNA, 25 bp, Homo sapien
cttgatttacaagggacaaaatgat

SEQ ID NO: 641011 - DNA, 25 bp, Homo sapien
ttacaagggacaaaatgatgcaaat

SEQ ID NO: 641012 - DNA, 25 bp, Homo sapien
gatttacaagggacaaaatgatgca

SEQ ID NO: 641013 - DNA, 25 bp, Homo sapien
tgatttacaagggacaaaatgatgc

SEQ ID NO: 641014 - DNA, 25 bp, Homo sapien
ccaacctactggtgaactggatcag

SEQ ID NO: 641015 - DNA, 25 bp, Homo sapien
gatatcttaaagctgggacagttcc

SEQ ID NO: 641016 - DNA, 25 bp, Homo sapien
aagctgcagaattccttagtcctca

SEQ ID NO: 641017 - DNA, 25 bp, Homo sapien
tcctggttgctgtcagtaagaaagc

SEQ ID NO: 641018 - DNA, 25 bp, Homo sapien
catcataggagtaaccacggtagcc

SEQ ID NO: 641019 - DNA, 25 bp, Homo sapien
gagtaaccacggtagcctttggatg

SEQ ID NO: 641020 - DNA, 25 bp, Homo sapien
cggtagcctttggatgcatagtaag

SEQ ID NO: 641021 - DNA, 25 bp, Homo sapien
ggaatgtcatcataggagtaaccac

SEQ ID NO: 641022 - DNA, 25 bp, Homo sapien
tctttgagttgtataccaccaaggg

SEQ ID NO: 641023 - DNA, 25 bp, Homo sapien
taaggatgtgtaacattccaccgaa

SEQ ID NO: 641024 - DNA, 25 bp, Homo sapien
ccaccgaaatggacatactacagtt

SEQ ID NO: 641025 - DNA, 25 bp, Homo sapien
ggaggcaaacacattagtaccgtaa

SEQ ID NO: 641026 - DNA, 25 bp, Homo sapien
aaaattctacatccaccgggtgtgg

SEQ ID NO: 641027 - DNA, 25 bp, Homo sapien
cacacaacgggaaacatagtcagag

SEQ ID NO: 641028 - DNA, 25 bp, Homo sapien
taaggaggataatactagcaaactg

SEQ ID NO: 641029 - DNA, 25 bp, Homo sapien
taaaatcgtatcagcagaatgaagg

SEQ ID NO: 641030 - DNA, 25 bp, Homo sapien
ccctttgctgatgtagcctgacagc

SEQ ID NO: 641031 - DNA, 25 bp, Homo sapien
tttgctgatgtagcctgacagcagg

SEQ ID NO: 641032 - DNA, 25 bp, Homo sapien
cctttgctgatgtagcctgacagca

SEQ ID NO: 641033 - DNA, 25 bp, Homo sapien
tgctgatgtagcctgacagcaggag

SEQ ID NO: 641034 - DNA, 25 bp, Homo sapien
ctataataatgagaaaggcgccaat

SEQ ID NO: 641035 - DNA, 25 bp, Homo sapien
gaaaggcgccaatcaaaaacagcac

SEQ ID NO: 641036 - DNA, 25 bp, Homo sapien
agtggcaagtgcgatggccttataa

SEQ ID NO: 641037 - DNA, 25 bp, Homo sapien
cgatggccttataagggatcttagg

SEQ ID NO: 641038 - DNA, 25 bp, Homo sapien
tgaacgggctttgactaaagtgtaa

SEQ ID NO: 641039 - DNA, 25 bp, Homo sapien
ttggatctcatgacatcaggaaaga

SEQ ID NO: 641040 - DNA, 25 bp, Homo sapien
caaggctctcgcattacaactaaaa

SEQ ID NO: 641041 - DNA, 25 bp, Homo sapien
tagaaatggacaatactggaattgg

SEQ ID NO: 641042 - DNA, 25 bp, Homo sapien
ttctgcgattatggctgaaagggtc

SEQ ID NO: 641043 - DNA, 25 bp, Homo sapien
ttctaatccccaaggacagttagca

SEQ ID NO: 641044 - DNA, 25 bp, Homo sapien
caaggacagttagcaaaatctccat

SEQ ID NO: 641045 - DNA, 25 bp, Homo sapien
gccacggccctcttctgcgattatg

SEQ ID NO: 641046 - DNA, 25 bp, Homo sapien
agccagtcagtcttgtcagttctct

SEQ ID NO: 641047 - DNA, 25 bp, Homo sapien
tagccatcgtctgtgctggagagcc

SEQ ID NO: 641048 - DNA, 25 bp, Homo sapien
tttcactttactactggggattcca

SEQ ID NO: 641049 - DNA, 25 bp, Homo sapien
gtagccatcgtctgtgctggagagc

SEQ ID NO: 641050 - DNA, 25 bp, Homo sapien
agccatcgtctgtgctggagagcct

SEQ ID NO: 641051 - DNA, 25 bp, Homo sapien
ctccagcctgggcgacagaatgaga

SEQ ID NO: 641052 - DNA, 25 bp, Homo sapien
cggaggttacagtgagccgagactg

SEQ ID NO: 641053 - DNA, 25 bp, Homo sapien
acgagaatagcttgagcctgggaga

SEQ ID NO: 641054 - DNA, 25 bp, Homo sapien
cgagactgcaccactgcactccagc

SEQ ID NO: 641055 - DNA, 25 bp, Homo sapien
ttagatgccagctgttctaagtact

SEQ ID NO: 641056 - DNA, 25 bp, Homo sapien
tgttagatgccagctgttctaagta

SEQ ID NO: 641057 - DNA, 25 bp, Homo sapien
tttgttagatgccagctgttctaag

SEQ ID NO: 641058 - DNA, 25 bp, Homo sapien
gtctttgttagatgccagctgttct

SEQ ID NO: 641059 - DNA, 25 bp, Homo sapien
caggctagagtttagggacccgatc

SEQ ID NO: 641060 - DNA, 25 bp, Homo sapien
gtttttgagggcatttaaccacatc

SEQ ID NO: 641061 - DNA, 25 bp, Homo sapien
caaagttcaaactaccagtatgtgt

SEQ ID NO: 641062 - DNA, 25 bp, Homo sapien
cctaactgttttacgtggcttgcag

SEQ ID NO: 641063 - DNA, 25 bp, Homo sapien
gggagacgaatgtttactcttggca

SEQ ID NO: 641064 - DNA, 25 bp, Homo sapien
cgcatcaaaacaatacatcgcaggg

SEQ ID NO: 641065 - DNA, 25 bp, Homo sapien
taactgttcatacatccgcatcaaa

SEQ ID NO: 641066 - DNA, 25 bp, Homo sapien
gacgaatgtttactcttggcaaaga

SEQ ID NO: 641067 - DNA, 25 bp, Homo sapien
agcgcggtctcggacacgcccagag

SEQ ID NO: 641068 - DNA, 25 bp, Homo sapien
gatgactcggagcttgatttcggcg

SEQ ID NO: 641069 - DNA, 25 bp, Homo sapien
ggacgaatgccccacacggatgact

SEQ ID NO: 641070 - DNA, 25 bp, Homo sapien
ataagaaccgacgcgaatttagacg

SEQ ID NO: 641071 - DNA, 25 bp, Homo sapien
agagctcgcccacggttggcagcgc

SEQ ID NO: 641072 - DNA, 25 bp, Homo sapien
acccagagctcgcccacggttggca

SEQ ID NO: 641073 - DNA, 25 bp, Homo sapien
acacccagagctcgcccacggttgg

SEQ ID NO: 641074 - DNA, 25 bp, Homo sapien
ccagagctcgcccacggttggcagc

SEQ ID NO: 641075 - DNA, 25 bp, Homo sapien
ggcatggcccgcttaagtgccactc

SEQ ID NO: 641076 - DNA, 25 bp, Homo sapien
tttgtttaagcagccgcgacctgtg

SEQ ID NO: 641077 - DNA, 25 bp, Homo sapien
gctgcacggcccgaatgcttcttcg

SEQ ID NO: 641078 - DNA, 25 bp, Homo sapien
ttaagcagccgcgacctgtgcctgc

SEQ ID NO: 641079 - DNA, 25 bp, Homo sapien
ccgaatgcttcttcgtgggttttgt

SEQ ID NO: 641080 - DNA, 25 bp, Homo sapien
ctgaaaatacatacggtcctagaac

SEQ ID NO: 641081 - DNA, 25 bp, Homo sapien
cagtaactagaactcagtccaagta

SEQ ID NO: 641082 - DNA, 25 bp, Homo sapien
gaaaatgaacttactactggacatg

SEQ ID NO: 641083 - DNA, 25 bp, Homo sapien
ggttaattctcatgtccagtaacta

SEQ ID NO: 641084 - DNA, 25 bp, Homo sapien
caaattgagcagcaggggttgtata

SEQ ID NO: 641085 - DNA, 25 bp, Homo sapien
aagccaaattgagcagcaggggttg

SEQ ID NO: 641086 - DNA, 25 bp, Homo sapien
gccaaattgagcagcaggggttgta

SEQ ID NO: 641087 - DNA, 25 bp, Homo sapien
aattgagcagcaggggttgtatacc

SEQ ID NO: 641088 - DNA, 25 bp, Homo sapien
ttcagtaggatacttccaacagtcc

SEQ ID NO: 641089 - DNA, 25 bp, Homo sapien
agctgtagctgggaattcagtagga

SEQ ID NO: 641090 - DNA, 25 bp, Homo sapien
attcagtaggatacttccaacagtc

SEQ ID NO: 641091 - DNA, 25 bp, Homo sapien
aactgcatttagagtcaagaccctt

SEQ ID NO: 641092 - DNA, 25 bp, Homo sapien
acttctaggttaactagaccagatc

SEQ ID NO: 641093 - DNA, 25 bp, Homo sapien
aatcacaagtatttctaagagacaa

SEQ ID NO: 641094 - DNA, 25 bp, Homo sapien
catttagagtcaagacccttttgta

SEQ ID NO: 641095 - DNA, 25 bp, Homo sapien
gaaaagacttcagtatatgctggca

SEQ ID NO: 641096 - DNA, 25 bp, Homo sapien
aaagacttcagtatatgctggcatc

SEQ ID NO: 641097 - DNA, 25 bp, Homo sapien
aaaagacttcagtatatgctggcat

SEQ ID NO: 641098 - DNA, 25 bp, Homo sapien
aagacttcagtatatgctggcatct

SEQ ID NO: 641099 - DNA, 25 bp, Homo sapien
gtgtcccatatccgcaattttatac

SEQ ID NO: 641100 - DNA, 25 bp, Homo sapien
tgtcccatatccgcaattttatact

SEQ ID NO: 641101 - DNA, 25 bp, Homo sapien
ttttaagtgtcccatatccgcaatt

SEQ ID NO: 641102 - DNA, 25 bp, Homo sapien
gtattttaagtgtcccatatccgca

SEQ ID NO: 641103 - DNA, 25 bp, Homo sapien
taattactgaggagtatgtatcaca

SEQ ID NO: 641104 - DNA, 25 bp, Homo sapien
gacaggaagatggttaattactgag

SEQ ID NO: 641105 - DNA, 25 bp, Homo sapien
gatggttaattactgaggagtatgt

SEQ ID NO: 641106 - DNA, 25 bp, Homo sapien
gaagatggttaattactgaggagta

SEQ ID NO: 641107 - DNA, 25 bp, Homo sapien
gacatactgagtgtcaccgttgaag

SEQ ID NO: 641108 - DNA, 25 bp, Homo sapien
aactggttcattcatctctatggta

SEQ ID NO: 641109 - DNA, 25 bp, Homo sapien
ctgagtgtcaccgttgaagagagtg

SEQ ID NO: 641110 - DNA, 25 bp, Homo sapien
gggtacatctgcagacatactgagt

SEQ ID NO: 641111 - DNA, 25 bp, Homo sapien
tcggcatatacgtgcaaattcacca

SEQ ID NO: 641112 - DNA, 25 bp, Homo sapien
caggaaattacaacagcatctccaa

SEQ ID NO: 641113 - DNA, 25 bp, Homo sapien
aatttcactccgtcttttgcacagg

SEQ ID NO: 641114 - DNA, 25 bp, Homo sapien
tcctcctctttatcgacattacttg

SEQ ID NO: 641115 - DNA, 25 bp, Homo sapien
taacatatcttgacggaggaggatc

SEQ ID NO: 641116 - DNA, 25 bp, Homo sapien
tatggcacagaaatcatgatggcgc

SEQ ID NO: 641117 - DNA, 25 bp, Homo sapien
tgatggcgcaagcaggcctaactac

SEQ ID NO: 641118 - DNA, 25 bp, Homo sapien
caggttagagagagctatatggcac

SEQ ID NO: 641119 - DNA, 25 bp, Homo sapien
gaattccaagttgttcaacatctaa

SEQ ID NO: 641120 - DNA, 25 bp, Homo sapien
aacatctaaatccatcaacttcatt

SEQ ID NO: 641121 - DNA, 25 bp, Homo sapien
catttcatagtctgaaactttctcc

SEQ ID NO: 641122 - DNA, 25 bp, Homo sapien
cttcatttcatagtctgaaactttc

SEQ ID NO: 641123 - DNA, 25 bp, Homo sapien
gaaatactgacacagagttttgatt

SEQ ID NO: 641124 - DNA, 25 bp, Homo sapien
gagaaatactgacacagagttttga

SEQ ID NO: 641125 - DNA, 25 bp, Homo sapien
tgattttctgtagcttcgtgactcg

SEQ ID NO: 641126 - DNA, 25 bp, Homo sapien
tgtagcttcgtgactcggtaaaaag

SEQ ID NO: 641127 - DNA, 25 bp, Homo sapien
tgatatcttcattgccggcgcattt

SEQ ID NO: 641128 - DNA, 25 bp, Homo sapien
ttatcttcggcccttagtgtaatga

SEQ ID NO: 641129 - DNA, 25 bp, Homo sapien
caaggtatccgcgttatcttcggcc

SEQ ID NO: 641130 - DNA, 25 bp, Homo sapien
aaatactagcgccaaggtatccgcg

SEQ ID NO: 641131 - DNA, 25 bp, Homo sapien
tttagtgagcaaagagccctggaac

SEQ ID NO: 641132 - DNA, 25 bp, Homo sapien
caatgagggctaggctcgaaagcgc

SEQ ID NO: 641133 - DNA, 25 bp, Homo sapien
taaagcatttaaagtcaaccgcgac

SEQ ID NO: 641134 - DNA, 25 bp, Homo sapien
cagctaaagcgtccattcaaggcca

SEQ ID NO: 641135 - DNA, 25 bp, Homo sapien
tcgcagcggtaggtgtcgaagccct

SEQ ID NO: 641136 - DNA, 25 bp, Homo sapien
ccaaagagacgtgggacgagtccat

SEQ ID NO: 641137 - DNA, 25 bp, Homo sapien
catgctctgcaggtttacaccgctg

SEQ ID NO: 641138 - DNA, 25 bp, Homo sapien
tacaccgctggagctaatatcccag

SEQ ID NO: 641139 - DNA, 25 bp, Homo sapien
agcctcagagcgagcgggcgaacgt

SEQ ID NO: 641140 - DNA, 25 bp, Homo sapien
ggcaggcgggaaggaggaaagtcta

SEQ ID NO: 641141 - DNA, 25 bp, Homo sapien
aaagtctagctggtttcggcttcag

SEQ ID NO: 641142 - DNA, 25 bp, Homo sapien
tggcggagtggcaacaacgccgcta

SEQ ID NO: 641143 - DNA, 25 bp, Homo sapien
ctagaaagacaacgaccactctgct

SEQ ID NO: 641144 - DNA, 25 bp, Homo sapien
cgctctcaccctgcgccgcgttgcg

SEQ ID NO: 641145 - DNA, 25 bp, Homo sapien
actctgctacgcctgcaaccgttta

SEQ ID NO: 641146 - DNA, 25 bp, Homo sapien
ctgcaaccgtttaatgccgccgcgt

SEQ ID NO: 641147 - DNA, 25 bp, Homo sapien
tgcgtaagggaagagctctggccca

SEQ ID NO: 641148 - DNA, 25 bp, Homo sapien
tttgtcaggctagagcctccgggtg

SEQ ID NO: 641149 - DNA, 25 bp, Homo sapien
tcagcaagcatttgtcaggctagag

SEQ ID NO: 641150 - DNA, 25 bp, Homo sapien
tccgggtggcgcttctcgccctcag

SEQ ID NO: 641151 - DNA, 25 bp, Homo sapien
tggagggcgtcctcccggttgatgg

SEQ ID NO: 641152 - DNA, 25 bp, Homo sapien
caggtgttggagggcgtcctcccgg

SEQ ID NO: 641153 - DNA, 25 bp, Homo sapien
tgttggagggcgtcctcccggttga

SEQ ID NO: 641154 - DNA, 25 bp, Homo sapien
gcaggtgttggagggcgtcctcccg

SEQ ID NO: 641155 - DNA, 25 bp, Homo sapien
tactactagttggtgagtatgcaga

SEQ ID NO: 641156 - DNA, 25 bp, Homo sapien
ttaagggtgagatcatgcttgatgt

SEQ ID NO: 641157 - DNA, 25 bp, Homo sapien
gctctgtagctctgtttaagggtga

SEQ ID NO: 641158 - DNA, 25 bp, Homo sapien
cttgatgttagtgggactttgtgga

SEQ ID NO: 641159 - DNA, 25 bp, Homo sapien
ttccagttaatgactgttagcatga

SEQ ID NO: 641160 - DNA, 25 bp, Homo sapien
tggaagaaatgctttccagttaatg

SEQ ID NO: 641161 - DNA, 25 bp, Homo sapien
ttggaagaaatgctttccagttaat

SEQ ID NO: 641162 - DNA, 25 bp, Homo sapien
cttggaagaaatgctttccagttaa

SEQ ID NO: 641163 - DNA, 25 bp, Homo sapien
cctgtaggcttttcctatagagaga

SEQ ID NO: 641164 - DNA, 25 bp, Homo sapien
gcctgtaggcttttcctatagagag

SEQ ID NO: 641165 - DNA, 25 bp, Homo sapien
aggcttttcctatagagagatttct

SEQ ID NO: 641166 - DNA, 25 bp, Homo sapien
tgtaggcttttcctatagagagatt

SEQ ID NO: 641167 - DNA, 25 bp, Homo sapien
gattgtgagattgttgttcccagcc

SEQ ID NO: 641168 - DNA, 25 bp, Homo sapien
ttttccccagttgccgagcctggag

SEQ ID NO: 641169 - DNA, 25 bp, Homo sapien
tccagaatacctatgtggagggcct

SEQ ID NO: 641170 - DNA, 25 bp, Homo sapien
tctgggagtagaagtcccatagccc

SEQ ID NO: 641171 - DNA, 25 bp, Homo sapien
ctataactaatatgacacatttggg

SEQ ID NO: 641172 - DNA, 25 bp, Homo sapien
tcttcaagggagaaacatactagtt

SEQ ID NO: 641173 - DNA, 25 bp, Homo sapien
gggattgagaacactgttaattcca

SEQ ID NO: 641174 - DNA, 25 bp, Homo sapien
caccccataatttcttctataacta

SEQ ID NO: 641175 - DNA, 25 bp, Homo sapien
gtattagacatactccctccttggg

SEQ ID NO: 641176 - DNA, 25 bp, Homo sapien
cttgagcccagttttgagattgcga

SEQ ID NO: 641177 - DNA, 25 bp, Homo sapien
cagtgaagcaggtaccagatggcga

SEQ ID NO: 641178 - DNA, 25 bp, Homo sapien
tgttccaatatggtaaacagcccca

SEQ ID NO: 641179 - DNA, 25 bp, Homo sapien
tctgttccctttggcgtccacagga

SEQ ID NO: 641180 - DNA, 25 bp, Homo sapien
gatgaatgtgttcagcatgtaccac

SEQ ID NO: 641181 - DNA, 25 bp, Homo sapien
tgtgtctccaagcagaatgcctttg

SEQ ID NO: 641182 - DNA, 25 bp, Homo sapien
tttccggggtatgagcaactgtgtc

SEQ ID NO: 641183 - DNA, 25 bp, Homo sapien
tctttgctactgtggtgtttggcct

SEQ ID NO: 641184 - DNA, 25 bp, Homo sapien
agaggcctcataccaccttccaagg

SEQ ID NO: 641185 - DNA, 25 bp, Homo sapien
ggcaaccttgccctgaagagggcca

SEQ ID NO: 641186 - DNA, 25 bp, Homo sapien
caccagctttcaggcagggtgctag

SEQ ID NO: 641187 - DNA, 25 bp, Homo sapien
tctcagaaaacggtccggatgtacc

SEQ ID NO: 641188 - DNA, 25 bp, Homo sapien
gaggattcttcgcaagtggattcaa

SEQ ID NO: 641189 - DNA, 25 bp, Homo sapien
tttgcctcgctcattggcccctttg

SEQ ID NO: 641190 - DNA, 25 bp, Homo sapien
tcttctcagaaaacggtccggatgt

SEQ ID NO: 641191 - DNA, 25 bp, Homo sapien
catggatcgctttgactgccagtat

SEQ ID NO: 641192 - DNA, 25 bp, Homo sapien
gcctctaacaggactttgccaatac

SEQ ID NO: 641193 - DNA, 25 bp, Homo sapien
ttgccaataccattcctggccatgg

SEQ ID NO: 641194 - DNA, 25 bp, Homo sapien
tctgatggccacctttgtcaatgta

SEQ ID NO: 641195 - DNA, 25 bp, Homo sapien
tcggaggaatggaggcttactaacc

SEQ ID NO: 641196 - DNA, 25 bp, Homo sapien
ataatctggaagacagtgttgccca

SEQ ID NO: 641197 - DNA, 25 bp, Homo sapien
tgggttcaccttcatcgcagactga

SEQ ID NO: 641198 - DNA, 25 bp, Homo sapien
tcatctgtgtctgaccaaatcaggg

SEQ ID NO: 641199 - DNA, 25 bp, Homo sapien
gcagagggcttctcgttcatgcacc

SEQ ID NO: 641200 - DNA, 25 bp, Homo sapien
ccatgtttgtgctgtagacttgctg

SEQ ID NO: 641201 - DNA, 25 bp, Homo sapien
ggactttctcatcgggcagggagca

SEQ ID NO: 641202 - DNA, 25 bp, Homo sapien
tgtactgtaactgagccctttccca

SEQ ID NO: 641203 - DNA, 25 bp, Homo sapien
cttctcttattcaggtccaaggccc

SEQ ID NO: 641204 - DNA, 25 bp, Homo sapien
tgaagcggcttctttccgctgaact

SEQ ID NO: 641205 - DNA, 25 bp, Homo sapien
ggctgaagcggcttctttccgctga

SEQ ID NO: 641206 - DNA, 25 bp, Homo sapien
ttccatttcagcctcgtggcttctc

SEQ ID NO: 641207 - DNA, 25 bp, Homo sapien
gaatggcatcacttgctttagaccc

SEQ ID NO: 641208 - DNA, 25 bp, Homo sapien
tcctgcatgctttctggagatgagg

SEQ ID NO: 641209 - DNA, 25 bp, Homo sapien
tgagtgcgcactagagctgctagca

SEQ ID NO: 641210 - DNA, 25 bp, Homo sapien
tcaggtagctaggagagcactgcca

SEQ ID NO: 641211 - DNA, 25 bp, Homo sapien
tgctgttgccatctgaatgcgccct

SEQ ID NO: 641212 - DNA, 25 bp, Homo sapien
tcaggttgaccagcagtggccttac

SEQ ID NO: 641213 - DNA, 25 bp, Homo sapien
cagaaggtgggccctattctcagaa

SEQ ID NO: 641214 - DNA, 25 bp, Homo sapien
cttccctttcaggttgaccagcagt

SEQ ID NO: 641215 - DNA, 25 bp, Homo sapien
gggctgtctcttgattaaggctgtc

SEQ ID NO: 641216 - DNA, 25 bp, Homo sapien
caggtggatggaggctgttctcatc

SEQ ID NO: 641217 - DNA, 25 bp, Homo sapien
cctctcaggtggatggaggctgttc

SEQ ID NO: 641218 - DNA, 25 bp, Homo sapien
tgtcacctgtttgtatagggaccat

SEQ ID NO: 641219 - DNA, 25 bp, Homo sapien
ctgcgctaggttcttgtatgctggc

SEQ ID NO: 641220 - DNA, 25 bp, Homo sapien
ctagtgaaactgtgtttgccgataa

SEQ ID NO: 641221 - DNA, 25 bp, Homo sapien
ttttttgacacctgcgctaggttct

SEQ ID NO: 641222 - DNA, 25 bp, Homo sapien
tgtttgccgataatcatccacatag

SEQ ID NO: 641223 - DNA, 25 bp, Homo sapien
tcttaattcgattctgaggatttgt

SEQ ID NO: 641224 - DNA, 25 bp, Homo sapien
ttttttgatcgagctgtggacatcc

SEQ ID NO: 641225 - DNA, 25 bp, Homo sapien
gggtaagatcagatgggaagcccct

SEQ ID NO: 641226 - DNA, 25 bp, Homo sapien
ggacatccttcttaattcgattctg

SEQ ID NO: 641227 - DNA, 25 bp, Homo sapien
gggagtgccaggcatcccatgggac

SEQ ID NO: 641228 - DNA, 25 bp, Homo sapien
tgctgggagtgccaggcatcccatg

SEQ ID NO: 641229 - DNA, 25 bp, Homo sapien
ggagtgccaggcatcccatgggacc

SEQ ID NO: 641230 - DNA, 25 bp, Homo sapien
tctgtgctgggagtgccaggcatcc

SEQ ID NO: 641231 - DNA, 25 bp, Homo sapien
caacttggcgtttcactaaatgcag

SEQ ID NO: 641232 - DNA, 25 bp, Homo sapien
gcagttctcggtgtgtagagtccac

SEQ ID NO: 641233 - DNA, 25 bp, Homo sapien
cactcagacacaggcgaccttgaag

SEQ ID NO: 641234 - DNA, 25 bp, Homo sapien
gatggaattcagttgtctcaccctg

SEQ ID NO: 641235 - DNA, 25 bp, Homo sapien
gcctaggagtgtcaaagtggtgttt

SEQ ID NO: 641236 - DNA, 25 bp, Homo sapien
cctaggagtgtcaaagtggtgtttg

SEQ ID NO: 641237 - DNA, 25 bp, Homo sapien
ctaggagtgtcaaagtggtgtttgt

SEQ ID NO: 641238 - DNA, 25 bp, Homo sapien
agcctaggagtgtcaaagtggtgtt

SEQ ID NO: 641239 - DNA, 25 bp, Homo sapien
gcgttattctacaccaggagccgga

SEQ ID NO: 641240 - DNA, 25 bp, Homo sapien
tgaggatctactttttagctagggc

SEQ ID NO: 641241 - DNA, 25 bp, Homo sapien
gagatgagcccctccgtcgttttgg

SEQ ID NO: 641242 - DNA, 25 bp, Homo sapien
tcatcgacggagaggagctaaggtc

SEQ ID NO: 641243 - DNA, 25 bp, Homo sapien
gctgttgcacaagtagctgctcaca

SEQ ID NO: 641244 - DNA, 25 bp, Homo sapien
agcggtgcctcaacctcacgagtag

SEQ ID NO: 641245 - DNA, 25 bp, Homo sapien
tacagagccatcagtcaaccttgag

SEQ ID NO: 641246 - DNA, 25 bp, Homo sapien
aaccttgagggattgttatctgacc

SEQ ID NO: 641247 - DNA, 25 bp, Homo sapien
cgattcttccgcctcagccttgcga

SEQ ID NO: 641248 - DNA, 25 bp, Homo sapien
gtgacatgatctcagttcattgcaa

SEQ ID NO: 641249 - DNA, 25 bp, Homo sapien
acaggtacatgccactgtgcctggc

SEQ ID NO: 641250 - DNA, 25 bp, Homo sapien
cctccacctcctggattcaagcgat

SEQ ID NO: 641251 - DNA, 25 bp, Homo sapien
tctgaatgacgcaaaacctgatggc

SEQ ID NO: 641252 - DNA, 25 bp, Homo sapien
ccatggtgttcctgcgtgtggagct

SEQ ID NO: 641253 - DNA, 25 bp, Homo sapien
ccatggacagtcgtgggatgcagcc

SEQ ID NO: 641254 - DNA, 25 bp, Homo sapien
gccagaatgatatgaccagtcgacc

SEQ ID NO: 641255 - DNA, 25 bp, Homo sapien
tggttaccatttgactgaactatct

SEQ ID NO: 641256 - DNA, 25 bp, Homo sapien
cctttcactctcaaactatgtgtgt

SEQ ID NO: 641257 - DNA, 25 bp, Homo sapien
gaatctcttacaggcagcatattat

SEQ ID NO: 641258 - DNA, 25 bp, Homo sapien
tattggatcttaattcatccggcca

SEQ ID NO: 641259 - DNA, 25 bp, Homo sapien
tatgtcaaatgtgcctcgtgaaacc

SEQ ID NO: 641260 - DNA, 25 bp, Homo sapien
catctcctggagatgaagtgccgtg

SEQ ID NO: 641261 - DNA, 25 bp, Homo sapien
aagtgccgtgtgcttccgacagcta

SEQ ID NO: 641262 - DNA, 25 bp, Homo sapien
ctatatcaaacgcttccaggagaag

SEQ ID NO: 641263 - DNA, 25 bp, Homo sapien
tcaacaccgacttccccacctgctt

SEQ ID NO: 641264 - DNA, 25 bp, Homo sapien
aatgtgactgtggatggcgatgcct

SEQ ID NO: 641265 - DNA, 25 bp, Homo sapien
ttcttaaagatgttgttgtaaagac

SEQ ID NO: 641266 - DNA, 25 bp, Homo sapien
tgccttccagggtcaacaccgactt

SEQ ID NO: 641267 - DNA, 25 bp, Homo sapien
tttaaagctacgctatctaaatagc

SEQ ID NO: 641268 - DNA, 25 bp, Homo sapien
gcactttaaagctacgctatctaaa

SEQ ID NO: 641269 - DNA, 25 bp, Homo sapien
tgttctcttgtaactactttacagt

SEQ ID NO: 641270 - DNA, 25 bp, Homo sapien
catgtgaatgaatggagggaggtaa

SEQ ID NO: 641271 - DNA, 25 bp, Homo sapien
aggggagcagccggataagaaaatc

SEQ ID NO: 641272 - DNA, 25 bp, Homo sapien
tgaggtctgataggggagcagccgg

SEQ ID NO: 641273 - DNA, 25 bp, Homo sapien
taaagtttattccagctataatgca

SEQ ID NO: 641274 - DNA, 25 bp, Homo sapien
tttaaagtttattccagctataatg

SEQ ID NO: 641275 - DNA, 25 bp, Homo sapien
aagtttattccagctataatgcagg

SEQ ID NO: 641276 - DNA, 25 bp, Homo sapien
gtttattccagctataatgcaggtt

SEQ ID NO: 641277 - DNA, 25 bp, Homo sapien
cgccttgatatggtctgtcatgagg

SEQ ID NO: 641278 - DNA, 25 bp, Homo sapien
accgccttgatatggtctgtcatga

SEQ ID NO: 641279 - DNA, 25 bp, Homo sapien
ccttgatatggtctgtcatgaggtc

SEQ ID NO: 641280 - DNA, 25 bp, Homo sapien
cttgatatggtctgtcatgaggtcc

SEQ ID NO: 641281 - DNA, 25 bp, Homo sapien
gtgtatgctcaaaggtccggccaaa

SEQ ID NO: 641282 - DNA, 25 bp, Homo sapien
tatgctcaaaggtccggccaaaact

SEQ ID NO: 641283 - DNA, 25 bp, Homo sapien
caaaggtccggccaaaactcttgat

SEQ ID NO: 641284 - DNA, 25 bp, Homo sapien
atgctcaaaggtccggccaaaactc

SEQ ID NO: 641285 - DNA, 25 bp, Homo sapien
accattgattgaatcttcaggagcc

SEQ ID NO: 641286 - DNA, 25 bp, Homo sapien
cattgattgaatcttcaggagcccc

SEQ ID NO: 641287 - DNA, 25 bp, Homo sapien
tgattgaatcttcaggagcccccat

SEQ ID NO: 641288 - DNA, 25 bp, Homo sapien
ttgattgaatcttcaggagccccca

SEQ ID NO: 641289 - DNA, 25 bp, Homo sapien
tgtggcatattagggcattggtcag

SEQ ID NO: 641290 - DNA, 25 bp, Homo sapien
ggcatattagggcattggtcagact

SEQ ID NO: 641291 - DNA, 25 bp, Homo sapien
ttgctgtggcatattagggcattgg

SEQ ID NO: 641292 - DNA, 25 bp, Homo sapien
tattagggcattggtcagactcctc

SEQ ID NO: 641293 - DNA, 25 bp, Homo sapien
tgcatgagtgagtagaagacccttt

SEQ ID NO: 641294 - DNA, 25 bp, Homo sapien
tgagattcaggcttgcatctccatc

SEQ ID NO: 641295 - DNA, 25 bp, Homo sapien
ttgagattcaggcttgcatctccat

SEQ ID NO: 641296 - DNA, 25 bp, Homo sapien
cagaagctgcatgagtgagtagaag

SEQ ID NO: 641297 - DNA, 25 bp, Homo sapien
taggagtcaggagtgcagtccccga

SEQ ID NO: 641298 - DNA, 25 bp, Homo sapien
gcagttcgctgcatcagagtgaaaa

SEQ ID NO: 641299 - DNA, 25 bp, Homo sapien
gcattagctgtacccttaagcaagg

SEQ ID NO: 641300 - DNA, 25 bp, Homo sapien
gcaatatcttggctccagcaagcat

SEQ ID NO: 641301 - DNA, 25 bp, Homo sapien
gaatagtcacggtgcaatcagcagc

SEQ ID NO: 641302 - DNA, 25 bp, Homo sapien
tttgcatgcatgaatacactccggg

SEQ ID NO: 641303 - DNA, 25 bp, Homo sapien
ttgaaggacataaccgagaggaggc

SEQ ID NO: 641304 - DNA, 25 bp, Homo sapien
gaatgaaggcatcgcatcagtccag

SEQ ID NO: 641305 - DNA, 25 bp, Homo sapien
gctattttgcaacatgcagggagga

SEQ ID NO: 641306 - DNA, 25 bp, Homo sapien
gcagggaggactgtcaacacttcta

SEQ ID NO: 641307 - DNA, 25 bp, Homo sapien
ttttggcccactgtagacaaggtac

SEQ ID NO: 641308 - DNA, 25 bp, Homo sapien
taagaccgcagggatgctgagagtc

SEQ ID NO: 641309 - DNA, 25 bp, Homo sapien
taaactgttcaatatcacttctcca

SEQ ID NO: 641310 - DNA, 25 bp, Homo sapien
aataaactgttcaatatcacttctc

SEQ ID NO: 641311 - DNA, 25 bp, Homo sapien
ttctccattcttatcgtgtgcacag

SEQ ID NO: 641312 - DNA, 25 bp, Homo sapien
tatcgtgtgcacagttgaaaagcac

SEQ ID NO: 641313 - DNA, 25 bp, Homo sapien
catcatcgccatttcattaaagcaa

SEQ ID NO: 641314 - DNA, 25 bp, Homo sapien
attttcatcatcgccatttcattaa

SEQ ID NO: 641315 - DNA, 25 bp, Homo sapien
ttttcatcatcgccatttcattaaa

SEQ ID NO: 641316 - DNA, 25 bp, Homo sapien
catcgccatttcattaaagcaaaac

SEQ ID NO: 641317 - DNA, 25 bp, Homo sapien
gagtcttagagttaggacctgaacc

SEQ ID NO: 641318 - DNA, 25 bp, Homo sapien
gaaatcctttgcactgaggaggcaa

SEQ ID NO: 641319 - DNA, 25 bp, Homo sapien
ggcaaaaattgacacctcaggatta

SEQ ID NO: 641320 - DNA, 25 bp, Homo sapien
tagaaagtggtccagtccttagcaa

SEQ ID NO: 641321 - DNA, 25 bp, Homo sapien
tggctgtaacacacctcccatgatg

SEQ ID NO: 641322 - DNA, 25 bp, Homo sapien
tgtctaagagtcttcttctatagcc

SEQ ID NO: 641323 - DNA, 25 bp, Homo sapien
tcccatgatgctgtaaaccacgcac

SEQ ID NO: 641324 - DNA, 25 bp, Homo sapien
gacaaacttatcgttacatttccat

SEQ ID NO: 641325 - DNA, 25 bp, Homo sapien
ggtgaagagtaaatgtcagctcctg

SEQ ID NO: 641326 - DNA, 25 bp, Homo sapien
tatctggagatagcttggaaactcc

SEQ ID NO: 641327 - DNA, 25 bp, Homo sapien
tgtggtttgcacacagtacatgttc

SEQ ID NO: 641328 - DNA, 25 bp, Homo sapien
tccctgtctaatctcattggtgtgg

SEQ ID NO: 641329 - DNA, 25 bp, Homo sapien
ttcccatgcagcctatgaacttggt

SEQ ID NO: 641330 - DNA, 25 bp, Homo sapien
cattgtatgttacgactttgcagca

SEQ ID NO: 641331 - DNA, 25 bp, Homo sapien
gggttttcaattgtgtgacaccagt

SEQ ID NO: 641332 - DNA, 25 bp, Homo sapien
tctgagtactggactggggttttca

SEQ ID NO: 641333 - DNA, 25 bp, Homo sapien
gcacataggccgtgagaatgcacat

SEQ ID NO: 641334 - DNA, 25 bp, Homo sapien
ggcaccccgttggttctgaggtcaa

SEQ ID NO: 641335 - DNA, 25 bp, Homo sapien
gcttgcgaatctgctccgtctggaa

SEQ ID NO: 641336 - DNA, 25 bp, Homo sapien
tgttgcaaagtaagccgatgggatg

SEQ ID NO: 641337 - DNA, 25 bp, Homo sapien
gcaacttcttatagcgggtgagggc

SEQ ID NO: 641338 - DNA, 25 bp, Homo sapien
aaagacaaagttaccgatgccgcag

SEQ ID NO: 641339 - DNA, 25 bp, Homo sapien
caatgacgatcttggctgcgaagaa

SEQ ID NO: 641340 - DNA, 25 bp, Homo sapien
ggagagctgccgtaccacgtagtag

SEQ ID NO: 641341 - DNA, 25 bp, Homo sapien
attaaagttgggtgtgaaactggtg

SEQ ID NO: 641342 - DNA, 25 bp, Homo sapien
tggattaaagttgggtgtgaaactg

SEQ ID NO: 641343 - DNA, 25 bp, Homo sapien
aactggtgtttccattctgggctgc

SEQ ID NO: 641344 - DNA, 25 bp, Homo sapien
ctctttcagggtcagtgagcctagc

SEQ ID NO: 641345 - DNA, 25 bp, Homo sapien
ctgcaagaaaagtggtgtgagggag

SEQ ID NO: 641346 - DNA, 25 bp, Homo sapien
gagcctagcaccctgcccacatcct

SEQ ID NO: 641347 - DNA, 25 bp, Homo sapien
ggtgagggtccagaccttctgctct

SEQ ID NO: 641348 - DNA, 25 bp, Homo sapien
caggagaacatctggtcacattccc

SEQ ID NO: 641349 - DNA, 25 bp, Homo sapien
ccagtgggcaacatgcaggagaaca

SEQ ID NO: 641350 - DNA, 25 bp, Homo sapien
tggaaggaggcacaaccagtgggca

SEQ ID NO: 641351 - DNA, 25 bp, Homo sapien
aagtataggccaaccagacccactg

SEQ ID NO: 641352 - DNA, 25 bp, Homo sapien
gctggccaggctcctacagctgtca

SEQ ID NO: 641353 - DNA, 25 bp, Homo sapien
gaactctcaagaagaatgtgcacct

SEQ ID NO: 641354 - DNA, 25 bp, Homo sapien
gaaggacagcataggatggatcaga

SEQ ID NO: 641355 - DNA, 25 bp, Homo sapien
cctgagatctgtaagttgggaaacc

SEQ ID NO: 641356 - DNA, 25 bp, Homo sapien
tgggtagcaaggagatgacccagct

SEQ ID NO: 641357 - DNA, 25 bp, Homo sapien
acgactccacatgtgggcgccgcgg

SEQ ID NO: 641358 - DNA, 25 bp, Homo sapien
actccacatgtgggcgccgcgggat

SEQ ID NO: 641359 - DNA, 25 bp, Homo sapien
ggtagcaaggagatgacccagctga

SEQ ID NO: 641360 - DNA, 25 bp, Homo sapien
cacacccggaggtgtcttctctcca

SEQ ID NO: 641361 - DNA, 25 bp, Homo sapien
tctgctcagcgtgggaccaagaatg

SEQ ID NO: 641362 - DNA, 25 bp, Homo sapien
gatgcaaatcccagtggcgtccaca

SEQ ID NO: 641363 - DNA, 25 bp, Homo sapien
ggtcgcccctccgtctcatgcgaca

SEQ ID NO: 641364 - DNA, 25 bp, Homo sapien
gaagccggatcgagagtcacagtgt

SEQ ID NO: 641365 - DNA, 25 bp, Homo sapien
ggccgctcggttttcacctcgagga

SEQ ID NO: 641366 - DNA, 25 bp, Homo sapien
gtcacagtgtggttgggcgcaggcg

SEQ ID NO: 641367 - DNA, 25 bp, Homo sapien
tgcacttgcagagccgctgcgtggg

SEQ ID NO: 641368 - DNA, 25 bp, Homo sapien
gaatcggaccacacagtagccgggt

SEQ ID NO: 641369 - DNA, 25 bp, Homo sapien
gcagcctctcgcacggatttcagcg

SEQ ID NO: 641370 - DNA, 25 bp, Homo sapien
ttcgcatcccgtctgaatcggacca

SEQ ID NO: 641371 - DNA, 25 bp, Homo sapien
ggatttcagcgccttcgcatcccgt

SEQ ID NO: 641372 - DNA, 25 bp, Homo sapien
agagtcctgtcttccggaggtgccc

SEQ ID NO: 641373 - DNA, 25 bp, Homo sapien
tgcgcttgggaacagtgagcaccgc

SEQ ID NO: 641374 - DNA, 25 bp, Homo sapien
agcgtccgcgcccactagaaggtga

SEQ ID NO: 641375 - DNA, 25 bp, Homo sapien
ctctgccgccagtcgtggcaccgca

SEQ ID NO: 641376 - DNA, 25 bp, Homo sapien
tcagcccatctgtccggagagtctg

SEQ ID NO: 641377 - DNA, 25 bp, Homo sapien
aagacaatcccaggagtgcctcagc

SEQ ID NO: 641378 - DNA, 25 bp, Homo sapien
cactatcagattccatggccgtata

SEQ ID NO: 641379 - DNA, 25 bp, Homo sapien
caaactttgcgatgaccaccactat

SEQ ID NO: 641380 - DNA, 25 bp, Homo sapien
ttaaacacaggaactgcccattcaa

SEQ ID NO: 641381 - DNA, 25 bp, Homo sapien
tggttaaacacaggaactgcccatt

SEQ ID NO: 641382 - DNA, 25 bp, Homo sapien
ggttaaacacaggaactgcccattc

SEQ ID NO: 641383 - DNA, 25 bp, Homo sapien
ctggttaaacacaggaactgcccat

SEQ ID NO: 641384 - DNA, 25 bp, Homo sapien
ctgtggcaggaccctgaaggtctaa

SEQ ID NO: 641385 - DNA, 25 bp, Homo sapien
tgtggcaggaccctgaaggtctaaa

SEQ ID NO: 641386 - DNA, 25 bp, Homo sapien
tggcaggaccctgaaggtctaaaaa

SEQ ID NO: 641387 - DNA, 25 bp, Homo sapien
gtggcaggaccctgaaggtctaaaa

SEQ ID NO: 641388 - DNA, 25 bp, Homo sapien
tggaacctgaccccactctccctac

SEQ ID NO: 641389 - DNA, 25 bp, Homo sapien
ctggaacctgaccccactctcccta

SEQ ID NO: 641390 - DNA, 25 bp, Homo sapien
gctgcgattgggcaggtgttctaca

SEQ ID NO: 641391 - DNA, 25 bp, Homo sapien
gctcagggcaacttccagatatgga

SEQ ID NO: 641392 - DNA, 25 bp, Homo sapien
tcttagcatctctcccgcatgatca

SEQ ID NO: 641393 - DNA, 25 bp, Homo sapien
catgatcaaaggcaagagagccagc

SEQ ID NO: 641394 - DNA, 25 bp, Homo sapien
gcagagtgactctgtaggatacacc

SEQ ID NO: 641395 - DNA, 25 bp, Homo sapien
ggttctgcagagtgactctgtagga

SEQ ID NO: 641396 - DNA, 25 bp, Homo sapien
aggatacacctgctgactcacctgg

SEQ ID NO: 641397 - DNA, 25 bp, Homo sapien
ggatacacctgctgactcacctggc

SEQ ID NO: 641398 - DNA, 25 bp, Homo sapien
aagatatcctgccatttacattaat

SEQ ID NO: 641399 - DNA, 25 bp, Homo sapien
taaagtgttggtgatcaagatatcc

SEQ ID NO: 641400 - DNA, 25 bp, Homo sapien
tcattcatcgacacaccagccaggt

SEQ ID NO: 641401 - DNA, 25 bp, Homo sapien
cagctagctgagtccttcattcatc

SEQ ID NO: 641402 - DNA, 25 bp, Homo sapien
gctctactgttgagagaaagtggtc

SEQ ID NO: 641403 - DNA, 25 bp, Homo sapien
ccctgtccagggatgctctactgtt

SEQ ID NO: 641404 - DNA, 25 bp, Homo sapien
ttgagagaaagtggtcttcaccagc

SEQ ID NO: 641405 - DNA, 25 bp, Homo sapien
ccagggatgctctactgttgagaga

SEQ ID NO: 641406 - DNA, 25 bp, Homo sapien
tgttccccctgggggccgctcctga

SEQ ID NO: 641407 - DNA, 25 bp, Homo sapien
tgtcctgtatccagcatcttcctgt

SEQ ID NO: 641408 - DNA, 25 bp, Homo sapien
agcatcttcctgttgttccccctgg

SEQ ID NO: 641409 - DNA, 25 bp, Homo sapien
tatgtcctgtatccagcatcttcct

SEQ ID NO: 641410 - DNA, 25 bp, Homo sapien
tccttatcagctttctggtgatcta

SEQ ID NO: 641411 - DNA, 25 bp, Homo sapien
cctgcttgtatttcggtggacgcca

SEQ ID NO: 641412 - DNA, 25 bp, Homo sapien
ttccatcttgccgactggctccctg

SEQ ID NO: 641413 - DNA, 25 bp, Homo sapien
gatctagcgcatctttgactcccct

SEQ ID NO: 641414 - DNA, 25 bp, Homo sapien
cagataggcgtgttcttggttattc

SEQ ID NO: 641415 - DNA, 25 bp, Homo sapien
cacaaacaaccttgcctgagtctgg

SEQ ID NO: 641416 - DNA, 25 bp, Homo sapien
gggacgcctttccagacgcatcaaa

SEQ ID NO: 641417 - DNA, 25 bp, Homo sapien
ccatgttccgggtgcaacgagagaa

SEQ ID NO: 641418 - DNA, 25 bp, Homo sapien
tgagactgggagtttccaagacacc

SEQ ID NO: 641419 - DNA, 25 bp, Homo sapien
tactgactgcttaggctccacgcac

SEQ ID NO: 641420 - DNA, 25 bp, Homo sapien
ctgtgagggcgacagcagcagttat

SEQ ID NO: 641421 - DNA, 25 bp, Homo sapien
cacgcaccatgctgggtagaccctt

SEQ ID NO: 641422 - DNA, 25 bp, Homo sapien
tctgagttggacatgcccattttgc

SEQ ID NO: 641423 - DNA, 25 bp, Homo sapien
gctgccttcacaagcccaccttctg

SEQ ID NO: 641424 - DNA, 25 bp, Homo sapien
acctcctcatcccaggatctaagga

SEQ ID NO: 641425 - DNA, 25 bp, Homo sapien
ccaggaggatttggaccccgggctg

SEQ ID NO: 641426 - DNA, 25 bp, Homo sapien
cgctaagctgaagagccaggaggat

SEQ ID NO: 641427 - DNA, 25 bp, Homo sapien
tcccacttgctggatcaaagaggtg

SEQ ID NO: 641428 - DNA, 25 bp, Homo sapien
ggtatcacggtcttgtgtgcaaaga

SEQ ID NO: 641429 - DNA, 25 bp, Homo sapien
gaaggaacttccatgagactctccc

SEQ ID NO: 641430 - DNA, 25 bp, Homo sapien
gcaaaagagcccctagcagctgtgt

SEQ ID NO: 641431 - DNA, 25 bp, Homo sapien
ttgtgtgggaagacatcacagtggc

SEQ ID NO: 641432 - DNA, 25 bp, Homo sapien
tcctgctgactcgtccaccatggga

SEQ ID NO: 641433 - DNA, 25 bp, Homo sapien
gctgcggcactcactgcctactctg

SEQ ID NO: 641434 - DNA, 25 bp, Homo sapien
acttggcacttcttgtgtgggaaga

SEQ ID NO: 641435 - DNA, 25 bp, Homo sapien
aagatgctccaatttcatcttgtat

SEQ ID NO: 641436 - DNA, 25 bp, Homo sapien
ggagctaggtgtgctagtggctact

SEQ ID NO: 641437 - DNA, 25 bp, Homo sapien
tgttgtttcattcaggtactttcac

SEQ ID NO: 641438 - DNA, 25 bp, Homo sapien
agtggctactgggtgttgtttcatt

SEQ ID NO: 641439 - DNA, 25 bp, Homo sapien
tggttaccacacacagaaattggga

SEQ ID NO: 641440 - DNA, 25 bp, Homo sapien
ctggaggctccaattccaaggtggc

SEQ ID NO: 641441 - DNA, 25 bp, Homo sapien
gagccagccctgattcaatgcgcaa

SEQ ID NO: 641442 - DNA, 25 bp, Homo sapien
acatgaatacgaggaggcaggaacc

SEQ ID NO: 641443 - DNA, 25 bp, Homo sapien
tttctgggaggcagcaaggatctga

SEQ ID NO: 641444 - DNA, 25 bp, Homo sapien
gaagatcaggtcaccgggctgaaga

SEQ ID NO: 641445 - DNA, 25 bp, Homo sapien
tcctggcaagctacattggacttag

SEQ ID NO: 641446 - DNA, 25 bp, Homo sapien
ggctgaagagtagcccgaagatctt

SEQ ID NO: 641447 - DNA, 25 bp, Homo sapien
gtggcagattcgataacaaccgctc

SEQ ID NO: 641448 - DNA, 25 bp, Homo sapien
gataacaaccgctctaattcatcat

SEQ ID NO: 641449 - DNA, 25 bp, Homo sapien
gattcgataacaaccgctctaattc

SEQ ID NO: 641450 - DNA, 25 bp, Homo sapien
tctggtggcagattcgataacaacc

SEQ ID NO: 641451 - DNA, 25 bp, Homo sapien
ttgatgtggtgctggactcggttta

SEQ ID NO: 641452 - DNA, 25 bp, Homo sapien
tgttgtgtgcaaacagaaaaaattg

SEQ ID NO: 641453 - DNA, 25 bp, Homo sapien
gtgctggactcggtttaccagtatt

SEQ ID NO: 641454 - DNA, 25 bp, Homo sapien
catgttgtgtgcaaacagaaaaaat

SEQ ID NO: 641455 - DNA, 25 bp, Homo sapien
tcctattgggccatcttggccccct

SEQ ID NO: 641456 - DNA, 25 bp, Homo sapien
cttctgcgttggtctttctgggagc

SEQ ID NO: 641457 - DNA, 25 bp, Homo sapien
attgggccatcttggcccccttcag

SEQ ID NO: 641458 - DNA, 25 bp, Homo sapien
tattgggccatcttggcccccttca

SEQ ID NO: 641459 - DNA, 25 bp, Homo sapien
tcttcctggacttgcgataacaact

SEQ ID NO: 641460 - DNA, 25 bp, Homo sapien
gttctgttgctcaataaagctcttc

SEQ ID NO: 641461 - DNA, 25 bp, Homo sapien
tggacttgcgataacaactcaggac

SEQ ID NO: 641462 - DNA, 25 bp, Homo sapien
cagttgcctgagtaacctcattctt

SEQ ID NO: 641463 - DNA, 25 bp, Homo sapien
aacctcaactcacttgtgtaaccag

SEQ ID NO: 641464 - DNA, 25 bp, Homo sapien
caaaaaagccagcatcgcaaactca

SEQ ID NO: 641465 - DNA, 25 bp, Homo sapien
gcaccaaatcaagaaatatacaaaa

SEQ ID NO: 641466 - DNA, 25 bp, Homo sapien
caaaaaacctgattcgaaaatgagc

SEQ ID NO: 641467 - DNA, 25 bp, Homo sapien
cacattgtggcataaaccgtgtccg

SEQ ID NO: 641468 - DNA, 25 bp, Homo sapien
cgtgtccgggtgtgaatgtccacag

SEQ ID NO: 641469 - DNA, 25 bp, Homo sapien
gtccctgtatacactcaggtgcaca

SEQ ID NO: 641470 - DNA, 25 bp, Homo sapien
tccaatgtccctgtatacactcagg

SEQ ID NO: 641471 - DNA, 25 bp, Homo sapien
tgagctgaagcaggaattctccact

SEQ ID NO: 641472 - DNA, 25 bp, Homo sapien
tatggcaactgctcttcaagggaca

SEQ ID NO: 641473 - DNA, 25 bp, Homo sapien
tggtctctatggagcccatctgtgg

SEQ ID NO: 641474 - DNA, 25 bp, Homo sapien
gagacttccaccttacaccagtgcg

SEQ ID NO: 641475 - DNA, 25 bp, Homo sapien
agaaactggcagagctcgcggagga

SEQ ID NO: 641476 - DNA, 25 bp, Homo sapien
aactggcagagctcgcggaggaagc

SEQ ID NO: 641477 - DNA, 25 bp, Homo sapien
gcagagctcgcggaggaagccacca

SEQ ID NO: 641478 - DNA, 25 bp, Homo sapien
agagctcgcggaggaagccaccagc

SEQ ID NO: 641479 - DNA, 25 bp, Homo sapien
tgtccatcaaagttgcaatgcagcc

SEQ ID NO: 641480 - DNA, 25 bp, Homo sapien
caaagttgcaatgcagccctaacgc

SEQ ID NO: 641481 - DNA, 25 bp, Homo sapien
agccctaacgcctggcatccttgaa

SEQ ID NO: 641482 - DNA, 25 bp, Homo sapien
cccagtgtccatcaaagttgcaatg

SEQ ID NO: 641483 - DNA, 25 bp, Homo sapien
gaagggaactccgtgtcaaggcacc

SEQ ID NO: 641484 - DNA, 25 bp, Homo sapien
gagcaggtacacaacacacaaggat

SEQ ID NO: 641485 - DNA, 25 bp, Homo sapien
tcttggccacaggactcagtttgct

SEQ ID NO: 641486 - DNA, 25 bp, Homo sapien
ggcacatacatgctcaacacgtgaa

SEQ ID NO: 641487 - DNA, 25 bp, Homo sapien
actgctgcgtgggcaagtggcactg

SEQ ID NO: 641488 - DNA, 25 bp, Homo sapien
tgctgcgtgggcaagtggcactggc

SEQ ID NO: 641489 - DNA, 25 bp, Homo sapien
gtgactgctgcgtgggcaagtggca

SEQ ID NO: 641490 - DNA, 25 bp, Homo sapien
tgactgctgcgtgggcaagtggcac

SEQ ID NO: 641491 - DNA, 25 bp, Homo sapien
ggaaacagttcaaatgtccaccagc

SEQ ID NO: 641492 - DNA, 25 bp, Homo sapien
tgtcctaaatgtgagttgtccagcc

SEQ ID NO: 641493 - DNA, 25 bp, Homo sapien
tgatgtcacctgttgccggagagag

SEQ ID NO: 641494 - DNA, 25 bp, Homo sapien
taccaacattttgacaggctaagag

SEQ ID NO: 641495 - DNA, 25 bp, Homo sapien
gattaagattctatgctggccagca

SEQ ID NO: 641496 - DNA, 25 bp, Homo sapien
gtgggaaatggccttacagcagctc

SEQ ID NO: 641497 - DNA, 25 bp, Homo sapien
tgtgatccgtgcctttacccagaag

SEQ ID NO: 641498 - DNA, 25 bp, Homo sapien
tactaacccaggtgcagcatgaggt

SEQ ID NO: 641499 - DNA, 25 bp, Homo sapien
cagactcatccttaagtggctcagg

SEQ ID NO: 641500 - DNA, 25 bp, Homo sapien
ttccccactgatgcactgaggtcca

SEQ ID NO: 641501 - DNA, 25 bp, Homo sapien
cacagctgggtggtcagtatgacca

SEQ ID NO: 641502 - DNA, 25 bp, Homo sapien
gaactaccttaggaattgccacctc

SEQ ID NO: 641503 - DNA, 25 bp, Homo sapien
ttatccgtttctctttaagggcagc

SEQ ID NO: 641504 - DNA, 25 bp, Homo sapien
cttattcggtgtagagggtgcaaac

SEQ ID NO: 641505 - DNA, 25 bp, Homo sapien
caaatggtggatggctgtcctttcc

SEQ ID NO: 641506 - DNA, 25 bp, Homo sapien
ggtgcaggtggaaactcagtagtca

SEQ ID NO: 641507 - DNA, 25 bp, Homo sapien
taaaaggtgtcgtggcctcatgata

SEQ ID NO: 641508 - DNA, 25 bp, Homo sapien
gagagtcgctgtggctgttccaagc

SEQ ID NO: 641509 - DNA, 25 bp, Homo sapien
tttggagagtcgctgtggctgttcc

SEQ ID NO: 641510 - DNA, 25 bp, Homo sapien
gatttggagagtcgctgtggctgtt

SEQ ID NO: 641511 - DNA, 25 bp, Homo sapien
tggagagtcgctgtggctgttccaa

SEQ ID NO: 641512 - DNA, 25 bp, Homo sapien
tatttcttctccaaagctcaactca

SEQ ID NO: 641513 - DNA, 25 bp, Homo sapien
attggccattccatactgctctgga

SEQ ID NO: 641514 - DNA, 25 bp, Homo sapien
gtcatagagcatcttgagaccacct

SEQ ID NO: 641515 - DNA, 25 bp, Homo sapien
cacacttaaagtatcattgggtctg

SEQ ID NO: 641516 - DNA, 25 bp, Homo sapien
cattgctccccagaaaggttgcact

SEQ ID NO: 641517 - DNA, 25 bp, Homo sapien
acattgctccccagaaaggttgcac

SEQ ID NO: 641518 - DNA, 25 bp, Homo sapien
attgctccccagaaaggttgcactg

SEQ ID NO: 641519 - DNA, 25 bp, Homo sapien
tcctttcagagtcggtggcttcctt

SEQ ID NO: 641520 - DNA, 25 bp, Homo sapien
cttctgtctcatccagtgaactgag

SEQ ID NO: 641521 - DNA, 25 bp, Homo sapien
accttcaatgtctatagttatgcca

SEQ ID NO: 641522 - DNA, 25 bp, Homo sapien
tgtctatagttatgccacatagaaa

SEQ ID NO: 641523 - DNA, 25 bp, Homo sapien
tgacgactgaagacaagactgccac

SEQ ID NO: 641524 - DNA, 25 bp, Homo sapien
taatgttgccatccaagtggtagcc

SEQ ID NO: 641525 - DNA, 25 bp, Homo sapien
caaataagttctgggcgtgccagca

SEQ ID NO: 641526 - DNA, 25 bp, Homo sapien
gaagtgcagctgagagaaccctgag

SEQ ID NO: 641527 - DNA, 25 bp, Homo sapien
gagtagcactcaccaagagacctag

SEQ ID NO: 641528 - DNA, 25 bp, Homo sapien
gtagagcacctgaccagctgggaaa

SEQ ID NO: 641529 - DNA, 25 bp, Homo sapien
gatgagctaagaatggaacccgtgt

SEQ ID NO: 641530 - DNA, 25 bp, Homo sapien
gaggtagcggtgtcattgagcccca

SEQ ID NO: 641531 - DNA, 25 bp, Homo sapien
gactcgctgctcaggaacataggct

SEQ ID NO: 641532 - DNA, 25 bp, Homo sapien
cataggcttccacagacagaggtaa

SEQ ID NO: 641533 - DNA, 25 bp, Homo sapien
taaggatatgaaccagccaggctgg

SEQ ID NO: 641534 - DNA, 25 bp, Homo sapien
gaaactccctgaatagccaagtgtg

SEQ ID NO: 641535 - DNA, 25 bp, Homo sapien
ggccagggtccatcttcagcagttg

SEQ ID NO: 641536 - DNA, 25 bp, Homo sapien
ctcttcgcctgcagatagctgggca

SEQ ID NO: 641537 - DNA, 25 bp, Homo sapien
tagcctgctcatatggacatggaag

SEQ ID NO: 641538 - DNA, 25 bp, Homo sapien
gcaagatgtccttcaggcccctaaa

SEQ ID NO: 641539 - DNA, 25 bp, Homo sapien
agcatggacagtgcaaaggcagtca

SEQ ID NO: 641540 - DNA, 25 bp, Homo sapien
gcatggacagtgcaaaggcagtcat

SEQ ID NO: 641541 - DNA, 25 bp, Homo sapien
gagcatggacagtgcaaaggcagtc

SEQ ID NO: 641542 - DNA, 25 bp, Homo sapien
agctgactacgctgctgagcaaatc

SEQ ID NO: 641543 - DNA, 25 bp, Homo sapien
cacagctgactacgctgctgagcaa

SEQ ID NO: 641544 - DNA, 25 bp, Homo sapien
cagctgactacgctgctgagcaaat

SEQ ID NO: 641545 - DNA, 25 bp, Homo sapien
acagctgactacgctgctgagcaaa

SEQ ID NO: 641546 - DNA, 25 bp, Homo sapien
caaatgatcaaagtgatagcgtttt

SEQ ID NO: 641547 - DNA, 25 bp, Homo sapien
gagttggagggaagcgcttcccacc

SEQ ID NO: 641548 - DNA, 25 bp, Homo sapien
tagcgttttctatgttacgtgtctg

SEQ ID NO: 641549 - DNA, 25 bp, Homo sapien
ccaccagaaacccacttgtgtcggt

SEQ ID NO: 641550 - DNA, 25 bp, Homo sapien
gttcagatcatgacctccgcaacgg

SEQ ID NO: 641551 - DNA, 25 bp, Homo sapien
atcccagccagctccgaaggaggcc

SEQ ID NO: 641552 - DNA, 25 bp, Homo sapien
tccgcaacggccacggctgggtgac

SEQ ID NO: 641553 - DNA, 25 bp, Homo sapien
tgggtgacatcgtcactccccaggg

SEQ ID NO: 641554 - DNA, 25 bp, Homo sapien
tgaccacgaatactctgccaactgc

SEQ ID NO: 641555 - DNA, 25 bp, Homo sapien
tggcctgaccctgctgaccacgggt

SEQ ID NO: 641556 - DNA, 25 bp, Homo sapien
ggcccggtgcaggagcaccctttgt

SEQ ID NO: 641557 - DNA, 25 bp, Homo sapien
tggtgactccccatccgcggaggct

SEQ ID NO: 641558 - DNA, 25 bp, Homo sapien
ctgagtgaccgagacagctcagtct

SEQ ID NO: 641559 - DNA, 25 bp, Homo sapien
cagtctagagtctcgactacccggg

SEQ ID NO: 641560 - DNA, 25 bp, Homo sapien
acccggagacgtgggctttgtcagt

SEQ ID NO: 641561 - DNA, 25 bp, Homo sapien
acagattctgcctccgggaaccaac

SEQ ID NO: 641562 - DNA, 25 bp, Homo sapien
gaactcttggggtgaaaccatcctc

SEQ ID NO: 641563 - DNA, 25 bp, Homo sapien
ttcttcagcctgtgcaatacctatg

SEQ ID NO: 641564 - DNA, 25 bp, Homo sapien
tgcttgcacgggtgcaagcatcagc

SEQ ID NO: 641565 - DNA, 25 bp, Homo sapien
cttggggtgaaaccatcctccttct

SEQ ID NO: 641566 - DNA, 25 bp, Homo sapien
cctaataagtgttgaagggtgcaga

SEQ ID NO: 641567 - DNA, 25 bp, Homo sapien
aaaggtggatggctgtgccgttcct

SEQ ID NO: 641568 - DNA, 25 bp, Homo sapien
gaaactcaggagttgaaaggtggat

SEQ ID NO: 641569 - DNA, 25 bp, Homo sapien
taggtgcatgaattctttcttaggg

SEQ ID NO: 641570 - DNA, 25 bp, Homo sapien
ggagagttgctgtgactgtgccgag

SEQ ID NO: 641571 - DNA, 25 bp, Homo sapien
atccgagtgtacttttgaagagtag

SEQ ID NO: 641572 - DNA, 25 bp, Homo sapien
tgaagagtagttcctgagcattccc

SEQ ID NO: 641573 - DNA, 25 bp, Homo sapien
tgatttcagaggtacaataaggaaa

SEQ ID NO: 641574 - DNA, 25 bp, Homo sapien
caggcagcagaagaccatagagcag

SEQ ID NO: 641575 - DNA, 25 bp, Homo sapien
gctgaagtttccaggtcgaaacttc

SEQ ID NO: 641576 - DNA, 25 bp, Homo sapien
cgaaacttctgtgctcgacctggaa

SEQ ID NO: 641577 - DNA, 25 bp, Homo sapien
ttccaggtcgaaacttctgtgctcg

SEQ ID NO: 641578 - DNA, 25 bp, Homo sapien
tgctcgacctggaagtttgtgctca

SEQ ID NO: 641579 - DNA, 25 bp, Homo sapien
gagcttcaccagggaaactgtggca

SEQ ID NO: 641580 - DNA, 25 bp, Homo sapien
ttcaccagggaaactgtggcaggag

SEQ ID NO: 641581 - DNA, 25 bp, Homo sapien
gacaaggtcttgattctgaggcctc

SEQ ID NO: 641582 - DNA, 25 bp, Homo sapien
gcaggagacaaggtcttgattctga

SEQ ID NO: 641583 - DNA, 25 bp, Homo sapien
cagatatgactgtggggccccaagg

SEQ ID NO: 641584 - DNA, 25 bp, Homo sapien
agatatgactgtggggccccaaggc

SEQ ID NO: 641585 - DNA, 25 bp, Homo sapien
gagggacgtgggagtccttgtcaga

SEQ ID NO: 641586 - DNA, 25 bp, Homo sapien
ggaacccagggaccgagagaaggca

SEQ ID NO: 641587 - DNA, 25 bp, Homo sapien
caggatccaggttagccggggaggg

SEQ ID NO: 641588 - DNA, 25 bp, Homo sapien
cagggaccgagagaaggcaggtgtt

SEQ ID NO: 641589 - DNA, 25 bp, Homo sapien
tttcaagacgctgctagaggcagtg

SEQ ID NO: 641590 - DNA, 25 bp, Homo sapien
ttcaagacgctgctagaggcagtga

SEQ ID NO: 641591 - DNA, 25 bp, Homo sapien
agctcttgaatccagaatcaggatg

SEQ ID NO: 641592 - DNA, 25 bp, Homo sapien
aagctcttgaatccagaatcaggat

SEQ ID NO: 641593 - DNA, 25 bp, Homo sapien
aggtcagccacagcatcctggacac

SEQ ID NO: 641594 - DNA, 25 bp, Homo sapien
ttggggaccacggatggaagtgtag

SEQ ID NO: 641595 - DNA, 25 bp, Homo sapien
cacactccctccaggaggtcagcca

SEQ ID NO: 641596 - DNA, 25 bp, Homo sapien
cacagcatcctggacactgaggttg

SEQ ID NO: 641597 - DNA, 25 bp, Homo sapien
tggccctttgatgataattacttag

SEQ ID NO: 641598 - DNA, 25 bp, Homo sapien
gaaagtggaaggacaacgcctcagt

SEQ ID NO: 641599 - DNA, 25 bp, Homo sapien
tgcttcaaaagacgagaagtcgtgg

SEQ ID NO: 641600 - DNA, 25 bp, Homo sapien
tccaaaatcatgtacaagccccgtt

SEQ ID NO: 641601 - DNA, 25 bp, Homo sapien
gaaaacctcttatgtcggagctggt

SEQ ID NO: 641602 - DNA, 25 bp, Homo sapien
gaatttacacttgttcgagcccaca

SEQ ID NO: 641603 - DNA, 25 bp, Homo sapien
acatcagtaaccaaaacgaggccca

SEQ ID NO: 641604 - DNA, 25 bp, Homo sapien
caagtcttcaagtggaagtgcctca

SEQ ID NO: 641605 - DNA, 25 bp, Homo sapien
gcttcccatgataattcatcagaac

SEQ ID NO: 641606 - DNA, 25 bp, Homo sapien
cttcccatgataattcatcagaacc

SEQ ID NO: 641607 - DNA, 25 bp, Homo sapien
ttcccatgataattcatcagaacct

SEQ ID NO: 641608 - DNA, 25 bp, Homo sapien
ccagtcagctagcgactccagaata

SEQ ID NO: 641609 - DNA, 25 bp, Homo sapien
agtcagctagcgactccagaataat

SEQ ID NO: 641610 - DNA, 25 bp, Homo sapien
cagtcagctagcgactccagaataa

SEQ ID NO: 641611 - DNA, 25 bp, Homo sapien
gtcagctagcgactccagaataatc

SEQ ID NO: 641612 - DNA, 25 bp, Homo sapien
tgtgttgcaaacacacgcagcattt

SEQ ID NO: 641613 - DNA, 25 bp, Homo sapien
atgatgtgttgcaaacacacgcagc

SEQ ID NO: 641614 - DNA, 25 bp, Homo sapien
cctgtttctatgatgatgtgttgca

SEQ ID NO: 641615 - DNA, 25 bp, Homo sapien
ctgtttctatgatgatgtgttgcaa

SEQ ID NO: 641616 - DNA, 25 bp, Homo sapien
cttttggtgcagagtgtgtatgtcg

SEQ ID NO: 641617 - DNA, 25 bp, Homo sapien
tttggtgcagagtgtgtatgtcgca

SEQ ID NO: 641618 - DNA, 25 bp, Homo sapien
ttttggtgcagagtgtgtatgtcgc

SEQ ID NO: 641619 - DNA, 25 bp, Homo sapien
ttggtgcagagtgtgtatgtcgcac

SEQ ID NO: 641620 - DNA, 25 bp, Homo sapien
cgatgaaagggtttgttcagcgcag

SEQ ID NO: 641621 - DNA, 25 bp, Homo sapien
agcgcagatgacctacttgggttca

SEQ ID NO: 641622 - DNA, 25 bp, Homo sapien
caacgatactcgatgaaagggtttg

SEQ ID NO: 641623 - DNA, 25 bp, Homo sapien
aagccagaagtcaacgatactcgat

SEQ ID NO: 641624 - DNA, 25 bp, Homo sapien
ctttaccaagccctaggtcctgaag

SEQ ID NO: 641625 - DNA, 25 bp, Homo sapien
gggtctttcatggagcaacagtttt

SEQ ID NO: 641626 - DNA, 25 bp, Homo sapien
ttttaatgggtctttcatggagcaa

SEQ ID NO: 641627 - DNA, 25 bp, Homo sapien
caagccctaggtcctgaagattttc

SEQ ID NO: 641628 - DNA, 25 bp, Homo sapien
ttatcgtgaaacaatctgagttagg

SEQ ID NO: 641629 - DNA, 25 bp, Homo sapien
caaaactgtgtttatcgtgaaacaa

SEQ ID NO: 641630 - DNA, 25 bp, Homo sapien
acaaaactgtgtttatcgtgaaaca

SEQ ID NO: 641631 - DNA, 25 bp, Homo sapien
atcgtgaaacaatctgagttaggaa

SEQ ID NO: 641632 - DNA, 25 bp, Homo sapien
tcacaaggagcaacggcagagaggt

SEQ ID NO: 641633 - DNA, 25 bp, Homo sapien
gcctgatcaaggtacgagccgtgga

SEQ ID NO: 641634 - DNA, 25 bp, Homo sapien
tagagatgcaaagacgtccctgccc

SEQ ID NO: 641635 - DNA, 25 bp, Homo sapien
aacagctagtgatacgaaggcccgg

SEQ ID NO: 641636 - DNA, 25 bp, Homo sapien
ccaagaaatcctagtataatctgaa

SEQ ID NO: 641637 - DNA, 25 bp, Homo sapien
tacatttagtaagacctacatttct

SEQ ID NO: 641638 - DNA, 25 bp, Homo sapien
tgcatgatatacaataaagaatact

SEQ ID NO: 641639 - DNA, 25 bp, Homo sapien
tgcttctaatccaagaaatcctagt

SEQ ID NO: 641640 - DNA, 25 bp, Homo sapien
ttaggcaacaaaatacgtccagtcc

SEQ ID NO: 641641 - DNA, 25 bp, Homo sapien
gagactgactggcaattatacctgg

SEQ ID NO: 641642 - DNA, 25 bp, Homo sapien
caagtttcgaggttcaccttcaggc

SEQ ID NO: 641643 - DNA, 25 bp, Homo sapien
tgaatacccagaacagcggtgcacg

SEQ ID NO: 641644 - DNA, 25 bp, Homo sapien
ttaagctctggcaattcctgcttca

SEQ ID NO: 641645 - DNA, 25 bp, Homo sapien
catggatatcagactccccacacaa

SEQ ID NO: 641646 - DNA, 25 bp, Homo sapien
gctcttaagctctggcaattcctgc

SEQ ID NO: 641647 - DNA, 25 bp, Homo sapien
gacacaaacagctcttaagctctgg

SEQ ID NO: 641648 - DNA, 25 bp, Homo sapien
gaatagcagcattgcccttttgtac

SEQ ID NO: 641649 - DNA, 25 bp, Homo sapien
taaagatcgagataagaagactgct

SEQ ID NO: 641650 - DNA, 25 bp, Homo sapien
gaaatgtctagtttacttgtgatct

SEQ ID NO: 641651 - DNA, 25 bp, Homo sapien
tggtttacctaagacctgcctgact

SEQ ID NO: 641652 - DNA, 25 bp, Homo sapien
taacgtcagacacgtccagagtgga

SEQ ID NO: 641653 - DNA, 25 bp, Homo sapien
tgacagccaggcaactatgtaaggc

SEQ ID NO: 641654 - DNA, 25 bp, Homo sapien
taagacggcggactgtcaaaccaga

SEQ ID NO: 641655 - DNA, 25 bp, Homo sapien
caggagcagatcgatgtaagacggc

SEQ ID NO: 641656 - DNA, 25 bp, Homo sapien
gatctctaagtttgatcctgttgac

SEQ ID NO: 641657 - DNA, 25 bp, Homo sapien
tctctaagtttgatcctgttgactt

SEQ ID NO: 641658 - DNA, 25 bp, Homo sapien
cctgccgctgatctctaagtttgat

SEQ ID NO: 641659 - DNA, 25 bp, Homo sapien
caaacctgccgctgatctctaagtt

SEQ ID NO: 641660 - DNA, 25 bp, Homo sapien
cagcagagatgaagggacctcaatc

SEQ ID NO: 641661 - DNA, 25 bp, Homo sapien
acagcagagatgaagggacctcaat

SEQ ID NO: 641662 - DNA, 25 bp, Homo sapien
gcagagatgaagggacctcaatcac

SEQ ID NO: 641663 - DNA, 25 bp, Homo sapien
aacagcagagatgaagggacctcaa

SEQ ID NO: 641664 - DNA, 25 bp, Homo sapien
gtgatgatatatgtgcagctgttct

SEQ ID NO: 641665 - DNA, 25 bp, Homo sapien
cagtgatgatatatgtgcagctgtt

SEQ ID NO: 641666 - DNA, 25 bp, Homo sapien
agtgatgatatatgtgcagctgttc

SEQ ID NO: 641667 - DNA, 25 bp, Homo sapien
ctcagtgatgatatatgtgcagctg

SEQ ID NO: 641668 - DNA, 25 bp, Homo sapien
gacacaatagcagacatgaaaaact

SEQ ID NO: 641669 - DNA, 25 bp, Homo sapien
cattaaatgagaataggatgctaaa

SEQ ID NO: 641670 - DNA, 25 bp, Homo sapien
tgagaataggatgctaaatatatgg

SEQ ID NO: 641671 - DNA, 25 bp, Homo sapien
aattaaagacacaatagcagacatg

SEQ ID NO: 641672 - DNA, 25 bp, Homo sapien
atattaacaagaccacgaaaaggag

SEQ ID NO: 641673 - DNA, 25 bp, Homo sapien
attacttggcagcaacctaaatgtt

SEQ ID NO: 641674 - DNA, 25 bp, Homo sapien
cctaaatgttcctaaatagcagtct

SEQ ID NO: 641675 - DNA, 25 bp, Homo sapien
ttgtggtaaagacaacaatggaata

SEQ ID NO: 641676 - DNA, 25 bp, Homo sapien
gctgggcctcttgaaccaaactgtt

SEQ ID NO: 641677 - DNA, 25 bp, Homo sapien
aagctgggcctcttgaaccaaactg

SEQ ID NO: 641678 - DNA, 25 bp, Homo sapien
aatgcaaagtccttgaaggaaattg

SEQ ID NO: 641679 - DNA, 25 bp, Homo sapien
tgggcctcttgaaccaaactgttaa

SEQ ID NO: 641680 - DNA, 25 bp, Homo sapien
tttcgtaagatgaaatctatacttc

SEQ ID NO: 641681 - DNA, 25 bp, Homo sapien
tatacttctaaattccatgaaaatt

SEQ ID NO: 641682 - DNA, 25 bp, Homo sapien
taatttcgtaagatgaaatctatac

SEQ ID NO: 641683 - DNA, 25 bp, Homo sapien
tttataatttcgtaagatgaaatct

SEQ ID NO: 641684 - DNA, 25 bp, Homo sapien
cctcttgaatataggatgggtttct

SEQ ID NO: 641685 - DNA, 25 bp, Homo sapien
tcccttagcttttgcctcttgaata

SEQ ID NO: 641686 - DNA, 25 bp, Homo sapien
ggatgggtttctgagcaagtcttca

SEQ ID NO: 641687 - DNA, 25 bp, Homo sapien
gagcaagtcttcagtatgtacattt

SEQ ID NO: 641688 - DNA, 25 bp, Homo sapien
ctgaggtccatgagttcaggataaa

SEQ ID NO: 641689 - DNA, 25 bp, Homo sapien
aaatatgttgataagttaccatccc

SEQ ID NO: 641690 - DNA, 25 bp, Homo sapien
caaaatatgttgataagttaccatc

SEQ ID NO: 641691 - DNA, 25 bp, Homo sapien
tgataagttaccatcccacattcca

SEQ ID NO: 641692 - DNA, 25 bp, Homo sapien
tatgttgataagttaccatcccaca

SEQ ID NO: 641693 - DNA, 25 bp, Homo sapien
tcataattcagacatagagactctc

SEQ ID NO: 641694 - DNA, 25 bp, Homo sapien
cacaaagctatttagtgatgacaca

SEQ ID NO: 641695 - DNA, 25 bp, Homo sapien
ccctgacagtatctagtccaactac

SEQ ID NO: 641696 - DNA, 25 bp, Homo sapien
gctatgatgaaaaaacccctgacag

SEQ ID NO: 641697 - DNA, 25 bp, Homo sapien
atttcaatgttaaaccctacatctt

SEQ ID NO: 641698 - DNA, 25 bp, Homo sapien
tatttcaatgttaaaccctacatct

SEQ ID NO: 641699 - DNA, 25 bp, Homo sapien
tagatgggcttcataagtaccttaa

SEQ ID NO: 641700 - DNA, 25 bp, Homo sapien
taacttatttgactaaaaggctgtc

SEQ ID NO: 641701 - DNA, 25 bp, Homo sapien
cctgggaatcatgagatttctaaaa

SEQ ID NO: 641702 - DNA, 25 bp, Homo sapien
aagaaatgatcttacttagatgggc

SEQ ID NO: 641703 - DNA, 25 bp, Homo sapien
aaaaagtagcacaagtatactacac

SEQ ID NO: 641704 - DNA, 25 bp, Homo sapien
caagtatactacacaagaatgaatc

SEQ ID NO: 641705 - DNA, 25 bp, Homo sapien
agaggtttgaattcccttgagacca

SEQ ID NO: 641706 - DNA, 25 bp, Homo sapien
gaggtttgaattcccttgagaccag

SEQ ID NO: 641707 - DNA, 25 bp, Homo sapien
ggaattttcctcctgaaccacagat

SEQ ID NO: 641708 - DNA, 25 bp, Homo sapien
gaattttcctcctgaaccacagatt

SEQ ID NO: 641709 - DNA, 25 bp, Homo sapien
catcttaagagaaggaaatggctga

SEQ ID NO: 641710 - DNA, 25 bp, Homo sapien
gaaatggctgattttctgaaaagga

SEQ ID NO: 641711 - DNA, 25 bp, Homo sapien
cgtgtccagcccctatatatagtat

SEQ ID NO: 641712 - DNA, 25 bp, Homo sapien
cagtttgcaacgattaatagacacc

SEQ ID NO: 641713 - DNA, 25 bp, Homo sapien
gacaccagtctgtagacccaagagt

SEQ ID NO: 641714 - DNA, 25 bp, Homo sapien
tggaacacagtggaatgatcattgc

SEQ ID NO: 641715 - DNA, 25 bp, Homo sapien
ttagaaggcccagtattatactcat

SEQ ID NO: 641716 - DNA, 25 bp, Homo sapien
gatcatcaagctaagaaaagcaatg

SEQ ID NO: 641717 - DNA, 25 bp, Homo sapien
aagcaatgcaatggttactatacac

SEQ ID NO: 641718 - DNA, 25 bp, Homo sapien
tcctattaatgctaactacaaaagg

SEQ ID NO: 641719 - DNA, 25 bp, Homo sapien
tttccgatccttagatttcagtgca

SEQ ID NO: 641720 - DNA, 25 bp, Homo sapien
ctttccgatccttagatttcagtgc

SEQ ID NO: 641721 - DNA, 25 bp, Homo sapien
tagatttcagtgcagtcacatgagt

SEQ ID NO: 641722 - DNA, 25 bp, Homo sapien
atttcagtgcagtcacatgagtgag

SEQ ID NO: 641723 - DNA, 25 bp, Homo sapien
tatcagtttaataagaataagcact

SEQ ID NO: 641724 - DNA, 25 bp, Homo sapien
tagcttatgaagagatggttaacag

SEQ ID NO: 641725 - DNA, 25 bp, Homo sapien
ccttagcttatgaagagatggttaa

SEQ ID NO: 641726 - DNA, 25 bp, Homo sapien
aagcctataaaacgtagaactatca

SEQ ID NO: 641727 - DNA, 25 bp, Homo sapien
aggttcctaatagggacaggaagag

SEQ ID NO: 641728 - DNA, 25 bp, Homo sapien
tcctaatagggacaggaagaggtac

SEQ ID NO: 641729 - DNA, 25 bp, Homo sapien
ttcctaatagggacaggaagaggta

SEQ ID NO: 641730 - DNA, 25 bp, Homo sapien
taggttcctaatagggacaggaaga

SEQ ID NO: 641731 - DNA, 25 bp, Homo sapien
ttgcataaaaggcctattgtaaaat

SEQ ID NO: 641732 - DNA, 25 bp, Homo sapien
aggcctattgtaaaataatgaccat

SEQ ID NO: 641733 - DNA, 25 bp, Homo sapien
taaaaggcctattgtaaaataatga

SEQ ID NO: 641734 - DNA, 25 bp, Homo sapien
gcctattgtaaaataatgaccatta

SEQ ID NO: 641735 - DNA, 25 bp, Homo sapien
tttaacagtcatccccatgtgcaaa

SEQ ID NO: 641736 - DNA, 25 bp, Homo sapien
tcctaaagctaagggataatttaca

SEQ ID NO: 641737 - DNA, 25 bp, Homo sapien
tacaagcaagtacaatagtcctaaa

SEQ ID NO: 641738 - DNA, 25 bp, Homo sapien
gagaacataaccatatacaagcaag

SEQ ID NO: 641739 - DNA, 25 bp, Homo sapien
attcaactggatcagcatcaaattt

SEQ ID NO: 641740 - DNA, 25 bp, Homo sapien
caaataattcaactggatcagcatc

SEQ ID NO: 641741 - DNA, 25 bp, Homo sapien
aataattcaactggatcagcatcaa

SEQ ID NO: 641742 - DNA, 25 bp, Homo sapien
tttcaaataattcaactggatcagc

SEQ ID NO: 641743 - DNA, 25 bp, Homo sapien
gacaggcctagcaactctatttact

SEQ ID NO: 641744 - DNA, 25 bp, Homo sapien
taactgttagtagccatactgagcc

SEQ ID NO: 641745 - DNA, 25 bp, Homo sapien
tgaatgcttacactagacaggccta

SEQ ID NO: 641746 - DNA, 25 bp, Homo sapien
agcccatgcaggacagcccttctaa

SEQ ID NO: 641747 - DNA, 25 bp, Homo sapien
cagaaagctgtagcgctgaagacag

SEQ ID NO: 641748 - DNA, 25 bp, Homo sapien
ctggcagaaagctgtagcgctgaag

SEQ ID NO: 641749 - DNA, 25 bp, Homo sapien
gcagaaagctgtagcgctgaagaca

SEQ ID NO: 641750 - DNA, 25 bp, Homo sapien
ggcagaaagctgtagcgctgaagac

SEQ ID NO: 641751 - DNA, 25 bp, Homo sapien
ttgaaggcacttctacaggaaatga

SEQ ID NO: 641752 - DNA, 25 bp, Homo sapien
gatcaatgtcactctgttgaaggca

SEQ ID NO: 641753 - DNA, 25 bp, Homo sapien
tgaggatagaaccagaagtcagtca

SEQ ID NO: 641754 - DNA, 25 bp, Homo sapien
tacttaagcactctgagctaccatg

SEQ ID NO: 641755 - DNA, 25 bp, Homo sapien
caagatatagcctggtgaaaatggg

SEQ ID NO: 641756 - DNA, 25 bp, Homo sapien
tcaggttcaacttcagatcaagata

SEQ ID NO: 641757 - DNA, 25 bp, Homo sapien
tgaacctgtacatgcataaagtttt

SEQ ID NO: 641758 - DNA, 25 bp, Homo sapien
gaactctcattgattttcagaagta

SEQ ID NO: 641759 - DNA, 25 bp, Homo sapien
tgtaatctgaatagatgcacctcct

SEQ ID NO: 641760 - DNA, 25 bp, Homo sapien
ctcatgtaatctgaatagatgcacc

SEQ ID NO: 641761 - DNA, 25 bp, Homo sapien
aatctgaatagatgcacctccttcc

SEQ ID NO: 641762 - DNA, 25 bp, Homo sapien
catgtaatctgaatagatgcacctc

SEQ ID NO: 641763 - DNA, 25 bp, Homo sapien
tcataataatccaacccctaggaac

SEQ ID NO: 641764 - DNA, 25 bp, Homo sapien
aagggtcctttcctatacataatat

SEQ ID NO: 641765 - DNA, 25 bp, Homo sapien
atatatacatcataataatccaacc

SEQ ID NO: 641766 - DNA, 25 bp, Homo sapien
cctaggaactctgattaaaattcac

SEQ ID NO: 641767 - DNA, 25 bp, Homo sapien
tcaactcagttggaaattaataccc

SEQ ID NO: 641768 - DNA, 25 bp, Homo sapien
gccaactagactaactttaaatcaa

SEQ ID NO: 641769 - DNA, 25 bp, Homo sapien
cacagttttagagtctaagtccccg

SEQ ID NO: 641770 - DNA, 25 bp, Homo sapien
cacttggttacatagtatactgacg

SEQ ID NO: 641771 - DNA, 25 bp, Homo sapien
tcttctggtcccctactccaattca

SEQ ID NO: 641772 - DNA, 25 bp, Homo sapien
ccaattcaggcttacctttcctgta

SEQ ID NO: 641773 - DNA, 25 bp, Homo sapien
tgtcctctgaaattcctatttcatc

SEQ ID NO: 641774 - DNA, 25 bp, Homo sapien
cctactccaattcaggcttaccttt

SEQ ID NO: 641775 - DNA, 25 bp, Homo sapien
tcactgaggccctccaccatctaac

SEQ ID NO: 641776 - DNA, 25 bp, Homo sapien
gaggccctccaccatctaactccaa

SEQ ID NO: 641777 - DNA, 25 bp, Homo sapien
actgaggccctccaccatctaactc

SEQ ID NO: 641778 - DNA, 25 bp, Homo sapien
cctcttcactgaggccctccaccat

SEQ ID NO: 641779 - DNA, 25 bp, Homo sapien
caaacactatgatatcttcctctct

SEQ ID NO: 641780 - DNA, 25 bp, Homo sapien
aattgaagaagcttgaagcagaaac

SEQ ID NO: 641781 - DNA, 25 bp, Homo sapien
tgtggctcactagccttattaattg

SEQ ID NO: 641782 - DNA, 25 bp, Homo sapien
cctagaaaacaaacactatgatatc

SEQ ID NO: 641783 - DNA, 25 bp, Homo sapien
caacaggtaagatcatgatatacca

SEQ ID NO: 641784 - DNA, 25 bp, Homo sapien
ctttttcatagtcaaacaacaggta

SEQ ID NO: 641785 - DNA, 25 bp, Homo sapien
gtcaaacaacaggtaagatcatgat

SEQ ID NO: 641786 - DNA, 25 bp, Homo sapien
ttttcatagtcaaacaacaggtaag

SEQ ID NO: 641787 - DNA, 25 bp, Homo sapien
caaaagcacagctactttttcctgg

SEQ ID NO: 641788 - DNA, 25 bp, Homo sapien
tacacagtacctctcaaactgcaag

SEQ ID NO: 641789 - DNA, 25 bp, Homo sapien
ctgcaagaacgtaagaaatttttgt

SEQ ID NO: 641790 - DNA, 25 bp, Homo sapien
gcctggtacacagtacctctcaaac

SEQ ID NO: 641791 - DNA, 25 bp, Homo sapien
cagcaaaatgtcagtacggaatgaa

SEQ ID NO: 641792 - DNA, 25 bp, Homo sapien
gatgatgctcatgtccggtttccta

SEQ ID NO: 641793 - DNA, 25 bp, Homo sapien
gcagtccactgtacagcctttctca

SEQ ID NO: 641794 - DNA, 25 bp, Homo sapien
aagaggaagccataactgctgatga

SEQ ID NO: 641795 - DNA, 25 bp, Homo sapien
agtattttcttgaactttagccagc

SEQ ID NO: 641796 - DNA, 25 bp, Homo sapien
tagtattttcttgaactttagccag

SEQ ID NO: 641797 - DNA, 25 bp, Homo sapien
caaagtgtactttcaacaatgggaa

SEQ ID NO: 641798 - DNA, 25 bp, Homo sapien
caacaatgggaaatggtacttattc

SEQ ID NO: 641799 - DNA, 25 bp, Homo sapien
aatacagttaacatagactatagag

SEQ ID NO: 641800 - DNA, 25 bp, Homo sapien
tactttcaacaatgggaaatggtac

SEQ ID NO: 641801 - DNA, 25 bp, Homo sapien
gagtttcctgcacctcgatggccaa

SEQ ID NO: 641802 - DNA, 25 bp, Homo sapien
tgggcagttgttgtagagtttcctg

SEQ ID NO: 641803 - DNA, 25 bp, Homo sapien
cctcgatggccaacatccaatggta

SEQ ID NO: 641804 - DNA, 25 bp, Homo sapien
tgttgtagagtttcctgcacctcga

SEQ ID NO: 641805 - DNA, 25 bp, Homo sapien
tatcctggtaatggcttaataatta

SEQ ID NO: 641806 - DNA, 25 bp, Homo sapien
cctggtaatggcttaataattatat

SEQ ID NO: 641807 - DNA, 25 bp, Homo sapien
tgtatcctggtaatggcttaataat

SEQ ID NO: 641808 - DNA, 25 bp, Homo sapien
ctgtatcctggtaatggcttaataa

SEQ ID NO: 641809 - DNA, 25 bp, Homo sapien
tatcagtttctgtcaaacggaaaaa

SEQ ID NO: 641810 - DNA, 25 bp, Homo sapien
tttaaataccactcaagtcagcttt

SEQ ID NO: 641811 - DNA, 25 bp, Homo sapien
gattaaaagggccattatgagctac

SEQ ID NO: 641812 - DNA, 25 bp, Homo sapien
gctccttaaattgatactaaagcaa

SEQ ID NO: 641813 - DNA, 25 bp, Homo sapien
caggaagggcatcaccctgaactac

SEQ ID NO: 641814 - DNA, 25 bp, Homo sapien
gtccaggaagggcatcaccctgaac

SEQ ID NO: 641815 - DNA, 25 bp, Homo sapien
aagggcatcaccctgaactacgtgc

SEQ ID NO: 641816 - DNA, 25 bp, Homo sapien
ggaagggcatcaccctgaactacgt

SEQ ID NO: 641817 - DNA, 25 bp, Homo sapien
cacttgaactcattgtcgcttatta

SEQ ID NO: 641818 - DNA, 25 bp, Homo sapien
ctgcacttgaactcattgtcgctta

SEQ ID NO: 641819 - DNA, 25 bp, Homo sapien
gcacttgaactcattgtcgcttatt

SEQ ID NO: 641820 - DNA, 25 bp, Homo sapien
cttgaactcattgtcgcttattaag

SEQ ID NO: 641821 - DNA, 25 bp, Homo sapien
cctccaggccttctagtgtcagctt

SEQ ID NO: 641822 - DNA, 25 bp, Homo sapien
gggagataccctatcatcgtcatct

SEQ ID NO: 641823 - DNA, 25 bp, Homo sapien
ttgtggagtacagtgggagataccc

SEQ ID NO: 641824 - DNA, 25 bp, Homo sapien
caggccttctagtgtcagcttcacc

SEQ ID NO: 641825 - DNA, 25 bp, Homo sapien
ggttattgacacaggaggtttttca

SEQ ID NO: 641826 - DNA, 25 bp, Homo sapien
cttggttattgacacaggaggtttt

SEQ ID NO: 641827 - DNA, 25 bp, Homo sapien
ttttttcttggttattgacacagga

SEQ ID NO: 641828 - DNA, 25 bp, Homo sapien
aattttttcttggttattgacacag

SEQ ID NO: 641829 - DNA, 25 bp, Homo sapien
tgtggattccaaattgtccatcgtc

SEQ ID NO: 641830 - DNA, 25 bp, Homo sapien
ccatcgtcaataataatttcgcttt

SEQ ID NO: 641831 - DNA, 25 bp, Homo sapien
ttgtccatcgtcaataataatttcg

SEQ ID NO: 641832 - DNA, 25 bp, Homo sapien
gattccaaattgtccatcgtcaata

SEQ ID NO: 641833 - DNA, 25 bp, Homo sapien
gttaaaactcttgatgcatacccag

SEQ ID NO: 641834 - DNA, 25 bp, Homo sapien
gaggctagcaaacagtaatggttct

SEQ ID NO: 641835 - DNA, 25 bp, Homo sapien
tgtagccctcaataaagaattccct

SEQ ID NO: 641836 - DNA, 25 bp, Homo sapien
taaaagcagcccaaggtgaataagc

SEQ ID NO: 641837 - DNA, 25 bp, Homo sapien
tgcttattcttatgtagtgcatatt

SEQ ID NO: 641838 - DNA, 25 bp, Homo sapien
aaaggtcttggcacaattaaaatgc

SEQ ID NO: 641839 - DNA, 25 bp, Homo sapien
ggacaacgataactccttcttgatt

SEQ ID NO: 641840 - DNA, 25 bp, Homo sapien
ttgtctcaaatgtaattctcctcat

SEQ ID NO: 641841 - DNA, 25 bp, Homo sapien
taaaagctttacgaacagcgtgaac

SEQ ID NO: 641842 - DNA, 25 bp, Homo sapien
caaatgttcgttaagcctgagcaag

SEQ ID NO: 641843 - DNA, 25 bp, Homo sapien
cagagctgtgaggaactaccaaaag

SEQ ID NO: 641844 - DNA, 25 bp, Homo sapien
taaatgagatgtgtccttactccag

SEQ ID NO: 641845 - DNA, 25 bp, Homo sapien
tcacttgacatggaccaccgatagt

SEQ ID NO: 641846 - DNA, 25 bp, Homo sapien
tattgatcgtggttgtagatgagtc

SEQ ID NO: 641847 - DNA, 25 bp, Homo sapien
tgtagatgagtctcccacttgtgaa

SEQ ID NO: 641848 - DNA, 25 bp, Homo sapien
tgtgaactatcacttgacatggacc

SEQ ID NO: 641849 - DNA, 25 bp, Homo sapien
gagtaaccatgaaagattccctgag

SEQ ID NO: 641850 - DNA, 25 bp, Homo sapien
tcgcaagctactcaaggaactaaag

SEQ ID NO: 641851 - DNA, 25 bp, Homo sapien
gacatgtggccaggtaaacttgaag

SEQ ID NO: 641852 - DNA, 25 bp, Homo sapien
cacgggaaattctagaagggacatg

SEQ ID NO: 641853 - DNA, 25 bp, Homo sapien
caaatcattactcctgggatactaa

SEQ ID NO: 641854 - DNA, 25 bp, Homo sapien
catactcttaaaaagcctaggcata

SEQ ID NO: 641855 - DNA, 25 bp, Homo sapien
gattaaatttgacgataagccaaac

SEQ ID NO: 641856 - DNA, 25 bp, Homo sapien
caccttaattggtagactgggtaga

SEQ ID NO: 641857 - DNA, 25 bp, Homo sapien
gtgctaaaggaattggaaactagat

SEQ ID NO: 641858 - DNA, 25 bp, Homo sapien
ctttgaacgtgttcaaacttaagtg

SEQ ID NO: 641859 - DNA, 25 bp, Homo sapien
cgtgttcaaacttaagtgagttgct

SEQ ID NO: 641860 - DNA, 25 bp, Homo sapien
tggaaactagataaagaaaacatac

SEQ ID NO: 641861 - DNA, 25 bp, Homo sapien
tactgagtacaatggttgctttcca

SEQ ID NO: 641862 - DNA, 25 bp, Homo sapien
actcctctactgagtacaatggttg

SEQ ID NO: 641863 - DNA, 25 bp, Homo sapien
tctactgagtacaatggttgctttc

SEQ ID NO: 641864 - DNA, 25 bp, Homo sapien
tcctctactgagtacaatggttgct

SEQ ID NO: 641865 - DNA, 25 bp, Homo sapien
gccacagcattttgaggattccagt

SEQ ID NO: 641866 - DNA, 25 bp, Homo sapien
cacagcattttgaggattccagttt

SEQ ID NO: 641867 - DNA, 25 bp, Homo sapien
agtttcccaaagcatcacagcttcc

SEQ ID NO: 641868 - DNA, 25 bp, Homo sapien
ccaaagcatcacagcttccacatat

SEQ ID NO: 641869 - DNA, 25 bp, Homo sapien
caattccccctgcaatgttactttc

SEQ ID NO: 641870 - DNA, 25 bp, Homo sapien
tctgctgattccaggggaatatggc

SEQ ID NO: 641871 - DNA, 25 bp, Homo sapien
tatggctgctgaaaatgaggaaatt

SEQ ID NO: 641872 - DNA, 25 bp, Homo sapien
ctcagttataaaagattatgaagac

SEQ ID NO: 641873 - DNA, 25 bp, Homo sapien
tgtttcccccaaggtcagtcctctc

SEQ ID NO: 641874 - DNA, 25 bp, Homo sapien
cattctcgccacatttagcagaggg

SEQ ID NO: 641875 - DNA, 25 bp, Homo sapien
taccattctcgccacatttagcaga

SEQ ID NO: 641876 - DNA, 25 bp, Homo sapien
tgcactaccattctcgccacattta

SEQ ID NO: 641877 - DNA, 25 bp, Homo sapien
gtgatgggggaattgaggtggggtc

SEQ ID NO: 641878 - DNA, 25 bp, Homo sapien
tgaggtggggtctcccccagtatcc

SEQ ID NO: 641879 - DNA, 25 bp, Homo sapien
tgcagtgaggaaatcaaggtgatgg

SEQ ID NO: 641880 - DNA, 25 bp, Homo sapien
cagtgaggaaatcaaggtgatgggg

SEQ ID NO: 641881 - DNA, 25 bp, Homo sapien
gagtcatctatatccacatccacca

SEQ ID NO: 641882 - DNA, 25 bp, Homo sapien
agtcatctatatccacatccaccat

SEQ ID NO: 641883 - DNA, 25 bp, Homo sapien
agagtcatctatatccacatccacc

SEQ ID NO: 641884 - DNA, 25 bp, Homo sapien
aagtggccacacactaaaccagagg

SEQ ID NO: 641885 - DNA, 25 bp, Homo sapien
ggtcagtccatttgcccgacatggc

SEQ ID NO: 641886 - DNA, 25 bp, Homo sapien
ccatcagctgactagcaatcttcaa

SEQ ID NO: 641887 - DNA, 25 bp, Homo sapien
tggctcaagggagccaacccatcag

SEQ ID NO: 641888 - DNA, 25 bp, Homo sapien
gcccggcctaccaacttcttgcact

SEQ ID NO: 641889 - DNA, 25 bp, Homo sapien
ggcctaccaacttcttgcactagca

SEQ ID NO: 641890 - DNA, 25 bp, Homo sapien
cctaccaacttcttgcactagcaaa

SEQ ID NO: 641891 - DNA, 25 bp, Homo sapien
taccaacttcttgcactagcaaagt

SEQ ID NO: 641892 - DNA, 25 bp, Homo sapien
cctcttatttcaaaggcaacctgag

SEQ ID NO: 641893 - DNA, 25 bp, Homo sapien
aagagttcctcttatttcaaaggca

SEQ ID NO: 641894 - DNA, 25 bp, Homo sapien
ttcaaaggcaacctgagaaggtgtc

SEQ ID NO: 641895 - DNA, 25 bp, Homo sapien
tttcaaaggcaacctgagaaggtgt

SEQ ID NO: 641896 - DNA, 25 bp, Homo sapien
tctgatggatttattttatgatgtc

SEQ ID NO: 641897 - DNA, 25 bp, Homo sapien
ctgatggatttattttatgatgtcg

SEQ ID NO: 641898 - DNA, 25 bp, Homo sapien
tgatggatttattttatgatgtcgt

SEQ ID NO: 641899 - DNA, 25 bp, Homo sapien
gatggatttattttatgatgtcgtg

SEQ ID NO: 641900 - DNA, 25 bp, Homo sapien
gcagaggtaccgggcgcccgccgtc

SEQ ID NO: 641901 - DNA, 25 bp, Homo sapien
ttcgctagtccgcaggtccgcgtcg

SEQ ID NO: 641902 - DNA, 25 bp, Homo sapien
gcccgccgtccgtgcctcgccagcg

SEQ ID NO: 641903 - DNA, 25 bp, Homo sapien
gggcgcccgccgtccgtgcctcgcc

SEQ ID NO: 641904 - DNA, 25 bp, Homo sapien
gcaggaagcagccacgctcaaaccg

SEQ ID NO: 641905 - DNA, 25 bp, Homo sapien
ctcaaaccggtttcagctgctccag

SEQ ID NO: 641906 - DNA, 25 bp, Homo sapien
gccacgctcaaaccggtttcagctg

SEQ ID NO: 641907 - DNA, 25 bp, Homo sapien
tgccgcggcgtcgagcggcaggaag

SEQ ID NO: 641908 - DNA, 25 bp, Homo sapien
cttggcagtttcagctattatcagc

SEQ ID NO: 641909 - DNA, 25 bp, Homo sapien
ttggcagtttcagctattatcagct

SEQ ID NO: 641910 - DNA, 25 bp, Homo sapien
tactgggctctgaactgagttaccc

SEQ ID NO: 641911 - DNA, 25 bp, Homo sapien
tggctgcttctaaaggggttgttcg

SEQ ID NO: 641912 - DNA, 25 bp, Homo sapien
tctgaactgagttacccagtttaac

SEQ ID NO: 641913 - DNA, 25 bp, Homo sapien
gggttgttcgtactgggctctgaac

SEQ ID NO: 641914 - DNA, 25 bp, Homo sapien
acttcctgtcgaacatcctctttga

SEQ ID NO: 641915 - DNA, 25 bp, Homo sapien
tcaaatcttcactgggttttcttgt

SEQ ID NO: 641916 - DNA, 25 bp, Homo sapien
ttcttgttggcacacttcagtttct

SEQ ID NO: 641917 - DNA, 25 bp, Homo sapien
gcatagctctatagcccattcaaaa

SEQ ID NO: 641918 - DNA, 25 bp, Homo sapien
tgatttactaggtctggagtaatgc

SEQ ID NO: 641919 - DNA, 25 bp, Homo sapien
tgaaactgatttactaggtctggag

SEQ ID NO: 641920 - DNA, 25 bp, Homo sapien
tacaaggaagtcaccgcgatgatga

SEQ ID NO: 641921 - DNA, 25 bp, Homo sapien
caaatgaggaacgtgaagaacttgg

SEQ ID NO: 641922 - DNA, 25 bp, Homo sapien
tgaacaaatgaggaacgtgaagaac

SEQ ID NO: 641923 - DNA, 25 bp, Homo sapien
agtcaccgcgatgatgaatgttttc

SEQ ID NO: 641924 - DNA, 25 bp, Homo sapien
cagcacggacaggaaagagcaaagg

SEQ ID NO: 641925 - DNA, 25 bp, Homo sapien
aaccagcacggacaggaaagagcaa

SEQ ID NO: 641926 - DNA, 25 bp, Homo sapien
tgaaccagcacggacaggaaagagc

SEQ ID NO: 641927 - DNA, 25 bp, Homo sapien
ctgaaccagcacggacaggaaagag

SEQ ID NO: 641928 - DNA, 25 bp, Homo sapien
tggaggtgccatagatccttgccct

SEQ ID NO: 641929 - DNA, 25 bp, Homo sapien
cctgttataaacttcctgagatgcc

SEQ ID NO: 641930 - DNA, 25 bp, Homo sapien
tgaggtcagaccatatcagtggtac

SEQ ID NO: 641931 - DNA, 25 bp, Homo sapien
tgaagagccctacaatgaggtcaga

SEQ ID NO: 641932 - DNA, 25 bp, Homo sapien
tctgaaaacttccagtcattacatc

SEQ ID NO: 641933 - DNA, 25 bp, Homo sapien
ccacatgcaattgctgactcccaag

SEQ ID NO: 641934 - DNA, 25 bp, Homo sapien
tcccaaggttgaatgagcggctcat

SEQ ID NO: 641935 - DNA, 25 bp, Homo sapien
aaaacttccagtcattacatccaca

SEQ ID NO: 641936 - DNA, 25 bp, Homo sapien
gagagaatcctcctaggagggcagt

SEQ ID NO: 641937 - DNA, 25 bp, Homo sapien
gagaatcctcctaggagggcagtca

SEQ ID NO: 641938 - DNA, 25 bp, Homo sapien
agcggagcccaccgcctctatgggg

SEQ ID NO: 641939 - DNA, 25 bp, Homo sapien
agcccaccgcctctatgggggcctc

SEQ ID NO: 641940 - DNA, 25 bp, Homo sapien
ctaggtatccacatgcatgatcact

SEQ ID NO: 641941 - DNA, 25 bp, Homo sapien
cacatgcatgatcactttgtcctct

SEQ ID NO: 641942 - DNA, 25 bp, Homo sapien
tcctgtgataactccctccacagtg

SEQ ID NO: 641943 - DNA, 25 bp, Homo sapien
tgccattagtgctttgccctggttc

SEQ ID NO: 641944 - DNA, 25 bp, Homo sapien
caggtaacggcttcgaagagaagat

SEQ ID NO: 641945 - DNA, 25 bp, Homo sapien
tcaggtaacggcttcgaagagaaga

SEQ ID NO: 641946 - DNA, 25 bp, Homo sapien
ttcaggtaacggcttcgaagagaag

SEQ ID NO: 641947 - DNA, 25 bp, Homo sapien
cttcaggtaacggcttcgaagagaa

SEQ ID NO: 641948 - DNA, 25 bp, Homo sapien
ttgaatgaagattggagcactgtga

SEQ ID NO: 641949 - DNA, 25 bp, Homo sapien
tgaatgaagattggagcactgtgac

SEQ ID NO: 641950 - DNA, 25 bp, Homo sapien
gacctgtagcaggtgctcttcttgc

SEQ ID NO: 641951 - DNA, 25 bp, Homo sapien
gcagtgcaactttatggctttggct

SEQ ID NO: 641952 - DNA, 25 bp, Homo sapien
taggctgctccctgttagacctgta

SEQ ID NO: 641953 - DNA, 25 bp, Homo sapien
tccatgccccctaggtccagtttag

SEQ ID NO: 641954 - DNA, 25 bp, Homo sapien
ggtgatgttacagttgttggctgca

SEQ ID NO: 641955 - DNA, 25 bp, Homo sapien
tatcagtgacacaggtgatgttaca

SEQ ID NO: 641956 - DNA, 25 bp, Homo sapien
ctgcatccctactggaaagctggaa

SEQ ID NO: 641957 - DNA, 25 bp, Homo sapien
tgcatccctactggaaagctggaag

SEQ ID NO: 641958 - DNA, 25 bp, Homo sapien
gcatctaagtactgccagagcccca

SEQ ID NO: 641959 - DNA, 25 bp, Homo sapien
gatgtgatgtcagggagaacccagc

SEQ ID NO: 641960 - DNA, 25 bp, Homo sapien
ggaagtcttccagcccttagatcca

SEQ ID NO: 641961 - DNA, 25 bp, Homo sapien
accagaagaccgaaaagctgctatg

SEQ ID NO: 641962 - DNA, 25 bp, Homo sapien
gtcagtatcttcaagccgatattgg

SEQ ID NO: 641963 - DNA, 25 bp, Homo sapien
ctagcatctttctactaagtcagta

SEQ ID NO: 641964 - DNA, 25 bp, Homo sapien
ggtaccctgtcagggtgactgtgac

SEQ ID NO: 641965 - DNA, 25 bp, Homo sapien
actgtgactcctggtccactggacc

SEQ ID NO: 641966 - DNA, 25 bp, Homo sapien
gccccaggacgtgcagtcctgtcag

SEQ ID NO: 641967 - DNA, 25 bp, Homo sapien
ccaggacgtgcagtcctgtcagtgg

SEQ ID NO: 641968 - DNA, 25 bp, Homo sapien
cccaggacgtgcagtcctgtcagtg

SEQ ID NO: 641969 - DNA, 25 bp, Homo sapien
caggacgtgcagtcctgtcagtggc

SEQ ID NO: 641970 - DNA, 25 bp, Homo sapien
tggctcctgaagatatagcagggag

SEQ ID NO: 641971 - DNA, 25 bp, Homo sapien
tgacatatggcttgattaactcctt

SEQ ID NO: 641972 - DNA, 25 bp, Homo sapien
agggctcctctggaagatgggagtg

SEQ ID NO: 641973 - DNA, 25 bp, Homo sapien
gaagccacagctcaagtgtgcacag

SEQ ID NO: 641974 - DNA, 25 bp, Homo sapien
ttcctgtattactgtggggaagtgg

SEQ ID NO: 641975 - DNA, 25 bp, Homo sapien
cctgtattactgtggggaagtggat

SEQ ID NO: 641976 - DNA, 25 bp, Homo sapien
tctgcaatacatgccttgtgttcat

SEQ ID NO: 641977 - DNA, 25 bp, Homo sapien
atctgcaatacatgccttgtgttca

SEQ ID NO: 641978 - DNA, 25 bp, Homo sapien
taaaagtcctaggtcttcatgcttc

SEQ ID NO: 641979 - DNA, 25 bp, Homo sapien
tattgtagataacttttgtgtatcc

SEQ ID NO: 641980 - DNA, 25 bp, Homo sapien
aagtcctaggtcttcatgcttctcc

SEQ ID NO: 641981 - DNA, 25 bp, Homo sapien
aacgtaaaagtcctaggtcttcatg

SEQ ID NO: 641982 - DNA, 25 bp, Homo sapien
taatggaccaccttagacatcgagt

SEQ ID NO: 641983 - DNA, 25 bp, Homo sapien
aatagacgtatttctgtaggcctgg

SEQ ID NO: 641984 - DNA, 25 bp, Homo sapien
gagcatttgcctaagttgcctagag

SEQ ID NO: 641985 - DNA, 25 bp, Homo sapien
gcctctaattagctatgggaccttc

SEQ ID NO: 641986 - DNA, 25 bp, Homo sapien
gtaggaacaacaccgactattgtca

SEQ ID NO: 641987 - DNA, 25 bp, Homo sapien
actgtaggaacaacaccgactattg

SEQ ID NO: 641988 - DNA, 25 bp, Homo sapien
tgcactgtaggaacaacaccgacta

SEQ ID NO: 641989 - DNA, 25 bp, Homo sapien
catgcactgtaggaacaacaccgac

SEQ ID NO: 641990 - DNA, 25 bp, Homo sapien
agtcttattaaatgcttcaaatata

SEQ ID NO: 641991 - DNA, 25 bp, Homo sapien
cttattaaatgcttcaaatatatgt

SEQ ID NO: 641992 - DNA, 25 bp, Homo sapien
tattaaatgcttcaaatatatgtca

SEQ ID NO: 641993 - DNA, 25 bp, Homo sapien
attaaatgcttcaaatatatgtcac

SEQ ID NO: 641994 - DNA, 25 bp, Homo sapien
tctcttttgttggtctgatcaagct

SEQ ID NO: 641995 - DNA, 25 bp, Homo sapien
tgggtgtgaatacgactgcaggtta

SEQ ID NO: 641996 - DNA, 25 bp, Homo sapien
ctgatcaagctgtttattgtttgca

SEQ ID NO: 641997 - DNA, 25 bp, Homo sapien
tgtttgcagatggtaacaaaatata

SEQ ID NO: 641998 - DNA, 25 bp, Homo sapien
catggaagtaggtcttgtaccaaga

SEQ ID NO: 641999 - DNA, 25 bp, Homo sapien
gatgactccattcccacatcattag

SEQ ID NO: 642000 - DNA, 25 bp, Homo sapien
tgaagttcctttccatgcccctcaa

SEQ ID NO: 642001 - DNA, 25 bp, Homo sapien
ccatggaagggcctatgaagttcct

SEQ ID NO: 642002 - DNA, 25 bp, Homo sapien
ggaagcagagagttgagaatgtgtt

SEQ ID NO: 642003 - DNA, 25 bp, Homo sapien
tttggcagcatgtgagtgccagggc

SEQ ID NO: 642004 - DNA, 25 bp, Homo sapien
ggaggagcacagatggcctttaaag

SEQ ID NO: 642005 - DNA, 25 bp, Homo sapien
cagcatgtgagtgccagggctttca

SEQ ID NO: 642006 - DNA, 25 bp, Homo sapien
tttcctcctacaccatggagataga

SEQ ID NO: 642007 - DNA, 25 bp, Homo sapien
gaagatatctatcatttcctcctac

SEQ ID NO: 642008 - DNA, 25 bp, Homo sapien
gatatctatcatttcctcctacacc

SEQ ID NO: 642009 - DNA, 25 bp, Homo sapien
catggagatagattggactgtggct

SEQ ID NO: 642010 - DNA, 25 bp, Homo sapien
tgcctgtagtgccagctagccagga

SEQ ID NO: 642011 - DNA, 25 bp, Homo sapien
ctgtagtgccagctagccaggaggc

SEQ ID NO: 642012 - DNA, 25 bp, Homo sapien
ggcgggtgcctgtagtgccagctag

SEQ ID NO: 642013 - DNA, 25 bp, Homo sapien
gggtgcctgtagtgccagctagcca

SEQ ID NO: 642014 - DNA, 25 bp, Homo sapien
cattcattgagcagatatctgtgca

SEQ ID NO: 642015 - DNA, 25 bp, Homo sapien
caaagcagtgtttaccaggtacatt

SEQ ID NO: 642016 - DNA, 25 bp, Homo sapien
caggtacattcatttcttcggggac

SEQ ID NO: 642017 - DNA, 25 bp, Homo sapien
gaaccatggatgttcttgcccttga

SEQ ID NO: 642018 - DNA, 25 bp, Homo sapien
ctctacattggcatctacgtagtcg

SEQ ID NO: 642019 - DNA, 25 bp, Homo sapien
tacattggcatctacgtagtcgaca

SEQ ID NO: 642020 - DNA, 25 bp, Homo sapien
cattggcatctacgtagtcgacagc

SEQ ID NO: 642021 - DNA, 25 bp, Homo sapien
tggcatctacgtagtcgacagctac

SEQ ID NO: 642022 - DNA, 25 bp, Homo sapien
gacgtcatccactccatgtacatca

SEQ ID NO: 642023 - DNA, 25 bp, Homo sapien
tatctatgtcaactacatcgacgtc

SEQ ID NO: 642024 - DNA, 25 bp, Homo sapien
catgtacatcatccacatctacggg

SEQ ID NO: 642025 - DNA, 25 bp, Homo sapien
catctacgggatctaaactttgcat

SEQ ID NO: 642026 - DNA, 25 bp, Homo sapien
atgtgcacaatgttgtctccctgtg

SEQ ID NO: 642027 - DNA, 25 bp, Homo sapien
aaatgtgcacaatgttgtctccctg

SEQ ID NO: 642028 - DNA, 25 bp, Homo sapien
tcgaagtttgtcttatgtgtacaaa

SEQ ID NO: 642029 - DNA, 25 bp, Homo sapien
aacattttcacagtcgaagtttgtc

SEQ ID NO: 642030 - DNA, 25 bp, Homo sapien
tccagacgaagtcagagcagaaccg

SEQ ID NO: 642031 - DNA, 25 bp, Homo sapien
ttgcagtcctcacagaaatgtccac

SEQ ID NO: 642032 - DNA, 25 bp, Homo sapien
cgatgttatcatgagaggaactgtt

SEQ ID NO: 642033 - DNA, 25 bp, Homo sapien
gtttccagacgaagtcagagcagaa

SEQ ID NO: 642034 - DNA, 25 bp, Homo sapien
tggtgggatgttaattaggtactca

SEQ ID NO: 642035 - DNA, 25 bp, Homo sapien
cacttttggatctggtgtggtggga

SEQ ID NO: 642036 - DNA, 25 bp, Homo sapien
gatgcttacaacaggatgacaagga

SEQ ID NO: 642037 - DNA, 25 bp, Homo sapien
caggcagattatgtaatctgggtcg

SEQ ID NO: 642038 - DNA, 25 bp, Homo sapien
actgtctgacttggcatttcagtgc

SEQ ID NO: 642039 - DNA, 25 bp, Homo sapien
aaaggaaagctttgcgggccactgt

SEQ ID NO: 642040 - DNA, 25 bp, Homo sapien
tttgagctttgcatgatcatctatg

SEQ ID NO: 642041 - DNA, 25 bp, Homo sapien
atgatcatctatgtatcctttttcc

SEQ ID NO: 642042 - DNA, 25 bp, Homo sapien
ccaccacaaccccactgccaaaact

SEQ ID NO: 642043 - DNA, 25 bp, Homo sapien
cactgccaaaactgtgtttaagcat

SEQ ID NO: 642044 - DNA, 25 bp, Homo sapien
tctcccaccacaaccccactgccaa

SEQ ID NO: 642045 - DNA, 25 bp, Homo sapien
caaccccactgccaaaactgtgttt

SEQ ID NO: 642046 - DNA, 25 bp, Homo sapien
ataaagggttatccaggcgtccagg

SEQ ID NO: 642047 - DNA, 25 bp, Homo sapien
tgaggagtcaaacgtcagcatggcc

SEQ ID NO: 642048 - DNA, 25 bp, Homo sapien
gaaactaccccagcttagagcttga

SEQ ID NO: 642049 - DNA, 25 bp, Homo sapien
tagagcttgataagatggcacatgg

SEQ ID NO: 642050 - DNA, 25 bp, Homo sapien
tcttgggtgaaggacaccaccgtgt

SEQ ID NO: 642051 - DNA, 25 bp, Homo sapien
gcaaggaggcatccacaaggtgcgt

SEQ ID NO: 642052 - DNA, 25 bp, Homo sapien
aaaggcaatatgacagggtggccca

SEQ ID NO: 642053 - DNA, 25 bp, Homo sapien
actatgactggtgggagaaaaagcc

SEQ ID NO: 642054 - DNA, 25 bp, Homo sapien
taagaagcagccatcacatgatctg

SEQ ID NO: 642055 - DNA, 25 bp, Homo sapien
ctgtcagaatgctattgaaaatgtg

SEQ ID NO: 642056 - DNA, 25 bp, Homo sapien
aaatgtgaattgcatgacttgtagc

SEQ ID NO: 642057 - DNA, 25 bp, Homo sapien
gcttatgacaatgactgtgctactg

SEQ ID NO: 642058 - DNA, 25 bp, Homo sapien
tcattccaagcctaggggtgcccgg

SEQ ID NO: 642059 - DNA, 25 bp, Homo sapien
tctgtggcttcattccaagcctagg

SEQ ID NO: 642060 - DNA, 25 bp, Homo sapien
tcaaatgaaactctgtggcttcatt

SEQ ID NO: 642061 - DNA, 25 bp, Homo sapien
attccaagcctaggggtgcccggag

SEQ ID NO: 642062 - DNA, 25 bp, Homo sapien
gaagaacagtgatgcccttgtgccc

SEQ ID NO: 642063 - DNA, 25 bp, Homo sapien
acttccagggcgatcgagagcatgg

SEQ ID NO: 642064 - DNA, 25 bp, Homo sapien
gatgatctccatgtgcccgtgcttg

SEQ ID NO: 642065 - DNA, 25 bp, Homo sapien
caaagctgatgtgggcatacagaag

SEQ ID NO: 642066 - DNA, 25 bp, Homo sapien
ctggcacaatgaggaccatggagcc

SEQ ID NO: 642067 - DNA, 25 bp, Homo sapien
gagcccttgtcgtcctggaggttga

SEQ ID NO: 642068 - DNA, 25 bp, Homo sapien
ggcagaccatacaccatgccgatct

SEQ ID NO: 642069 - DNA, 25 bp, Homo sapien
cagtaactgactgcagcatgagggc

SEQ ID NO: 642070 - DNA, 25 bp, Homo sapien
ttcagccagagttcttccccaacct

SEQ ID NO: 642071 - DNA, 25 bp, Homo sapien
tcagccagagttcttccccaacctg

SEQ ID NO: 642072 - DNA, 25 bp, Homo sapien
tttcagccagagttcttccccaacc

SEQ ID NO: 642073 - DNA, 25 bp, Homo sapien
ctttcagccagagttcttccccaac

SEQ ID NO: 642074 - DNA, 25 bp, Homo sapien
ctggtgatccacgttacacatgtgg

SEQ ID NO: 642075 - DNA, 25 bp, Homo sapien
atctcaaaattggagtgggacatgc

SEQ ID NO: 642076 - DNA, 25 bp, Homo sapien
caatctcaaaattggagtgggacat

SEQ ID NO: 642077 - DNA, 25 bp, Homo sapien
gatccacgttacacatgtgggtgtc

SEQ ID NO: 642078 - DNA, 25 bp, Homo sapien
gtggctgcaatggctaacttctgac

SEQ ID NO: 642079 - DNA, 25 bp, Homo sapien
tctgactggacacgcagaacccctt

SEQ ID NO: 642080 - DNA, 25 bp, Homo sapien
ggcatccagggaggtagcctcaaaa

SEQ ID NO: 642081 - DNA, 25 bp, Homo sapien
cagaaccccttgtgctggagggtgt

SEQ ID NO: 642082 - DNA, 25 bp, Homo sapien
cttgaaaccttcaatgttaatggca

SEQ ID NO: 642083 - DNA, 25 bp, Homo sapien
ccctggccaacttgaaaccttcaat

SEQ ID NO: 642084 - DNA, 25 bp, Homo sapien
taatggcatggtgccctttggccat

SEQ ID NO: 642085 - DNA, 25 bp, Homo sapien
caatgttaatggcatggtgcccttt

SEQ ID NO: 642086 - DNA, 25 bp, Homo sapien
ccccaagtgtcttcatcctcgtctt

SEQ ID NO: 642087 - DNA, 25 bp, Homo sapien
tccccaagtgtcttcatcctcgtct

SEQ ID NO: 642088 - DNA, 25 bp, Homo sapien
tcaatgacactcaatgacatcacac

SEQ ID NO: 642089 - DNA, 25 bp, Homo sapien
atctgtgtgaaaatcatcacttgaa

SEQ ID NO: 642090 - DNA, 25 bp, Homo sapien
aagaagagctttcatctgtgtgaaa

SEQ ID NO: 642091 - DNA, 25 bp, Homo sapien
tcatctgactcagaagaagagcttt

SEQ ID NO: 642092 - DNA, 25 bp, Homo sapien
tcatcacttgaagttgttgcataac

SEQ ID NO: 642093 - DNA, 25 bp, Homo sapien
taatgccaacaaactgaagattctt

SEQ ID NO: 642094 - DNA, 25 bp, Homo sapien
ctccattaatgccaacaaactgaag

SEQ ID NO: 642095 - DNA, 25 bp, Homo sapien
ttttcatgccatttgaatctttgtt

SEQ ID NO: 642096 - DNA, 25 bp, Homo sapien
tgccatttgaatctttgttaccatc

SEQ ID NO: 642097 - DNA, 25 bp, Homo sapien
gcatatggaggccagcggccatctg

SEQ ID NO: 642098 - DNA, 25 bp, Homo sapien
tctgtcaggttcactagagaccatg

SEQ ID NO: 642099 - DNA, 25 bp, Homo sapien
tgtcctttcctgagcggggaaggca

SEQ ID NO: 642100 - DNA, 25 bp, Homo sapien
tcattgtttgtgcatatggaggcca

SEQ ID NO: 642101 - DNA, 25 bp, Homo sapien
cgtccattgttgcttgctgcccaca

SEQ ID NO: 642102 - DNA, 25 bp, Homo sapien
gtccattgttgcttgctgcccacac

SEQ ID NO: 642103 - DNA, 25 bp, Homo sapien
cccactgtggctgctccaaagggct

SEQ ID NO: 642104 - DNA, 25 bp, Homo sapien
gctccaaagggctgctctcccgttt

SEQ ID NO: 642105 - DNA, 25 bp, Homo sapien
tgctctcccgtttccaccagtgcca

SEQ ID NO: 642106 - DNA, 25 bp, Homo sapien
ccaccagtgccacaatccgtctcat

SEQ ID NO: 642107 - DNA, 25 bp, Homo sapien
tgtgtatccataagaccatagaggg

SEQ ID NO: 642108 - DNA, 25 bp, Homo sapien
tgacaggagcaacgcaaacgatgac

SEQ ID NO: 642109 - DNA, 25 bp, Homo sapien
tcagagcttagaaagggtaaccatc

SEQ ID NO: 642110 - DNA, 25 bp, Homo sapien
tacaggcctattctatgacaggagc

SEQ ID NO: 642111 - DNA, 25 bp, Homo sapien
taccccatggttgcagttttgacag

SEQ ID NO: 642112 - DNA, 25 bp, Homo sapien
tccttcctagaaacgggtacataga

SEQ ID NO: 642113 - DNA, 25 bp, Homo sapien
cacatccatattgcttaggttgaag

SEQ ID NO: 642114 - DNA, 25 bp, Homo sapien
tactaactgtataatgcctgagaac

SEQ ID NO: 642115 - DNA, 25 bp, Homo sapien
ttgtccatggcaacggtgaagccgg

SEQ ID NO: 642116 - DNA, 25 bp, Homo sapien
gtgaagccggagagaagataacccc

SEQ ID NO: 642117 - DNA, 25 bp, Homo sapien
tgcaggctcctcagtctcgtgtgat

SEQ ID NO: 642118 - DNA, 25 bp, Homo sapien
taggatgacttcgatctggcaaaac

SEQ ID NO: 642119 - DNA, 25 bp, Homo sapien
caataaagtccatgctaacaacaca

SEQ ID NO: 642120 - DNA, 25 bp, Homo sapien
aaagacattcatgctttcctaagac

SEQ ID NO: 642121 - DNA, 25 bp, Homo sapien
ttaaacaacacaggttctcttgatg

SEQ ID NO: 642122 - DNA, 25 bp, Homo sapien
tcctaagacaataaagtccatgcta

SEQ ID NO: 642123 - DNA, 25 bp, Homo sapien
taaatggaccaacttctaaggacta

SEQ ID NO: 642124 - DNA, 25 bp, Homo sapien
atggaccaacttctaaggactaatt

SEQ ID NO: 642125 - DNA, 25 bp, Homo sapien
caggctttaaatggaccaacttcta

SEQ ID NO: 642126 - DNA, 25 bp, Homo sapien
ccaggctttaaatggaccaacttct

SEQ ID NO: 642127 - DNA, 25 bp, Homo sapien
cagtaactgagcatgggtaccagag

SEQ ID NO: 642128 - DNA, 25 bp, Homo sapien
ggtaagacaccaagcaatgagacgg

SEQ ID NO: 642129 - DNA, 25 bp, Homo sapien
tgcagcattcataccgagggaggcc

SEQ ID NO: 642130 - DNA, 25 bp, Homo sapien
cagggttacccaaggctcaatagca

SEQ ID NO: 642131 - DNA, 25 bp, Homo sapien
ctggcagagaggaaagggccagttt

SEQ ID NO: 642132 - DNA, 25 bp, Homo sapien
cctggcagagaggaaagggccagtt

SEQ ID NO: 642133 - DNA, 25 bp, Homo sapien
taaatgcctttagggcagagttaca

SEQ ID NO: 642134 - DNA, 25 bp, Homo sapien
ggaaataagaaccataatggtttgc

SEQ ID NO: 642135 - DNA, 25 bp, Homo sapien
gagttacagagtaatatattctgac

SEQ ID NO: 642136 - DNA, 25 bp, Homo sapien
tgagtaacagccatgagaaatctcc

SEQ ID NO: 642137 - DNA, 25 bp, Homo sapien
tgggactggctgtaagaacacgtac

SEQ ID NO: 642138 - DNA, 25 bp, Homo sapien
tcttgggactggctgtaagaacacg

SEQ ID NO: 642139 - DNA, 25 bp, Homo sapien
taatgacttctagtactactgcaag

SEQ ID NO: 642140 - DNA, 25 bp, Homo sapien
aaagtcaagtctcgggagggcagct

SEQ ID NO: 642141 - DNA, 25 bp, Homo sapien
ccctctcccgcagttttgtgtagca

SEQ ID NO: 642142 - DNA, 25 bp, Homo sapien
acagcctgaggttgatgacccctcc

SEQ ID NO: 642143 - DNA, 25 bp, Homo sapien
gttttgtgtagcattccaacagagg

SEQ ID NO: 642144 - DNA, 25 bp, Homo sapien
tctgagccaggtttcagacagcctg

SEQ ID NO: 642145 - DNA, 25 bp, Homo sapien
ataagaattcctgcccattccattc

SEQ ID NO: 642146 - DNA, 25 bp, Homo sapien
ctgcagacaacaacagaattctgtt

SEQ ID NO: 642147 - DNA, 25 bp, Homo sapien
cagtttaagaatcaacattcagaca

SEQ ID NO: 642148 - DNA, 25 bp, Homo sapien
tgcagacaacaacagaattctgtta

SEQ ID NO: 642149 - DNA, 25 bp, Homo sapien
agtggggtggaaacgactagctaca

SEQ ID NO: 642150 - DNA, 25 bp, Homo sapien
cagtagaccacaaacggccttgaag

SEQ ID NO: 642151 - DNA, 25 bp, Homo sapien
ggtggaaacgactagctacaattaa

SEQ ID NO: 642152 - DNA, 25 bp, Homo sapien
ctctttgtactgacagtagaccaca

SEQ ID NO: 642153 - DNA, 25 bp, Homo sapien
tatttctctacaccctcaaagtgga

SEQ ID NO: 642154 - DNA, 25 bp, Homo sapien
gaaacgcgaactaggttagaagctc

SEQ ID NO: 642155 - DNA, 25 bp, Homo sapien
tatcgcagcatttgagtgccccatc

SEQ ID NO: 642156 - DNA, 25 bp, Homo sapien
caaatccaacactgcataagctgct

SEQ ID NO: 642157 - DNA, 25 bp, Homo sapien
gaaagagaatgccaatctgtctgaa

SEQ ID NO: 642158 - DNA, 25 bp, Homo sapien
caatctgtctgaagcagagcccaca

SEQ ID NO: 642159 - DNA, 25 bp, Homo sapien
tgccaatctgtctgaagcagagccc

SEQ ID NO: 642160 - DNA, 25 bp, Homo sapien
gaatgccaatctgtctgaagcagag

SEQ ID NO: 642161 - DNA, 25 bp, Homo sapien
agcagagcggcagcctctaaatgtc

SEQ ID NO: 642162 - DNA, 25 bp, Homo sapien
cagagcggcagcctctaaatgtctt

SEQ ID NO: 642163 - DNA, 25 bp, Homo sapien
tcagcagagcggcagcctctaaatg

SEQ ID NO: 642164 - DNA, 25 bp, Homo sapien
actcagcagagcggcagcctctaaa

SEQ ID NO: 642165 - DNA, 25 bp, Homo sapien
caaaaagaaaaataagaaatcaatg

SEQ ID NO: 642166 - DNA, 25 bp, Homo sapien
catgattaagctatctatgcaacgc

SEQ ID NO: 642167 - DNA, 25 bp, Homo sapien
tatcatcttgggagctaatacacca

SEQ ID NO: 642168 - DNA, 25 bp, Homo sapien
tcccgaagaccgaatcacacgtttg

SEQ ID NO: 642169 - DNA, 25 bp, Homo sapien
gtatcctaaagctccatcccgaaga

SEQ ID NO: 642170 - DNA, 25 bp, Homo sapien
tttttgcttcctctctctttaggcc

SEQ ID NO: 642171 - DNA, 25 bp, Homo sapien
cttttttgcttcctctctctttagg

SEQ ID NO: 642172 - DNA, 25 bp, Homo sapien
ataatcttttttgcttcctctctct

SEQ ID NO: 642173 - DNA, 25 bp, Homo sapien
tttgcttcctctctctttaggcccc

SEQ ID NO: 642174 - DNA, 25 bp, Homo sapien
tggtcttctgggtggttgctctctg

SEQ ID NO: 642175 - DNA, 25 bp, Homo sapien
tcattctcttgttcagaagcctgtt

SEQ ID NO: 642176 - DNA, 25 bp, Homo sapien
tgtttttcctccagtgtgccattac

SEQ ID NO: 642177 - DNA, 25 bp, Homo sapien
ttctggatcttgagaaattgtttcc

SEQ ID NO: 642178 - DNA, 25 bp, Homo sapien
tgttccatgtagaagactgtccact

SEQ ID NO: 642179 - DNA, 25 bp, Homo sapien
tgttgctgcccgaacaggtcctcct

SEQ ID NO: 642180 - DNA, 25 bp, Homo sapien
cagggtatagctgaataatggagcc

SEQ ID NO: 642181 - DNA, 25 bp, Homo sapien
ttggctctgaagataacatcttggc

SEQ ID NO: 642182 - DNA, 25 bp, Homo sapien
caacgtcaacatctgggctagtgta

SEQ ID NO: 642183 - DNA, 25 bp, Homo sapien
ttgttgccagcacggatatttccca

SEQ ID NO: 642184 - DNA, 25 bp, Homo sapien
ggctagtgtatcgtatctcatgtgg

SEQ ID NO: 642185 - DNA, 25 bp, Homo sapien
gttccatcattgcacccagcaccaa

SEQ ID NO: 642186 - DNA, 25 bp, Homo sapien
tgcaggtgagcaagctttttcattt

SEQ ID NO: 642187 - DNA, 25 bp, Homo sapien
taaagacatatttcccccaattata

SEQ ID NO: 642188 - DNA, 25 bp, Homo sapien
aaatcatgactttcttaaagacata

SEQ ID NO: 642189 - DNA, 25 bp, Homo sapien
tatgaggtaggaggatactttatgc

SEQ ID NO: 642190 - DNA, 25 bp, Homo sapien
taatacataattgaaagaatacggg

SEQ ID NO: 642191 - DNA, 25 bp, Homo sapien
aattgaaagaatacgggtggatggc

SEQ ID NO: 642192 - DNA, 25 bp, Homo sapien
tcacaacagtaatgatggcttcata

SEQ ID NO: 642193 - DNA, 25 bp, Homo sapien
gaatacgggtggatggcttcacaac

SEQ ID NO: 642194 - DNA, 25 bp, Homo sapien
tgtcttgtctcggaatgttgtacta

SEQ ID NO: 642195 - DNA, 25 bp, Homo sapien
tctgtcttgtctcggaatgttgtac

SEQ ID NO: 642196 - DNA, 25 bp, Homo sapien
gtcttgtctcggaatgttgtactat

SEQ ID NO: 642197 - DNA, 25 bp, Homo sapien
attctgtcttgtctcggaatgttgt

SEQ ID NO: 642198 - DNA, 25 bp, Homo sapien
ggagcaagtagattttctgaaactt

SEQ ID NO: 642199 - DNA, 25 bp, Homo sapien
gagcaagtagattttctgaaacttt

SEQ ID NO: 642200 - DNA, 25 bp, Homo sapien
aaggagcaagtagattttctgaaac

SEQ ID NO: 642201 - DNA, 25 bp, Homo sapien
aggagcaagtagattttctgaaact

SEQ ID NO: 642202 - DNA, 25 bp, Homo sapien
ccacagaagtccaaatagatgaact

SEQ ID NO: 642203 - DNA, 25 bp, Homo sapien
cacagaagtccaaatagatgaactt

SEQ ID NO: 642204 - DNA, 25 bp, Homo sapien
acagaagtccaaatagatgaacttt

SEQ ID NO: 642205 - DNA, 25 bp, Homo sapien
tcgattatcagtgcccgcttcttta

SEQ ID NO: 642206 - DNA, 25 bp, Homo sapien
tcttgagtaagtttctgagatttcc

SEQ ID NO: 642207 - DNA, 25 bp, Homo sapien
aactatatttcgattatcagtgccc

SEQ ID NO: 642208 - DNA, 25 bp, Homo sapien
taatgcccttgtccttcaaagcttt

SEQ ID NO: 642209 - DNA, 25 bp, Homo sapien
tatgggcccttactaaaagcaagac

SEQ ID NO: 642210 - DNA, 25 bp, Homo sapien
ggatagcatggcctagcacttggga

SEQ ID NO: 642211 - DNA, 25 bp, Homo sapien
caggttatctcatggccaaaggcag

SEQ ID NO: 642212 - DNA, 25 bp, Homo sapien
cccaacggtacaaggcaagtgatga

SEQ ID NO: 642213 - DNA, 25 bp, Homo sapien
aatgcagttccataactatggccaa

SEQ ID NO: 642214 - DNA, 25 bp, Homo sapien
agacttcctccactggtcacttcaa

SEQ ID NO: 642215 - DNA, 25 bp, Homo sapien
aatgacgttatccaggtagaaccac

SEQ ID NO: 642216 - DNA, 25 bp, Homo sapien
ttcctccactggtcacttcaaatgc

SEQ ID NO: 642217 - DNA, 25 bp, Homo sapien
gaccgagagagccaagaatggcacc

SEQ ID NO: 642218 - DNA, 25 bp, Homo sapien
aagacccgaggagacaacgagggcg

SEQ ID NO: 642219 - DNA, 25 bp, Homo sapien
gcgggagacccctaaaatcagcgat

SEQ ID NO: 642220 - DNA, 25 bp, Homo sapien
gccaagaatggcaccctggcggaag

SEQ ID NO: 642221 - DNA, 25 bp, Homo sapien
gtttcagcaccacgaagtcgccgtc

SEQ ID NO: 642222 - DNA, 25 bp, Homo sapien
gcaccacgaagtcgccgtcgcggat

SEQ ID NO: 642223 - DNA, 25 bp, Homo sapien
ttcacgtttcagcaccacgaagtcg

SEQ ID NO: 642224 - DNA, 25 bp, Homo sapien
atcttcacgtttcagcaccacgaag

SEQ ID NO: 642225 - DNA, 25 bp, Homo sapien
cagccggtcgccgtgctccacggcg

SEQ ID NO: 642226 - DNA, 25 bp, Homo sapien
cggtcgccgtgctccacggcgtccc

SEQ ID NO: 642227 - DNA, 25 bp, Homo sapien
gcccctcctcctcggttgtcgccac

SEQ ID NO: 642228 - DNA, 25 bp, Homo sapien
cctcctcctcggttgtcgccaccgc

SEQ ID NO: 642229 - DNA, 25 bp, Homo sapien
tcccacaacctggcgcactaggagc

SEQ ID NO: 642230 - DNA, 25 bp, Homo sapien
acaacctggcgcactaggagccctc

SEQ ID NO: 642231 - DNA, 25 bp, Homo sapien
ttcccacaacctggcgcactaggag

SEQ ID NO: 642232 - DNA, 25 bp, Homo sapien
ccacaacctggcgcactaggagccc

SEQ ID NO: 642233 - DNA, 25 bp, Homo sapien
cgctttccggcccagacctcaagac

SEQ ID NO: 642234 - DNA, 25 bp, Homo sapien
cagacctcaagaccgcttccggaag

SEQ ID NO: 642235 - DNA, 25 bp, Homo sapien
acgtgttgcacgccgcttccgcttt

SEQ ID NO: 642236 - DNA, 25 bp, Homo sapien
ccccacgtgttgcacgccgcttccg

SEQ ID NO: 642237 - DNA, 25 bp, Homo sapien
cttccgtctggccaaactccttgat

SEQ ID NO: 642238 - DNA, 25 bp, Homo sapien
ctttgagcggaagttggatcactga

SEQ ID NO: 642239 - DNA, 25 bp, Homo sapien
gaagacctgattttcgcttgaggca

SEQ ID NO: 642240 - DNA, 25 bp, Homo sapien
aaactccttgattggctgcactccg

SEQ ID NO: 642241 - DNA, 25 bp, Homo sapien
gtcattctatgtgagctgaggacat

SEQ ID NO: 642242 - DNA, 25 bp, Homo sapien
tctttcatccttcgctttactgcag

SEQ ID NO: 642243 - DNA, 25 bp, Homo sapien
cctacttgcgtcttcagtggtcgaa

SEQ ID NO: 642244 - DNA, 25 bp, Homo sapien
tgttaataaaaatgcccgatatggc

SEQ ID NO: 642245 - DNA, 25 bp, Homo sapien
taagtgctggttttacttcttagag

SEQ ID NO: 642246 - DNA, 25 bp, Homo sapien
tgtgcatcatatttggactgtaact

SEQ ID NO: 642247 - DNA, 25 bp, Homo sapien
aaatgactcaagcatcaaattatct

SEQ ID NO: 642248 - DNA, 25 bp, Homo sapien
tctgctagttatttggaattatccc

SEQ ID NO: 642249 - DNA, 25 bp, Homo sapien
actccagcctgggcaacaagagtga

SEQ ID NO: 642250 - DNA, 25 bp, Homo sapien
tgagccaagatcgtgccattgcact

SEQ ID NO: 642251 - DNA, 25 bp, Homo sapien
tgaacccgggagatggagattgcag

SEQ ID NO: 642252 - DNA, 25 bp, Homo sapien
cgggaggctgaagtgaagaatcact

SEQ ID NO: 642253 - DNA, 25 bp, Homo sapien
agagacagctcacgcccaaaattct

SEQ ID NO: 642254 - DNA, 25 bp, Homo sapien
tacactagctatgcctggagggagg

SEQ ID NO: 642255 - DNA, 25 bp, Homo sapien
caaggtaggatatcacaaggtggga

SEQ ID NO: 642256 - DNA, 25 bp, Homo sapien
ttttgggtgccatgcactgcgcgtg

SEQ ID NO: 642257 - DNA, 25 bp, Homo sapien
catgcttaagcagagtaaattaggc

SEQ ID NO: 642258 - DNA, 25 bp, Homo sapien
tctgcaggccttagaccatagacgt

SEQ ID NO: 642259 - DNA, 25 bp, Homo sapien
gttcatctgtcgagcaaactaaggg

SEQ ID NO: 642260 - DNA, 25 bp, Homo sapien
ctgtggacacggtagattagttctc

SEQ ID NO: 642261 - DNA, 25 bp, Homo sapien
ttaacatcttttaacgttgcatccc

SEQ ID NO: 642262 - DNA, 25 bp, Homo sapien
tctgactgtctcttgtggatatgtc

SEQ ID NO: 642263 - DNA, 25 bp, Homo sapien
ttttcagcatcttgatagtcagagg

SEQ ID NO: 642264 - DNA, 25 bp, Homo sapien
gaaacattgtagtaagacagtctct

SEQ ID NO: 642265 - DNA, 25 bp, Homo sapien
cattccagactaggtacagagcgag

SEQ ID NO: 642266 - DNA, 25 bp, Homo sapien
taggtacagagcgagtctatgtgga

SEQ ID NO: 642267 - DNA, 25 bp, Homo sapien
cgagtctatgtggagtgcaatgtct

SEQ ID NO: 642268 - DNA, 25 bp, Homo sapien
cagagcgagtctatgtggagtgcaa

SEQ ID NO: 642269 - DNA, 25 bp, Homo sapien
aggtggtgatgctcgcttgcctgcc

SEQ ID NO: 642270 - DNA, 25 bp, Homo sapien
cacaagaaccgtagggcgccgcacg

SEQ ID NO: 642271 - DNA, 25 bp, Homo sapien
gatactgtaaaccacccacaagaac

SEQ ID NO: 642272 - DNA, 25 bp, Homo sapien
acaagaaccgtagggcgccgcacgc

SEQ ID NO: 642273 - DNA, 25 bp, Homo sapien
tgcactagatactgtaaaccaccca

SEQ ID NO: 642274 - DNA, 25 bp, Homo sapien
ggccacccgcctcagagggtttcag

SEQ ID NO: 642275 - DNA, 25 bp, Homo sapien
tcggctgcgcggtcatcctatcttg

SEQ ID NO: 642276 - DNA, 25 bp, Homo sapien
tcatcctatcttgttcgtttctccc

SEQ ID NO: 642277 - DNA, 25 bp, Homo sapien
cggctacgtcggctgcgcggtcatc

SEQ ID NO: 642278 - DNA, 25 bp, Homo sapien
tgcactcaggtaacaagctctgggt

SEQ ID NO: 642279 - DNA, 25 bp, Homo sapien
ggatgaatttcagggtcaccagcgg

SEQ ID NO: 642280 - DNA, 25 bp, Homo sapien
atcggccagcggaaccactgttcgg

SEQ ID NO: 642281 - DNA, 25 bp, Homo sapien
ttccctgaaaagaagttactggcag

SEQ ID NO: 642282 - DNA, 25 bp, Homo sapien
taatattgcactaggagtttttgct

SEQ ID NO: 642283 - DNA, 25 bp, Homo sapien
tcaatgacgagaattggcttggccc

SEQ ID NO: 642284 - DNA, 25 bp, Homo sapien
atcccgaatatgttgtcaatgacga

SEQ ID NO: 642285 - DNA, 25 bp, Homo sapien
tttttgctttagctggactaacaga

SEQ ID NO: 642286 - DNA, 25 bp, Homo sapien
gaattctgttgcctatccacataga

SEQ ID NO: 642287 - DNA, 25 bp, Homo sapien
gagttggaggaagtcatcgttacag

SEQ ID NO: 642288 - DNA, 25 bp, Homo sapien
cacatagaagtatcagttgggcagt

SEQ ID NO: 642289 - DNA, 25 bp, Homo sapien
tgatgggcaacacttgagtagggca

SEQ ID NO: 642290 - DNA, 25 bp, Homo sapien
tgggaagtgctcttgatccacttgc

SEQ ID NO: 642291 - DNA, 25 bp, Homo sapien
cagtatcttatatgttagcttgacc

SEQ ID NO: 642292 - DNA, 25 bp, Homo sapien
tgggccaatcaaagatcagctttgg

SEQ ID NO: 642293 - DNA, 25 bp, Homo sapien
gatttattgctcgaaactgggccaa

SEQ ID NO: 642294 - DNA, 25 bp, Homo sapien
tttcttcactgactgttcttttgct

SEQ ID NO: 642295 - DNA, 25 bp, Homo sapien
cggcctaatcctgctttttaagtct

SEQ ID NO: 642296 - DNA, 25 bp, Homo sapien
ctctttcttcactgactgttctttt

SEQ ID NO: 642297 - DNA, 25 bp, Homo sapien
gcgcccggcctaatcctgcttttta

SEQ ID NO: 642298 - DNA, 25 bp, Homo sapien
agcctctgccacctgggtccaagtg

SEQ ID NO: 642299 - DNA, 25 bp, Homo sapien
cagcctctgccacctgggtccaagt

SEQ ID NO: 642300 - DNA, 25 bp, Homo sapien
ctcccaggctagagtcccatggcac

SEQ ID NO: 642301 - DNA, 25 bp, Homo sapien
ctagagtcccatggcaccatctcgg

SEQ ID NO: 642302 - DNA, 25 bp, Homo sapien
ggcaattttgctttcttgtggctat

SEQ ID NO: 642303 - DNA, 25 bp, Homo sapien
tgtattttagacctcccatctgaga

SEQ ID NO: 642304 - DNA, 25 bp, Homo sapien
ttaaggtattgctcagtcatcttct

SEQ ID NO: 642305 - DNA, 25 bp, Homo sapien
cattatatcttgaagtcagtgctag

SEQ ID NO: 642306 - DNA, 25 bp, Homo sapien
gaaggaactggctggataagtatac

SEQ ID NO: 642307 - DNA, 25 bp, Homo sapien
tatacaatatttcacgctgggcaca

SEQ ID NO: 642308 - DNA, 25 bp, Homo sapien
ggaccatggtgtaaaatctgaggaa

SEQ ID NO: 642309 - DNA, 25 bp, Homo sapien
gacaagttgcattcattgaatgggc

SEQ ID NO: 642310 - DNA, 25 bp, Homo sapien
ttacttacatgatcatttcgagaga

SEQ ID NO: 642311 - DNA, 25 bp, Homo sapien
cttacttacatgatcatttcgagag

SEQ ID NO: 642312 - DNA, 25 bp, Homo sapien
tccacttacttacatgatcatttcg

SEQ ID NO: 642313 - DNA, 25 bp, Homo sapien
cacttacttacatgatcatttcgag

SEQ ID NO: 642314 - DNA, 25 bp, Homo sapien
cagattatgaagagtccctggtggt

SEQ ID NO: 642315 - DNA, 25 bp, Homo sapien
caagcttggctgtaactgcttctta

SEQ ID NO: 642316 - DNA, 25 bp, Homo sapien
ggatcatccttatacatgttgtgcc

SEQ ID NO: 642317 - DNA, 25 bp, Homo sapien
gctctgaatgaggtaatcgggccac

SEQ ID NO: 642318 - DNA, 25 bp, Homo sapien
ttctaaagcatccaatgtagttttc

SEQ ID NO: 642319 - DNA, 25 bp, Homo sapien
caaacgaagtcaggctcaaacatag

SEQ ID NO: 642320 - DNA, 25 bp, Homo sapien
gaatgtaagacacctagaggatgcc

SEQ ID NO: 642321 - DNA, 25 bp, Homo sapien
caaacatagttctgtgataagccct

SEQ ID NO: 642322 - DNA, 25 bp, Homo sapien
gaggatgcccgagtaaaaaatgaca

SEQ ID NO: 642323 - DNA, 25 bp, Homo sapien
tagttaggctgaaagtggacttccc

SEQ ID NO: 642324 - DNA, 25 bp, Homo sapien
cattatggccggaagactgttcagg

SEQ ID NO: 642325 - DNA, 25 bp, Homo sapien
cagggacaccgccattgaatcagat

SEQ ID NO: 642326 - DNA, 25 bp, Homo sapien
taaaaacatagtccagagcatgggc

SEQ ID NO: 642327 - DNA, 25 bp, Homo sapien
tcttgtggcttgaatcgcatctccc

SEQ ID NO: 642328 - DNA, 25 bp, Homo sapien
tatgatgaaactagggatctacctt

SEQ ID NO: 642329 - DNA, 25 bp, Homo sapien
tctcccaagaaagatacgttcacgt

SEQ ID NO: 642330 - DNA, 25 bp, Homo sapien
tactggattacagtgggccccaata

SEQ ID NO: 642331 - DNA, 25 bp, Homo sapien
tcaaggcattctggcttcacgggaa

SEQ ID NO: 642332 - DNA, 25 bp, Homo sapien
gcttccgctggaaagacctgaggat

SEQ ID NO: 642333 - DNA, 25 bp, Homo sapien
tgagacgcgttatcccagaagctgg

SEQ ID NO: 642334 - DNA, 25 bp, Homo sapien
tcagatccagttcgatgagacgcgt

SEQ ID NO: 642335 - DNA, 25 bp, Homo sapien
accaggtgcgtgtcgcagcgctgca

SEQ ID NO: 642336 - DNA, 25 bp, Homo sapien
taactgacggtctggagccccagcg

SEQ ID NO: 642337 - DNA, 25 bp, Homo sapien
taggccaccaggtgcgtgtcgcagc

SEQ ID NO: 642338 - DNA, 25 bp, Homo sapien
cagcgggtaatcatcaaaggccggg

SEQ ID NO: 642339 - DNA, 25 bp, Homo sapien
tcctcactgtagtcgtccagcagca

SEQ ID NO: 642340 - DNA, 25 bp, Homo sapien
tgcttgcagggatggtaatcacagg

SEQ ID NO: 642341 - DNA, 25 bp, Homo sapien
cgcagagtagcggatctggtaccca

SEQ ID NO: 642342 - DNA, 25 bp, Homo sapien
tggtacccatgcactaccgagttgg

SEQ ID NO: 642343 - DNA, 25 bp, Homo sapien
tgttctcctcggtgctgggtcctgg

SEQ ID NO: 642344 - DNA, 25 bp, Homo sapien
gatatcaggctcaaggacaagctcg

SEQ ID NO: 642345 - DNA, 25 bp, Homo sapien
tggaatctcgccctcggaaagactc

SEQ ID NO: 642346 - DNA, 25 bp, Homo sapien
ttatgctgcggtcccacgaggtagg

SEQ ID NO: 642347 - DNA, 25 bp, Homo sapien
tgtgcggccatgcagctatcgtgcg

SEQ ID NO: 642348 - DNA, 25 bp, Homo sapien
aaaacgctggagttgctgtgacctg

SEQ ID NO: 642349 - DNA, 25 bp, Homo sapien
tatcgtgcgagagcccacgttaggg

SEQ ID NO: 642350 - DNA, 25 bp, Homo sapien
tgctttggtcggactggcacactcc

SEQ ID NO: 642351 - DNA, 25 bp, Homo sapien
cttctgcgcagagctttgaatcctc

SEQ ID NO: 642352 - DNA, 25 bp, Homo sapien
tagaagacgtctggcttcagggaca

SEQ ID NO: 642353 - DNA, 25 bp, Homo sapien
cacacatcacctcattgattctggg

SEQ ID NO: 642354 - DNA, 25 bp, Homo sapien
ttgaatcctcattgccgacgtcacc

SEQ ID NO: 642355 - DNA, 25 bp, Homo sapien
cagttctctttgcatccgtgaggag

SEQ ID NO: 642356 - DNA, 25 bp, Homo sapien
tgaggagccaagacaagtcacaact

SEQ ID NO: 642357 - DNA, 25 bp, Homo sapien
gggttgccaaagaggttgatcgata

SEQ ID NO: 642358 - DNA, 25 bp, Homo sapien
ccaaagaggttgatcgataggacct

SEQ ID NO: 642359 - DNA, 25 bp, Homo sapien
taaaagaggactaacagggcctgcc

SEQ ID NO: 642360 - DNA, 25 bp, Homo sapien
tagacccactcaaattctggaaggg

SEQ ID NO: 642361 - DNA, 25 bp, Homo sapien
gctgggtggactatctgggacctac

SEQ ID NO: 642362 - DNA, 25 bp, Homo sapien
ggcctgcccatagacttccaaggga

SEQ ID NO: 642363 - DNA, 25 bp, Homo sapien
tccagggtcgtcagccgaggcatct

SEQ ID NO: 642364 - DNA, 25 bp, Homo sapien
tgtgtggcgacagaagcaagtgctg

SEQ ID NO: 642365 - DNA, 25 bp, Homo sapien
cagaaggacctgtagatgtggagta

SEQ ID NO: 642366 - DNA, 25 bp, Homo sapien
aggtctctgatccaccctgactcaa

SEQ ID NO: 642367 - DNA, 25 bp, Homo sapien
atccaggacttcgagcgtgaccagg

SEQ ID NO: 642368 - DNA, 25 bp, Homo sapien
ttcaaggaacgtgccgctgagatcc

SEQ ID NO: 642369 - DNA, 25 bp, Homo sapien
tccaggttgcggttcgccagggtca

SEQ ID NO: 642370 - DNA, 25 bp, Homo sapien
tgacccggaagagcgggaccttctc

SEQ ID NO: 642371 - DNA, 25 bp, Homo sapien
cccagctggggcgcagcaccgtcag

SEQ ID NO: 642372 - DNA, 25 bp, Homo sapien
gcagcagcggtagggtttgccgcat

SEQ ID NO: 642373 - DNA, 25 bp, Homo sapien
ctgcccagctggggcgcagcaccgt

SEQ ID NO: 642374 - DNA, 25 bp, Homo sapien
agcagcagcggtagggtttgccgca

SEQ ID NO: 642375 - DNA, 25 bp, Homo sapien
gacgttcccagagtcgcctagtgtg

SEQ ID NO: 642376 - DNA, 25 bp, Homo sapien
ggagcacaggcgctggatgttccct

SEQ ID NO: 642377 - DNA, 25 bp, Homo sapien
tcgcctagtgtgcagtgacctctcc

SEQ ID NO: 642378 - DNA, 25 bp, Homo sapien
tctcccctaggagcacggtgatacc

SEQ ID NO: 642379 - DNA, 25 bp, Homo sapien
gaccactgatttggacagcaactca

SEQ ID NO: 642380 - DNA, 25 bp, Homo sapien
tgagagggactgagatactccagtc

SEQ ID NO: 642381 - DNA, 25 bp, Homo sapien
tttatagattctagggaccactgat

SEQ ID NO: 642382 - DNA, 25 bp, Homo sapien
tcagctatgaactccagagggaggc

SEQ ID NO: 642383 - DNA, 25 bp, Homo sapien
ggagtttctgatacacgcgtgcgca

SEQ ID NO: 642384 - DNA, 25 bp, Homo sapien
tctgagaccatttctgagggaggag

SEQ ID NO: 642385 - DNA, 25 bp, Homo sapien
cagattctaggtgttgctgaccaac

SEQ ID NO: 642386 - DNA, 25 bp, Homo sapien
aaggacccaagatgagaactctgag

SEQ ID NO: 642387 - DNA, 25 bp, Homo sapien
gaaatgcgttcagctatgaggtaca

SEQ ID NO: 642388 - DNA, 25 bp, Homo sapien
tggtcagaattggatcccatggccc

SEQ ID NO: 642389 - DNA, 25 bp, Homo sapien
gactgaggtcttagagtcacccaaa

SEQ ID NO: 642390 - DNA, 25 bp, Homo sapien
tccccttaggcctcattggtcagaa

SEQ ID NO: 642391 - DNA, 25 bp, Homo sapien
gaggattgcttgagcgtagaggtgg

SEQ ID NO: 642392 - DNA, 25 bp, Homo sapien
agcctgggtgacagaatgagacccc

SEQ ID NO: 642393 - DNA, 25 bp, Homo sapien
tgagctgagatggcactgctgcact

SEQ ID NO: 642394 - DNA, 25 bp, Homo sapien
gctgagatggcactgctgcactcca

SEQ ID NO: 642395 - DNA, 25 bp, Homo sapien
catgaatactaagggcatgcctcac

SEQ ID NO: 642396 - DNA, 25 bp, Homo sapien
aatccctgtggtctcatatctgacc

SEQ ID NO: 642397 - DNA, 25 bp, Homo sapien
catgtatgtttcttaccccaacaca

SEQ ID NO: 642398 - DNA, 25 bp, Homo sapien
ccaactgtgcccatgtatgtttctt

SEQ ID NO: 642399 - DNA, 25 bp, Homo sapien
gctctcctgatgtctacctgattaa

SEQ ID NO: 642400 - DNA, 25 bp, Homo sapien
ttgcttgagttacatgcaatggatt

SEQ ID NO: 642401 - DNA, 25 bp, Homo sapien
gcttgagttacatgcaatggattca

SEQ ID NO: 642402 - DNA, 25 bp, Homo sapien
tgcttgagttacatgcaatggattc

SEQ ID NO: 642403 - DNA, 25 bp, Homo sapien
gggcccctttgtaagcacctggtca

SEQ ID NO: 642404 - DNA, 25 bp, Homo sapien
tgtagcactgcctggaagaggtctt

SEQ ID NO: 642405 - DNA, 25 bp, Homo sapien
tagcacagagattcagggccccttt

SEQ ID NO: 642406 - DNA, 25 bp, Homo sapien
gcttcccagaatatcccaccattag

SEQ ID NO: 642407 - DNA, 25 bp, Homo sapien
tgtccatcaacacatctcttgagtc

SEQ ID NO: 642408 - DNA, 25 bp, Homo sapien
cccagatcctctgctcctctcacac

SEQ ID NO: 642409 - DNA, 25 bp, Homo sapien
gtcacgctatgtgagaaaataatta

SEQ ID NO: 642410 - DNA, 25 bp, Homo sapien
aggaaagtcacgctatgtgagaaaa

SEQ ID NO: 642411 - DNA, 25 bp, Homo sapien
aagaggaatgttccctttctgtctc

SEQ ID NO: 642412 - DNA, 25 bp, Homo sapien
tatagagatactaaatgtagaagcc

SEQ ID NO: 642413 - DNA, 25 bp, Homo sapien
tttcatcataggaatttgggtgacc

SEQ ID NO: 642414 - DNA, 25 bp, Homo sapien
taggaatttgggtgaccttttgcac

SEQ ID NO: 642415 - DNA, 25 bp, Homo sapien
tgatgttgaaaggtgcccattaatt

SEQ ID NO: 642416 - DNA, 25 bp, Homo sapien
ggtgaccttttgcactcagtattaa

SEQ ID NO: 642417 - DNA, 25 bp, Homo sapien
tgtctcaaggcagtctcaaggcaga

SEQ ID NO: 642418 - DNA, 25 bp, Homo sapien
gcaaggcctcagaaattcagcgggt

SEQ ID NO: 642419 - DNA, 25 bp, Homo sapien
tgtcatggaagaaacgctcccctga

SEQ ID NO: 642420 - DNA, 25 bp, Homo sapien
tctcaaggcaagcactgtctcaagg

SEQ ID NO: 642421 - DNA, 25 bp, Homo sapien
agagggacgcttccccatgacccag

SEQ ID NO: 642422 - DNA, 25 bp, Homo sapien
gaacacagaccagcgataagaggga

SEQ ID NO: 642423 - DNA, 25 bp, Homo sapien
gaccagcgataagagggacgcttcc

SEQ ID NO: 642424 - DNA, 25 bp, Homo sapien
caggagaacacagaccagcgataag

SEQ ID NO: 642425 - DNA, 25 bp, Homo sapien
ccttggacatggtggtctttgagaa

SEQ ID NO: 642426 - DNA, 25 bp, Homo sapien
tgaccagttgggatagacacctgac

SEQ ID NO: 642427 - DNA, 25 bp, Homo sapien
ctgactggaatccttgacactggca

SEQ ID NO: 642428 - DNA, 25 bp, Homo sapien
tcctgaatcccaacccagagtagaa

SEQ ID NO: 642429 - DNA, 25 bp, Homo sapien
gagagatctgtaggaatggaatggg

SEQ ID NO: 642430 - DNA, 25 bp, Homo sapien
agatctgtaggaatggaatggggct

SEQ ID NO: 642431 - DNA, 25 bp, Homo sapien
ctgagagatctgtaggaatggaatg

SEQ ID NO: 642432 - DNA, 25 bp, Homo sapien
gagatctgtaggaatggaatggggc

SEQ ID NO: 642433 - DNA, 25 bp, Homo sapien
gccccagaaatctgaggagaccaat

SEQ ID NO: 642434 - DNA, 25 bp, Homo sapien
gtggccccagaaatctgaggagacc

SEQ ID NO: 642435 - DNA, 25 bp, Homo sapien
tggccccagaaatctgaggagacca

SEQ ID NO: 642436 - DNA, 25 bp, Homo sapien
cccagaaatctgaggagaccaatga

SEQ ID NO: 642437 - DNA, 25 bp, Homo sapien
tcagtggtcatcttggcaggtatca

SEQ ID NO: 642438 - DNA, 25 bp, Homo sapien
atgtgggtcagtggtcatcttggca

SEQ ID NO: 642439 - DNA, 25 bp, Homo sapien
gaccagatgtgggtcagtggtcatc

SEQ ID NO: 642440 - DNA, 25 bp, Homo sapien
ctaagaccagatgtgggtcagtggt

SEQ ID NO: 642441 - DNA, 25 bp, Homo sapien
ccttgttggtgtgagccgagcacgc

SEQ ID NO: 642442 - DNA, 25 bp, Homo sapien
agagaggctccttccgtggctggta

SEQ ID NO: 642443 - DNA, 25 bp, Homo sapien
tcagcacgaggataacttgtagcca

SEQ ID NO: 642444 - DNA, 25 bp, Homo sapien
tacatgctgggcacgttagggatcc

SEQ ID NO: 642445 - DNA, 25 bp, Homo sapien
gacaagaaaatgtagccgccaatgt

SEQ ID NO: 642446 - DNA, 25 bp, Homo sapien
tggaacaagtcctcatcgagtgttt

SEQ ID NO: 642447 - DNA, 25 bp, Homo sapien
tactcgtgcacaatcttgcaatctg

SEQ ID NO: 642448 - DNA, 25 bp, Homo sapien
gaaagcagtaaagacgttttggtca

SEQ ID NO: 642449 - DNA, 25 bp, Homo sapien
caacctgttatatgaaactcccaga

SEQ ID NO: 642450 - DNA, 25 bp, Homo sapien
ttaatcaacctgttatatgaaactc

SEQ ID NO: 642451 - DNA, 25 bp, Homo sapien
gtgaatctccatgttgtcactggaa

SEQ ID NO: 642452 - DNA, 25 bp, Homo sapien
tgttgtcactggaatcccggtggct

SEQ ID NO: 642453 - DNA, 25 bp, Homo sapien
acgcttcaccacgtatcaggcactt

SEQ ID NO: 642454 - DNA, 25 bp, Homo sapien
gcactttgcttgcaggctgcactgg

SEQ ID NO: 642455 - DNA, 25 bp, Homo sapien
acacagtaggttcggagagcccact

SEQ ID NO: 642456 - DNA, 25 bp, Homo sapien
cagtaggttcggagagcccactgga

SEQ ID NO: 642457 - DNA, 25 bp, Homo sapien
ctgacaaggtagtaggtgaggccaa

SEQ ID NO: 642458 - DNA, 25 bp, Homo sapien
tgactgccacgcctggatgaaccgc

SEQ ID NO: 642459 - DNA, 25 bp, Homo sapien
gcagcttggcttcgaccaggggcat

SEQ ID NO: 642460 - DNA, 25 bp, Homo sapien
ggtgaggccaaactcaggcagtgac

SEQ ID NO: 642461 - DNA, 25 bp, Homo sapien
tgcgcctccaggatccgggcggcca

SEQ ID NO: 642462 - DNA, 25 bp, Homo sapien
gtgcgcctccaggatccgggcggcc

SEQ ID NO: 642463 - DNA, 25 bp, Homo sapien
gcgcctccaggatccgggcggccag

SEQ ID NO: 642464 - DNA, 25 bp, Homo sapien
gaaacagacatcaacctctcttcac

SEQ ID NO: 642465 - DNA, 25 bp, Homo sapien
ctctcttcacatgcaccggctgctc

SEQ ID NO: 642466 - DNA, 25 bp, Homo sapien
ctcttcacatgcaccggctgctctg

SEQ ID NO: 642467 - DNA, 25 bp, Homo sapien
acagacatcaacctctcttcacatg

SEQ ID NO: 642468 - DNA, 25 bp, Homo sapien
gtttggatttgtgtctttttgcaca

SEQ ID NO: 642469 - DNA, 25 bp, Homo sapien
tttggatttgtgtctttttgcacac

SEQ ID NO: 642470 - DNA, 25 bp, Homo sapien
tgtttggatttgtgtctttttgcac

SEQ ID NO: 642471 - DNA, 25 bp, Homo sapien
ctgtttggatttgtgtctttttgca

SEQ ID NO: 642472 - DNA, 25 bp, Homo sapien
ttcgatgccaacatgcaggcagcca

SEQ ID NO: 642473 - DNA, 25 bp, Homo sapien
tctgggttcatatccatgttttcga

SEQ ID NO: 642474 - DNA, 25 bp, Homo sapien
caggcagccatccattgggcgtatt

SEQ ID NO: 642475 - DNA, 25 bp, Homo sapien
gactggaagccacctgagatgcaga

SEQ ID NO: 642476 - DNA, 25 bp, Homo sapien
tgtgattttgttacactgtgattgt

SEQ ID NO: 642477 - DNA, 25 bp, Homo sapien
tcattgtgattttgttacactgtga

SEQ ID NO: 642478 - DNA, 25 bp, Homo sapien
cattgtgattttgttacactgtgat

SEQ ID NO: 642479 - DNA, 25 bp, Homo sapien
tgtcattgtgattttgttacactgt

SEQ ID NO: 642480 - DNA, 25 bp, Homo sapien
tacaaagcaatagctgagtgacaca

SEQ ID NO: 642481 - DNA, 25 bp, Homo sapien
aatagtgctctaaatttgtgaaaac

SEQ ID NO: 642482 - DNA, 25 bp, Homo sapien
tgctcttaggcttagtggaggtgaa

SEQ ID NO: 642483 - DNA, 25 bp, Homo sapien
ggttttgctcttaggcttagtggag

SEQ ID NO: 642484 - DNA, 25 bp, Homo sapien
gtcacatctcaaatacatttcattc

SEQ ID NO: 642485 - DNA, 25 bp, Homo sapien
atggtcacatctcaaatacatttca

SEQ ID NO: 642486 - DNA, 25 bp, Homo sapien
cacatctcaaatacatttcattcat

SEQ ID NO: 642487 - DNA, 25 bp, Homo sapien
tggtcacatctcaaatacatttcat

SEQ ID NO: 642488 - DNA, 25 bp, Homo sapien
cggcaacagggattagtaacttgat

SEQ ID NO: 642489 - DNA, 25 bp, Homo sapien
caacagggattagtaacttgattcc

SEQ ID NO: 642490 - DNA, 25 bp, Homo sapien
catcggcaacagggattagtaactt

SEQ ID NO: 642491 - DNA, 25 bp, Homo sapien
tcggcaacagggattagtaacttga

SEQ ID NO: 642492 - DNA, 25 bp, Homo sapien
gagacaaaactgagttctgaggcat

SEQ ID NO: 642493 - DNA, 25 bp, Homo sapien
tgaaggacaaagatcagagacaaaa

SEQ ID NO: 642494 - DNA, 25 bp, Homo sapien
aagatcagagacaaaactgagttct

SEQ ID NO: 642495 - DNA, 25 bp, Homo sapien
gaaggacaaagatcagagacaaaac

SEQ ID NO: 642496 - DNA, 25 bp, Homo sapien
atgagccacagcaagatatagggta

SEQ ID NO: 642497 - DNA, 25 bp, Homo sapien
gatgtgtctttaaagataaaccaat

SEQ ID NO: 642498 - DNA, 25 bp, Homo sapien
aagtatgctatggatgtgtctttaa

SEQ ID NO: 642499 - DNA, 25 bp, Homo sapien
tttaaagtatgctatggatgtgtct

SEQ ID NO: 642500 - DNA, 25 bp, Homo sapien
ggatgtgtctttaaagataaaccaa

SEQ ID NO: 642501 - DNA, 25 bp, Homo sapien
ttgtcatttataccggcttcattgc

SEQ ID NO: 642502 - DNA, 25 bp, Homo sapien
gtttgtcatttataccggcttcatt

SEQ ID NO: 642503 - DNA, 25 bp, Homo sapien
ttgtttgtcatttataccggcttca

SEQ ID NO: 642504 - DNA, 25 bp, Homo sapien
catttataccggcttcattgctcat

SEQ ID NO: 642505 - DNA, 25 bp, Homo sapien
tgcaagtttagggatatcagtaatg

SEQ ID NO: 642506 - DNA, 25 bp, Homo sapien
ctgcaagtttagggatatcagtaat

SEQ ID NO: 642507 - DNA, 25 bp, Homo sapien
tctgcaagtttagggatatcagtaa

SEQ ID NO: 642508 - DNA, 25 bp, Homo sapien
aataatttgagattatctgcaagtt

SEQ ID NO: 642509 - DNA, 25 bp, Homo sapien
tagtcccttgtggagctaacccatg

SEQ ID NO: 642510 - DNA, 25 bp, Homo sapien
tacatctaattatggtggacccacc

SEQ ID NO: 642511 - DNA, 25 bp, Homo sapien
ccatgctagtgaagtggagccctca

SEQ ID NO: 642512 - DNA, 25 bp, Homo sapien
ttctataaacgtgacacagggccct

SEQ ID NO: 642513 - DNA, 25 bp, Homo sapien
gaaagcgccgcttctatttcatcaa

SEQ ID NO: 642514 - DNA, 25 bp, Homo sapien
acaacgacagtttgctaatgtggta

SEQ ID NO: 642515 - DNA, 25 bp, Homo sapien
caaaaggctgtccgcttttccacct

SEQ ID NO: 642516 - DNA, 25 bp, Homo sapien
tcaacctcggactcgcctgcaaaat

SEQ ID NO: 642517 - DNA, 25 bp, Homo sapien
gagttggtttattcggacagcatca

SEQ ID NO: 642518 - DNA, 25 bp, Homo sapien
ctcatagagttggtttattcggaca

SEQ ID NO: 642519 - DNA, 25 bp, Homo sapien
ttctaagagaatggcccacctggct

SEQ ID NO: 642520 - DNA, 25 bp, Homo sapien
ctgtagagctgcaaagatcaacatt

SEQ ID NO: 642521 - DNA, 25 bp, Homo sapien
tatcctttcatgcattcatattaaa

SEQ ID NO: 642522 - DNA, 25 bp, Homo sapien
tttatcctttcatgcattcatatta

SEQ ID NO: 642523 - DNA, 25 bp, Homo sapien
cattttatcctttcatgcattcata

SEQ ID NO: 642524 - DNA, 25 bp, Homo sapien
attttatcctttcatgcattcatat

SEQ ID NO: 642525 - DNA, 25 bp, Homo sapien
tttaaatcgtaagagcagctgctca

SEQ ID NO: 642526 - DNA, 25 bp, Homo sapien
ttccataagggagcgtgaggagtct

SEQ ID NO: 642527 - DNA, 25 bp, Homo sapien
tgccttgttccataagggagcgtga

SEQ ID NO: 642528 - DNA, 25 bp, Homo sapien
ataatatttaaatcgtaagagcagc

SEQ ID NO: 642529 - DNA, 25 bp, Homo sapien
gaccgaggctggtacatatccgcaa

SEQ ID NO: 642530 - DNA, 25 bp, Homo sapien
ttgttccgtcaaagggctgtcactg

SEQ ID NO: 642531 - DNA, 25 bp, Homo sapien
gctttatcaaccagagaccgaggct

SEQ ID NO: 642532 - DNA, 25 bp, Homo sapien
tgaaccaagtcatggtggatgatgc

SEQ ID NO: 642533 - DNA, 25 bp, Homo sapien
aatatcttcaattatgggttcctta

SEQ ID NO: 642534 - DNA, 25 bp, Homo sapien
ggagaactctccaggtttagaatat

SEQ ID NO: 642535 - DNA, 25 bp, Homo sapien
agctgttggagaactctccaggttt

SEQ ID NO: 642536 - DNA, 25 bp, Homo sapien
taaaatagtcaccagacggctttaa

SEQ ID NO: 642537 - DNA, 25 bp, Homo sapien
agagcaaagtctgaccagtcttggg

SEQ ID NO: 642538 - DNA, 25 bp, Homo sapien
ttcaaattcggcagacgaaggcgca

SEQ ID NO: 642539 - DNA, 25 bp, Homo sapien
catatttgtccagggtccagtgggt

SEQ ID NO: 642540 - DNA, 25 bp, Homo sapien
gctgagaagctgactcgcaacctca

SEQ ID NO: 642541 - DNA, 25 bp, Homo sapien
tgctgctcttcattgggatggtcaa

SEQ ID NO: 642542 - DNA, 25 bp, Homo sapien
tgggatggtcaacgcggaccacaag

SEQ ID NO: 642543 - DNA, 25 bp, Homo sapien
tcagtgtgacgtctttctgctgctc

SEQ ID NO: 642544 - DNA, 25 bp, Homo sapien
tgaaggtctccagatactctcagtg

SEQ ID NO: 642545 - DNA, 25 bp, Homo sapien
tcttcaaagtacagatagggatgtg

SEQ ID NO: 642546 - DNA, 25 bp, Homo sapien
tcccctcatgggagaagctagcagg

SEQ ID NO: 642547 - DNA, 25 bp, Homo sapien
tgtgaatttcaaacccatcgttttc

SEQ ID NO: 642548 - DNA, 25 bp, Homo sapien
gctagcaggaaagaacgttcacaac

SEQ ID NO: 642549 - DNA, 25 bp, Homo sapien
aaggtgcttggtgttcgaaggccac

SEQ ID NO: 642550 - DNA, 25 bp, Homo sapien
tcagccgggaaaacgcatctaagga

SEQ ID NO: 642551 - DNA, 25 bp, Homo sapien
gattccccttacaacaaaatgcagg

SEQ ID NO: 642552 - DNA, 25 bp, Homo sapien
gagtgaacgtctagtctgcagcaag

SEQ ID NO: 642553 - DNA, 25 bp, Homo sapien
gccggagaaggtggtcacatccaga

SEQ ID NO: 642554 - DNA, 25 bp, Homo sapien
ttcaatcaacagctatttaagtaca

SEQ ID NO: 642555 - DNA, 25 bp, Homo sapien
cacctgcggctgaactgaaagttta

SEQ ID NO: 642556 - DNA, 25 bp, Homo sapien
tattttgcggccagatgcgtagggc

SEQ ID NO: 642557 - DNA, 25 bp, Homo sapien
tagcccagatgattaaagccgcgcc

SEQ ID NO: 642558 - DNA, 25 bp, Homo sapien
tggagagctgcgtccctacaaacta

SEQ ID NO: 642559 - DNA, 25 bp, Homo sapien
gatgtctcatcctgacgctttaagg

SEQ ID NO: 642560 - DNA, 25 bp, Homo sapien
gggcgcacgctcagtatctgcagct

SEQ ID NO: 642561 - DNA, 25 bp, Homo sapien
caggggagactccaggagacccaag

SEQ ID NO: 642562 - DNA, 25 bp, Homo sapien
ggctgcatgcggaagtctgggccac

SEQ ID NO: 642563 - DNA, 25 bp, Homo sapien
caagggcaggctgcatgcggaagtc

SEQ ID NO: 642564 - DNA, 25 bp, Homo sapien
ctgaggctcccgaccaggggagact

SEQ ID NO: 642565 - DNA, 25 bp, Homo sapien
cccgccagtcgccttcctgttggat

SEQ ID NO: 642566 - DNA, 25 bp, Homo sapien
caccggtcccgccagtcgccttcct

SEQ ID NO: 642567 - DNA, 25 bp, Homo sapien
ggtcccgccagtcgccttcctgttg

SEQ ID NO: 642568 - DNA, 25 bp, Homo sapien
ccgccagtcgccttcctgttggatt

SEQ ID NO: 642569 - DNA, 25 bp, Homo sapien
ttctgagtccagtttgggcctgagt

SEQ ID NO: 642570 - DNA, 25 bp, Homo sapien
gtccagtttgggcctgagtcttgcc

SEQ ID NO: 642571 - DNA, 25 bp, Homo sapien
ccagtttgggcctgagtcttgccct

SEQ ID NO: 642572 - DNA, 25 bp, Homo sapien
tgagtccagtttgggcctgagtctt

SEQ ID NO: 642573 - DNA, 25 bp, Homo sapien
gatgattgggaaatacgcaggctct

SEQ ID NO: 642574 - DNA, 25 bp, Homo sapien
tgattgggaaatacgcaggctcttt

SEQ ID NO: 642575 - DNA, 25 bp, Homo sapien
gatgatgattgggaaatacgcaggc

SEQ ID NO: 642576 - DNA, 25 bp, Homo sapien
gggaaatacgcaggctctttctgct

SEQ ID NO: 642577 - DNA, 25 bp, Homo sapien
gtggttgttctgtgcctttgaagcc

SEQ ID NO: 642578 - DNA, 25 bp, Homo sapien
tcccacatggctggaagtgccagtg

SEQ ID NO: 642579 - DNA, 25 bp, Homo sapien
gtgggtgagtggttgttctgtgcct

SEQ ID NO: 642580 - DNA, 25 bp, Homo sapien
actttttggtccaagtcccacatgg

SEQ ID NO: 642581 - DNA, 25 bp, Homo sapien
gaattctcttgaacagggccgtcca

SEQ ID NO: 642582 - DNA, 25 bp, Homo sapien
tcatggaatttgctcctgctggaca

SEQ ID NO: 642583 - DNA, 25 bp, Homo sapien
cctggacccggagtgatgccaaagt

SEQ ID NO: 642584 - DNA, 25 bp, Homo sapien
caaagtaaggcaaggccacaagcag

SEQ ID NO: 642585 - DNA, 25 bp, Homo sapien
gagctcattgatatcattcaggtga

SEQ ID NO: 642586 - DNA, 25 bp, Homo sapien
gaataagtgtagactccttttccac

SEQ ID NO: 642587 - DNA, 25 bp, Homo sapien
gctccttcacgtggtttgggaataa

SEQ ID NO: 642588 - DNA, 25 bp, Homo sapien
ccacttttagggaacccttgctcag

SEQ ID NO: 642589 - DNA, 25 bp, Homo sapien
agctcagggcttgtcccagataaag

SEQ ID NO: 642590 - DNA, 25 bp, Homo sapien
catgtcctgaaaattcccattggca

SEQ ID NO: 642591 - DNA, 25 bp, Homo sapien
ttttcagtccctttgcctctcgtgg

SEQ ID NO: 642592 - DNA, 25 bp, Homo sapien
aaagcacatgtcctgaaaattccca

SEQ ID NO: 642593 - DNA, 25 bp, Homo sapien
ccgagaaaatctcagcatccacttg

SEQ ID NO: 642594 - DNA, 25 bp, Homo sapien
ctccagaccgagaaaatctcagcat

SEQ ID NO: 642595 - DNA, 25 bp, Homo sapien
cagaccgagaaaatctcagcatcca

SEQ ID NO: 642596 - DNA, 25 bp, Homo sapien
ctgttcagctttgactgcccctctc

SEQ ID NO: 642597 - DNA, 25 bp, Homo sapien
gtgatgacgaattcttgaatgagaa

SEQ ID NO: 642598 - DNA, 25 bp, Homo sapien
ttctgtaaacgtttgaaatgagatg

SEQ ID NO: 642599 - DNA, 25 bp, Homo sapien
cttctgtaaacgtttgaaatgagat

SEQ ID NO: 642600 - DNA, 25 bp, Homo sapien
tctgtaaacgtttgaaatgagatgc

SEQ ID NO: 642601 - DNA, 25 bp, Homo sapien
tctagaaccaaagacctggtttggc

SEQ ID NO: 642602 - DNA, 25 bp, Homo sapien
cctccattaaaaccattgcctgatg

SEQ ID NO: 642603 - DNA, 25 bp, Homo sapien
tttcccagccagaagattgagaatc

SEQ ID NO: 642604 - DNA, 25 bp, Homo sapien
gcctgatgctgattcccaaccaatt

SEQ ID NO: 642605 - DNA, 25 bp, Homo sapien
cacctgtattggtacctcgattgtt

SEQ ID NO: 642606 - DNA, 25 bp, Homo sapien
tgtattggtacctcgattgttttcc

SEQ ID NO: 642607 - DNA, 25 bp, Homo sapien
tggtacctcgattgttttccaagcc

SEQ ID NO: 642608 - DNA, 25 bp, Homo sapien
tctaccacctgtattggtacctcga

SEQ ID NO: 642609 - DNA, 25 bp, Homo sapien
cagaaaaactgccatagctcatctg

SEQ ID NO: 642610 - DNA, 25 bp, Homo sapien
ccacaaagagattgggcaatctgat

SEQ ID NO: 642611 - DNA, 25 bp, Homo sapien
gattgggcaatctgatcaactgcaa

SEQ ID NO: 642612 - DNA, 25 bp, Homo sapien
gaaaaactgccatagctcatctgca

SEQ ID NO: 642613 - DNA, 25 bp, Homo sapien
gaaatttacagtcataccatcatcc

SEQ ID NO: 642614 - DNA, 25 bp, Homo sapien
atttacagtcataccatcatccatc

SEQ ID NO: 642615 - DNA, 25 bp, Homo sapien
ctttcagatcctgtttccataggag

SEQ ID NO: 642616 - DNA, 25 bp, Homo sapien
cagatcctgtttccataggaggaaa

SEQ ID NO: 642617 - DNA, 25 bp, Homo sapien
aattaccaacgctattaaataagat

SEQ ID NO: 642618 - DNA, 25 bp, Homo sapien
taattaccaacgctattaaataaga

SEQ ID NO: 642619 - DNA, 25 bp, Homo sapien
ttctgatgatatttcaacgagctcc

SEQ ID NO: 642620 - DNA, 25 bp, Homo sapien
tccacagtcagcatcagggcatgca

SEQ ID NO: 642621 - DNA, 25 bp, Homo sapien
tctttgggacagttgacaacatata

SEQ ID NO: 642622 - DNA, 25 bp, Homo sapien
cagtcagcatcagggcatgcagaat

SEQ ID NO: 642623 - DNA, 25 bp, Homo sapien
gtggtagagccggttattcacagag

SEQ ID NO: 642624 - DNA, 25 bp, Homo sapien
gtagagccggttattcacagagagg

SEQ ID NO: 642625 - DNA, 25 bp, Homo sapien
gaggcgttcgaggtgcgagaggagg

SEQ ID NO: 642626 - DNA, 25 bp, Homo sapien
tcagcaagaggcgttcgaggtgcga

SEQ ID NO: 642627 - DNA, 25 bp, Homo sapien
gaaagcatcacattgggcatcaagc

SEQ ID NO: 642628 - DNA, 25 bp, Homo sapien
tcaagctgtgacaccagcagtggag

SEQ ID NO: 642629 - DNA, 25 bp, Homo sapien
gtaccggccacccaacatttttgca

SEQ ID NO: 642630 - DNA, 25 bp, Homo sapien
catggagagtgtggttcccttggac

SEQ ID NO: 642631 - DNA, 25 bp, Homo sapien
ccagagggtggtactggacagtgag

SEQ ID NO: 642632 - DNA, 25 bp, Homo sapien
actggacagtgaggtagagtttcat

SEQ ID NO: 642633 - DNA, 25 bp, Homo sapien
ggtactggacagtgaggtagagttt

SEQ ID NO: 642634 - DNA, 25 bp, Homo sapien
gatggagactgccagccatccagag

SEQ ID NO: 642635 - DNA, 25 bp, Homo sapien
accttcttgaacgtgggaagagatt

SEQ ID NO: 642636 - DNA, 25 bp, Homo sapien
gccaccttcttgaacgtgggaagag

SEQ ID NO: 642637 - DNA, 25 bp, Homo sapien
agtcccttgaggtctcttggcagcc

SEQ ID NO: 642638 - DNA, 25 bp, Homo sapien
cagtcccttgaggtctcttggcagc

SEQ ID NO: 642639 - DNA, 25 bp, Homo sapien
ctttgtgatgagatataggcgtacc

SEQ ID NO: 642640 - DNA, 25 bp, Homo sapien
ttttaattgagtagagccctgagga

SEQ ID NO: 642641 - DNA, 25 bp, Homo sapien
gctgggacatgtctcctggcaggat

SEQ ID NO: 642642 - DNA, 25 bp, Homo sapien
gaagtgagttgttcccagccttaca

SEQ ID NO: 642643 - DNA, 25 bp, Homo sapien
catggggagcccgtgtactgtgtcc

SEQ ID NO: 642644 - DNA, 25 bp, Homo sapien
aaagtggtgagttgcaacctctgca

SEQ ID NO: 642645 - DNA, 25 bp, Homo sapien
cttgctcaggcccatccgagcttgg

SEQ ID NO: 642646 - DNA, 25 bp, Homo sapien
cccatccgagcttggaaagtggtga

SEQ ID NO: 642647 - DNA, 25 bp, Homo sapien
aaggaccttcacagtcggctccctg

SEQ ID NO: 642648 - DNA, 25 bp, Homo sapien
gccaatagcttatctgagtctttcg

SEQ ID NO: 642649 - DNA, 25 bp, Homo sapien
ttcggatgaagtctggactcctcag

SEQ ID NO: 642650 - DNA, 25 bp, Homo sapien
cagtggaccaggctttgcctcacct

SEQ ID NO: 642651 - DNA, 25 bp, Homo sapien
tgacagatagcagggatctcagatg

SEQ ID NO: 642652 - DNA, 25 bp, Homo sapien
ggtgactggtctggaatgaaacgct

SEQ ID NO: 642653 - DNA, 25 bp, Homo sapien
acaggcttttgacagatagcaggga

SEQ ID NO: 642654 - DNA, 25 bp, Homo sapien
ctggtctggaatgaaacgctgaaca

SEQ ID NO: 642655 - DNA, 25 bp, Homo sapien
ttttagcactgaaatccctgttgtc

SEQ ID NO: 642656 - DNA, 25 bp, Homo sapien
aagcagtaggtggagctacaggctt

SEQ ID NO: 642657 - DNA, 25 bp, Homo sapien
ttttatcacgaaagaatgtttgcag

SEQ ID NO: 642658 - DNA, 25 bp, Homo sapien
tttttagcactgaaatccctgttgt

SEQ ID NO: 642659 - DNA, 25 bp, Homo sapien
tagcaatacccttcccattgaacct

SEQ ID NO: 642660 - DNA, 25 bp, Homo sapien
gaggctcatagcaatacccttccca

SEQ ID NO: 642661 - DNA, 25 bp, Homo sapien
cccattgaaccttctctgagaatac

SEQ ID NO: 642662 - DNA, 25 bp, Homo sapien
gtggtctgttggaggctcatagcaa

SEQ ID NO: 642663 - DNA, 25 bp, Homo sapien
tgagaggtagattggcaccttaaac

SEQ ID NO: 642664 - DNA, 25 bp, Homo sapien
ctgagaggtagattggcaccttaaa

SEQ ID NO: 642665 - DNA, 25 bp, Homo sapien
tagatgcctgcatgcgtggatgacc

SEQ ID NO: 642666 - DNA, 25 bp, Homo sapien
ccatgcgccctagcatagatgcctg

SEQ ID NO: 642667 - DNA, 25 bp, Homo sapien
cagtgcaaggcatagaagtaaccca

SEQ ID NO: 642668 - DNA, 25 bp, Homo sapien
gaagtaacccagtgatagtgccatg

SEQ ID NO: 642669 - DNA, 25 bp, Homo sapien
aaaataatccatggcgggaaggagg

SEQ ID NO: 642670 - DNA, 25 bp, Homo sapien
gtgggtgtctgtctttttgggatcc

SEQ ID NO: 642671 - DNA, 25 bp, Homo sapien
tatggtgtctggactcaaattcagc

SEQ ID NO: 642672 - DNA, 25 bp, Homo sapien
tttgggatccaatgaggctggcagt

SEQ ID NO: 642673 - DNA, 25 bp, Homo sapien
attgatttctctcagtgttcgccac

SEQ ID NO: 642674 - DNA, 25 bp, Homo sapien
tctctcagtgttcgccacacgcgtt

SEQ ID NO: 642675 - DNA, 25 bp, Homo sapien
gtggaatgagcaacattgatttctc

SEQ ID NO: 642676 - DNA, 25 bp, Homo sapien
gtgttcgccacacgcgttccatcat

SEQ ID NO: 642677 - DNA, 25 bp, Homo sapien
tttggcgcagattagggataaacca

SEQ ID NO: 642678 - DNA, 25 bp, Homo sapien
tctcctagttggtgcactacttcac

SEQ ID NO: 642679 - DNA, 25 bp, Homo sapien
tgttgccatgtactatagcctgtct

SEQ ID NO: 642680 - DNA, 25 bp, Homo sapien
cctactgtgtagtattttggcgcag

SEQ ID NO: 642681 - DNA, 25 bp, Homo sapien
gggtgccctgagtgtgatgttctgg

SEQ ID NO: 642682 - DNA, 25 bp, Homo sapien
tgccctgagtgtgatgttctggata

SEQ ID NO: 642683 - DNA, 25 bp, Homo sapien
acgcacactggcctatctggggaca

SEQ ID NO: 642684 - DNA, 25 bp, Homo sapien
cactggcctatctggggacatgtca

SEQ ID NO: 642685 - DNA, 25 bp, Homo sapien
tgagcttgatcagtgaccggctggc

SEQ ID NO: 642686 - DNA, 25 bp, Homo sapien
cacactgtcagtagttgagtttggc

SEQ ID NO: 642687 - DNA, 25 bp, Homo sapien
agtacgggacttttgagcttgatca

SEQ ID NO: 642688 - DNA, 25 bp, Homo sapien
cagaacatgggtattaagtacggga

SEQ ID NO: 642689 - DNA, 25 bp, Homo sapien
tctcgggggctaacagagcctagga

SEQ ID NO: 642690 - DNA, 25 bp, Homo sapien
tctgttctgaatctcgggggctaac

SEQ ID NO: 642691 - DNA, 25 bp, Homo sapien
tgccttccagatccctcattcagca

SEQ ID NO: 642692 - DNA, 25 bp, Homo sapien
ttgccttccagatccctcattcagc

SEQ ID NO: 642693 - DNA, 25 bp, Homo sapien
cacatggaggtatggactgtcctct

SEQ ID NO: 642694 - DNA, 25 bp, Homo sapien
tcccactcatatgtcctgccacaca

SEQ ID NO: 642695 - DNA, 25 bp, Homo sapien
tctcctatttcttcggtatgattgg

SEQ ID NO: 642696 - DNA, 25 bp, Homo sapien
tttcttcggtatgattggatctgca

SEQ ID NO: 642697 - DNA, 25 bp, Homo sapien
gcccagttgaattgaaggtctcgga

SEQ ID NO: 642698 - DNA, 25 bp, Homo sapien
aagcttgttctgtgccaactgccca

SEQ ID NO: 642699 - DNA, 25 bp, Homo sapien
taggattgacaaagatacccaaatc

SEQ ID NO: 642700 - DNA, 25 bp, Homo sapien
aagatacccaaatcctccaattggc

SEQ ID NO: 642701 - DNA, 25 bp, Homo sapien
cccctccacaatgtccgctttgact

SEQ ID NO: 642702 - DNA, 25 bp, Homo sapien
aatgtccgctttgactctctttatc

SEQ ID NO: 642703 - DNA, 25 bp, Homo sapien
ccacaatgtccgctttgactctctt

SEQ ID NO: 642704 - DNA, 25 bp, Homo sapien
caatgtccgctttgactctctttat

SEQ ID NO: 642705 - DNA, 25 bp, Homo sapien
tcccatagcgggcttctattttccc

SEQ ID NO: 642706 - DNA, 25 bp, Homo sapien
aattcccatagcgggcttctatttt

SEQ ID NO: 642707 - DNA, 25 bp, Homo sapien
ttcccatagcgggcttctattttcc

SEQ ID NO: 642708 - DNA, 25 bp, Homo sapien
ttaattcccatagcgggcttctatt

SEQ ID NO: 642709 - DNA, 25 bp, Homo sapien
gagatgcacatgatgatactagctg

SEQ ID NO: 642710 - DNA, 25 bp, Homo sapien
tgcctgggtcatcttaaggccgact

SEQ ID NO: 642711 - DNA, 25 bp, Homo sapien
gcctgggtcatcttaaggccgactg

SEQ ID NO: 642712 - DNA, 25 bp, Homo sapien
gatgcacatgatgatactagctgtg

SEQ ID NO: 642713 - DNA, 25 bp, Homo sapien
tctcatatacattttggagtcaggg

SEQ ID NO: 642714 - DNA, 25 bp, Homo sapien
tcggaagttgatagagtacatgatt

SEQ ID NO: 642715 - DNA, 25 bp, Homo sapien
tgtcatctgactgtccaaagtctcc

SEQ ID NO: 642716 - DNA, 25 bp, Homo sapien
ctggcagagtgtctagccgtctagc

SEQ ID NO: 642717 - DNA, 25 bp, Homo sapien
caaaacaatatgactgggtctaata

SEQ ID NO: 642718 - DNA, 25 bp, Homo sapien
tccagataaatgtgcagcagtgagg

SEQ ID NO: 642719 - DNA, 25 bp, Homo sapien
caattgtcttgataaaagggcagca

SEQ ID NO: 642720 - DNA, 25 bp, Homo sapien
gaaattgaggcaggtatggacatac

SEQ ID NO: 642721 - DNA, 25 bp, Homo sapien
cttaggatccccttgtccacctgca

SEQ ID NO: 642722 - DNA, 25 bp, Homo sapien
gtccacctgcacctgaaatcttcat

SEQ ID NO: 642723 - DNA, 25 bp, Homo sapien
ctgagccacacccttaggatcccct

SEQ ID NO: 642724 - DNA, 25 bp, Homo sapien
cacacccttaggatccccttgtcca

SEQ ID NO: 642725 - DNA, 25 bp, Homo sapien
gagaagcatgaacatcagccaaggg

SEQ ID NO: 642726 - DNA, 25 bp, Homo sapien
tagacgagtggcactttgaggaaac

SEQ ID NO: 642727 - DNA, 25 bp, Homo sapien
ctattgccttagacgagtggcactt

SEQ ID NO: 642728 - DNA, 25 bp, Homo sapien
taaattgattgacatatgggttagc

SEQ ID NO: 642729 - DNA, 25 bp, Homo sapien
gtctgtggagcagtggatgactggg

SEQ ID NO: 642730 - DNA, 25 bp, Homo sapien
ccaaatgggtctgtggagcagtgga

SEQ ID NO: 642731 - DNA, 25 bp, Homo sapien
aaatgggtctgtggagcagtggatg

SEQ ID NO: 642732 - DNA, 25 bp, Homo sapien
tgggtctgtggagcagtggatgact

SEQ ID NO: 642733 - DNA, 25 bp, Homo sapien
tggaacaccaatggactccctcaga

SEQ ID NO: 642734 - DNA, 25 bp, Homo sapien
gaattatagttcctactcctcagta

SEQ ID NO: 642735 - DNA, 25 bp, Homo sapien
tggactccctcagaaactcagattc

SEQ ID NO: 642736 - DNA, 25 bp, Homo sapien
gagctgcccaaattcgcattgtctc

SEQ ID NO: 642737 - DNA, 25 bp, Homo sapien
aatgtccttagcaggtactctggta

SEQ ID NO: 642738 - DNA, 25 bp, Homo sapien
tgctgactcagcaaatgtccttagc

SEQ ID NO: 642739 - DNA, 25 bp, Homo sapien
gactcagcaaatgtccttagcaggt

SEQ ID NO: 642740 - DNA, 25 bp, Homo sapien
cagcaaatgtccttagcaggtactc

SEQ ID NO: 642741 - DNA, 25 bp, Homo sapien
gttctctgggctgctgatgggcatt

SEQ ID NO: 642742 - DNA, 25 bp, Homo sapien
tggttctctgggctgctgatgggca

SEQ ID NO: 642743 - DNA, 25 bp, Homo sapien
tctctgggctgctgatgggcattca

SEQ ID NO: 642744 - DNA, 25 bp, Homo sapien
ctggttctctgggctgctgatgggc

SEQ ID NO: 642745 - DNA, 25 bp, Homo sapien
gaaatgctttggacaaggctgtatg

SEQ ID NO: 642746 - DNA, 25 bp, Homo sapien
ctttggacaaggctgtatgttactg

SEQ ID NO: 642747 - DNA, 25 bp, Homo sapien
aatgctttggacaaggctgtatgtt

SEQ ID NO: 642748 - DNA, 25 bp, Homo sapien
tgctttggacaaggctgtatgttac

SEQ ID NO: 642749 - DNA, 25 bp, Homo sapien
tgtaacttgtttcgaaatgaaatgc

SEQ ID NO: 642750 - DNA, 25 bp, Homo sapien
taacttgtttcgaaatgaaatgcag

SEQ ID NO: 642751 - DNA, 25 bp, Homo sapien
tatgtaacttgtttcgaaatgaaat

SEQ ID NO: 642752 - DNA, 25 bp, Homo sapien
tgaatatgtaacttgtttcgaaatg

SEQ ID NO: 642753 - DNA, 25 bp, Homo sapien
ggtaaagttgatgccttcctgaacc

SEQ ID NO: 642754 - DNA, 25 bp, Homo sapien
tctatgggggtaaagttgatgcctt

SEQ ID NO: 642755 - DNA, 25 bp, Homo sapien
tgcagttgaatttcacccaagttaa

SEQ ID NO: 642756 - DNA, 25 bp, Homo sapien
caagttaaatccaatgcaaacctgc

SEQ ID NO: 642757 - DNA, 25 bp, Homo sapien
cccctctgaagatgattcgattctg

SEQ ID NO: 642758 - DNA, 25 bp, Homo sapien
gaactgaaaactattatggagcttg

SEQ ID NO: 642759 - DNA, 25 bp, Homo sapien
tctcagaactaacgggttggaactg

SEQ ID NO: 642760 - DNA, 25 bp, Homo sapien
gcagtctgcgttcatgtggtttttc

SEQ ID NO: 642761 - DNA, 25 bp, Homo sapien
aagctgggaagcgacaaactctttc

SEQ ID NO: 642762 - DNA, 25 bp, Homo sapien
taaaagctgggaagcgacaaactct

SEQ ID NO: 642763 - DNA, 25 bp, Homo sapien
gggaagcgacaaactctttccacag

SEQ ID NO: 642764 - DNA, 25 bp, Homo sapien
agtaaaagctgggaagcgacaaact

SEQ ID NO: 642765 - DNA, 25 bp, Homo sapien
tcccaggataggtcatagacaatta

SEQ ID NO: 642766 - DNA, 25 bp, Homo sapien
atggcatatgtatttgtccttcaac

SEQ ID NO: 642767 - DNA, 25 bp, Homo sapien
tcagattgggtcctttgagggacat

SEQ ID NO: 642768 - DNA, 25 bp, Homo sapien
tcaacttcacctctcctgctgttca

SEQ ID NO: 642769 - DNA, 25 bp, Homo sapien
taccacatcttctagagttatgacg

SEQ ID NO: 642770 - DNA, 25 bp, Homo sapien
ggaggtatatctgggtatacagcac

SEQ ID NO: 642771 - DNA, 25 bp, Homo sapien
gagttatgacgtcttgtacagttcc

SEQ ID NO: 642772 - DNA, 25 bp, Homo sapien
tgcgtggaccaatagaggagctgtc

SEQ ID NO: 642773 - DNA, 25 bp, Homo sapien
aaggtcatctccatatgcaagatca

SEQ ID NO: 642774 - DNA, 25 bp, Homo sapien
ggatcatgcctttgatgttctatca

SEQ ID NO: 642775 - DNA, 25 bp, Homo sapien
ggtgtaaggcctgtatatagattca

SEQ ID NO: 642776 - DNA, 25 bp, Homo sapien
tggatgtctagttatgtcagcagca

SEQ ID NO: 642777 - DNA, 25 bp, Homo sapien
agaaccaaacatggctttcaaaatc

SEQ ID NO: 642778 - DNA, 25 bp, Homo sapien
ctacaagaaccaaacatggctttca

SEQ ID NO: 642779 - DNA, 25 bp, Homo sapien
caagaaccaaacatggctttcaaaa

SEQ ID NO: 642780 - DNA, 25 bp, Homo sapien
aaccaaacatggctttcaaaatcat

SEQ ID NO: 642781 - DNA, 25 bp, Homo sapien
gagcattctgtgaccggtagacaga

SEQ ID NO: 642782 - DNA, 25 bp, Homo sapien
gcattctgtgaccggtagacagaat

SEQ ID NO: 642783 - DNA, 25 bp, Homo sapien
ctgagcattctgtgaccggtagaca

SEQ ID NO: 642784 - DNA, 25 bp, Homo sapien
tgagcattctgtgaccggtagacag

SEQ ID NO: 642785 - DNA, 25 bp, Homo sapien
tgtggaatcatgaaggaaatcaatc

SEQ ID NO: 642786 - DNA, 25 bp, Homo sapien
aatcaatccacatgtagcttgcaag

SEQ ID NO: 642787 - DNA, 25 bp, Homo sapien
tatttcactaatcttggcaacactc

SEQ ID NO: 642788 - DNA, 25 bp, Homo sapien
caccccctgttctaggattctgtgg

SEQ ID NO: 642789 - DNA, 25 bp, Homo sapien
gggcttcaccttaccactaactgaa

SEQ ID NO: 642790 - DNA, 25 bp, Homo sapien
aatggtgcattgagagccagaagcc

SEQ ID NO: 642791 - DNA, 25 bp, Homo sapien
gccagaagccatatctttagtaggg

SEQ ID NO: 642792 - DNA, 25 bp, Homo sapien
ccactaactgaagatggtgtgaaaa

SEQ ID NO: 642793 - DNA, 25 bp, Homo sapien
ttccgcagtccagtttcttgtcttt

SEQ ID NO: 642794 - DNA, 25 bp, Homo sapien
cgcagtccagtttcttgtctttcca

SEQ ID NO: 642795 - DNA, 25 bp, Homo sapien
tcttgtctttccagaagaaatctca

SEQ ID NO: 642796 - DNA, 25 bp, Homo sapien
cttgtctttccagaagaaatctcat

SEQ ID NO: 642797 - DNA, 25 bp, Homo sapien
accacagcccagtagtgctcttatc

SEQ ID NO: 642798 - DNA, 25 bp, Homo sapien
tgctcttatcagatgctgcctggta

SEQ ID NO: 642799 - DNA, 25 bp, Homo sapien
gcccagtagtgctcttatcagatgc

SEQ ID NO: 642800 - DNA, 25 bp, Homo sapien
agtagtgctcttatcagatgctgcc

SEQ ID NO: 642801 - DNA, 25 bp, Homo sapien
gctgattttactaggacacaggacc

SEQ ID NO: 642802 - DNA, 25 bp, Homo sapien
tccttggtaaaggagcatggttgag

SEQ ID NO: 642803 - DNA, 25 bp, Homo sapien
tttactaggacacaggaccatcatg

SEQ ID NO: 642804 - DNA, 25 bp, Homo sapien
atcatgaggggtccttggtaaagga

SEQ ID NO: 642805 - DNA, 25 bp, Homo sapien
gagctgggtctagaaagactctggc

SEQ ID NO: 642806 - DNA, 25 bp, Homo sapien
tctggctagtgctgctccatcacac

SEQ ID NO: 642807 - DNA, 25 bp, Homo sapien
aaagactctggctagtgctgctcca

SEQ ID NO: 642808 - DNA, 25 bp, Homo sapien
tcagcagttaggtctagaaagagct

SEQ ID NO: 642809 - DNA, 25 bp, Homo sapien
gagaattgttgccgatattgatgtt

SEQ ID NO: 642810 - DNA, 25 bp, Homo sapien
ttgagaattgttgccgatattgatg

SEQ ID NO: 642811 - DNA, 25 bp, Homo sapien
cttgagaattgttgccgatattgat

SEQ ID NO: 642812 - DNA, 25 bp, Homo sapien
aattgttgccgatattgatgtttga

SEQ ID NO: 642813 - DNA, 25 bp, Homo sapien
ggcacctgcgcaccatgtgatctct

SEQ ID NO: 642814 - DNA, 25 bp, Homo sapien
ttctcttctcgtgctatggtgagcc

SEQ ID NO: 642815 - DNA, 25 bp, Homo sapien
cgtgctatggtgagcctagaatttg

SEQ ID NO: 642816 - DNA, 25 bp, Homo sapien
taggcacctgcgcaccatgtgatct

SEQ ID NO: 642817 - DNA, 25 bp, Homo sapien
ggccctagagaagggtgtttctgca

SEQ ID NO: 642818 - DNA, 25 bp, Homo sapien
tgggctttaaattatgtggccctag

SEQ ID NO: 642819 - DNA, 25 bp, Homo sapien
ttatgtggccctagagaagggtgtt

SEQ ID NO: 642820 - DNA, 25 bp, Homo sapien
tgtgggctttaaattatgtggccct

SEQ ID NO: 642821 - DNA, 25 bp, Homo sapien
ccttctagtgcactggaaacctttt

SEQ ID NO: 642822 - DNA, 25 bp, Homo sapien
gccttctagtgcactggaaaccttt

SEQ ID NO: 642823 - DNA, 25 bp, Homo sapien
tgccttctagtgcactggaaacctt

SEQ ID NO: 642824 - DNA, 25 bp, Homo sapien
ggctggatgtcaggcatcagtatcg

SEQ ID NO: 642825 - DNA, 25 bp, Homo sapien
gcatcagtatcggacttagacaggg

SEQ ID NO: 642826 - DNA, 25 bp, Homo sapien
ggcatcatcggtgaaggcccaggct

SEQ ID NO: 642827 - DNA, 25 bp, Homo sapien
tttcctgccatgtcactctacaagg

SEQ ID NO: 642828 - DNA, 25 bp, Homo sapien
ttctgaggctactcctagtggtttc

SEQ ID NO: 642829 - DNA, 25 bp, Homo sapien
gaatatccactagcataaattctgg

SEQ ID NO: 642830 - DNA, 25 bp, Homo sapien
caagaaattcccaatagaatatcca

SEQ ID NO: 642831 - DNA, 25 bp, Homo sapien
tctcttcaaatggttttgaggacac

SEQ ID NO: 642832 - DNA, 25 bp, Homo sapien
gggtccactcttgacaccccagcat

SEQ ID NO: 642833 - DNA, 25 bp, Homo sapien
acttttcggtagttctgagatttct

SEQ ID NO: 642834 - DNA, 25 bp, Homo sapien
tccactcttgacaccccagcatctt

SEQ ID NO: 642835 - DNA, 25 bp, Homo sapien
tttcggtagttctgagatttctgct

SEQ ID NO: 642836 - DNA, 25 bp, Homo sapien
aaatacagttgaggcagagatgtcg

SEQ ID NO: 642837 - DNA, 25 bp, Homo sapien
atgttgaaccaggtacattatagaa

SEQ ID NO: 642838 - DNA, 25 bp, Homo sapien
tcagaggaagccgatgttgaaccag

SEQ ID NO: 642839 - DNA, 25 bp, Homo sapien
gatgtcggggtgatgctcagaggaa

SEQ ID NO: 642840 - DNA, 25 bp, Homo sapien
ggccctagatcccaccctgactcct

SEQ ID NO: 642841 - DNA, 25 bp, Homo sapien
cttggaagacattgtcggccctaga

SEQ ID NO: 642842 - DNA, 25 bp, Homo sapien
ggaagacattgtcggccctagatcc

SEQ ID NO: 642843 - DNA, 25 bp, Homo sapien
gtcggccctagatcccaccctgact

SEQ ID NO: 642844 - DNA, 25 bp, Homo sapien
gacacctccatcaccactgagcagg

SEQ ID NO: 642845 - DNA, 25 bp, Homo sapien
acacctccatcaccactgagcaggg

SEQ ID NO: 642846 - DNA, 25 bp, Homo sapien
cagggtataaaaattcggagatgat

SEQ ID NO: 642847 - DNA, 25 bp, Homo sapien
tcagagaacgcagtcttatattttg

SEQ ID NO: 642848 - DNA, 25 bp, Homo sapien
ggctcctcttcagagaacgcagtct

SEQ ID NO: 642849 - DNA, 25 bp, Homo sapien
tttggaatctctatgaattacatat

SEQ ID NO: 642850 - DNA, 25 bp, Homo sapien
tctgaacaacactaataactaaggg

SEQ ID NO: 642851 - DNA, 25 bp, Homo sapien
gattttacaggtctgctccttcaga

SEQ ID NO: 642852 - DNA, 25 bp, Homo sapien
tgctccaaggcctctgttctctgct

SEQ ID NO: 642853 - DNA, 25 bp, Homo sapien
tgtttccagccacggtgactgagtc

SEQ ID NO: 642854 - DNA, 25 bp, Homo sapien
ttcccatccttgtaagggcttgaca

SEQ ID NO: 642855 - DNA, 25 bp, Homo sapien
tattccctaagagagaatccttgac

SEQ ID NO: 642856 - DNA, 25 bp, Homo sapien
aatccttgactttcacggtatgtga

SEQ ID NO: 642857 - DNA, 25 bp, Homo sapien
cagtagctagaggacacttattccc

SEQ ID NO: 642858 - DNA, 25 bp, Homo sapien
aacatcaggccccatgagttcctca

SEQ ID NO: 642859 - DNA, 25 bp, Homo sapien
tgaagatgaacatcaggccccatga

SEQ ID NO: 642860 - DNA, 25 bp, Homo sapien
cttaagtagtataaggatttgctga

SEQ ID NO: 642861 - DNA, 25 bp, Homo sapien
taagtagtataaggatttgctgaag

SEQ ID NO: 642862 - DNA, 25 bp, Homo sapien
ctgccagcattgatctgcgaggagg

SEQ ID NO: 642863 - DNA, 25 bp, Homo sapien
agctgccagcattgatctgcgagga

SEQ ID NO: 642864 - DNA, 25 bp, Homo sapien
gctgccagcattgatctgcgaggag

SEQ ID NO: 642865 - DNA, 25 bp, Homo sapien
cagctgccagcattgatctgcgagg

SEQ ID NO: 642866 - DNA, 25 bp, Homo sapien
catgatagctcaacagggaaccaag

SEQ ID NO: 642867 - DNA, 25 bp, Homo sapien
gcacaggtgtccaacaatttcattc

SEQ ID NO: 642868 - DNA, 25 bp, Homo sapien
gagaaaaaggttcctgccaagttgc

SEQ ID NO: 642869 - DNA, 25 bp, Homo sapien
catgctgcagggtaataggaaggac

SEQ ID NO: 642870 - DNA, 25 bp, Homo sapien
ttatgttgtcaaggattctttttct

SEQ ID NO: 642871 - DNA, 25 bp, Homo sapien
aggattctttttctgttttgtgaga

SEQ ID NO: 642872 - DNA, 25 bp, Homo sapien
attctttttctgttttgtgagatac

SEQ ID NO: 642873 - DNA, 25 bp, Homo sapien
tatgttgtcaaggattctttttctg

SEQ ID NO: 642874 - DNA, 25 bp, Homo sapien
gctttctgcatcctcttcctgactt

SEQ ID NO: 642875 - DNA, 25 bp, Homo sapien
gcatcctcttcctgactttccattg

SEQ ID NO: 642876 - DNA, 25 bp, Homo sapien
tcctgctttctgcatcctcttcctg

SEQ ID NO: 642877 - DNA, 25 bp, Homo sapien
cttcctgactttccattgttttctc

SEQ ID NO: 642878 - DNA, 25 bp, Homo sapien
taaccaaagttatagtcaaagtcaa

SEQ ID NO: 642879 - DNA, 25 bp, Homo sapien
aaagtcaatttggaggattcaagaa

SEQ ID NO: 642880 - DNA, 25 bp, Homo sapien
ggttgcagcagctcacagctataaa

SEQ ID NO: 642881 - DNA, 25 bp, Homo sapien
aatgtgttgacccaagaggtttaat

SEQ ID NO: 642882 - DNA, 25 bp, Homo sapien
ttcctcatcagcacgatggtcatag

SEQ ID NO: 642883 - DNA, 25 bp, Homo sapien
catcagcacgatggtcatagcccca

SEQ ID NO: 642884 - DNA, 25 bp, Homo sapien
aatgcccaaccagtatctgcttcct

SEQ ID NO: 642885 - DNA, 25 bp, Homo sapien
tcctgtggtttatcataagttacca

SEQ ID NO: 642886 - DNA, 25 bp, Homo sapien
gaggtttaggagatctctgtttacc

SEQ ID NO: 642887 - DNA, 25 bp, Homo sapien
gccattgcctccatggaatcctaca

SEQ ID NO: 642888 - DNA, 25 bp, Homo sapien
cttggtctgggaagcttgttttata

SEQ ID NO: 642889 - DNA, 25 bp, Homo sapien
ttgttccttacagccattgcctcca

SEQ ID NO: 642890 - DNA, 25 bp, Homo sapien
tgcaccactatgtgttctgagcatg

SEQ ID NO: 642891 - DNA, 25 bp, Homo sapien
ttctgcaccactatgtgttctgagc

SEQ ID NO: 642892 - DNA, 25 bp, Homo sapien
tctgcaccactatgtgttctgagca

SEQ ID NO: 642893 - DNA, 25 bp, Homo sapien
cttctgcaccactatgtgttctgag

SEQ ID NO: 642894 - DNA, 25 bp, Homo sapien
caaaaagctgagaggaaacgatgcc

SEQ ID NO: 642895 - DNA, 25 bp, Homo sapien
aacgatgccagggaaccggtaattg

SEQ ID NO: 642896 - DNA, 25 bp, Homo sapien
tttccagcatactgctccagttcca

SEQ ID NO: 642897 - DNA, 25 bp, Homo sapien
taacggggcatgtcaaaacctactc

SEQ ID NO: 642898 - DNA, 25 bp, Homo sapien
aaatcagttgagaacagacccaacg

SEQ ID NO: 642899 - DNA, 25 bp, Homo sapien
aacgagaattcaagtccagtatcag

SEQ ID NO: 642900 - DNA, 25 bp, Homo sapien
ccagtatcagtgttttgacctccaa

SEQ ID NO: 642901 - DNA, 25 bp, Homo sapien
ttgaggtgccaattgatcatgctac

SEQ ID NO: 642902 - DNA, 25 bp, Homo sapien
catcaactattaatatgtcattctt

SEQ ID NO: 642903 - DNA, 25 bp, Homo sapien
atcaactattaatatgtcattcttc

SEQ ID NO: 642904 - DNA, 25 bp, Homo sapien
tcaactattaatatgtcattcttca

SEQ ID NO: 642905 - DNA, 25 bp, Homo sapien
tagcacaactgaacctattatcaca

SEQ ID NO: 642906 - DNA, 25 bp, Homo sapien
gcacaactgaacctattatcacaac

SEQ ID NO: 642907 - DNA, 25 bp, Homo sapien
ttagcacaactgaacctattatcac

SEQ ID NO: 642908 - DNA, 25 bp, Homo sapien
acaactgaacctattatcacaactg

SEQ ID NO: 642909 - DNA, 25 bp, Homo sapien
gactagacacctgctatacgcccag

SEQ ID NO: 642910 - DNA, 25 bp, Homo sapien
caaccagaaaagagtgactagacac

SEQ ID NO: 642911 - DNA, 25 bp, Homo sapien
gatgtgttgacgaaggcatgcagac

SEQ ID NO: 642912 - DNA, 25 bp, Homo sapien
ggatgctgggacaaacaggccaata

SEQ ID NO: 642913 - DNA, 25 bp, Homo sapien
gaatgtccaggtcagaggcaacagc

SEQ ID NO: 642914 - DNA, 25 bp, Homo sapien
aaggctgggaatgtccaggtcagag

SEQ ID NO: 642915 - DNA, 25 bp, Homo sapien
ctgggaatgtccaggtcagaggcaa

SEQ ID NO: 642916 - DNA, 25 bp, Homo sapien
atgtccaggtcagaggcaacagctg

SEQ ID NO: 642917 - DNA, 25 bp, Homo sapien
ccgggacactgatgcattcagaata

SEQ ID NO: 642918 - DNA, 25 bp, Homo sapien
tttccgggacactgatgcattcaga

SEQ ID NO: 642919 - DNA, 25 bp, Homo sapien
agaatttccgggacactgatgcatt

SEQ ID NO: 642920 - DNA, 25 bp, Homo sapien
cactgatgcattcagaataggagaa

SEQ ID NO: 642921 - DNA, 25 bp, Homo sapien
atgccactgtccagtctgtgaccaa

SEQ ID NO: 642922 - DNA, 25 bp, Homo sapien
gccactgtccagtctgtgaccaagg

SEQ ID NO: 642923 - DNA, 25 bp, Homo sapien
tgtgaccaaggcatgtgcgtacttc

SEQ ID NO: 642924 - DNA, 25 bp, Homo sapien
catgtgcgtacttcaggttcaatca

SEQ ID NO: 642925 - DNA, 25 bp, Homo sapien
tcatacgtaataagatttccttgac

SEQ ID NO: 642926 - DNA, 25 bp, Homo sapien
gagtcatacgtaataagatttcctt

SEQ ID NO: 642927 - DNA, 25 bp, Homo sapien
gccgagggggagtcatacgtaataa

SEQ ID NO: 642928 - DNA, 25 bp, Homo sapien
gggagtcatacgtaataagatttcc

SEQ ID NO: 642929 - DNA, 25 bp, Homo sapien
gttgggtaactgattgatcatgtgg

SEQ ID NO: 642930 - DNA, 25 bp, Homo sapien
gaaagaggttgggtaactgattgat

SEQ ID NO: 642931 - DNA, 25 bp, Homo sapien
aactgattgatcatgtggaaggctt

SEQ ID NO: 642932 - DNA, 25 bp, Homo sapien
aagaggttgggtaactgattgatca

SEQ ID NO: 642933 - DNA, 25 bp, Homo sapien
tgtctgcagggtattccaaggccaa

SEQ ID NO: 642934 - DNA, 25 bp, Homo sapien
gacacggctaaaggaagtccatctt

SEQ ID NO: 642935 - DNA, 25 bp, Homo sapien
gcttctctggttaaagacggttctg

SEQ ID NO: 642936 - DNA, 25 bp, Homo sapien
tgagctgtgctacaactgtttctgc

SEQ ID NO: 642937 - DNA, 25 bp, Homo sapien
actgagaacaacatcacgtctctta

SEQ ID NO: 642938 - DNA, 25 bp, Homo sapien
ttggcctggtaagaaaatccatcta

SEQ ID NO: 642939 - DNA, 25 bp, Homo sapien
aaaatcttagggttgtgcaattcct

SEQ ID NO: 642940 - DNA, 25 bp, Homo sapien
tcacgtctcttaaacactagggaaa

SEQ ID NO: 642941 - DNA, 25 bp, Homo sapien
cttgtataaacttctgtttggttga

SEQ ID NO: 642942 - DNA, 25 bp, Homo sapien
gatttttatacatcgccatattcat

SEQ ID NO: 642943 - DNA, 25 bp, Homo sapien
tgatttttatacatcgccatattca

SEQ ID NO: 642944 - DNA, 25 bp, Homo sapien
tcaagcgttcgaactcatttccacc

SEQ ID NO: 642945 - DNA, 25 bp, Homo sapien
atttccaccacaagagggcagccat

SEQ ID NO: 642946 - DNA, 25 bp, Homo sapien
tcatttccaccacaagagggcagcc

SEQ ID NO: 642947 - DNA, 25 bp, Homo sapien
ttccaccacaagagggcagccatct

SEQ ID NO: 642948 - DNA, 25 bp, Homo sapien
cctttaaaagccgcgagcgccgcgc

SEQ ID NO: 642949 - DNA, 25 bp, Homo sapien
gagccgcgccgcgaagggggaggtg

SEQ ID NO: 642950 - DNA, 25 bp, Homo sapien
tttaaaagccgcgagcgccgcgcca

SEQ ID NO: 642951 - DNA, 25 bp, Homo sapien
gctcggggatccccggcgagccgcg

SEQ ID NO: 642952 - DNA, 25 bp, Homo sapien
gccggtgcctttgccccagcggagc

SEQ ID NO: 642953 - DNA, 25 bp, Homo sapien
actttgcgccggtgcctttgcccca

SEQ ID NO: 642954 - DNA, 25 bp, Homo sapien
tttgccccagcggagcctgcttcgc

SEQ ID NO: 642955 - DNA, 25 bp, Homo sapien
cccactttgcgccggtgcctttgcc

SEQ ID NO: 642956 - DNA, 25 bp, Homo sapien
ttccgagaacagatgcaagatgctt

SEQ ID NO: 642957 - DNA, 25 bp, Homo sapien
gctagtaacttttggccatgatgga

SEQ ID NO: 642958 - DNA, 25 bp, Homo sapien
ggataagcaggtctttgcaccaaga

SEQ ID NO: 642959 - DNA, 25 bp, Homo sapien
tttatcacctcagcagagcttcagg

SEQ ID NO: 642960 - DNA, 25 bp, Homo sapien
tggaatgactggattgtggctcccc

SEQ ID NO: 642961 - DNA, 25 bp, Homo sapien
tgtgtcccgacagaactcagtgcta

SEQ ID NO: 642962 - DNA, 25 bp, Homo sapien
gattcctaaggcatgctgtgtcccg

SEQ ID NO: 642963 - DNA, 25 bp, Homo sapien
tttactgccacggagaatgcccttt

SEQ ID NO: 642964 - DNA, 25 bp, Homo sapien
gaaaagtctacatggaaggttactc

SEQ ID NO: 642965 - DNA, 25 bp, Homo sapien
ggttactctggcaaagtgcttagca

SEQ ID NO: 642966 - DNA, 25 bp, Homo sapien
gcagtgctactgttgagttcacaag

SEQ ID NO: 642967 - DNA, 25 bp, Homo sapien
tatatgggttcaaccccagcacatg

SEQ ID NO: 642968 - DNA, 25 bp, Homo sapien
caagcaaaacctggataacccgaga

SEQ ID NO: 642969 - DNA, 25 bp, Homo sapien
tcagagataatagcccatgcaacag

SEQ ID NO: 642970 - DNA, 25 bp, Homo sapien
cagatgttcataagagcagggcacc

SEQ ID NO: 642971 - DNA, 25 bp, Homo sapien
ccaaggaagggttcagcagatgttc

SEQ ID NO: 642972 - DNA, 25 bp, Homo sapien
ctaagatctcctgtgagcggccagt

SEQ ID NO: 642973 - DNA, 25 bp, Homo sapien
cacaggcttccctcgtggaaaatgc

SEQ ID NO: 642974 - DNA, 25 bp, Homo sapien
cgtttgttaaacctgactgaagctg

SEQ ID NO: 642975 - DNA, 25 bp, Homo sapien
ttttccatggtaatgcgactcggct

SEQ ID NO: 642976 - DNA, 25 bp, Homo sapien
aattcgcgaatagctataggacccc

SEQ ID NO: 642977 - DNA, 25 bp, Homo sapien
gaatagctataggaccccgacaaag

SEQ ID NO: 642978 - DNA, 25 bp, Homo sapien
gcgaatagctataggaccccgacaa

SEQ ID NO: 642979 - DNA, 25 bp, Homo sapien
tcgcgaatagctataggaccccgac

SEQ ID NO: 642980 - DNA, 25 bp, Homo sapien
tggccagtgtggaatccaatgagct

SEQ ID NO: 642981 - DNA, 25 bp, Homo sapien
ccaatgagctactaacaaggacagt

SEQ ID NO: 642982 - DNA, 25 bp, Homo sapien
gaaattctgagaagtgcagctgcct

SEQ ID NO: 642983 - DNA, 25 bp, Homo sapien
gcccattccggtgaagagtgaagat

SEQ ID NO: 642984 - DNA, 25 bp, Homo sapien
gcagcactatcatccaacaatcagt

SEQ ID NO: 642985 - DNA, 25 bp, Homo sapien
tcccagtccggttccacagaatcaa

SEQ ID NO: 642986 - DNA, 25 bp, Homo sapien
cattgaacattgtgtgtgccctgta

SEQ ID NO: 642987 - DNA, 25 bp, Homo sapien
tgtagacctgcattctccagtggtc

SEQ ID NO: 642988 - DNA, 25 bp, Homo sapien
ttgtgtgttctgactcctaaactta

SEQ ID NO: 642989 - DNA, 25 bp, Homo sapien
tctgggcatcaccaatcgaccccat

SEQ ID NO: 642990 - DNA, 25 bp, Homo sapien
gttctgactcctaaacttagtcttc

SEQ ID NO: 642991 - DNA, 25 bp, Homo sapien
cttctctgggcatcaccaatcgacc

SEQ ID NO: 642992 - DNA, 25 bp, Homo sapien
tcactaaagaagtcactcttggcca

SEQ ID NO: 642993 - DNA, 25 bp, Homo sapien
tgtcccagctatgattcactaaaga

SEQ ID NO: 642994 - DNA, 25 bp, Homo sapien
tcttggccacatagaccctggcttt

SEQ ID NO: 642995 - DNA, 25 bp, Homo sapien
taacatgccgttgaaagtttctctg

SEQ ID NO: 642996 - DNA, 25 bp, Homo sapien
ctgaatttcatcactatccttccac

SEQ ID NO: 642997 - DNA, 25 bp, Homo sapien
tttcatcactatccttccactccat

SEQ ID NO: 642998 - DNA, 25 bp, Homo sapien
gaatttcatcactatccttccactc

SEQ ID NO: 642999 - DNA, 25 bp, Homo sapien
aatttcatcactatccttccactcc

SEQ ID NO: 643000 - DNA, 25 bp, Homo sapien
ggtgtcggtgattcttaacttgcag

SEQ ID NO: 643001 - DNA, 25 bp, Homo sapien
cctgcagcttgtatggtgtatgcca

SEQ ID NO: 643002 - DNA, 25 bp, Homo sapien
cagcttcggcatgaaattttttggg

SEQ ID NO: 643003 - DNA, 25 bp, Homo sapien
tatagggcttatgatagcctgcagc

SEQ ID NO: 643004 - DNA, 25 bp, Homo sapien
gctgggtaccttggcaaatagtgcc

SEQ ID NO: 643005 - DNA, 25 bp, Homo sapien
gatgactccagcacaagcttgagag

SEQ ID NO: 643006 - DNA, 25 bp, Homo sapien
tctgctactggagcggttcctgccg

SEQ ID NO: 643007 - DNA, 25 bp, Homo sapien
tggcagtggatggtcattgagtccc

SEQ ID NO: 643008 - DNA, 25 bp, Homo sapien
cgtctagactggaagtgggtgctca

SEQ ID NO: 643009 - DNA, 25 bp, Homo sapien
tatgaggctcagtctggtgcaacct

SEQ ID NO: 643010 - DNA, 25 bp, Homo sapien
caagatcaaaggaatcaccgtgggc

SEQ ID NO: 643011 - DNA, 25 bp, Homo sapien
cgtgggcagagccatgacaagtatg

SEQ ID NO: 643012 - DNA, 25 bp, Homo sapien
tagtcagcgtacttgaccttaaagc

SEQ ID NO: 643013 - DNA, 25 bp, Homo sapien
taggtttgggtgtacgactctgaac

SEQ ID NO: 643014 - DNA, 25 bp, Homo sapien
gactctgaacgacaacttctgtact

SEQ ID NO: 643015 - DNA, 25 bp, Homo sapien
ctctctaattccaccatcctgggtg

SEQ ID NO: 643016 - DNA, 25 bp, Homo sapien
aggtgctgatgatttgagatgaatt

SEQ ID NO: 643017 - DNA, 25 bp, Homo sapien
gctgatgatttgagatgaattgcac

SEQ ID NO: 643018 - DNA, 25 bp, Homo sapien
gatttgagatgaattgcacacagtt

SEQ ID NO: 643019 - DNA, 25 bp, Homo sapien
gatgatttgagatgaattgcacaca

SEQ ID NO: 643020 - DNA, 25 bp, Homo sapien
cttgagctttgcattagatcagcca

SEQ ID NO: 643021 - DNA, 25 bp, Homo sapien
tagcgtatctcaattgctccggtat

SEQ ID NO: 643022 - DNA, 25 bp, Homo sapien
gctccggtattgctgacacttcacc

SEQ ID NO: 643023 - DNA, 25 bp, Homo sapien
cacgctttaaccagagctcttgtac

SEQ ID NO: 643024 - DNA, 25 bp, Homo sapien
tgagatcctagcgtatctcaattgc

SEQ ID NO: 643025 - DNA, 25 bp, Homo sapien
tagagacgttggggacaaaaacata

SEQ ID NO: 643026 - DNA, 25 bp, Homo sapien
tctattagagacgttggggacaaaa

SEQ ID NO: 643027 - DNA, 25 bp, Homo sapien
ttctattagagacgttggggacaaa

SEQ ID NO: 643028 - DNA, 25 bp, Homo sapien
tttctattagagacgttggggacaa

SEQ ID NO: 643029 - DNA, 25 bp, Homo sapien
ttgaaatggtcaagatgtaggtctt

SEQ ID NO: 643030 - DNA, 25 bp, Homo sapien
tcttgaaatggtcaagatgtaggtc

SEQ ID NO: 643031 - DNA, 25 bp, Homo sapien
taagttcttgaaatggtcaagatgt

SEQ ID NO: 643032 - DNA, 25 bp, Homo sapien
ataagttcttgaaatggtcaagatg

SEQ ID NO: 643033 - DNA, 25 bp, Homo sapien
ctctctgtttacttggaagatcttg

SEQ ID NO: 643034 - DNA, 25 bp, Homo sapien
tctctgtttacttggaagatcttga

SEQ ID NO: 643035 - DNA, 25 bp, Homo sapien
caagatagcaatgccaatttctctc

SEQ ID NO: 643036 - DNA, 25 bp, Homo sapien
gcttcttgccacaagatagcaatgc

SEQ ID NO: 643037 - DNA, 25 bp, Homo sapien
ctcgtgaaccctccactctagccac

SEQ ID NO: 643038 - DNA, 25 bp, Homo sapien
tttccaccctgtggctcttgccatt

SEQ ID NO: 643039 - DNA, 25 bp, Homo sapien
caaagtccataatcctcctcgtgaa

SEQ ID NO: 643040 - DNA, 25 bp, Homo sapien
gtgaaccctccactctagccaccca

SEQ ID NO: 643041 - DNA, 25 bp, Homo sapien
taatgtcccactgtctaatgcaatg

SEQ ID NO: 643042 - DNA, 25 bp, Homo sapien
tcagactgctgtaaccaaatgccgt

SEQ ID NO: 643043 - DNA, 25 bp, Homo sapien
ccataagagctaagacttgtgtcct

SEQ ID NO: 643044 - DNA, 25 bp, Homo sapien
caaatgccgtagacttcgtggctta

SEQ ID NO: 643045 - DNA, 25 bp, Homo sapien
gacacttgtgcaggtgacctatacg

SEQ ID NO: 643046 - DNA, 25 bp, Homo sapien
ttgtgcaggtgacctatacggcctg

SEQ ID NO: 643047 - DNA, 25 bp, Homo sapien
ggacacttgtgcaggtgacctatac

SEQ ID NO: 643048 - DNA, 25 bp, Homo sapien
acttgtgcaggtgacctatacggcc

SEQ ID NO: 643049 - DNA, 25 bp, Homo sapien
gatttgcttctcagtcactttgcca

SEQ ID NO: 643050 - DNA, 25 bp, Homo sapien
gcttctcagtcactttgccactatt

SEQ ID NO: 643051 - DNA, 25 bp, Homo sapien
tgaattctaaattcttctatacagc

SEQ ID NO: 643052 - DNA, 25 bp, Homo sapien
aagatttgcttctcagtcactttgc

SEQ ID NO: 643053 - DNA, 25 bp, Homo sapien
aacggttgagagaaccagcactttg

SEQ ID NO: 643054 - DNA, 25 bp, Homo sapien
tattccaggggacttggttctccca

SEQ ID NO: 643055 - DNA, 25 bp, Homo sapien
ttcatatgcgtttgtctgtattctt

SEQ ID NO: 643056 - DNA, 25 bp, Homo sapien
aattctcgtgtctttttcatatgcg

SEQ ID NO: 643057 - DNA, 25 bp, Homo sapien
tatggataatcactctggtgactgg

SEQ ID NO: 643058 - DNA, 25 bp, Homo sapien
ccacagtcaacatgattcgtataat

SEQ ID NO: 643059 - DNA, 25 bp, Homo sapien
tttctgaacgttattattaccacag

SEQ ID NO: 643060 - DNA, 25 bp, Homo sapien
ggtgactggttgacttttctgaacg

SEQ ID NO: 643061 - DNA, 25 bp, Homo sapien
ctgggtcagagatacttttctttgg

SEQ ID NO: 643062 - DNA, 25 bp, Homo sapien
cagcagcctcggaatggtgttatca

SEQ ID NO: 643063 - DNA, 25 bp, Homo sapien
taagacttcgtgtgatcacaggaca

SEQ ID NO: 643064 - DNA, 25 bp, Homo sapien
tttctttggatgcataagacttcgt

SEQ ID NO: 643065 - DNA, 25 bp, Homo sapien
cataaaagcaggtggtccaacgtgg

SEQ ID NO: 643066 - DNA, 25 bp, Homo sapien
tgcttgtcgtcttttccccataaaa

SEQ ID NO: 643067 - DNA, 25 bp, Homo sapien
cacactcaggcctgtttcgctgtaa

SEQ ID NO: 643068 - DNA, 25 bp, Homo sapien
tattagatgccttcgtgaggtgagt

SEQ ID NO: 643069 - DNA, 25 bp, Homo sapien
tgtaagagaggatgtagaaagttcc

SEQ ID NO: 643070 - DNA, 25 bp, Homo sapien
ttaagggtgaagttaagacatcgga

SEQ ID NO: 643071 - DNA, 25 bp, Homo sapien
gaaagttccgttgtgaatttcttca

SEQ ID NO: 643072 - DNA, 25 bp, Homo sapien
tgatgaccagtaacaattatgctgt

SEQ ID NO: 643073 - DNA, 25 bp, Homo sapien
ggtgggggtgaccattctttggcat

SEQ ID NO: 643074 - DNA, 25 bp, Homo sapien
tatactgtctcctgacgaaggaccc

SEQ ID NO: 643075 - DNA, 25 bp, Homo sapien
tgtacattggcttaatactgagaaa

SEQ ID NO: 643076 - DNA, 25 bp, Homo sapien
cgggctgaaatgaagcagattcact

SEQ ID NO: 643077 - DNA, 25 bp, Homo sapien
taattattgcacttctggcaagtct

SEQ ID NO: 643078 - DNA, 25 bp, Homo sapien
cctccaatgtggctgattacaagct

SEQ ID NO: 643079 - DNA, 25 bp, Homo sapien
tcccttggctttttgaactgttgga

SEQ ID NO: 643080 - DNA, 25 bp, Homo sapien
agaaatgtaacatcttgtcgtaaca

SEQ ID NO: 643081 - DNA, 25 bp, Homo sapien
catcttgtcgtaacacgtttcaaaa

SEQ ID NO: 643082 - DNA, 25 bp, Homo sapien
cttgcagtcatgaagcggaaggtct

SEQ ID NO: 643083 - DNA, 25 bp, Homo sapien
catgatcgtcacagcaagtgccatt

SEQ ID NO: 643084 - DNA, 25 bp, Homo sapien
cataattcccatggctttacgggtt

SEQ ID NO: 643085 - DNA, 25 bp, Homo sapien
gaaggtctgggagctgatccataat

SEQ ID NO: 643086 - DNA, 25 bp, Homo sapien
acccaatgacttggcaggaagtaga

SEQ ID NO: 643087 - DNA, 25 bp, Homo sapien
ccttttagagtcatgatatgtctga

SEQ ID NO: 643088 - DNA, 25 bp, Homo sapien
catctatacccaatgacttggcagg

SEQ ID NO: 643089 - DNA, 25 bp, Homo sapien
ggaagtagaatcatcacctcctttt

SEQ ID NO: 643090 - DNA, 25 bp, Homo sapien
agcatgctgggaccccagtcatgga

SEQ ID NO: 643091 - DNA, 25 bp, Homo sapien
tgctgggaccccagtcatggacttc

SEQ ID NO: 643092 - DNA, 25 bp, Homo sapien
ggaccccagtcatggacttctaagc

SEQ ID NO: 643093 - DNA, 25 bp, Homo sapien
gaatccaagcatgctgggaccccag

SEQ ID NO: 643094 - DNA, 25 bp, Homo sapien
tcgttcactgctggaacactgggaa

SEQ ID NO: 643095 - DNA, 25 bp, Homo sapien
cctcatttccatggtaagcatcttg

SEQ ID NO: 643096 - DNA, 25 bp, Homo sapien
tatttttaacgttccacattgcaca

SEQ ID NO: 643097 - DNA, 25 bp, Homo sapien
acattgcacattgttggctctccaa

SEQ ID NO: 643098 - DNA, 25 bp, Homo sapien
agccagattgagtgaagcttctgtt

SEQ ID NO: 643099 - DNA, 25 bp, Homo sapien
cttcaattatgtgagtccacttctt

SEQ ID NO: 643100 - DNA, 25 bp, Homo sapien
tcaattatgtgagtccacttctttt

SEQ ID NO: 643101 - DNA, 25 bp, Homo sapien
tcttcaattatgtgagtccacttct

SEQ ID NO: 643102 - DNA, 25 bp, Homo sapien
gggagttcactttgatgttggattc

SEQ ID NO: 643103 - DNA, 25 bp, Homo sapien
tgttggattcgtatatgaaagtatc

SEQ ID NO: 643104 - DNA, 25 bp, Homo sapien
tattttcaaaccgaacatccaatgt

SEQ ID NO: 643105 - DNA, 25 bp, Homo sapien
ttcaaaccgaacatccaatgttggt

SEQ ID NO: 643106 - DNA, 25 bp, Homo sapien
gcacagacaatatgcagaagccaca

SEQ ID NO: 643107 - DNA, 25 bp, Homo sapien
tatgccacaacgagcaaaaagaatg

SEQ ID NO: 643108 - DNA, 25 bp, Homo sapien
tcatgtaggcgtccccgttctcttg

SEQ ID NO: 643109 - DNA, 25 bp, Homo sapien
taaccggagctctaggaatgtaaga

SEQ ID NO: 643110 - DNA, 25 bp, Homo sapien
taaatgggactgtctctatttcact

SEQ ID NO: 643111 - DNA, 25 bp, Homo sapien
ttttgatttacacaagggccttgag

SEQ ID NO: 643112 - DNA, 25 bp, Homo sapien
catttaaaaaatagcgttgctagat

SEQ ID NO: 643113 - DNA, 25 bp, Homo sapien
gggccttgagagtcatctttaacat

SEQ ID NO: 643114 - DNA, 25 bp, Homo sapien
gcatggtgatgctacatattaggaa

SEQ ID NO: 643115 - DNA, 25 bp, Homo sapien
cagcctgcctatactaagcccaaaa

SEQ ID NO: 643116 - DNA, 25 bp, Homo sapien
caaacgccaatagaatagttatcca

SEQ ID NO: 643117 - DNA, 25 bp, Homo sapien
tcacctccttggtaatatttggcaa

SEQ ID NO: 643118 - DNA, 25 bp, Homo sapien
ccagctctcctgatgtgggttagca

SEQ ID NO: 643119 - DNA, 25 bp, Homo sapien
ctctgattggatgaaaataagcgcg

SEQ ID NO: 643120 - DNA, 25 bp, Homo sapien
gacagcaagaacttacgggctctag

SEQ ID NO: 643121 - DNA, 25 bp, Homo sapien
tgctggctctaaacaagccatggga

SEQ ID NO: 643122 - DNA, 25 bp, Homo sapien
tgaattaccaatcctataacccaaa

SEQ ID NO: 643123 - DNA, 25 bp, Homo sapien
ccgtgaacttcacgctgaattacca

SEQ ID NO: 643124 - DNA, 25 bp, Homo sapien
cacgctgaattaccaatcctataac

SEQ ID NO: 643125 - DNA, 25 bp, Homo sapien
gaacttcacgctgaattaccaatcc

SEQ ID NO: 643126 - DNA, 25 bp, Homo sapien
taatgtggagtgcatgcttctgacg

SEQ ID NO: 643127 - DNA, 25 bp, Homo sapien
gtgtcatccaacaaaaggttccagc

SEQ ID NO: 643128 - DNA, 25 bp, Homo sapien
tacagaaacttcactatcaacgtgg

SEQ ID NO: 643129 - DNA, 25 bp, Homo sapien
aaagcccttgaccagatgtgtctga

SEQ ID NO: 643130 - DNA, 25 bp, Homo sapien
tctagtactatttatacgcagtttc

SEQ ID NO: 643131 - DNA, 25 bp, Homo sapien
tagtactatttatacgcagtttctt

SEQ ID NO: 643132 - DNA, 25 bp, Homo sapien
agtactatttatacgcagtttcttt

SEQ ID NO: 643133 - DNA, 25 bp, Homo sapien
ctagtactatttatacgcagtttct

SEQ ID NO: 643134 - DNA, 25 bp, Homo sapien
tcactacacttagacattctgcaaa

SEQ ID NO: 643135 - DNA, 25 bp, Homo sapien
ctcacattgagtctagagtcactac

SEQ ID NO: 643136 - DNA, 25 bp, Homo sapien
ctagagtcactacacttagacattc

SEQ ID NO: 643137 - DNA, 25 bp, Homo sapien
tgagtctagagtcactacacttaga

SEQ ID NO: 643138 - DNA, 25 bp, Homo sapien
caagtagttatagcaaagagaagtc

SEQ ID NO: 643139 - DNA, 25 bp, Homo sapien
gacgtgtcccattacacttagtgaa

SEQ ID NO: 643140 - DNA, 25 bp, Homo sapien
aagagaagtcttcaactagagaagg

SEQ ID NO: 643141 - DNA, 25 bp, Homo sapien
gctacttaaaggaggatcagggatt

SEQ ID NO: 643142 - DNA, 25 bp, Homo sapien
aatatttacaacaaagttggtctgc

SEQ ID NO: 643143 - DNA, 25 bp, Homo sapien
gtctgctgaacagccgtatcaaggg

SEQ ID NO: 643144 - DNA, 25 bp, Homo sapien
gatgtggctgctctaaagcccattt

SEQ ID NO: 643145 - DNA, 25 bp, Homo sapien
cctgtgtaacattcagccttgtggg

SEQ ID NO: 643146 - DNA, 25 bp, Homo sapien
aaacttcatgttgatgtccaaggaa

SEQ ID NO: 643147 - DNA, 25 bp, Homo sapien
aacttcatgttgatgtccaaggaaa

SEQ ID NO: 643148 - DNA, 25 bp, Homo sapien
ctaaacttcatgttgatgtccaagg

SEQ ID NO: 643149 - DNA, 25 bp, Homo sapien
taaacttcatgttgatgtccaagga

SEQ ID NO: 643150 - DNA, 25 bp, Homo sapien
tcttgcctatgctgccgatcagctt

SEQ ID NO: 643151 - DNA, 25 bp, Homo sapien
tttcttgcctatgctgccgatcagc

SEQ ID NO: 643152 - DNA, 25 bp, Homo sapien
cttgcctatgctgccgatcagcttt

SEQ ID NO: 643153 - DNA, 25 bp, Homo sapien
tttttcttgcctatgctgccgatca

SEQ ID NO: 643154 - DNA, 25 bp, Homo sapien
caaaaaactgagatgcccggataca

SEQ ID NO: 643155 - DNA, 25 bp, Homo sapien
gaaactgcactacttctactggaga

SEQ ID NO: 643156 - DNA, 25 bp, Homo sapien
gaggatcagctgttcccatggtacc

SEQ ID NO: 643157 - DNA, 25 bp, Homo sapien
tctttaagcagaggtcagtacacac

SEQ ID NO: 643158 - DNA, 25 bp, Homo sapien
gaagcaagtgcctttcacagcacca

SEQ ID NO: 643159 - DNA, 25 bp, Homo sapien
tgaagatcataacacagaagtaagc

SEQ ID NO: 643160 - DNA, 25 bp, Homo sapien
tctatcacctgagtgtttgacctgg

SEQ ID NO: 643161 - DNA, 25 bp, Homo sapien
cctgagtgtttgacctggatgtcac

SEQ ID NO: 643162 - DNA, 25 bp, Homo sapien
gctcctgacatccaatcaacatcaa

SEQ ID NO: 643163 - DNA, 25 bp, Homo sapien
tcctgacatccaatcaacatcaaca

SEQ ID NO: 643164 - DNA, 25 bp, Homo sapien
aacatcaacatggcttgacgatcca

SEQ ID NO: 643165 - DNA, 25 bp, Homo sapien
tgacatccaatcaacatcaacatgg

SEQ ID NO: 643166 - DNA, 25 bp, Homo sapien
gtaaaacgaaccattcctgaaggca

SEQ ID NO: 643167 - DNA, 25 bp, Homo sapien
ctttgatgggcacgggcgatctgtt

SEQ ID NO: 643168 - DNA, 25 bp, Homo sapien
gatcctcagactggtaaaacgaacc

SEQ ID NO: 643169 - DNA, 25 bp, Homo sapien
ggcaaagttgcatgagatcctcaga

SEQ ID NO: 643170 - DNA, 25 bp, Homo sapien
ctgatgtcagattctgctttcccca

SEQ ID NO: 643171 - DNA, 25 bp, Homo sapien
gctgtttgacaaattgtctgtgtcc

SEQ ID NO: 643172 - DNA, 25 bp, Homo sapien
ggtttccacaatgccacgtcatctg

SEQ ID NO: 643173 - DNA, 25 bp, Homo sapien
tctgctttccccaccgaggctgtgg

SEQ ID NO: 643174 - DNA, 25 bp, Homo sapien
gaagaccccaggagatgagtcgcat

SEQ ID NO: 643175 - DNA, 25 bp, Homo sapien
agaagaccccaggagatgagtcgca

SEQ ID NO: 643176 - DNA, 25 bp, Homo sapien
cagaagaccccaggagatgagtcgc

SEQ ID NO: 643177 - DNA, 25 bp, Homo sapien
tgatgttctgcgcttctgattctct

SEQ ID NO: 643178 - DNA, 25 bp, Homo sapien
catcatctactccagttgcagaact

SEQ ID NO: 643179 - DNA, 25 bp, Homo sapien
tcaatcatcatctactccagttgca

SEQ ID NO: 643180 - DNA, 25 bp, Homo sapien
ctgattctcttgatcagtaagacac

SEQ ID NO: 643181 - DNA, 25 bp, Homo sapien
ctcgtttgatgactggtggagatgg

SEQ ID NO: 643182 - DNA, 25 bp, Homo sapien
tttgatgactggtggagatggtgga

SEQ ID NO: 643183 - DNA, 25 bp, Homo sapien
tcgtttgatgactggtggagatggt

SEQ ID NO: 643184 - DNA, 25 bp, Homo sapien
cgtttgatgactggtggagatggtg

SEQ ID NO: 643185 - DNA, 25 bp, Homo sapien
ccatgagcatgggtaattgtcacac

SEQ ID NO: 643186 - DNA, 25 bp, Homo sapien
tacatggttctatgcgtccagatgc

SEQ ID NO: 643187 - DNA, 25 bp, Homo sapien
gcccaccgatgagtttttacagaag

SEQ ID NO: 643188 - DNA, 25 bp, Homo sapien
ctgatcaacaaagggaatggtgcca

SEQ ID NO: 643189 - DNA, 25 bp, Homo sapien
catctacaccacaggatattaaaaa

SEQ ID NO: 643190 - DNA, 25 bp, Homo sapien
ctgccacatctacaccacaggatat

SEQ ID NO: 643191 - DNA, 25 bp, Homo sapien
ccacatctacaccacaggatattaa

SEQ ID NO: 643192 - DNA, 25 bp, Homo sapien
tctacaccacaggatattaaaaagg

SEQ ID NO: 643193 - DNA, 25 bp, Homo sapien
tgtggattttgaatagtagattttc

SEQ ID NO: 643194 - DNA, 25 bp, Homo sapien
tgtacgttacttcctgtgtagcata

SEQ ID NO: 643195 - DNA, 25 bp, Homo sapien
tagagcaaaggccagtgtacgttac

SEQ ID NO: 643196 - DNA, 25 bp, Homo sapien
tctcatcaatagatcctccttgtct

SEQ ID NO: 643197 - DNA, 25 bp, Homo sapien
aatgtgcctgagtgagttgggcccc

SEQ ID NO: 643198 - DNA, 25 bp, Homo sapien
cctgagtgagttgggcccctttcct

SEQ ID NO: 643199 - DNA, 25 bp, Homo sapien
tgcctgagtgagttgggcccctttc

SEQ ID NO: 643200 - DNA, 25 bp, Homo sapien
tgtgcctgagtgagttgggcccctt

SEQ ID NO: 643201 - DNA, 25 bp, Homo sapien
caaactctgatataggcaatacgac

SEQ ID NO: 643202 - DNA, 25 bp, Homo sapien
tcagctagggacaagaaaaataaca

SEQ ID NO: 643203 - DNA, 25 bp, Homo sapien
tccacagtgtgttttgctccgacca

SEQ ID NO: 643204 - DNA, 25 bp, Homo sapien
tcggatacaatccactgaacagctt

SEQ ID NO: 643205 - DNA, 25 bp, Homo sapien
agcctcctggatacccaatgataga

SEQ ID NO: 643206 - DNA, 25 bp, Homo sapien
gttagcctcctggatacccaatgat

SEQ ID NO: 643207 - DNA, 25 bp, Homo sapien
aggaaattacggtggatagatgagt

SEQ ID NO: 643208 - DNA, 25 bp, Homo sapien
tggatagatgagttagcctcctgga

SEQ ID NO: 643209 - DNA, 25 bp, Homo sapien
cagacagctgacaggtctcaagagg

SEQ ID NO: 643210 - DNA, 25 bp, Homo sapien
aggtcagacagctgacaggtctcaa

SEQ ID NO: 643211 - DNA, 25 bp, Homo sapien
cagccagaaatagtccacacacttt

SEQ ID NO: 643212 - DNA, 25 bp, Homo sapien
actctcagccagaaatagtccacac

SEQ ID NO: 643213 - DNA, 25 bp, Homo sapien
gctgccagactctaatcatgacaga

SEQ ID NO: 643214 - DNA, 25 bp, Homo sapien
ccacaaagcggcaatgtcttaaatt

SEQ ID NO: 643215 - DNA, 25 bp, Homo sapien
agttgctgccagactctaatcatga

SEQ ID NO: 643216 - DNA, 25 bp, Homo sapien
acaaagcggcaatgtcttaaatttc

SEQ ID NO: 643217 - DNA, 25 bp, Homo sapien
gtgcctatgcccaaattatcatctg

SEQ ID NO: 643218 - DNA, 25 bp, Homo sapien
tcctggtattgatttgtgcctatgc

SEQ ID NO: 643219 - DNA, 25 bp, Homo sapien
cagcacacccattcctggtattgat

SEQ ID NO: 643220 - DNA, 25 bp, Homo sapien
gagatggtgatgcaatgcttggatc

SEQ ID NO: 643221 - DNA, 25 bp, Homo sapien
gtagcagttctcaaaaggtgcaggg

SEQ ID NO: 643222 - DNA, 25 bp, Homo sapien
cccaggaagctattacacgggccat

SEQ ID NO: 643223 - DNA, 25 bp, Homo sapien
ttcaggcaagatgaggaaccgtgtg

SEQ ID NO: 643224 - DNA, 25 bp, Homo sapien
gtagtgtctgacaactgctaacatc

SEQ ID NO: 643225 - DNA, 25 bp, Homo sapien
ccttgcacctttcaactgtgtggca

SEQ ID NO: 643226 - DNA, 25 bp, Homo sapien
tcaactgtgtggcaatatgactctc

SEQ ID NO: 643227 - DNA, 25 bp, Homo sapien
ttctacacagccgttccttgcacct

SEQ ID NO: 643228 - DNA, 25 bp, Homo sapien
cctttcaactgtgtggcaatatgac

SEQ ID NO: 643229 - DNA, 25 bp, Homo sapien
tactggccagagggcattgccgaca

SEQ ID NO: 643230 - DNA, 25 bp, Homo sapien
tggccagagggcattgccgacattc

SEQ ID NO: 643231 - DNA, 25 bp, Homo sapien
ggcattgccgacattcatatagttc

SEQ ID NO: 643232 - DNA, 25 bp, Homo sapien
gagggcattgccgacattcatatag

SEQ ID NO: 643233 - DNA, 25 bp, Homo sapien
tgatcccactatggaccagcatgag

SEQ ID NO: 643234 - DNA, 25 bp, Homo sapien
gaatgtaggcatgcaaccttgccct

SEQ ID NO: 643235 - DNA, 25 bp, Homo sapien
gtgtggacatctgactggcatggca

SEQ ID NO: 643236 - DNA, 25 bp, Homo sapien
ggatggttcacctctcttcgagcaa

SEQ ID NO: 643237 - DNA, 25 bp, Homo sapien
ccaccctggattctgaagttgaatt

SEQ ID NO: 643238 - DNA, 25 bp, Homo sapien
tgaacctcaaatagtagatccaccc

SEQ ID NO: 643239 - DNA, 25 bp, Homo sapien
caaatagtagatccaccctggattc

SEQ ID NO: 643240 - DNA, 25 bp, Homo sapien
ctgaggtggactgaacctcaaatag

SEQ ID NO: 643241 - DNA, 25 bp, Homo sapien
tgaagtctatctttatagccgtcaa

SEQ ID NO: 643242 - DNA, 25 bp, Homo sapien
tatgtccacccttccatgaagattc

SEQ ID NO: 643243 - DNA, 25 bp, Homo sapien
ttatagccgtcaaagcacttttcag

SEQ ID NO: 643244 - DNA, 25 bp, Homo sapien
cctcctcagtaatttcctaaggtct

SEQ ID NO: 643245 - DNA, 25 bp, Homo sapien
catgtgggcattaaggactgaggaa

SEQ ID NO: 643246 - DNA, 25 bp, Homo sapien
cggtcaaggaaagagcacggataac

SEQ ID NO: 643247 - DNA, 25 bp, Homo sapien
cactggattctaaggcggtcaagga

SEQ ID NO: 643248 - DNA, 25 bp, Homo sapien
gattctactgaacgcagggagtctg

SEQ ID NO: 643249 - DNA, 25 bp, Homo sapien
cagattggagtgcatgccacgatca

SEQ ID NO: 643250 - DNA, 25 bp, Homo sapien
actgcacttggccggttttctcatc

SEQ ID NO: 643251 - DNA, 25 bp, Homo sapien
ctttagtaagaattgtgatccccaa

SEQ ID NO: 643252 - DNA, 25 bp, Homo sapien
tccccaaagctgtttaggtatgttg

SEQ ID NO: 643253 - DNA, 25 bp, Homo sapien
gatcataacaatcgtcacaaagcaa

SEQ ID NO: 643254 - DNA, 25 bp, Homo sapien
caaactgcaggttttccaagagaaa

SEQ ID NO: 643255 - DNA, 25 bp, Homo sapien
agatggcagaaacccgatcataaca

SEQ ID NO: 643256 - DNA, 25 bp, Homo sapien
tattgaacaataaccagaaggacca

SEQ ID NO: 643257 - DNA, 25 bp, Homo sapien
aaaaaatccttcatgacagcggttg

SEQ ID NO: 643258 - DNA, 25 bp, Homo sapien
aaaaatccttcatgacagcggttgc

SEQ ID NO: 643259 - DNA, 25 bp, Homo sapien
aaaatccttcatgacagcggttgcc

SEQ ID NO: 643260 - DNA, 25 bp, Homo sapien
ccgttttgaataggcacactgtttg

SEQ ID NO: 643261 - DNA, 25 bp, Homo sapien
ctttccgttttgaataggcacactg

SEQ ID NO: 643262 - DNA, 25 bp, Homo sapien
ttttgaggcatgagtaatctttttt

SEQ ID NO: 643263 - DNA, 25 bp, Homo sapien
ttgaggcatgagtaatcttttttcc

SEQ ID NO: 643264 - DNA, 25 bp, Homo sapien
gatgtgcttgcaggggtccctatca

SEQ ID NO: 643265 - DNA, 25 bp, Homo sapien
tagatgatgtgcttgcaggggtccc

SEQ ID NO: 643266 - DNA, 25 bp, Homo sapien
gatgatgtgcttgcaggggtcccta

SEQ ID NO: 643267 - DNA, 25 bp, Homo sapien
cttagatgatgtgcttgcaggggtc

SEQ ID NO: 643268 - DNA, 25 bp, Homo sapien
ccagaagaaagcgtccattgtttcg

SEQ ID NO: 643269 - DNA, 25 bp, Homo sapien
gtaatctcatagatgttccctgcat

SEQ ID NO: 643270 - DNA, 25 bp, Homo sapien
ccattgtttcgtaatctcatagatg

SEQ ID NO: 643271 - DNA, 25 bp, Homo sapien
aagcgtccattgtttcgtaatctca

SEQ ID NO: 643272 - DNA, 25 bp, Homo sapien
cacttcaaatgaagatgaccgatcc

SEQ ID NO: 643273 - DNA, 25 bp, Homo sapien
aaatgaagatgaccgatccctcaag

SEQ ID NO: 643274 - DNA, 25 bp, Homo sapien
tactccagtcaggttagttttggct

SEQ ID NO: 643275 - DNA, 25 bp, Homo sapien
tacaatactccagtcaggttagttt

SEQ ID NO: 643276 - DNA, 25 bp, Homo sapien
acagaacatgtccatgtcccctata

SEQ ID NO: 643277 - DNA, 25 bp, Homo sapien
agtacatacttaatcaggtgggatg

SEQ ID NO: 643278 - DNA, 25 bp, Homo sapien
tacatacttaatcaggtgggatgac

SEQ ID NO: 643279 - DNA, 25 bp, Homo sapien
acagtacatacttaatcaggtggga

SEQ ID NO: 643280 - DNA, 25 bp, Homo sapien
tttaaactgttatcaaaagactgac

SEQ ID NO: 643281 - DNA, 25 bp, Homo sapien
ctgcagtttggcctgtcattgtcag

SEQ ID NO: 643282 - DNA, 25 bp, Homo sapien
gcagtttggcctgtcattgtcagaa

SEQ ID NO: 643283 - DNA, 25 bp, Homo sapien
ttaaactgttatcaaaagactgact

SEQ ID NO: 643284 - DNA, 25 bp, Homo sapien
catcctcaagttgaccataagcaaa

SEQ ID NO: 643285 - DNA, 25 bp, Homo sapien
gttgaccataagcaaatcttggacg

SEQ ID NO: 643286 - DNA, 25 bp, Homo sapien
gatttggtgtcttccaatgccctgg

SEQ ID NO: 643287 - DNA, 25 bp, Homo sapien
ttggtgtcttccaatgccctggaca

SEQ ID NO: 643288 - DNA, 25 bp, Homo sapien
ttcagacctggtgtcatcggccaca

SEQ ID NO: 643289 - DNA, 25 bp, Homo sapien
tcacactgtaaatcttcagacctgg

SEQ ID NO: 643290 - DNA, 25 bp, Homo sapien
aattcacactgtaaatcttcagacc

SEQ ID NO: 643291 - DNA, 25 bp, Homo sapien
agacctggtgtcatcggccacattc

SEQ ID NO: 643292 - DNA, 25 bp, Homo sapien
tgttagggggacacaagtagcaaga

SEQ ID NO: 643293 - DNA, 25 bp, Homo sapien
tagggggacacaagtagcaagacat

SEQ ID NO: 643294 - DNA, 25 bp, Homo sapien
gaggagagacgtgttagggggacac

SEQ ID NO: 643295 - DNA, 25 bp, Homo sapien
acgtgttagggggacacaagtagca

SEQ ID NO: 643296 - DNA, 25 bp, Homo sapien
cttaaagaggcaggagactctccat

SEQ ID NO: 643297 - DNA, 25 bp, Homo sapien
agaggcaggagactctccatctaag

SEQ ID NO: 643298 - DNA, 25 bp, Homo sapien
ttaaagaggcaggagactctccatc

SEQ ID NO: 643299 - DNA, 25 bp, Homo sapien
aaagaggcaggagactctccatcta

SEQ ID NO: 643300 - DNA, 25 bp, Homo sapien
gggtagagtttggctttcaaatgac

SEQ ID NO: 643301 - DNA, 25 bp, Homo sapien
ctttcctcaggggtagagtttggct

SEQ ID NO: 643302 - DNA, 25 bp, Homo sapien
aggggtagagtttggctttcaaatg

SEQ ID NO: 643303 - DNA, 25 bp, Homo sapien
cctcaggggtagagtttggctttca

SEQ ID NO: 643304 - DNA, 25 bp, Homo sapien
gaaatggaaactcgggcaacacaag

SEQ ID NO: 643305 - DNA, 25 bp, Homo sapien
gagagatggctaatactcagaccag

SEQ ID NO: 643306 - DNA, 25 bp, Homo sapien
cagccaccagagcaatatccaggaa

SEQ ID NO: 643307 - DNA, 25 bp, Homo sapien
cagcaagtcaacattggcagcagct

SEQ ID NO: 643308 - DNA, 25 bp, Homo sapien
taggtgtcctaatggtgtagaaggc

SEQ ID NO: 643309 - DNA, 25 bp, Homo sapien
gaactaggtgtcctaatggtgtaga

SEQ ID NO: 643310 - DNA, 25 bp, Homo sapien
aaatgaactaggtgtcctaatggtg

SEQ ID NO: 643311 - DNA, 25 bp, Homo sapien
ttgagaaatgaactaggtgtcctaa

SEQ ID NO: 643312 - DNA, 25 bp, Homo sapien
atgttgtgttgttatggtctggagc

SEQ ID NO: 643313 - DNA, 25 bp, Homo sapien
ttgtgttgttatggtctggagcaaa

SEQ ID NO: 643314 - DNA, 25 bp, Homo sapien
agtttggagtttagtctgatttggg

SEQ ID NO: 643315 - DNA, 25 bp, Homo sapien
cataacaacgtgtatgattggatgt

SEQ ID NO: 643316 - DNA, 25 bp, Homo sapien
gaataccgttgtagttctctccttc

SEQ ID NO: 643317 - DNA, 25 bp, Homo sapien
cttcatctttccccgccactaccac

SEQ ID NO: 643318 - DNA, 25 bp, Homo sapien
ttaggaataccgttgtagttctctc

SEQ ID NO: 643319 - DNA, 25 bp, Homo sapien
tccttcatctttccccgccactacc

SEQ ID NO: 643320 - DNA, 25 bp, Homo sapien
tgtttcctgcttgccggttcacacc

SEQ ID NO: 643321 - DNA, 25 bp, Homo sapien
tttcctgcttgccggttcacacctc

SEQ ID NO: 643322 - DNA, 25 bp, Homo sapien
gtttcctgcttgccggttcacacct

SEQ ID NO: 643323 - DNA, 25 bp, Homo sapien
cctcttctttccacatgcaaacacg

SEQ ID NO: 643324 - DNA, 25 bp, Homo sapien
tctttccacatgcaaacacgcattt

SEQ ID NO: 643325 - DNA, 25 bp, Homo sapien
acatgcaaacacgcatttttcattt

SEQ ID NO: 643326 - DNA, 25 bp, Homo sapien
catgcaaacacgcatttttcatttt

SEQ ID NO: 643327 - DNA, 25 bp, Homo sapien
gactgttcggtgtaagtgcctcgaa

SEQ ID NO: 643328 - DNA, 25 bp, Homo sapien
taagtgcctcgaataaataactcag

SEQ ID NO: 643329 - DNA, 25 bp, Homo sapien
gagaagactgttcggtgtaagtgcc

SEQ ID NO: 643330 - DNA, 25 bp, Homo sapien
tcaggcattgagaagactgttcggt

SEQ ID NO: 643331 - DNA, 25 bp, Homo sapien
ctgagcctcagttatagatttgaag

SEQ ID NO: 643332 - DNA, 25 bp, Homo sapien
gagcctcagttatagatttgaagct

SEQ ID NO: 643333 - DNA, 25 bp, Homo sapien
cagctctctctagcagaatgccctt

SEQ ID NO: 643334 - DNA, 25 bp, Homo sapien
cctcagttatagatttgaagctctc

SEQ ID NO: 643335 - DNA, 25 bp, Homo sapien
gtctgttgatttcttgcggcagata

SEQ ID NO: 643336 - DNA, 25 bp, Homo sapien
ttcccagacaccttccaggcatata

SEQ ID NO: 643337 - DNA, 25 bp, Homo sapien
tgttgatttcttgcggcagatacaa

SEQ ID NO: 643338 - DNA, 25 bp, Homo sapien
cagacaccttccaggcatatagcat

SEQ ID NO: 643339 - DNA, 25 bp, Homo sapien
tagaaaactgggtagaggatagtac

SEQ ID NO: 643340 - DNA, 25 bp, Homo sapien
ttagaaaactgggtagaggatagta

SEQ ID NO: 643341 - DNA, 25 bp, Homo sapien
ttagtggactttgtttcacatggct

SEQ ID NO: 643342 - DNA, 25 bp, Homo sapien
gtatgcccatccacaagctttagtg

SEQ ID NO: 643343 - DNA, 25 bp, Homo sapien
gtcatgtctgtatgcccatccacaa

SEQ ID NO: 643344 - DNA, 25 bp, Homo sapien
ctccattcagaagactgatcttggg

SEQ ID NO: 643345 - DNA, 25 bp, Homo sapien
tgatgaagagctatgggacagtgtc

SEQ ID NO: 643346 - DNA, 25 bp, Homo sapien
tgactggaacaaatgctcgtggctt

SEQ ID NO: 643347 - DNA, 25 bp, Homo sapien
tctccattctgaagtagccttgcca

SEQ ID NO: 643348 - DNA, 25 bp, Homo sapien
gccctcaccagaataaggcctgatg

SEQ ID NO: 643349 - DNA, 25 bp, Homo sapien
tgttgctttcaaacccatggtccca

SEQ ID NO: 643350 - DNA, 25 bp, Homo sapien
gtgattgagatactaaacactcctc

SEQ ID NO: 643351 - DNA, 25 bp, Homo sapien
tgggcccaatcgcatccacgctttt

SEQ ID NO: 643352 - DNA, 25 bp, Homo sapien
tttccttcacctggttcaagttgca

SEQ ID NO: 643353 - DNA, 25 bp, Homo sapien
caaagttgtgaatcaggcattacca

SEQ ID NO: 643354 - DNA, 25 bp, Homo sapien
gaacgacaccctttgtattgaagtg

SEQ ID NO: 643355 - DNA, 25 bp, Homo sapien
gatacagcactttagcctgccaggg

SEQ ID NO: 643356 - DNA, 25 bp, Homo sapien
tcctaggacacccattgaaaagtca

SEQ ID NO: 643357 - DNA, 25 bp, Homo sapien
cagatcttggaaacggccaaaggat

SEQ ID NO: 643358 - DNA, 25 bp, Homo sapien
agatcttggaaacggccaaaggatt

SEQ ID NO: 643359 - DNA, 25 bp, Homo sapien
tcagatcttggaaacggccaaagga

SEQ ID NO: 643360 - DNA, 25 bp, Homo sapien
caatgtcttgtcgatgactttcaca

SEQ ID NO: 643361 - DNA, 25 bp, Homo sapien
tgtcttgtcgatgactttcacattc

SEQ ID NO: 643362 - DNA, 25 bp, Homo sapien
aatgtcttgtcgatgactttcacat

SEQ ID NO: 643363 - DNA, 25 bp, Homo sapien
gtcttgtcgatgactttcacattct

SEQ ID NO: 643364 - DNA, 25 bp, Homo sapien
gaaaaaataatgcatacatttaata

SEQ ID NO: 643365 - DNA, 25 bp, Homo sapien
ctgaaaaaataatgcatacatttaa

SEQ ID NO: 643366 - DNA, 25 bp, Homo sapien
aaaaataatgcatacatttaatatg

SEQ ID NO: 643367 - DNA, 25 bp, Homo sapien
aaataatgcatacatttaatatgaa

SEQ ID NO: 643368 - DNA, 25 bp, Homo sapien
gtagtgagtagaccatttatctggg

SEQ ID NO: 643369 - DNA, 25 bp, Homo sapien
cacagaatggcattcttcttgttga

SEQ ID NO: 643370 - DNA, 25 bp, Homo sapien
ttcacagaatggcattcttcttgtt

SEQ ID NO: 643371 - DNA, 25 bp, Homo sapien
gtacagtagtgagtagaccatttat

SEQ ID NO: 643372 - DNA, 25 bp, Homo sapien
ttcaaaaatgcggtagctgataatc

SEQ ID NO: 643373 - DNA, 25 bp, Homo sapien
gttctttctgagtcaaattagaaat

SEQ ID NO: 643374 - DNA, 25 bp, Homo sapien
ggtagctgataatcaactcacagcc

SEQ ID NO: 643375 - DNA, 25 bp, Homo sapien
aactcacagccattctttctagcta

SEQ ID NO: 643376 - DNA, 25 bp, Homo sapien
ctttagtatctcgaggacatcttga

SEQ ID NO: 643377 - DNA, 25 bp, Homo sapien
tagtatctcgaggacatcttgaaca

SEQ ID NO: 643378 - DNA, 25 bp, Homo sapien
catggccaaccggaattcttccttt

SEQ ID NO: 643379 - DNA, 25 bp, Homo sapien
tatctcgaggacatcttgaacacct

SEQ ID NO: 643380 - DNA, 25 bp, Homo sapien
tccacaatttctggcagaacatcaa

SEQ ID NO: 643381 - DNA, 25 bp, Homo sapien
ccttggcgccaagagccagagcttt

SEQ ID NO: 643382 - DNA, 25 bp, Homo sapien
ccagagctttcagaacatcagtgcc

SEQ ID NO: 643383 - DNA, 25 bp, Homo sapien
aagctaagccccaaacgattggtct

SEQ ID NO: 643384 - DNA, 25 bp, Homo sapien
tcgagttgtcgagccccatgattcg

SEQ ID NO: 643385 - DNA, 25 bp, Homo sapien
tgattcgacaccaagatcccattca

SEQ ID NO: 643386 - DNA, 25 bp, Homo sapien
ggctggcaccccatcgagttgtcga

SEQ ID NO: 643387 - DNA, 25 bp, Homo sapien
ccattcaagccatgtttaacagcct

SEQ ID NO: 643388 - DNA, 25 bp, Homo sapien
ctttggtctgagagcaactgttgca

SEQ ID NO: 643389 - DNA, 25 bp, Homo sapien
tagccatttgtactggagggagcac

SEQ ID NO: 643390 - DNA, 25 bp, Homo sapien
tagtcattggtatctccctgtggga

SEQ ID NO: 643391 - DNA, 25 bp, Homo sapien
gctctgaaataaggcaatagcatcc

SEQ ID NO: 643392 - DNA, 25 bp, Homo sapien
tcccagctgatagatgggtctattg

SEQ ID NO: 643393 - DNA, 25 bp, Homo sapien
gctttagccacatatgcagcaagtc

SEQ ID NO: 643394 - DNA, 25 bp, Homo sapien
gcagcaagtccactgtcgtctccaa

SEQ ID NO: 643395 - DNA, 25 bp, Homo sapien
tcaaaatgccctttgcaacaattgg

SEQ ID NO: 643396 - DNA, 25 bp, Homo sapien
cgacaagagcttttcaattatcaat

SEQ ID NO: 643397 - DNA, 25 bp, Homo sapien
tgaacttctcggtctgctgactcaa

SEQ ID NO: 643398 - DNA, 25 bp, Homo sapien
tctctgaacttctcggtctgctgac

SEQ ID NO: 643399 - DNA, 25 bp, Homo sapien
tccagacaagtttgacaacgacaag

SEQ ID NO: 643400 - DNA, 25 bp, Homo sapien
cagtggttttttcttgctcctgggc

SEQ ID NO: 643401 - DNA, 25 bp, Homo sapien
ctctgccagtggttttttcttgctc

SEQ ID NO: 643402 - DNA, 25 bp, Homo sapien
gccagtggttttttcttgctcctgg

SEQ ID NO: 643403 - DNA, 25 bp, Homo sapien
ttctctgccagtggttttttcttgc

SEQ ID NO: 643404 - DNA, 25 bp, Homo sapien
gagtagccccagcagtgaagaagca

SEQ ID NO: 643405 - DNA, 25 bp, Homo sapien
tgagtagccccagcagtgaagaagc

SEQ ID NO: 643406 - DNA, 25 bp, Homo sapien
ggcggcagtttgaatctgttacgca

SEQ ID NO: 643407 - DNA, 25 bp, Homo sapien
agttgtggcggcagtttgaatctgt

SEQ ID NO: 643408 - DNA, 25 bp, Homo sapien
gcggcagtttgaatctgttacgcac

SEQ ID NO: 643409 - DNA, 25 bp, Homo sapien
ctgagttgtggcggcagtttgaatc

SEQ ID NO: 643410 - DNA, 25 bp, Homo sapien
cttcttcaattgaggaggtggccca

SEQ ID NO: 643411 - DNA, 25 bp, Homo sapien
acatcatgcccgttcccagggactg

SEQ ID NO: 643412 - DNA, 25 bp, Homo sapien
cggttgcccaggtaaggtgtgtcca

SEQ ID NO: 643413 - DNA, 25 bp, Homo sapien
gttgcagccaacgaagtgcctcagg

SEQ ID NO: 643414 - DNA, 25 bp, Homo sapien
caaacctttgaattgtagttggatg

SEQ ID NO: 643415 - DNA, 25 bp, Homo sapien
gaattgtagttggatgagtaaagac

SEQ ID NO: 643416 - DNA, 25 bp, Homo sapien
ccaaacctttgaattgtagttggat

SEQ ID NO: 643417 - DNA, 25 bp, Homo sapien
ctttgaattgtagttggatgagtaa

SEQ ID NO: 643418 - DNA, 25 bp, Homo sapien
tcttcaatatgtcgttgtgcttcaa

SEQ ID NO: 643419 - DNA, 25 bp, Homo sapien
tctccccaaggaatccccagacttc

SEQ ID NO: 643420 - DNA, 25 bp, Homo sapien
aattggtaaatagccacggctctga

SEQ ID NO: 643421 - DNA, 25 bp, Homo sapien
tgtgcttcaatatgtcatcacttcc

SEQ ID NO: 643422 - DNA, 25 bp, Homo sapien
cccttgaagttggactctgaataaa

SEQ ID NO: 643423 - DNA, 25 bp, Homo sapien
gcagaaaggcccttgaagttggact

SEQ ID NO: 643424 - DNA, 25 bp, Homo sapien
gaaaggcccttgaagttggactctg

SEQ ID NO: 643425 - DNA, 25 bp, Homo sapien
ggcccttgaagttggactctgaata

SEQ ID NO: 643426 - DNA, 25 bp, Homo sapien
gattgataactaacccgttttctga

SEQ ID NO: 643427 - DNA, 25 bp, Homo sapien
cagggagattgataactaacccgtt

SEQ ID NO: 643428 - DNA, 25 bp, Homo sapien
acttctccagggagattgataacta

SEQ ID NO: 643429 - DNA, 25 bp, Homo sapien
ctcttccttgctagggtctaagtcc

SEQ ID NO: 643430 - DNA, 25 bp, Homo sapien
gtccacatgagccatgcgctgcatg

SEQ ID NO: 643431 - DNA, 25 bp, Homo sapien
tagcccccacacatattggcatgct

SEQ ID NO: 643432 - DNA, 25 bp, Homo sapien
acagtggcaagctcgccgtccacat

SEQ ID NO: 643433 - DNA, 25 bp, Homo sapien
agccatgcgctgcatggccgtagcc

SEQ ID NO: 643434 - DNA, 25 bp, Homo sapien
ccggagcatccttggatacagcttc

SEQ ID NO: 643435 - DNA, 25 bp, Homo sapien
ctaaaacagaagtcgacagatctgt

SEQ ID NO: 643436 - DNA, 25 bp, Homo sapien
tccggagcatccttggatacagctt

SEQ ID NO: 643437 - DNA, 25 bp, Homo sapien
cagaagtcgacagatctgtttcagc

SEQ ID NO: 643438 - DNA, 25 bp, Homo sapien
ctttggaagtactgatttagcatgt

SEQ ID NO: 643439 - DNA, 25 bp, Homo sapien
ttggaagtactgatttagcatgttg

SEQ ID NO: 643440 - DNA, 25 bp, Homo sapien
tggaagtactgatttagcatgttgt

SEQ ID NO: 643441 - DNA, 25 bp, Homo sapien
ggaagtactgatttagcatgttgtt

SEQ ID NO: 643442 - DNA, 25 bp, Homo sapien
cacaggttattgctatcccagatgg

SEQ ID NO: 643443 - DNA, 25 bp, Homo sapien
tttcacaggttattgctatcccaga

SEQ ID NO: 643444 - DNA, 25 bp, Homo sapien
caggttattgctatcccagatggag

SEQ ID NO: 643445 - DNA, 25 bp, Homo sapien
tatcccagatggagttcgttgtttt

SEQ ID NO: 643446 - DNA, 25 bp, Homo sapien
tagtctggagttatctactgctgaa

SEQ ID NO: 643447 - DNA, 25 bp, Homo sapien
taaggtttcagtattgacaggcatc

SEQ ID NO: 643448 - DNA, 25 bp, Homo sapien
tagacagtcgttagacaacactggg

SEQ ID NO: 643449 - DNA, 25 bp, Homo sapien
cacatagaggatatgtaaggtctca

SEQ ID NO: 643450 - DNA, 25 bp, Homo sapien
gccttaaagctcgacaccagctggg

SEQ ID NO: 643451 - DNA, 25 bp, Homo sapien
ggaatgcaatttactgacactctga

SEQ ID NO: 643452 - DNA, 25 bp, Homo sapien
tcagtacgtattggcttaaggaatc

SEQ ID NO: 643453 - DNA, 25 bp, Homo sapien
tcaacagaggcaatatatagtcagg

SEQ ID NO: 643454 - DNA, 25 bp, Homo sapien
tcttcttggagactgggcaccaatt

SEQ ID NO: 643455 - DNA, 25 bp, Homo sapien
tataagggtgaacataagcaggatc

SEQ ID NO: 643456 - DNA, 25 bp, Homo sapien
aaatcccaagcatgggcccacagag

SEQ ID NO: 643457 - DNA, 25 bp, Homo sapien
tcatagtaaagacactccatcttcg

SEQ ID NO: 643458 - DNA, 25 bp, Homo sapien
tggcaatgccattttggtatttact

SEQ ID NO: 643459 - DNA, 25 bp, Homo sapien
ggtatttactactttcctggagctc

SEQ ID NO: 643460 - DNA, 25 bp, Homo sapien
tcctccccagtcaaggaaaattctg

SEQ ID NO: 643461 - DNA, 25 bp, Homo sapien
gaaaattctggcaatgccattttgg

SEQ ID NO: 643462 - DNA, 25 bp, Homo sapien
tattatgcagtgagaagaatcttat

SEQ ID NO: 643463 - DNA, 25 bp, Homo sapien
cagtgagaagaatcttataagcaga

SEQ ID NO: 643464 - DNA, 25 bp, Homo sapien
ggctttattatgcagtgagaagaat

SEQ ID NO: 643465 - DNA, 25 bp, Homo sapien
gaatcttataagcagagatgggata

SEQ ID NO: 643466 - DNA, 25 bp, Homo sapien
ttgatacgagcaacagaaccagcct

SEQ ID NO: 643467 - DNA, 25 bp, Homo sapien
ggctaacagacagggattccatgca

SEQ ID NO: 643468 - DNA, 25 bp, Homo sapien
taagtatgtgcccatgcagtgcaag

SEQ ID NO: 643469 - DNA, 25 bp, Homo sapien
gatggcctcgattttgaagctgcac

SEQ ID NO: 643470 - DNA, 25 bp, Homo sapien
cacaagactaccttgtactggcaag

SEQ ID NO: 643471 - DNA, 25 bp, Homo sapien
cactttcaggtactggagttcatta

SEQ ID NO: 643472 - DNA, 25 bp, Homo sapien
tactggcaagacttagaggacttct

SEQ ID NO: 643473 - DNA, 25 bp, Homo sapien
ggacttctggcttgaaaaatattgc

SEQ ID NO: 643474 - DNA, 25 bp, Homo sapien
aaggatttggtacaaactgcaggcc

SEQ ID NO: 643475 - DNA, 25 bp, Homo sapien
tgagctgctctctatacccaaggcc

SEQ ID NO: 643476 - DNA, 25 bp, Homo sapien
tattggagtcctctgaccaagagat

SEQ ID NO: 643477 - DNA, 25 bp, Homo sapien
caaggcttctacgttacactttggg

SEQ ID NO: 643478 - DNA, 25 bp, Homo sapien
tgacttttacgctgcctcaaggagt

SEQ ID NO: 643479 - DNA, 25 bp, Homo sapien
gtcccttgtcagcatgctgactttt

SEQ ID NO: 643480 - DNA, 25 bp, Homo sapien
tgcctcaaggagtcttccaccacct

SEQ ID NO: 643481 - DNA, 25 bp, Homo sapien
ctcaggctctacttcctcccgggtc

SEQ ID NO: 643482 - DNA, 25 bp, Homo sapien
gggcccctgatcattggcctcactt

SEQ ID NO: 643483 - DNA, 25 bp, Homo sapien
tgttcagctctatgagcctcctctg

SEQ ID NO: 643484 - DNA, 25 bp, Homo sapien
tcctgcaactgttcagctctatgag

SEQ ID NO: 643485 - DNA, 25 bp, Homo sapien
tgcttcatcctcatcgccaagatct

SEQ ID NO: 643486 - DNA, 25 bp, Homo sapien
gatcacaggagcttatcgtacttac

SEQ ID NO: 643487 - DNA, 25 bp, Homo sapien
gaagagttactagcacacagcagaa

SEQ ID NO: 643488 - DNA, 25 bp, Homo sapien
ttccaaaaacactctagatcacagg

SEQ ID NO: 643489 - DNA, 25 bp, Homo sapien
gaataaagacatgcaaatccagagg

SEQ ID NO: 643490 - DNA, 25 bp, Homo sapien
aacattctgatattaccaccaagac

SEQ ID NO: 643491 - DNA, 25 bp, Homo sapien
tgcttactggctattctaggacata

SEQ ID NO: 643492 - DNA, 25 bp, Homo sapien
tattcctttaccctggcatgctacg

SEQ ID NO: 643493 - DNA, 25 bp, Homo sapien
gggtcttggatccagagaaagccct

SEQ ID NO: 643494 - DNA, 25 bp, Homo sapien
gaatgtcaaactgaggagacccagg

SEQ ID NO: 643495 - DNA, 25 bp, Homo sapien
taactacttagattgcacaaaatac

SEQ ID NO: 643496 - DNA, 25 bp, Homo sapien
cacattaccattgaaagcagtctca

SEQ ID NO: 643497 - DNA, 25 bp, Homo sapien
tgtacatgaaattcattttgcctta

SEQ ID NO: 643498 - DNA, 25 bp, Homo sapien
caaaatacttaagggataggattag

SEQ ID NO: 643499 - DNA, 25 bp, Homo sapien
gacataagaacaccaagcaggaatt

SEQ ID NO: 643500 - DNA, 25 bp, Homo sapien
aaagacataagaacaccaagcagga

SEQ ID NO: 643501 - DNA, 25 bp, Homo sapien
accaaggtggctatgacgaaaaaga

SEQ ID NO: 643502 - DNA, 25 bp, Homo sapien
gtggctatgacgaaaaagacataag

SEQ ID NO: 643503 - DNA, 25 bp, Homo sapien
tacatacataggttcccacaaagct

SEQ ID NO: 643504 - DNA, 25 bp, Homo sapien
aactgagagtagtaattaaggtcat

SEQ ID NO: 643505 - DNA, 25 bp, Homo sapien
tgttgtttctacatacataggttcc

SEQ ID NO: 643506 - DNA, 25 bp, Homo sapien
tcccacaaagctttatgtatctaaa

SEQ ID NO: 643507 - DNA, 25 bp, Homo sapien
tactggacacaggatgatatggctc

SEQ ID NO: 643508 - DNA, 25 bp, Homo sapien
gacgcagcaagtagtttaaacactg

SEQ ID NO: 643509 - DNA, 25 bp, Homo sapien
cagaagagatagagctaaagacgca

SEQ ID NO: 643510 - DNA, 25 bp, Homo sapien
tcatttgttcaagaccctgacagct

SEQ ID NO: 643511 - DNA, 25 bp, Homo sapien
aaatatcccatgctgttcgctgaaa

SEQ ID NO: 643512 - DNA, 25 bp, Homo sapien
tacacttaccaggtgaacatcacaa

SEQ ID NO: 643513 - DNA, 25 bp, Homo sapien
tcacacagattgtcctcccaaggat

SEQ ID NO: 643514 - DNA, 25 bp, Homo sapien
aagccttaagttttctgtcacgtca

SEQ ID NO: 643515 - DNA, 25 bp, Homo sapien
tagttcgcaaaagcatatacaggtt

SEQ ID NO: 643516 - DNA, 25 bp, Homo sapien
tgttcaatctggttggatttagtcc

SEQ ID NO: 643517 - DNA, 25 bp, Homo sapien
ttttgttcaatctggttggatttag

SEQ ID NO: 643518 - DNA, 25 bp, Homo sapien
caatctggttggatttagtcctccc

SEQ ID NO: 643519 - DNA, 25 bp, Homo sapien
ttcaatctggttggatttagtcctc

SEQ ID NO: 643520 - DNA, 25 bp, Homo sapien
agagatgctaaaaagaccagccatt

SEQ ID NO: 643521 - DNA, 25 bp, Homo sapien
tgctaaaaagaccagccattccaga

SEQ ID NO: 643522 - DNA, 25 bp, Homo sapien
ccatatcttgccagagatgctaaaa

SEQ ID NO: 643523 - DNA, 25 bp, Homo sapien
gatgctaaaaagaccagccattcca

SEQ ID NO: 643524 - DNA, 25 bp, Homo sapien
gccaaaaaggcacctctctgcgcaa

SEQ ID NO: 643525 - DNA, 25 bp, Homo sapien
ttagtttatacacctgaccccagcc

SEQ ID NO: 643526 - DNA, 25 bp, Homo sapien
tgttaaatgcgcaggcatgccacaa

SEQ ID NO: 643527 - DNA, 25 bp, Homo sapien
ccacttggtgctattctcttgataa

SEQ ID NO: 643528 - DNA, 25 bp, Homo sapien
cagaggctcgactgattgccatttc

SEQ ID NO: 643529 - DNA, 25 bp, Homo sapien
agccggggatttccagccagtcaga

SEQ ID NO: 643530 - DNA, 25 bp, Homo sapien
acggcggaatatcccatcctttgca

SEQ ID NO: 643531 - DNA, 25 bp, Homo sapien
acgataacggcggaatatcccatcc

SEQ ID NO: 643532 - DNA, 25 bp, Homo sapien
gggccacgataacggcggaatatcc

SEQ ID NO: 643533 - DNA, 25 bp, Homo sapien
ctgggccacgataacggcggaatat

SEQ ID NO: 643534 - DNA, 25 bp, Homo sapien
agagtggtgacaaagaagcggccac

SEQ ID NO: 643535 - DNA, 25 bp, Homo sapien
ggtgacaaagaagcggccactcaaa

SEQ ID NO: 643536 - DNA, 25 bp, Homo sapien
aaaaatgctgggagagtggtgacaa

SEQ ID NO: 643537 - DNA, 25 bp, Homo sapien
aaaatgctgggagagtggtgacaaa

SEQ ID NO: 643538 - DNA, 25 bp, Homo sapien
gaaatagccatcactcaagggtgat

SEQ ID NO: 643539 - DNA, 25 bp, Homo sapien
ctgctgttttcctgaccttgacaac

SEQ ID NO: 643540 - DNA, 25 bp, Homo sapien
ctctaatctagtgaaatagccatca

SEQ ID NO: 643541 - DNA, 25 bp, Homo sapien
tcctgaccttgacaactaagctcat

SEQ ID NO: 643542 - DNA, 25 bp, Homo sapien
tatctcaagtactccactggtggtc

SEQ ID NO: 643543 - DNA, 25 bp, Homo sapien
taacactgctgttactagtccaagc

SEQ ID NO: 643544 - DNA, 25 bp, Homo sapien
cagtggcctgttctcacgactctgg

SEQ ID NO: 643545 - DNA, 25 bp, Homo sapien
agtacactcctacctgcacatggtg

SEQ ID NO: 643546 - DNA, 25 bp, Homo sapien
gcctcccattctgaatcagtctgct

SEQ ID NO: 643547 - DNA, 25 bp, Homo sapien
tctgctggcaggatggacaccatgg

SEQ ID NO: 643548 - DNA, 25 bp, Homo sapien
ttcaccattctttgcaaaagcctcc

SEQ ID NO: 643549 - DNA, 25 bp, Homo sapien
ccttccccacactgatctgaagtat

SEQ ID NO: 643550 - DNA, 25 bp, Homo sapien
ccaatagtgtcctgttgggaagcac

SEQ ID NO: 643551 - DNA, 25 bp, Homo sapien
gaataataccgcactagattgctgg

SEQ ID NO: 643552 - DNA, 25 bp, Homo sapien
caaaggttctgcaacacgtgggcca

SEQ ID NO: 643553 - DNA, 25 bp, Homo sapien
gaagcactgatgaatgtccaacaca

SEQ ID NO: 643554 - DNA, 25 bp, Homo sapien
tgaactaagtgtcaagatgaagcta

SEQ ID NO: 643555 - DNA, 25 bp, Homo sapien
tcaggatgagcacttgggttttagt

SEQ ID NO: 643556 - DNA, 25 bp, Homo sapien
catagcaggcctctagtggtatgga

SEQ ID NO: 643557 - DNA, 25 bp, Homo sapien
aattcccagatgaaagagcgcatat

SEQ ID NO: 643558 - DNA, 25 bp, Homo sapien
catactgcacgtggatgtcactgaa

SEQ ID NO: 643559 - DNA, 25 bp, Homo sapien
ttattctcacaatgacatctccagg

SEQ ID NO: 643560 - DNA, 25 bp, Homo sapien
gaagactacgacacaaatggcctgc

SEQ ID NO: 643561 - DNA, 25 bp, Homo sapien
tagcctgtgctacgtattcatactg

SEQ ID NO: 643562 - DNA, 25 bp, Homo sapien
ccctccatcaccagcgtccagttgg

SEQ ID NO: 643563 - DNA, 25 bp, Homo sapien
tggacccggctctgctccggcggca

SEQ ID NO: 643564 - DNA, 25 bp, Homo sapien
atttcagcatccactcgccctccat

SEQ ID NO: 643565 - DNA, 25 bp, Homo sapien
agttggaggcggtcatgggctggac

SEQ ID NO: 643566 - DNA, 25 bp, Homo sapien
cacagccgcgatccaggcggccagg

SEQ ID NO: 643567 - DNA, 25 bp, Homo sapien
gagcgccgttagctgcgggccgcag

SEQ ID NO: 643568 - DNA, 25 bp, Homo sapien
acagccgcgatccaggcggccagga

SEQ ID NO: 643569 - DNA, 25 bp, Homo sapien
gcggccaggagcgccgttagctgcg

SEQ ID NO: 643570 - DNA, 25 bp, Homo sapien
agactggcggtgctcgcaatgccgc

SEQ ID NO: 643571 - DNA, 25 bp, Homo sapien
gtttttcaaggaagcgggagacgca

SEQ ID NO: 643572 - DNA, 25 bp, Homo sapien
gttgggcgccgagcgaggcttctcg

SEQ ID NO: 643573 - DNA, 25 bp, Homo sapien
gaggacgccacctcttatcgccgct

SEQ ID NO: 643574 - DNA, 25 bp, Homo sapien
tgttgcttgggtaatcgtggacttg

SEQ ID NO: 643575 - DNA, 25 bp, Homo sapien
caagagggaacaggcagtgggaggc

SEQ ID NO: 643576 - DNA, 25 bp, Homo sapien
ctgcaggatcaagagggaacaggca

SEQ ID NO: 643577 - DNA, 25 bp, Homo sapien
aggatcaagagggaacaggcagtgg

SEQ ID NO: 643578 - DNA, 25 bp, Homo sapien
gatcaagagggaacaggcagtggga

SEQ ID NO: 643579 - DNA, 25 bp, Homo sapien
catttgacctcaagtcaatctgaca

SEQ ID NO: 643580 - DNA, 25 bp, Homo sapien
gacaattgtgcattaactgaagagc

SEQ ID NO: 643581 - DNA, 25 bp, Homo sapien
ctgacaattgtgcattaactgaaga

SEQ ID NO: 643582 - DNA, 25 bp, Homo sapien
atttgacctcaagtcaatctgacaa

SEQ ID NO: 643583 - DNA, 25 bp, Homo sapien
tgagtcactcacgtctgtagagccc

SEQ ID NO: 643584 - DNA, 25 bp, Homo sapien
aatccactgtactgagtcactcacg

SEQ ID NO: 643585 - DNA, 25 bp, Homo sapien
agtagttttgtttccgaatccactg

SEQ ID NO: 643586 - DNA, 25 bp, Homo sapien
tctgtagagccctcatggtttttcc

SEQ ID NO: 643587 - DNA, 25 bp, Homo sapien
tatgatcattgcaggcaatgggtta

SEQ ID NO: 643588 - DNA, 25 bp, Homo sapien
ttatctgcaactcccaggagacaca

SEQ ID NO: 643589 - DNA, 25 bp, Homo sapien
gggttattatctgcaactcccagga

SEQ ID NO: 643590 - DNA, 25 bp, Homo sapien
aatagaaatatgatcattgcaggca

SEQ ID NO: 643591 - DNA, 25 bp, Homo sapien
ccaaatatttcatcacaggccacag

SEQ ID NO: 643592 - DNA, 25 bp, Homo sapien
ttcttgctaccctgcaggggttctg

SEQ ID NO: 643593 - DNA, 25 bp, Homo sapien
tcttgtttacttcttgctaccctgc

SEQ ID NO: 643594 - DNA, 25 bp, Homo sapien
ttgtttacttcttgctaccctgcag

SEQ ID NO: 643595 - DNA, 25 bp, Homo sapien
gtttacttcttgctaccctgcaggg

SEQ ID NO: 643596 - DNA, 25 bp, Homo sapien
gatacaacctttaggaattacacaa

SEQ ID NO: 643597 - DNA, 25 bp, Homo sapien
tcaaacattgtcaaatacgacaggg

SEQ ID NO: 643598 - DNA, 25 bp, Homo sapien
ggtcagtctttctcaacatatttca

SEQ ID NO: 643599 - DNA, 25 bp, Homo sapien
tgtggcaaatgatccccagctacaa

SEQ ID NO: 643600 - DNA, 25 bp, Homo sapien
ctatttggtgcttgttcacccacca

SEQ ID NO: 643601 - DNA, 25 bp, Homo sapien
tatttggtgcttgttcacccaccat

SEQ ID NO: 643602 - DNA, 25 bp, Homo sapien
taaagccactctattaagccaggaa

SEQ ID NO: 643603 - DNA, 25 bp, Homo sapien
caatactgcctagtgaattgcaggg

SEQ ID NO: 643604 - DNA, 25 bp, Homo sapien
cacacagaatagtggatacccatgc

SEQ ID NO: 643605 - DNA, 25 bp, Homo sapien
tggcgaatatcccacagaagatgct

SEQ ID NO: 643606 - DNA, 25 bp, Homo sapien
gtttatcaattttcttgatcctttc

SEQ ID NO: 643607 - DNA, 25 bp, Homo sapien
tttatcaattttcttgatcctttcc

SEQ ID NO: 643608 - DNA, 25 bp, Homo sapien
gcccagagatgacggagaaggaaat

SEQ ID NO: 643609 - DNA, 25 bp, Homo sapien
tgaggcatcatttccgcagtcttct

SEQ ID NO: 643610 - DNA, 25 bp, Homo sapien
tctggattgtgctgagagtgtctct

SEQ ID NO: 643611 - DNA, 25 bp, Homo sapien
tcagtcactatatctgagggcccag

SEQ ID NO: 643612 - DNA, 25 bp, Homo sapien
gagtcagaagctggcaatttcatca

SEQ ID NO: 643613 - DNA, 25 bp, Homo sapien
agtcagaagctggcaatttcatcat

SEQ ID NO: 643614 - DNA, 25 bp, Homo sapien
tgagtcagaagctggcaatttcatc

SEQ ID NO: 643615 - DNA, 25 bp, Homo sapien
ttgggatccaaagacgctccggagc

SEQ ID NO: 643616 - DNA, 25 bp, Homo sapien
ggagctcgagcccaaattcccaaga

SEQ ID NO: 643617 - DNA, 25 bp, Homo sapien
tgcctctttggttcctcccgatggg

SEQ ID NO: 643618 - DNA, 25 bp, Homo sapien
tgtctcgaaagcacaacgtaaccgt

SEQ ID NO: 643619 - DNA, 25 bp, Homo sapien
ggctccagacctcgcgtcccgcccg

SEQ ID NO: 643620 - DNA, 25 bp, Homo sapien
gctccagacctcgcgtcccgcccgg

SEQ ID NO: 643621 - DNA, 25 bp, Homo sapien
gggctccagacctcgcgtcccgccc

SEQ ID NO: 643622 - DNA, 25 bp, Homo sapien
ctccagacctcgcgtcccgcccggg

SEQ ID NO: 643623 - DNA, 25 bp, Homo sapien
gcggaggacacaacggtccagccaa

SEQ ID NO: 643624 - DNA, 25 bp, Homo sapien
cctcttggcgcttttgtgggagcca

SEQ ID NO: 643625 - DNA, 25 bp, Homo sapien
caggtggtcgttgatgccaaacttc

SEQ ID NO: 643626 - DNA, 25 bp, Homo sapien
ttagtgattgcgaaccctcttggcg

SEQ ID NO: 643627 - DNA, 25 bp, Homo sapien
gaaaataagtacgtaatttagagca

SEQ ID NO: 643628 - DNA, 25 bp, Homo sapien
gtacgtaatttagagcaggatccat

SEQ ID NO: 643629 - DNA, 25 bp, Homo sapien
taagtacgtaatttagagcaggatc

SEQ ID NO: 643630 - DNA, 25 bp, Homo sapien
aataagtacgtaatttagagcagga

SEQ ID NO: 643631 - DNA, 25 bp, Homo sapien
gggcctggtgttaccctgaaggcta

SEQ ID NO: 643632 - DNA, 25 bp, Homo sapien
aaggctaaagtggtaaacaagagca

SEQ ID NO: 643633 - DNA, 25 bp, Homo sapien
cactaattcatccaagaattttggg

SEQ ID NO: 643634 - DNA, 25 bp, Homo sapien
caagagcattatgtttcatagttgc

SEQ ID NO: 643635 - DNA, 25 bp, Homo sapien
gaactggaagttctctgccatccag

SEQ ID NO: 643636 - DNA, 25 bp, Homo sapien
ccccacttcgtgcattctgaaagtc

SEQ ID NO: 643637 - DNA, 25 bp, Homo sapien
cgtatttctcgagccaagtagagaa

SEQ ID NO: 643638 - DNA, 25 bp, Homo sapien
gaaagtctgggccttatagtatttg

SEQ ID NO: 643639 - DNA, 25 bp, Homo sapien
gaacgctctcgtgtttgaggacaac

SEQ ID NO: 643640 - DNA, 25 bp, Homo sapien
tctgatgatcctggctaagcatttg

SEQ ID NO: 643641 - DNA, 25 bp, Homo sapien
tggaggagcacagcacttgaacgct

SEQ ID NO: 643642 - DNA, 25 bp, Homo sapien
gacaactgggctgacatcgagtgaa

SEQ ID NO: 643643 - DNA, 25 bp, Homo sapien
gcagtatctgctacgtcctcttggg

SEQ ID NO: 643644 - DNA, 25 bp, Homo sapien
gtatctgctacgtcctcttgggttt

SEQ ID NO: 643645 - DNA, 25 bp, Homo sapien
cagtatctgctacgtcctcttgggt

SEQ ID NO: 643646 - DNA, 25 bp, Homo sapien
agcagtatctgctacgtcctcttgg

SEQ ID NO: 643647 - DNA, 25 bp, Homo sapien
tataagattccagctttgcggttga

SEQ ID NO: 643648 - DNA, 25 bp, Homo sapien
gatgtcgagccttatgaagagaagc

SEQ ID NO: 643649 - DNA, 25 bp, Homo sapien
catgagccattaatggttgaccagg

SEQ ID NO: 643650 - DNA, 25 bp, Homo sapien
gagaagctttaacgtgaaatgaacg

SEQ ID NO: 643651 - DNA, 25 bp, Homo sapien
tatcatataggcagtctctcatgga

SEQ ID NO: 643652 - DNA, 25 bp, Homo sapien
gctctgcaacgttatggcagccatg

SEQ ID NO: 643653 - DNA, 25 bp, Homo sapien
aatggctacgctgaaaatacttgtc

SEQ ID NO: 643654 - DNA, 25 bp, Homo sapien
tactcgtaagtccaggaaatggcta

SEQ ID NO: 643655 - DNA, 25 bp, Homo sapien
tccccgcattcatctttacaaggtg

SEQ ID NO: 643656 - DNA, 25 bp, Homo sapien
tgatggatgtacaaagaatcagcat

SEQ ID NO: 643657 - DNA, 25 bp, Homo sapien
tacaaggtgtaataattaagccagc

SEQ ID NO: 643658 - DNA, 25 bp, Homo sapien
gcagaatcatagcattgcctgatgg

SEQ ID NO: 643659 - DNA, 25 bp, Homo sapien
taactttgtagttgtgaacagttgt

SEQ ID NO: 643660 - DNA, 25 bp, Homo sapien
cccattaactttgtagttgtgaaca

SEQ ID NO: 643661 - DNA, 25 bp, Homo sapien
cattaactttgtagttgtgaacagt

SEQ ID NO: 643662 - DNA, 25 bp, Homo sapien
tttcccattaactttgtagttgtga

SEQ ID NO: 643663 - DNA, 25 bp, Homo sapien
tttggcagtagggtctaggattcaa

SEQ ID NO: 643664 - DNA, 25 bp, Homo sapien
tcatcgagtcccaaattggagatgt

SEQ ID NO: 643665 - DNA, 25 bp, Homo sapien
gcagtagggtctaggattcaaagca

SEQ ID NO: 643666 - DNA, 25 bp, Homo sapien
tcaaagttttggcagtagggtctag

SEQ ID NO: 643667 - DNA, 25 bp, Homo sapien
ctgcaggtgccaaccacctgtggta

SEQ ID NO: 643668 - DNA, 25 bp, Homo sapien
ctgtaaccaggtgcggctccctgca

SEQ ID NO: 643669 - DNA, 25 bp, Homo sapien
gggtctgtaaccaggtgcggctccc

SEQ ID NO: 643670 - DNA, 25 bp, Homo sapien
tgccaaccacctgtggtaaaggcat

SEQ ID NO: 643671 - DNA, 25 bp, Homo sapien
tatagggtgagaagcaatcgcgtcc

SEQ ID NO: 643672 - DNA, 25 bp, Homo sapien
agcaatgccatgctggtttccatgg

SEQ ID NO: 643673 - DNA, 25 bp, Homo sapien
cataattccgttgacagcagttttc

SEQ ID NO: 643674 - DNA, 25 bp, Homo sapien
tgctccctgctgattgccctgagct

SEQ ID NO: 643675 - DNA, 25 bp, Homo sapien
tagtaagagtttaatagtaagttga

SEQ ID NO: 643676 - DNA, 25 bp, Homo sapien
cccgaagtaggcttattgtatagta

SEQ ID NO: 643677 - DNA, 25 bp, Homo sapien
ttgactctcccgaagtaggcttatt

SEQ ID NO: 643678 - DNA, 25 bp, Homo sapien
taagttgattgacaggtagttccat

SEQ ID NO: 643679 - DNA, 25 bp, Homo sapien
atgtgggcacttccacagtcttata

SEQ ID NO: 643680 - DNA, 25 bp, Homo sapien
aatacctaaacactatcattctgtg

SEQ ID NO: 643681 - DNA, 25 bp, Homo sapien
taaacactatcattctgtgctcctg

SEQ ID NO: 643682 - DNA, 25 bp, Homo sapien
caccggccgaatacctaaacactat

SEQ ID NO: 643683 - DNA, 25 bp, Homo sapien
aatgaattgttaccaccggccgaat

SEQ ID NO: 643684 - DNA, 25 bp, Homo sapien
gatgcccatgaaccagtacagctct

SEQ ID NO: 643685 - DNA, 25 bp, Homo sapien
ttgggtatcacaagcctacatgtgg

SEQ ID NO: 643686 - DNA, 25 bp, Homo sapien
gcctacatgtggaccaacctccttt

SEQ ID NO: 643687 - DNA, 25 bp, Homo sapien
gcctcttgctccagaatcatgcttg

SEQ ID NO: 643688 - DNA, 25 bp, Homo sapien
tttgtgccaactgggcaccgtgtcc

SEQ ID NO: 643689 - DNA, 25 bp, Homo sapien
tgtttggtctcgcagtttgtgccaa

SEQ ID NO: 643690 - DNA, 25 bp, Homo sapien
tttgtgggtttgtttggtctcgcag

SEQ ID NO: 643691 - DNA, 25 bp, Homo sapien
caccgtgtccttagtccaccctctt

SEQ ID NO: 643692 - DNA, 25 bp, Homo sapien
tctgtgcgagcccagtattgctgaa

SEQ ID NO: 643693 - DNA, 25 bp, Homo sapien
tgaactgtgtaaggcaaagtgcaaa

SEQ ID NO: 643694 - DNA, 25 bp, Homo sapien
caggcagcaatttccctgtaattct

SEQ ID NO: 643695 - DNA, 25 bp, Homo sapien
ttggtggcgaatgagcaacctttgc

SEQ ID NO: 643696 - DNA, 25 bp, Homo sapien
taagcttgcagagctaccgtggtgg

SEQ ID NO: 643697 - DNA, 25 bp, Homo sapien
ataagcttgcagagctaccgtggtg

SEQ ID NO: 643698 - DNA, 25 bp, Homo sapien
cataagcttgcagagctaccgtggt

SEQ ID NO: 643699 - DNA, 25 bp, Homo sapien
acttcttcaagcttgattcccttac

SEQ ID NO: 643700 - DNA, 25 bp, Homo sapien
gattaaacttcttcaagcttgattc

SEQ ID NO: 643701 - DNA, 25 bp, Homo sapien
atcttctagattaaacttcttcaag

SEQ ID NO: 643702 - DNA, 25 bp, Homo sapien
tctagattaaacttcttcaagcttg

SEQ ID NO: 643703 - DNA, 25 bp, Homo sapien
cacagagggttctataatgtgcatt

SEQ ID NO: 643704 - DNA, 25 bp, Homo sapien
gatgaagaaacctggacatatgctt

SEQ ID NO: 643705 - DNA, 25 bp, Homo sapien
attttggttgtcattgctgtagaga

SEQ ID NO: 643706 - DNA, 25 bp, Homo sapien
tggacatatgcttgacttactcatg

SEQ ID NO: 643707 - DNA, 25 bp, Homo sapien
cctcctggatgcttctctatccttc

SEQ ID NO: 643708 - DNA, 25 bp, Homo sapien
tcttccctcctggatgcttctctat

SEQ ID NO: 643709 - DNA, 25 bp, Homo sapien
tcctggatgcttctctatccttctc

SEQ ID NO: 643710 - DNA, 25 bp, Homo sapien
tccctcctggatgcttctctatcct

SEQ ID NO: 643711 - DNA, 25 bp, Homo sapien
ggccacgaacacctcaaggttcagc

SEQ ID NO: 643712 - DNA, 25 bp, Homo sapien
caatgttctctgtctctaagtgtct

SEQ ID NO: 643713 - DNA, 25 bp, Homo sapien
ctcctttccccgcaatgttctctgt

SEQ ID NO: 643714 - DNA, 25 bp, Homo sapien
ctctaagtgtctaaaggccacgaac

SEQ ID NO: 643715 - DNA, 25 bp, Homo sapien
gcaagaggaaaactagaccattgag

SEQ ID NO: 643716 - DNA, 25 bp, Homo sapien
gggtggcccaaaagagagactagct

SEQ ID NO: 643717 - DNA, 25 bp, Homo sapien
gattgagtgcaagactttctgcggg

SEQ ID NO: 643718 - DNA, 25 bp, Homo sapien
taccaggataaagtgaagaaagctt

SEQ ID NO: 643719 - DNA, 25 bp, Homo sapien
tactgtgggcaatacatatcggaga

SEQ ID NO: 643720 - DNA, 25 bp, Homo sapien
taaggaagttgtgctgtctgctggc

SEQ ID NO: 643721 - DNA, 25 bp, Homo sapien
aaagtgtttatcactgcggcctctg

SEQ ID NO: 643722 - DNA, 25 bp, Homo sapien
tgtgggttcaagtgccagctttgcc

SEQ ID NO: 643723 - DNA, 25 bp, Homo sapien
cccatgtactttgtaaggagacaga

SEQ ID NO: 643724 - DNA, 25 bp, Homo sapien
catatatttgcattggtcgagtgcc

SEQ ID NO: 643725 - DNA, 25 bp, Homo sapien
ggagctcaagatacaggcaaacaaa

SEQ ID NO: 643726 - DNA, 25 bp, Homo sapien
gagccatgtcataataaaagtgccc

SEQ ID NO: 643727 - DNA, 25 bp, Homo sapien
cactcactgggcgatgtgttctgtg

SEQ ID NO: 643728 - DNA, 25 bp, Homo sapien
gcttgaatatcttcagaacatgcag

SEQ ID NO: 643729 - DNA, 25 bp, Homo sapien
agctgcattcaatcctagcaccagc

SEQ ID NO: 643730 - DNA, 25 bp, Homo sapien
accagcccaaccttcaggccacctc

SEQ ID NO: 643731 - DNA, 25 bp, Homo sapien
gcaatgtccacgctcattaaggctg

SEQ ID NO: 643732 - DNA, 25 bp, Homo sapien
aatgtccacgctcattaaggctgta

SEQ ID NO: 643733 - DNA, 25 bp, Homo sapien
gcagcaatgtccacgctcattaagg

SEQ ID NO: 643734 - DNA, 25 bp, Homo sapien
tgtccacgctcattaaggctgtatt

SEQ ID NO: 643735 - DNA, 25 bp, Homo sapien
cagcattcagggtcagtggctaaaa

SEQ ID NO: 643736 - DNA, 25 bp, Homo sapien
agtggctaaaatacttgtcgtaaag

SEQ ID NO: 643737 - DNA, 25 bp, Homo sapien
atacttgtcgtaaaggtgccaagcc

SEQ ID NO: 643738 - DNA, 25 bp, Homo sapien
tccacagcattcagggtcagtggct

SEQ ID NO: 643739 - DNA, 25 bp, Homo sapien
tcagatgctttggcctgccagaggc

SEQ ID NO: 643740 - DNA, 25 bp, Homo sapien
agatgctttggcctgccagaggctc

SEQ ID NO: 643741 - DNA, 25 bp, Homo sapien
atgctttggcctgccagaggctcac

SEQ ID NO: 643742 - DNA, 25 bp, Homo sapien
gatgctttggcctgccagaggctca

SEQ ID NO: 643743 - DNA, 25 bp, Homo sapien
gaacaaatccctttgcaaaggtgta

SEQ ID NO: 643744 - DNA, 25 bp, Homo sapien
tagtcttctgtgtcaccagccttgc

SEQ ID NO: 643745 - DNA, 25 bp, Homo sapien
caagaaactgtttgttgagtaggcg

SEQ ID NO: 643746 - DNA, 25 bp, Homo sapien
tgagtaggcgcttactagctggaac

SEQ ID NO: 643747 - DNA, 25 bp, Homo sapien
tgggagtaacatgagctttgcaggg

SEQ ID NO: 643748 - DNA, 25 bp, Homo sapien
atgggagtaacatgagctttgcagg

SEQ ID NO: 643749 - DNA, 25 bp, Homo sapien
gggagtaacatgagctttgcagggg

SEQ ID NO: 643750 - DNA, 25 bp, Homo sapien
ctgggacatggtgcatacaaatggg

SEQ ID NO: 643751 - DNA, 25 bp, Homo sapien
ggatgtctgccaggtattaggacca

SEQ ID NO: 643752 - DNA, 25 bp, Homo sapien
ggtggttacattgattatatccttc

SEQ ID NO: 643753 - DNA, 25 bp, Homo sapien
taagaacccatccaatggtggttac

SEQ ID NO: 643754 - DNA, 25 bp, Homo sapien
gaagacgggcagacataagaaccca

SEQ ID NO: 643755 - DNA, 25 bp, Homo sapien
tctgtgtcaccaatgaggagggctc

SEQ ID NO: 643756 - DNA, 25 bp, Homo sapien
aggagggctctgtaactgttgatga

SEQ ID NO: 643757 - DNA, 25 bp, Homo sapien
tagccagattacagcctttgggtgt

SEQ ID NO: 643758 - DNA, 25 bp, Homo sapien
gctagtttgcctagtgtagccagat

SEQ ID NO: 643759 - DNA, 25 bp, Homo sapien
gagtagatgtatactccacagccaa

SEQ ID NO: 643760 - DNA, 25 bp, Homo sapien
ttagattaagggagtagatgtatac

SEQ ID NO: 643761 - DNA, 25 bp, Homo sapien
caaaactcatttgtctccattgggt

SEQ ID NO: 643762 - DNA, 25 bp, Homo sapien
caatccttcacaaaactcatttgtc

SEQ ID NO: 643763 - DNA, 25 bp, Homo sapien
gcttttttcagattcagaaagataa

SEQ ID NO: 643764 - DNA, 25 bp, Homo sapien
gataaaatatcagccatgtattaaa

SEQ ID NO: 643765 - DNA, 25 bp, Homo sapien
gaaagataaaatatcagccatgtat

SEQ ID NO: 643766 - DNA, 25 bp, Homo sapien
tctcagctgcttttattccaaaata

SEQ ID NO: 643767 - DNA, 25 bp, Homo sapien
ttcataacagcccactttagaggtc

SEQ ID NO: 643768 - DNA, 25 bp, Homo sapien
gggcggtggtgcaatgaaattattc

SEQ ID NO: 643769 - DNA, 25 bp, Homo sapien
tctacagctactccagatctgtttc

SEQ ID NO: 643770 - DNA, 25 bp, Homo sapien
actccagatctgtttcgataaaggg

SEQ ID NO: 643771 - DNA, 25 bp, Homo sapien
agtgaattttgagagtgctgtgtgc

SEQ ID NO: 643772 - DNA, 25 bp, Homo sapien
tttcttgtaaagtgaattttgagag

SEQ ID NO: 643773 - DNA, 25 bp, Homo sapien
tggaagctgaacctcaggtagtagc

SEQ ID NO: 643774 - DNA, 25 bp, Homo sapien
ctgaacctcaggtagtagcccttac

SEQ ID NO: 643775 - DNA, 25 bp, Homo sapien
gctgtgtgctatagcatcactggaa

SEQ ID NO: 643776 - DNA, 25 bp, Homo sapien
aagctgaacctcaggtagtagccct

SEQ ID NO: 643777 - DNA, 25 bp, Homo sapien
gctgtgtgctatagcatcactggaa

SEQ ID NO: 643778 - DNA, 25 bp, Homo sapien
gctatagcatcactggaagccgaac

SEQ ID NO: 643779 - DNA, 25 bp, Homo sapien
gagtgctgtgtgctatagcatcact

SEQ ID NO: 643780 - DNA, 25 bp, Homo sapien
tgtgctatagcatcactggaagccg

SEQ ID NO: 643781 - DNA, 25 bp, Homo sapien
cattggaaggtgaacctcaggtagc

SEQ ID NO: 643782 - DNA, 25 bp, Homo sapien
gtctgcatttccaccttcgaagatt

SEQ ID NO: 643783 - DNA, 25 bp, Homo sapien
tcaaatgctaacatcgtggatgaca

SEQ ID NO: 643784 - DNA, 25 bp, Homo sapien
tgagcaatgatggtaggtttgacag

SEQ ID NO: 643785 - DNA, 25 bp, Homo sapien
tcgtggatgacaacatagagcctac

SEQ ID NO: 643786 - DNA, 25 bp, Homo sapien
tagagcctactgtaatccattatga

SEQ ID NO: 643787 - DNA, 25 bp, Homo sapien
caggagaaactgtacctgagctgta

SEQ ID NO: 643788 - DNA, 25 bp, Homo sapien
cacaggagaaactgtacctgagctg

SEQ ID NO: 643789 - DNA, 25 bp, Homo sapien
aggagaaactgtacctgagctgtac

SEQ ID NO: 643790 - DNA, 25 bp, Homo sapien
acaggagaaactgtacctgagctgt

SEQ ID NO: 643791 - DNA, 25 bp, Homo sapien
tcatatccagacacccccaatggat

SEQ ID NO: 643792 - DNA, 25 bp, Homo sapien
atccagacacccccaatggatacac

SEQ ID NO: 643793 - DNA, 25 bp, Homo sapien
tatccagacacccccaatggataca

SEQ ID NO: 643794 - DNA, 25 bp, Homo sapien
catatccagacacccccaatggata

SEQ ID NO: 643795 - DNA, 25 bp, Homo sapien
ggatccacagacgaaacagacagag

SEQ ID NO: 643796 - DNA, 25 bp, Homo sapien
gacagaggctatgttccattcaaga

SEQ ID NO: 643797 - DNA, 25 bp, Homo sapien
tttccacgacaaggaccaacctctg

SEQ ID NO: 643798 - DNA, 25 bp, Homo sapien
tgccagctacacaagaggcacgcac

SEQ ID NO: 643799 - DNA, 25 bp, Homo sapien
ttactaggactttttctgacaggac

SEQ ID NO: 643800 - DNA, 25 bp, Homo sapien
tttgattaacatctctgtctcagcc

SEQ ID NO: 643801 - DNA, 25 bp, Homo sapien
attactacttctgaaagagagggtt

SEQ ID NO: 643802 - DNA, 25 bp, Homo sapien
ttcacttagcgtaacttcctccaag

SEQ ID NO: 643803 - DNA, 25 bp, Homo sapien
gtatctttgaaagggtcatataatc

SEQ ID NO: 643804 - DNA, 25 bp, Homo sapien
tcctctacagaagtgatgaactgag

SEQ ID NO: 643805 - DNA, 25 bp, Homo sapien
aatcggcagttgaggatgagattgc

SEQ ID NO: 643806 - DNA, 25 bp, Homo sapien
agcatgattcgtggtcctcaatgga

SEQ ID NO: 643807 - DNA, 25 bp, Homo sapien
gtcataagcactccatttgttgtca

SEQ ID NO: 643808 - DNA, 25 bp, Homo sapien
agggagttgcaagagaggtcctcat

SEQ ID NO: 643809 - DNA, 25 bp, Homo sapien
tttccatttccctgtcataagcact

SEQ ID NO: 643810 - DNA, 25 bp, Homo sapien
tgttgtcagctttcattaaggacat

SEQ ID NO: 643811 - DNA, 25 bp, Homo sapien
tacgtgtgaaccgtgctctgctgca

SEQ ID NO: 643812 - DNA, 25 bp, Homo sapien
taaatggccaggtaaacatcccaga

SEQ ID NO: 643813 - DNA, 25 bp, Homo sapien
tccctgaagtggtccgtgaaccgat

SEQ ID NO: 643814 - DNA, 25 bp, Homo sapien
tgctgcaatctactagtgcctcggg

SEQ ID NO: 643815 - DNA, 25 bp, Homo sapien
gccctgaaagagtgcatgggtgaaa

SEQ ID NO: 643816 - DNA, 25 bp, Homo sapien
gacttagtggtgctagtggaacagc

SEQ ID NO: 643817 - DNA, 25 bp, Homo sapien
tgaggatttcaactagtgtagtaga

SEQ ID NO: 643818 - DNA, 25 bp, Homo sapien
tggaccttaaaaccatctggatgtg

SEQ ID NO: 643819 - DNA, 25 bp, Homo sapien
tgggtgaacaagcagcatgtgtcca

SEQ ID NO: 643820 - DNA, 25 bp, Homo sapien
ttgggataaacttgattgggtgaac

SEQ ID NO: 643821 - DNA, 25 bp, Homo sapien
attcctgagctgtatctttgatata

SEQ ID NO: 643822 - DNA, 25 bp, Homo sapien
gatgcttgaaaacagtccgatttac

SEQ ID NO: 643823 - DNA, 25 bp, Homo sapien
gaaacagccactgataccaaggtat

SEQ ID NO: 643824 - DNA, 25 bp, Homo sapien
taaatgaggacggtcatagaaggtt

SEQ ID NO: 643825 - DNA, 25 bp, Homo sapien
ctcacacaaagtaggaattctgtac

SEQ ID NO: 643826 - DNA, 25 bp, Homo sapien
tagaaggtttatcattaggtggcaa

SEQ ID NO: 643827 - DNA, 25 bp, Homo sapien
ctgccctcattgggtgctcttgccc

SEQ ID NO: 643828 - DNA, 25 bp, Homo sapien
cctcagaagggatcacccttgcact

SEQ ID NO: 643829 - DNA, 25 bp, Homo sapien
gcactgccctcattgggtgctcttg

SEQ ID NO: 643830 - DNA, 25 bp, Homo sapien
ctcagaagggatcacccttgcactg

SEQ ID NO: 643831 - DNA, 25 bp, Homo sapien
gtcccataagctgcggtctgatggc

SEQ ID NO: 643832 - DNA, 25 bp, Homo sapien
atgctgtcccataagctgcggtctg

SEQ ID NO: 643833 - DNA, 25 bp, Homo sapien
gccagaggtaagactttctctgtgc

SEQ ID NO: 643834 - DNA, 25 bp, Homo sapien
ctgccagaggtaagactttctctgt

SEQ ID NO: 643835 - DNA, 25 bp, Homo sapien
tcttccactctaaagggccctcttg

SEQ ID NO: 643836 - DNA, 25 bp, Homo sapien
tctgacgtagaggttacttggctaa

SEQ ID NO: 643837 - DNA, 25 bp, Homo sapien
gcagcaagattaggctgagtccttc

SEQ ID NO: 643838 - DNA, 25 bp, Homo sapien
gaggttacttggctaagatcaaggt

SEQ ID NO: 643839 - DNA, 25 bp, Homo sapien
tgttgattctccactcattgtagtg

SEQ ID NO: 643840 - DNA, 25 bp, Homo sapien
aagttctgagagcactgttgattct

SEQ ID NO: 643841 - DNA, 25 bp, Homo sapien
caggagatgtgatgcttctggtcca

SEQ ID NO: 643842 - DNA, 25 bp, Homo sapien
attttgagtagccacttagtgcctg

SEQ ID NO: 643843 - DNA, 25 bp, Homo sapien
taaagatccacaagtcagctttgaa

SEQ ID NO: 643844 - DNA, 25 bp, Homo sapien
aggaagggtggcatagcaacaatgg

SEQ ID NO: 643845 - DNA, 25 bp, Homo sapien
catctttgccgtccattggatggag

SEQ ID NO: 643846 - DNA, 25 bp, Homo sapien
actacactctggtttacatattcca

SEQ ID NO: 643847 - DNA, 25 bp, Homo sapien
agggattaaatgtcctgtgctccat

SEQ ID NO: 643848 - DNA, 25 bp, Homo sapien
taaatgtcctgtgctccataggtgc

SEQ ID NO: 643849 - DNA, 25 bp, Homo sapien
aatgtcctgtgctccataggtgcat

SEQ ID NO: 643850 - DNA, 25 bp, Homo sapien
ggattaaatgtcctgtgctccatag

SEQ ID NO: 643851 - DNA, 25 bp, Homo sapien
gatacctaacagattatacatacta

SEQ ID NO: 643852 - DNA, 25 bp, Homo sapien
catatcgtcagcagtcagggacagt

SEQ ID NO: 643853 - DNA, 25 bp, Homo sapien
gtaaacaatcatatcgtcagcagtc

SEQ ID NO: 643854 - DNA, 25 bp, Homo sapien
tactgaaaaccttataatagtatta

SEQ ID NO: 643855 - DNA, 25 bp, Homo sapien
gaacccctgtgcaagttatcactgg

SEQ ID NO: 643856 - DNA, 25 bp, Homo sapien
ttagtgcactctggaacatgtcgtc

SEQ ID NO: 643857 - DNA, 25 bp, Homo sapien
tgtcgtcccagcacaactgtacttc

SEQ ID NO: 643858 - DNA, 25 bp, Homo sapien
taaagctccatgatactgagtagca

SEQ ID NO: 643859 - DNA, 25 bp, Homo sapien
gtcatcagaaggaagcggcaaaaag

SEQ ID NO: 643860 - DNA, 25 bp, Homo sapien
agaacaagcctccaacacctacagt

SEQ ID NO: 643861 - DNA, 25 bp, Homo sapien
tagctcccatgtaagatacactaag

SEQ ID NO: 643862 - DNA, 25 bp, Homo sapien
catttggtatccacagctgatctgg

SEQ ID NO: 643863 - DNA, 25 bp, Homo sapien
ttatcctctagtcctgtaagtcagg

SEQ ID NO: 643864 - DNA, 25 bp, Homo sapien
ggtttcactgggctacactccaggt

SEQ ID NO: 643865 - DNA, 25 bp, Homo sapien
ctaacatattcatggagcagagaca

SEQ ID NO: 643866 - DNA, 25 bp, Homo sapien
taactatagaactgagcactggatg

SEQ ID NO: 643867 - DNA, 25 bp, Homo sapien
gatggatgacgaagcctggaaatca

SEQ ID NO: 643868 - DNA, 25 bp, Homo sapien
tcagagctatataaccaccctgtgc

SEQ ID NO: 643869 - DNA, 25 bp, Homo sapien
taatttcgaaagagaggtcaaagag

SEQ ID NO: 643870 - DNA, 25 bp, Homo sapien
gccaaggtttgccttagagtggatt

SEQ ID NO: 643871 - DNA, 25 bp, Homo sapien
ggtaaacaggtcatcgctgcactgc

SEQ ID NO: 643872 - DNA, 25 bp, Homo sapien
taaacaggtcatcgctgcactgctt

SEQ ID NO: 643873 - DNA, 25 bp, Homo sapien
acaggtcatcgctgcactgcttcat

SEQ ID NO: 643874 - DNA, 25 bp, Homo sapien
tcaggtaaacaggtcatcgctgcac

SEQ ID NO: 643875 - DNA, 25 bp, Homo sapien
agacttctggcaatatctggtgttc

SEQ ID NO: 643876 - DNA, 25 bp, Homo sapien
gacttctggcaatatctggtgttca

SEQ ID NO: 643877 - DNA, 25 bp, Homo sapien
acagacttctggcaatatctggtgt

SEQ ID NO: 643878 - DNA, 25 bp, Homo sapien
tggacagacttctggcaatatctgg

SEQ ID NO: 643879 - DNA, 25 bp, Homo sapien
gccaaagggagctaaaaatcagcca

SEQ ID NO: 643880 - DNA, 25 bp, Homo sapien
gactgatattttctagccaaaggga

SEQ ID NO: 643881 - DNA, 25 bp, Homo sapien
ttcagtacagaatgccctggcaatg

SEQ ID NO: 643882 - DNA, 25 bp, Homo sapien
tctgagcccgatctttacacacatg

SEQ ID NO: 643883 - DNA, 25 bp, Homo sapien
gaaggtagcctagctgtttcattgg

SEQ ID NO: 643884 - DNA, 25 bp, Homo sapien
gtagcctagctgtttcattggcccc

SEQ ID NO: 643885 - DNA, 25 bp, Homo sapien
ctattactgctgcttaaattcacag

SEQ ID NO: 643886 - DNA, 25 bp, Homo sapien
tgcttaaattcacagcaccgtggac

SEQ ID NO: 643887 - DNA, 25 bp, Homo sapien
tttccaggtgaagtatctgaaaggt

SEQ ID NO: 643888 - DNA, 25 bp, Homo sapien
ttccaggtgaagtatctgaaaggtc

SEQ ID NO: 643889 - DNA, 25 bp, Homo sapien
tccaggtgaagtatctgaaaggtct

SEQ ID NO: 643890 - DNA, 25 bp, Homo sapien
ttttccaggtgaagtatctgaaagg

SEQ ID NO: 643891 - DNA, 25 bp, Homo sapien
gctaaatattggaatcagaggagct

SEQ ID NO: 643892 - DNA, 25 bp, Homo sapien
aaaagaaagctctcaatctatagcc

SEQ ID NO: 643893 - DNA, 25 bp, Homo sapien
tttagtgacactagcaagattctca

SEQ ID NO: 643894 - DNA, 25 bp, Homo sapien
tggtctcagccccaaagatcttgat

SEQ ID NO: 643895 - DNA, 25 bp, Homo sapien
ccagcgcaatgtggttaagtctcca

SEQ ID NO: 643896 - DNA, 25 bp, Homo sapien
ctttagacaccagcgcaatgtggtt

SEQ ID NO: 643897 - DNA, 25 bp, Homo sapien
tagacaccagcgcaatgtggttaag

SEQ ID NO: 643898 - DNA, 25 bp, Homo sapien
agactttagacaccagcgcaatgtg

SEQ ID NO: 643899 - DNA, 25 bp, Homo sapien
tttctggcaacttagcaaccctcat

SEQ ID NO: 643900 - DNA, 25 bp, Homo sapien
tgactcctccaaccttcctttctgg

SEQ ID NO: 643901 - DNA, 25 bp, Homo sapien
ctcgtccttgactcctccaaccttc

SEQ ID NO: 643902 - DNA, 25 bp, Homo sapien
tcctttctggcaacttagcaaccct

SEQ ID NO: 643903 - DNA, 25 bp, Homo sapien
gactatttgcactcaaagtctgggt

SEQ ID NO: 643904 - DNA, 25 bp, Homo sapien
tctagagaatacaaagacccacatg

SEQ ID NO: 643905 - DNA, 25 bp, Homo sapien
catttggctgcatgagcaagtcggc

SEQ ID NO: 643906 - DNA, 25 bp, Homo sapien
cagacagtgtgctgtttgaattgac

SEQ ID NO: 643907 - DNA, 25 bp, Homo sapien
gaaaggcgttaatcataaagaagca

SEQ ID NO: 643908 - DNA, 25 bp, Homo sapien
tacagactgtctgaaattgaagaag

SEQ ID NO: 643909 - DNA, 25 bp, Homo sapien
gcaagaatggtcaaaatcgaatgct

SEQ ID NO: 643910 - DNA, 25 bp, Homo sapien
tagtccagagatagaataaagttga

SEQ ID NO: 643911 - DNA, 25 bp, Homo sapien
ccatcttgcatcattgaaactacta

SEQ ID NO: 643912 - DNA, 25 bp, Homo sapien
gccttgttctttgtcgaatgtgtga

SEQ ID NO: 643913 - DNA, 25 bp, Homo sapien
gaatgtgtgaaattccgtactgtgg

SEQ ID NO: 643914 - DNA, 25 bp, Homo sapien
cagttttgtgcctttatgtatttgc

SEQ ID NO: 643915 - DNA, 25 bp, Homo sapien
tggccatgtaaaccaattttcaaag

SEQ ID NO: 643916 - DNA, 25 bp, Homo sapien
aaagttctaatgacatagccatgtg

SEQ ID NO: 643917 - DNA, 25 bp, Homo sapien
cactactgagaatagcatggttttg

SEQ ID NO: 643918 - DNA, 25 bp, Homo sapien
gctgtgtattaaattagactgtgtc

SEQ ID NO: 643919 - DNA, 25 bp, Homo sapien
agccttcatttcctaagggagctgc

SEQ ID NO: 643920 - DNA, 25 bp, Homo sapien
gagctgctggacttagtttataaac

SEQ ID NO: 643921 - DNA, 25 bp, Homo sapien
aatttctctagcaactttcagcctg

SEQ ID NO: 643922 - DNA, 25 bp, Homo sapien
ttcctactgctgttaatgacaccaa

SEQ ID NO: 643923 - DNA, 25 bp, Homo sapien
tctgtggatctttggacagttgtat

SEQ ID NO: 643924 - DNA, 25 bp, Homo sapien
tggatctttggacagttgtatgctg

SEQ ID NO: 643925 - DNA, 25 bp, Homo sapien
tgtggatctttggacagttgtatgc

SEQ ID NO: 643926 - DNA, 25 bp, Homo sapien
agtgctgtgcctgacgcctcctttc

SEQ ID NO: 643927 - DNA, 25 bp, Homo sapien
tcactctccatcgttccttttacag

SEQ ID NO: 643928 - DNA, 25 bp, Homo sapien
actctccatcgttccttttacagat

SEQ ID NO: 643929 - DNA, 25 bp, Homo sapien
cactctccatcgttccttttacaga

SEQ ID NO: 643930 - DNA, 25 bp, Homo sapien
ctctccatcgttccttttacagatc

SEQ ID NO: 643931 - DNA, 25 bp, Homo sapien
aagtgaacattgcagttgtagccca

SEQ ID NO: 643932 - DNA, 25 bp, Homo sapien
gaacattgcagttgtagcccacaga

SEQ ID NO: 643933 - DNA, 25 bp, Homo sapien
ttgtagcccacagaaagcatatccg

SEQ ID NO: 643934 - DNA, 25 bp, Homo sapien
gaaagcatatccgatcccagagaca

SEQ ID NO: 643935 - DNA, 25 bp, Homo sapien
catgaaaagcttctggggtgcagtc

SEQ ID NO: 643936 - DNA, 25 bp, Homo sapien
tattttagcatagtcatgaaaagct

SEQ ID NO: 643937 - DNA, 25 bp, Homo sapien
gtcatgaaaagcttctggggtgcag

SEQ ID NO: 643938 - DNA, 25 bp, Homo sapien
cttattttagcatagtcatgaaaag

SEQ ID NO: 643939 - DNA, 25 bp, Homo sapien
cttatttgatgaagatttatcctca

SEQ ID NO: 643940 - DNA, 25 bp, Homo sapien
catagggaacccaaatatagagctt

SEQ ID NO: 643941 - DNA, 25 bp, Homo sapien
tctggacaattgcacgtggatggga

SEQ ID NO: 643942 - DNA, 25 bp, Homo sapien
cgtggatgggacatgccttattcct

SEQ ID NO: 643943 - DNA, 25 bp, Homo sapien
taaaacatccacgttgtgcccagta

SEQ ID NO: 643944 - DNA, 25 bp, Homo sapien
caaggaggagcttggtaggtgtccc

SEQ ID NO: 643945 - DNA, 25 bp, Homo sapien
tgatgcgcaaggtcaataaaacatc

SEQ ID NO: 643946 - DNA, 25 bp, Homo sapien
tgcccagtatacctggagtccttgc

SEQ ID NO: 643947 - DNA, 25 bp, Homo sapien
agggcccaccaatcaggatagacca

SEQ ID NO: 643948 - DNA, 25 bp, Homo sapien
tgcacatcactagttctgccatcca

SEQ ID NO: 643949 - DNA, 25 bp, Homo sapien
tcagcagctgagtatgcatctccta

SEQ ID NO: 643950 - DNA, 25 bp, Homo sapien
tatgcatctcctagcgggcaacagg

SEQ ID NO: 643951 - DNA, 25 bp, Homo sapien
cacagagagtatggggactttttgg

SEQ ID NO: 643952 - DNA, 25 bp, Homo sapien
actttttggccaaattgggcagatg

SEQ ID NO: 643953 - DNA, 25 bp, Homo sapien
tcacagagagtatggggactttttg

SEQ ID NO: 643954 - DNA, 25 bp, Homo sapien
ccaaattgggcagatgcaggctcca

SEQ ID NO: 643955 - DNA, 25 bp, Homo sapien
ccgagggcaggacgatcacattaga

SEQ ID NO: 643956 - DNA, 25 bp, Homo sapien
tcacaagcccatctacaaggtgctc

SEQ ID NO: 643957 - DNA, 25 bp, Homo sapien
aatctgtgtaggcagcaggccggaa

SEQ ID NO: 643958 - DNA, 25 bp, Homo sapien
ggccggaagtggtgacagccaccat

SEQ ID NO: 643959 - DNA, 25 bp, Homo sapien
actgcgagctcgtccttaggacccg

SEQ ID NO: 643960 - DNA, 25 bp, Homo sapien
ctccaggggcgagcggagtgactcg

SEQ ID NO: 643961 - DNA, 25 bp, Homo sapien
tcttggcgccgctttcctcaggagc

SEQ ID NO: 643962 - DNA, 25 bp, Homo sapien
aggcagccatcttggcgccgctttc

SEQ ID NO: 643963 - DNA, 25 bp, Homo sapien
tctggcccagcagggaatgggcgca

SEQ ID NO: 643964 - DNA, 25 bp, Homo sapien
tagtaacgagcgaggcatagaggct

SEQ ID NO: 643965 - DNA, 25 bp, Homo sapien
cagggaagggagtggtagtaacgag

SEQ ID NO: 643966 - DNA, 25 bp, Homo sapien
ctttttaccaggcagtggcgtggcc

SEQ ID NO: 643967 - DNA, 25 bp, Homo sapien
taagctgtacactacctcctactgc

SEQ ID NO: 643968 - DNA, 25 bp, Homo sapien
tgatcccaggtaatgaatcactacc

SEQ ID NO: 643969 - DNA, 25 bp, Homo sapien
taagggaacttgtggagaactcgtc

SEQ ID NO: 643970 - DNA, 25 bp, Homo sapien
tcttaaggacccctggagagatacc

SEQ ID NO: 643971 - DNA, 25 bp, Homo sapien
caatgggaatgaagcgcaacaaaga

SEQ ID NO: 643972 - DNA, 25 bp, Homo sapien
tccatcacctcaatgggaatgaagc

SEQ ID NO: 643973 - DNA, 25 bp, Homo sapien
gaatgaagcgcaacaaagatttgtc

SEQ ID NO: 643974 - DNA, 25 bp, Homo sapien
tcacctcaatgggaatgaagcgcaa

SEQ ID NO: 643975 - DNA, 25 bp, Homo sapien
tgttctacataccactaaagagtca

SEQ ID NO: 643976 - DNA, 25 bp, Homo sapien
tatgggtctaagttccagggcagat

SEQ ID NO: 643977 - DNA, 25 bp, Homo sapien
ccaattcccaagaccggtgttctgt

SEQ ID NO: 643978 - DNA, 25 bp, Homo sapien
aggaatccgaagacctagccatggg

SEQ ID NO: 643979 - DNA, 25 bp, Homo sapien
gcagtaattcctggttccgggtcca

SEQ ID NO: 643980 - DNA, 25 bp, Homo sapien
ggaaccgcactgctatatataaacg

SEQ ID NO: 643981 - DNA, 25 bp, Homo sapien
tggaatatgctcaacggcaaagctg

SEQ ID NO: 643982 - DNA, 25 bp, Homo sapien
tccattaacctgtaggagtccagag

SEQ ID NO: 643983 - DNA, 25 bp, Homo sapien
tattctctaaatatgcaatcaaaat

SEQ ID NO: 643984 - DNA, 25 bp, Homo sapien
aaatcaacaatcttattcaatctta

SEQ ID NO: 643985 - DNA, 25 bp, Homo sapien
attttatgtattaccatacgttttg

SEQ ID NO: 643986 - DNA, 25 bp, Homo sapien
tcaaaaatcagtttcttgatacaat

SEQ ID NO: 643987 - DNA, 25 bp, Homo sapien
taattaatctgccaaagtgttaaaa

SEQ ID NO: 643988 - DNA, 25 bp, Homo sapien
taaattaattaatctgccaaagtgt

SEQ ID NO: 643989 - DNA, 25 bp, Homo sapien
aattaattaatctgccaaagtgtta

SEQ ID NO: 643990 - DNA, 25 bp, Homo sapien
attaatctgccaaagtgttaaaatc

SEQ ID NO: 643991 - DNA, 25 bp, Homo sapien
agcttcccctccacattggttgagc

SEQ ID NO: 643992 - DNA, 25 bp, Homo sapien
cctccacattggttgagcatcgcca

SEQ ID NO: 643993 - DNA, 25 bp, Homo sapien
ctccacattggttgagcatcgccat

SEQ ID NO: 643994 - DNA, 25 bp, Homo sapien
tcccctccacattggttgagcatcg

SEQ ID NO: 643995 - DNA, 25 bp, Homo sapien
gcttcccaaggctctagataaatct

SEQ ID NO: 643996 - DNA, 25 bp, Homo sapien
agaaatttctccagatgcaatgctg

SEQ ID NO: 643997 - DNA, 25 bp, Homo sapien
caaggctctagataaatctccaaga

SEQ ID NO: 643998 - DNA, 25 bp, Homo sapien
tcacacaaactatccacagcagctg

SEQ ID NO: 643999 - DNA, 25 bp, Homo sapien
gcatgtggcagggacacttggcaag

SEQ ID NO: 644000 - DNA, 25 bp, Homo sapien
ttggcaaggtctacctgaagagact

SEQ ID NO: 644001 - DNA, 25 bp, Homo sapien
tctctgttctgccaaagtgtaaggt

SEQ ID NO: 644002 - DNA, 25 bp, Homo sapien
acacttggcaaggtctacctgaaga

SEQ ID NO: 644003 - DNA, 25 bp, Homo sapien
aatctgtcatattcaggtgagtgcc

SEQ ID NO: 644004 - DNA, 25 bp, Homo sapien
tattcaggtgagtgccaaacaccag

SEQ ID NO: 644005 - DNA, 25 bp, Homo sapien
gtcatagttaggtagtatttatcca

SEQ ID NO: 644006 - DNA, 25 bp, Homo sapien
gccttgcagcaatctgtcatattca

SEQ ID NO: 644007 - DNA, 25 bp, Homo sapien
aaagcaaacctccttctggcctaga

SEQ ID NO: 644008 - DNA, 25 bp, Homo sapien
tctgggcgtaggctgaactaacgtt

SEQ ID NO: 644009 - DNA, 25 bp, Homo sapien
ggttaatcagatgctcctacttgga

SEQ ID NO: 644010 - DNA, 25 bp, Homo sapien
cttggaactgaagccgccattgcaa

SEQ ID NO: 644011 - DNA, 25 bp, Homo sapien
ttgtgaacagctttccccatgagta

SEQ ID NO: 644012 - DNA, 25 bp, Homo sapien
tgtgaacagctttccccatgagtac

SEQ ID NO: 644013 - DNA, 25 bp, Homo sapien
attgtgaacagctttccccatgagt

SEQ ID NO: 644014 - DNA, 25 bp, Homo sapien
tgccctagatctgcactcaaggagt

SEQ ID NO: 644015 - DNA, 25 bp, Homo sapien
ggttgtggggactttcttgctagac

SEQ ID NO: 644016 - DNA, 25 bp, Homo sapien
cattttcctcatgccctagatctgc

SEQ ID NO: 644017 - DNA, 25 bp, Homo sapien
agaccctgattctagcaagaagcag

SEQ ID NO: 644018 - DNA, 25 bp, Homo sapien
tgcacattggctattaccagattcc

SEQ ID NO: 644019 - DNA, 25 bp, Homo sapien
gtctgcttgtctggatgtctgcaca

SEQ ID NO: 644020 - DNA, 25 bp, Homo sapien
tcaaagtcgcagtggagtccatggt

SEQ ID NO: 644021 - DNA, 25 bp, Homo sapien
cccaggagcatccacaatgttcagc

SEQ ID NO: 644022 - DNA, 25 bp, Homo sapien
atctttgccttgagtcattttatcc

SEQ ID NO: 644023 - DNA, 25 bp, Homo sapien
tatgggggttcagtaagaaggctac

SEQ ID NO: 644024 - DNA, 25 bp, Homo sapien
actgaacagttttactcaaaaccat

SEQ ID NO: 644025 - DNA, 25 bp, Homo sapien
ggctacccacttactcttatctttg

SEQ ID NO: 644026 - DNA, 25 bp, Homo sapien
tatttgcatcacctatactaggctg

SEQ ID NO: 644027 - DNA, 25 bp, Homo sapien
cctactttagtcctcctgttgaaca

SEQ ID NO: 644028 - DNA, 25 bp, Homo sapien
gatttccactccagtccagattggg

SEQ ID NO: 644029 - DNA, 25 bp, Homo sapien
tacaggcctttagagacttcataca

SEQ ID NO: 644030 - DNA, 25 bp, Homo sapien
ctcttttgcattgttaatatcagaa

SEQ ID NO: 644031 - DNA, 25 bp, Homo sapien
cttttttgtcatcattccgttttgc

SEQ ID NO: 644032 - DNA, 25 bp, Homo sapien
tggaatagcattgctgtcttttttg

SEQ ID NO: 644033 - DNA, 25 bp, Homo sapien
gtcatcattccgttttgcattgtta

SEQ ID NO: 644034 - DNA, 25 bp, Homo sapien
ttgtcacatctactagcttagtttt

SEQ ID NO: 644035 - DNA, 25 bp, Homo sapien
gtcacatctactagcttagttttag

SEQ ID NO: 644036 - DNA, 25 bp, Homo sapien
gaattttgtttttgtcacatctact

SEQ ID NO: 644037 - DNA, 25 bp, Homo sapien
tgtcacatctactagcttagtttta

SEQ ID NO: 644038 - DNA, 25 bp, Homo sapien
catcactatactatattggcagtga

SEQ ID NO: 644039 - DNA, 25 bp, Homo sapien
tgaaggggaccacagtactgctggt

SEQ ID NO: 644040 - DNA, 25 bp, Homo sapien
actatactatattggcagtgaaggg

SEQ ID NO: 644041 - DNA, 25 bp, Homo sapien
gctggttgacatatgaagtggtgaa

SEQ ID NO: 644042 - DNA, 25 bp, Homo sapien
ttattctgaaatatggactggctct

SEQ ID NO: 644043 - DNA, 25 bp, Homo sapien
tagagccatgcgttcagggagtgcc

SEQ ID NO: 644044 - DNA, 25 bp, Homo sapien
gggacttggttctgactagagccat

SEQ ID NO: 644045 - DNA, 25 bp, Homo sapien
gaaatatggactggctctcctgttc

SEQ ID NO: 644046 - DNA, 25 bp, Homo sapien
tgcaaggtcgccagacagttaggag

SEQ ID NO: 644047 - DNA, 25 bp, Homo sapien
tttcctgaatttgggggcattcgtc

SEQ ID NO: 644048 - DNA, 25 bp, Homo sapien
tttgggggcattcgtcattgtgtga

SEQ ID NO: 644049 - DNA, 25 bp, Homo sapien
atttgggggcattcgtcattgtgtg

SEQ ID NO: 644050 - DNA, 25 bp, Homo sapien
agtaggcacactcatgggacttcag

SEQ ID NO: 644051 - DNA, 25 bp, Homo sapien
gtaggcacactcatgggacttcagg

SEQ ID NO: 644052 - DNA, 25 bp, Homo sapien
acactcatgggacttcaggtttgtc

SEQ ID NO: 644053 - DNA, 25 bp, Homo sapien
tggcgagatgacttagagaggcaat

SEQ ID NO: 644054 - DNA, 25 bp, Homo sapien
ctggcgagatgacttagagaggcaa

SEQ ID NO: 644055 - DNA, 25 bp, Homo sapien
cttagagaggcaatggtttggaatt

SEQ ID NO: 644056 - DNA, 25 bp, Homo sapien
agatgacttagagaggcaatggttt

SEQ ID NO: 644057 - DNA, 25 bp, Homo sapien
tcctactgcctttgttcttcttcat

SEQ ID NO: 644058 - DNA, 25 bp, Homo sapien
tgtgggctctcaatggactgcttgg

SEQ ID NO: 644059 - DNA, 25 bp, Homo sapien
gatttccgtcatcaccatgtgggct

SEQ ID NO: 644060 - DNA, 25 bp, Homo sapien
gatgattcacctacatgcctggcaa

SEQ ID NO: 644061 - DNA, 25 bp, Homo sapien
taaggtctggacatgggaactggtc

SEQ ID NO: 644062 - DNA, 25 bp, Homo sapien
catagaattggtgcagacatctgcc

SEQ ID NO: 644063 - DNA, 25 bp, Homo sapien
tcagtatcacagagctaagactagg

SEQ ID NO: 644064 - DNA, 25 bp, Homo sapien
tacagctcaggatatgtgttgccaa

SEQ ID NO: 644065 - DNA, 25 bp, Homo sapien
ccaccagtagcatgtgagagcatca

SEQ ID NO: 644066 - DNA, 25 bp, Homo sapien
ttgctctccttatgtgaaggcccat

SEQ ID NO: 644067 - DNA, 25 bp, Homo sapien
gcatctgtgctaattattctgcccc

SEQ ID NO: 644068 - DNA, 25 bp, Homo sapien
cagccagtctgcctcgggcatctgt

SEQ ID NO: 644069 - DNA, 25 bp, Homo sapien
ggcactgctctaagaaggatccctc

SEQ ID NO: 644070 - DNA, 25 bp, Homo sapien
ttgcttatgttgttctcatagtctg

SEQ ID NO: 644071 - DNA, 25 bp, Homo sapien
tgtctagtgtagctattctgagagt

SEQ ID NO: 644072 - DNA, 25 bp, Homo sapien
gtgtagctattctgagagttttgac

SEQ ID NO: 644073 - DNA, 25 bp, Homo sapien
tttatgatgtctagtgtagctattc

SEQ ID NO: 644074 - DNA, 25 bp, Homo sapien
gatgtctagtgtagctattctgaga

SEQ ID NO: 644075 - DNA, 25 bp, Homo sapien
tatgatgggagccttatggctcagc

SEQ ID NO: 644076 - DNA, 25 bp, Homo sapien
gccttgttggcaaagtgatttaatt

SEQ ID NO: 644077 - DNA, 25 bp, Homo sapien
tcagctgttgccataaaaatcttcc

SEQ ID NO: 644078 - DNA, 25 bp, Homo sapien
ctttgtgagagcaaagctgtgcagg

SEQ ID NO: 644079 - DNA, 25 bp, Homo sapien
cctcactgctataagtcaaatccct

SEQ ID NO: 644080 - DNA, 25 bp, Homo sapien
cttgctgaagctttcctcactgcta

SEQ ID NO: 644081 - DNA, 25 bp, Homo sapien
tgctataagtcaaatccctgtccat

SEQ ID NO: 644082 - DNA, 25 bp, Homo sapien
ctttcctcactgctataagtcaaat

SEQ ID NO: 644083 - DNA, 25 bp, Homo sapien
ttcttgttaatcactagtccttcct

SEQ ID NO: 644084 - DNA, 25 bp, Homo sapien
cttgttaatcactagtccttccttc

SEQ ID NO: 644085 - DNA, 25 bp, Homo sapien
tcttgttaatcactagtccttcctt

SEQ ID NO: 644086 - DNA, 25 bp, Homo sapien
ggggcttcctggtgtagctctccct

SEQ ID NO: 644087 - DNA, 25 bp, Homo sapien
ttctccagaacaagatggagatgca

SEQ ID NO: 644088 - DNA, 25 bp, Homo sapien
gaagtgatgagggctggtgaggctt

SEQ ID NO: 644089 - DNA, 25 bp, Homo sapien
gaggcttctccagaacaagatggag

SEQ ID NO: 644090 - DNA, 25 bp, Homo sapien
tccagaacaagatggagatgcaact

SEQ ID NO: 644091 - DNA, 25 bp, Homo sapien
caggtgctctatttgagaagccatc

SEQ ID NO: 644092 - DNA, 25 bp, Homo sapien
tggtggacactgtgtcgtgatgtca

SEQ ID NO: 644093 - DNA, 25 bp, Homo sapien
acactgtgtcgtgatgtcattgcag

SEQ ID NO: 644094 - DNA, 25 bp, Homo sapien
tcattgcaggtgctctatttgagaa

SEQ ID NO: 644095 - DNA, 25 bp, Homo sapien
acgctgagacctcggtgccctggcc

SEQ ID NO: 644096 - DNA, 25 bp, Homo sapien
ggtgccctggccacagtgacccttt

SEQ ID NO: 644097 - DNA, 25 bp, Homo sapien
tcggtgccctggccacagtgaccct

SEQ ID NO: 644098 - DNA, 25 bp, Homo sapien
agacgctgagacctcggtgccctgg

SEQ ID NO: 644099 - DNA, 25 bp, Homo sapien
acattctgggttggttaagtgttca

SEQ ID NO: 644100 - DNA, 25 bp, Homo sapien
agtgacattctgggttggttaagtg

SEQ ID NO: 644101 - DNA, 25 bp, Homo sapien
gacattctgggttggttaagtgttc

SEQ ID NO: 644102 - DNA, 25 bp, Homo sapien
tgacattctgggttggttaagtgtt

SEQ ID NO: 644103 - DNA, 25 bp, Homo sapien
actgttcattgtggagggctgtcat

SEQ ID NO: 644104 - DNA, 25 bp, Homo sapien
acattctgggttggttaactgttca

SEQ ID NO: 644105 - DNA, 25 bp, Homo sapien
tgttcattgtggagggctgtcatat

SEQ ID NO: 644106 - DNA, 25 bp, Homo sapien
ctgttcattgtggagggctgtcata

SEQ ID NO: 644107 - DNA, 25 bp, Homo sapien
gagggtgaactcaggtaattttagc

SEQ ID NO: 644108 - DNA, 25 bp, Homo sapien
gggtgaactcaggtaattttagcta

SEQ ID NO: 644109 - DNA, 25 bp, Homo sapien
ctggagggtgaactcaggtaatttt

SEQ ID NO: 644110 - DNA, 25 bp, Homo sapien
tggagggtgaactcaggtaatttta

SEQ ID NO: 644111 - DNA, 25 bp, Homo sapien
tggtggcacgtggtgccgtgctgcc

SEQ ID NO: 644112 - DNA, 25 bp, Homo sapien
ttatacaactgctaagcatggtttc

SEQ ID NO: 644113 - DNA, 25 bp, Homo sapien
tggctggtggcacgtggtgccgtgc

SEQ ID NO: 644114 - DNA, 25 bp, Homo sapien
ctaagcatggtttctcagggtctgt

SEQ ID NO: 644115 - DNA, 25 bp, Homo sapien
gtattagcattgttaattgttctac

SEQ ID NO: 644116 - DNA, 25 bp, Homo sapien
tgttctaccttcagtttaccttcaa

SEQ ID NO: 644117 - DNA, 25 bp, Homo sapien
aaaaggttgtattagcattgttaat

SEQ ID NO: 644118 - DNA, 25 bp, Homo sapien
agcattgttaattgttctaccttca

SEQ ID NO: 644119 - DNA, 25 bp, Homo sapien
ctttgtggtggcaatagtaagaact

SEQ ID NO: 644120 - DNA, 25 bp, Homo sapien
gaacttattccaaagataggatttc

SEQ ID NO: 644121 - DNA, 25 bp, Homo sapien
tagccgttgcccttagattttgtag

SEQ ID NO: 644122 - DNA, 25 bp, Homo sapien
gcttgtgagtatgctattgaagtca

SEQ ID NO: 644123 - DNA, 25 bp, Homo sapien
tatggattttttcccctgcattggg

SEQ ID NO: 644124 - DNA, 25 bp, Homo sapien
tgttccacacactcccatgttaaat

SEQ ID NO: 644125 - DNA, 25 bp, Homo sapien
actgaaatatggattttttcccctg

SEQ ID NO: 644126 - DNA, 25 bp, Homo sapien
ctcccatgttaaattgggcattctg

SEQ ID NO: 644127 - DNA, 25 bp, Homo sapien
cctgaggttactgcctggtcagtgg

SEQ ID NO: 644128 - DNA, 25 bp, Homo sapien
cctttgccaacagcctgaggttact

SEQ ID NO: 644129 - DNA, 25 bp, Homo sapien
tcatggcccatgaacatggtttcgg

SEQ ID NO: 644130 - DNA, 25 bp, Homo sapien
catggtttcggaaagaaatagtcct

SEQ ID NO: 644131 - DNA, 25 bp, Homo sapien
cactggtgaacagcatagcctttga

SEQ ID NO: 644132 - DNA, 25 bp, Homo sapien
acactggtgaacagcatagcctttg

SEQ ID NO: 644133 - DNA, 25 bp, Homo sapien
gaacactggtgaacagcatagcctt

SEQ ID NO: 644134 - DNA, 25 bp, Homo sapien
aggaacactggtgaacagcatagcc

SEQ ID NO: 644135 - DNA, 25 bp, Homo sapien
tccctttcattctctctgtaaccat

SEQ ID NO: 644136 - DNA, 25 bp, Homo sapien
cttctgcccagttttccctttcatt

SEQ ID NO: 644137 - DNA, 25 bp, Homo sapien
ttctgcccagttttccctttcattc

SEQ ID NO: 644138 - DNA, 25 bp, Homo sapien
ttttccctttcattctctctgtaac

SEQ ID NO: 644139 - DNA, 25 bp, Homo sapien
tcagcaaatctgtctgtagatcatt

SEQ ID NO: 644140 - DNA, 25 bp, Homo sapien
tgaaatcagcaaatctgtctgtaga

SEQ ID NO: 644141 - DNA, 25 bp, Homo sapien
gcaaatctgtctgtagatcattttc

SEQ ID NO: 644142 - DNA, 25 bp, Homo sapien
atctgtctgtagatcattttctttt

SEQ ID NO: 644143 - DNA, 25 bp, Homo sapien
cagccacttgtctcccatgggttgg

SEQ ID NO: 644144 - DNA, 25 bp, Homo sapien
tgcaggccagccacttgtctcccat

SEQ ID NO: 644145 - DNA, 25 bp, Homo sapien
ggccagccacttgtctcccatgggt

SEQ ID NO: 644146 - DNA, 25 bp, Homo sapien
ttctgcaggccagccacttgtctcc

SEQ ID NO: 644147 - DNA, 25 bp, Homo sapien
gccattgagcaaggtgggtaagcat

SEQ ID NO: 644148 - DNA, 25 bp, Homo sapien
tgcccaaaaggcactgcttgtttta

SEQ ID NO: 644149 - DNA, 25 bp, Homo sapien
gcccaaaaggcactgcttgttttag

SEQ ID NO: 644150 - DNA, 25 bp, Homo sapien
gttttagccattgagcaaggtgggt

SEQ ID NO: 644151 - DNA, 25 bp, Homo sapien
ctgcctgttttctgaagtgttctat

SEQ ID NO: 644152 - DNA, 25 bp, Homo sapien
gcctgttttctgaagtgttctatga

SEQ ID NO: 644153 - DNA, 25 bp, Homo sapien
gttttctgaagtgttctatgattgt

SEQ ID NO: 644154 - DNA, 25 bp, Homo sapien
tctgaagtgttctatgattgttcat

SEQ ID NO: 644155 - DNA, 25 bp, Homo sapien
gcatcagaaactgtgtttctcttga

SEQ ID NO: 644156 - DNA, 25 bp, Homo sapien
tttgtttctgagcatcagaaactgt

SEQ ID NO: 644157 - DNA, 25 bp, Homo sapien
cagaaactgtgtttctcttgagaat

SEQ ID NO: 644158 - DNA, 25 bp, Homo sapien
tctgagcatcagaaactgtgtttct

SEQ ID NO: 644159 - DNA, 25 bp, Homo sapien
tgattgtgggtaaagtttcaaaaca

SEQ ID NO: 644160 - DNA, 25 bp, Homo sapien
tctaagccctttggtactcctccca

SEQ ID NO: 644161 - DNA, 25 bp, Homo sapien
ctaagccctttggtactcctcccat

SEQ ID NO: 644162 - DNA, 25 bp, Homo sapien
tgcggaattttgattgtgggtaaag

SEQ ID NO: 644163 - DNA, 25 bp, Homo sapien
tttcactcggtgaggaaatactgaa

SEQ ID NO: 644164 - DNA, 25 bp, Homo sapien
gaattggagggagatacggtcctta

SEQ ID NO: 644165 - DNA, 25 bp, Homo sapien
tcttgtctttggtcgcgtcttttct

SEQ ID NO: 644166 - DNA, 25 bp, Homo sapien
gaacctagcctgctttgcatcagct

SEQ ID NO: 644167 - DNA, 25 bp, Homo sapien
aatgtggttctgtatgccgaacatg

SEQ ID NO: 644168 - DNA, 25 bp, Homo sapien
taaatccagcataaatcccagcaga

SEQ ID NO: 644169 - DNA, 25 bp, Homo sapien
tcccagcagaaagtagtgtatcaga

SEQ ID NO: 644170 - DNA, 25 bp, Homo sapien
gccgaacatgtgttcataataacag

SEQ ID NO: 644171 - DNA, 25 bp, Homo sapien
aaaaatctacttccaagattggctc

SEQ ID NO: 644172 - DNA, 25 bp, Homo sapien
cccctgtgaaaaatctacttccaag

SEQ ID NO: 644173 - DNA, 25 bp, Homo sapien
tgaaaaatctacttccaagattggc

SEQ ID NO: 644174 - DNA, 25 bp, Homo sapien
tgtgaaaaatctacttccaagattg

SEQ ID NO: 644175 - DNA, 25 bp, Homo sapien
cacttcccgtgttcctcaaagagaa

SEQ ID NO: 644176 - DNA, 25 bp, Homo sapien
gaacaatgcgactatttaaaagcct

SEQ ID NO: 644177 - DNA, 25 bp, Homo sapien
ctaatccgatccagttgcacaagga

SEQ ID NO: 644178 - DNA, 25 bp, Homo sapien
tgtgtttacactgcaagaggtttca

SEQ ID NO: 644179 - DNA, 25 bp, Homo sapien
ccttgggtgtaagttttacttgatg

SEQ ID NO: 644180 - DNA, 25 bp, Homo sapien
ttggtgactcattgttgtatgctcc

SEQ ID NO: 644181 - DNA, 25 bp, Homo sapien
gtgtttggtgttcttccatgttctt

SEQ ID NO: 644182 - DNA, 25 bp, Homo sapien
gctcccctgtcatgcaagatgtttg

SEQ ID NO: 644183 - DNA, 25 bp, Homo sapien
gttacacaagaaggaaagatctgag

SEQ ID NO: 644184 - DNA, 25 bp, Homo sapien
agtgtggaatccagaggttttgttc

SEQ ID NO: 644185 - DNA, 25 bp, Homo sapien
aacattcagtgtggaatccagaggt

SEQ ID NO: 644186 - DNA, 25 bp, Homo sapien
tcaatcagttacacaagaaggaaag

SEQ ID NO: 644187 - DNA, 25 bp, Homo sapien
ggcatttttcttagtgctggactta

SEQ ID NO: 644188 - DNA, 25 bp, Homo sapien
ttagctggcatttttcttagtgctg

SEQ ID NO: 644189 - DNA, 25 bp, Homo sapien
gctggcatttttcttagtgctggac

SEQ ID NO: 644190 - DNA, 25 bp, Homo sapien
gcatttttcttagtgctggacttac

SEQ ID NO: 644191 - DNA, 25 bp, Homo sapien
ccgcttagctcccaggttctctgca

SEQ ID NO: 644192 - DNA, 25 bp, Homo sapien
tggatgagagtatcaaagatgaaag

SEQ ID NO: 644193 - DNA, 25 bp, Homo sapien
tcggggaattttgtcacctgtatca

SEQ ID NO: 644194 - DNA, 25 bp, Homo sapien
taaaagctcctggtcaaaatgattc

SEQ ID NO: 644195 - DNA, 25 bp, Homo sapien
aagagaagaaattgccgtcacctgc

SEQ ID NO: 644196 - DNA, 25 bp, Homo sapien
gctgttgactctgtaatctcctaat

SEQ ID NO: 644197 - DNA, 25 bp, Homo sapien
gaaagcatacacctcaccagaaaag

SEQ ID NO: 644198 - DNA, 25 bp, Homo sapien
gctgatgtgttggacgctatgtgac

SEQ ID NO: 644199 - DNA, 25 bp, Homo sapien
tcattcaatgtcataccaaccgtta

SEQ ID NO: 644200 - DNA, 25 bp, Homo sapien
cataccaaccgttatttgtgcccat

SEQ ID NO: 644201 - DNA, 25 bp, Homo sapien
gtgcccattgcttttaggcgagtca

SEQ ID NO: 644202 - DNA, 25 bp, Homo sapien
cgagtcagggagttaaacagcagca

SEQ ID NO: 644203 - DNA, 25 bp, Homo sapien
cccggtagtctagaactaatcagat

SEQ ID NO: 644204 - DNA, 25 bp, Homo sapien
caaagccaagaggagcgcatggaaa

SEQ ID NO: 644205 - DNA, 25 bp, Homo sapien
cagattactgattttagggcacagc

SEQ ID NO: 644206 - DNA, 25 bp, Homo sapien
gctgggaattgagccatgccaccaa

SEQ ID NO: 644207 - DNA, 25 bp, Homo sapien
ctggcaattggtaggagcatctggt

SEQ ID NO: 644208 - DNA, 25 bp, Homo sapien
ccacctggcaattggtaggagcatc

SEQ ID NO: 644209 - DNA, 25 bp, Homo sapien
cacctggcaattggtaggagcatct

SEQ ID NO: 644210 - DNA, 25 bp, Homo sapien
acctggcaattggtaggagcatctg

SEQ ID NO: 644211 - DNA, 25 bp, Homo sapien
cctgactgattccaagccttggttt

SEQ ID NO: 644212 - DNA, 25 bp, Homo sapien
gaacctttgcagacaaagagagctg

SEQ ID NO: 644213 - DNA, 25 bp, Homo sapien
gaatgaaggcttccttgggcccggc

SEQ ID NO: 644214 - DNA, 25 bp, Homo sapien
gaagtggcagaaccttagatggttc

SEQ ID NO: 644215 - DNA, 25 bp, Homo sapien
tggttcaaggccatacttgctggag

SEQ ID NO: 644216 - DNA, 25 bp, Homo sapien
gcacatattgtcttgcccaggctag

SEQ ID NO: 644217 - DNA, 25 bp, Homo sapien
gactcaggctacagaatgtcaggct

SEQ ID NO: 644218 - DNA, 25 bp, Homo sapien
gctacagagagcagtgggcttaaca

SEQ ID NO: 644219 - DNA, 25 bp, Homo sapien
ccacttgacaggtgatgaagaggag

SEQ ID NO: 644220 - DNA, 25 bp, Homo sapien
caaaacagctcccacttgacaggtg

SEQ ID NO: 644221 - DNA, 25 bp, Homo sapien
ctccaaaacagctcccacttgacag

SEQ ID NO: 644222 - DNA, 25 bp, Homo sapien
cccacttgacaggtgatgaagagga

SEQ ID NO: 644223 - DNA, 25 bp, Homo sapien
tcagatgtcccgaaccatgtggtgt

SEQ ID NO: 644224 - DNA, 25 bp, Homo sapien
cccaggtttgagatccgttcagtga

SEQ ID NO: 644225 - DNA, 25 bp, Homo sapien
tatctctcagatgcacgttccgatg

SEQ ID NO: 644226 - DNA, 25 bp, Homo sapien
aacgtattctgctgaggtgcaccca

SEQ ID NO: 644227 - DNA, 25 bp, Homo sapien
caggggatgcacgactttcttcgtc

SEQ ID NO: 644228 - DNA, 25 bp, Homo sapien
cctcccaggggatgcacgactttct

SEQ ID NO: 644229 - DNA, 25 bp, Homo sapien
gggatgcacgactttcttcgtcttg

SEQ ID NO: 644230 - DNA, 25 bp, Homo sapien
tcccaggggatgcacgactttcttc

SEQ ID NO: 644231 - DNA, 25 bp, Homo sapien
tgctcagaccgtgaagtggaaaaac

SEQ ID NO: 644232 - DNA, 25 bp, Homo sapien
cgggaactgccacttactcagggcc

SEQ ID NO: 644233 - DNA, 25 bp, Homo sapien
tagaagggcgagtcctttgcttccg

SEQ ID NO: 644234 - DNA, 25 bp, Homo sapien
tttgcttccgcagcgtccggtggga

SEQ ID NO: 644235 - DNA, 25 bp, Homo sapien
agagtcacccgggaataactgcgcc

SEQ ID NO: 644236 - DNA, 25 bp, Homo sapien
cgttagctcgcgttgcctgctgtgg

SEQ ID NO: 644237 - DNA, 25 bp, Homo sapien
gaaatgagacgatccatcagtgcca

SEQ ID NO: 644238 - DNA, 25 bp, Homo sapien
tgggtacaaacttccgtagatcctg

SEQ ID NO: 644239 - DNA, 25 bp, Homo sapien
cgccgacgtctttcccaggttgagg

SEQ ID NO: 644240 - DNA, 25 bp, Homo sapien
gatactgagccatgagcaaccaggc

SEQ ID NO: 644241 - DNA, 25 bp, Homo sapien
gcgaggcgcccaacagtagaatgca

SEQ ID NO: 644242 - DNA, 25 bp, Homo sapien
gagcagctgctcgaatgtgccaagg

SEQ ID NO: 644243 - DNA, 25 bp, Homo sapien
tccagttttacagtactacaggaaa

SEQ ID NO: 644244 - DNA, 25 bp, Homo sapien
ctacaaacataaaagtcaagatgtc

SEQ ID NO: 644245 - DNA, 25 bp, Homo sapien
tctgttaagttctgtaaaatttgca

SEQ ID NO: 644246 - DNA, 25 bp, Homo sapien
gaactgacgttttatcaatcttctg

SEQ ID NO: 644247 - DNA, 25 bp, Homo sapien
cactccagcggcgactttgagggat

SEQ ID NO: 644248 - DNA, 25 bp, Homo sapien
gagttctcctgatgttgttccgtga

SEQ ID NO: 644249 - DNA, 25 bp, Homo sapien
gaacagagccggcaaagtaaagtca

SEQ ID NO: 644250 - DNA, 25 bp, Homo sapien
ggacgggcactctttgcagagaaca

SEQ ID NO: 644251 - DNA, 25 bp, Homo sapien
tagctacaatcaaacaggcctgggt

SEQ ID NO: 644252 - DNA, 25 bp, Homo sapien
cagacagctttcgtgctcatggtgg

SEQ ID NO: 644253 - DNA, 25 bp, Homo sapien
tgtccatgcttaaacccacggaagg

SEQ ID NO: 644254 - DNA, 25 bp, Homo sapien
tgtacacgagatacaccaacatagc

SEQ ID NO: 644255 - DNA, 25 bp, Homo sapien
ttgtcttgggaatgtttcactgcta

SEQ ID NO: 644256 - DNA, 25 bp, Homo sapien
gcaccagaaaacgactaatgtaact

SEQ ID NO: 644257 - DNA, 25 bp, Homo sapien
tgaaagtgattcatgcttctggctg

SEQ ID NO: 644258 - DNA, 25 bp, Homo sapien
ggacctgaagaatcaatctgtgtga

SEQ ID NO: 644259 - DNA, 25 bp, Homo sapien
agcttctgctgttcggagtggtctt

SEQ ID NO: 644260 - DNA, 25 bp, Homo sapien
ggcctgagtctcattttggttccac

SEQ ID NO: 644261 - DNA, 25 bp, Homo sapien
cagctgccttggagatgctattgga

SEQ ID NO: 644262 - DNA, 25 bp, Homo sapien
tagatgacatatgtggtttttagag

SEQ ID NO: 644263 - DNA, 25 bp, Homo sapien
tagcactgaaattgctccctgggag

SEQ ID NO: 644264 - DNA, 25 bp, Homo sapien
caaggagtggtatactgtggctcaa

SEQ ID NO: 644265 - DNA, 25 bp, Homo sapien
tatgcttagagcaaccagagcgcta

SEQ ID NO: 644266 - DNA, 25 bp, Homo sapien
tcaagaagatctagacagcagcacg

SEQ ID NO: 644267 - DNA, 25 bp, Homo sapien
ctcaccaacatcaagtctaggaatc

SEQ ID NO: 644268 - DNA, 25 bp, Homo sapien
ctgttgctctctgagagggctccct

SEQ ID NO: 644269 - DNA, 25 bp, Homo sapien
taagaatggatgtccgaggagttcc

SEQ ID NO: 644270 - DNA, 25 bp, Homo sapien
gatgcaagacggtggacctgctagt

SEQ ID NO: 644271 - DNA, 25 bp, Homo sapien
tctgagctcgtcctaattggcaatc

SEQ ID NO: 644272 - DNA, 25 bp, Homo sapien
tcataagataggaagagaggtgtgt

SEQ ID NO: 644273 - DNA, 25 bp, Homo sapien
tgtttatagtagtagtcctgcagaa

SEQ ID NO: 644274 - DNA, 25 bp, Homo sapien
gaaatctggcagctcctacagtggt

SEQ ID NO: 644275 - DNA, 25 bp, Homo sapien
ggcttaaggcctttccacttgatgc

SEQ ID NO: 644276 - DNA, 25 bp, Homo sapien
tagggtttggctctctgtgcccact

SEQ ID NO: 644277 - DNA, 25 bp, Homo sapien
ggctggtaccttcttcctattcagg

SEQ ID NO: 644278 - DNA, 25 bp, Homo sapien
tattcaggtcccagctcgtttgatc

SEQ ID NO: 644279 - DNA, 25 bp, Homo sapien
tggaggtaaactgtcccggatcctc

SEQ ID NO: 644280 - DNA, 25 bp, Homo sapien
cttgtgtaggtccttcactcttgga

SEQ ID NO: 644281 - DNA, 25 bp, Homo sapien
ctcttggaggtaaactgtcccggat

SEQ ID NO: 644282 - DNA, 25 bp, Homo sapien
gtgtaggtccttcactcttggaggt

SEQ ID NO: 644283 - DNA, 25 bp, Homo sapien
ggggggctcgccatcaatcatttct

SEQ ID NO: 644284 - DNA, 25 bp, Homo sapien
tcgccatcaatcatttctatcacca

SEQ ID NO: 644285 - DNA, 25 bp, Homo sapien
gaagtaggggggctcgccatcaatc

SEQ ID NO: 644286 - DNA, 25 bp, Homo sapien
gggctcgccatcaatcatttctatc

SEQ ID NO: 644287 - DNA, 25 bp, Homo sapien
cagagttggagtgactttcccacag

SEQ ID NO: 644288 - DNA, 25 bp, Homo sapien
tattttgtggcactttctttgatcc

SEQ ID NO: 644289 - DNA, 25 bp, Homo sapien
catgtctccagccactttgcaagtt

SEQ ID NO: 644290 - DNA, 25 bp, Homo sapien
tctgaattctcatgcctgctcatct

SEQ ID NO: 644291 - DNA, 25 bp, Homo sapien
ttggaaacttgagcacagaaaccaa

SEQ ID NO: 644292 - DNA, 25 bp, Homo sapien
tttcctcttcggcacctctttggaa

SEQ ID NO: 644293 - DNA, 25 bp, Homo sapien
ccagtagggagtgccaaccaatgat

SEQ ID NO: 644294 - DNA, 25 bp, Homo sapien
ctctgtcccataaggtagcctagaa

SEQ ID NO: 644295 - DNA, 25 bp, Homo sapien
acaggcagacagtagctatctgttc

SEQ ID NO: 644296 - DNA, 25 bp, Homo sapien
tgtgaatcactccttggttatgaag

SEQ ID NO: 644297 - DNA, 25 bp, Homo sapien
gcagacagtagctatctgttcttca

SEQ ID NO: 644298 - DNA, 25 bp, Homo sapien
tttttatgtccctgtgaatcactcc

SEQ ID NO: 644299 - DNA, 25 bp, Homo sapien
ctttagtgaaacagtccacgtgctc

SEQ ID NO: 644300 - DNA, 25 bp, Homo sapien
aagaacatctttgaaatgctcaaga

SEQ ID NO: 644301 - DNA, 25 bp, Homo sapien
tccagcccatatctgaaaaacctgc

SEQ ID NO: 644302 - DNA, 25 bp, Homo sapien
ttagtgaaacagtccacgtgctcca

SEQ ID NO: 644303 - DNA, 25 bp, Homo sapien
cacattgtcatggtggtaatcccgc

SEQ ID NO: 644304 - DNA, 25 bp, Homo sapien
ggcaccaccttctagaaactccatg

SEQ ID NO: 644305 - DNA, 25 bp, Homo sapien
gctgctgtacatgtcaaccacattg

SEQ ID NO: 644306 - DNA, 25 bp, Homo sapien
ctcatcgccgacaaggtagctgctg

SEQ ID NO: 644307 - DNA, 25 bp, Homo sapien
tgctttttgttctcttgtggccaca

SEQ ID NO: 644308 - DNA, 25 bp, Homo sapien
gctttttgttctcttgtggccacaa

SEQ ID NO: 644309 - DNA, 25 bp, Homo sapien
gaaatatacttttgacttgtgaaga

SEQ ID NO: 644310 - DNA, 25 bp, Homo sapien
atatacttttgacttgtgaagatga

SEQ ID NO: 644311 - DNA, 25 bp, Homo sapien
gatgcatacgatgccggttgagcct

SEQ ID NO: 644312 - DNA, 25 bp, Homo sapien
gaagccgtggagatgtactgcgaac

SEQ ID NO: 644313 - DNA, 25 bp, Homo sapien
tgagccttccccgattttgataaag

SEQ ID NO: 644314 - DNA, 25 bp, Homo sapien
cgaaactgttcatgggacaccctgg

SEQ ID NO: 644315 - DNA, 25 bp, Homo sapien
gcaatcttttctatgacctgattta

SEQ ID NO: 644316 - DNA, 25 bp, Homo sapien
caaagcagtccagcttaaactgtgc

SEQ ID NO: 644317 - DNA, 25 bp, Homo sapien
tccagcttaaactgtgcaatctttt

SEQ ID NO: 644318 - DNA, 25 bp, Homo sapien
aaagatgtgcaaagcagtccagctt

SEQ ID NO: 644319 - DNA, 25 bp, Homo sapien
aatgaggactcggaatgttccgtga

SEQ ID NO: 644320 - DNA, 25 bp, Homo sapien
agaatgaggactcggaatgttccgt

SEQ ID NO: 644321 - DNA, 25 bp, Homo sapien
tgaatgtgatgctccaatacacctt

SEQ ID NO: 644322 - DNA, 25 bp, Homo sapien
gttccagtgcctgaatgtgatgctc

SEQ ID NO: 644323 - DNA, 25 bp, Homo sapien
tctattatctgagcatggaaaggac

SEQ ID NO: 644324 - DNA, 25 bp, Homo sapien
ctctattatctgagcatggaaagga

SEQ ID NO: 644325 - DNA, 25 bp, Homo sapien
ggaaaacgactgcttgtaagaattc

SEQ ID NO: 644326 - DNA, 25 bp, Homo sapien
aacgactgcttgtaagaattctgga

SEQ ID NO: 644327 - DNA, 25 bp, Homo sapien
gaagggaaaacgactgcttgtaaga

SEQ ID NO: 644328 - DNA, 25 bp, Homo sapien
tgggaagggaaaacgactgcttgta

SEQ ID NO: 644329 - DNA, 25 bp, Homo sapien
agggactcttcgtctttggggactg

SEQ ID NO: 644330 - DNA, 25 bp, Homo sapien
gactggtttgcagcctcagaatatt

SEQ ID NO: 644331 - DNA, 25 bp, Homo sapien
tgcgatccgtcatcgcctgcagtga

SEQ ID NO: 644332 - DNA, 25 bp, Homo sapien
atccgtcatcgcctgcagtgatgtg

SEQ ID NO: 644333 - DNA, 25 bp, Homo sapien
ttctgatcgtaagggctgaacaccc

SEQ ID NO: 644334 - DNA, 25 bp, Homo sapien
gaagttcccatgagtgattatgctg

SEQ ID NO: 644335 - DNA, 25 bp, Homo sapien
gagtttcctgtgaaacatggagcag

SEQ ID NO: 644336 - DNA, 25 bp, Homo sapien
tgaacacccttggtagaagttccca

SEQ ID NO: 644337 - DNA, 25 bp, Homo sapien
tagcaggccgttgatggaggtttcc

SEQ ID NO: 644338 - DNA, 25 bp, Homo sapien
caaatggcatcatcggttcctggag

SEQ ID NO: 644339 - DNA, 25 bp, Homo sapien
tacttttcggtcgtgtagtcagcag

SEQ ID NO: 644340 - DNA, 25 bp, Homo sapien
tagtcagcagtagtatcggattcgc

SEQ ID NO: 644341 - DNA, 25 bp, Homo sapien
ttatttgtaatagggatattatcac

SEQ ID NO: 644342 - DNA, 25 bp, Homo sapien
tcacttgatggtatttagtgatccc

SEQ ID NO: 644343 - DNA, 25 bp, Homo sapien
tgtaatagggatattatcacttgat

SEQ ID NO: 644344 - DNA, 25 bp, Homo sapien
gatggtatttagtgatccccttccc

SEQ ID NO: 644345 - DNA, 25 bp, Homo sapien
ctgttggtaaagaactgtcttcctt

SEQ ID NO: 644346 - DNA, 25 bp, Homo sapien
tgtcttccttgtttttattaaggca

SEQ ID NO: 644347 - DNA, 25 bp, Homo sapien
cctgttggtaaagaactgtcttcct

SEQ ID NO: 644348 - DNA, 25 bp, Homo sapien
tgttggtaaagaactgtcttccttg

SEQ ID NO: 644349 - DNA, 25 bp, Homo sapien
tttcttcttcccgcttctgtgaatc

SEQ ID NO: 644350 - DNA, 25 bp, Homo sapien
ttcttcttcccgcttctgtgaatcc

SEQ ID NO: 644351 - DNA, 25 bp, Homo sapien
cttcttcccgcttctgtgaatccct

SEQ ID NO: 644352 - DNA, 25 bp, Homo sapien
tcttcttcccgcttctgtgaatccc

SEQ ID NO: 644353 - DNA, 25 bp, Homo sapien
aagggctcaggatgagagaaccgct

SEQ ID NO: 644354 - DNA, 25 bp, Homo sapien
tcaaccccctggtggaagggctcag

SEQ ID NO: 644355 - DNA, 25 bp, Homo sapien
tcaggatgagagaaccgcttctctt

SEQ ID NO: 644356 - DNA, 25 bp, Homo sapien
gtcgggaacatatgaattcaacccc

SEQ ID NO: 644357 - DNA, 25 bp, Homo sapien
gtaacaaggcattggcaaccacatg

SEQ ID NO: 644358 - DNA, 25 bp, Homo sapien
gtgtaacaaggcattggcaaccaca

SEQ ID NO: 644359 - DNA, 25 bp, Homo sapien
tgtaacaaggcattggcaaccacat

SEQ ID NO: 644360 - DNA, 25 bp, Homo sapien
tgtgtaacaaggcattggcaaccac

SEQ ID NO: 644361 - DNA, 25 bp, Homo sapien
gatgacagcatactccaaggaacat

SEQ ID NO: 644362 - DNA, 25 bp, Homo sapien
ctagatgacagcatactccaaggaa

SEQ ID NO: 644363 - DNA, 25 bp, Homo sapien
gacagcatactccaaggaacataca

SEQ ID NO: 644364 - DNA, 25 bp, Homo sapien
atactccaaggaacatacagcgctg

SEQ ID NO: 644365 - DNA, 25 bp, Homo sapien
tgggtgctgaggacatctcaacaga

SEQ ID NO: 644366 - DNA, 25 bp, Homo sapien
tgatgggcagttggaccagcaaggc

SEQ ID NO: 644367 - DNA, 25 bp, Homo sapien
gaagaggttgcgctctagctgctca

SEQ ID NO: 644368 - DNA, 25 bp, Homo sapien
ttttgaccacatggcgtctggggct

SEQ ID NO: 644369 - DNA, 25 bp, Homo sapien
ttcataagctctagcttcaacacca

SEQ ID NO: 644370 - DNA, 25 bp, Homo sapien
accttcataagctctagcttcaaca

SEQ ID NO: 644371 - DNA, 25 bp, Homo sapien
cttcataagctctagcttcaacacc

SEQ ID NO: 644372 - DNA, 25 bp, Homo sapien
ccttcataagctctagcttcaacac

SEQ ID NO: 644373 - DNA, 25 bp, Homo sapien
tgctaacaggctgtgccactgctgg

SEQ ID NO: 644374 - DNA, 25 bp, Homo sapien
ggcctgttggccgtatctgctaaca

SEQ ID NO: 644375 - DNA, 25 bp, Homo sapien
tgtgttcaaagttggacgggccaga

SEQ ID NO: 644376 - DNA, 25 bp, Homo sapien
tgaagggtccaccataggctttggc

SEQ ID NO: 644377 - DNA, 25 bp, Homo sapien
tgtcactgagcaggtgaagctgagc

SEQ ID NO: 644378 - DNA, 25 bp, Homo sapien
gatggtgaggtttcttgggtcctgt

SEQ ID NO: 644379 - DNA, 25 bp, Homo sapien
ttacaaactgtgtcactgagcaggt

SEQ ID NO: 644380 - DNA, 25 bp, Homo sapien
ccataaaggccctctctgagaaatt

SEQ ID NO: 644381 - DNA, 25 bp, Homo sapien
atccttagtcactcccattacctta

SEQ ID NO: 644382 - DNA, 25 bp, Homo sapien
ctcccattaccttaaagcccctcat

SEQ ID NO: 644383 - DNA, 25 bp, Homo sapien
tagtcactcccattaccttaaagcc

SEQ ID NO: 644384 - DNA, 25 bp, Homo sapien
cttagtcactcccattaccttaaag

SEQ ID NO: 644385 - DNA, 25 bp, Homo sapien
tcaggacctgtttcatcagtatcgc

SEQ ID NO: 644386 - DNA, 25 bp, Homo sapien
cctgcccaggtacatagtggtacat

SEQ ID NO: 644387 - DNA, 25 bp, Homo sapien
gaagcaattgctcactctgatagag

SEQ ID NO: 644388 - DNA, 25 bp, Homo sapien
aaagaaatcactcaacctgcccagg

SEQ ID NO: 644389 - DNA, 25 bp, Homo sapien
tggtttttactgcagattctccttg

SEQ ID NO: 644390 - DNA, 25 bp, Homo sapien
ggtttttactgcagattctccttgt

SEQ ID NO: 644391 - DNA, 25 bp, Homo sapien
tactgcagattctccttgtctcact

SEQ ID NO: 644392 - DNA, 25 bp, Homo sapien
ttttactgcagattctccttgtctc

SEQ ID NO: 644393 - DNA, 25 bp, Homo sapien
gagtcagtccctagcgtggaatccc

SEQ ID NO: 644394 - DNA, 25 bp, Homo sapien
acctgaggagctttggtcacccaga

SEQ ID NO: 644395 - DNA, 25 bp, Homo sapien
cagagccccagatgaccaaataaca

SEQ ID NO: 644396 - DNA, 25 bp, Homo sapien
taaatgaaatatccgagcttccctc

SEQ ID NO: 644397 - DNA, 25 bp, Homo sapien
ctgcttcaggtgagattcctacata

SEQ ID NO: 644398 - DNA, 25 bp, Homo sapien
tacataactgttgggcaaggaaagc

SEQ ID NO: 644399 - DNA, 25 bp, Homo sapien
gagattcctacataactgttgggca

SEQ ID NO: 644400 - DNA, 25 bp, Homo sapien
tcaggtgagattcctacataactgt

SEQ ID NO: 644401 - DNA, 25 bp, Homo sapien
actccagaggagtgtggctatttct

SEQ ID NO: 644402 - DNA, 25 bp, Homo sapien
ttctgcaacttttcgctggtgcttg

SEQ ID NO: 644403 - DNA, 25 bp, Homo sapien
tcattttagcaagaggtggaagcat

SEQ ID NO: 644404 - DNA, 25 bp, Homo sapien
caacttttcgctggtgcttgtcagt

SEQ ID NO: 644405 - DNA, 25 bp, Homo sapien
gactcaaccggcatcatagcacaaa

SEQ ID NO: 644406 - DNA, 25 bp, Homo sapien
gcatctccatgtactgactcaaccg

SEQ ID NO: 644407 - DNA, 25 bp, Homo sapien
agttcatcttcgctagtcattccac

SEQ ID NO: 644408 - DNA, 25 bp, Homo sapien
gcacaaagattcaggatgaaagaat

SEQ ID NO: 644409 - DNA, 25 bp, Homo sapien
ccactgagtgtagttccaggtctgc

SEQ ID NO: 644410 - DNA, 25 bp, Homo sapien
cagtccctggaggaattatgcacta

SEQ ID NO: 644411 - DNA, 25 bp, Homo sapien
gagtgtagttccaggtctgctctcc

SEQ ID NO: 644412 - DNA, 25 bp, Homo sapien
taatatttgcttggctcctaggaac

SEQ ID NO: 644413 - DNA, 25 bp, Homo sapien
ctggttcttcagtcacccccttgcc

SEQ ID NO: 644414 - DNA, 25 bp, Homo sapien
ttctctggttcttcagtcaccccct

SEQ ID NO: 644415 - DNA, 25 bp, Homo sapien
ccttctctggttcttcagtcacccc

SEQ ID NO: 644416 - DNA, 25 bp, Homo sapien
ctctggttcttcagtcacccccttg

SEQ ID NO: 644417 - DNA, 25 bp, Homo sapien
cagtgtgacacctcactccatggga

SEQ ID NO: 644418 - DNA, 25 bp, Homo sapien
tgctgaagacctgatgcagttgaac

SEQ ID NO: 644419 - DNA, 25 bp, Homo sapien
tgggactacctagggtgctgaagac

SEQ ID NO: 644420 - DNA, 25 bp, Homo sapien
taaatgctttcttacatcgccatgg

SEQ ID NO: 644421 - DNA, 25 bp, Homo sapien
ctggatatgattatactgggagaca

SEQ ID NO: 644422 - DNA, 25 bp, Homo sapien
gaaatacagctttgatgctcaggga

SEQ ID NO: 644423 - DNA, 25 bp, Homo sapien
gaagcatccagcgaaagttggaaat

SEQ ID NO: 644424 - DNA, 25 bp, Homo sapien
tcagaggccccagtaagagccatgg

SEQ ID NO: 644425 - DNA, 25 bp, Homo sapien
gattagcccgatagggcatgaactt

SEQ ID NO: 644426 - DNA, 25 bp, Homo sapien
tgtgggcaataagtgggatctcatg

SEQ ID NO: 644427 - DNA, 25 bp, Homo sapien
acagattagcccgatagggcatgaa

SEQ ID NO: 644428 - DNA, 25 bp, Homo sapien
gggatctcatggagtcccatgcttt

SEQ ID NO: 644429 - DNA, 25 bp, Homo sapien
gagacaatggctggaggtcttaatg

SEQ ID NO: 644430 - DNA, 25 bp, Homo sapien
gaaggataagcaagggcacatccaa

SEQ ID NO: 644431 - DNA, 25 bp, Homo sapien
gggcaatcctctaccaaagtacttg

SEQ ID NO: 644432 - DNA, 25 bp, Homo sapien
agcatggaaggataagcaagggcac

SEQ ID NO: 644433 - DNA, 25 bp, Homo sapien
acatccaagcacacatttgcgaact

SEQ ID NO: 644434 - DNA, 25 bp, Homo sapien
tcggttataattctctgtgttctga

SEQ ID NO: 644435 - DNA, 25 bp, Homo sapien
attttgcaatggtcccgtcggttat

SEQ ID NO: 644436 - DNA, 25 bp, Homo sapien
ctgtcgttcaggtataattttgcaa

SEQ ID NO: 644437 - DNA, 25 bp, Homo sapien
cttgtcaaactgtcgttcaggtata

SEQ ID NO: 644438 - DNA, 25 bp, Homo sapien
gaagacagtcattaattaggcttct

SEQ ID NO: 644439 - DNA, 25 bp, Homo sapien
gacagtcattaattaggcttctaag

SEQ ID NO: 644440 - DNA, 25 bp, Homo sapien
tattccacggaaaacactagaaaca

SEQ ID NO: 644441 - DNA, 25 bp, Homo sapien
ctgataatattccacggaaaacact

SEQ ID NO: 644442 - DNA, 25 bp, Homo sapien
gcaaagagagatgctccggttacca

SEQ ID NO: 644443 - DNA, 25 bp, Homo sapien
ggtccctagcctttgcatctcctag

SEQ ID NO: 644444 - DNA, 25 bp, Homo sapien
ttcgcatcctctcccggcaaagaga

SEQ ID NO: 644445 - DNA, 25 bp, Homo sapien
taggagatgcaggatcgcgctgtca

SEQ ID NO: 644446 - DNA, 25 bp, Homo sapien
tcccggtctccccgggcgcacgctg

SEQ ID NO: 644447 - DNA, 25 bp, Homo sapien
tctccccgggcgcacgctggggaac

SEQ ID NO: 644448 - DNA, 25 bp, Homo sapien
tccccgggcgcacgctggggaacta

SEQ ID NO: 644449 - DNA, 25 bp, Homo sapien
ggtctccccgggcgcacgctgggga

SEQ ID NO: 644450 - DNA, 25 bp, Homo sapien
acagctttctactctccacccaaac

SEQ ID NO: 644451 - DNA, 25 bp, Homo sapien
cccggcttcgcccctcggaggactg

SEQ ID NO: 644452 - DNA, 25 bp, Homo sapien
ttcgcccctcggaggactgtccatg

SEQ ID NO: 644453 - DNA, 25 bp, Homo sapien
cggcttcgcccctcggaggactgtc

SEQ ID NO: 644454 - DNA, 25 bp, Homo sapien
cttcgcccctcggaggactgtccat

SEQ ID NO: 644455 - DNA, 25 bp, Homo sapien
gcagctgctccgggttttcgtggca

SEQ ID NO: 644456 - DNA, 25 bp, Homo sapien
cagctgctccgggttttcgtggcag

SEQ ID NO: 644457 - DNA, 25 bp, Homo sapien
ctgctccgggttttcgtggcagccg

SEQ ID NO: 644458 - DNA, 25 bp, Homo sapien
gttttcgtggcagccggcgggaggc

SEQ ID NO: 644459 - DNA, 25 bp, Homo sapien
actcaatcttatgaagatccatcag

SEQ ID NO: 644460 - DNA, 25 bp, Homo sapien
ctcaatcttatgaagatccatcaga

SEQ ID NO: 644461 - DNA, 25 bp, Homo sapien
ctaaagccttagttgcctcttggag

SEQ ID NO: 644462 - DNA, 25 bp, Homo sapien
aagccttagttgcctcttggagggg

SEQ ID NO: 644463 - DNA, 25 bp, Homo sapien
tcatgaaagcctcatttgtagccat

SEQ ID NO: 644464 - DNA, 25 bp, Homo sapien
tttgcttatgcaggttccactaccc

SEQ ID NO: 644465 - DNA, 25 bp, Homo sapien
ttatgcaggttccactacccaccat

SEQ ID NO: 644466 - DNA, 25 bp, Homo sapien
tgcttatgcaggttccactacccac

SEQ ID NO: 644467 - DNA, 25 bp, Homo sapien
ctttgcttatgcaggttccactacc

SEQ ID NO: 644468 - DNA, 25 bp, Homo sapien
tcctgtttatttcgttgtggattcc

SEQ ID NO: 644469 - DNA, 25 bp, Homo sapien
tttgctcttcagttggacctgcttc

SEQ ID NO: 644470 - DNA, 25 bp, Homo sapien
tcttcagttggacctgcttctctga

SEQ ID NO: 644471 - DNA, 25 bp, Homo sapien
ggattcccaacaccactcactgctg

SEQ ID NO: 644472 - DNA, 25 bp, Homo sapien
gaagtagcaagtagcaagctcatgc

SEQ ID NO: 644473 - DNA, 25 bp, Homo sapien
tagcaagtagcaagctcatgcacat

SEQ ID NO: 644474 - DNA, 25 bp, Homo sapien
tcacaggaagtagcaagtagcaagc

SEQ ID NO: 644475 - DNA, 25 bp, Homo sapien
ggatcatcacaggaagtagcaagta

SEQ ID NO: 644476 - DNA, 25 bp, Homo sapien
tttatgagcattgccacattctcca

SEQ ID NO: 644477 - DNA, 25 bp, Homo sapien
ttatgagcattgccacattctccat

SEQ ID NO: 644478 - DNA, 25 bp, Homo sapien
gtttatgagcattgccacattctcc

SEQ ID NO: 644479 - DNA, 25 bp, Homo sapien
caaaaccctggctgcaaggaagtct

SEQ ID NO: 644480 - DNA, 25 bp, Homo sapien
gaccagcggcaggtctcattttgct

SEQ ID NO: 644481 - DNA, 25 bp, Homo sapien
gacaggaagatcacatgcaaaaccc

SEQ ID NO: 644482 - DNA, 25 bp, Homo sapien
tattcagctttctagccacatagca

SEQ ID NO: 644483 - DNA, 25 bp, Homo sapien
gttgtatattacaaaagtattgatc

SEQ ID NO: 644484 - DNA, 25 bp, Homo sapien
tgttgtatattacaaaagtattgat

SEQ ID NO: 644485 - DNA, 25 bp, Homo sapien
cttgttgtatattacaaaagtattg

SEQ ID NO: 644486 - DNA, 25 bp, Homo sapien
ttgttgtatattacaaaagtattga

SEQ ID NO: 644487 - DNA, 25 bp, Homo sapien
ctatgaggattccacattctggaga

SEQ ID NO: 644488 - DNA, 25 bp, Homo sapien
tgaggattccacattctggagacgc

SEQ ID NO: 644489 - DNA, 25 bp, Homo sapien
tatgaggattccacattctggagac

SEQ ID NO: 644490 - DNA, 25 bp, Homo sapien
ggattccacattctggagacgctga

SEQ ID NO: 644491 - DNA, 25 bp, Homo sapien
ccctagccaggggtcagaagtgtca

SEQ ID NO: 644492 - DNA, 25 bp, Homo sapien
ctccttagtgtcctcgattggatct

SEQ ID NO: 644493 - DNA, 25 bp, Homo sapien
tagtgtcctcgattggatcttcaca

SEQ ID NO: 644494 - DNA, 25 bp, Homo sapien
tgtcctcgattggatcttcacatac

SEQ ID NO: 644495 - DNA, 25 bp, Homo sapien
tttttcatctcggtcattttctata

SEQ ID NO: 644496 - DNA, 25 bp, Homo sapien
tttcatctcggtcattttctatatt

SEQ ID NO: 644497 - DNA, 25 bp, Homo sapien
ctgtttttttcatctcggtcatttt

SEQ ID NO: 644498 - DNA, 25 bp, Homo sapien
tttttttcatctcggtcattttcta

SEQ ID NO: 644499 - DNA, 25 bp, Homo sapien
aatgctactgaggagcctttggcag

SEQ ID NO: 644500 - DNA, 25 bp, Homo sapien
tctgggcgctggattctagcaatgc

SEQ ID NO: 644501 - DNA, 25 bp, Homo sapien
tgacttcaacaagcgccgaatctgg

SEQ ID NO: 644502 - DNA, 25 bp, Homo sapien
gcagagaaagtcagctccaagctgc

SEQ ID NO: 644503 - DNA, 25 bp, Homo sapien
tttgtgtaacctgccaggttcctcc

SEQ ID NO: 644504 - DNA, 25 bp, Homo sapien
cagtttgtgtaacctgccaggttcc

SEQ ID NO: 644505 - DNA, 25 bp, Homo sapien
tgtgtaacctgccaggttcctccag

SEQ ID NO: 644506 - DNA, 25 bp, Homo sapien
tttcagtttgtgtaacctgccaggt

SEQ ID NO: 644507 - DNA, 25 bp, Homo sapien
tgcttccactctgtgtttctcagtg

SEQ ID NO: 644508 - DNA, 25 bp, Homo sapien
actctgtgtttctcagtggtggagg

SEQ ID NO: 644509 - DNA, 25 bp, Homo sapien
tggtggaggaattagtgagtccatc

SEQ ID NO: 644510 - DNA, 25 bp, Homo sapien
tagtgagtccatcagtgcctgccat

SEQ ID NO: 644511 - DNA, 25 bp, Homo sapien
gatcggttcctgtaattatgtatga

SEQ ID NO: 644512 - DNA, 25 bp, Homo sapien
aacaaagttttgctcaatgacagac

SEQ ID NO: 644513 - DNA, 25 bp, Homo sapien
taattggtgtcagatctggaaccag

SEQ ID NO: 644514 - DNA, 25 bp, Homo sapien
tatgaaaaacgagacttcacagcct

SEQ ID NO: 644515 - DNA, 25 bp, Homo sapien
ctgacctcaatggcctcccaaactg

SEQ ID NO: 644516 - DNA, 25 bp, Homo sapien
cctaaagaatagaacaacattataa

SEQ ID NO: 644517 - DNA, 25 bp, Homo sapien
aagaatagaacaacattataaaatt

SEQ ID NO: 644518 - DNA, 25 bp, Homo sapien
tttcctaaagaatagaacaacatta

SEQ ID NO: 644519 - DNA, 25 bp, Homo sapien
ctgggcaggtcttccggtcttggct

SEQ ID NO: 644520 - DNA, 25 bp, Homo sapien
tgtgtcacaaccacacctaaattgg

SEQ ID NO: 644521 - DNA, 25 bp, Homo sapien
ttcggtgagtcacaagatattcaac

SEQ ID NO: 644522 - DNA, 25 bp, Homo sapien
tcttccaatgtctcaggccagaaat

SEQ ID NO: 644523 - DNA, 25 bp, Homo sapien
ttcaagaccctatgggaggtagccc

SEQ ID NO: 644524 - DNA, 25 bp, Homo sapien
tctgctcaaactactggagaggaga

SEQ ID NO: 644525 - DNA, 25 bp, Homo sapien
gaggtagccctgtcttacaaccata

SEQ ID NO: 644526 - DNA, 25 bp, Homo sapien
ggagatgccacagtctttactatgg

SEQ ID NO: 644527 - DNA, 25 bp, Homo sapien
gcaccagtatgtgaactccaccaga

SEQ ID NO: 644528 - DNA, 25 bp, Homo sapien
tgaattactgtgataccaatgaaag

SEQ ID NO: 644529 - DNA, 25 bp, Homo sapien
cataactgcctgtaaggaatgaatg

SEQ ID NO: 644530 - DNA, 25 bp, Homo sapien
ttgtttgtatgcatctctctccccg

SEQ ID NO: 644531 - DNA, 25 bp, Homo sapien
tagaagaggcacacaccaaaagatt

SEQ ID NO: 644532 - DNA, 25 bp, Homo sapien
ggtgtccacacttagctcgccatca

SEQ ID NO: 644533 - DNA, 25 bp, Homo sapien
tgtaaaccaggtagtctcagcaaaa

SEQ ID NO: 644534 - DNA, 25 bp, Homo sapien
tgaagttaaaggtagggcaagtcca

SEQ ID NO: 644535 - DNA, 25 bp, Homo sapien
tcaagaatttggaagtagtgactct

SEQ ID NO: 644536 - DNA, 25 bp, Homo sapien
ggctcagggtctcatttaaggtggt

SEQ ID NO: 644537 - DNA, 25 bp, Homo sapien
ttaaggtggtagttcaggatgccag

SEQ ID NO: 644538 - DNA, 25 bp, Homo sapien
gaagaaagtactgaaggcccttcaa

SEQ ID NO: 644539 - DNA, 25 bp, Homo sapien
tgtccttacagcgtggcagctggct

SEQ ID NO: 644540 - DNA, 25 bp, Homo sapien
tccttacagcgtggcagctggcttc

SEQ ID NO: 644541 - DNA, 25 bp, Homo sapien
ccgagtgtccttacagcgtggcagc

SEQ ID NO: 644542 - DNA, 25 bp, Homo sapien
gactgcccgagtgtccttacagcgt

SEQ ID NO: 644543 - DNA, 25 bp, Homo sapien
cgctgagcgtcagaggacgagagca

SEQ ID NO: 644544 - DNA, 25 bp, Homo sapien
tccgggagcccaaggtcgcggctgg

SEQ ID NO: 644545 - DNA, 25 bp, Homo sapien
ccaagggacatcattcacgcctggg

SEQ ID NO: 644546 - DNA, 25 bp, Homo sapien
ctgggccagcgctgagcgtcagagg

SEQ ID NO: 644547 - DNA, 25 bp, Homo sapien
caaagtccataataccaaagtgagt

SEQ ID NO: 644548 - DNA, 25 bp, Homo sapien
caaagtgagtttattagtatttgcc

SEQ ID NO: 644549 - DNA, 25 bp, Homo sapien
gattctctcagaagaacggagccaa

SEQ ID NO: 644550 - DNA, 25 bp, Homo sapien
aacacaagttaacaccaaagtccat

SEQ ID NO: 644551 - DNA, 25 bp, Homo sapien
gttcctgtatcagtgagcagctgca

SEQ ID NO: 644552 - DNA, 25 bp, Homo sapien
catggtgggaactattggctagaaa

SEQ ID NO: 644553 - DNA, 25 bp, Homo sapien
tccagtgctcgagggcaagtctgca

SEQ ID NO: 644554 - DNA, 25 bp, Homo sapien
acaagggtgcgctttcagatgaaac

SEQ ID NO: 644555 - DNA, 25 bp, Homo sapien
tcaagttatgaagggtcatgactcc

SEQ ID NO: 644556 - DNA, 25 bp, Homo sapien
tactgcctgcttgcctatggatcaa

SEQ ID NO: 644557 - DNA, 25 bp, Homo sapien
cttcggtgaactgggtaagactgtg

SEQ ID NO: 644558 - DNA, 25 bp, Homo sapien
gaactcttatgagactctagtggaa

SEQ ID NO: 644559 - DNA, 25 bp, Homo sapien
tggcaagaagaaatggatgactcac

SEQ ID NO: 644560 - DNA, 25 bp, Homo sapien
agatagaactgatgggaaacatggc

SEQ ID NO: 644561 - DNA, 25 bp, Homo sapien
gctgtttccacctgaatgaattccc

SEQ ID NO: 644562 - DNA, 25 bp, Homo sapien
ccatcatgtgatggcaagaaatgct

SEQ ID NO: 644563 - DNA, 25 bp, Homo sapien
tacggagtataaactgggctcctgc

SEQ ID NO: 644564 - DNA, 25 bp, Homo sapien
tctctttcttaggtcaaagctacgg

SEQ ID NO: 644565 - DNA, 25 bp, Homo sapien
caaagctacggagtataaactgggc

SEQ ID NO: 644566 - DNA, 25 bp, Homo sapien
tcttaggtcaaagctacggagtata

SEQ ID NO: 644567 - DNA, 25 bp, Homo sapien
tccttcaatagttgtttttcaggaa

SEQ ID NO: 644568 - DNA, 25 bp, Homo sapien
aatagttgtttttcaggaagctctg

SEQ ID NO: 644569 - DNA, 25 bp, Homo sapien
agttgtttttcaggaagctctgttt

SEQ ID NO: 644570 - DNA, 25 bp, Homo sapien
caatagttgtttttcaggaagctct

SEQ ID NO: 644571 - DNA, 25 bp, Homo sapien
gacagggttggatttctcaagactg

SEQ ID NO: 644572 - DNA, 25 bp, Homo sapien
caagactggcaggatagaggactcc

SEQ ID NO: 644573 - DNA, 25 bp, Homo sapien
cctcacaggtagagaagctaggcca

SEQ ID NO: 644574 - DNA, 25 bp, Homo sapien
tagaggactccactcctatggaagc

SEQ ID NO: 644575 - DNA, 25 bp, Homo sapien
tctgctgaaactgtatctctaggtt

SEQ ID NO: 644576 - DNA, 25 bp, Homo sapien
gctgaaactgtatctctaggtttct

SEQ ID NO: 644577 - DNA, 25 bp, Homo sapien
attctgctgaaactgtatctctagg

SEQ ID NO: 644578 - DNA, 25 bp, Homo sapien
cattctgctgaaactgtatctctag

SEQ ID NO: 644579 - DNA, 25 bp, Homo sapien
caacagtcgtcccatctagtcagga

SEQ ID NO: 644580 - DNA, 25 bp, Homo sapien
agttctttaatcacagtaggcagcc

SEQ ID NO: 644581 - DNA, 25 bp, Homo sapien
gtggagcgcaacagtcgtcccatct

SEQ ID NO: 644582 - DNA, 25 bp, Homo sapien
aaccttgtcgctggtaaaatacaca

SEQ ID NO: 644583 - DNA, 25 bp, Homo sapien
catcagctggaacgttcagagtctc

SEQ ID NO: 644584 - DNA, 25 bp, Homo sapien
cattgtgaatactaaaggtgaggac

SEQ ID NO: 644585 - DNA, 25 bp, Homo sapien
ggatagctcgctcaaactgtacttg

SEQ ID NO: 644586 - DNA, 25 bp, Homo sapien
tgcagttttgacaggcccaacaggg

SEQ ID NO: 644587 - DNA, 25 bp, Homo sapien
acacattgttgctggtctccaaggg

SEQ ID NO: 644588 - DNA, 25 bp, Homo sapien
cagctgggacctcagttggacacgt

SEQ ID NO: 644589 - DNA, 25 bp, Homo sapien
ttctgcacacattgttgctggtctc

SEQ ID NO: 644590 - DNA, 25 bp, Homo sapien
gacctcagttggacacgtatgtggg

SEQ ID NO: 644591 - DNA, 25 bp, Homo sapien
tttgacacttctacccctgagagta

SEQ ID NO: 644592 - DNA, 25 bp, Homo sapien
gctggacatactaggtggagagacc

SEQ ID NO: 644593 - DNA, 25 bp, Homo sapien
gaaattttactgtcccgaggctgcc

SEQ ID NO: 644594 - DNA, 25 bp, Homo sapien
ttgcacacggcctagaagtaggatg

SEQ ID NO: 644595 - DNA, 25 bp, Homo sapien
gaatgcacttacacacgcctttctg

SEQ ID NO: 644596 - DNA, 25 bp, Homo sapien
aacccacagcaaaggatgtggaagt

SEQ ID NO: 644597 - DNA, 25 bp, Homo sapien
gaaacaagaccaatcatccagtatt

SEQ ID NO: 644598 - DNA, 25 bp, Homo sapien
cacttttgcaggttagaatgcactt

SEQ ID NO: 644599 - DNA, 25 bp, Homo sapien
gaattccgagtgtggagacccagac

SEQ ID NO: 644600 - DNA, 25 bp, Homo sapien
ggaagttaaaattgcgagagaagca

SEQ ID NO: 644601 - DNA, 25 bp, Homo sapien
agaagcaacacagagtggttttccc

SEQ ID NO: 644602 - DNA, 25 bp, Homo sapien
ctcgacctcggtaagggaagacgtg

SEQ ID NO: 644603 - DNA, 25 bp, Homo sapien
tgttggcataggactcatcttaagg

SEQ ID NO: 644604 - DNA, 25 bp, Homo sapien
tcatcttggatgcttttggctctaa

SEQ ID NO: 644605 - DNA, 25 bp, Homo sapien
tctaggatctgctggtaaaagtgag

SEQ ID NO: 644606 - DNA, 25 bp, Homo sapien
taaaactgctgatagtaccaaatgc

SEQ ID NO: 644607 - DNA, 25 bp, Homo sapien
gatgtcgggaggaccgcgtagaaag

SEQ ID NO: 644608 - DNA, 25 bp, Homo sapien
agctgagagtgagcttccctttgct

SEQ ID NO: 644609 - DNA, 25 bp, Homo sapien
gaggaccgcgtagaaagctgagagt

SEQ ID NO: 644610 - DNA, 25 bp, Homo sapien
ggtagtgcttgggaagatgtcggga

SEQ ID NO: 644611 - DNA, 25 bp, Homo sapien
cagtccagttggattcatgaggcat

SEQ ID NO: 644612 - DNA, 25 bp, Homo sapien
attcatcctatgatgccaccatcct

SEQ ID NO: 644613 - DNA, 25 bp, Homo sapien
tcctcagcatttgacttccatggct

SEQ ID NO: 644614 - DNA, 25 bp, Homo sapien
cagtgtttcaagaacccagctccat

SEQ ID NO: 644615 - DNA, 25 bp, Homo sapien
atctattgccataataatacagtat

SEQ ID NO: 644616 - DNA, 25 bp, Homo sapien
taatacagtattgaaatttccccca

SEQ ID NO: 644617 - DNA, 25 bp, Homo sapien
aatttcccccaaattcggcagctca

SEQ ID NO: 644618 - DNA, 25 bp, Homo sapien
ttagtaatctattgccataataata

SEQ ID NO: 644619 - DNA, 25 bp, Homo sapien
ttctgctggttgaagctggcctcag

SEQ ID NO: 644620 - DNA, 25 bp, Homo sapien
tcctgcaactatagtcatctgggct

SEQ ID NO: 644621 - DNA, 25 bp, Homo sapien
tgtgggtcaacttggccgttctgct

SEQ ID NO: 644622 - DNA, 25 bp, Homo sapien
ttgtgtgactcatcaacctgtgggt

SEQ ID NO: 644623 - DNA, 25 bp, Homo sapien
ggtccagtgccttaaacccatgcag

SEQ ID NO: 644624 - DNA, 25 bp, Homo sapien
ttggtccagtgccttaaacccatgc

SEQ ID NO: 644625 - DNA, 25 bp, Homo sapien
tggtccagtgccttaaacccatgca

SEQ ID NO: 644626 - DNA, 25 bp, Homo sapien
gtccagtgccttaaacccatgcagt

SEQ ID NO: 644627 - DNA, 25 bp, Homo sapien
agaaatgaggaagcccataattctg

SEQ ID NO: 644628 - DNA, 25 bp, Homo sapien
accgcctgatggttaaaaggctggc

SEQ ID NO: 644629 - DNA, 25 bp, Homo sapien
ctgtgggggaaagtaaccgcctgat

SEQ ID NO: 644630 - DNA, 25 bp, Homo sapien
aggctggccccgtatttcctcctct

SEQ ID NO: 644631 - DNA, 25 bp, Homo sapien
gtttcctcattcatgaaatcagcag

SEQ ID NO: 644632 - DNA, 25 bp, Homo sapien
ttttgcctgcaggataagcctccat

SEQ ID NO: 644633 - DNA, 25 bp, Homo sapien
cagctaatcttgtagggtccatggt

SEQ ID NO: 644634 - DNA, 25 bp, Homo sapien
tgaaaactcagaataccaagccagt

SEQ ID NO: 644635 - DNA, 25 bp, Homo sapien
taatgccttgaaacagtctgcctct

SEQ ID NO: 644636 - DNA, 25 bp, Homo sapien
tctttcttccattttgcgatgcagt

SEQ ID NO: 644637 - DNA, 25 bp, Homo sapien
gatatttaggctgttgagttttcct

SEQ ID NO: 644638 - DNA, 25 bp, Homo sapien
gactgttgtcgttagggtgctatta

SEQ ID NO: 644639 - DNA, 25 bp, Homo sapien
catgccccgcggacttgatttatgc

SEQ ID NO: 644640 - DNA, 25 bp, Homo sapien
ttctctctggtgcaggtccaatctc

SEQ ID NO: 644641 - DNA, 25 bp, Homo sapien
aggtcttggcctcaagtggtgtccc

SEQ ID NO: 644642 - DNA, 25 bp, Homo sapien
ttttctctctggtgcaggtccaatc

SEQ ID NO: 644643 - DNA, 25 bp, Homo sapien
gttgttacactcagaggtcttggcc

SEQ ID NO: 644644 - DNA, 25 bp, Homo sapien
taagaggccctgttatgagccactg

SEQ ID NO: 644645 - DNA, 25 bp, Homo sapien
aatttacaactatgaacacggcaga

SEQ ID NO: 644646 - DNA, 25 bp, Homo sapien
gagccaagtccatcccatgctttag

SEQ ID NO: 644647 - DNA, 25 bp, Homo sapien
cacggcagatttaagaagtgtccat

SEQ ID NO: 644648 - DNA, 25 bp, Homo sapien
tccccacgggtccactgctttattc

SEQ ID NO: 644649 - DNA, 25 bp, Homo sapien
gagtgacttggtgtaaattccttcc

SEQ ID NO: 644650 - DNA, 25 bp, Homo sapien
catcttaagattctggagtgacttg

SEQ ID NO: 644651 - DNA, 25 bp, Homo sapien
gatccccggtcacttgggaatacta

SEQ ID NO: 644652 - DNA, 25 bp, Homo sapien
aaacccatgggcacccatgatacca

SEQ ID NO: 644653 - DNA, 25 bp, Homo sapien
cctcagaaaggcctgttgcaaaccc

SEQ ID NO: 644654 - DNA, 25 bp, Homo sapien
catgggcacccatgataccagacat

SEQ ID NO: 644655 - DNA, 25 bp, Homo sapien
gaaaggcctgttgcaaacccatggg

SEQ ID NO: 644656 - DNA, 25 bp, Homo sapien
cagaaaagaatttgacggacctagg

SEQ ID NO: 644657 - DNA, 25 bp, Homo sapien
tccctgtaacaagtaggtgctgcct

SEQ ID NO: 644658 - DNA, 25 bp, Homo sapien
tggcatgcagaacagatcaataccg

SEQ ID NO: 644659 - DNA, 25 bp, Homo sapien
caactggaacgcattgaggaaggga

SEQ ID NO: 644660 - DNA, 25 bp, Homo sapien
ccagcctgctcgtgtagtggacgaa

SEQ ID NO: 644661 - DNA, 25 bp, Homo sapien
gacgaacgggagcagatggccatca

SEQ ID NO: 644662 - DNA, 25 bp, Homo sapien
caataatcaggacggagtggtggcc

SEQ ID NO: 644663 - DNA, 25 bp, Homo sapien
atggccatcagtggcggcttcatcc

SEQ ID NO: 644664 - DNA, 25 bp, Homo sapien
ggtaacaaatgatgcccgagaaaat

SEQ ID NO: 644665 - DNA, 25 bp, Homo sapien
gcatcatcgggaacctccgtcacat

SEQ ID NO: 644666 - DNA, 25 bp, Homo sapien
caggtgagcggcatcatcgggaacc

SEQ ID NO: 644667 - DNA, 25 bp, Homo sapien
aatgatgcccgagaaaatgaaatgg

SEQ ID NO: 644668 - DNA, 25 bp, Homo sapien
cacaataggtacaaagctggtaatc

SEQ ID NO: 644669 - DNA, 25 bp, Homo sapien
cattgagtgatactggttgagagaa

SEQ ID NO: 644670 - DNA, 25 bp, Homo sapien
aagtacagcaccacaataggtacaa

SEQ ID NO: 644671 - DNA, 25 bp, Homo sapien
gctggtaatcattgagtgatactgg

SEQ ID NO: 644672 - DNA, 25 bp, Homo sapien
tggctctaactccttgaggtcttga

SEQ ID NO: 644673 - DNA, 25 bp, Homo sapien
tttccaaaggttgtacatagtggtc

SEQ ID NO: 644674 - DNA, 25 bp, Homo sapien
catagtggtcatttggtggctctaa

SEQ ID NO: 644675 - DNA, 25 bp, Homo sapien
tctctcctcggtggcatttgctgaa

SEQ ID NO: 644676 - DNA, 25 bp, Homo sapien
actgccacggtcctttgagtgtcag

SEQ ID NO: 644677 - DNA, 25 bp, Homo sapien
aaatgtgccgtctttggttcctcat

SEQ ID NO: 644678 - DNA, 25 bp, Homo sapien
tgttcttgtaaaactgtgacattcc

SEQ ID NO: 644679 - DNA, 25 bp, Homo sapien
gttactgccacggtcctttgagtgt

SEQ ID NO: 644680 - DNA, 25 bp, Homo sapien
aaaagatggatttgacacactcacc

SEQ ID NO: 644681 - DNA, 25 bp, Homo sapien
tatgttttggagagagcaatcttgc

SEQ ID NO: 644682 - DNA, 25 bp, Homo sapien
ttaagttataccagcaaaagtgcag

SEQ ID NO: 644683 - DNA, 25 bp, Homo sapien
gagctatgcacaccaaattgctgag

SEQ ID NO: 644684 - DNA, 25 bp, Homo sapien
cctgagaacaggctctataagtagc

SEQ ID NO: 644685 - DNA, 25 bp, Homo sapien
tcctggttgccttggttggctgtca

SEQ ID NO: 644686 - DNA, 25 bp, Homo sapien
tatgtccacatagtagcaatgcaga

SEQ ID NO: 644687 - DNA, 25 bp, Homo sapien
tactgcatacgtcaaagctgccaag

SEQ ID NO: 644688 - DNA, 25 bp, Homo sapien
cagtcatctccgttaggctaaaggg

SEQ ID NO: 644689 - DNA, 25 bp, Homo sapien
tatgcctcagggatgaatcagctct

SEQ ID NO: 644690 - DNA, 25 bp, Homo sapien
gatgattgaggttatccagccacca

SEQ ID NO: 644691 - DNA, 25 bp, Homo sapien
aatcagctctgggtaatgcgccaac

SEQ ID NO: 644692 - DNA, 25 bp, Homo sapien
ctacttggcactggcagaggaccct

SEQ ID NO: 644693 - DNA, 25 bp, Homo sapien
tacttggcactggcagaggaccctt

SEQ ID NO: 644694 - DNA, 25 bp, Homo sapien
taataaactgatgattgcattgaaa

SEQ ID NO: 644695 - DNA, 25 bp, Homo sapien
cccaatctctgtgtcactaattcat

SEQ ID NO: 644696 - DNA, 25 bp, Homo sapien
ttctcttgtcggactctcatttcta

SEQ ID NO: 644697 - DNA, 25 bp, Homo sapien
cagatcccagtaacagagtcctttt

SEQ ID NO: 644698 - DNA, 25 bp, Homo sapien
tactgagcttccattatatatcaag

SEQ ID NO: 644699 - DNA, 25 bp, Homo sapien
tacagagcataagaggtaggacaga

SEQ ID NO: 644700 - DNA, 25 bp, Homo sapien
gtattggaaaaacagcactaggaga

SEQ ID NO: 644701 - DNA, 25 bp, Homo sapien
ttaactgaacttacactcaagctag

SEQ ID NO: 644702 - DNA, 25 bp, Homo sapien
ctttgtcaggtctaccaataaactg

SEQ ID NO: 644703 - DNA, 25 bp, Homo sapien
taccaataaactgcccaagtatctc

SEQ ID NO: 644704 - DNA, 25 bp, Homo sapien
caggtctaccaataaactgcccaag

SEQ ID NO: 644705 - DNA, 25 bp, Homo sapien
ggtctaccaataaactgcccaagta

SEQ ID NO: 644706 - DNA, 25 bp, Homo sapien
aaagagagcacgttgttccattcca

SEQ ID NO: 644707 - DNA, 25 bp, Homo sapien
tgatataggcgctggttacatgggc

SEQ ID NO: 644708 - DNA, 25 bp, Homo sapien
gcaccacggtctgcaattataaggc

SEQ ID NO: 644709 - DNA, 25 bp, Homo sapien
cccaatgtgaaaaatgctccctgca

SEQ ID NO: 644710 - DNA, 25 bp, Homo sapien
gtcccttgggactagcaacagtggg

SEQ ID NO: 644711 - DNA, 25 bp, Homo sapien
gaaaccaaggaggagagtgcagtcc

SEQ ID NO: 644712 - DNA, 25 bp, Homo sapien
aagcctaccagaagctagtggatgg

SEQ ID NO: 644713 - DNA, 25 bp, Homo sapien
gatggagccaacctagggcaacgtg

SEQ ID NO: 644714 - DNA, 25 bp, Homo sapien
tctatcagtcctaaccagggtgttg

SEQ ID NO: 644715 - DNA, 25 bp, Homo sapien
tatcagtcctaaccagggtgttgac

SEQ ID NO: 644716 - DNA, 25 bp, Homo sapien
tctctctatcagtcctaaccagggt

SEQ ID NO: 644717 - DNA, 25 bp, Homo sapien
tctctatcagtcctaaccagggtgt

SEQ ID NO: 644718 - DNA, 25 bp, Homo sapien
cacagtgtcttggtgggcgggggtc

SEQ ID NO: 644719 - DNA, 25 bp, Homo sapien
gcgggggtcgtgcagattttcttta

SEQ ID NO: 644720 - DNA, 25 bp, Homo sapien
gtcacagtgtcttggtgggcggggg

SEQ ID NO: 644721 - DNA, 25 bp, Homo sapien
cagtgtcttggtgggcgggggtcgt

SEQ ID NO: 644722 - DNA, 25 bp, Homo sapien
cttggctttaggagggacggaagct

SEQ ID NO: 644723 - DNA, 25 bp, Homo sapien
agcctttgctttggccttggcttta

SEQ ID NO: 644724 - DNA, 25 bp, Homo sapien
tttgctttggccttggctttaggag

SEQ ID NO: 644725 - DNA, 25 bp, Homo sapien
gagggacggaagcttccttcttcat

SEQ ID NO: 644726 - DNA, 25 bp, Homo sapien
ttaaatattctcacagttttcaaac

SEQ ID NO: 644727 - DNA, 25 bp, Homo sapien
ctcacagttttcaaacattttcagc

SEQ ID NO: 644728 - DNA, 25 bp, Homo sapien
cacagttttcaaacattttcagcac

SEQ ID NO: 644729 - DNA, 25 bp, Homo sapien
aaatattctcacagttttcaaacat

SEQ ID NO: 644730 - DNA, 25 bp, Homo sapien
cactgaacctgctaaggataaactt

SEQ ID NO: 644731 - DNA, 25 bp, Homo sapien
cttaatactggttgatgccggagcc

SEQ ID NO: 644732 - DNA, 25 bp, Homo sapien
aggccactgaacctgctaaggataa

SEQ ID NO: 644733 - DNA, 25 bp, Homo sapien
tgaacctgctaaggataaacttaat

SEQ ID NO: 644734 - DNA, 25 bp, Homo sapien
atggtagtttattaaagttatcaga

SEQ ID NO: 644735 - DNA, 25 bp, Homo sapien
tggtagtttattaaagttatcagac

SEQ ID NO: 644736 - DNA, 25 bp, Homo sapien
gatggtagtttattaaagttatcag

SEQ ID NO: 644737 - DNA, 25 bp, Homo sapien
agatggtagtttattaaagttatca

SEQ ID NO: 644738 - DNA, 25 bp, Homo sapien
ccatgcttcttaaaggagggccaca

SEQ ID NO: 644739 - DNA, 25 bp, Homo sapien
aagagcagagcggaactgaggattt

SEQ ID NO: 644740 - DNA, 25 bp, Homo sapien
ttgaccaaaggccaattaaataatc

SEQ ID NO: 644741 - DNA, 25 bp, Homo sapien
taacctgttatgatccttgaccaaa

SEQ ID NO: 644742 - DNA, 25 bp, Homo sapien
cagattccagttccttaggttgggt

SEQ ID NO: 644743 - DNA, 25 bp, Homo sapien
ttgggttgggattgagatccagcat

SEQ ID NO: 644744 - DNA, 25 bp, Homo sapien
ggattgagatccagcatttctaacc

SEQ ID NO: 644745 - DNA, 25 bp, Homo sapien
cggtacacacaaatcaccagggcat

SEQ ID NO: 644746 - DNA, 25 bp, Homo sapien
tgagcccagtgaacctccaaaacca

SEQ ID NO: 644747 - DNA, 25 bp, Homo sapien
ctgagcccagtgaacctccaaaacc

SEQ ID NO: 644748 - DNA, 25 bp, Homo sapien
gagcccagtgaacctccaaaaccat

SEQ ID NO: 644749 - DNA, 25 bp, Homo sapien
cttccatggtttatactcatcttcc

SEQ ID NO: 644750 - DNA, 25 bp, Homo sapien
ttccatggtttatactcatcttcca

SEQ ID NO: 644751 - DNA, 25 bp, Homo sapien
aacttccatggtttatactcatctt

SEQ ID NO: 644752 - DNA, 25 bp, Homo sapien
tccatggtttatactcatcttccat

SEQ ID NO: 644753 - DNA, 25 bp, Homo sapien
tacacccttgtattcaactgtgaag

SEQ ID NO: 644754 - DNA, 25 bp, Homo sapien
ttccgtaacatatgcacagcaaggg

SEQ ID NO: 644755 - DNA, 25 bp, Homo sapien
ggagccaccagaaattcgtgcctta

SEQ ID NO: 644756 - DNA, 25 bp, Homo sapien
aaattaatatggagtggctcagacc

SEQ ID NO: 644757 - DNA, 25 bp, Homo sapien
tagatggccgtggttgcccacgcct

SEQ ID NO: 644758 - DNA, 25 bp, Homo sapien
gatggccgtggttgcccacgcctgt

SEQ ID NO: 644759 - DNA, 25 bp, Homo sapien
ttagatggccgtggttgcccacgcc

SEQ ID NO: 644760 - DNA, 25 bp, Homo sapien
tggccgtggttgcccacgcctgtag

SEQ ID NO: 644761 - DNA, 25 bp, Homo sapien
cacgtggtgagagtagaggcaaaca

SEQ ID NO: 644762 - DNA, 25 bp, Homo sapien
agttctgtacaaggagcatggcgcc

SEQ ID NO: 644763 - DNA, 25 bp, Homo sapien
gaagctggcctgttcaggaatcacg

SEQ ID NO: 644764 - DNA, 25 bp, Homo sapien
aactcgctcttgcaggaactaatag

SEQ ID NO: 644765 - DNA, 25 bp, Homo sapien
aattgtatgttttgtcaaggcctgc

SEQ ID NO: 644766 - DNA, 25 bp, Homo sapien
tctatggattttagtgcgccaagac

SEQ ID NO: 644767 - DNA, 25 bp, Homo sapien
caaaccaaatgagttcaaggatacc

SEQ ID NO: 644768 - DNA, 25 bp, Homo sapien
tttatttagacagctgaaacagggc

SEQ ID NO: 644769 - DNA, 25 bp, Homo sapien
tacccaactcctatgtgacacattg

SEQ ID NO: 644770 - DNA, 25 bp, Homo sapien
tataagatcaattggagaggttcgc

SEQ ID NO: 644771 - DNA, 25 bp, Homo sapien
gataaaaatgcaaaggcatggcatc

SEQ ID NO: 644772 - DNA, 25 bp, Homo sapien
tgctgtataagaaagtacatcccaa

SEQ ID NO: 644773 - DNA, 25 bp, Homo sapien
ttccattcacgaatcaccttttttc

SEQ ID NO: 644774 - DNA, 25 bp, Homo sapien
atggcatttccattcacgaatcacc

SEQ ID NO: 644775 - DNA, 25 bp, Homo sapien
gcatttccattcacgaatcaccttt

SEQ ID NO: 644776 - DNA, 25 bp, Homo sapien
tccattcacgaatcaccttttttcc

SEQ ID NO: 644777 - DNA, 25 bp, Homo sapien
tcttgtaatacgaacatgctattct

SEQ ID NO: 644778 - DNA, 25 bp, Homo sapien
cttgtaatacgaacatgctattctc

SEQ ID NO: 644779 - DNA, 25 bp, Homo sapien
caattgccaacagactagtttattt

SEQ ID NO: 644780 - DNA, 25 bp, Homo sapien
ttgccaacagactagtttatttgtt

SEQ ID NO: 644781 - DNA, 25 bp, Homo sapien
gagaatctgcctgaactgaccaaag

SEQ ID NO: 644782 - DNA, 25 bp, Homo sapien
tgtaggccactaagctttgcagtca

SEQ ID NO: 644783 - DNA, 25 bp, Homo sapien
tctggccagttagcaacacagggag

SEQ ID NO: 644784 - DNA, 25 bp, Homo sapien
caacaacagattctagggcactgca

SEQ ID NO: 644785 - DNA, 25 bp, Homo sapien
ctgcaggacatgcagtgccgtctga

SEQ ID NO: 644786 - DNA, 25 bp, Homo sapien
cttgagtgttaactgcaggacatgc

SEQ ID NO: 644787 - DNA, 25 bp, Homo sapien
ccaacaaagcccatggttccttgag

SEQ ID NO: 644788 - DNA, 25 bp, Homo sapien
catggttccttgagtgttaactgca

SEQ ID NO: 644789 - DNA, 25 bp, Homo sapien
tttggagccaaattttgcagtgcac

SEQ ID NO: 644790 - DNA, 25 bp, Homo sapien
aattttgcagtgcacacatctttca

SEQ ID NO: 644791 - DNA, 25 bp, Homo sapien
agcaagctgcagattgttgcttcat

SEQ ID NO: 644792 - DNA, 25 bp, Homo sapien
gagaagcaagctgcagattgttgct

SEQ ID NO: 644793 - DNA, 25 bp, Homo sapien
tccataactattaggacatattgag

SEQ ID NO: 644794 - DNA, 25 bp, Homo sapien
cttccataactattaggacatattg

SEQ ID NO: 644795 - DNA, 25 bp, Homo sapien
ccataactattaggacatattgagc

SEQ ID NO: 644796 - DNA, 25 bp, Homo sapien
ttccataactattaggacatattga

SEQ ID NO: 644797 - DNA, 25 bp, Homo sapien
ttcctagccaacataaaagccccac

SEQ ID NO: 644798 - DNA, 25 bp, Homo sapien
attcctagccaacataaaagcccca

SEQ ID NO: 644799 - DNA, 25 bp, Homo sapien
tattcctagccaacataaaagcccc

SEQ ID NO: 644800 - DNA, 25 bp, Homo sapien
tttattcctagccaacataaaagcc

SEQ ID NO: 644801 - DNA, 25 bp, Homo sapien
ttggcacaggacaagatctacgtgg

SEQ ID NO: 644802 - DNA, 25 bp, Homo sapien
tctacgtggtcactgattagctgcc

SEQ ID NO: 644803 - DNA, 25 bp, Homo sapien
gaagtgtctccggataaagttgtac

SEQ ID NO: 644804 - DNA, 25 bp, Homo sapien
ccttcctaggttaagcagctggtcc

SEQ ID NO: 644805 - DNA, 25 bp, Homo sapien
gggattcgacaaccacaggtctcag

SEQ ID NO: 644806 - DNA, 25 bp, Homo sapien
cacatgattctgtatggaggctgtc

SEQ ID NO: 644807 - DNA, 25 bp, Homo sapien
tgaggactgtgaggttgtacacacg

SEQ ID NO: 644808 - DNA, 25 bp, Homo sapien
gaacattttcaatcaggttgcagca

SEQ ID NO: 644809 - DNA, 25 bp, Homo sapien
gcattatcacgttttaacattaaaa

SEQ ID NO: 644810 - DNA, 25 bp, Homo sapien
tttttctatttattgcattatcacg

SEQ ID NO: 644811 - DNA, 25 bp, Homo sapien
cagcattgtggctataaaatcaaaa

SEQ ID NO: 644812 - DNA, 25 bp, Homo sapien
tattctttaggaattaaagtatgaa

SEQ ID NO: 644813 - DNA, 25 bp, Homo sapien
cagacctctgcaaaaagtatgttcc

SEQ ID NO: 644814 - DNA, 25 bp, Homo sapien
ttttacagactgctttgcagacctc

SEQ ID NO: 644815 - DNA, 25 bp, Homo sapien
gaaagatatcccagctacaagaagc

SEQ ID NO: 644816 - DNA, 25 bp, Homo sapien
gttccaagatggacacctatgaaag

SEQ ID NO: 644817 - DNA, 25 bp, Homo sapien
tcctgtggtgataaagctattgtca

SEQ ID NO: 644818 - DNA, 25 bp, Homo sapien
ggcaactgggcccaaataaagggca

SEQ ID NO: 644819 - DNA, 25 bp, Homo sapien
tagctaaagggctgtaaccatggca

SEQ ID NO: 644820 - DNA, 25 bp, Homo sapien
gccaggaacagccaaggtacttaaa

SEQ ID NO: 644821 - DNA, 25 bp, Homo sapien
gctggttgtggcgaaatgcccttaa

SEQ ID NO: 644822 - DNA, 25 bp, Homo sapien
gaagactggcaaaacgctgttaact

SEQ ID NO: 644823 - DNA, 25 bp, Homo sapien
tgcttgactggaaatgttagcctct

SEQ ID NO: 644824 - DNA, 25 bp, Homo sapien
taactattaaagctggttgtggcaa

SEQ ID NO: 644825 - DNA, 25 bp, Homo sapien
cttgctcaggaatgtcgtcgttttt

SEQ ID NO: 644826 - DNA, 25 bp, Homo sapien
gctgcttttgattctgtaccacccc

SEQ ID NO: 644827 - DNA, 25 bp, Homo sapien
ctctccacaagttccgaaggctcat

SEQ ID NO: 644828 - DNA, 25 bp, Homo sapien
tgtatgagcccaactaaagggacca

SEQ ID NO: 644829 - DNA, 25 bp, Homo sapien
tgctaacagcgtaactgagtcagga

SEQ ID NO: 644830 - DNA, 25 bp, Homo sapien
ggtcagcttgacctatatccaagag

SEQ ID NO: 644831 - DNA, 25 bp, Homo sapien
cacgtggtcttcaactgtgctatga

SEQ ID NO: 644832 - DNA, 25 bp, Homo sapien
ccaccaaaccattcaaggtcagctt

SEQ ID NO: 644833 - DNA, 25 bp, Homo sapien
cacctctaacttgttgtccccttat

SEQ ID NO: 644834 - DNA, 25 bp, Homo sapien
cccttatgtgcaccttagctctcaa

SEQ ID NO: 644835 - DNA, 25 bp, Homo sapien
tgttgtccccttatgtgcaccttag

SEQ ID NO: 644836 - DNA, 25 bp, Homo sapien
tgtgcaccttagctctcaactaaat

SEQ ID NO: 644837 - DNA, 25 bp, Homo sapien
tgcataactatgactatttttctcc

SEQ ID NO: 644838 - DNA, 25 bp, Homo sapien
ctcttttgcataactatgactattt

SEQ ID NO: 644839 - DNA, 25 bp, Homo sapien
ccatctttagttacggcagggagtc

SEQ ID NO: 644840 - DNA, 25 bp, Homo sapien
tagttcagatgtcacctactcagag

SEQ ID NO: 644841 - DNA, 25 bp, Homo sapien
cccacgataacagaaggtagcagcc

SEQ ID NO: 644842 - DNA, 25 bp, Homo sapien
tagagaatcttgtcccctttggtcc

SEQ ID NO: 644843 - DNA, 25 bp, Homo sapien
cgtatctactaactcggcagtgctg

SEQ ID NO: 644844 - DNA, 25 bp, Homo sapien
gaacatggagtcaggaccgtgcaag

SEQ ID NO: 644845 - DNA, 25 bp, Homo sapien
cgcggctgctttcacgtagctggca

SEQ ID NO: 644846 - DNA, 25 bp, Homo sapien
ttgagtctctgaaacggcaacagga

SEQ ID NO: 644847 - DNA, 25 bp, Homo sapien
tattcagcgtatattccagcaaatt

SEQ ID NO: 644848 - DNA, 25 bp, Homo sapien
agggcacggagcacgcgcagctctg

SEQ ID NO: 644849 - DNA, 25 bp, Homo sapien
acaaccttcgcgtcgcgcgagggca

SEQ ID NO: 644850 - DNA, 25 bp, Homo sapien
tgctgccgcggatcccgacaacctt

SEQ ID NO: 644851 - DNA, 25 bp, Homo sapien
acatatcaaaatggcacagcttctg

SEQ ID NO: 644852 - DNA, 25 bp, Homo sapien
taaataacatatcaaaatggcacag

SEQ ID NO: 644853 - DNA, 25 bp, Homo sapien
tttaaataacatatcaaaatggcac

SEQ ID NO: 644854 - DNA, 25 bp, Homo sapien
ataacatatcaaaatggcacagctt

SEQ ID NO: 644855 - DNA, 25 bp, Homo sapien
gaaagccgcgatattctgaacagag

SEQ ID NO: 644856 - DNA, 25 bp, Homo sapien
tccacgggccatcgaagtgtttcgc

SEQ ID NO: 644857 - DNA, 25 bp, Homo sapien
ttaaaaatagcctgcgtccggcgcc

SEQ ID NO: 644858 - DNA, 25 bp, Homo sapien
tggcctcaatcctgcagcgaagctg

SEQ ID NO: 644859 - DNA, 25 bp, Homo sapien
gagcttcagcggagagcctcatctt

SEQ ID NO: 644860 - DNA, 25 bp, Homo sapien
tctgggcagataatagagcttcagc

SEQ ID NO: 644861 - DNA, 25 bp, Homo sapien
gaagacagagggttccatgaaagat

SEQ ID NO: 644862 - DNA, 25 bp, Homo sapien
tctgaactgcaaccaaagtaaccag

SEQ ID NO: 644863 - DNA, 25 bp, Homo sapien
tgcaaacgacttacccatctgacct

SEQ ID NO: 644864 - DNA, 25 bp, Homo sapien
cacatagatgcagccacttttgact

SEQ ID NO: 644865 - DNA, 25 bp, Homo sapien
caaatagtttgacacttcatctggg

SEQ ID NO: 644866 - DNA, 25 bp, Homo sapien
agtacttggttagagcagggtttca

SEQ ID NO: 644867 - DNA, 25 bp, Homo sapien
gattgcttctgtcatagagtcctcc

SEQ ID NO: 644868 - DNA, 25 bp, Homo sapien
ttgcttctgtcatagagtcctcctc

SEQ ID NO: 644869 - DNA, 25 bp, Homo sapien
agattgcttctgtcatagagtcctc

SEQ ID NO: 644870 - DNA, 25 bp, Homo sapien
ttagattgcttctgtcatagagtcc

SEQ ID NO: 644871 - DNA, 25 bp, Homo sapien
gagggaagacagtcccaacgacgaa

SEQ ID NO: 644872 - DNA, 25 bp, Homo sapien
tgatggtcggagagtaaggatcctc

SEQ ID NO: 644873 - DNA, 25 bp, Homo sapien
ttctcagagtgacacaagactgcct

SEQ ID NO: 644874 - DNA, 25 bp, Homo sapien
cgaaaactatccaaagtggccccag

SEQ ID NO: 644875 - DNA, 25 bp, Homo sapien
tagctggaataatctgacccttgag

SEQ ID NO: 644876 - DNA, 25 bp, Homo sapien
ctttacttacaacttggcaatgtgt

SEQ ID NO: 644877 - DNA, 25 bp, Homo sapien
aatgtgttttattatcggtgtgcat

SEQ ID NO: 644878 - DNA, 25 bp, Homo sapien
tctcttggttcctggggatgacgat

SEQ ID NO: 644879 - DNA, 25 bp, Homo sapien
tacccatgtgggtacacctgaattc

SEQ ID NO: 644880 - DNA, 25 bp, Homo sapien
tcaaattgtccatatagtgcctgaa

SEQ ID NO: 644881 - DNA, 25 bp, Homo sapien
tgtccatatagtgcctgaagaagat

SEQ ID NO: 644882 - DNA, 25 bp, Homo sapien
tggagttggtggtacccatgtgggt

SEQ ID NO: 644883 - DNA, 25 bp, Homo sapien
tgatatgtaacttgggcagcagaag

SEQ ID NO: 644884 - DNA, 25 bp, Homo sapien
tgaggtttcttctcgcacacatgtt

SEQ ID NO: 644885 - DNA, 25 bp, Homo sapien
ccaggcatgctgagatgctcgagag

SEQ ID NO: 644886 - DNA, 25 bp, Homo sapien
ttagtcagccacttgatatgtaact

SEQ ID NO: 644887 - DNA, 25 bp, Homo sapien
cctggaatcgtgaagtgtagttcat

SEQ ID NO: 644888 - DNA, 25 bp, Homo sapien
cagcctggaatcgtgaagtgtagtt

SEQ ID NO: 644889 - DNA, 25 bp, Homo sapien
agcctggaatcgtgaagtgtagttc

SEQ ID NO: 644890 - DNA, 25 bp, Homo sapien
gcagcctggaatcgtgaagtgtagt

SEQ ID NO: 644891 - DNA, 25 bp, Homo sapien
gggatgtaaagagccccttcctaga

SEQ ID NO: 644892 - DNA, 25 bp, Homo sapien
tttttctggccagaagatgggccat

SEQ ID NO: 644893 - DNA, 25 bp, Homo sapien
ccaaatgtattccaagggctcctca

SEQ ID NO: 644894 - DNA, 25 bp, Homo sapien
tactaggtctgtgtgtagaagccca

SEQ ID NO: 644895 - DNA, 25 bp, Homo sapien
gctagaggcgatcatgcctaataat

SEQ ID NO: 644896 - DNA, 25 bp, Homo sapien
tccccatgctagaggcgatcatgcc

SEQ ID NO: 644897 - DNA, 25 bp, Homo sapien
ggcgatcatgcctaataatttatta

SEQ ID NO: 644898 - DNA, 25 bp, Homo sapien
gctttccccatgctagaggcgatca

SEQ ID NO: 644899 - DNA, 25 bp, Homo sapien
gcaacactataaagtagagggtcgc

SEQ ID NO: 644900 - DNA, 25 bp, Homo sapien
ccaagtgtggtaggatatcgccttg

SEQ ID NO: 644901 - DNA, 25 bp, Homo sapien
cgtccccactgtggaacagtgacca

SEQ ID NO: 644902 - DNA, 25 bp, Homo sapien
tctgaaccagtaagttggacagcct

SEQ ID NO: 644903 - DNA, 25 bp, Homo sapien
tgggcagctggggccacaggcccat

SEQ ID NO: 644904 - DNA, 25 bp, Homo sapien
ctttcatcctggataatgggcagct

SEQ ID NO: 644905 - DNA, 25 bp, Homo sapien
ttcatcctggataatgggcagctgg

SEQ ID NO: 644906 - DNA, 25 bp, Homo sapien
aatgggcagctggggccacaggccc

SEQ ID NO: 644907 - DNA, 25 bp, Homo sapien
tggtgccgtgttcttgtccctccat

SEQ ID NO: 644908 - DNA, 25 bp, Homo sapien
gactttatcagagaacctggctttg

SEQ ID NO: 644909 - DNA, 25 bp, Homo sapien
gccgcttcccgggtgactttatcag

SEQ ID NO: 644910 - DNA, 25 bp, Homo sapien
tatcagagaacctggctttggtgcc

SEQ ID NO: 644911 - DNA, 25 bp, Homo sapien
cacattttaactgacattagggcac

SEQ ID NO: 644912 - DNA, 25 bp, Homo sapien
ttaagctcttggctaaattctttcc

SEQ ID NO: 644913 - DNA, 25 bp, Homo sapien
gggcaccaagtgcaaaaatctgcaa

SEQ ID NO: 644914 - DNA, 25 bp, Homo sapien
gcaaaaatctgcaaacagttagctt

SEQ ID NO: 644915 - DNA, 25 bp, Homo sapien
taaggcggtgcagtctcagacgtac

SEQ ID NO: 644916 - DNA, 25 bp, Homo sapien
aaacaatcgtgtaagaaggcttgcc

SEQ ID NO: 644917 - DNA, 25 bp, Homo sapien
cgtactggttggagatttgaagcac

SEQ ID NO: 644918 - DNA, 25 bp, Homo sapien
cagtaatacactggctggtcctttc

SEQ ID NO: 644919 - DNA, 25 bp, Homo sapien
agtgcagccacatgcagcagggtgt

SEQ ID NO: 644920 - DNA, 25 bp, Homo sapien
gcagccacatgcagcagggtgttgt

SEQ ID NO: 644921 - DNA, 25 bp, Homo sapien
gccacatgcagcagggtgttgtcat

SEQ ID NO: 644922 - DNA, 25 bp, Homo sapien
ccttgattgggacatagtgcagcca

SEQ ID NO: 644923 - DNA, 25 bp, Homo sapien
tctctagtcctcacttcacctgagg

SEQ ID NO: 644924 - DNA, 25 bp, Homo sapien
cccctggtgacatattgtagtgaaa

SEQ ID NO: 644925 - DNA, 25 bp, Homo sapien
aaaaacacaacccatctctagtcct

SEQ ID NO: 644926 - DNA, 25 bp, Homo sapien
tattcttttagtgcccctctccaag

SEQ ID NO: 644927 - DNA, 25 bp, Homo sapien
catgtggtccttaggagccttctgg

SEQ ID NO: 644928 - DNA, 25 bp, Homo sapien
cacatgtggtccttaggagccttct

SEQ ID NO: 644929 - DNA, 25 bp, Homo sapien
attccctcacatgtggtccttagga

SEQ ID NO: 644930 - DNA, 25 bp, Homo sapien
caggttagtccctatcattccctca

SEQ ID NO: 644931 - DNA, 25 bp, Homo sapien
aaaacagcctcagccatgagtcggg

SEQ ID NO: 644932 - DNA, 25 bp, Homo sapien
gacatgctccctgtgatgcttagga

SEQ ID NO: 644933 - DNA, 25 bp, Homo sapien
tgcttgagactagccagagtgggtc

SEQ ID NO: 644934 - DNA, 25 bp, Homo sapien
gccctgttgtgaagctacgcaaaac

SEQ ID NO: 644935 - DNA, 25 bp, Homo sapien
cctggaggagtgataataattgagc

SEQ ID NO: 644936 - DNA, 25 bp, Homo sapien
gcttcagtagtttaggccttgagtg

SEQ ID NO: 644937 - DNA, 25 bp, Homo sapien
gatttagagcagtaacttccagacc

SEQ ID NO: 644938 - DNA, 25 bp, Homo sapien
gctatagaatccagctaaaggcctg

SEQ ID NO: 644939 - DNA, 25 bp, Homo sapien
cagcttgttaatgataggtatgcag

SEQ ID NO: 644940 - DNA, 25 bp, Homo sapien
caaccccagactaatggtttcttgc

SEQ ID NO: 644941 - DNA, 25 bp, Homo sapien
gactattaagaacaacttcgtgcca

SEQ ID NO: 644942 - DNA, 25 bp, Homo sapien
tgtaagggttcctagtacagaaaca

SEQ ID NO: 644943 - DNA, 25 bp, Homo sapien
actgctgactgcgataaccaggaac

SEQ ID NO: 644944 - DNA, 25 bp, Homo sapien
ttgactgctgactgcgataaccagg

SEQ ID NO: 644945 - DNA, 25 bp, Homo sapien
tgctgactgcgataaccaggaacgg

SEQ ID NO: 644946 - DNA, 25 bp, Homo sapien
tgactgcgataaccaggaacggttt

SEQ ID NO: 644947 - DNA, 25 bp, Homo sapien
tgacctaaacagagcaaaagggtac

SEQ ID NO: 644948 - DNA, 25 bp, Homo sapien
aatattaaaatagtacaactctcaa

SEQ ID NO: 644949 - DNA, 25 bp, Homo sapien
ctaaacagagcaaaagggtacagaa

SEQ ID NO: 644950 - DNA, 25 bp, Homo sapien
caactctcaataatgacctaaacag

SEQ ID NO: 644951 - DNA, 25 bp, Homo sapien
tgtttaaaatctgccattcgaacat

SEQ ID NO: 644952 - DNA, 25 bp, Homo sapien
ctggcagcaccaaaatgtttaaaat

SEQ ID NO: 644953 - DNA, 25 bp, Homo sapien
aaaatgtttaaaatctgccattcga

SEQ ID NO: 644954 - DNA, 25 bp, Homo sapien
aatgtttaaaatctgccattcgaac

SEQ ID NO: 644955 - DNA, 25 bp, Homo sapien
tgggagtgagaccagaacaacaggt

SEQ ID NO: 644956 - DNA, 25 bp, Homo sapien
tgaattccagttctgatccactaat

SEQ ID NO: 644957 - DNA, 25 bp, Homo sapien
gtcacctagccagatatcatatgcc

SEQ ID NO: 644958 - DNA, 25 bp, Homo sapien
ggcttttcaaaatccacctctagtc

SEQ ID NO: 644959 - DNA, 25 bp, Homo sapien
ttcaagtcttgcctgcaccttgctt

SEQ ID NO: 644960 - DNA, 25 bp, Homo sapien
ttgcctgcaccttgcttacaatggc

SEQ ID NO: 644961 - DNA, 25 bp, Homo sapien
tcttgcctgcaccttgcttacaatg

SEQ ID NO: 644962 - DNA, 25 bp, Homo sapien
aagtcttgcctgcaccttgcttaca

SEQ ID NO: 644963 - DNA, 25 bp, Homo sapien
gcagtactttgcttccatctgagcc

SEQ ID NO: 644964 - DNA, 25 bp, Homo sapien
tcaggctatccacgccttcatcaag

SEQ ID NO: 644965 - DNA, 25 bp, Homo sapien
gatctgatccatgtcacccttgaag

SEQ ID NO: 644966 - DNA, 25 bp, Homo sapien
tgggttcctctgtgtactgcacgca

SEQ ID NO: 644967 - DNA, 25 bp, Homo sapien
taaagatatctttttaaagagtagc

SEQ ID NO: 644968 - DNA, 25 bp, Homo sapien
aagatatctttttaaagagtagccg

SEQ ID NO: 644969 - DNA, 25 bp, Homo sapien
ctaaagatatctttttaaagagtag

SEQ ID NO: 644970 - DNA, 25 bp, Homo sapien
gttccctgctcatcgtacactgctc

SEQ ID NO: 644971 - DNA, 25 bp, Homo sapien
tgctcatcgtacactgctctctgtt

SEQ ID NO: 644972 - DNA, 25 bp, Homo sapien
ccctgctcatcgtacactgctctct

SEQ ID NO: 644973 - DNA, 25 bp, Homo sapien
ctgctcatcgtacactgctctctgt

SEQ ID NO: 644974 - DNA, 25 bp, Homo sapien
aagcagcgggtggcgtcctccttgt

SEQ ID NO: 644975 - DNA, 25 bp, Homo sapien
tggaagcagcgggtggcgtcctcct

SEQ ID NO: 644976 - DNA, 25 bp, Homo sapien
ggatctggaagcagcgggtggcgtc

SEQ ID NO: 644977 - DNA, 25 bp, Homo sapien
agcgggtggcgtcctccttgtcgcc

SEQ ID NO: 644978 - DNA, 25 bp, Homo sapien
ttgtggtagcctcgtcggacctcgc

SEQ ID NO: 644979 - DNA, 25 bp, Homo sapien
acaccttgtggtagcctcgtcggac

SEQ ID NO: 644980 - DNA, 25 bp, Homo sapien
gggacaccttgtggtagcctcgtcg

SEQ ID NO: 644981 - DNA, 25 bp, Homo sapien
cctgcagggacaccttgtggtagcc

SEQ ID NO: 644982 - DNA, 25 bp, Homo sapien
gcacgcccagcacccagtaaagcca

SEQ ID NO: 644983 - DNA, 25 bp, Homo sapien
agtaaagccagccattaattatttt

SEQ ID NO: 644984 - DNA, 25 bp, Homo sapien
gtaaagccagccattaattattttc

SEQ ID NO: 644985 - DNA, 25 bp, Homo sapien
cccacagagttgttcaaagcctgac

SEQ ID NO: 644986 - DNA, 25 bp, Homo sapien
aaatacagcacttacagggtgtggc

SEQ ID NO: 644987 - DNA, 25 bp, Homo sapien
gagaatctactgtacttatagggca

SEQ ID NO: 644988 - DNA, 25 bp, Homo sapien
aaaggctttctggttcccacagagt

SEQ ID NO: 644989 - DNA, 25 bp, Homo sapien
tcaaccacttgcgtagtaccccaaa

SEQ ID NO: 644990 - DNA, 25 bp, Homo sapien
taatgtccataaacaagaaaggtct

SEQ ID NO: 644991 - DNA, 25 bp, Homo sapien
ttctcagcggcatagattctaagcc

SEQ ID NO: 644992 - DNA, 25 bp, Homo sapien
aatttggcatctgaaagtctgaaac

SEQ ID NO: 644993 - DNA, 25 bp, Homo sapien
taattcaggtaattactcagtacag

SEQ ID NO: 644994 - DNA, 25 bp, Homo sapien
tccatgcttggtttgtcaagacaag

SEQ ID NO: 644995 - DNA, 25 bp, Homo sapien
cagaaatctgcaggactcactctaa

SEQ ID NO: 644996 - DNA, 25 bp, Homo sapien
ttaatgaactgaaacacgttgaagc

SEQ ID NO: 644997 - DNA, 25 bp, Homo sapien
tgtcaatgtgcagcttaacagaggg

SEQ ID NO: 644998 - DNA, 25 bp, Homo sapien
tatttgatcagggaacagaaggtgt

SEQ ID NO: 644999 - DNA, 25 bp, Homo sapien
tatctagagctacccagtactgggc

SEQ ID NO: 645000 - DNA, 25 bp, Homo sapien
aacagctatgtaagtccccaggaga

SEQ ID NO: 645001 - DNA, 25 bp, Homo sapien
aactgtagagaactgcctcagggca

SEQ ID NO: 645002 - DNA, 25 bp, Homo sapien
ggagactgacataccctgagctggg

SEQ ID NO: 645003 - DNA, 25 bp, Homo sapien
gaaagagacccacagtcgaaacgga

SEQ ID NO: 645004 - DNA, 25 bp, Homo sapien
cagggcacccttctagctcagataa

SEQ ID NO: 645005 - DNA, 25 bp, Homo sapien
atggcaaagccggtagaactacgta

SEQ ID NO: 645006 - DNA, 25 bp, Homo sapien
tgaataacaagggaatcaaggctcc

SEQ ID NO: 645007 - DNA, 25 bp, Homo sapien
gaactacgtaagctcagaagaggcc

SEQ ID NO: 645008 - DNA, 25 bp, Homo sapien
tattataccccgattaccagaacag

SEQ ID NO: 645009 - DNA, 25 bp, Homo sapien
tacaaagtaagattggtgtgcttcc

SEQ ID NO: 645010 - DNA, 25 bp, Homo sapien
taaggcaggcagtgtactctatggc

SEQ ID NO: 645011 - DNA, 25 bp, Homo sapien
tggtgaaccaacaagattactctgt

SEQ ID NO: 645012 - DNA, 25 bp, Homo sapien
caaagtatcttcacggtctcaatgg

SEQ ID NO: 645013 - DNA, 25 bp, Homo sapien
gcatcaccattaggacatctggcag

SEQ ID NO: 645014 - DNA, 25 bp, Homo sapien
ggttctgagctgcaaaggcactttc

SEQ ID NO: 645015 - DNA, 25 bp, Homo sapien
ctgggagcctgatccgagaccgtgt

SEQ ID NO: 645016 - DNA, 25 bp, Homo sapien
cagaagtgggagctcaaagaccagg

SEQ ID NO: 645017 - DNA, 25 bp, Homo sapien
cattgccagtgtaagccagcttgtc

SEQ ID NO: 645018 - DNA, 25 bp, Homo sapien
taagccagcttgtcaaaacttaaat

SEQ ID NO: 645019 - DNA, 25 bp, Homo sapien
gatttcccagccaaccacagaaact

SEQ ID NO: 645020 - DNA, 25 bp, Homo sapien
gctgtgagatgcggcactcgatttc

SEQ ID NO: 645021 - DNA, 25 bp, Homo sapien
ctaagtcagcaacggcctcagactc

SEQ ID NO: 645022 - DNA, 25 bp, Homo sapien
tcagactctacctagcggcggcagt

SEQ ID NO: 645023 - DNA, 25 bp, Homo sapien
gagtatgacacgacagtttaaagaa

SEQ ID NO: 645024 - DNA, 25 bp, Homo sapien
gtttaaagaactacaagccctcaga

SEQ ID NO: 645025 - DNA, 25 bp, Homo sapien
tgtctaccagcgtgtacgccggctg

SEQ ID NO: 645026 - DNA, 25 bp, Homo sapien
gctgcttggcaaaccgggctttctg

SEQ ID NO: 645027 - DNA, 25 bp, Homo sapien
cggtttaagctctgggcactttcca

SEQ ID NO: 645028 - DNA, 25 bp, Homo sapien
tgtccagtttgggtgttttgtcggc

SEQ ID NO: 645029 - DNA, 25 bp, Homo sapien
gtagaaggccgtcaccaagcaacag

SEQ ID NO: 645030 - DNA, 25 bp, Homo sapien
cagctgctcccgcacgttgttggtg

SEQ ID NO: 645031 - DNA, 25 bp, Homo sapien
cagatccaagccacagttaagacag

SEQ ID NO: 645032 - DNA, 25 bp, Homo sapien
cgtgttggccccatgtttctcaatg

SEQ ID NO: 645033 - DNA, 25 bp, Homo sapien
ggcaggcacaaaaccaattaactct

SEQ ID NO: 645034 - DNA, 25 bp, Homo sapien
gaaaaaagcatcatcgcaggaacaa

SEQ ID NO: 645035 - DNA, 25 bp, Homo sapien
aagcatcatcgcaggaacaaaagaa

SEQ ID NO: 645036 - DNA, 25 bp, Homo sapien
agaataccaacagtggttctcctgc

SEQ ID NO: 645037 - DNA, 25 bp, Homo sapien
cagcgagctgtttccatcacgttta

SEQ ID NO: 645038 - DNA, 25 bp, Homo sapien
gatttccttgatcgggttcccatca

SEQ ID NO: 645039 - DNA, 25 bp, Homo sapien
ccatcacgtttactaacaagatcga

SEQ ID NO: 645040 - DNA, 25 bp, Homo sapien
tgcaacggcagcaatcagcgagctg

SEQ ID NO: 645041 - DNA, 25 bp, Homo sapien
ggaaggctcgcaagcgatgtagatt

SEQ ID NO: 645042 - DNA, 25 bp, Homo sapien
catgtatttcattgttcgctgaagg

SEQ ID NO: 645043 - DNA, 25 bp, Homo sapien
tagattgaatattcagcggaaacat

SEQ ID NO: 645044 - DNA, 25 bp, Homo sapien
tggccacatgtatttcattgttcgc

SEQ ID NO: 645045 - DNA, 25 bp, Homo sapien
ctgcaaatgtgctccgtagtaagac

SEQ ID NO: 645046 - DNA, 25 bp, Homo sapien
actgcaaatgtgctccgtagtaaga

SEQ ID NO: 645047 - DNA, 25 bp, Homo sapien
tgcaaatgtgctccgtagtaagacc

SEQ ID NO: 645048 - DNA, 25 bp, Homo sapien
tgatgttcgcacagttatcctggta

SEQ ID NO: 645049 - DNA, 25 bp, Homo sapien
tgcactttgtcttcaccggctggag

SEQ ID NO: 645050 - DNA, 25 bp, Homo sapien
gctggagactggaagaccgacactc

SEQ ID NO: 645051 - DNA, 25 bp, Homo sapien
cctggtaataggagtcagaggtgca

SEQ ID NO: 645052 - DNA, 25 bp, Homo sapien
ggcaggtattacagtcatcatccca

SEQ ID NO: 645053 - DNA, 25 bp, Homo sapien
aggcgatccgtccattcaggcactg

SEQ ID NO: 645054 - DNA, 25 bp, Homo sapien
ctttgagcaggcgatccgtccattc

SEQ ID NO: 645055 - DNA, 25 bp, Homo sapien
ctccccatggtgatgcaaggtctcc

SEQ ID NO: 645056 - DNA, 25 bp, Homo sapien
tccaaaggcacaaggtgaagactgg

SEQ ID NO: 645057 - DNA, 25 bp, Homo sapien
tcatccacacaggtcgctccaaagg

SEQ ID NO: 645058 - DNA, 25 bp, Homo sapien
caccggtagccattgatctcatcca

SEQ ID NO: 645059 - DNA, 25 bp, Homo sapien
cctggagggcagacacaccggtagc

SEQ ID NO: 645060 - DNA, 25 bp, Homo sapien
atccacacaggtgccgctgttgtaa

SEQ ID NO: 645061 - DNA, 25 bp, Homo sapien
ttattctgcagtcgggcccagcaaa

SEQ ID NO: 645062 - DNA, 25 bp, Homo sapien
gggcacattcgcaccggtaccagtt

SEQ ID NO: 645063 - DNA, 25 bp, Homo sapien
tcgcaccggtaccagttgtctccat

SEQ ID NO: 645064 - DNA, 25 bp, Homo sapien
ctaagaaagcaaagaccaccttggt

SEQ ID NO: 645065 - DNA, 25 bp, Homo sapien
cttggttaccaacctcccagtccat

SEQ ID NO: 645066 - DNA, 25 bp, Homo sapien
ggatgagggctgcagtcattggtat

SEQ ID NO: 645067 - DNA, 25 bp, Homo sapien
agggatgagggctgcagtcattggt

SEQ ID NO: 645068 - DNA, 25 bp, Homo sapien
cagggatgagggctgcagtcattgg

SEQ ID NO: 645069 - DNA, 25 bp, Homo sapien
gggatgagggctgcagtcattggta

SEQ ID NO: 645070 - DNA, 25 bp, Homo sapien
taatacccaaatgataaagtcgtag

SEQ ID NO: 645071 - DNA, 25 bp, Homo sapien
ctaatacccaaatgataaagtcgta

SEQ ID NO: 645072 - DNA, 25 bp, Homo sapien
tacccaaatgataaagtcgtagtta

SEQ ID NO: 645073 - DNA, 25 bp, Homo sapien
aatacccaaatgataaagtcgtagt

SEQ ID NO: 645074 - DNA, 25 bp, Homo sapien
cccgcaccacacttagtttcatttg

SEQ ID NO: 645075 - DNA, 25 bp, Homo sapien
gcaccacacttagtttcatttgctg

SEQ ID NO: 645076 - DNA, 25 bp, Homo sapien
ggcccgcaccacacttagtttcatt

SEQ ID NO: 645077 - DNA, 25 bp, Homo sapien
caggcccgcaccacacttagtttca

SEQ ID NO: 645078 - DNA, 25 bp, Homo sapien
tattggcgactttctcatgcccagg

SEQ ID NO: 645079 - DNA, 25 bp, Homo sapien
tgtctccacttatcttattggcgac

SEQ ID NO: 645080 - DNA, 25 bp, Homo sapien
ccaggtcagggctgtatcccatcaa

SEQ ID NO: 645081 - DNA, 25 bp, Homo sapien
agacaggctgctggtcagacccaga

SEQ ID NO: 645082 - DNA, 25 bp, Homo sapien
tccattgcaagtccccaagggtgtc

SEQ ID NO: 645083 - DNA, 25 bp, Homo sapien
ccaggtgatacaaaagcagacatca

SEQ ID NO: 645084 - DNA, 25 bp, Homo sapien
tccgacagccctgggagagttcaag

SEQ ID NO: 645085 - DNA, 25 bp, Homo sapien
ggtgtcaggatctgctccgacagcc

SEQ ID NO: 645086 - DNA, 25 bp, Homo sapien
ttgggcaggcagctactgtttcggg

SEQ ID NO: 645087 - DNA, 25 bp, Homo sapien
aggactcgccgttgaccacacatgt

SEQ ID NO: 645088 - DNA, 25 bp, Homo sapien
gacgcacgtaaaggactcgccgttg

SEQ ID NO: 645089 - DNA, 25 bp, Homo sapien
tccttgcagacgcacgtaaaggact

SEQ ID NO: 645090 - DNA, 25 bp, Homo sapien
aagagcagacacgaccaccctccct

SEQ ID NO: 645091 - DNA, 25 bp, Homo sapien
gaagagcagacacgaccaccctccc

SEQ ID NO: 645092 - DNA, 25 bp, Homo sapien
gagcagacacgaccaccctccctga

SEQ ID NO: 645093 - DNA, 25 bp, Homo sapien
agagcagacacgaccaccctccctg

SEQ ID NO: 645094 - DNA, 25 bp, Homo sapien
ttacaggttgttccttcccagccgc

SEQ ID NO: 645095 - DNA, 25 bp, Homo sapien
gttgcacgtggcctcatcacactga

SEQ ID NO: 645096 - DNA, 25 bp, Homo sapien
gccgccaggacacatgcacttaaaa

SEQ ID NO: 645097 - DNA, 25 bp, Homo sapien
acttaaaagcatccccctcatcata

SEQ ID NO: 645098 - DNA, 25 bp, Homo sapien
tttcagtgtgagtcccagtggcccc

SEQ ID NO: 645099 - DNA, 25 bp, Homo sapien
atttcagtgtgagtcccagtggccc

SEQ ID NO: 645100 - DNA, 25 bp, Homo sapien
gtcgcgacacgtgcccccattgtgg

SEQ ID NO: 645101 - DNA, 25 bp, Homo sapien
gggttctggctgcagtcattaatat

SEQ ID NO: 645102 - DNA, 25 bp, Homo sapien
cagtagaagtcattgaccaggtcgc

SEQ ID NO: 645103 - DNA, 25 bp, Homo sapien
tttttacagtcacagtagaagtcat

SEQ ID NO: 645104 - DNA, 25 bp, Homo sapien
ccccataagctatcatcaggactca

SEQ ID NO: 645105 - DNA, 25 bp, Homo sapien
aacatgacccatacatcccagagct

SEQ ID NO: 645106 - DNA, 25 bp, Homo sapien
cacaagtgatactgtcccagtgcag

SEQ ID NO: 645107 - DNA, 25 bp, Homo sapien
gaaatcactgcggtcttgcttccag

SEQ ID NO: 645108 - DNA, 25 bp, Homo sapien
gttgacaccatcgatgcaagtgcca

SEQ ID NO: 645109 - DNA, 25 bp, Homo sapien
gggttgctctcacagtcattaatat

SEQ ID NO: 645110 - DNA, 25 bp, Homo sapien
gcaagtgccaccgtttctacaaggg

SEQ ID NO: 645111 - DNA, 25 bp, Homo sapien
acttgtaggagttgacaccatcgat

SEQ ID NO: 645112 - DNA, 25 bp, Homo sapien
tctcaaattagacaggcggcttatc

SEQ ID NO: 645113 - DNA, 25 bp, Homo sapien
gaactgaaggacttgtgaagccata

SEQ ID NO: 645114 - DNA, 25 bp, Homo sapien
tacagaaaagaggaatcacccaacc

SEQ ID NO: 645115 - DNA, 25 bp, Homo sapien
catgggcatttagtcaccggtacta

SEQ ID NO: 645116 - DNA, 25 bp, Homo sapien
gaaatataccgcaccccttcaggtg

SEQ ID NO: 645117 - DNA, 25 bp, Homo sapien
catggcagtatgttcccgtgaagcc

SEQ ID NO: 645118 - DNA, 25 bp, Homo sapien
ggtgaatttgcctcccgactgactc

SEQ ID NO: 645119 - DNA, 25 bp, Homo sapien
tgtgtcgttggaagccatggccact

SEQ ID NO: 645120 - DNA, 25 bp, Homo sapien
cggcagtggtctttcaggtgtgagc

SEQ ID NO: 645121 - DNA, 25 bp, Homo sapien
taggctcacaataatcgatgtccag

SEQ ID NO: 645122 - DNA, 25 bp, Homo sapien
tgcagaaatagtcactggcacggtt

SEQ ID NO: 645123 - DNA, 25 bp, Homo sapien
gtagcactgggcaccgttctggcag

SEQ ID NO: 645124 - DNA, 25 bp, Homo sapien
cattcatcgatgtctctctcacagt

SEQ ID NO: 645125 - DNA, 25 bp, Homo sapien
ttccagagaaaccagtgggacacag

SEQ ID NO: 645126 - DNA, 25 bp, Homo sapien
gccaggtggacagatacagcgataa

SEQ ID NO: 645127 - DNA, 25 bp, Homo sapien
cacagtgatcgcctgcatagccagg

SEQ ID NO: 645128 - DNA, 25 bp, Homo sapien
aacacagggcttcagcggtttagca

SEQ ID NO: 645129 - DNA, 25 bp, Homo sapien
gactgttgcggtttagctggttcac

SEQ ID NO: 645130 - DNA, 25 bp, Homo sapien
taagccctagcgaaacttccaagag

SEQ ID NO: 645131 - DNA, 25 bp, Homo sapien
cagagctctcctagtgtcgcacaaa

SEQ ID NO: 645132 - DNA, 25 bp, Homo sapien
gacactggccaaggcagtcattaat

SEQ ID NO: 645133 - DNA, 25 bp, Homo sapien
ccgacaggaggcgtcattctgacac

SEQ ID NO: 645134 - DNA, 25 bp, Homo sapien
gaggcgtcattctgacactggccaa

SEQ ID NO: 645135 - DNA, 25 bp, Homo sapien
ctgacactggccaaggcagtcatta

SEQ ID NO: 645136 - DNA, 25 bp, Homo sapien
gcagtagtagctggcaatgagattc

SEQ ID NO: 645137 - DNA, 25 bp, Homo sapien
agccgggaagacagtcgcagtagta

SEQ ID NO: 645138 - DNA, 25 bp, Homo sapien
aattctgacccatccagccgggaag

SEQ ID NO: 645139 - DNA, 25 bp, Homo sapien
caggatttggcgtttacacaaggtt

SEQ ID NO: 645140 - DNA, 25 bp, Homo sapien
gagatcatccccttttggaacccag

SEQ ID NO: 645141 - DNA, 25 bp, Homo sapien
tcaagttatttctcccaggcctgct

SEQ ID NO: 645142 - DNA, 25 bp, Homo sapien
ttcccacagggcctaaaagagctag

SEQ ID NO: 645143 - DNA, 25 bp, Homo sapien
gaacactcctcggacagacgattga

SEQ ID NO: 645144 - DNA, 25 bp, Homo sapien
gtgtgaactcacactgccggccaca

SEQ ID NO: 645145 - DNA, 25 bp, Homo sapien
cggccacacgctcgtcttctgtaat

SEQ ID NO: 645146 - DNA, 25 bp, Homo sapien
tcttagcatgatggagtgtgaactc

SEQ ID NO: 645147 - DNA, 25 bp, Homo sapien
tctgtaatggctttgacaatcaaag

SEQ ID NO: 645148 - DNA, 25 bp, Homo sapien
cacacacttaaatccgttaaccagg

SEQ ID NO: 645149 - DNA, 25 bp, Homo sapien
acacacacttaaatccgttaaccag

SEQ ID NO: 645150 - DNA, 25 bp, Homo sapien
actggcacgttttcccagtccactg

SEQ ID NO: 645151 - DNA, 25 bp, Homo sapien
cgtgggaacagttattaggagaaca

SEQ ID NO: 645152 - DNA, 25 bp, Homo sapien
ggaacagttattaggagaacagtca

SEQ ID NO: 645153 - DNA, 25 bp, Homo sapien
acagttattaggagaacagtcatca

SEQ ID NO: 645154 - DNA, 25 bp, Homo sapien
ttattaggagaacagtcatcaatgt

SEQ ID NO: 645155 - DNA, 25 bp, Homo sapien
aggggctgtcattgaagagccagac

SEQ ID NO: 645156 - DNA, 25 bp, Homo sapien
gaacaagcgattccacgaggacgtt

SEQ ID NO: 645157 - DNA, 25 bp, Homo sapien
tccatggctgcaagaagaataacca

SEQ ID NO: 645158 - DNA, 25 bp, Homo sapien
taaccacaattggaaggtggccagc

SEQ ID NO: 645159 - DNA, 25 bp, Homo sapien
atgacagaatccagtagtaagtgac

SEQ ID NO: 645160 - DNA, 25 bp, Homo sapien
cagatacatgcgctaccttagtggg

SEQ ID NO: 645161 - DNA, 25 bp, Homo sapien
tgcgctaccttagtgggacaggatg

SEQ ID NO: 645162 - DNA, 25 bp, Homo sapien
actgcttaccagacttaggcctgca

SEQ ID NO: 645163 - DNA, 25 bp, Homo sapien
tgcttaccagacttaggcctgcacc

SEQ ID NO: 645164 - DNA, 25 bp, Homo sapien
agcctaggtacctctccccagcgtg

SEQ ID NO: 645165 - DNA, 25 bp, Homo sapien
agcgtggtatcttggcacaaggatc

SEQ ID NO: 645166 - DNA, 25 bp, Homo sapien
ggacaagcctaggtacctctcccca

SEQ ID NO: 645167 - DNA, 25 bp, Homo sapien
tccccagcgtggtatcttggcacaa

SEQ ID NO: 645168 - DNA, 25 bp, Homo sapien
cttagaatggacacaggctgaaaat

SEQ ID NO: 645169 - DNA, 25 bp, Homo sapien
aatggacacaggctgaaaattggac

SEQ ID NO: 645170 - DNA, 25 bp, Homo sapien
gacacaggctgaaaattggacttac

SEQ ID NO: 645171 - DNA, 25 bp, Homo sapien
tggacacaggctgaaaattggactt

SEQ ID NO: 645172 - DNA, 25 bp, Homo sapien
gcctggggaacactcacactcaaag

SEQ ID NO: 645173 - DNA, 25 bp, Homo sapien
gatgcctgcacaccgttacctcccc

SEQ ID NO: 645174 - DNA, 25 bp, Homo sapien
caaaaaccaggatggcagtcagaga

SEQ ID NO: 645175 - DNA, 25 bp, Homo sapien
ctccaaccgaatcccacaccacagc

SEQ ID NO: 645176 - DNA, 25 bp, Homo sapien
tgcctgcacaccgttacctccccac

SEQ ID NO: 645177 - DNA, 25 bp, Homo sapien
cagggcctgtgttgctacaagttcc

SEQ ID NO: 645178 - DNA, 25 bp, Homo sapien
cccctcagggcaggaacactgatat

SEQ ID NO: 645179 - DNA, 25 bp, Homo sapien
caatttcacagttgggtcctgaata

SEQ ID NO: 645180 - DNA, 25 bp, Homo sapien
cccgttgagacacggctgatgagtc

SEQ ID NO: 645181 - DNA, 25 bp, Homo sapien
aaagatcctggagtcactaagagac

SEQ ID NO: 645182 - DNA, 25 bp, Homo sapien
aaaaagatcctggagtcactaagag

SEQ ID NO: 645183 - DNA, 25 bp, Homo sapien
agatcctggagtcactaagagacgc

SEQ ID NO: 645184 - DNA, 25 bp, Homo sapien
gccaaaaagatcctggagtcactaa

SEQ ID NO: 645185 - DNA, 25 bp, Homo sapien
tgggtctcatccctaagggccatac

SEQ ID NO: 645186 - DNA, 25 bp, Homo sapien
cctgggtctcatccctaagggccat

SEQ ID NO: 645187 - DNA, 25 bp, Homo sapien
ctgggtctcatccctaagggccata

SEQ ID NO: 645188 - DNA, 25 bp, Homo sapien
attacagatgccgtggacgcatccc

SEQ ID NO: 645189 - DNA, 25 bp, Homo sapien
cagatgccgtggacgcatcccgggt

SEQ ID NO: 645190 - DNA, 25 bp, Homo sapien
ccgggtgtgggatgcacttatcaca

SEQ ID NO: 645191 - DNA, 25 bp, Homo sapien
tatcacagtacaggccttgccagcc

SEQ ID NO: 645192 - DNA, 25 bp, Homo sapien
agcacacctccaggttagccttttg

SEQ ID NO: 645193 - DNA, 25 bp, Homo sapien
acagcacacctccaggttagccttt

SEQ ID NO: 645194 - DNA, 25 bp, Homo sapien
ccttttgaacgttaagagacacctg

SEQ ID NO: 645195 - DNA, 25 bp, Homo sapien
ctgtacaattcaaatggaagactgc

SEQ ID NO: 645196 - DNA, 25 bp, Homo sapien
ggaatcataaaggtaaaggccacag

SEQ ID NO: 645197 - DNA, 25 bp, Homo sapien
taggaagagacaattcgggacaacc

SEQ ID NO: 645198 - DNA, 25 bp, Homo sapien
catcgccaccaatgggagacagcag

SEQ ID NO: 645199 - DNA, 25 bp, Homo sapien
taggtggattcctgctccgcattgg

SEQ ID NO: 645200 - DNA, 25 bp, Homo sapien
tttgcaagacccatgcttaggactg

SEQ ID NO: 645201 - DNA, 25 bp, Homo sapien
gagtttgcaagacccatgcttagga

SEQ ID NO: 645202 - DNA, 25 bp, Homo sapien
gggagtttgcaagacccatgcttag

SEQ ID NO: 645203 - DNA, 25 bp, Homo sapien
tgcaagacccatgcttaggactgca

SEQ ID NO: 645204 - DNA, 25 bp, Homo sapien
caggcatagtgtccaaagaagtcat

SEQ ID NO: 645205 - DNA, 25 bp, Homo sapien
tagtagtcatcacaggtcacgcgga

SEQ ID NO: 645206 - DNA, 25 bp, Homo sapien
gggcggcagaacttattgcagccaa

SEQ ID NO: 645207 - DNA, 25 bp, Homo sapien
ttttgttgccattctggtcacaggc

SEQ ID NO: 645208 - DNA, 25 bp, Homo sapien
agccttttcaataatactgtcaggt

SEQ ID NO: 645209 - DNA, 25 bp, Homo sapien
gcccgagtgagaagccttttcaata

SEQ ID NO: 645210 - DNA, 25 bp, Homo sapien
gagtgagaagccttttcaataatac

SEQ ID NO: 645211 - DNA, 25 bp, Homo sapien
gccttttcaataatactgtcaggtt

SEQ ID NO: 645212 - DNA, 25 bp, Homo sapien
tagctcaaacatcaggtgccagcag

SEQ ID NO: 645213 - DNA, 25 bp, Homo sapien
cagctctcaggagtatgtagtccct

SEQ ID NO: 645214 - DNA, 25 bp, Homo sapien
ggcagcaaggcactaaatcagcacc

SEQ ID NO: 645215 - DNA, 25 bp, Homo sapien
taataaacacctcgagctcaagcag

SEQ ID NO: 645216 - DNA, 25 bp, Homo sapien
cgggccagtgctcctttaaaaagtg

SEQ ID NO: 645217 - DNA, 25 bp, Homo sapien
tggctgtttttctaggcctcgggcc

SEQ ID NO: 645218 - DNA, 25 bp, Homo sapien
taaaaagtgatgcaagccctataag

SEQ ID NO: 645219 - DNA, 25 bp, Homo sapien
agcgttcgccctctagggctctcaa

SEQ ID NO: 645220 - DNA, 25 bp, Homo sapien
tatttccgggaagtgtcgtgcagag

SEQ ID NO: 645221 - DNA, 25 bp, Homo sapien
tttagacaagagtccagggcaatcc

SEQ ID NO: 645222 - DNA, 25 bp, Homo sapien
gcttctgaggctggtatcaacaaca

SEQ ID NO: 645223 - DNA, 25 bp, Homo sapien
gatcggttaaacacactagccatgg

SEQ ID NO: 645224 - DNA, 25 bp, Homo sapien
ccagtgccacgaagatgagtcacga

SEQ ID NO: 645225 - DNA, 25 bp, Homo sapien
tgggttcaaatacgtctgctgcctg

SEQ ID NO: 645226 - DNA, 25 bp, Homo sapien
tggcagttcgtttggcagtccagcc

SEQ ID NO: 645227 - DNA, 25 bp, Homo sapien
tgagtcacgaagaagccatgaccgc

SEQ ID NO: 645228 - DNA, 25 bp, Homo sapien
taaaagactttggaggaccgatgac

SEQ ID NO: 645229 - DNA, 25 bp, Homo sapien
ttacaactcgcttgggtcccacagg

SEQ ID NO: 645230 - DNA, 25 bp, Homo sapien
gatacgatggacaacacggtgtgta

SEQ ID NO: 645231 - DNA, 25 bp, Homo sapien
tatggccaggctacagatacgatgg

SEQ ID NO: 645232 - DNA, 25 bp, Homo sapien
aatgcagacaactgtgggtagctct

SEQ ID NO: 645233 - DNA, 25 bp, Homo sapien
aaatgcagacaactgtgggtagctc

SEQ ID NO: 645234 - DNA, 25 bp, Homo sapien
cagtcctcaacgtttgtggcaggga

SEQ ID NO: 645235 - DNA, 25 bp, Homo sapien
caggtgtctatgaccctgactggca

SEQ ID NO: 645236 - DNA, 25 bp, Homo sapien
caaatggcctgggactctctggcac

SEQ ID NO: 645237 - DNA, 25 bp, Homo sapien
gcatcaagttttccagcgaccgcaa

SEQ ID NO: 645238 - DNA, 25 bp, Homo sapien
gaacggtgtcattactggaatccca

SEQ ID NO: 645239 - DNA, 25 bp, Homo sapien
cctccacaagcaacgtataggacct

SEQ ID NO: 645240 - DNA, 25 bp, Homo sapien
acggtgtcattactggaatcccacg

SEQ ID NO: 645241 - DNA, 25 bp, Homo sapien
aatcccacgcctccacaagcaacgt

SEQ ID NO: 645242 - DNA, 25 bp, Homo sapien
tcctttgtcagcactcttcccaggt

SEQ ID NO: 645243 - DNA, 25 bp, Homo sapien
tcccaggttgacaaatgactccttt

SEQ ID NO: 645244 - DNA, 25 bp, Homo sapien
gttgttgcattgagttcctggatgt

SEQ ID NO: 645245 - DNA, 25 bp, Homo sapien
ttctgttggttgttgcattgagttc

SEQ ID NO: 645246 - DNA, 25 bp, Homo sapien
cagctcaaagttgagatcaggaaat

SEQ ID NO: 645247 - DNA, 25 bp, Homo sapien
cactggagtcaacatgcatgcaggc

SEQ ID NO: 645248 - DNA, 25 bp, Homo sapien
ctggcagggacgcactggagtcaac

SEQ ID NO: 645249 - DNA, 25 bp, Homo sapien
agttgagatcaggaaatgccacctc

SEQ ID NO: 645250 - DNA, 25 bp, Homo sapien
aatcagagtctactaactaaacaaa

SEQ ID NO: 645251 - DNA, 25 bp, Homo sapien
gctgttaaactgaaggcacctttta

SEQ ID NO: 645252 - DNA, 25 bp, Homo sapien
tttacagtaaggtcagtctcacaaa

SEQ ID NO: 645253 - DNA, 25 bp, Homo sapien
aattccctggatactggcaagatgc

SEQ ID NO: 645254 - DNA, 25 bp, Homo sapien
cgtcctccacttcaacagtattgtt

SEQ ID NO: 645255 - DNA, 25 bp, Homo sapien
agtattgttgtaattaatcctctga

SEQ ID NO: 645256 - DNA, 25 bp, Homo sapien
acgtcctccacttcaacagtattgt

SEQ ID NO: 645257 - DNA, 25 bp, Homo sapien
acagtattgttgtaattaatcctct

SEQ ID NO: 645258 - DNA, 25 bp, Homo sapien
aggagttttgacagacttgcacaag

SEQ ID NO: 645259 - DNA, 25 bp, Homo sapien
caggagttttgacagacttgcacaa

SEQ ID NO: 645260 - DNA, 25 bp, Homo sapien
ggagttttgacagacttgcacaagc

SEQ ID NO: 645261 - DNA, 25 bp, Homo sapien
tttccttatgttttccagaacagta

SEQ ID NO: 645262 - DNA, 25 bp, Homo sapien
gctgtgccaaggttgtgttctctgc

SEQ ID NO: 645263 - DNA, 25 bp, Homo sapien
gtgccaaggttgtgttctctgccct

SEQ ID NO: 645264 - DNA, 25 bp, Homo sapien
ccaaggttgtgttctctgccctgtc

SEQ ID NO: 645265 - DNA, 25 bp, Homo sapien
caaggttgtgttctctgccctgtcc

SEQ ID NO: 645266 - DNA, 25 bp, Homo sapien
ctgggcagagcggtaagcacttaat

SEQ ID NO: 645267 - DNA, 25 bp, Homo sapien
cagagcggtaagcacttaattgcca

SEQ ID NO: 645268 - DNA, 25 bp, Homo sapien
ggcagagcggtaagcacttaattgc

SEQ ID NO: 645269 - DNA, 25 bp, Homo sapien
gagcggtaagcacttaattgccaca

SEQ ID NO: 645270 - DNA, 25 bp, Homo sapien
tcctgccaagctgacggacacaaat

SEQ ID NO: 645271 - DNA, 25 bp, Homo sapien
aattgtgttggcagccgggagcttc

SEQ ID NO: 645272 - DNA, 25 bp, Homo sapien
aataaaccgccatccaaacggcacg

SEQ ID NO: 645273 - DNA, 25 bp, Homo sapien
aaacggcacgcgtgcggcgtccaaa

SEQ ID NO: 645274 - DNA, 25 bp, Homo sapien
cagtcggctcccagggttcgtcagg

SEQ ID NO: 645275 - DNA, 25 bp, Homo sapien
tttggagaggccctattattctcca

SEQ ID NO: 645276 - DNA, 25 bp, Homo sapien
tgctgactcaactgttgcttcctgt

SEQ ID NO: 645277 - DNA, 25 bp, Homo sapien
tcctgtcgcttgtcctgtgttagca

SEQ ID NO: 645278 - DNA, 25 bp, Homo sapien
tcggccaactctattgtcctgcctg

SEQ ID NO: 645279 - DNA, 25 bp, Homo sapien
caactctattgtcctgcctgtgtct

SEQ ID NO: 645280 - DNA, 25 bp, Homo sapien
aattcggccaactctattgtcctgc

SEQ ID NO: 645281 - DNA, 25 bp, Homo sapien
ttcagtcaattcggccaactctatt

SEQ ID NO: 645282 - DNA, 25 bp, Homo sapien
tgctaagaaacaagacaacaaggag

SEQ ID NO: 645283 - DNA, 25 bp, Homo sapien
tgcaaattcctataagtactggagg

SEQ ID NO: 645284 - DNA, 25 bp, Homo sapien
caagagcctccacgccaaagtttca

SEQ ID NO: 645285 - DNA, 25 bp, Homo sapien
tgcatgcctgtaagttgctgctgac

SEQ ID NO: 645286 - DNA, 25 bp, Homo sapien
gcagatacttagcacagctctttca

SEQ ID NO: 645287 - DNA, 25 bp, Homo sapien
cccaagcccagtgttgcaacacaga

SEQ ID NO: 645288 - DNA, 25 bp, Homo sapien
ttggagcagctattctgcagatact

SEQ ID NO: 645289 - DNA, 25 bp, Homo sapien
ccagtgttgcaacacagatacatca

SEQ ID NO: 645290 - DNA, 25 bp, Homo sapien
tcctccggcaggagggtggaaccac

SEQ ID NO: 645291 - DNA, 25 bp, Homo sapien
taataagattccttttatggtcttg

SEQ ID NO: 645292 - DNA, 25 bp, Homo sapien
cactaataagattccttttatggtc

SEQ ID NO: 645293 - DNA, 25 bp, Homo sapien
ctccagacagatcctccggcaggag

SEQ ID NO: 645294 - DNA, 25 bp, Homo sapien
taatgccagctcctgtaatcgtgga

SEQ ID NO: 645295 - DNA, 25 bp, Homo sapien
gccaccccaagcttcatacacagac

SEQ ID NO: 645296 - DNA, 25 bp, Homo sapien
tgccagctcctgtaatcgtggattt

SEQ ID NO: 645297 - DNA, 25 bp, Homo sapien
cagctcctgtaatcgtggattttaa

SEQ ID NO: 645298 - DNA, 25 bp, Homo sapien
ctttcctccccttctgcaatcgcac

SEQ ID NO: 645299 - DNA, 25 bp, Homo sapien
catttccctttcctccccttctgca

SEQ ID NO: 645300 - DNA, 25 bp, Homo sapien
ttccctttcctccccttctgcaatc

SEQ ID NO: 645301 - DNA, 25 bp, Homo sapien
ccctttcctccccttctgcaatcgc

SEQ ID NO: 645302 - DNA, 25 bp, Homo sapien
ggatgttgcaagggcctcgctgcag

SEQ ID NO: 645303 - DNA, 25 bp, Homo sapien
gggatgttgcaagggcctcgctgca

SEQ ID NO: 645304 - DNA, 25 bp, Homo sapien
cttccacccattttgggatgttgca

SEQ ID NO: 645305 - DNA, 25 bp, Homo sapien
tccttccacccattttgggatgttg

SEQ ID NO: 645306 - DNA, 25 bp, Homo sapien
gttgccaatttggacggcgttcgca

SEQ ID NO: 645307 - DNA, 25 bp, Homo sapien
cagctacaacgatctcttggcttgg

SEQ ID NO: 645308 - DNA, 25 bp, Homo sapien
cttcaagttgcaagtttacaccggc

SEQ ID NO: 645309 - DNA, 25 bp, Homo sapien
ccttccacggcgcaccaggtttaat

SEQ ID NO: 645310 - DNA, 25 bp, Homo sapien
gcatggacaggatctccaactcgaa

SEQ ID NO: 645311 - DNA, 25 bp, Homo sapien
gaaactgaaaggcagcacgatgcgg

SEQ ID NO: 645312 - DNA, 25 bp, Homo sapien
cgtgacgcgggactgatactccttg

SEQ ID NO: 645313 - DNA, 25 bp, Homo sapien
tatgtgtcacactcgtcgcgggtgc

SEQ ID NO: 645314 - DNA, 25 bp, Homo sapien
cggccgcgcgtccgtggggaacgca

SEQ ID NO: 645315 - DNA, 25 bp, Homo sapien
agggcgagcaggaggcttagggggc

SEQ ID NO: 645316 - DNA, 25 bp, Homo sapien
ggccgcgcgtccgtggggaacgcat

SEQ ID NO: 645317 - DNA, 25 bp, Homo sapien
cgagcaggaggcttagggggcgccc

SEQ ID NO: 645318 - DNA, 25 bp, Homo sapien
atatactccgccgattggagcatgc

SEQ ID NO: 645319 - DNA, 25 bp, Homo sapien
cgcgtcccggctctaatatactccg

SEQ ID NO: 645320 - DNA, 25 bp, Homo sapien
cggctctaatatactccgccgattg

SEQ ID NO: 645321 - DNA, 25 bp, Homo sapien
tactccgccgattggagcatgcacg

SEQ ID NO: 645322 - DNA, 25 bp, Homo sapien
tattctgatcgcttctttgagacgc

SEQ ID NO: 645323 - DNA, 25 bp, Homo sapien
ttccagaaggcaaagagcccggcct

SEQ ID NO: 645324 - DNA, 25 bp, Homo sapien
ttaatattcatgagagggcgtgctc

SEQ ID NO: 645325 - DNA, 25 bp, Homo sapien
caggtaacacaatgacgcgtgcccg

SEQ ID NO: 645326 - DNA, 25 bp, Homo sapien
ggcaagcctcgcaattaacagctac

SEQ ID NO: 645327 - DNA, 25 bp, Homo sapien
ttgaggcaagcctcgcaattaacag

SEQ ID NO: 645328 - DNA, 25 bp, Homo sapien
aattaacagctacactcctggtcat

SEQ ID NO: 645329 - DNA, 25 bp, Homo sapien
caattaacagctacactcctggtca

SEQ ID NO: 645330 - DNA, 25 bp, Homo sapien
cacaacctggagtacagaagtgacc

SEQ ID NO: 645331 - DNA, 25 bp, Homo sapien
taggatctatcgcacacatattgcc

SEQ ID NO: 645332 - DNA, 25 bp, Homo sapien
gctcccttggagatagtaagtccct

SEQ ID NO: 645333 - DNA, 25 bp, Homo sapien
tatggatatcaaacaggctgacagg

SEQ ID NO: 645334 - DNA, 25 bp, Homo sapien
tctttatactcttccttgacatgta

SEQ ID NO: 645335 - DNA, 25 bp, Homo sapien
catgttgaacagctccatgcttgct

SEQ ID NO: 645336 - DNA, 25 bp, Homo sapien
ttgacatgtacatggtagtttttgt

SEQ ID NO: 645337 - DNA, 25 bp, Homo sapien
tgaacagctccatgcttgcttgttc

SEQ ID NO: 645338 - DNA, 25 bp, Homo sapien
ctgttaatgatgcttgttgcctcac

SEQ ID NO: 645339 - DNA, 25 bp, Homo sapien
cactgggtttgcaaattcaaaagca

SEQ ID NO: 645340 - DNA, 25 bp, Homo sapien
ctttactgataccaactgagcctgc

SEQ ID NO: 645341 - DNA, 25 bp, Homo sapien
gcagtattgggtgactctcattcct

SEQ ID NO: 645342 - DNA, 25 bp, Homo sapien
tgaggactccatcaccattgtgcat

SEQ ID NO: 645343 - DNA, 25 bp, Homo sapien
tttgcagagggaacacgagcttctt

SEQ ID NO: 645344 - DNA, 25 bp, Homo sapien
agcttgttgctcacaattatttgca

SEQ ID NO: 645345 - DNA, 25 bp, Homo sapien
ggattggaacacatcttgagcttgt

SEQ ID NO: 645346 - DNA, 25 bp, Homo sapien
ttcagagccacaaaagaacagttcg

SEQ ID NO: 645347 - DNA, 25 bp, Homo sapien
cagagccacaaaagaacagttcgtc

SEQ ID NO: 645348 - DNA, 25 bp, Homo sapien
ttgatatagaccttcagagccacaa

SEQ ID NO: 645349 - DNA, 25 bp, Homo sapien
tttgaaagtcattgatatagacctt

SEQ ID NO: 645350 - DNA, 25 bp, Homo sapien
tgattctgttcatgacgttcatagg

SEQ ID NO: 645351 - DNA, 25 bp, Homo sapien
gaggtgaggagagcaattaccctga

SEQ ID NO: 645352 - DNA, 25 bp, Homo sapien
gatgcacggttgttaagcccctgtt

SEQ ID NO: 645353 - DNA, 25 bp, Homo sapien
ctgaaggatgcacggttgttaagcc

SEQ ID NO: 645354 - DNA, 25 bp, Homo sapien
gttcaatgaatgacgcagcagctct

SEQ ID NO: 645355 - DNA, 25 bp, Homo sapien
cataaggaaaacacccaagccggag

SEQ ID NO: 645356 - DNA, 25 bp, Homo sapien
gatagtattgactgaggtcctccgt

SEQ ID NO: 645357 - DNA, 25 bp, Homo sapien
tcttataccaacaaacagactttgg

SEQ ID NO: 645358 - DNA, 25 bp, Homo sapien
caggtggcacagctatgttggtagc

SEQ ID NO: 645359 - DNA, 25 bp, Homo sapien
gcttcattaggtgatggagatgcca

SEQ ID NO: 645360 - DNA, 25 bp, Homo sapien
ctgctacaaacattactgaaaaggc

SEQ ID NO: 645361 - DNA, 25 bp, Homo sapien
caaacattactgaaaaggcaactca

SEQ ID NO: 645362 - DNA, 25 bp, Homo sapien
ctgaaaaggcaactcagttgtgtgt

SEQ ID NO: 645363 - DNA, 25 bp, Homo sapien
cattactgaaaaggcaactcagttg

SEQ ID NO: 645364 - DNA, 25 bp, Homo sapien
accttgctgtaatacagcctgacac

SEQ ID NO: 645365 - DNA, 25 bp, Homo sapien
gtggcaccttgctgtaatacagcct

SEQ ID NO: 645366 - DNA, 25 bp, Homo sapien
ggcaccttgctgtaatacagcctga

SEQ ID NO: 645367 - DNA, 25 bp, Homo sapien
ggtggcaccttgctgtaatacagcc

SEQ ID NO: 645368 - DNA, 25 bp, Homo sapien
tgtgagaaacgcatgagtcaggcta

SEQ ID NO: 645369 - DNA, 25 bp, Homo sapien
catctcagtaagcttttctataggc

SEQ ID NO: 645370 - DNA, 25 bp, Homo sapien
tcctaggcccaagagacagtgaaat

SEQ ID NO: 645371 - DNA, 25 bp, Homo sapien
gaatgagtcaatagtgttgactgcc

SEQ ID NO: 645372 - DNA, 25 bp, Homo sapien
tcatcctgttgataagagcagatgg

SEQ ID NO: 645373 - DNA, 25 bp, Homo sapien
gatggcctactgcatgtgactcaga

SEQ ID NO: 645374 - DNA, 25 bp, Homo sapien
tgttgataagagcagatggcctact

SEQ ID NO: 645375 - DNA, 25 bp, Homo sapien
gagcagatggcctactgcatgtgac

SEQ ID NO: 645376 - DNA, 25 bp, Homo sapien
tctgccacgggagtcagctagtacg

SEQ ID NO: 645377 - DNA, 25 bp, Homo sapien
tttgttgaggctcgcatctgccacg

SEQ ID NO: 645378 - DNA, 25 bp, Homo sapien
tacgttgcccagttcaacatccatc

SEQ ID NO: 645379 - DNA, 25 bp, Homo sapien
tcccttgaagtgccagccctggagc

SEQ ID NO: 645380 - DNA, 25 bp, Homo sapien
aggaggtgagcttcgggccagtcag

SEQ ID NO: 645381 - DNA, 25 bp, Homo sapien
tgagcttcgggccagtcagcattac

SEQ ID NO: 645382 - DNA, 25 bp, Homo sapien
ttcgggccagtcagcattaccgcct

SEQ ID NO: 645383 - DNA, 25 bp, Homo sapien
ccacagactggtgcaggtccatggc

SEQ ID NO: 645384 - DNA, 25 bp, Homo sapien
taaaatcaaggcataaggcaggacc

SEQ ID NO: 645385 - DNA, 25 bp, Homo sapien
tagagattgtaggatgtcatcactg

SEQ ID NO: 645386 - DNA, 25 bp, Homo sapien
ggcaggaccgaagtagaatagaaca

SEQ ID NO: 645387 - DNA, 25 bp, Homo sapien
cacagttttgtgtactcaagttcag

SEQ ID NO: 645388 - DNA, 25 bp, Homo sapien
tgctgtgtatagacgtgtattctga

SEQ ID NO: 645389 - DNA, 25 bp, Homo sapien
tttgctgtgtatagacgtgtattct

SEQ ID NO: 645390 - DNA, 25 bp, Homo sapien
ttgctgtgtatagacgtgtattctg

SEQ ID NO: 645391 - DNA, 25 bp, Homo sapien
ctttgctgtgtatagacgtgtattc

SEQ ID NO: 645392 - DNA, 25 bp, Homo sapien
ggtctcagtaacactgaacagggaa

SEQ ID NO: 645393 - DNA, 25 bp, Homo sapien
agggcttgtgcggtcccacgagcct

SEQ ID NO: 645394 - DNA, 25 bp, Homo sapien
gactgcagcttggactccacggtga

SEQ ID NO: 645395 - DNA, 25 bp, Homo sapien
gccgggagagggtgttgaagacagg

SEQ ID NO: 645396 - DNA, 25 bp, Homo sapien
gaggaggctcaacatagtttttttg

SEQ ID NO: 645397 - DNA, 25 bp, Homo sapien
aaaaatcctgcagaatctatggcag

SEQ ID NO: 645398 - DNA, 25 bp, Homo sapien
tcccctgaacgctgagagcttctgt

SEQ ID NO: 645399 - DNA, 25 bp, Homo sapien
aacagagtagcattttgatcagtaa

SEQ ID NO: 645400 - DNA, 25 bp, Homo sapien
aggtataccccataggcagtctgcc

SEQ ID NO: 645401 - DNA, 25 bp, Homo sapien
aactgacatgggacactggtgggta

SEQ ID NO: 645402 - DNA, 25 bp, Homo sapien
cagatattgatgcagggcttagccg

SEQ ID NO: 645403 - DNA, 25 bp, Homo sapien
caccatgaagccttggatctgcaga

SEQ ID NO: 645404 - DNA, 25 bp, Homo sapien
gggtaagatttcctgcttagggatc

SEQ ID NO: 645405 - DNA, 25 bp, Homo sapien
cgtgcatttagcatgtacgccaggt

SEQ ID NO: 645406 - DNA, 25 bp, Homo sapien
aattttcccgtttgcctgccagcca

SEQ ID NO: 645407 - DNA, 25 bp, Homo sapien
gctagtcaggtaacgaccgctgcgt

SEQ ID NO: 645408 - DNA, 25 bp, Homo sapien
tgctgtaacttgtatgtttggaaca

SEQ ID NO: 645409 - DNA, 25 bp, Homo sapien
gggtaagtagcatgctgtaacttgt

SEQ ID NO: 645410 - DNA, 25 bp, Homo sapien
ttccatggtttggcagatgactgac

SEQ ID NO: 645411 - DNA, 25 bp, Homo sapien
ttggaacagatccacaaagtgtgtc

SEQ ID NO: 645412 - DNA, 25 bp, Homo sapien
taatccacagaatttctacccgttg

SEQ ID NO: 645413 - DNA, 25 bp, Homo sapien
acttttatctgagctggctaaactc

SEQ ID NO: 645414 - DNA, 25 bp, Homo sapien
tgagcagtcaaagctgaccgaaact

SEQ ID NO: 645415 - DNA, 25 bp, Homo sapien
tctacccgttgagggtttgccagca

SEQ ID NO: 645416 - DNA, 25 bp, Homo sapien
cccttctatacatcttatcacttga

SEQ ID NO: 645417 - DNA, 25 bp, Homo sapien
gaaggcagcccttttgacattccat

SEQ ID NO: 645418 - DNA, 25 bp, Homo sapien
ctgttaccccttctatacatcttat

SEQ ID NO: 645419 - DNA, 25 bp, Homo sapien
aaggcagcccttttgacattccatt

SEQ ID NO: 645420 - DNA, 25 bp, Homo sapien
cactgatcatattccgctctagctt

SEQ ID NO: 645421 - DNA, 25 bp, Homo sapien
aaaaatatgacaggcattaaatgac

SEQ ID NO: 645422 - DNA, 25 bp, Homo sapien
tacgcggcttatagtattaggtaaa

SEQ ID NO: 645423 - DNA, 25 bp, Homo sapien
ttgtagatgagtctgggtgtacgcg

SEQ ID NO: 645424 - DNA, 25 bp, Homo sapien
ctttactgcttttctctgtattgtg

SEQ ID NO: 645425 - DNA, 25 bp, Homo sapien
tttactgcttttctctgtattgtgc

SEQ ID NO: 645426 - DNA, 25 bp, Homo sapien
tactgcttttctctgtattgtgcct

SEQ ID NO: 645427 - DNA, 25 bp, Homo sapien
ttactgcttttctctgtattgtgcc

SEQ ID NO: 645428 - DNA, 25 bp, Homo sapien
cctgctatacgggatccacgaaggg

SEQ ID NO: 645429 - DNA, 25 bp, Homo sapien
gagtttacagctttcctacacagga

SEQ ID NO: 645430 - DNA, 25 bp, Homo sapien
ttctctctcctgctatacgggatcc

SEQ ID NO: 645431 - DNA, 25 bp, Homo sapien
ctatcctgggaattgaacccgtgag

SEQ ID NO: 645432 - DNA, 25 bp, Homo sapien
gcccggagtggaagcaaagtccacc

SEQ ID NO: 645433 - DNA, 25 bp, Homo sapien
ctggcccggagtggaagcaaagtcc

SEQ ID NO: 645434 - DNA, 25 bp, Homo sapien
ggcccggagtggaagcaaagtccac

SEQ ID NO: 645435 - DNA, 25 bp, Homo sapien
tggcccggagtggaagcaaagtcca

SEQ ID NO: 645436 - DNA, 25 bp, Homo sapien
gaggtgggtggttcacctgtcagga

SEQ ID NO: 645437 - DNA, 25 bp, Homo sapien
ccgaggtgggtggttcacctgtcag

SEQ ID NO: 645438 - DNA, 25 bp, Homo sapien
gttcaagagcagcctggccaacatg

SEQ ID NO: 645439 - DNA, 25 bp, Homo sapien
ggccgaggtgggtggttcacctgtc

SEQ ID NO: 645440 - DNA, 25 bp, Homo sapien
cagcttcgttgattgagggccctgc

SEQ ID NO: 645441 - DNA, 25 bp, Homo sapien
caaagttgtgcttagctggatccat

SEQ ID NO: 645442 - DNA, 25 bp, Homo sapien
ttttacaaagttgtgcttagctgga

SEQ ID NO: 645443 - DNA, 25 bp, Homo sapien
ttgccccccagcttcgttgattgag

SEQ ID NO: 645444 - DNA, 25 bp, Homo sapien
ccagctttgtcattggcagatgaac

SEQ ID NO: 645445 - DNA, 25 bp, Homo sapien
tccagctttgtcattggcagatgaa

SEQ ID NO: 645446 - DNA, 25 bp, Homo sapien
cctgagccaggttattctgtaactt

SEQ ID NO: 645447 - DNA, 25 bp, Homo sapien
aacactgttgtgatctgttgccctg

SEQ ID NO: 645448 - DNA, 25 bp, Homo sapien
tttactacttggtctaagtcctgag

SEQ ID NO: 645449 - DNA, 25 bp, Homo sapien
tattctgtaacttcccttgtggaaa

SEQ ID NO: 645450 - DNA, 25 bp, Homo sapien
agtgatcattaacttccaggtggcc

SEQ ID NO: 645451 - DNA, 25 bp, Homo sapien
taagcctttgtgtaaacattccaga

SEQ ID NO: 645452 - DNA, 25 bp, Homo sapien
gacttcggcaatgggccaattcctt

SEQ ID NO: 645453 - DNA, 25 bp, Homo sapien
tatctcacaatgtaacttccaaagt

SEQ ID NO: 645454 - DNA, 25 bp, Homo sapien
atcttgtccctattaagaagttttg

SEQ ID NO: 645455 - DNA, 25 bp, Homo sapien
cgtatcttgtccctattaagaagtt

SEQ ID NO: 645456 - DNA, 25 bp, Homo sapien
caagggtcccaagtaagactgtgcc

SEQ ID NO: 645457 - DNA, 25 bp, Homo sapien
tctgagggagcccaagctaagacaa

SEQ ID NO: 645458 - DNA, 25 bp, Homo sapien
tctgcacagtcacttcaagggtccc

SEQ ID NO: 645459 - DNA, 25 bp, Homo sapien
tctacggaggtttcagctcccacgt

SEQ ID NO: 645460 - DNA, 25 bp, Homo sapien
ctgaacaggacgattgaactttgct

SEQ ID NO: 645461 - DNA, 25 bp, Homo sapien
tgaacaggacgattgaactttgctt

SEQ ID NO: 645462 - DNA, 25 bp, Homo sapien
ccttaccgcttctagtcactgttcg

SEQ ID NO: 645463 - DNA, 25 bp, Homo sapien
ccccttaccgcttctagtcactgtt

SEQ ID NO: 645464 - DNA, 25 bp, Homo sapien
cgcttctagtcactgttcgtctcat

SEQ ID NO: 645465 - DNA, 25 bp, Homo sapien
taccgcttctagtcactgttcgtct

SEQ ID NO: 645466 - DNA, 25 bp, Homo sapien
agagcccagggaacggtaaacaatg

SEQ ID NO: 645467 - DNA, 25 bp, Homo sapien
acaatgggaaactgagctctagaat

SEQ ID NO: 645468 - DNA, 25 bp, Homo sapien
taaacaatgggaaactgagctctag

SEQ ID NO: 645469 - DNA, 25 bp, Homo sapien
tacagagcccagggaacggtaaaca

SEQ ID NO: 645470 - DNA, 25 bp, Homo sapien
gagtttgcaggttccagccagaaaa

SEQ ID NO: 645471 - DNA, 25 bp, Homo sapien
gctagctgatacacattgcgatgcc

SEQ ID NO: 645472 - DNA, 25 bp, Homo sapien
gctaatccagtagttacctgcagga

SEQ ID NO: 645473 - DNA, 25 bp, Homo sapien
gaaatgaaccaccttagctgagggc

SEQ ID NO: 645474 - DNA, 25 bp, Homo sapien
cgtttttttctgaggctagacgaga

SEQ ID NO: 645475 - DNA, 25 bp, Homo sapien
tcacgtcacaaaggtgtccatgagt

SEQ ID NO: 645476 - DNA, 25 bp, Homo sapien
cttcctaaacagcaactcttggtgt

SEQ ID NO: 645477 - DNA, 25 bp, Homo sapien
tgagtgagggattcataacagtagt

SEQ ID NO: 645478 - DNA, 25 bp, Homo sapien
aggctggagcaaggagcaggtcgtc

SEQ ID NO: 645479 - DNA, 25 bp, Homo sapien
ctggagcaaggagcaggtcgtccat

SEQ ID NO: 645480 - DNA, 25 bp, Homo sapien
ggccaggctggagcaaggagcaggt

SEQ ID NO: 645481 - DNA, 25 bp, Homo sapien
ccaggctggagcaaggagcaggtcg

SEQ ID NO: 645482 - DNA, 25 bp, Homo sapien
ttaaaagatatatagctggactcaa

SEQ ID NO: 645483 - DNA, 25 bp, Homo sapien
tatagctggactcaaccttcctttg

SEQ ID NO: 645484 - DNA, 25 bp, Homo sapien
tagctggactcaaccttcctttgtc

SEQ ID NO: 645485 - DNA, 25 bp, Homo sapien
gatatatagctggactcaaccttcc

SEQ ID NO: 645486 - DNA, 25 bp, Homo sapien
gggtactgagactgcaagtcttaaa

SEQ ID NO: 645487 - DNA, 25 bp, Homo sapien
ctgggtactgagactgcaagtctta

SEQ ID NO: 645488 - DNA, 25 bp, Homo sapien
gtactgagactgcaagtcttaaatg

SEQ ID NO: 645489 - DNA, 25 bp, Homo sapien
gtcttaaatgcagatctatttctcc

SEQ ID NO: 645490 - DNA, 25 bp, Homo sapien
aggtgacataggcattggagccctc

SEQ ID NO: 645491 - DNA, 25 bp, Homo sapien
taatgactaaagtccccgtagcagc

SEQ ID NO: 645492 - DNA, 25 bp, Homo sapien
cactgggtctgatattcacttcata

SEQ ID NO: 645493 - DNA, 25 bp, Homo sapien
gacattaactgtgcggaaagcaact

SEQ ID NO: 645494 - DNA, 25 bp, Homo sapien
ttaagtaacgtgaccataaatacca

SEQ ID NO: 645495 - DNA, 25 bp, Homo sapien
caatatgttaagtaacgtgaccata

SEQ ID NO: 645496 - DNA, 25 bp, Homo sapien
ggcaaagtcatttacaatatgttaa

SEQ ID NO: 645497 - DNA, 25 bp, Homo sapien
ttacaatatgttaagtaacgtgacc

SEQ ID NO: 645498 - DNA, 25 bp, Homo sapien
ttcagctagtttcacttcatattca

SEQ ID NO: 645499 - DNA, 25 bp, Homo sapien
cagggtatgtagcggagcgttttca

SEQ ID NO: 645500 - DNA, 25 bp, Homo sapien
gcgttttcagctagtttcacttcat

SEQ ID NO: 645501 - DNA, 25 bp, Homo sapien
tgtagcggagcgttttcagctagtt

SEQ ID NO: 645502 - DNA, 25 bp, Homo sapien
gaaaagcaggactgtgcaaattttc

SEQ ID NO: 645503 - DNA, 25 bp, Homo sapien
tgaagaaaagcaggactgtgcaaat

SEQ ID NO: 645504 - DNA, 25 bp, Homo sapien
gcaggactgtgcaaattttctgcaa

SEQ ID NO: 645505 - DNA, 25 bp, Homo sapien
aagcaggactgtgcaaattttctgc

SEQ ID NO: 645506 - DNA, 25 bp, Homo sapien
ccttgacttgaacttttcgggtctg

SEQ ID NO: 645507 - DNA, 25 bp, Homo sapien
caagaagggttggaaggcttcagca

SEQ ID NO: 645508 - DNA, 25 bp, Homo sapien
tggtatgcaataatttccagggcaa

SEQ ID NO: 645509 - DNA, 25 bp, Homo sapien
ttcgggtctggactatttcttccac

SEQ ID NO: 645510 - DNA, 25 bp, Homo sapien
ctttttgccatttccagagcactga

SEQ ID NO: 645511 - DNA, 25 bp, Homo sapien
ctgaaaactcaaagttctcttattt

SEQ ID NO: 645512 - DNA, 25 bp, Homo sapien
tttttgccatttccagagcactgaa

SEQ ID NO: 645513 - DNA, 25 bp, Homo sapien
gagcactgaaaactcaaagttctct

SEQ ID NO: 645514 - DNA, 25 bp, Homo sapien
tcttggagcccaagagtattttaga

SEQ ID NO: 645515 - DNA, 25 bp, Homo sapien
tcaggtagaggatacgaaaaggaaa

SEQ ID NO: 645516 - DNA, 25 bp, Homo sapien
tatctctctcattgctcagcataag

SEQ ID NO: 645517 - DNA, 25 bp, Homo sapien
gagcgtctgctgagtacgtgatata

SEQ ID NO: 645518 - DNA, 25 bp, Homo sapien
gcagatggcataggtgctctaccca

SEQ ID NO: 645519 - DNA, 25 bp, Homo sapien
tggatgaggccgaggctagacttct

SEQ ID NO: 645520 - DNA, 25 bp, Homo sapien
tctgtgtagctcaagggcaatgagc

SEQ ID NO: 645521 - DNA, 25 bp, Homo sapien
gaggttgtgcttccagggaaccgac

SEQ ID NO: 645522 - DNA, 25 bp, Homo sapien
tttgcttggagtcctctgatttagc

SEQ ID NO: 645523 - DNA, 25 bp, Homo sapien
cacttcatttgcttggagtcctctg

SEQ ID NO: 645524 - DNA, 25 bp, Homo sapien
acttcatttgcttggagtcctctga

SEQ ID NO: 645525 - DNA, 25 bp, Homo sapien
ttcatttgcttggagtcctctgatt

SEQ ID NO: 645526 - DNA, 25 bp, Homo sapien
taaggttctgtttgtcattgaaatg

SEQ ID NO: 645527 - DNA, 25 bp, Homo sapien
tgtcattgaaatgggacaggctgtg

SEQ ID NO: 645528 - DNA, 25 bp, Homo sapien
ttaaggttctgtttgtcattgaaat

SEQ ID NO: 645529 - DNA, 25 bp, Homo sapien
ttgtcattgaaatgggacaggctgt

SEQ ID NO: 645530 - DNA, 25 bp, Homo sapien
ccttgtacctgtcctttgtctgtta

SEQ ID NO: 645531 - DNA, 25 bp, Homo sapien
gccttggcctgtacgcttctttttg

SEQ ID NO: 645532 - DNA, 25 bp, Homo sapien
tctcctcaggacctcttaaagttcc

SEQ ID NO: 645533 - DNA, 25 bp, Homo sapien
ttattctgcaatacataagccccaa

SEQ ID NO: 645534 - DNA, 25 bp, Homo sapien
taaagttcctaaatctgccttggcc

SEQ ID NO: 645535 - DNA, 25 bp, Homo sapien
gccctaaagggcagtgtagccaatg

SEQ ID NO: 645536 - DNA, 25 bp, Homo sapien
ggactggcccctaaaacattttgca

SEQ ID NO: 645537 - DNA, 25 bp, Homo sapien
taggtgatactcaaatctctgggca

SEQ ID NO: 645538 - DNA, 25 bp, Homo sapien
caatggacaggtgatcccaggtacc

SEQ ID NO: 645539 - DNA, 25 bp, Homo sapien
gttttgattgaaatagacaaaccta

SEQ ID NO: 645540 - DNA, 25 bp, Homo sapien
tagacaaacctatgttcctacagaa

SEQ ID NO: 645541 - DNA, 25 bp, Homo sapien
tatgagaacaggatgtttgtattaa

SEQ ID NO: 645542 - DNA, 25 bp, Homo sapien
ttgattgaaatagacaaacctatgt

SEQ ID NO: 645543 - DNA, 25 bp, Homo sapien
tatctctgtagtctaaatcttcaaa

SEQ ID NO: 645544 - DNA, 25 bp, Homo sapien
tctgcttctcctcagtcagcgtggg

SEQ ID NO: 645545 - DNA, 25 bp, Homo sapien
cagtaatcaataagactatccattc

SEQ ID NO: 645546 - DNA, 25 bp, Homo sapien
tcagcgtgggccagaagtctttctc

SEQ ID NO: 645547 - DNA, 25 bp, Homo sapien
atactgggtatcttctatctgcccc

SEQ ID NO: 645548 - DNA, 25 bp, Homo sapien
tatcttctatctgcccctttgggtc

SEQ ID NO: 645549 - DNA, 25 bp, Homo sapien
tgggtatcttctatctgcccctttg

SEQ ID NO: 645550 - DNA, 25 bp, Homo sapien
ggtatcttctatctgcccctttggg

SEQ ID NO: 645551 - DNA, 25 bp, Homo sapien
taactctaactagcatttttgaggc

SEQ ID NO: 645552 - DNA, 25 bp, Homo sapien
ttttttcctataactctaactagca

SEQ ID NO: 645553 - DNA, 25 bp, Homo sapien
gcttctcccgtgtgattttttccta

SEQ ID NO: 645554 - DNA, 25 bp, Homo sapien
caattcgtttgcttctcccgtgtga

SEQ ID NO: 645555 - DNA, 25 bp, Homo sapien
gaacccccgtcatgtggttgatgcc

SEQ ID NO: 645556 - DNA, 25 bp, Homo sapien
agggatgacccttgatcaggcttgg

SEQ ID NO: 645557 - DNA, 25 bp, Homo sapien
tcaggcttggttggattcctcacag

SEQ ID NO: 645558 - DNA, 25 bp, Homo sapien
gtgttgaggacaagactagaacccc

SEQ ID NO: 645559 - DNA, 25 bp, Homo sapien
cagctttttgctcatcatatttcac

SEQ ID NO: 645560 - DNA, 25 bp, Homo sapien
tcagctttttgctcatcatatttca

SEQ ID NO: 645561 - DNA, 25 bp, Homo sapien
gctttttgctcatcatatttcacat

SEQ ID NO: 645562 - DNA, 25 bp, Homo sapien
aatcagctttttgctcatcatattt

SEQ ID NO: 645563 - DNA, 25 bp, Homo sapien
cctgttcaaggcagtggaaagtgaa

SEQ ID NO: 645564 - DNA, 25 bp, Homo sapien
aagtgtcttccaaacgagcacatga

SEQ ID NO: 645565 - DNA, 25 bp, Homo sapien
gatctattagcagtcctgccggttc

SEQ ID NO: 645566 - DNA, 25 bp, Homo sapien
tgtttgaccaaaggaacaagtgtct

SEQ ID NO: 645567 - DNA, 25 bp, Homo sapien
tcttgtctgccaaggcaagaccacc

SEQ ID NO: 645568 - DNA, 25 bp, Homo sapien
gtggtcatagatttgttataacctc

SEQ ID NO: 645569 - DNA, 25 bp, Homo sapien
ctttgagtgtgccacatgtgtgtgg

SEQ ID NO: 645570 - DNA, 25 bp, Homo sapien
tagctggcgaccgtggtgtctgtat

SEQ ID NO: 645571 - DNA, 25 bp, Homo sapien
tattttgaatccctggaattgtcct

SEQ ID NO: 645572 - DNA, 25 bp, Homo sapien
gaattgtcctcttcactttgcaaca

SEQ ID NO: 645573 - DNA, 25 bp, Homo sapien
actttgcaacatccactcactcaga

SEQ ID NO: 645574 - DNA, 25 bp, Homo sapien
tattgccttgtgtatgagttgggtg

SEQ ID NO: 645575 - DNA, 25 bp, Homo sapien
tgctacaccaacaagtcgagatagg

SEQ ID NO: 645576 - DNA, 25 bp, Homo sapien
gaagtcatggagcaacaaatcatcc

SEQ ID NO: 645577 - DNA, 25 bp, Homo sapien
taaatagagaatggaagggctcact

SEQ ID NO: 645578 - DNA, 25 bp, Homo sapien
gatgtctaacatagtgcgggaagga

SEQ ID NO: 645579 - DNA, 25 bp, Homo sapien
aagcacccgctttgttggacgtacg

SEQ ID NO: 645580 - DNA, 25 bp, Homo sapien
taaagtgatggagactcttcgcagc

SEQ ID NO: 645581 - DNA, 25 bp, Homo sapien
catatgcttgtttcggatgagaggg

SEQ ID NO: 645582 - DNA, 25 bp, Homo sapien
ggacgtacgatctatagacagcaga

SEQ ID NO: 645583 - DNA, 25 bp, Homo sapien
cagggcactgccagctgtcacattc

SEQ ID NO: 645584 - DNA, 25 bp, Homo sapien
cactgccagctgtcacattcaacat

SEQ ID NO: 645585 - DNA, 25 bp, Homo sapien
gggcactgccagctgtcacattcaa

SEQ ID NO: 645586 - DNA, 25 bp, Homo sapien
ggcactgccagctgtcacattcaac

SEQ ID NO: 645587 - DNA, 25 bp, Homo sapien
gaagcagtatggtaaccagcccgat

SEQ ID NO: 645588 - DNA, 25 bp, Homo sapien
aagaggagaacactggtagcttcac

SEQ ID NO: 645589 - DNA, 25 bp, Homo sapien
caggtatgcatgacagtaaaggaga

SEQ ID NO: 645590 - DNA, 25 bp, Homo sapien
gcactggcagcccagtaggagcttt

SEQ ID NO: 645591 - DNA, 25 bp, Homo sapien
tctttgatgtgccagtttgaggcag

SEQ ID NO: 645592 - DNA, 25 bp, Homo sapien
cactcgtaggtcgtgatggactgaa

SEQ ID NO: 645593 - DNA, 25 bp, Homo sapien
tctctttgatgcatggattcctgtg

SEQ ID NO: 645594 - DNA, 25 bp, Homo sapien
tccttccttcaaagacactgttggt

SEQ ID NO: 645595 - DNA, 25 bp, Homo sapien
gagagtccagcgtgtctgtcatgag

SEQ ID NO: 645596 - DNA, 25 bp, Homo sapien
gtggagagtccagcgtgtctgtcat

SEQ ID NO: 645597 - DNA, 25 bp, Homo sapien
ctgtggagagtccagcgtgtctgtc

SEQ ID NO: 645598 - DNA, 25 bp, Homo sapien
gagtccagcgtgtctgtcatgagcc

SEQ ID NO: 645599 - DNA, 25 bp, Homo sapien
tccatcttgtatagccacagaacag

SEQ ID NO: 645600 - DNA, 25 bp, Homo sapien
cagaacagacggagacctgtggtgt

SEQ ID NO: 645601 - DNA, 25 bp, Homo sapien
tgtgggtgacgctggaaaacattcc

SEQ ID NO: 645602 - DNA, 25 bp, Homo sapien
gccatcgtttcatacaagcctggtg

SEQ ID NO: 645603 - DNA, 25 bp, Homo sapien
tctcccatgtgtggaagagtctgaa

SEQ ID NO: 645604 - DNA, 25 bp, Homo sapien
cacatctggaagtagcagggcagta

SEQ ID NO: 645605 - DNA, 25 bp, Homo sapien
caggagactgaaagacatgggtacc

SEQ ID NO: 645606 - DNA, 25 bp, Homo sapien
cagggcagtaatttcccagaccaca

SEQ ID NO: 645607 - DNA, 25 bp, Homo sapien
cttgagtaagatccagctccctttt

SEQ ID NO: 645608 - DNA, 25 bp, Homo sapien
tgagtaagatccagctcccttttta

SEQ ID NO: 645609 - DNA, 25 bp, Homo sapien
gagtaagatccagctccctttttac

SEQ ID NO: 645610 - DNA, 25 bp, Homo sapien
agtaagatccagctccctttttact

SEQ ID NO: 645611 - DNA, 25 bp, Homo sapien
tctgaaggtcatttgctgcctcacc

SEQ ID NO: 645612 - DNA, 25 bp, Homo sapien
ggtctgaaggtcatttgctgcctca

SEQ ID NO: 645613 - DNA, 25 bp, Homo sapien
aaggtcatttgctgcctcacctgaa

SEQ ID NO: 645614 - DNA, 25 bp, Homo sapien
atttgctgcctcacctgaatttgga

SEQ ID NO: 645615 - DNA, 25 bp, Homo sapien
tacatgaatgaatagatcttctggc

SEQ ID NO: 645616 - DNA, 25 bp, Homo sapien
aatgaatagatcttctggctgacca

SEQ ID NO: 645617 - DNA, 25 bp, Homo sapien
aatggctgcggctctatttctacat

SEQ ID NO: 645618 - DNA, 25 bp, Homo sapien
gcggctctatttctacatgaatgaa

SEQ ID NO: 645619 - DNA, 25 bp, Homo sapien
gtcagttaaagttaacatcaccaag

SEQ ID NO: 645620 - DNA, 25 bp, Homo sapien
tcagttaaagttaacatcaccaagt

SEQ ID NO: 645621 - DNA, 25 bp, Homo sapien
cagttaaagttaacatcaccaagtc

SEQ ID NO: 645622 - DNA, 25 bp, Homo sapien
tggcggttttcacatggcacatggg

SEQ ID NO: 645623 - DNA, 25 bp, Homo sapien
taacacattgtgtaagctaaacagt

SEQ ID NO: 645624 - DNA, 25 bp, Homo sapien
ttgtacccactgaaggagcaggcct

SEQ ID NO: 645625 - DNA, 25 bp, Homo sapien
ggaacttgatctgtgaacccagaag

SEQ ID NO: 645626 - DNA, 25 bp, Homo sapien
tcaggtgaattaacctcgaaggtca

SEQ ID NO: 645627 - DNA, 25 bp, Homo sapien
taacctcgaaggtcaacaggatgac

SEQ ID NO: 645628 - DNA, 25 bp, Homo sapien
ccagatcaggtgaattaacctcgaa

SEQ ID NO: 645629 - DNA, 25 bp, Homo sapien
gagtttcaaaagggatgcccatggg

SEQ ID NO: 645630 - DNA, 25 bp, Homo sapien
tgatcatgttgacactagaaggact

SEQ ID NO: 645631 - DNA, 25 bp, Homo sapien
tcatatagttgacaatgatcttttc

SEQ ID NO: 645632 - DNA, 25 bp, Homo sapien
gtagacccgtttcctattattgatc

SEQ ID NO: 645633 - DNA, 25 bp, Homo sapien
gatgaatgattctgtagacccgttt

SEQ ID NO: 645634 - DNA, 25 bp, Homo sapien
ttctgggggtgtacatacttcctag

SEQ ID NO: 645635 - DNA, 25 bp, Homo sapien
gctgagtaaggtccgattgggtaaa

SEQ ID NO: 645636 - DNA, 25 bp, Homo sapien
tgctgagtaaggtccgattgggtaa

SEQ ID NO: 645637 - DNA, 25 bp, Homo sapien
gggtgtacatacttcctagtgccca

SEQ ID NO: 645638 - DNA, 25 bp, Homo sapien
ttttatcaggaaaggaattgggcat

SEQ ID NO: 645639 - DNA, 25 bp, Homo sapien
catgatgcgagatgtttcattcatg

SEQ ID NO: 645640 - DNA, 25 bp, Homo sapien
ggaacatgatgcgagatgtttcatt

SEQ ID NO: 645641 - DNA, 25 bp, Homo sapien
ttaatggaacatgatgcgagatgtt

SEQ ID NO: 645642 - DNA, 25 bp, Homo sapien
aatggaacatgatgcgagatgtttc

SEQ ID NO: 645643 - DNA, 25 bp, Homo sapien
tttatgtctttcagcgggtgtggag

SEQ ID NO: 645644 - DNA, 25 bp, Homo sapien
ctttcagcgggtgtggagagttcaa

SEQ ID NO: 645645 - DNA, 25 bp, Homo sapien
tggctacatgagcagacaatatttt

SEQ ID NO: 645646 - DNA, 25 bp, Homo sapien
ctgccaacaaacttggctacatgag

SEQ ID NO: 645647 - DNA, 25 bp, Homo sapien
aagcacgacagagctttatgctgcc

SEQ ID NO: 645648 - DNA, 25 bp, Homo sapien
tttccccagtctcagaactgatgat

SEQ ID NO: 645649 - DNA, 25 bp, Homo sapien
gctgccaagatggatccaggttctt

SEQ ID NO: 645650 - DNA, 25 bp, Homo sapien
actgatgatgtggatatgagacatg

SEQ ID NO: 645651 - DNA, 25 bp, Homo sapien
cttggtgctgtggcatcctggaggt

SEQ ID NO: 645652 - DNA, 25 bp, Homo sapien
tgctgtggcatcctggaggtccagt

SEQ ID NO: 645653 - DNA, 25 bp, Homo sapien
ggtgctgtggcatcctggaggtcca

SEQ ID NO: 645654 - DNA, 25 bp, Homo sapien
tggtgctgtggcatcctggaggtcc

SEQ ID NO: 645655 - DNA, 25 bp, Homo sapien
cccagcacgccacatcagatgagtg

SEQ ID NO: 645656 - DNA, 25 bp, Homo sapien
tgcgtaagcacgtgtgatattctac

SEQ ID NO: 645657 - DNA, 25 bp, Homo sapien
gggaatagaaatgcgtaagcacgtg

SEQ ID NO: 645658 - DNA, 25 bp, Homo sapien
attctacatggtcagctttgtaggg

SEQ ID NO: 645659 - DNA, 25 bp, Homo sapien
tgagaatgcatgtgataaccaatac

SEQ ID NO: 645660 - DNA, 25 bp, Homo sapien
agaggcctgagaatgcatgtgataa

SEQ ID NO: 645661 - DNA, 25 bp, Homo sapien
tgcatgtgataaccaatacttgtgt

SEQ ID NO: 645662 - DNA, 25 bp, Homo sapien
ggcctgagaatgcatgtgataacca

SEQ ID NO: 645663 - DNA, 25 bp, Homo sapien
tgaggtaatcgtcaccggctgccat

SEQ ID NO: 645664 - DNA, 25 bp, Homo sapien
tgtgagttgaggtaatcgtcaccgg

SEQ ID NO: 645665 - DNA, 25 bp, Homo sapien
tgagttgaggtaatcgtcaccggct

SEQ ID NO: 645666 - DNA, 25 bp, Homo sapien
ctcttgctgtgagttgaggtaatcg

SEQ ID NO: 645667 - DNA, 25 bp, Homo sapien
accttattgtaaaccctgtggccat

SEQ ID NO: 645668 - DNA, 25 bp, Homo sapien
gaccttattgtaaaccctgtggcca

SEQ ID NO: 645669 - DNA, 25 bp, Homo sapien
acttgccaacaacttcagacatcag

SEQ ID NO: 645670 - DNA, 25 bp, Homo sapien
tacttgccaacaacttcagacatca

SEQ ID NO: 645671 - DNA, 25 bp, Homo sapien
ttacttgccaacaacttcagacatc

SEQ ID NO: 645672 - DNA, 25 bp, Homo sapien
tgcgttgtattaagtaatgggaatt

SEQ ID NO: 645673 - DNA, 25 bp, Homo sapien
gtaatgggaattgggctgtgctctt

SEQ ID NO: 645674 - DNA, 25 bp, Homo sapien
tgggaattgggctgtgctcttgttc

SEQ ID NO: 645675 - DNA, 25 bp, Homo sapien
attgggctgtgctcttgttctctgc

SEQ ID NO: 645676 - DNA, 25 bp, Homo sapien
ctgccaccctactctccttcacagt

SEQ ID NO: 645677 - DNA, 25 bp, Homo sapien
gcctgccaccctactctccttcaca

SEQ ID NO: 645678 - DNA, 25 bp, Homo sapien
tgccaccctactctccttcacagtg

SEQ ID NO: 645679 - DNA, 25 bp, Homo sapien
cctgccaccctactctccttcacag

SEQ ID NO: 645680 - DNA, 25 bp, Homo sapien
gttgttggcagaagtaaggtaaata

SEQ ID NO: 645681 - DNA, 25 bp, Homo sapien
tcttttacatggaaaatgcgagaac

SEQ ID NO: 645682 - DNA, 25 bp, Homo sapien
ggtaaatatagaacctctgatggcg

SEQ ID NO: 645683 - DNA, 25 bp, Homo sapien
cgtttgggtgctatgaagcttattc

SEQ ID NO: 645684 - DNA, 25 bp, Homo sapien
agcagtatgaatctagcaaaatctg

SEQ ID NO: 645685 - DNA, 25 bp, Homo sapien
tacaacatactctaatttttgtcct

SEQ ID NO: 645686 - DNA, 25 bp, Homo sapien
aaagatcctccttcacatacaacat

SEQ ID NO: 645687 - DNA, 25 bp, Homo sapien
atttttgtccttctagcagtatgaa

SEQ ID NO: 645688 - DNA, 25 bp, Homo sapien
tgttgatccccagccagtcttcttg

SEQ ID NO: 645689 - DNA, 25 bp, Homo sapien
gaattgtagcatccacattctcaca

SEQ ID NO: 645690 - DNA, 25 bp, Homo sapien
gcaaacgtttgacatctgctctgga

SEQ ID NO: 645691 - DNA, 25 bp, Homo sapien
aaatggaagcattcttagaggatat

SEQ ID NO: 645692 - DNA, 25 bp, Homo sapien
gcctttgcccatcaggaaattgcat

SEQ ID NO: 645693 - DNA, 25 bp, Homo sapien
gagacaatgtggaagtaagacccat

SEQ ID NO: 645694 - DNA, 25 bp, Homo sapien
tttgcctgcctttgcccatcaggaa

SEQ ID NO: 645695 - DNA, 25 bp, Homo sapien
tatggtgagagccaagtgactatta

SEQ ID NO: 645696 - DNA, 25 bp, Homo sapien
tttctattattcttagcatgatgtc

SEQ ID NO: 645697 - DNA, 25 bp, Homo sapien
ctttctattattcttagcatgatgt

SEQ ID NO: 645698 - DNA, 25 bp, Homo sapien
ttctattattcttagcatgatgtcc

SEQ ID NO: 645699 - DNA, 25 bp, Homo sapien
cctggatctggaagtttgggagata

SEQ ID NO: 645700 - DNA, 25 bp, Homo sapien
tcctggatctggaagtttgggagat

SEQ ID NO: 645701 - DNA, 25 bp, Homo sapien
ggatctggaagtttgggagatactt

SEQ ID NO: 645702 - DNA, 25 bp, Homo sapien
ctggatctggaagtttgggagatac

SEQ ID NO: 645703 - DNA, 25 bp, Homo sapien
taactcagttaactgagggaaggcc

SEQ ID NO: 645704 - DNA, 25 bp, Homo sapien
aaactttggcggcagaaccacgtag

SEQ ID NO: 645705 - DNA, 25 bp, Homo sapien
ccttagttaggcgatgtatctgata

SEQ ID NO: 645706 - DNA, 25 bp, Homo sapien
ggccatgcagggctcacgttccttg

SEQ ID NO: 645707 - DNA, 25 bp, Homo sapien
gcctctgtccaaagcagtgtaagat

SEQ ID NO: 645708 - DNA, 25 bp, Homo sapien
tctgtccaaagcagtgtaagatgca

SEQ ID NO: 645709 - DNA, 25 bp, Homo sapien
aaatgaaagtggctggaagcatcac

SEQ ID NO: 645710 - DNA, 25 bp, Homo sapien
caaagcagtgtaagatgcaccagct

SEQ ID NO: 645711 - DNA, 25 bp, Homo sapien
gcctctgtgcagttgatacctgcac

SEQ ID NO: 645712 - DNA, 25 bp, Homo sapien
cagtgacagggtcgactcgcatcat

SEQ ID NO: 645713 - DNA, 25 bp, Homo sapien
gtgcagttgatacctgcacttccgg

SEQ ID NO: 645714 - DNA, 25 bp, Homo sapien
tgcacttccgggctcagtgacaggg

SEQ ID NO: 645715 - DNA, 25 bp, Homo sapien
cacttgcctgctgtgagtctcactt

SEQ ID NO: 645716 - DNA, 25 bp, Homo sapien
gagagaggaccatccattcacttgc

SEQ ID NO: 645717 - DNA, 25 bp, Homo sapien
taaacctaagggattggactgtaca

SEQ ID NO: 645718 - DNA, 25 bp, Homo sapien
ttgcgtccagcaagcctgatgtcct

SEQ ID NO: 645719 - DNA, 25 bp, Homo sapien
agcatgatctgtttgacatgaattc

SEQ ID NO: 645720 - DNA, 25 bp, Homo sapien
ctcctaactggatagcttcagtttg

SEQ ID NO: 645721 - DNA, 25 bp, Homo sapien
tgatctgtttgacatgaattctaca

SEQ ID NO: 645722 - DNA, 25 bp, Homo sapien
tcaagagcatgatctgtttgacatg

SEQ ID NO: 645723 - DNA, 25 bp, Homo sapien
gggcctgctgtctcaagtttgagag

SEQ ID NO: 645724 - DNA, 25 bp, Homo sapien
tcttcaacacgaataaataggcagt

SEQ ID NO: 645725 - DNA, 25 bp, Homo sapien
gacatctgagattcgggtccgatag

SEQ ID NO: 645726 - DNA, 25 bp, Homo sapien
tcgggtccgatagggtcacaatgtc

SEQ ID NO: 645727 - DNA, 25 bp, Homo sapien
ccataacttgcccaataaagtgcca

SEQ ID NO: 645728 - DNA, 25 bp, Homo sapien
gaatcaccataacttgcccaataaa

SEQ ID NO: 645729 - DNA, 25 bp, Homo sapien
gcccaataaagtgccactcatccat

SEQ ID NO: 645730 - DNA, 25 bp, Homo sapien
taacttgcccaataaagtgccactc

SEQ ID NO: 645731 - DNA, 25 bp, Homo sapien
tgtgaagagcttaattggagtacct

SEQ ID NO: 645732 - DNA, 25 bp, Homo sapien
ttaggcgttaaaggattgtaccatc

SEQ ID NO: 645733 - DNA, 25 bp, Homo sapien
aaggtggaacttagatggatttgcc

SEQ ID NO: 645734 - DNA, 25 bp, Homo sapien
gaggaatcatcaacttcagttaggc

SEQ ID NO: 645735 - DNA, 25 bp, Homo sapien
cggtattttcatcctgtccagtgga

SEQ ID NO: 645736 - DNA, 25 bp, Homo sapien
ggcatccatgtggtcggctcggtat

SEQ ID NO: 645737 - DNA, 25 bp, Homo sapien
gtccagtggatgctgatcttagaaa

SEQ ID NO: 645738 - DNA, 25 bp, Homo sapien
cgacaggtcttttcgatcgttagtt

SEQ ID NO: 645739 - DNA, 25 bp, Homo sapien
cagccacatggagagattcaagtct

SEQ ID NO: 645740 - DNA, 25 bp, Homo sapien
agtctcctagaaggaagacctgttg

SEQ ID NO: 645741 - DNA, 25 bp, Homo sapien
tttgatcaataacagccacatggag

SEQ ID NO: 645742 - DNA, 25 bp, Homo sapien
agacctgttggccttcatcttccaa

SEQ ID NO: 645743 - DNA, 25 bp, Homo sapien
tcctgcaggaacaattttatatggg

SEQ ID NO: 645744 - DNA, 25 bp, Homo sapien
ttttcctgcaggaacaattttatat

SEQ ID NO: 645745 - DNA, 25 bp, Homo sapien
tgtgagtaactcaggccagctttga

SEQ ID NO: 645746 - DNA, 25 bp, Homo sapien
cagctttgaaaaccatacttttgtt

SEQ ID NO: 645747 - DNA, 25 bp, Homo sapien
cagaatattgatgtgtgagtctaaa

SEQ ID NO: 645748 - DNA, 25 bp, Homo sapien
aggatttacttgatttctagtgggg

SEQ ID NO: 645749 - DNA, 25 bp, Homo sapien
aaggatttacttgatttctagtggg

SEQ ID NO: 645750 - DNA, 25 bp, Homo sapien
ttattccagaatattgatgtgtgag

SEQ ID NO: 645751 - DNA, 25 bp, Homo sapien
gcattgggtgccagcttgcacatta

SEQ ID NO: 645752 - DNA, 25 bp, Homo sapien
ccaggagggacaatgaccatgtaag

SEQ ID NO: 645753 - DNA, 25 bp, Homo sapien
catgtaagtggttctcacgccggac

SEQ ID NO: 645754 - DNA, 25 bp, Homo sapien
taactcctttgacagtactttcgcc

SEQ ID NO: 645755 - DNA, 25 bp, Homo sapien
ttttgacagtcgatagccccttgat

SEQ ID NO: 645756 - DNA, 25 bp, Homo sapien
agtcgatagccccttgatgccagct

SEQ ID NO: 645757 - DNA, 25 bp, Homo sapien
cgatagccccttgatgccagcttag

SEQ ID NO: 645758 - DNA, 25 bp, Homo sapien
tgacagtcgatagccccttgatgcc

SEQ ID NO: 645759 - DNA, 25 bp, Homo sapien
taaggccctctttatgtagcaaatg

SEQ ID NO: 645760 - DNA, 25 bp, Homo sapien
gctttgcagaacctaatacatccct

SEQ ID NO: 645761 - DNA, 25 bp, Homo sapien
taacatcaaaggaattaaggccctc

SEQ ID NO: 645762 - DNA, 25 bp, Homo sapien
tgcatttgctgatcattgccacttg

SEQ ID NO: 645763 - DNA, 25 bp, Homo sapien
tatattcctcagtaaagtggaaaaa

SEQ ID NO: 645764 - DNA, 25 bp, Homo sapien
tatttgccagccataatcattatat

SEQ ID NO: 645765 - DNA, 25 bp, Homo sapien
cccatgctcagagtaggcctcggaa

SEQ ID NO: 645766 - DNA, 25 bp, Homo sapien
acatcgtaccgcctttctccaaata

SEQ ID NO: 645767 - DNA, 25 bp, Homo sapien
aatgacgtgctctggagttatcacc

SEQ ID NO: 645768 - DNA, 25 bp, Homo sapien
taaaaatgacgtgctctggagttat

SEQ ID NO: 645769 - DNA, 25 bp, Homo sapien
gacgtgctctggagttatcaccctt

SEQ ID NO: 645770 - DNA, 25 bp, Homo sapien
ggagaataaaaatgacgtgctctgg

SEQ ID NO: 645771 - DNA, 25 bp, Homo sapien
cctcagaaccaagaggaacaaagtg

SEQ ID NO: 645772 - DNA, 25 bp, Homo sapien
tcctcagaaccaagaggaacaaagt

SEQ ID NO: 645773 - DNA, 25 bp, Homo sapien
cttagaagcgtaagccttcaccagg

SEQ ID NO: 645774 - DNA, 25 bp, Homo sapien
gaacagtgtgagtgcctccgctcat

SEQ ID NO: 645775 - DNA, 25 bp, Homo sapien
ctgcctcttagaagcgtaagccttc

SEQ ID NO: 645776 - DNA, 25 bp, Homo sapien
caggaagaacagtgtgagtgcctcc

SEQ ID NO: 645777 - DNA, 25 bp, Homo sapien
ggcggtactggagcaaaccttgctt

SEQ ID NO: 645778 - DNA, 25 bp, Homo sapien
cacagctgatgggagcatcttcaag

SEQ ID NO: 645779 - DNA, 25 bp, Homo sapien
tcttctttggatgtcacagctgatg

SEQ ID NO: 645780 - DNA, 25 bp, Homo sapien
gatgggagcatcttcaaggcggtac

SEQ ID NO: 645781 - DNA, 25 bp, Homo sapien
taatgagtggttgatcttcgccagg

SEQ ID NO: 645782 - DNA, 25 bp, Homo sapien
tggctgccccaagactagtcataga

SEQ ID NO: 645783 - DNA, 25 bp, Homo sapien
gaaaacaagggtgcttcactgacca

SEQ ID NO: 645784 - DNA, 25 bp, Homo sapien
tacagattggtagggttcaaagcct

SEQ ID NO: 645785 - DNA, 25 bp, Homo sapien
caatctggaaagcagcaatgagcca

SEQ ID NO: 645786 - DNA, 25 bp, Homo sapien
tatgatggtcaagctggcatgtgtc

SEQ ID NO: 645787 - DNA, 25 bp, Homo sapien
catgatctggtatacacttcaggac

SEQ ID NO: 645788 - DNA, 25 bp, Homo sapien
catgtgtctagggagtgaaccagac

SEQ ID NO: 645789 - DNA, 25 bp, Homo sapien
tgtgcaggatgaattcacgcttctc

SEQ ID NO: 645790 - DNA, 25 bp, Homo sapien
tgcaacatgcatcttgttcattctc

SEQ ID NO: 645791 - DNA, 25 bp, Homo sapien
tctctatgatatttgttgtgcagga

SEQ ID NO: 645792 - DNA, 25 bp, Homo sapien
tctcaacatctaagccttcggcaca

SEQ ID NO: 645793 - DNA, 25 bp, Homo sapien
gaagctagtcgcatttttcccggat

SEQ ID NO: 645794 - DNA, 25 bp, Homo sapien
tttcccggatactggcagccattgt

SEQ ID NO: 645795 - DNA, 25 bp, Homo sapien
gcaacaactcatagctcaaagtcag

SEQ ID NO: 645796 - DNA, 25 bp, Homo sapien
tgatgttctcattttggcaggcaac

SEQ ID NO: 645797 - DNA, 25 bp, Homo sapien
tctagaaaattgagtgagcccagct

SEQ ID NO: 645798 - DNA, 25 bp, Homo sapien
gatgcaccagtttagggcctaggcc

SEQ ID NO: 645799 - DNA, 25 bp, Homo sapien
tattgaccaggttgaatgggcgcca

SEQ ID NO: 645800 - DNA, 25 bp, Homo sapien
cagctgtgactcatagcagaggcca

SEQ ID NO: 645801 - DNA, 25 bp, Homo sapien
gaggtcttgtcttcaacccactgct

SEQ ID NO: 645802 - DNA, 25 bp, Homo sapien
gctgatgcatttcataacttttggc

SEQ ID NO: 645803 - DNA, 25 bp, Homo sapien
tgtctgggtactgctcatggaagaa

SEQ ID NO: 645804 - DNA, 25 bp, Homo sapien
tgggctctttctgtcggctgtctgg

SEQ ID NO: 645805 - DNA, 25 bp, Homo sapien
cacatggactatgccggcgggtttt

SEQ ID NO: 645806 - DNA, 25 bp, Homo sapien
gcaactgttgaggatcctgctggaa

SEQ ID NO: 645807 - DNA, 25 bp, Homo sapien
gggataatcccaggaggcaccaaca

SEQ ID NO: 645808 - DNA, 25 bp, Homo sapien
catgggaggctgacccacatggact

SEQ ID NO: 645809 - DNA, 25 bp, Homo sapien
tcttttgcagaagcacaactctgaa

SEQ ID NO: 645810 - DNA, 25 bp, Homo sapien
caactctgaagtaagtcacctaagg

SEQ ID NO: 645811 - DNA, 25 bp, Homo sapien
aagtaagtcacctaaggccacgcag

SEQ ID NO: 645812 - DNA, 25 bp, Homo sapien
gaagcacaactctgaagtaagtcac

SEQ ID NO: 645813 - DNA, 25 bp, Homo sapien
gctatcttcaagatttccagggagt

SEQ ID NO: 645814 - DNA, 25 bp, Homo sapien
agctatcttcaagatttccagggag

SEQ ID NO: 645815 - DNA, 25 bp, Homo sapien
cttcaagatttccagggagtaatag

SEQ ID NO: 645816 - DNA, 25 bp, Homo sapien
tatcttcaagatttccagggagtaa

SEQ ID NO: 645817 - DNA, 25 bp, Homo sapien
ccaagatccagtaatatctgctcat

SEQ ID NO: 645818 - DNA, 25 bp, Homo sapien
cttgtccaagatccagtaatatctg

SEQ ID NO: 645819 - DNA, 25 bp, Homo sapien
tccaagatccagtaatatctgctca

SEQ ID NO: 645820 - DNA, 25 bp, Homo sapien
tgtccaagatccagtaatatctgct

SEQ ID NO: 645821 - DNA, 25 bp, Homo sapien
tccactcaactgttccatactttgt

SEQ ID NO: 645822 - DNA, 25 bp, Homo sapien
accatccctccactcaactgttcca

SEQ ID NO: 645823 - DNA, 25 bp, Homo sapien
gtacttgataagagtttgttcccga

SEQ ID NO: 645824 - DNA, 25 bp, Homo sapien
tccatactttgtacttgataagagt

SEQ ID NO: 645825 - DNA, 25 bp, Homo sapien
gctctctctgaagtgtgggagtgga

SEQ ID NO: 645826 - DNA, 25 bp, Homo sapien
taatataagggggtttctgctgagg

SEQ ID NO: 645827 - DNA, 25 bp, Homo sapien
gctgcttgggaacagctttcataat

SEQ ID NO: 645828 - DNA, 25 bp, Homo sapien
aataatccctggacggcaatgccag

SEQ ID NO: 645829 - DNA, 25 bp, Homo sapien
gcagacactgtcattcccgtataga

SEQ ID NO: 645830 - DNA, 25 bp, Homo sapien
ctctttacttgcttgtaggttgtct

SEQ ID NO: 645831 - DNA, 25 bp, Homo sapien
tgtcattcccgtatagattttaaca

SEQ ID NO: 645832 - DNA, 25 bp, Homo sapien
taggttgtctatgtttctccatttc

SEQ ID NO: 645833 - DNA, 25 bp, Homo sapien
tgtagatgccacttttaggtaacca

SEQ ID NO: 645834 - DNA, 25 bp, Homo sapien
taggtaaccattttgtgtagacctg

SEQ ID NO: 645835 - DNA, 25 bp, Homo sapien
caagccttctttcataaactgtggt

SEQ ID NO: 645836 - DNA, 25 bp, Homo sapien
tttagtatggactttctgtctgtag

SEQ ID NO: 645837 - DNA, 25 bp, Homo sapien
tccatcacaggcatttaggtcctca

SEQ ID NO: 645838 - DNA, 25 bp, Homo sapien
catctcctcacctggtctgtctttt

SEQ ID NO: 645839 - DNA, 25 bp, Homo sapien
tcctcacctggtctgtcttttttcc

SEQ ID NO: 645840 - DNA, 25 bp, Homo sapien
ggtcctcattagtttctcattccac

SEQ ID NO: 645841 - DNA, 25 bp, Homo sapien
tagcacatgccagtcttctgaaatg

SEQ ID NO: 645842 - DNA, 25 bp, Homo sapien
gggctatcactgtccccatattcac

SEQ ID NO: 645843 - DNA, 25 bp, Homo sapien
tttatcaaagaaattgggctatcac

SEQ ID NO: 645844 - DNA, 25 bp, Homo sapien
cttagcacatgccagtcttctgaaa

SEQ ID NO: 645845 - DNA, 25 bp, Homo sapien
cttgcttgtcaacaagccacttgct

SEQ ID NO: 645846 - DNA, 25 bp, Homo sapien
tgcttgtcaacaagccacttgcttt

SEQ ID NO: 645847 - DNA, 25 bp, Homo sapien
ttgctttcaccaatatttctcacat

SEQ ID NO: 645848 - DNA, 25 bp, Homo sapien
cacttgctttcaccaatatttctca

SEQ ID NO: 645849 - DNA, 25 bp, Homo sapien
ctagaaaagccacgatcaagataga

SEQ ID NO: 645850 - DNA, 25 bp, Homo sapien
aagccacgatcaagatagaggtaag

SEQ ID NO: 645851 - DNA, 25 bp, Homo sapien
cacgatcaagatagaggtaagagat

SEQ ID NO: 645852 - DNA, 25 bp, Homo sapien
gaaaagccacgatcaagatagaggt

SEQ ID NO: 645853 - DNA, 25 bp, Homo sapien
gatctgcatttttgattaggataat

SEQ ID NO: 645854 - DNA, 25 bp, Homo sapien
atctgcatttttgattaggataatt

SEQ ID NO: 645855 - DNA, 25 bp, Homo sapien
ctgcatttttgattaggataattga

SEQ ID NO: 645856 - DNA, 25 bp, Homo sapien
tctgcatttttgattaggataattg

SEQ ID NO: 645857 - DNA, 25 bp, Homo sapien
ctgactcataactgatttcccccat

SEQ ID NO: 645858 - DNA, 25 bp, Homo sapien
ccatagaaaaacattggggaaatag

SEQ ID NO: 645859 - DNA, 25 bp, Homo sapien
aaaacattggggaaatagtgctcca

SEQ ID NO: 645860 - DNA, 25 bp, Homo sapien
agttgttcagatttccatagaaaaa

SEQ ID NO: 645861 - DNA, 25 bp, Homo sapien
gttgttcagatttccatagaaaaac

SEQ ID NO: 645862 - DNA, 25 bp, Homo sapien
tatgattttgctaaggcacccagag

SEQ ID NO: 645863 - DNA, 25 bp, Homo sapien
ctatgattttgctaaggcacccaga

SEQ ID NO: 645864 - DNA, 25 bp, Homo sapien
ggcacccagagtgtgaagtaacttt

SEQ ID NO: 645865 - DNA, 25 bp, Homo sapien
cacccagagtgtgaagtaactttgt

SEQ ID NO: 645866 - DNA, 25 bp, Homo sapien
aagcatagcactgatgtaattccct

SEQ ID NO: 645867 - DNA, 25 bp, Homo sapien
cagagccctttcttcgtgtggggta

SEQ ID NO: 645868 - DNA, 25 bp, Homo sapien
ctttcttcgtgtggggtacagtgga

SEQ ID NO: 645869 - DNA, 25 bp, Homo sapien
cactgatgtaattccctgagctgtg

SEQ ID NO: 645870 - DNA, 25 bp, Homo sapien
tgtctatgcaggcattgttgggata

SEQ ID NO: 645871 - DNA, 25 bp, Homo sapien
ttgttgggatataaggcagaatctc

SEQ ID NO: 645872 - DNA, 25 bp, Homo sapien
gttgggatataaggcagaatctcca

SEQ ID NO: 645873 - DNA, 25 bp, Homo sapien
gcattgttgggatataaggcagaat

SEQ ID NO: 645874 - DNA, 25 bp, Homo sapien
gagcttatgagactctccctgagga

SEQ ID NO: 645875 - DNA, 25 bp, Homo sapien
gaactacttgtgcagagtttggaag

SEQ ID NO: 645876 - DNA, 25 bp, Homo sapien
tggaaagagtagattccacctcctg

SEQ ID NO: 645877 - DNA, 25 bp, Homo sapien
tgtggattgtgaaggagcaatggaa

SEQ ID NO: 645878 - DNA, 25 bp, Homo sapien
catcttttctccatcgtatttccag

SEQ ID NO: 645879 - DNA, 25 bp, Homo sapien
gttctgtctaaatataagtttcatc

SEQ ID NO: 645880 - DNA, 25 bp, Homo sapien
ctctctgggcagtagattgttctgt

SEQ ID NO: 645881 - DNA, 25 bp, Homo sapien
tatttccagatcaccctctctgggc

SEQ ID NO: 645882 - DNA, 25 bp, Homo sapien
tcactcaccttaagaccttcacccc

SEQ ID NO: 645883 - DNA, 25 bp, Homo sapien
gttatgaccatcactcaccttaaga

SEQ ID NO: 645884 - DNA, 25 bp, Homo sapien
tgaccatcactcaccttaagacctt

SEQ ID NO: 645885 - DNA, 25 bp, Homo sapien
tatgaccatcactcaccttaagacc

SEQ ID NO: 645886 - DNA, 25 bp, Homo sapien
gttggacactttggtgaccttgagc

SEQ ID NO: 645887 - DNA, 25 bp, Homo sapien
tcttggtgttggacactttggtgac

SEQ ID NO: 645888 - DNA, 25 bp, Homo sapien
cagtcttgctcaggggctggtactc

SEQ ID NO: 645889 - DNA, 25 bp, Homo sapien
gaccttgagcatgttgaagtgtaca

SEQ ID NO: 645890 - DNA, 25 bp, Homo sapien
gacaatgtcaccgatctggatgtcc

SEQ ID NO: 645891 - DNA, 25 bp, Homo sapien
gtgacaatgtcaccgatctggatgt

SEQ ID NO: 645892 - DNA, 25 bp, Homo sapien
ctgtgacaatgtcaccgatctggat

SEQ ID NO: 645893 - DNA, 25 bp, Homo sapien
ccactgtgacaatgtcaccgatctg

SEQ ID NO: 645894 - DNA, 25 bp, Homo sapien
tgagtgggagaataggtacacaggc

SEQ ID NO: 645895 - DNA, 25 bp, Homo sapien
cagatgacaatggttctctgactct

SEQ ID NO: 645896 - DNA, 25 bp, Homo sapien
tgcacacagtctgggcagatgacaa

SEQ ID NO: 645897 - DNA, 25 bp, Homo sapien
atacttggacatgtagtgcacacag

SEQ ID NO: 645898 - DNA, 25 bp, Homo sapien
ggttggctgtttttgatagcctcac

SEQ ID NO: 645899 - DNA, 25 bp, Homo sapien
aaatttcttgtcagtctaggtgccc

SEQ ID NO: 645900 - DNA, 25 bp, Homo sapien
tgttcaccatgccaaacagaatcct

SEQ ID NO: 645901 - DNA, 25 bp, Homo sapien
caatgttcttttactaccgcgggag

SEQ ID NO: 645902 - DNA, 25 bp, Homo sapien
ccatcttgacctatgcaattggtga

SEQ ID NO: 645903 - DNA, 25 bp, Homo sapien
caccaccatcttgacctatgcaatt

SEQ ID NO: 645904 - DNA, 25 bp, Homo sapien
gacctatgcaattggtgaggccaca

SEQ ID NO: 645905 - DNA, 25 bp, Homo sapien
tcttgacctatgcaattggtgaggc

SEQ ID NO: 645906 - DNA, 25 bp, Homo sapien
tgcctagaatcattgagagagtata

SEQ ID NO: 645907 - DNA, 25 bp, Homo sapien
tgtcactcaacagtcttttaaactc

SEQ ID NO: 645908 - DNA, 25 bp, Homo sapien
gctgttctcaaaagctgcctagaat

SEQ ID NO: 645909 - DNA, 25 bp, Homo sapien
tctttcattcttgacatttgccatt

SEQ ID NO: 645910 - DNA, 25 bp, Homo sapien
agttggcctatgtaacccaggacca

SEQ ID NO: 645911 - DNA, 25 bp, Homo sapien
tcacctatatgtcctggagttggcc

SEQ ID NO: 645912 - DNA, 25 bp, Homo sapien
tgtagacattctcgaagtcacctcc

SEQ ID NO: 645913 - DNA, 25 bp, Homo sapien
ttttccaggcatctagttcttcacc

SEQ ID NO: 645914 - DNA, 25 bp, Homo sapien
ctggaggaggaatgagagctccatc

SEQ ID NO: 645915 - DNA, 25 bp, Homo sapien
gcatgttcatcactcaactctaacg

SEQ ID NO: 645916 - DNA, 25 bp, Homo sapien
gagctccatctctagtgcatgttca

SEQ ID NO: 645917 - DNA, 25 bp, Homo sapien
tctaacgtgaaaagaggagtttcag

SEQ ID NO: 645918 - DNA, 25 bp, Homo sapien
tgatggatgatctcaggtccagagc

SEQ ID NO: 645919 - DNA, 25 bp, Homo sapien
tgctgaaatgccctggtccaaagac

SEQ ID NO: 645920 - DNA, 25 bp, Homo sapien
cttcctaaggaagtagccctgggct

SEQ ID NO: 645921 - DNA, 25 bp, Homo sapien
ttcttggcagagaggttgtccatga

SEQ ID NO: 645922 - DNA, 25 bp, Homo sapien
ttactaagggtgaaggcccaacatc

SEQ ID NO: 645923 - DNA, 25 bp, Homo sapien
ctaagggtgaaggcccaacatctgc

SEQ ID NO: 645924 - DNA, 25 bp, Homo sapien
agggcttgctttcctagggccgctt

SEQ ID NO: 645925 - DNA, 25 bp, Homo sapien
cagggcttgctttcctagggccgct

SEQ ID NO: 645926 - DNA, 25 bp, Homo sapien
agcaacaagctgcttcaaaattatc

SEQ ID NO: 645927 - DNA, 25 bp, Homo sapien
cagcaacaagctgcttcaaaattat

SEQ ID NO: 645928 - DNA, 25 bp, Homo sapien
tcagcaacaagctgcttcaaaatta

SEQ ID NO: 645929 - DNA, 25 bp, Homo sapien
acaggtgacaggaagtcatctaact

SEQ ID NO: 645930 - DNA, 25 bp, Homo sapien
caggtgacaggaagtcatctaactt

SEQ ID NO: 645931 - DNA, 25 bp, Homo sapien
tgacaggaagtcatctaacttcttc

SEQ ID NO: 645932 - DNA, 25 bp, Homo sapien
ggtgacaggaagtcatctaacttct

SEQ ID NO: 645933 - DNA, 25 bp, Homo sapien
gatactcaggtggagatcagacccg

SEQ ID NO: 645934 - DNA, 25 bp, Homo sapien
tacatacggatcataggacaccaat

SEQ ID NO: 645935 - DNA, 25 bp, Homo sapien
ggattaccaacagcctactcaatgg

SEQ ID NO: 645936 - DNA, 25 bp, Homo sapien
caagttcttcaagtggtcccagtaa

SEQ ID NO: 645937 - DNA, 25 bp, Homo sapien
gacacattaccctcgacattaccat

SEQ ID NO: 645938 - DNA, 25 bp, Homo sapien
tctgaagacttatgagctgacacat

SEQ ID NO: 645939 - DNA, 25 bp, Homo sapien
tatgagctgacacattaccctcgac

SEQ ID NO: 645940 - DNA, 25 bp, Homo sapien
gacattaccatgcattgacctctct

SEQ ID NO: 645941 - DNA, 25 bp, Homo sapien
cagcggaagcatgggagaacactgc

SEQ ID NO: 645942 - DNA, 25 bp, Homo sapien
gcttcagcggaagcatgggagaaca

SEQ ID NO: 645943 - DNA, 25 bp, Homo sapien
tttctgagcttcagcggaagcatgg

SEQ ID NO: 645944 - DNA, 25 bp, Homo sapien
ttctgagcttcagcggaagcatggg

SEQ ID NO: 645945 - DNA, 25 bp, Homo sapien
ttcgtttattaagaaatggtcactg

SEQ ID NO: 645946 - DNA, 25 bp, Homo sapien
tcatttttggtgagcattgtgttcg

SEQ ID NO: 645947 - DNA, 25 bp, Homo sapien
cagaacaaacttgtgactcagaggg

SEQ ID NO: 645948 - DNA, 25 bp, Homo sapien
gagaatgcagaacaaacttgtgact

SEQ ID NO: 645949 - DNA, 25 bp, Homo sapien
tttccagagaaacaagttgatctga

SEQ ID NO: 645950 - DNA, 25 bp, Homo sapien
agtttccagagaaacaagttgatct

SEQ ID NO: 645951 - DNA, 25 bp, Homo sapien
gataggaacgtttatgagtcccagg

SEQ ID NO: 645952 - DNA, 25 bp, Homo sapien
gccttgaagataggaacgtttatga

SEQ ID NO: 645953 - DNA, 25 bp, Homo sapien
agttggaaaatctgccacatgtcat

SEQ ID NO: 645954 - DNA, 25 bp, Homo sapien
tggaacagcaggttgaaatgccttt

SEQ ID NO: 645955 - DNA, 25 bp, Homo sapien
gcctttcaagcgctttgattgccac

SEQ ID NO: 645956 - DNA, 25 bp, Homo sapien
tttcaagcgctttgattgccaccat

SEQ ID NO: 645957 - DNA, 25 bp, Homo sapien
aagcgctttgattgccaccatgaaa

SEQ ID NO: 645958 - DNA, 25 bp, Homo sapien
aatagaatcaggaacgaatctgtga

SEQ ID NO: 645959 - DNA, 25 bp, Homo sapien
aaatagaatcaggaacgaatctgtg

SEQ ID NO: 645960 - DNA, 25 bp, Homo sapien
taaatagaatcaggaacgaatctgt

SEQ ID NO: 645961 - DNA, 25 bp, Homo sapien
tctggaaggcctatcggatgggaac

SEQ ID NO: 645962 - DNA, 25 bp, Homo sapien
tatgatcaaagcatcttcgggagcc

SEQ ID NO: 645963 - DNA, 25 bp, Homo sapien
ttcgggagccattagctctatacag

SEQ ID NO: 645964 - DNA, 25 bp, Homo sapien
cttaactaaataacttgctatgatc

SEQ ID NO: 645965 - DNA, 25 bp, Homo sapien
tcaatatggtgtgttggatttccct

SEQ ID NO: 645966 - DNA, 25 bp, Homo sapien
ggactaaaaacatcgtctgctgagg

SEQ ID NO: 645967 - DNA, 25 bp, Homo sapien
tatagctcaggaaactagatcgtga

SEQ ID NO: 645968 - DNA, 25 bp, Homo sapien
aggtcacagaactgattcaatgcag

SEQ ID NO: 645969 - DNA, 25 bp, Homo sapien
gttatgagacccaatataagttctg

SEQ ID NO: 645970 - DNA, 25 bp, Homo sapien
agcagaagttatgagacccaatata

SEQ ID NO: 645971 - DNA, 25 bp, Homo sapien
gagacccaatataagttctggttct

SEQ ID NO: 645972 - DNA, 25 bp, Homo sapien
tctggactgagaatccatggggact

SEQ ID NO: 645973 - DNA, 25 bp, Homo sapien
atcccaccctctcccaaccggcaca

SEQ ID NO: 645974 - DNA, 25 bp, Homo sapien
gcacaggatcagcttgtttgctcac

SEQ ID NO: 645975 - DNA, 25 bp, Homo sapien
ggcacaggatcagcttgtttgctca

SEQ ID NO: 645976 - DNA, 25 bp, Homo sapien
accctctcccaaccggcacaggatc

SEQ ID NO: 645977 - DNA, 25 bp, Homo sapien
tctgtctgctgatggcaatctctcc

SEQ ID NO: 645978 - DNA, 25 bp, Homo sapien
tcccagttggtgcagtcaacattcc

SEQ ID NO: 645979 - DNA, 25 bp, Homo sapien
agttggtgcagtcaacattccagtg

SEQ ID NO: 645980 - DNA, 25 bp, Homo sapien
gatggcaatctctccgtggctttct

SEQ ID NO: 645981 - DNA, 25 bp, Homo sapien
agaagttccaatctgttccaattga

SEQ ID NO: 645982 - DNA, 25 bp, Homo sapien
ccaatctgttccaattgataattta

SEQ ID NO: 645983 - DNA, 25 bp, Homo sapien
attgataatttaaagggaagactct

SEQ ID NO: 645984 - DNA, 25 bp, Homo sapien
taatttaaagggaagactctgccag

SEQ ID NO: 645985 - DNA, 25 bp, Homo sapien
aacttcttaaatgttttgttgcagc

SEQ ID NO: 645986 - DNA, 25 bp, Homo sapien
aaatgttttgttgcagccagcactg

SEQ ID NO: 645987 - DNA, 25 bp, Homo sapien
tcttaaatgttttgttgcagccagc

SEQ ID NO: 645988 - DNA, 25 bp, Homo sapien
aatgttttgttgcagccagcactgg

SEQ ID NO: 645989 - DNA, 25 bp, Homo sapien
gtatcctttagccttgattccccat

SEQ ID NO: 645990 - DNA, 25 bp, Homo sapien
taatgatacccctgccccggtatcc

SEQ ID NO: 645991 - DNA, 25 bp, Homo sapien
ttagccttgattccccatgtgtttc

SEQ ID NO: 645992 - DNA, 25 bp, Homo sapien
atgtcctaatgatacccctgccccg

SEQ ID NO: 645993 - DNA, 25 bp, Homo sapien
caatctgatttctccatcctctccc

SEQ ID NO: 645994 - DNA, 25 bp, Homo sapien
acaatctgatttctccatcctctcc

SEQ ID NO: 645995 - DNA, 25 bp, Homo sapien
tcacttctcaggtggggcggctgcc

SEQ ID NO: 645996 - DNA, 25 bp, Homo sapien
ttctcaggtggggcggctgccaggc

SEQ ID NO: 645997 - DNA, 25 bp, Homo sapien
tctgaagctgtgtagcttaagggcc

SEQ ID NO: 645998 - DNA, 25 bp, Homo sapien
tagcttaagggcctttgagtaataa

SEQ ID NO: 645999 - DNA, 25 bp, Homo sapien
tatcatcatggctttacctctaatg

SEQ ID NO: 646000 - DNA, 25 bp, Homo sapien
taatgcccactgtaagagcaagatc

SEQ ID NO: 646001 - DNA, 25 bp, Homo sapien
tgtgtatttgctggaagggacatgc

SEQ ID NO: 646002 - DNA, 25 bp, Homo sapien
gtgtatttgctggaagggacatgca

SEQ ID NO: 646003 - DNA, 25 bp, Homo sapien
cacatacagtactcagcgtgaaaca

SEQ ID NO: 646004 - DNA, 25 bp, Homo sapien
agtactcagcgtgaaacaccaaatg

SEQ ID NO: 646005 - DNA, 25 bp, Homo sapien
tcatgctgctccttagaattctaaa

SEQ ID NO: 646006 - DNA, 25 bp, Homo sapien
catgatgtctggcactctgctaggc

SEQ ID NO: 646007 - DNA, 25 bp, Homo sapien
ttcacttttgagacggattcaaagg

SEQ ID NO: 646008 - DNA, 25 bp, Homo sapien
tccttagaattctaaagactcatga

SEQ ID NO: 646009 - DNA, 25 bp, Homo sapien
cattttccatgccattcatggtaac

SEQ ID NO: 646010 - DNA, 25 bp, Homo sapien
tctgctgtaagcatgcaaaaggaag

SEQ ID NO: 646011 - DNA, 25 bp, Homo sapien
ccattttccatgccattcatggtaa

SEQ ID NO: 646012 - DNA, 25 bp, Homo sapien
ttttccatgccattcatggtaacag

SEQ ID NO: 646013 - DNA, 25 bp, Homo sapien
tgttacaaagatattcaagagaaaa

SEQ ID NO: 646014 - DNA, 25 bp, Homo sapien
ctgttacaaagatattcaagagaaa

SEQ ID NO: 646015 - DNA, 25 bp, Homo sapien
gaacagataaggttgagattccaga

SEQ ID NO: 646016 - DNA, 25 bp, Homo sapien
caaataaaattaatagcactgccat

SEQ ID NO: 646017 - DNA, 25 bp, Homo sapien
aaaacaacacaaaccattcagtaga

SEQ ID NO: 646018 - DNA, 25 bp, Homo sapien
cattcagtagaacaggctgcattta

SEQ ID NO: 646019 - DNA, 25 bp, Homo sapien
atgaggtagttcaataggccaggca

SEQ ID NO: 646020 - DNA, 25 bp, Homo sapien
tccaaatagttgctctccctggttc

SEQ ID NO: 646021 - DNA, 25 bp, Homo sapien
aataggccaggcactccaaatagtt

SEQ ID NO: 646022 - DNA, 25 bp, Homo sapien
ggcactccaaatagttgctctccct

SEQ ID NO: 646023 - DNA, 25 bp, Homo sapien
gttgctgccggcttgttcctgagac

SEQ ID NO: 646024 - DNA, 25 bp, Homo sapien
gccggcttgttcctgagaccgctca

SEQ ID NO: 646025 - DNA, 25 bp, Homo sapien
tgctgccggcttgttcctgagaccg

SEQ ID NO: 646026 - DNA, 25 bp, Homo sapien
gcttgttcctgagaccgctcatgta

SEQ ID NO: 646027 - DNA, 25 bp, Homo sapien
agacacgaggctaccacatggctga

SEQ ID NO: 646028 - DNA, 25 bp, Homo sapien
tgtggctcaattcttggaaccccag

SEQ ID NO: 646029 - DNA, 25 bp, Homo sapien
agtacccgtctccttttgatgtgcg

SEQ ID NO: 646030 - DNA, 25 bp, Homo sapien
cttggagagtaggttggcttgccct

SEQ ID NO: 646031 - DNA, 25 bp, Homo sapien
ggtccggtgacacaggtagtttcca

SEQ ID NO: 646032 - DNA, 25 bp, Homo sapien
caggtccggtgacacaggtagtttc

SEQ ID NO: 646033 - DNA, 25 bp, Homo sapien
ccggtgacacaggtagtttccacac

SEQ ID NO: 646034 - DNA, 25 bp, Homo sapien
tccggtgacacaggtagtttccaca

SEQ ID NO: 646035 - DNA, 25 bp, Homo sapien
ttgggtgactcctccactgtttcgt

SEQ ID NO: 646036 - DNA, 25 bp, Homo sapien
caggaagccctccgtgtgcagctta

SEQ ID NO: 646037 - DNA, 25 bp, Homo sapien
ccactgtttcgtcctccttcaggct

SEQ ID NO: 646038 - DNA, 25 bp, Homo sapien
tcctccactgtttcgtcctccttca

SEQ ID NO: 646039 - DNA, 25 bp, Homo sapien
agcccacgttgaaccgcttacagat

SEQ ID NO: 646040 - DNA, 25 bp, Homo sapien
caccttagcgcagccacctgctaac

SEQ ID NO: 646041 - DNA, 25 bp, Homo sapien
accctggctagggcggtcatggaca

SEQ ID NO: 646042 - DNA, 25 bp, Homo sapien
gtgtcctccggcacctctttaggcg

SEQ ID NO: 646043 - DNA, 25 bp, Homo sapien
gagcccagggtcgtcagctgagccc

SEQ ID NO: 646044 - DNA, 25 bp, Homo sapien
gacacggagcccagggtcgtcagct

SEQ ID NO: 646045 - DNA, 25 bp, Homo sapien
agggtcgtcagctgagcccgcagcc

SEQ ID NO: 646046 - DNA, 25 bp, Homo sapien
acacggagcccagggtcgtcagctg

SEQ ID NO: 646047 - DNA, 25 bp, Homo sapien
ataacagcagctagatctggtaggg

SEQ ID NO: 646048 - DNA, 25 bp, Homo sapien
gtagggagtcggagcatgacaattc

SEQ ID NO: 646049 - DNA, 25 bp, Homo sapien
cagcagctagatctggtagggagtc

SEQ ID NO: 646050 - DNA, 25 bp, Homo sapien
gggagtcggagcatgacaattccat

SEQ ID NO: 646051 - DNA, 25 bp, Homo sapien
ctgcagagagggcccagggtaaggt

SEQ ID NO: 646052 - DNA, 25 bp, Homo sapien
tgctgcagagagggcccagggtaag

SEQ ID NO: 646053 - DNA, 25 bp, Homo sapien
gcagagagggcccagggtaaggtac

SEQ ID NO: 646054 - DNA, 25 bp, Homo sapien
ggtatgcctgctgcagagagggccc

SEQ ID NO: 646055 - DNA, 25 bp, Homo sapien
gccacagtgtgcagacttagagcag

SEQ ID NO: 646056 - DNA, 25 bp, Homo sapien
agtgtgcagacttagagcagaggca

SEQ ID NO: 646057 - DNA, 25 bp, Homo sapien
cacagtgtgcagacttagagcagag

SEQ ID NO: 646058 - DNA, 25 bp, Homo sapien
aagccacagtgtgcagacttagagc

SEQ ID NO: 646059 - DNA, 25 bp, Homo sapien
gccattgatgatctgaggacagtga

SEQ ID NO: 646060 - DNA, 25 bp, Homo sapien
aacatctttattggttctgtggaac

SEQ ID NO: 646061 - DNA, 25 bp, Homo sapien
caacagccattgatgatctgaggac

SEQ ID NO: 646062 - DNA, 25 bp, Homo sapien
gtggcaacagccattgatgatctga

SEQ ID NO: 646063 - DNA, 25 bp, Homo sapien
tgcgattgactagacatggtggctt

SEQ ID NO: 646064 - DNA, 25 bp, Homo sapien
gatctgaaccatctgaacagtgctg

SEQ ID NO: 646065 - DNA, 25 bp, Homo sapien
agtttgacatctgctgcaccttggt

SEQ ID NO: 646066 - DNA, 25 bp, Homo sapien
ccgcttgggccataaggagtgaagt

SEQ ID NO: 646067 - DNA, 25 bp, Homo sapien
aataaagcagaagctgctgccaagc

SEQ ID NO: 646068 - DNA, 25 bp, Homo sapien
ctcaataaagcagaagctgctgcca

SEQ ID NO: 646069 - DNA, 25 bp, Homo sapien
caataaagcagaagctgctgccaag

SEQ ID NO: 646070 - DNA, 25 bp, Homo sapien
taaagcagaagctgctgccaagcat

SEQ ID NO: 646071 - DNA, 25 bp, Homo sapien
tataaatggactaaattctgcaatt

SEQ ID NO: 646072 - DNA, 25 bp, Homo sapien
ttaaatataaatggactaaattctg

SEQ ID NO: 646073 - DNA, 25 bp, Homo sapien
aatataaatggactaaattctgcaa

SEQ ID NO: 646074 - DNA, 25 bp, Homo sapien
taaatataaatggactaaattctgc

SEQ ID NO: 646075 - DNA, 25 bp, Homo sapien
tgttcctcaactgtggaaatgatca

SEQ ID NO: 646076 - DNA, 25 bp, Homo sapien
gttcctcaactgtggaaatgatcat

SEQ ID NO: 646077 - DNA, 25 bp, Homo sapien
tttctattctgttcctcaactgtgg

SEQ ID NO: 646078 - DNA, 25 bp, Homo sapien
attctgttcctcaactgtggaaatg

SEQ ID NO: 646079 - DNA, 25 bp, Homo sapien
tatttgctccccatccaaaattctc

SEQ ID NO: 646080 - DNA, 25 bp, Homo sapien
ccctcttagggatgtctaatttata

SEQ ID NO: 646081 - DNA, 25 bp, Homo sapien
ttatttgctccccatccaaaattct

SEQ ID NO: 646082 - DNA, 25 bp, Homo sapien
taatttatacaatttgtctagcagg

SEQ ID NO: 646083 - DNA, 25 bp, Homo sapien
gataagcccctcgagttcctgcctc

SEQ ID NO: 646084 - DNA, 25 bp, Homo sapien
ttctgccactccgataagcccctcg

SEQ ID NO: 646085 - DNA, 25 bp, Homo sapien
aggcattttcagtgggggctttcct

SEQ ID NO: 646086 - DNA, 25 bp, Homo sapien
gaaggcgcataacaggcattttcag

SEQ ID NO: 646087 - DNA, 25 bp, Homo sapien
cctagacagtgaaaatgtctctgcc

SEQ ID NO: 646088 - DNA, 25 bp, Homo sapien
cctccaacccacttaatgaatttag

SEQ ID NO: 646089 - DNA, 25 bp, Homo sapien
cccacttaatgaatttagagacaca

SEQ ID NO: 646090 - DNA, 25 bp, Homo sapien
taaagaccacacgattgctttggaa

SEQ ID NO: 646091 - DNA, 25 bp, Homo sapien
agcagcggcagtcttccttggagga

SEQ ID NO: 646092 - DNA, 25 bp, Homo sapien
cagctgcgaggggacagaatgcttc

SEQ ID NO: 646093 - DNA, 25 bp, Homo sapien
gaatgcttcgctgtggtggttccgc

SEQ ID NO: 646094 - DNA, 25 bp, Homo sapien
aggaggccggcgtgcgcgcagctct

SEQ ID NO: 646095 - DNA, 25 bp, Homo sapien
ttcccaacaccccaaggtagcagca

SEQ ID NO: 646096 - DNA, 25 bp, Homo sapien
tttcctgatggcagatacccccgcg

SEQ ID NO: 646097 - DNA, 25 bp, Homo sapien
acggccacgtcaggcgcatcccttt

SEQ ID NO: 646098 - DNA, 25 bp, Homo sapien
ggccttcctctcgaacacttgcggg

SEQ ID NO: 646099 - DNA, 25 bp, Homo sapien
tcgaatcactaaccaaaaatctccc

SEQ ID NO: 646100 - DNA, 25 bp, Homo sapien
tagacatatacaacataccacaact

SEQ ID NO: 646101 - DNA, 25 bp, Homo sapien
tagcttgtaaagaaatcgaatcact

SEQ ID NO: 646102 - DNA, 25 bp, Homo sapien
agaatagcataaacttgggctgggc

SEQ ID NO: 646103 - DNA, 25 bp, Homo sapien
gactatgaatttcatggagttgctc

SEQ ID NO: 646104 - DNA, 25 bp, Homo sapien
tgactatgaatttcatggagttgct

SEQ ID NO: 646105 - DNA, 25 bp, Homo sapien
catatggtacatagctcaaagggaa

SEQ ID NO: 646106 - DNA, 25 bp, Homo sapien
caagtatgtaaataatcagtaaagc

SEQ ID NO: 646107 - DNA, 25 bp, Homo sapien
aagggattctagttcacaagtatgt

SEQ ID NO: 646108 - DNA, 25 bp, Homo sapien
ggccagaagtctggtgtgagtttca

SEQ ID NO: 646109 - DNA, 25 bp, Homo sapien
agatgttcctccatcacactctggg

SEQ ID NO: 646110 - DNA, 25 bp, Homo sapien
taacctggcccaaagtcagtttctg

SEQ ID NO: 646111 - DNA, 25 bp, Homo sapien
agatgcggtctgtagtagatgttcc

SEQ ID NO: 646112 - DNA, 25 bp, Homo sapien
gcccaaagtcagtttctgggagaag

SEQ ID NO: 646113 - DNA, 25 bp, Homo sapien
ctggaagagcagacactttatccat

SEQ ID NO: 646114 - DNA, 25 bp, Homo sapien
tatccatagtgtagccaactgggtt

SEQ ID NO: 646115 - DNA, 25 bp, Homo sapien
gacactttatccatagtgtagccaa

SEQ ID NO: 646116 - DNA, 25 bp, Homo sapien
gtgtagccaactgggttgagcaaac

SEQ ID NO: 646117 - DNA, 25 bp, Homo sapien
ctttactctgaaacgtgcctgcagc

SEQ ID NO: 646118 - DNA, 25 bp, Homo sapien
tccaggctttactctgaaacgtgcc

SEQ ID NO: 646119 - DNA, 25 bp, Homo sapien
gagttccaggctttactctgaaacg

SEQ ID NO: 646120 - DNA, 25 bp, Homo sapien
tgaggagttccaggctttactctga

SEQ ID NO: 646121 - DNA, 25 bp, Homo sapien
gatttcactttcatcgggacagcca

SEQ ID NO: 646122 - DNA, 25 bp, Homo sapien
gggatttcactttcatcgggacagc

SEQ ID NO: 646123 - DNA, 25 bp, Homo sapien
aatattgtgctagcaatagacaggg

SEQ ID NO: 646124 - DNA, 25 bp, Homo sapien
ggctctggattcaatattgtgctag

SEQ ID NO: 646125 - DNA, 25 bp, Homo sapien
tgggactacactgatgagcaagcaa

SEQ ID NO: 646126 - DNA, 25 bp, Homo sapien
ggaatgtggactttgtagcacccca

SEQ ID NO: 646127 - DNA, 25 bp, Homo sapien
caaagtgttccggagcctgtagaaa

SEQ ID NO: 646128 - DNA, 25 bp, Homo sapien
gcctgcacctcaaagcgaacactgt

SEQ ID NO: 646129 - DNA, 25 bp, Homo sapien
ttgacaagtagaatcagccttgatt

SEQ ID NO: 646130 - DNA, 25 bp, Homo sapien
cttgattcgtaaaatgtcataatgc

SEQ ID NO: 646131 - DNA, 25 bp, Homo sapien
aatcagccttgattcgtaaaatgtc

SEQ ID NO: 646132 - DNA, 25 bp, Homo sapien
cagccttgattcgtaaaatgtcata

SEQ ID NO: 646133 - DNA, 25 bp, Homo sapien
gcttaaaagcactgtgccggctggg

SEQ ID NO: 646134 - DNA, 25 bp, Homo sapien
gatcaaccatatgcttaaaagcact

SEQ ID NO: 646135 - DNA, 25 bp, Homo sapien
aagtaatgacactgccaccatatgg

SEQ ID NO: 646136 - DNA, 25 bp, Homo sapien
tgacactgccaccatatggatcaac

SEQ ID NO: 646137 - DNA, 25 bp, Homo sapien
cagagcaaggaggaaaggcaatctt

SEQ ID NO: 646138 - DNA, 25 bp, Homo sapien
cccaggaaacattagtaggagagca

SEQ ID NO: 646139 - DNA, 25 bp, Homo sapien
gcagctagagctccatccaactggg

SEQ ID NO: 646140 - DNA, 25 bp, Homo sapien
aataggcagcttatcacatgagcag

SEQ ID NO: 646141 - DNA, 25 bp, Homo sapien
gcggggtgaaggttgaagactgctc

SEQ ID NO: 646142 - DNA, 25 bp, Homo sapien
tgcggggtgaaggttgaagactgct

SEQ ID NO: 646143 - DNA, 25 bp, Homo sapien
agactgctccttggacaatgccttc

SEQ ID NO: 646144 - DNA, 25 bp, Homo sapien
gactgctccttggacaatgccttct

SEQ ID NO: 646145 - DNA, 25 bp, Homo sapien
agcctggttcccattgcccaagaaa

SEQ ID NO: 646146 - DNA, 25 bp, Homo sapien
aagatgctcaagtgcttgcagtaag

SEQ ID NO: 646147 - DNA, 25 bp, Homo sapien
gatggtgagggccactagcttcgcc

SEQ ID NO: 646148 - DNA, 25 bp, Homo sapien
tgcagtaagaagcaatcagcttgca

SEQ ID NO: 646149 - DNA, 25 bp, Homo sapien
catggtgttaccagtagagggtctt

SEQ ID NO: 646150 - DNA, 25 bp, Homo sapien
cccctactagagcagaggttcccaa

SEQ ID NO: 646151 - DNA, 25 bp, Homo sapien
tattgttctcccctactagagcaga

SEQ ID NO: 646152 - DNA, 25 bp, Homo sapien
tgttctcccctactagagcagaggt

SEQ ID NO: 646153 - DNA, 25 bp, Homo sapien
ggagcggaggtactcgtatgccctt

SEQ ID NO: 646154 - DNA, 25 bp, Homo sapien
tctagcatgggagcggaggtactcg

SEQ ID NO: 646155 - DNA, 25 bp, Homo sapien
agcatgggagcggaggtactcgtat

SEQ ID NO: 646156 - DNA, 25 bp, Homo sapien
catgggagcggaggtactcgtatgc

SEQ ID NO: 646157 - DNA, 25 bp, Homo sapien
gcagttgacaaatctagcttcctgt

SEQ ID NO: 646158 - DNA, 25 bp, Homo sapien
cagttgacaaatctagcttcctgtc

SEQ ID NO: 646159 - DNA, 25 bp, Homo sapien
agttgacaaatctagcttcctgtct

SEQ ID NO: 646160 - DNA, 25 bp, Homo sapien
ccatctcccacaagatctcgaatag

SEQ ID NO: 646161 - DNA, 25 bp, Homo sapien
tataatgagcaaacaggaattgtgc

SEQ ID NO: 646162 - DNA, 25 bp, Homo sapien
taagaacagtccatggagtcaaggc

SEQ ID NO: 646163 - DNA, 25 bp, Homo sapien
gaatagcttcctgactataatgagc

SEQ ID NO: 646164 - DNA, 25 bp, Homo sapien
tgagggtatggtccagaggaagctg

SEQ ID NO: 646165 - DNA, 25 bp, Homo sapien
tgatgctgagggtatggtccagagg

SEQ ID NO: 646166 - DNA, 25 bp, Homo sapien
gatgctgagggtatggtccagagga

SEQ ID NO: 646167 - DNA, 25 bp, Homo sapien
agtgaggtacaaagagatggaagaa

SEQ ID NO: 646168 - DNA, 25 bp, Homo sapien
tgattgacaatgcttggtgagaaga

SEQ ID NO: 646169 - DNA, 25 bp, Homo sapien
ttgacaatgcttggtgagaagacag

SEQ ID NO: 646170 - DNA, 25 bp, Homo sapien
gacaatgcttggtgagaagacaggc

SEQ ID NO: 646171 - DNA, 25 bp, Homo sapien
ctccctcctttctctaggctccctg

SEQ ID NO: 646172 - DNA, 25 bp, Homo sapien
tccctcctttctctaggctccctgt

SEQ ID NO: 646173 - DNA, 25 bp, Homo sapien
ctttctctaggctccctgttttcct

SEQ ID NO: 646174 - DNA, 25 bp, Homo sapien
ctcctttctctaggctccctgtttt

SEQ ID NO: 646175 - DNA, 25 bp, Homo sapien
taattcagccgataatctgttgtca

SEQ ID NO: 646176 - DNA, 25 bp, Homo sapien
aattcagccgataatctgttgtcaa

SEQ ID NO: 646177 - DNA, 25 bp, Homo sapien
ctaattcagccgataatctgttgtc

SEQ ID NO: 646178 - DNA, 25 bp, Homo sapien
ttgttgtacgctaaaaatgcttcca

SEQ ID NO: 646179 - DNA, 25 bp, Homo sapien
gcattcatagtaatccacttggatg

SEQ ID NO: 646180 - DNA, 25 bp, Homo sapien
catagtaatccacttggatgttgtt

SEQ ID NO: 646181 - DNA, 25 bp, Homo sapien
acttggatgttgttgtacgctaaaa

SEQ ID NO: 646182 - DNA, 25 bp, Homo sapien
taccctgagttaatgtgctgtttag

SEQ ID NO: 646183 - DNA, 25 bp, Homo sapien
taggggttacacaggtttccacaga

SEQ ID NO: 646184 - DNA, 25 bp, Homo sapien
gatgacctaatgctgacataccctg

SEQ ID NO: 646185 - DNA, 25 bp, Homo sapien
ctgaccaaagagatgacctaatgct

SEQ ID NO: 646186 - DNA, 25 bp, Homo sapien
gggcagcatccagtctacaaagtag

SEQ ID NO: 646187 - DNA, 25 bp, Homo sapien
tgcaagtaaataacgcaagttttgg

SEQ ID NO: 646188 - DNA, 25 bp, Homo sapien
tatgtgacactagtatgagtgactc

SEQ ID NO: 646189 - DNA, 25 bp, Homo sapien
tcttgttggcctagttggattccac

SEQ ID NO: 646190 - DNA, 25 bp, Homo sapien
gaacaatacactcagattaaacttg

SEQ ID NO: 646191 - DNA, 25 bp, Homo sapien
ttccggccgccgttttcatctttca

SEQ ID NO: 646192 - DNA, 25 bp, Homo sapien
taaacttgtccccgacaggatgcat

SEQ ID NO: 646193 - DNA, 25 bp, Homo sapien
tcatctttcactaagaacaatacac

SEQ ID NO: 646194 - DNA, 25 bp, Homo sapien
caggactcttccttttcggaagaat

SEQ ID NO: 646195 - DNA, 25 bp, Homo sapien
tgaacaggactcttccttttcggaa

SEQ ID NO: 646196 - DNA, 25 bp, Homo sapien
caatggacccatttgtagtgtggga

SEQ ID NO: 646197 - DNA, 25 bp, Homo sapien
ccatttgtagtgtgggaatagtctg

SEQ ID NO: 646198 - DNA, 25 bp, Homo sapien
ttatacgtagggttgtacagaagaa

SEQ ID NO: 646199 - DNA, 25 bp, Homo sapien
ctggtttgcagggtgggtgaatgaa

SEQ ID NO: 646200 - DNA, 25 bp, Homo sapien
ccagcattcccagtaggattgattg

SEQ ID NO: 646201 - DNA, 25 bp, Homo sapien
tatttggtggtatctactcgagaga

SEQ ID NO: 646202 - DNA, 25 bp, Homo sapien
gcatagcagacctcttaatgttaga

SEQ ID NO: 646203 - DNA, 25 bp, Homo sapien
cattctggtcgcatacattgtaaaa

SEQ ID NO: 646204 - DNA, 25 bp, Homo sapien
cattccacaagtatcctttcagcat

SEQ ID NO: 646205 - DNA, 25 bp, Homo sapien
tcattccacaagtatcctttcagca

SEQ ID NO: 646206 - DNA, 25 bp, Homo sapien
tattagagtgaatgaagcaaacaac

SEQ ID NO: 646207 - DNA, 25 bp, Homo sapien
aacaacatgacaagccaggagatcc

SEQ ID NO: 646208 - DNA, 25 bp, Homo sapien
gcctcgtagtccaggtgttgcccca

SEQ ID NO: 646209 - DNA, 25 bp, Homo sapien
gggtgcagactacatatgttcatgg

SEQ ID NO: 646210 - DNA, 25 bp, Homo sapien
gcttggtccaatcatgattggtgac

SEQ ID NO: 646211 - DNA, 25 bp, Homo sapien
tgcatgttacaataggtgtcactgt

SEQ ID NO: 646212 - DNA, 25 bp, Homo sapien
ttggctcggagcactggctgtctga

SEQ ID NO: 646213 - DNA, 25 bp, Homo sapien
gtcactgttttgcttggtccaatca

SEQ ID NO: 646214 - DNA, 25 bp, Homo sapien
caaactggcagggtctttatcccac

SEQ ID NO: 646215 - DNA, 25 bp, Homo sapien
cagagacggtaaagaacaggtccaa

SEQ ID NO: 646216 - DNA, 25 bp, Homo sapien
tcagtaacaacaaccttatcccggc

SEQ ID NO: 646217 - DNA, 25 bp, Homo sapien
gcagcaagttgccaccagtttgtta

SEQ ID NO: 646218 - DNA, 25 bp, Homo sapien
cccaaaacagataaacctcagtgta

SEQ ID NO: 646219 - DNA, 25 bp, Homo sapien
atttgtttaggccatgacttctaca

SEQ ID NO: 646220 - DNA, 25 bp, Homo sapien
tacatttgttgcttctgggatttaa

SEQ ID NO: 646221 - DNA, 25 bp, Homo sapien
gatagttaggtattaaacacttcag

SEQ ID NO: 646222 - DNA, 25 bp, Homo sapien
tgacgtattcactgtgcctctgggc

SEQ ID NO: 646223 - DNA, 25 bp, Homo sapien
caaggcccatgagtgactgccctga

SEQ ID NO: 646224 - DNA, 25 bp, Homo sapien
tacctggctagtaagaggtgggaca

SEQ ID NO: 646225 - DNA, 25 bp, Homo sapien
ccatgcgcatgcaagtgtgtttgcc

SEQ ID NO: 646226 - DNA, 25 bp, Homo sapien
tgctgtgcaaattggtagaccttat

SEQ ID NO: 646227 - DNA, 25 bp, Homo sapien
gaaactttaattgcatcctatcaga

SEQ ID NO: 646228 - DNA, 25 bp, Homo sapien
gaaggcacttgtttgtaagccagag

SEQ ID NO: 646229 - DNA, 25 bp, Homo sapien
gatagtcttcaggtgcagtgcgttc

SEQ ID NO: 646230 - DNA, 25 bp, Homo sapien
tcaacatggtattccgtaaacattg

SEQ ID NO: 646231 - DNA, 25 bp, Homo sapien
atggtattccgtaaacattgtgtca

SEQ ID NO: 646232 - DNA, 25 bp, Homo sapien
acatggtattccgtaaacattgtgt

SEQ ID NO: 646233 - DNA, 25 bp, Homo sapien
cttcaacatggtattccgtaaacat

SEQ ID NO: 646234 - DNA, 25 bp, Homo sapien
cccagagggtcacactgatggtctc

SEQ ID NO: 646235 - DNA, 25 bp, Homo sapien
ggaatagcctatccaggcttagagc

SEQ ID NO: 646236 - DNA, 25 bp, Homo sapien
ttgcacaagtctgacagaaccctag

SEQ ID NO: 646237 - DNA, 25 bp, Homo sapien
tcagaggagatgcagttgaaacctt

SEQ ID NO: 646238 - DNA, 25 bp, Homo sapien
cacaagaattatcacttcagaggag

SEQ ID NO: 646239 - DNA, 25 bp, Homo sapien
agacccttatcttgatgcctgagag

SEQ ID NO: 646240 - DNA, 25 bp, Homo sapien
cactgaatgttgtccatgaggtact

SEQ ID NO: 646241 - DNA, 25 bp, Homo sapien
gaggtactgagccaaatggtgggct

SEQ ID NO: 646242 - DNA, 25 bp, Homo sapien
tgacaaattgtcagacatcatattt

SEQ ID NO: 646243 - DNA, 25 bp, Homo sapien
ttgggagaattctaggtctgtcact

SEQ ID NO: 646244 - DNA, 25 bp, Homo sapien
gggagaattctaggtctgtcactag

SEQ ID NO: 646245 - DNA, 25 bp, Homo sapien
attctaggtctgtcactagatctgg

SEQ ID NO: 646246 - DNA, 25 bp, Homo sapien
ggtctgtcactagatctggactgaa

SEQ ID NO: 646247 - DNA, 25 bp, Homo sapien
tcatgtccgagtcaggtgggacccc

SEQ ID NO: 646248 - DNA, 25 bp, Homo sapien
tgaaaatgcaatcacctagcttggg

SEQ ID NO: 646249 - DNA, 25 bp, Homo sapien
catttgtcatacttaggctctagcc

SEQ ID NO: 646250 - DNA, 25 bp, Homo sapien
cacagcccgttgtgtaaggaaacaa

SEQ ID NO: 646251 - DNA, 25 bp, Homo sapien
cactttagcctctgtgatctggtca

SEQ ID NO: 646252 - DNA, 25 bp, Homo sapien
tcagtaaatgcacacccattttcaa

SEQ ID NO: 646253 - DNA, 25 bp, Homo sapien
gtaaatgcacacccattttcaacaa

SEQ ID NO: 646254 - DNA, 25 bp, Homo sapien
atcagtaaatgcacacccattttca

SEQ ID NO: 646255 - DNA, 25 bp, Homo sapien
cagtaaatgcacacccattttcaac

SEQ ID NO: 646256 - DNA, 25 bp, Homo sapien
ctacttcatttagggtgactttcaa

SEQ ID NO: 646257 - DNA, 25 bp, Homo sapien
gtgagtagccagagaagccgactac

SEQ ID NO: 646258 - DNA, 25 bp, Homo sapien
ttgcaaaagagcctataaatagcct

SEQ ID NO: 646259 - DNA, 25 bp, Homo sapien
ctgaattgagaaactgtgagtagcc

SEQ ID NO: 646260 - DNA, 25 bp, Homo sapien
caaatatagtgaaatgaatagcctt

SEQ ID NO: 646261 - DNA, 25 bp, Homo sapien
gacaaatatagtgaaatgaatagcc

SEQ ID NO: 646262 - DNA, 25 bp, Homo sapien
cagtgtgaatccaaaaatagaaggc

SEQ ID NO: 646263 - DNA, 25 bp, Homo sapien
gtgaatccaaaaatagaaggcacaa

SEQ ID NO: 646264 - DNA, 25 bp, Homo sapien
ttcttgcctttcatgtggttcccag

SEQ ID NO: 646265 - DNA, 25 bp, Homo sapien
caactctcttgagtgtttctcctct

SEQ ID NO: 646266 - DNA, 25 bp, Homo sapien
tccaactctcttgagtgtttctcct

SEQ ID NO: 646267 - DNA, 25 bp, Homo sapien
ttgcctttcatgtggttcccagcca

SEQ ID NO: 646268 - DNA, 25 bp, Homo sapien
catctccttcgtgggtgggaagaca

SEQ ID NO: 646269 - DNA, 25 bp, Homo sapien
tgaacccctccacctatgaagaagt

SEQ ID NO: 646270 - DNA, 25 bp, Homo sapien
aagaatttgaaacggctggtggctc

SEQ ID NO: 646271 - DNA, 25 bp, Homo sapien
gaagtagatcaccaccgaaagtggg

SEQ ID NO: 646272 - DNA, 25 bp, Homo sapien
attggcccaggaacagaaatctctg

SEQ ID NO: 646273 - DNA, 25 bp, Homo sapien
tcttaagagggcttcgcctggcctg

SEQ ID NO: 646274 - DNA, 25 bp, Homo sapien
tgcttgagcccgtctgagtgaacca

SEQ ID NO: 646275 - DNA, 25 bp, Homo sapien
taggaatgacttctggctcgtccag

SEQ ID NO: 646276 - DNA, 25 bp, Homo sapien
ctaggatgcacacaagatccaacat

SEQ ID NO: 646277 - DNA, 25 bp, Homo sapien
taggatgcacacaagatccaacatt

SEQ ID NO: 646278 - DNA, 25 bp, Homo sapien
aggatgcacacaagatccaacattt

SEQ ID NO: 646279 - DNA, 25 bp, Homo sapien
tctaggatgcacacaagatccaaca

SEQ ID NO: 646280 - DNA, 25 bp, Homo sapien
caagctcatgacttttacattcctg

SEQ ID NO: 646281 - DNA, 25 bp, Homo sapien
ggttctgatgggtgcttagattaga

SEQ ID NO: 646282 - DNA, 25 bp, Homo sapien
gattagaatttcgtgaaaggatggc

SEQ ID NO: 646283 - DNA, 25 bp, Homo sapien
tacattcctgccgattggacatagg

SEQ ID NO: 646284 - DNA, 25 bp, Homo sapien
tgttcacgacataaagacctcttct

SEQ ID NO: 646285 - DNA, 25 bp, Homo sapien
ttaaatcagtgagcacagatgctgc

SEQ ID NO: 646286 - DNA, 25 bp, Homo sapien
caaacttcagtacgtttaaccatga

SEQ ID NO: 646287 - DNA, 25 bp, Homo sapien
gtagggatttcaccaaacttcagta

SEQ ID NO: 646288 - DNA, 25 bp, Homo sapien
cctttatcccaggtatccaaacttg

SEQ ID NO: 646289 - DNA, 25 bp, Homo sapien
ctttatcccaggtatccaaacttga

SEQ ID NO: 646290 - DNA, 25 bp, Homo sapien
agtctacttgcccaactctcttatt

SEQ ID NO: 646291 - DNA, 25 bp, Homo sapien
gtctacttgcccaactctcttattc

SEQ ID NO: 646292 - DNA, 25 bp, Homo sapien
catagatactccactgccacaaaca

SEQ ID NO: 646293 - DNA, 25 bp, Homo sapien
atcaatgaccgccatagatactcca

SEQ ID NO: 646294 - DNA, 25 bp, Homo sapien
tgccacaaacactcctgtagctctg

SEQ ID NO: 646295 - DNA, 25 bp, Homo sapien
caaacactcctgtagctctggaagt

SEQ ID NO: 646296 - DNA, 25 bp, Homo sapien
gataaggggtgagtgttccctagaa

SEQ ID NO: 646297 - DNA, 25 bp, Homo sapien
atggaaggataaggggtgagtgttc

SEQ ID NO: 646298 - DNA, 25 bp, Homo sapien
aggataaggggtgagtgttccctag

SEQ ID NO: 646299 - DNA, 25 bp, Homo sapien
ctgaagaggcattgctctgaggagg

SEQ ID NO: 646300 - DNA, 25 bp, Homo sapien
tcaaatgcctaaggcttgtttggga

SEQ ID NO: 646301 - DNA, 25 bp, Homo sapien
ttgtttgggaagtccgctaccgtca

SEQ ID NO: 646302 - DNA, 25 bp, Homo sapien
gctaccgtcattactgagtgacttc

SEQ ID NO: 646303 - DNA, 25 bp, Homo sapien
tgctgacgttggtgatgtgagtaac

SEQ ID NO: 646304 - DNA, 25 bp, Homo sapien
agcagcccgttcacctctagactca

SEQ ID NO: 646305 - DNA, 25 bp, Homo sapien
gcccgttcacctctagactcaccgt

SEQ ID NO: 646306 - DNA, 25 bp, Homo sapien
ttcacctctagactcaccgtcaatg

SEQ ID NO: 646307 - DNA, 25 bp, Homo sapien
ctagactcaccgtcaatgccatcat

SEQ ID NO: 646308 - DNA, 25 bp, Homo sapien
ctgtgggctacagtcatgttgtctg

SEQ ID NO: 646309 - DNA, 25 bp, Homo sapien
gtgggctacagtcatgttgtctgct

SEQ ID NO: 646310 - DNA, 25 bp, Homo sapien
tgtgggctacagtcatgttgtctgc

SEQ ID NO: 646311 - DNA, 25 bp, Homo sapien
tctccatctgtagcagacctggttt

SEQ ID NO: 646312 - DNA, 25 bp, Homo sapien
catctgtagcagacctggtttcttt

SEQ ID NO: 646313 - DNA, 25 bp, Homo sapien
ctggtttctttacttagcagtaggt

SEQ ID NO: 646314 - DNA, 25 bp, Homo sapien
tggtttctttacttagcagtaggta

SEQ ID NO: 646315 - DNA, 25 bp, Homo sapien
taagaattccggaagaacacaggta

SEQ ID NO: 646316 - DNA, 25 bp, Homo sapien
gagtcatctgtaagaattccggaag

SEQ ID NO: 646317 - DNA, 25 bp, Homo sapien
cattggagtcatctgtaagaattcc

SEQ ID NO: 646318 - DNA, 25 bp, Homo sapien
gaacacaggtattatttgttcgaat

SEQ ID NO: 646319 - DNA, 25 bp, Homo sapien
tcctgggcaggaatggttaatctaa

SEQ ID NO: 646320 - DNA, 25 bp, Homo sapien
ttgtaaggtcctagtaaggtcactg

SEQ ID NO: 646321 - DNA, 25 bp, Homo sapien
cagaacagccattaattcagacatc

SEQ ID NO: 646322 - DNA, 25 bp, Homo sapien
tgaggaaagaccaacttgtggaagg

SEQ ID NO: 646323 - DNA, 25 bp, Homo sapien
ttgagaggtaatgagttttaggccc

SEQ ID NO: 646324 - DNA, 25 bp, Homo sapien
ctaagtcgctgtagcagcttctttt

SEQ ID NO: 646325 - DNA, 25 bp, Homo sapien
cgctgtagcagcttcttttgtaagt

SEQ ID NO: 646326 - DNA, 25 bp, Homo sapien
atttgagaggtaatgagttttaggc

SEQ ID NO: 646327 - DNA, 25 bp, Homo sapien
ggccagtaaggctaaacgagaactg

SEQ ID NO: 646328 - DNA, 25 bp, Homo sapien
aggctaaacgagaactggagtctgt

SEQ ID NO: 646329 - DNA, 25 bp, Homo sapien
gtgggccagtaaggctaaacgagaa

SEQ ID NO: 646330 - DNA, 25 bp, Homo sapien
cagtaaggctaaacgagaactggag

SEQ ID NO: 646331 - DNA, 25 bp, Homo sapien
acatttattggcaaacaggcttgag

SEQ ID NO: 646332 - DNA, 25 bp, Homo sapien
caggatcaatcaagacactgtctct

SEQ ID NO: 646333 - DNA, 25 bp, Homo sapien
tgtagacatttattggcaaacaggc

SEQ ID NO: 646334 - DNA, 25 bp, Homo sapien
ctgctctgcaggatcaatcaagaca

SEQ ID NO: 646335 - DNA, 25 bp, Homo sapien
ggcagtgccttcatccttgggttgg

SEQ ID NO: 646336 - DNA, 25 bp, Homo sapien
tgagtgctatgtgcaggcacggatt

SEQ ID NO: 646337 - DNA, 25 bp, Homo sapien
tcagtgtggtggatcttgagtgcta

SEQ ID NO: 646338 - DNA, 25 bp, Homo sapien
cttgggttggcccttcaactctgac

SEQ ID NO: 646339 - DNA, 25 bp, Homo sapien
tgggagagttatccaggtagattct

SEQ ID NO: 646340 - DNA, 25 bp, Homo sapien
gaaaagctggcacaaactactaata

SEQ ID NO: 646341 - DNA, 25 bp, Homo sapien
ggaaaagctggcacaaactactaat

SEQ ID NO: 646342 - DNA, 25 bp, Homo sapien
gttatccaggtagattctagtaggg

SEQ ID NO: 646343 - DNA, 25 bp, Homo sapien
ttacatgggcctctggaaagtcagg

SEQ ID NO: 646344 - DNA, 25 bp, Homo sapien
catgattaagtaatcggtctcccca

SEQ ID NO: 646345 - DNA, 25 bp, Homo sapien
gtctctataacgcaggctcttttca

SEQ ID NO: 646346 - DNA, 25 bp, Homo sapien
ggcttcagtccatgattaagtaatc

SEQ ID NO: 646347 - DNA, 25 bp, Homo sapien
ttaagtaatcggtctccccagcagc

SEQ ID NO: 646348 - DNA, 25 bp, Homo sapien
gctctccaattcattattactaata

SEQ ID NO: 646349 - DNA, 25 bp, Homo sapien
tctcccaacccggaatatttccatc

SEQ ID NO: 646350 - DNA, 25 bp, Homo sapien
ccggaatatttccatcttcccctgc

SEQ ID NO: 646351 - DNA, 25 bp, Homo sapien
ccaattcattattactaataccaca

SEQ ID NO: 646352 - DNA, 25 bp, Homo sapien
ggaatccaccacatatcaatgtgta

SEQ ID NO: 646353 - DNA, 25 bp, Homo sapien
tgtgatagggagagatagccctcat

SEQ ID NO: 646354 - DNA, 25 bp, Homo sapien
caatgtgtatcctctcatgttttga

SEQ ID NO: 646355 - DNA, 25 bp, Homo sapien
ttaatggagccaatcataggaatcc

SEQ ID NO: 646356 - DNA, 25 bp, Homo sapien
gaatgtgtgttctgtagccgtttga

SEQ ID NO: 646357 - DNA, 25 bp, Homo sapien
cattgcattctgacaagatagctga

SEQ ID NO: 646358 - DNA, 25 bp, Homo sapien
tagggccatttaatctcaagtgcaa

SEQ ID NO: 646359 - DNA, 25 bp, Homo sapien
taagtgtagctatgtcctgcttgct

SEQ ID NO: 646360 - DNA, 25 bp, Homo sapien
caaatgagataagaaccctgtccac

SEQ ID NO: 646361 - DNA, 25 bp, Homo sapien
gcttgaaatgatagagaggggtaca

SEQ ID NO: 646362 - DNA, 25 bp, Homo sapien
gaaccctgtccacaaattcattatt

SEQ ID NO: 646363 - DNA, 25 bp, Homo sapien
ctttgtcaatgactgctgcagagct

SEQ ID NO: 646364 - DNA, 25 bp, Homo sapien
gcaatgctacattcttctaggacac

SEQ ID NO: 646365 - DNA, 25 bp, Homo sapien
cagccggaaccactgcaatgctaca

SEQ ID NO: 646366 - DNA, 25 bp, Homo sapien
tcttctaggacactcagcaacacag

SEQ ID NO: 646367 - DNA, 25 bp, Homo sapien
ttcaggtcatgatttattggttcag

SEQ ID NO: 646368 - DNA, 25 bp, Homo sapien
gaaacaggctttgattaccaggagt

SEQ ID NO: 646369 - DNA, 25 bp, Homo sapien
tgaatattagacataagctggttgg

SEQ ID NO: 646370 - DNA, 25 bp, Homo sapien
tgtttagccgtttgctccttgaagg

SEQ ID NO: 646371 - DNA, 25 bp, Homo sapien
ggtgttctatgatgaatgtaccaca

SEQ ID NO: 646372 - DNA, 25 bp, Homo sapien
cttcctgctagaaggtgtggccgtg

SEQ ID NO: 646373 - DNA, 25 bp, Homo sapien
taagaacgaggcagccatctaggta

SEQ ID NO: 646374 - DNA, 25 bp, Homo sapien
gggagaataagaacgaggcagccat

SEQ ID NO: 646375 - DNA, 25 bp, Homo sapien
cagccatctaggtaacttcctgcta

SEQ ID NO: 646376 - DNA, 25 bp, Homo sapien
ggcatttgggaactgcggatcactt

SEQ ID NO: 646377 - DNA, 25 bp, Homo sapien
ttgggaactgcggatcacttctcca

SEQ ID NO: 646378 - DNA, 25 bp, Homo sapien
gaactgcggatcacttctccaggac

SEQ ID NO: 646379 - DNA, 25 bp, Homo sapien
catttgggaactgcggatcacttct

SEQ ID NO: 646380 - DNA, 25 bp, Homo sapien
tttggtcgataaggcgcagatcctg

SEQ ID NO: 646381 - DNA, 25 bp, Homo sapien
aacaatttggtcgataaggcgcaga

SEQ ID NO: 646382 - DNA, 25 bp, Homo sapien
caatttggtcgataaggcgcagatc

SEQ ID NO: 646383 - DNA, 25 bp, Homo sapien
aatttggtcgataaggcgcagatcc

SEQ ID NO: 646384 - DNA, 25 bp, Homo sapien
tcggtcgttggtggaagcatctagc

SEQ ID NO: 646385 - DNA, 25 bp, Homo sapien
cctgtgcgagaaaggagatgccatg

SEQ ID NO: 646386 - DNA, 25 bp, Homo sapien
tgtcggtactgagcctgtgcgagaa

SEQ ID NO: 646387 - DNA, 25 bp, Homo sapien
atctagctcaggtgtgtcggtactg

SEQ ID NO: 646388 - DNA, 25 bp, Homo sapien
ccagatgtgcctcttagctgcggtg

SEQ ID NO: 646389 - DNA, 25 bp, Homo sapien
tagttcattagtgactgtaatgtaa

SEQ ID NO: 646390 - DNA, 25 bp, Homo sapien
ttagctgcggtgttcacagataccc

SEQ ID NO: 646391 - DNA, 25 bp, Homo sapien
cagcaggaaccgcttctacccagat

SEQ ID NO: 646392 - DNA, 25 bp, Homo sapien
tgattatcccccgatatttgagggc

SEQ ID NO: 646393 - DNA, 25 bp, Homo sapien
aagtccatccatacctgatgaatgg

SEQ ID NO: 646394 - DNA, 25 bp, Homo sapien
gaatggtctgtgttgcctctgaagc

SEQ ID NO: 646395 - DNA, 25 bp, Homo sapien
gaagctctgtacttccaggaagtcc

SEQ ID NO: 646396 - DNA, 25 bp, Homo sapien
tgttcacgatgagcttaaagtcagt

SEQ ID NO: 646397 - DNA, 25 bp, Homo sapien
tcagaccagagccaagtagaagcct

SEQ ID NO: 646398 - DNA, 25 bp, Homo sapien
aacagttaaataggcagcctctgca

SEQ ID NO: 646399 - DNA, 25 bp, Homo sapien
ccccagtggctgatatggctgttca

SEQ ID NO: 646400 - DNA, 25 bp, Homo sapien
gatgactgggaatgccccatcgctt

SEQ ID NO: 646401 - DNA, 25 bp, Homo sapien
ccctgtgacgatgataatggaagca

SEQ ID NO: 646402 - DNA, 25 bp, Homo sapien
caaaagattgataccgcctgaaagg

SEQ ID NO: 646403 - DNA, 25 bp, Homo sapien
tcgcttcccagggacatcataggga

SEQ ID NO: 646404 - DNA, 25 bp, Homo sapien
agtccatctcagactgattaatcag

SEQ ID NO: 646405 - DNA, 25 bp, Homo sapien
caaaatctcttgcatctgagcagcc

SEQ ID NO: 646406 - DNA, 25 bp, Homo sapien
aatgctgtgtggattaactgttccc

SEQ ID NO: 646407 - DNA, 25 bp, Homo sapien
tgcattgccagagaacggcacaggc

SEQ ID NO: 646408 - DNA, 25 bp, Homo sapien
gcagggagtgggttgtttatttctc

SEQ ID NO: 646409 - DNA, 25 bp, Homo sapien
ctgcagggagtgggttgtttatttc

SEQ ID NO: 646410 - DNA, 25 bp, Homo sapien
tttatttctccaaatactgatgaaa

SEQ ID NO: 646411 - DNA, 25 bp, Homo sapien
tatttctccaaatactgatgaaagg

SEQ ID NO: 646412 - DNA, 25 bp, Homo sapien
ttaccacagatctggtggtattcat

SEQ ID NO: 646413 - DNA, 25 bp, Homo sapien
gatctgtcgggacaatctggacttg

SEQ ID NO: 646414 - DNA, 25 bp, Homo sapien
gacaatctggacttggtcatgatct

SEQ ID NO: 646415 - DNA, 25 bp, Homo sapien
tctggacttggtcatgatctggctt

SEQ ID NO: 646416 - DNA, 25 bp, Homo sapien
ttaaaagctcaagatctgtcgggac

SEQ ID NO: 646417 - DNA, 25 bp, Homo sapien
tctgccagctgccttagtaccctat

SEQ ID NO: 646418 - DNA, 25 bp, Homo sapien
tgccagctgccttagtaccctatag

SEQ ID NO: 646419 - DNA, 25 bp, Homo sapien
cagctgccttagtaccctatagcta

SEQ ID NO: 646420 - DNA, 25 bp, Homo sapien
gccttagtaccctatagctacccat

SEQ ID NO: 646421 - DNA, 25 bp, Homo sapien
ctgcaagtatagagtcaagggccac

SEQ ID NO: 646422 - DNA, 25 bp, Homo sapien
tctagaggtggttgttaacttgtaa

SEQ ID NO: 646423 - DNA, 25 bp, Homo sapien
tttaatggcagaggtctagaggtgg

SEQ ID NO: 646424 - DNA, 25 bp, Homo sapien
tttcctcttccgaggtctttgccca

SEQ ID NO: 646425 - DNA, 25 bp, Homo sapien
ttatttcctcttccgaggtctttgc

SEQ ID NO: 646426 - DNA, 25 bp, Homo sapien
ggctttgtcacatccatgcctgaag

SEQ ID NO: 646427 - DNA, 25 bp, Homo sapien
tctaataattgtctcagagaagcag

SEQ ID NO: 646428 - DNA, 25 bp, Homo sapien
agaagcaggatatttagatgtcgga

SEQ ID NO: 646429 - DNA, 25 bp, Homo sapien
tcagagaagcaggatatttagatgt

SEQ ID NO: 646430 - DNA, 25 bp, Homo sapien
tgtagaatgatactcatctgatggg

SEQ ID NO: 646431 - DNA, 25 bp, Homo sapien
gatactcatctgatgggtcccagag

SEQ ID NO: 646432 - DNA, 25 bp, Homo sapien
ctctggttaccattgcatttagagg

SEQ ID NO: 646433 - DNA, 25 bp, Homo sapien
ggaaaagaagagtgtagaatgatac

SEQ ID NO: 646434 - DNA, 25 bp, Homo sapien
caaccgatttgatctgtaacccagg

SEQ ID NO: 646435 - DNA, 25 bp, Homo sapien
gagtagcttcactcaaccgatttga

SEQ ID NO: 646436 - DNA, 25 bp, Homo sapien
ttcctttctttatgtggagtagctt

SEQ ID NO: 646437 - DNA, 25 bp, Homo sapien
caggtatctgtcagtgatttcaagg

SEQ ID NO: 646438 - DNA, 25 bp, Homo sapien
ccttaagatctcttttatcatgccc

SEQ ID NO: 646439 - DNA, 25 bp, Homo sapien
cagctctaatttgccagaatcctta

SEQ ID NO: 646440 - DNA, 25 bp, Homo sapien
agatctcttttatcatgccctgctg

SEQ ID NO: 646441 - DNA, 25 bp, Homo sapien
ctaatttgccagaatccttaagatc

SEQ ID NO: 646442 - DNA, 25 bp, Homo sapien
ccattggaatacttctgtgggctcc

SEQ ID NO: 646443 - DNA, 25 bp, Homo sapien
cgtccaggggagtactggtgtattt

SEQ ID NO: 646444 - DNA, 25 bp, Homo sapien
ctgtgtctgacgtccaggggagtac

SEQ ID NO: 646445 - DNA, 25 bp, Homo sapien
tttttatgccattggaatacttctg

SEQ ID NO: 646446 - DNA, 25 bp, Homo sapien
gaatgcatctctgatctcccctatg

SEQ ID NO: 646447 - DNA, 25 bp, Homo sapien
ctatggccccaagacaggacgcttt

SEQ ID NO: 646448 - DNA, 25 bp, Homo sapien
tggtctggacatatttctctttggt

SEQ ID NO: 646449 - DNA, 25 bp, Homo sapien
gacagtaaaaatgcctacgggatgg

SEQ ID NO: 646450 - DNA, 25 bp, Homo sapien
tgggatgagaaaccgaattttaaga

SEQ ID NO: 646451 - DNA, 25 bp, Homo sapien
tttgagctcagctggcgaatgggat

SEQ ID NO: 646452 - DNA, 25 bp, Homo sapien
gctgcaggaatggatctctgaagca

SEQ ID NO: 646453 - DNA, 25 bp, Homo sapien
ggccacataatatgtctcagactga

SEQ ID NO: 646454 - DNA, 25 bp, Homo sapien
tcatggccctttttgcttctgccag

SEQ ID NO: 646455 - DNA, 25 bp, Homo sapien
agccagggtgccagcgtcttcacct

SEQ ID NO: 646456 - DNA, 25 bp, Homo sapien
tgcagattcagcctctgtgggagca

SEQ ID NO: 646457 - DNA, 25 bp, Homo sapien
cgtttgatactgacgctccctcctg

SEQ ID NO: 646458 - DNA, 25 bp, Homo sapien
tgccagcgtcttcacctactccata

SEQ ID NO: 646459 - DNA, 25 bp, Homo sapien
ttccaacacagctctagaaggctct

SEQ ID NO: 646460 - DNA, 25 bp, Homo sapien
cattccaacacagctctagaaggct

SEQ ID NO: 646461 - DNA, 25 bp, Homo sapien
tccattccaacacagctctagaagg

SEQ ID NO: 646462 - DNA, 25 bp, Homo sapien
ctccattccaacacagctctagaag

SEQ ID NO: 646463 - DNA, 25 bp, Homo sapien
gggtcagttttacaacattagcatc

SEQ ID NO: 646464 - DNA, 25 bp, Homo sapien
aggggtcagttttacaacattagca

SEQ ID NO: 646465 - DNA, 25 bp, Homo sapien
ggggtcagttttacaacattagcat

SEQ ID NO: 646466 - DNA, 25 bp, Homo sapien
gagaagggtccaccttgggctgttc

SEQ ID NO: 646467 - DNA, 25 bp, Homo sapien
agggtccaccttgggctgttctctg

SEQ ID NO: 646468 - DNA, 25 bp, Homo sapien
gaagggtccaccttgggctgttctc

SEQ ID NO: 646469 - DNA, 25 bp, Homo sapien
ctatctgcatgcacagatgagaagg

SEQ ID NO: 646470 - DNA, 25 bp, Homo sapien
catatatgacttgctaggcctttcc

SEQ ID NO: 646471 - DNA, 25 bp, Homo sapien
gaaacttccaatggtgaggaacaga

SEQ ID NO: 646472 - DNA, 25 bp, Homo sapien
tattcagagagctggtgaaaggtgc

SEQ ID NO: 646473 - DNA, 25 bp, Homo sapien
cacacagttgccagtggtgctgaca

SEQ ID NO: 646474 - DNA, 25 bp, Homo sapien
tcattctcgttgagttcccactgtg

SEQ ID NO: 646475 - DNA, 25 bp, Homo sapien
cacatgtacttctgaggcaattctt

SEQ ID NO: 646476 - DNA, 25 bp, Homo sapien
gtgtacatggccacatgtacttctg

SEQ ID NO: 646477 - DNA, 25 bp, Homo sapien
tcttcatcattctcgttgagttccc

SEQ ID NO: 646478 - DNA, 25 bp, Homo sapien
aggcagcacgctggcttggtttcca

SEQ ID NO: 646479 - DNA, 25 bp, Homo sapien
tgtgaataaacatgccgtaggtctt

SEQ ID NO: 646480 - DNA, 25 bp, Homo sapien
ctagaggactcaggacatttgtgtt

SEQ ID NO: 646481 - DNA, 25 bp, Homo sapien
tgggccaactcgacagaccagtgta

SEQ ID NO: 646482 - DNA, 25 bp, Homo sapien
gaagagtgtattcctccatctcatg

SEQ ID NO: 646483 - DNA, 25 bp, Homo sapien
aagagtgtattcctccatctcatgg

SEQ ID NO: 646484 - DNA, 25 bp, Homo sapien
gaatgttcacgtcttgagaagtata

SEQ ID NO: 646485 - DNA, 25 bp, Homo sapien
acgtcttgagaagtataaaatctac

SEQ ID NO: 646486 - DNA, 25 bp, Homo sapien
cggaatgttcacgtcttgagaagta

SEQ ID NO: 646487 - DNA, 25 bp, Homo sapien
tgttcacgtcttgagaagtataaaa

SEQ ID NO: 646488 - DNA, 25 bp, Homo sapien
ttaatagtcatgaacgagttttgct

SEQ ID NO: 646489 - DNA, 25 bp, Homo sapien
catattgactattgggtcctgtatg

SEQ ID NO: 646490 - DNA, 25 bp, Homo sapien
gcttggtaaatcagggaagtgtttc

SEQ ID NO: 646491 - DNA, 25 bp, Homo sapien
gctttgtagagattattgcttgttc

SEQ ID NO: 646492 - DNA, 25 bp, Homo sapien
gaccttgggcctgtaaccagcctca

SEQ ID NO: 646493 - DNA, 25 bp, Homo sapien
aggactgaccttgggcctgtaacca

SEQ ID NO: 646494 - DNA, 25 bp, Homo sapien
gactgaccttgggcctgtaaccagc

SEQ ID NO: 646495 - DNA, 25 bp, Homo sapien
ctgaccttgggcctgtaaccagcct

SEQ ID NO: 646496 - DNA, 25 bp, Homo sapien
attcaagtctcaagctgccagaggc

SEQ ID NO: 646497 - DNA, 25 bp, Homo sapien
tcctctcggattttaaccacagctg

SEQ ID NO: 646498 - DNA, 25 bp, Homo sapien
cggattttaaccacagctgtgctgg

SEQ ID NO: 646499 - DNA, 25 bp, Homo sapien
cagttcctctcggattttaaccaca

SEQ ID NO: 646500 - DNA, 25 bp, Homo sapien
aagaaaagatgatctctatctggtg

SEQ ID NO: 646501 - DNA, 25 bp, Homo sapien
aaaagatgatctctatctggtgcat

SEQ ID NO: 646502 - DNA, 25 bp, Homo sapien
tctcaaacttgaaagaaaagatgat

SEQ ID NO: 646503 - DNA, 25 bp, Homo sapien
cttctcaaacttgaaagaaaagatg

SEQ ID NO: 646504 - DNA, 25 bp, Homo sapien
tcctattttcagatgcatggcagac

SEQ ID NO: 646505 - DNA, 25 bp, Homo sapien
catggcagacactcgtggagggtct

SEQ ID NO: 646506 - DNA, 25 bp, Homo sapien
ggttatccaagcctagaccagggct

SEQ ID NO: 646507 - DNA, 25 bp, Homo sapien
cagggtgcagggtacaactctaatc

SEQ ID NO: 646508 - DNA, 25 bp, Homo sapien
tttcaccccataagacactaagttc

SEQ ID NO: 646509 - DNA, 25 bp, Homo sapien
gaactaacatactctggattggcac

SEQ ID NO: 646510 - DNA, 25 bp, Homo sapien
tgtgagtcatcaagctgaccccaac

SEQ ID NO: 646511 - DNA, 25 bp, Homo sapien
cttttggaaggttaatcagttcttg

SEQ ID NO: 646512 - DNA, 25 bp, Homo sapien
tagcgcaacacaggaagtgtgcttc

SEQ ID NO: 646513 - DNA, 25 bp, Homo sapien
tgtagaaacttaagaacatttgctc

SEQ ID NO: 646514 - DNA, 25 bp, Homo sapien
ggattcttttaagcactctgctttc

SEQ ID NO: 646515 - DNA, 25 bp, Homo sapien
ttttaacttcaatccaagatagcgc

SEQ ID NO: 646516 - DNA, 25 bp, Homo sapien
aggctgagaataaacaagtctctgc

SEQ ID NO: 646517 - DNA, 25 bp, Homo sapien
caggctgagaataaacaagtctctg

SEQ ID NO: 646518 - DNA, 25 bp, Homo sapien
aatgactggaggcagcttgggaaca

SEQ ID NO: 646519 - DNA, 25 bp, Homo sapien
tacattcatggttgtcccagtaggc

SEQ ID NO: 646520 - DNA, 25 bp, Homo sapien
gatcttgaaggtgctacagtaggct

SEQ ID NO: 646521 - DNA, 25 bp, Homo sapien
gagaaagtcttaggcatcgcagtgg

SEQ ID NO: 646522 - DNA, 25 bp, Homo sapien
gaaggattgtctagagctctcagca

SEQ ID NO: 646523 - DNA, 25 bp, Homo sapien
agcaggaagaaggattgtctagagc

SEQ ID NO: 646524 - DNA, 25 bp, Homo sapien
tcagtgccccatacatgggagcagg

SEQ ID NO: 646525 - DNA, 25 bp, Homo sapien
tctgcatcagcaccagtggggagct

SEQ ID NO: 646526 - DNA, 25 bp, Homo sapien
cacccttggttgctatgcagcttcc

SEQ ID NO: 646527 - DNA, 25 bp, Homo sapien
tgtgtttgctatcaggtcattcacc

SEQ ID NO: 646528 - DNA, 25 bp, Homo sapien
tttccagatcacctgttgtgtttgc

SEQ ID NO: 646529 - DNA, 25 bp, Homo sapien
tatcaggtcattcacccttggttgc

SEQ ID NO: 646530 - DNA, 25 bp, Homo sapien
tcacattgtgatgcagcgtcttcct

SEQ ID NO: 646531 - DNA, 25 bp, Homo sapien
gagactaaacagctccggtgtggta

SEQ ID NO: 646532 - DNA, 25 bp, Homo sapien
tcccagagcttgtacaggaggagac

SEQ ID NO: 646533 - DNA, 25 bp, Homo sapien
tgtatcaaaatgacgctgcagcttc

SEQ ID NO: 646534 - DNA, 25 bp, Homo sapien
ggtgtaaaccagctctcagtgggaa

SEQ ID NO: 646535 - DNA, 25 bp, Homo sapien
tctaccaaatattaggcagcttctg

SEQ ID NO: 646536 - DNA, 25 bp, Homo sapien
tctcgtagtcaaggtatcagtttgg

SEQ ID NO: 646537 - DNA, 25 bp, Homo sapien
cattctggacacttgatctcgtagt

SEQ ID NO: 646538 - DNA, 25 bp, Homo sapien
gaaaaattaacaggagatctatgaa

SEQ ID NO: 646539 - DNA, 25 bp, Homo sapien
caactccgacgatgaaaaattaaca

SEQ ID NO: 646540 - DNA, 25 bp, Homo sapien
aggagatctatgaaactcggtacca

SEQ ID NO: 646541 - DNA, 25 bp, Homo sapien
gaaactcggtaccaagctgtcctcc

SEQ ID NO: 646542 - DNA, 25 bp, Homo sapien
acatgaatgtgtaccggaccctgag

SEQ ID NO: 646543 - DNA, 25 bp, Homo sapien
tggtgaagcccctgatacctgggca

SEQ ID NO: 646544 - DNA, 25 bp, Homo sapien
agaagggacaaatgtcagctgcagc

SEQ ID NO: 646545 - DNA, 25 bp, Homo sapien
gccagcaagcttggctgtgtgctgt

SEQ ID NO: 646546 - DNA, 25 bp, Homo sapien
tccagaaggaagaagttgagcctag

SEQ ID NO: 646547 - DNA, 25 bp, Homo sapien
tgagtccagaaggaagaagttgagc

SEQ ID NO: 646548 - DNA, 25 bp, Homo sapien
aggaagaagttgagcctagatcatg

SEQ ID NO: 646549 - DNA, 25 bp, Homo sapien
cagaaggaagaagttgagcctagat

SEQ ID NO: 646550 - DNA, 25 bp, Homo sapien
cgagatcgtgccattgcactccagc

SEQ ID NO: 646551 - DNA, 25 bp, Homo sapien
gtgggaggcagaggttgcagtgagc

SEQ ID NO: 646552 - DNA, 25 bp, Homo sapien
cagctatccgcgaggctgagacagg

SEQ ID NO: 646553 - DNA, 25 bp, Homo sapien
gagacaggagaatcggttgaacgtg

SEQ ID NO: 646554 - DNA, 25 bp, Homo sapien
taaagagtttgtgacgggtgggaga

SEQ ID NO: 646555 - DNA, 25 bp, Homo sapien
tcaattacttgcgacccacatacag

SEQ ID NO: 646556 - DNA, 25 bp, Homo sapien
gacccctgtgggatatgttttacca

SEQ ID NO: 646557 - DNA, 25 bp, Homo sapien
tcatttggaggcctagagcagttca

SEQ ID NO: 646558 - DNA, 25 bp, Homo sapien
tttaacttcacatgacccctgtggg

SEQ ID NO: 646559 - DNA, 25 bp, Homo sapien
ggtggtaaatccgtccaggatgctg

SEQ ID NO: 646560 - DNA, 25 bp, Homo sapien
ggcatttgcattagtctggtggtaa

SEQ ID NO: 646561 - DNA, 25 bp, Homo sapien
cagatatgtgacctgatgtctggaa

SEQ ID NO: 646562 - DNA, 25 bp, Homo sapien
tgcttgcctttagttggatcttcaa

SEQ ID NO: 646563 - DNA, 25 bp, Homo sapien
ctgccatttgctcactgtgaccctg

SEQ ID NO: 646564 - DNA, 25 bp, Homo sapien
catgcagactgcttgttcctatgca

SEQ ID NO: 646565 - DNA, 25 bp, Homo sapien
gctgtaggttctgagggactaggat

SEQ ID NO: 646566 - DNA, 25 bp, Homo sapien
aagtggtgaccattaactccgcctc

SEQ ID NO: 646567 - DNA, 25 bp, Homo sapien
ttcagtgcttaccagtgctttaggg

SEQ ID NO: 646568 - DNA, 25 bp, Homo sapien
gagttctaccttcactcctcaaaca

SEQ ID NO: 646569 - DNA, 25 bp, Homo sapien
ggaagtctaagatcacaatgccacc

SEQ ID NO: 646570 - DNA, 25 bp, Homo sapien
ccttttttgagttgcagaatgccaa

SEQ ID NO: 646571 - DNA, 25 bp, Homo sapien
gactgacaggtaggccaaagttctg

SEQ ID NO: 646572 - DNA, 25 bp, Homo sapien
cctccagcacatagggcagtgagcc

SEQ ID NO: 646573 - DNA, 25 bp, Homo sapien
aaattgagtggagggcctaggacca

SEQ ID NO: 646574 - DNA, 25 bp, Homo sapien
cttctagtggttaagagtggccagc

SEQ ID NO: 646575 - DNA, 25 bp, Homo sapien
tggaaacactgagattgttctatag

SEQ ID NO: 646576 - DNA, 25 bp, Homo sapien
gatgtacttccacatacattaacag

SEQ ID NO: 646577 - DNA, 25 bp, Homo sapien
ttttagtcagctttcacattattgc

SEQ ID NO: 646578 - DNA, 25 bp, Homo sapien
tatagttcaacagttctccaccaaa

SEQ ID NO: 646579 - DNA, 25 bp, Homo sapien
gaacttgctcatgtaatccaatacc

SEQ ID NO: 646580 - DNA, 25 bp, Homo sapien
tgctcatgtaatccaataccacctg

SEQ ID NO: 646581 - DNA, 25 bp, Homo sapien
agaacttgctcatgtaatccaatac

SEQ ID NO: 646582 - DNA, 25 bp, Homo sapien
acttgctcatgtaatccaataccac

SEQ ID NO: 646583 - DNA, 25 bp, Homo sapien
cagatgtcccaccttcttgggagaa

SEQ ID NO: 646584 - DNA, 25 bp, Homo sapien
tccatctgtccagtggagccagatg

SEQ ID NO: 646585 - DNA, 25 bp, Homo sapien
tctgtccagtggagccagatgtccc

SEQ ID NO: 646586 - DNA, 25 bp, Homo sapien
gaaattaattgaggctcatttccag

SEQ ID NO: 646587 - DNA, 25 bp, Homo sapien
cgcatgaaagtgttcatcgtagcct

SEQ ID NO: 646588 - DNA, 25 bp, Homo sapien
taggagggttatatcattccaagga

SEQ ID NO: 646589 - DNA, 25 bp, Homo sapien
gaacttaggttgtccgtttatgctc

SEQ ID NO: 646590 - DNA, 25 bp, Homo sapien
tattaagctggtttcaagaacaagc

SEQ ID NO: 646591 - DNA, 25 bp, Homo sapien
ccttgcaatactttactgagaatga

SEQ ID NO: 646592 - DNA, 25 bp, Homo sapien
tgcttttttgtccttgcaatacttt

SEQ ID NO: 646593 - DNA, 25 bp, Homo sapien
gtttgcttttttgtccttgcaatac

SEQ ID NO: 646594 - DNA, 25 bp, Homo sapien
gcttttttgtccttgcaatacttta

SEQ ID NO: 646595 - DNA, 25 bp, Homo sapien
caatctattcgctacttccatgaga

SEQ ID NO: 646596 - DNA, 25 bp, Homo sapien
tgttaacgataatcactctactctg

SEQ ID NO: 646597 - DNA, 25 bp, Homo sapien
gctcccacgtatatgtgatgacatg

SEQ ID NO: 646598 - DNA, 25 bp, Homo sapien
aatatgtaatggtccagtcagggtc

SEQ ID NO: 646599 - DNA, 25 bp, Homo sapien
gtctagtagacctcactgaaaatgt

SEQ ID NO: 646600 - DNA, 25 bp, Homo sapien
gagggtattcctaactgtgctagta

SEQ ID NO: 646601 - DNA, 25 bp, Homo sapien
catccatgagtaggatagcatttct

SEQ ID NO: 646602 - DNA, 25 bp, Homo sapien
aaggtaacttcgtttcatccatgag

SEQ ID NO: 646603 - DNA, 25 bp, Homo sapien
cagcagcctccatattacagatcag

SEQ ID NO: 646604 - DNA, 25 bp, Homo sapien
accaggaactggcactctcagcaca

SEQ ID NO: 646605 - DNA, 25 bp, Homo sapien
gatcagctgatttcgtgaggacatt

SEQ ID NO: 646606 - DNA, 25 bp, Homo sapien
tggcactctcagcacaaatgtcagc

SEQ ID NO: 646607 - DNA, 25 bp, Homo sapien
tccttcggcatcttctttgtgtact

SEQ ID NO: 646608 - DNA, 25 bp, Homo sapien
ctttctagcattcttgtgggtcctt

SEQ ID NO: 646609 - DNA, 25 bp, Homo sapien
gtccttcggcatcttctttgtgtac

SEQ ID NO: 646610 - DNA, 25 bp, Homo sapien
catgatcatcatcacacgaattggc

SEQ ID NO: 646611 - DNA, 25 bp, Homo sapien
gtttttccatatgtcacgtacatgt

SEQ ID NO: 646612 - DNA, 25 bp, Homo sapien
tcatcatcacacgaattggcaaaaa

SEQ ID NO: 646613 - DNA, 25 bp, Homo sapien
acatgtgatttcttcatgatcatca

SEQ ID NO: 646614 - DNA, 25 bp, Homo sapien
aggcctcttaaataccatacattcc

SEQ ID NO: 646615 - DNA, 25 bp, Homo sapien
ggcctcttaaataccatacattcct

SEQ ID NO: 646616 - DNA, 25 bp, Homo sapien
cgccagcactagattgttgactgtt

SEQ ID NO: 646617 - DNA, 25 bp, Homo sapien
ttgccgccagcactagattgttgac

SEQ ID NO: 646618 - DNA, 25 bp, Homo sapien
tatccacactacagacagatgggtg

SEQ ID NO: 646619 - DNA, 25 bp, Homo sapien
taaacctcatatgtcctgagaatgc

SEQ ID NO: 646620 - DNA, 25 bp, Homo sapien
taacaggacactatcatactagagg

SEQ ID NO: 646621 - DNA, 25 bp, Homo sapien
caaaaactggttttcatcactgact

SEQ ID NO: 646622 - DNA, 25 bp, Homo sapien
tgctagtgcaaggacaagagctgcc

SEQ ID NO: 646623 - DNA, 25 bp, Homo sapien
tctcttaaacgaaacctgcaggatg

SEQ ID NO: 646624 - DNA, 25 bp, Homo sapien
tattctgctatgtatcaggaagggc

SEQ ID NO: 646625 - DNA, 25 bp, Homo sapien
aagggctaagcacttcaggcaggca

SEQ ID NO: 646626 - DNA, 25 bp, Homo sapien
gagaggcatttgacccaagtcttga

SEQ ID NO: 646627 - DNA, 25 bp, Homo sapien
tcttgaaagcagagtagccagttgt

SEQ ID NO: 646628 - DNA, 25 bp, Homo sapien
catggtaggaggttcaggatgctta

SEQ ID NO: 646629 - DNA, 25 bp, Homo sapien
gaaggaagccgatacgctcatgagc

SEQ ID NO: 646630 - DNA, 25 bp, Homo sapien
caagaataacaccgtgaaataacca

SEQ ID NO: 646631 - DNA, 25 bp, Homo sapien
aagaatggacaaaagctatgatgag

SEQ ID NO: 646632 - DNA, 25 bp, Homo sapien
aatggacaaaagctatgatgaggga

SEQ ID NO: 646633 - DNA, 25 bp, Homo sapien
gctatgatgagggaaatacaatttg

SEQ ID NO: 646634 - DNA, 25 bp, Homo sapien
cctagactctgcaggtttgaggaac

SEQ ID NO: 646635 - DNA, 25 bp, Homo sapien
tgaggaactcttatgaccagctaca

SEQ ID NO: 646636 - DNA, 25 bp, Homo sapien
aaatggctcagagaatttggctcgc

SEQ ID NO: 646637 - DNA, 25 bp, Homo sapien
caaaaagtgatagatgagtcttcca

SEQ ID NO: 646638 - DNA, 25 bp, Homo sapien
gtattcatgaagtctagtcaccaag

SEQ ID NO: 646639 - DNA, 25 bp, Homo sapien
tttattgaccaaaccacaactctca

SEQ ID NO: 646640 - DNA, 25 bp, Homo sapien
caaaccttcgttagatgatgtattc

SEQ ID NO: 646641 - DNA, 25 bp, Homo sapien
tctcagatttcatagtcagtggtgc

SEQ ID NO: 646642 - DNA, 25 bp, Homo sapien
agctgtaagcctccaatgctcctag

SEQ ID NO: 646643 - DNA, 25 bp, Homo sapien
tgttcaatttgagtcccgttagaga

SEQ ID NO: 646644 - DNA, 25 bp, Homo sapien
tatggacatcaaatggcagcctgca

SEQ ID NO: 646645 - DNA, 25 bp, Homo sapien
cagttctgaacgatgggctatggac

SEQ ID NO: 646646 - DNA, 25 bp, Homo sapien
tcaagtgcagccaattctacaggtc

SEQ ID NO: 646647 - DNA, 25 bp, Homo sapien
caattaatgtcgagcatcatcagag

SEQ ID NO: 646648 - DNA, 25 bp, Homo sapien
gatgtaacagtccaactttgcaaaa

SEQ ID NO: 646649 - DNA, 25 bp, Homo sapien
tacaggtccgcatttctcaagtcgc

SEQ ID NO: 646650 - DNA, 25 bp, Homo sapien
tcaaaacctgcctattctccatatt

SEQ ID NO: 646651 - DNA, 25 bp, Homo sapien
aacgatctgtggcttgggtgtagcc

SEQ ID NO: 646652 - DNA, 25 bp, Homo sapien
aaggatgaagtgacagaacgatctg

SEQ ID NO: 646653 - DNA, 25 bp, Homo sapien
ttgggtgtagccatctgccatcaaa

SEQ ID NO: 646654 - DNA, 25 bp, Homo sapien
caaatgcttcgggtcctcaagcttc

SEQ ID NO: 646655 - DNA, 25 bp, Homo sapien
cctgcaaatgcttcgggtcctcaag

SEQ ID NO: 646656 - DNA, 25 bp, Homo sapien
ttcgggtcctcaagcttcccactgt

SEQ ID NO: 646657 - DNA, 25 bp, Homo sapien
ggtcctcaagcttcccactgtctgt

SEQ ID NO: 646658 - DNA, 25 bp, Homo sapien
gcttccagggactaaagtgcccggc

SEQ ID NO: 646659 - DNA, 25 bp, Homo sapien
ataaattctttataggacggtcctg

SEQ ID NO: 646660 - DNA, 25 bp, Homo sapien
tcctgtttgttggttcccagagatg

SEQ ID NO: 646661 - DNA, 25 bp, Homo sapien
gaatatcggagatagtcctgtctcc

SEQ ID NO: 646662 - DNA, 25 bp, Homo sapien
tctaggacagactgaaccacctcct

SEQ ID NO: 646663 - DNA, 25 bp, Homo sapien
ctctgttccacctcacagatctgag

SEQ ID NO: 646664 - DNA, 25 bp, Homo sapien
cacctcctgccagctctgttccacc

SEQ ID NO: 646665 - DNA, 25 bp, Homo sapien
taggacagactgaaccacctcctgc

SEQ ID NO: 646666 - DNA, 25 bp, Homo sapien
gggattttttgaatcgtgcataatc

SEQ ID NO: 646667 - DNA, 25 bp, Homo sapien
tcttcataggaacccaagtcttcca

SEQ ID NO: 646668 - DNA, 25 bp, Homo sapien
ccagggattttttgaatcgtgcata

SEQ ID NO: 646669 - DNA, 25 bp, Homo sapien
tttcttcataggaacccaagtcttc

SEQ ID NO: 646670 - DNA, 25 bp, Homo sapien
ggaagccagatatggaacatgggtc

SEQ ID NO: 646671 - DNA, 25 bp, Homo sapien
agccagatatggaacatgggtcccc

SEQ ID NO: 646672 - DNA, 25 bp, Homo sapien
cagatatggaacatgggtccccgac

SEQ ID NO: 646673 - DNA, 25 bp, Homo sapien
gatatggaacatgggtccccgactc

SEQ ID NO: 646674 - DNA, 25 bp, Homo sapien
ttagcaaaccttaagaaactaggca

SEQ ID NO: 646675 - DNA, 25 bp, Homo sapien
taagaaactaggcagaaatgaaggt

SEQ ID NO: 646676 - DNA, 25 bp, Homo sapien
gcaaaccttaagaaactaggcagaa

SEQ ID NO: 646677 - DNA, 25 bp, Homo sapien
gaaactaggcagaaatgaaggtccc

SEQ ID NO: 646678 - DNA, 25 bp, Homo sapien
tgttacatgccctctgaattgggag

SEQ ID NO: 646679 - DNA, 25 bp, Homo sapien
cagtgtcctttagaatcgactccca

SEQ ID NO: 646680 - DNA, 25 bp, Homo sapien
gcagtgcacggtgaatgcttaccct

SEQ ID NO: 646681 - DNA, 25 bp, Homo sapien
tacagctgagcttttgaggtttgga

SEQ ID NO: 646682 - DNA, 25 bp, Homo sapien
tataactccaagtgggtgcattggt

SEQ ID NO: 646683 - DNA, 25 bp, Homo sapien
caaatcacttcaagagaggcttggt

SEQ ID NO: 646684 - DNA, 25 bp, Homo sapien
tgcactgagatagaaactccacccg

SEQ ID NO: 646685 - DNA, 25 bp, Homo sapien
gatggagcagtgtgccctgatgctc

SEQ ID NO: 646686 - DNA, 25 bp, Homo sapien
caaatgttataaatggcctactctg

SEQ ID NO: 646687 - DNA, 25 bp, Homo sapien
acagctcttcagtagggtaaaagtc

SEQ ID NO: 646688 - DNA, 25 bp, Homo sapien
aaaaacctaagttccgatgatgatg

SEQ ID NO: 646689 - DNA, 25 bp, Homo sapien
tgcccggcctgaatgtagtatcttt

SEQ ID NO: 646690 - DNA, 25 bp, Homo sapien
cagatacggtttttaggacacccag

SEQ ID NO: 646691 - DNA, 25 bp, Homo sapien
ggacacccagcttccgtgaggataa

SEQ ID NO: 646692 - DNA, 25 bp, Homo sapien
tagaccccatgtcattctgtaggat

SEQ ID NO: 646693 - DNA, 25 bp, Homo sapien
taatgagagagctagaccccatgtc

SEQ ID NO: 646694 - DNA, 25 bp, Homo sapien
ttctatcctggaataccctcaacct

SEQ ID NO: 646695 - DNA, 25 bp, Homo sapien
tttactcttctgtcatcccaatttc

SEQ ID NO: 646696 - DNA, 25 bp, Homo sapien
cagccactgtcctacatcctctgtt

SEQ ID NO: 646697 - DNA, 25 bp, Homo sapien
tgtcctacatcctctgtttttactc

SEQ ID NO: 646698 - DNA, 25 bp, Homo sapien
tgtgcgaacgcgtggactaggtctt

SEQ ID NO: 646699 - DNA, 25 bp, Homo sapien
tcggaggctccatcccggaggcact

SEQ ID NO: 646700 - DNA, 25 bp, Homo sapien
tcttggctcgctgggagggaagggc

SEQ ID NO: 646701 - DNA, 25 bp, Homo sapien
gaaaggcttggaaatgtgcgacgcg

SEQ ID NO: 646702 - DNA, 25 bp, Homo sapien
tcaggtataagcctttgtgtgaaca

SEQ ID NO: 646703 - DNA, 25 bp, Homo sapien
tactcccttggaaaacttcacagca

SEQ ID NO: 646704 - DNA, 25 bp, Homo sapien
tgtttaggatctacaacaatccagg

SEQ ID NO: 646705 - DNA, 25 bp, Homo sapien
cacagcatttgaaggttgaatccca

SEQ ID NO: 646706 - DNA, 25 bp, Homo sapien
tggcccagagatagacaagaagctc

SEQ ID NO: 646707 - DNA, 25 bp, Homo sapien
gaatgcgatctacagaccaccagta

SEQ ID NO: 646708 - DNA, 25 bp, Homo sapien
tgttgctgcgagagacatgacttca

SEQ ID NO: 646709 - DNA, 25 bp, Homo sapien
taagagttttaagccatgcccagaa

SEQ ID NO: 646710 - DNA, 25 bp, Homo sapien
agcacacatgaagtccctcccacaa

SEQ ID NO: 646711 - DNA, 25 bp, Homo sapien
cagcacacatgaagtccctcccaca

SEQ ID NO: 646712 - DNA, 25 bp, Homo sapien
tgcagcacacatgaagtccctccca

SEQ ID NO: 646713 - DNA, 25 bp, Homo sapien
gcagcacacatgaagtccctcccac

SEQ ID NO: 646714 - DNA, 25 bp, Homo sapien
gcattggttgcctaggtgtcttcag

SEQ ID NO: 646715 - DNA, 25 bp, Homo sapien
gctccctgatgtgcgtactatccca

SEQ ID NO: 646716 - DNA, 25 bp, Homo sapien
ggctgagatgcggtccatatgaaaa

SEQ ID NO: 646717 - DNA, 25 bp, Homo sapien
caaagaccaactgctggctgagatg

SEQ ID NO: 646718 - DNA, 25 bp, Homo sapien
catactttgctggaaaaaggctaac

SEQ ID NO: 646719 - DNA, 25 bp, Homo sapien
tctctgctcccctcactggtacatt

SEQ ID NO: 646720 - DNA, 25 bp, Homo sapien
aaaaggctaacaactcagtgcatcc

SEQ ID NO: 646721 - DNA, 25 bp, Homo sapien
ctccatactttgctggaaaaaggct

SEQ ID NO: 646722 - DNA, 25 bp, Homo sapien
tgcaattccgaagacatcatgaaat

SEQ ID NO: 646723 - DNA, 25 bp, Homo sapien
caggtgagacaactgagagctcctt

SEQ ID NO: 646724 - DNA, 25 bp, Homo sapien
ggtggcacaacatgcaattccgaag

SEQ ID NO: 646725 - DNA, 25 bp, Homo sapien
agctccttactgagagtgtgaagtg

SEQ ID NO: 646726 - DNA, 25 bp, Homo sapien
tacgtgggcacatgacaggtactca

SEQ ID NO: 646727 - DNA, 25 bp, Homo sapien
ggaattattgtggtgtgccccaaga

SEQ ID NO: 646728 - DNA, 25 bp, Homo sapien
tggtcctgacaatctacatgaagta

SEQ ID NO: 646729 - DNA, 25 bp, Homo sapien
tttgtgccaccaggatacgtgggca

SEQ ID NO: 646730 - DNA, 25 bp, Homo sapien
caggttggaccggggcttcatctgt

SEQ ID NO: 646731 - DNA, 25 bp, Homo sapien
actgcacatggctgcaggaatgccc

SEQ ID NO: 646732 - DNA, 25 bp, Homo sapien
ctgcacatggctgcaggaatgccca

SEQ ID NO: 646733 - DNA, 25 bp, Homo sapien
tgcccaggttggaccggggcttcat

SEQ ID NO: 646734 - DNA, 25 bp, Homo sapien
cagaagggagtgtttgtctattacc

SEQ ID NO: 646735 - DNA, 25 bp, Homo sapien
tgcttagtggaatgaggatagacct

SEQ ID NO: 646736 - DNA, 25 bp, Homo sapien
gacctcaatgctcatggtatttgca

SEQ ID NO: 646737 - DNA, 25 bp, Homo sapien
catctccagtgtaggcactggtgat

SEQ ID NO: 646738 - DNA, 25 bp, Homo sapien
gacagacaagataaacctaggcaga

SEQ ID NO: 646739 - DNA, 25 bp, Homo sapien
tcaaaacagctcgtctctgactggt

SEQ ID NO: 646740 - DNA, 25 bp, Homo sapien
gggactctctcgacactaagatgac

SEQ ID NO: 646741 - DNA, 25 bp, Homo sapien
tagccagtttaggaaggtcacattt

SEQ ID NO: 646742 - DNA, 25 bp, Homo sapien
ggcccatggtctctcacaggctaca

SEQ ID NO: 646743 - DNA, 25 bp, Homo sapien
tacagtaaaggtagccctcagttcc

SEQ ID NO: 646744 - DNA, 25 bp, Homo sapien
gaatttatcagagcaggtaagtgaa

SEQ ID NO: 646745 - DNA, 25 bp, Homo sapien
agcagaatttatcagagcaggtaag

SEQ ID NO: 646746 - DNA, 25 bp, Homo sapien
aaacacagcatcaggaaatgttgtg

SEQ ID NO: 646747 - DNA, 25 bp, Homo sapien
gaaatgttgtgtctttaagtgtcag

SEQ ID NO: 646748 - DNA, 25 bp, Homo sapien
tctttaagtgtcagcgtgtcccttc

SEQ ID NO: 646749 - DNA, 25 bp, Homo sapien
caaaaacacagcatcaggaaatgtt

SEQ ID NO: 646750 - DNA, 25 bp, Homo sapien
taaccacagtgcaaaagtgacattc

SEQ ID NO: 646751 - DNA, 25 bp, Homo sapien
acaggagtggtctaaatcccttgcc

SEQ ID NO: 646752 - DNA, 25 bp, Homo sapien
agtgacattcatgcaacaggagtgg

SEQ ID NO: 646753 - DNA, 25 bp, Homo sapien
gatggcagcgtccaaaagtgcggaa

SEQ ID NO: 646754 - DNA, 25 bp, Homo sapien
cctcggaaaataaacgagctttcat

SEQ ID NO: 646755 - DNA, 25 bp, Homo sapien
aatcgaggatgttttggcccaaagg

SEQ ID NO: 646756 - DNA, 25 bp, Homo sapien
tatacacctcggaaaataaacgagc

SEQ ID NO: 646757 - DNA, 25 bp, Homo sapien
gtgatgtgttccaggcaaaagccca

SEQ ID NO: 646758 - DNA, 25 bp, Homo sapien
aaccaaggtcctatatcagtcagct

SEQ ID NO: 646759 - DNA, 25 bp, Homo sapien
gattccattccgaggaagtcagagc

SEQ ID NO: 646760 - DNA, 25 bp, Homo sapien
tcaccattcaacaggctagcttggc

SEQ ID NO: 646761 - DNA, 25 bp, Homo sapien
tccatctgagtgactggccattggc

SEQ ID NO: 646762 - DNA, 25 bp, Homo sapien
agtgtttgaatgtggaaggcgcaca

SEQ ID NO: 646763 - DNA, 25 bp, Homo sapien
tgttccagacaaaatcgatgctcgg

SEQ ID NO: 646764 - DNA, 25 bp, Homo sapien
aaagccccgagtgtgtttattgtgg

SEQ ID NO: 646765 - DNA, 25 bp, Homo sapien
atttttagatgtgtggaactgttcc

SEQ ID NO: 646766 - DNA, 25 bp, Homo sapien
cggaccgagcgcttctgtgttcact

SEQ ID NO: 646767 - DNA, 25 bp, Homo sapien
tcaagcaagagaaaacagtcctaag

SEQ ID NO: 646768 - DNA, 25 bp, Homo sapien
gggctcaagtcacatggaatctgtt

SEQ ID NO: 646769 - DNA, 25 bp, Homo sapien
agcacagaataagcccatagcaggg

SEQ ID NO: 646770 - DNA, 25 bp, Homo sapien
cgtgagaacggccatccacttctga

SEQ ID NO: 646771 - DNA, 25 bp, Homo sapien
agcctggtgtcacatgctccttgaa

SEQ ID NO: 646772 - DNA, 25 bp, Homo sapien
ttgaagcacctcctgtgggccggtt

SEQ ID NO: 646773 - DNA, 25 bp, Homo sapien
tgtacacgcggtgagagggtttctc

SEQ ID NO: 646774 - DNA, 25 bp, Homo sapien
aagcgtaaccttttctctggagttg

SEQ ID NO: 646775 - DNA, 25 bp, Homo sapien
cacagtgggtgcgactcaattcaca

SEQ ID NO: 646776 - DNA, 25 bp, Homo sapien
aattcacacccggatccagagtttc

SEQ ID NO: 646777 - DNA, 25 bp, Homo sapien
tgtggtgaaactaatcacgtctgtg

SEQ ID NO: 646778 - DNA, 25 bp, Homo sapien
aatttgtaggatgaggcaaaagtag

SEQ ID NO: 646779 - DNA, 25 bp, Homo sapien
tttgtaggatgaggcaaaagtagtg

SEQ ID NO: 646780 - DNA, 25 bp, Homo sapien
caaaatttgtaggatgaggcaaaag

SEQ ID NO: 646781 - DNA, 25 bp, Homo sapien
gtaggatgaggcaaaagtagtgctt

SEQ ID NO: 646782 - DNA, 25 bp, Homo sapien
gatgtttcatacctaagctacgatg

SEQ ID NO: 646783 - DNA, 25 bp, Homo sapien
ttaaacagcttggtgccacaatggg

SEQ ID NO: 646784 - DNA, 25 bp, Homo sapien
ttcaacacgtatttactcagggagc

SEQ ID NO: 646785 - DNA, 25 bp, Homo sapien
cactcacagggaggcattatgccaa

SEQ ID NO: 646786 - DNA, 25 bp, Homo sapien
tatacactaactcctggcagccatg

SEQ ID NO: 646787 - DNA, 25 bp, Homo sapien
gagcgaaccctgaggtaggcacaga

SEQ ID NO: 646788 - DNA, 25 bp, Homo sapien
cagggattacactccactgttggcc

SEQ ID NO: 646789 - DNA, 25 bp, Homo sapien
ttgcaaattagctgatccacactgg

SEQ ID NO: 646790 - DNA, 25 bp, Homo sapien
ctagtcatagtaggcaatttcattt

SEQ ID NO: 646791 - DNA, 25 bp, Homo sapien
tagtcatagtaggcaatttcatttt

SEQ ID NO: 646792 - DNA, 25 bp, Homo sapien
tagagtggaccctaatccattacga

SEQ ID NO: 646793 - DNA, 25 bp, Homo sapien
ccatgttgatgtcctaagccccggg

SEQ ID NO: 646794 - DNA, 25 bp, Homo sapien
cagtgtaaccatctagtactaggct

SEQ ID NO: 646795 - DNA, 25 bp, Homo sapien
taggacagaattcaccagtgtaacc

SEQ ID NO: 646796 - DNA, 25 bp, Homo sapien
tattctggtgaatgttccttgtgca

SEQ ID NO: 646797 - DNA, 25 bp, Homo sapien
tgtttttcccctcgatcatgtcagt

SEQ ID NO: 646798 - DNA, 25 bp, Homo sapien
gataccctctcagcttttgactgga

SEQ ID NO: 646799 - DNA, 25 bp, Homo sapien
tcaacttggagggtgttttaacatg

SEQ ID NO: 646800 - DNA, 25 bp, Homo sapien
gctttgcagagctgcggtggaccct

SEQ ID NO: 646801 - DNA, 25 bp, Homo sapien
taaggtttattctgatgccacagga

SEQ ID NO: 646802 - DNA, 25 bp, Homo sapien
ttgttgttcttagtaccaggagcac

SEQ ID NO: 646803 - DNA, 25 bp, Homo sapien
cttcccaggtgaggctacgtgccac

SEQ ID NO: 646804 - DNA, 25 bp, Homo sapien
taatgaaccaccttgggcttggctg

SEQ ID NO: 646805 - DNA, 25 bp, Homo sapien
tccccatggcaattcaaggcaaaga

SEQ ID NO: 646806 - DNA, 25 bp, Homo sapien
cagtaactgcaccatgtaaaggaga

SEQ ID NO: 646807 - DNA, 25 bp, Homo sapien
tctggaagctgagtgtgccgccttg

SEQ ID NO: 646808 - DNA, 25 bp, Homo sapien
cagattcttggtgatataagccaga

SEQ ID NO: 646809 - DNA, 25 bp, Homo sapien
cacagttaaaagcatccatgttaaa

SEQ ID NO: 646810 - DNA, 25 bp, Homo sapien
tagagaatgaggttattttctcatc

SEQ ID NO: 646811 - DNA, 25 bp, Homo sapien
aatgaagttgattttacatctctca

SEQ ID NO: 646812 - DNA, 25 bp, Homo sapien
aatatagtccatacagctcgaagct

SEQ ID NO: 646813 - DNA, 25 bp, Homo sapien
gaagaggagtcacatactataccca

SEQ ID NO: 646814 - DNA, 25 bp, Homo sapien
cccatataagggatgagaacaacag

SEQ ID NO: 646815 - DNA, 25 bp, Homo sapien
caacagtttaagttaccacaggatc

SEQ ID NO: 646816 - DNA, 25 bp, Homo sapien
cacttgtgtctcgagcagtgcacga

SEQ ID NO: 646817 - DNA, 25 bp, Homo sapien
aaaggcccgcgtgtcactaagcgct

SEQ ID NO: 646818 - DNA, 25 bp, Homo sapien
gacatatcacatcagcgacagttgg

SEQ ID NO: 646819 - DNA, 25 bp, Homo sapien
taagcgctaactacagcagcacttg

SEQ ID NO: 646820 - DNA, 25 bp, Homo sapien
gtcctgccaccgcaccaggaggaag

SEQ ID NO: 646821 - DNA, 25 bp, Homo sapien
ctctccaggcggcacaccccacctt

SEQ ID NO: 646822 - DNA, 25 bp, Homo sapien
ccaccgcaccaggaggaagtcttga

SEQ ID NO: 646823 - DNA, 25 bp, Homo sapien
accttcgattgccacagactgtcct

SEQ ID NO: 646824 - DNA, 25 bp, Homo sapien
tagaatagagatggagctttagatt

SEQ ID NO: 646825 - DNA, 25 bp, Homo sapien
tgttagaatagagatggagctttag

SEQ ID NO: 646826 - DNA, 25 bp, Homo sapien
ggcactgttagaatagagatggagc

SEQ ID NO: 646827 - DNA, 25 bp, Homo sapien
cactgttagaatagagatggagctt

SEQ ID NO: 646828 - DNA, 25 bp, Homo sapien
cactggccgtgtagttataatttgc

SEQ ID NO: 646829 - DNA, 25 bp, Homo sapien
cacaccaatgggatccactggccgt

SEQ ID NO: 646830 - DNA, 25 bp, Homo sapien
cgtgtagttataatttgccgctttc

SEQ ID NO: 646831 - DNA, 25 bp, Homo sapien
caatgggatccactggccgtgtagt

SEQ ID NO: 646832 - DNA, 25 bp, Homo sapien
gaactgttaaggcacggagacccag

SEQ ID NO: 646833 - DNA, 25 bp, Homo sapien
gctacaggtgataaaagtgctccat

SEQ ID NO: 646834 - DNA, 25 bp, Homo sapien
gatcgggaaatcactggctctctgg

SEQ ID NO: 646835 - DNA, 25 bp, Homo sapien
gaaacatggatctcgctctaagtgc

SEQ ID NO: 646836 - DNA, 25 bp, Homo sapien
caaggttcatccaagctacagtata

SEQ ID NO: 646837 - DNA, 25 bp, Homo sapien
cagaaagatttactcctaagtcctc

SEQ ID NO: 646838 - DNA, 25 bp, Homo sapien
tatgttctggtacaagctcctcacc

SEQ ID NO: 646839 - DNA, 25 bp, Homo sapien
tgtccaaagtagcagcaccattttt

SEQ ID NO: 646840 - DNA, 25 bp, Homo sapien
gtggttaactatagtcaacttactc

SEQ ID NO: 646841 - DNA, 25 bp, Homo sapien
tgtttgagctctcacacgtaagtga

SEQ ID NO: 646842 - DNA, 25 bp, Homo sapien
aagttctatcttctagctactggaa

SEQ ID NO: 646843 - DNA, 25 bp, Homo sapien
tatctaactgtacccattgaccgac

SEQ ID NO: 646844 - DNA, 25 bp, Homo sapien
gcactaggcttctgtacaacactgc

SEQ ID NO: 646845 - DNA, 25 bp, Homo sapien
cactaggcttctgtacaacactgcc

SEQ ID NO: 646846 - DNA, 25 bp, Homo sapien
actaggcttctgtacaacactgcct

SEQ ID NO: 646847 - DNA, 25 bp, Homo sapien
ggcactaggcttctgtacaacactg

SEQ ID NO: 646848 - DNA, 25 bp, Homo sapien
tgggctgacatatatccgacacaca

SEQ ID NO: 646849 - DNA, 25 bp, Homo sapien
atcctgggctgacatatatccgaca

SEQ ID NO: 646850 - DNA, 25 bp, Homo sapien
cctgggctgacatatatccgacaca

SEQ ID NO: 646851 - DNA, 25 bp, Homo sapien
gggctgacatatatccgacacacat

SEQ ID NO: 646852 - DNA, 25 bp, Homo sapien
gctctccgtcgtgtggctccacaga

SEQ ID NO: 646853 - DNA, 25 bp, Homo sapien
tctccgtcgtgtggctccacagaaa

SEQ ID NO: 646854 - DNA, 25 bp, Homo sapien
ctctccgtcgtgtggctccacagaa

SEQ ID NO: 646855 - DNA, 25 bp, Homo sapien
attctcgattctcctgcctggctaa

SEQ ID NO: 646856 - DNA, 25 bp, Homo sapien
aagcgattctcgattctcctgcctg

SEQ ID NO: 646857 - DNA, 25 bp, Homo sapien
tcaagcgattctcgattctcctgcc

SEQ ID NO: 646858 - DNA, 25 bp, Homo sapien
gcgattctcgattctcctgcctggc

SEQ ID NO: 646859 - DNA, 25 bp, Homo sapien
tatcaggtttcagactattatcaga

SEQ ID NO: 646860 - DNA, 25 bp, Homo sapien
tttgaaacaacatcgtgttagctgg

SEQ ID NO: 646861 - DNA, 25 bp, Homo sapien
tattatcagactaccaggtttcaga

SEQ ID NO: 646862 - DNA, 25 bp, Homo sapien
gggaatatgaatggctctaaaacat

SEQ ID NO: 646863 - DNA, 25 bp, Homo sapien
tatggaaccaactacactgtttttc

SEQ ID NO: 646864 - DNA, 25 bp, Homo sapien
gaagctctacatggatatggaacca

SEQ ID NO: 646865 - DNA, 25 bp, Homo sapien
aaaattacacactctttgacctagc

SEQ ID NO: 646866 - DNA, 25 bp, Homo sapien
tcatcaaagtagctttaatcagcaa

SEQ ID NO: 646867 - DNA, 25 bp, Homo sapien
cacatctgagcctgtgaaagcgctg

SEQ ID NO: 646868 - DNA, 25 bp, Homo sapien
tccagcaacacgcagggtaaatgag

SEQ ID NO: 646869 - DNA, 25 bp, Homo sapien
aacagtctcggtgtggtcaagctca

SEQ ID NO: 646870 - DNA, 25 bp, Homo sapien
gaaagcgctggctataacagtctcg

SEQ ID NO: 646871 - DNA, 25 bp, Homo sapien
tagctggacaaatggaagcaggatc

SEQ ID NO: 646872 - DNA, 25 bp, Homo sapien
tggatgaactgtgggcctcaaatct

SEQ ID NO: 646873 - DNA, 25 bp, Homo sapien
gtgctcatcgcataatcaggctctg

SEQ ID NO: 646874 - DNA, 25 bp, Homo sapien
caagcttggcacaaaagccactggt

SEQ ID NO: 646875 - DNA, 25 bp, Homo sapien
ccagctgcagagttgttatatagaa

SEQ ID NO: 646876 - DNA, 25 bp, Homo sapien
ggccagctgcagagttgttatatag

SEQ ID NO: 646877 - DNA, 25 bp, Homo sapien
tcctgcccctggtttgggacccatg

SEQ ID NO: 646878 - DNA, 25 bp, Homo sapien
tctcctgcccctggtttgggaccca

SEQ ID NO: 646879 - DNA, 25 bp, Homo sapien
ggctcggcagaacatctgcatgaac

SEQ ID NO: 646880 - DNA, 25 bp, Homo sapien
tcggcagaacatctgcatgaacgga

SEQ ID NO: 646881 - DNA, 25 bp, Homo sapien
gaacatctgcatgaacggaggacaa

SEQ ID NO: 646882 - DNA, 25 bp, Homo sapien
tgcttattttgggaggagtcaggct

SEQ ID NO: 646883 - DNA, 25 bp, Homo sapien
caagcacgccatcttcactggcaag

SEQ ID NO: 646884 - DNA, 25 bp, Homo sapien
gactaacgacctacttgagagacac

SEQ ID NO: 646885 - DNA, 25 bp, Homo sapien
cccaggatgcaagaaatcaagctga

SEQ ID NO: 646886 - DNA, 25 bp, Homo sapien
tgatatcctccaagaagagactgga

SEQ ID NO: 646887 - DNA, 25 bp, Homo sapien
tttccagcaacgcagccaactcaag

SEQ ID NO: 646888 - DNA, 25 bp, Homo sapien
acatacgaaaatcaataaacatagt

SEQ ID NO: 646889 - DNA, 25 bp, Homo sapien
aatccacagccaatattgtactgaa

SEQ ID NO: 646890 - DNA, 25 bp, Homo sapien
tacgaaaatcaataaacatagtcca

SEQ ID NO: 646891 - DNA, 25 bp, Homo sapien
cgaaaatcaataaacatagtccagc

SEQ ID NO: 646892 - DNA, 25 bp, Homo sapien
aagttaggaaacgactggtgctgga

SEQ ID NO: 646893 - DNA, 25 bp, Homo sapien
aaaagttaggaaacgactggtgctg

SEQ ID NO: 646894 - DNA, 25 bp, Homo sapien
gttaggaaacgactggtgctggagg

SEQ ID NO: 646895 - DNA, 25 bp, Homo sapien
ttaggaaacgactggtgctggaggg

SEQ ID NO: 646896 - DNA, 25 bp, Homo sapien
aacttcttctgggctcctatagctc

SEQ ID NO: 646897 - DNA, 25 bp, Homo sapien
acttcttctgggctcctatagctca

SEQ ID NO: 646898 - DNA, 25 bp, Homo sapien
taagtctacaagattgtctccatcg

SEQ ID NO: 646899 - DNA, 25 bp, Homo sapien
gcatatggaggtaaatgagcctaca

SEQ ID NO: 646900 - DNA, 25 bp, Homo sapien
gagctgggcattaaaccactggtcc

SEQ ID NO: 646901 - DNA, 25 bp, Homo sapien
gaggtcaggtgagcgagaaaatact

SEQ ID NO: 646902 - DNA, 25 bp, Homo sapien
tatgcaatatcctaattctttgtcc

SEQ ID NO: 646903 - DNA, 25 bp, Homo sapien
ttggatcagagtgatggctcatgaa

SEQ ID NO: 646904 - DNA, 25 bp, Homo sapien
tgttgaaggctgctgttggatcaga

SEQ ID NO: 646905 - DNA, 25 bp, Homo sapien
aaccttgaagttgctttatcaaata

SEQ ID NO: 646906 - DNA, 25 bp, Homo sapien
catcagaacccttggacgaccaggt

SEQ ID NO: 646907 - DNA, 25 bp, Homo sapien
tctcctggccagctatgaaagtcct

SEQ ID NO: 646908 - DNA, 25 bp, Homo sapien
tacttgtccccggttcatcagaaga

SEQ ID NO: 646909 - DNA, 25 bp, Homo sapien
gagagtcagcatgttctcagaagcc

SEQ ID NO: 646910 - DNA, 25 bp, Homo sapien
ccaggtgccaaaagtgttgcaacca

SEQ ID NO: 646911 - DNA, 25 bp, Homo sapien
gacttgcctcctgttactacagatg

SEQ ID NO: 646912 - DNA, 25 bp, Homo sapien
catcttgattcaagacttgcctcct

SEQ ID NO: 646913 - DNA, 25 bp, Homo sapien
aatagcttcacctgttgactaggtc

SEQ ID NO: 646914 - DNA, 25 bp, Homo sapien
cacctgttgactaggtctactgctt

SEQ ID NO: 646915 - DNA, 25 bp, Homo sapien
acaaatagtaattcaaactaccatc

SEQ ID NO: 646916 - DNA, 25 bp, Homo sapien
tatcatgcctaagactacaaatagt

SEQ ID NO: 646917 - DNA, 25 bp, Homo sapien
tattgcaacccttcatcctaaatga

SEQ ID NO: 646918 - DNA, 25 bp, Homo sapien
ccactataatattatcatgcctaag

SEQ ID NO: 646919 - DNA, 25 bp, Homo sapien
ctaatattagtggttttccccacat

SEQ ID NO: 646920 - DNA, 25 bp, Homo sapien
gtggttttccccacatgctcacaaa

SEQ ID NO: 646921 - DNA, 25 bp, Homo sapien
ttagtggttttccccacatgctcac

SEQ ID NO: 646922 - DNA, 25 bp, Homo sapien
taatattagtggttttccccacatg

SEQ ID NO: 646923 - DNA, 25 bp, Homo sapien
aaaaccgcattcattttctaagtga

SEQ ID NO: 646924 - DNA, 25 bp, Homo sapien
tatgtatcttatgtcacaaggaaag

SEQ ID NO: 646925 - DNA, 25 bp, Homo sapien
gatatccttatagaaatttcccatc

SEQ ID NO: 646926 - DNA, 25 bp, Homo sapien
tcttgaaggctcttataaaaccgca

SEQ ID NO: 646927 - DNA, 25 bp, Homo sapien
tatcagctataaagccccagagatt

SEQ ID NO: 646928 - DNA, 25 bp, Homo sapien
tcatggaagacaaccccaaggtctc

SEQ ID NO: 646929 - DNA, 25 bp, Homo sapien
tcaaagtctagtcccacatacggct

SEQ ID NO: 646930 - DNA, 25 bp, Homo sapien
tggccttttagctgaatcctgcata

SEQ ID NO: 646931 - DNA, 25 bp, Homo sapien
tgggttttgggcaggcacatgttcc

SEQ ID NO: 646932 - DNA, 25 bp, Homo sapien
tacatagaaatacaggaccagagtt

SEQ ID NO: 646933 - DNA, 25 bp, Homo sapien
gatgggtacagttgcaaggcatcca

SEQ ID NO: 646934 - DNA, 25 bp, Homo sapien
aatggtggcatactgactgcattcc

SEQ ID NO: 646935 - DNA, 25 bp, Homo sapien
tgaacgctgccacaacaaacatggg

SEQ ID NO: 646936 - DNA, 25 bp, Homo sapien
ctgataagcaataatgttgagcgct

SEQ ID NO: 646937 - DNA, 25 bp, Homo sapien
gttgttccctttgctatggagaagc

SEQ ID NO: 646938 - DNA, 25 bp, Homo sapien
ccagagtttgctattgcctatcttt

SEQ ID NO: 646939 - DNA, 25 bp, Homo sapien
cagagatctttctaagtagtgaact

SEQ ID NO: 646940 - DNA, 25 bp, Homo sapien
taaaacagcattcaacaacagtaat

SEQ ID NO: 646941 - DNA, 25 bp, Homo sapien
taaatcacatatgctattaagccga

SEQ ID NO: 646942 - DNA, 25 bp, Homo sapien
ttctgggtcttttgcgagtccacat

SEQ ID NO: 646943 - DNA, 25 bp, Homo sapien
cagtattaactgtggttcttttcct

SEQ ID NO: 646944 - DNA, 25 bp, Homo sapien
tcatgtggtactatctactgtggtg

SEQ ID NO: 646945 - DNA, 25 bp, Homo sapien
caatcagtattaactgtggttcttt

SEQ ID NO: 646946 - DNA, 25 bp, Homo sapien
atcagtattaactgtggttcttttc

SEQ ID NO: 646947 - DNA, 25 bp, Homo sapien
ctcatagtgcttatagaagtgaaat

SEQ ID NO: 646948 - DNA, 25 bp, Homo sapien
gaagatgtaatcttcttaatgttat

SEQ ID NO: 646949 - DNA, 25 bp, Homo sapien
ctgactcatagtgcttatagaagtg

SEQ ID NO: 646950 - DNA, 25 bp, Homo sapien
tccatatttagaagatgtaatcttc

SEQ ID NO: 646951 - DNA, 25 bp, Homo sapien
aacttgttttgcatagtctccaaca

SEQ ID NO: 646952 - DNA, 25 bp, Homo sapien
ggtgcgcacaagatgctctccacat

SEQ ID NO: 646953 - DNA, 25 bp, Homo sapien
tgtgaacattctctagccagtatgg

SEQ ID NO: 646954 - DNA, 25 bp, Homo sapien
catcctcagcttgtaaagcatgtga

SEQ ID NO: 646955 - DNA, 25 bp, Homo sapien
ctctctctttcccagtatgtttcct

SEQ ID NO: 646956 - DNA, 25 bp, Homo sapien
tgtttcctgttgctgagaattcagc

SEQ ID NO: 646957 - DNA, 25 bp, Homo sapien
tttcctgttgctgagaattcagcat

SEQ ID NO: 646958 - DNA, 25 bp, Homo sapien
ctttcccagtatgtttcctgttgct

SEQ ID NO: 646959 - DNA, 25 bp, Homo sapien
gacaaaggaagatctcataggtggg

SEQ ID NO: 646960 - DNA, 25 bp, Homo sapien
cagtgacccaataagctgaaagcta

SEQ ID NO: 646961 - DNA, 25 bp, Homo sapien
tgaaagtaaaaatatccccagtgac

SEQ ID NO: 646962 - DNA, 25 bp, Homo sapien
gcaactgtccaccaaagtgtgagac

SEQ ID NO: 646963 - DNA, 25 bp, Homo sapien
tttcaagtgagaacaatcaaaggga

SEQ ID NO: 646964 - DNA, 25 bp, Homo sapien
caggtagtactccacaatgggaagg

SEQ ID NO: 646965 - DNA, 25 bp, Homo sapien
ctgacagcaggtagtactccacaat

SEQ ID NO: 646966 - DNA, 25 bp, Homo sapien
caagtgagaacaatcaaagggagaa

SEQ ID NO: 646967 - DNA, 25 bp, Homo sapien
tatatcccaggtctacaatctcttt

SEQ ID NO: 646968 - DNA, 25 bp, Homo sapien
taaaacatcaaaagtgcatcttggg

SEQ ID NO: 646969 - DNA, 25 bp, Homo sapien
tatccattatatcccaggtctacaa

SEQ ID NO: 646970 - DNA, 25 bp, Homo sapien
gatcactttatccattatatcccag

SEQ ID NO: 646971 - DNA, 25 bp, Homo sapien
tgaggtacctgcaagtgatcctttg

SEQ ID NO: 646972 - DNA, 25 bp, Homo sapien
gcagcagagcctcattcggtgctaa

SEQ ID NO: 646973 - DNA, 25 bp, Homo sapien
gagatgtactaatggctgcaacaac

SEQ ID NO: 646974 - DNA, 25 bp, Homo sapien
tgatcctttgggaagcgccacagtg

SEQ ID NO: 646975 - DNA, 25 bp, Homo sapien
caaattatttcagctccagtggcag

SEQ ID NO: 646976 - DNA, 25 bp, Homo sapien
ggatgtcaccaacaggactaagagc

SEQ ID NO: 646977 - DNA, 25 bp, Homo sapien
gcccaacaaggcagattaaggaatc

SEQ ID NO: 646978 - DNA, 25 bp, Homo sapien
gaatagaattcccatcccagataat

SEQ ID NO: 646979 - DNA, 25 bp, Homo sapien
gtcaaattgtccctgtttgcagatg

SEQ ID NO: 646980 - DNA, 25 bp, Homo sapien
ggatattcaattatgaaaaaaggaa

SEQ ID NO: 646981 - DNA, 25 bp, Homo sapien
taaaggatattcaattatgaaaaaa

SEQ ID NO: 646982 - DNA, 25 bp, Homo sapien
aaggatattcaattatgaaaaaagg

SEQ ID NO: 646983 - DNA, 25 bp, Homo sapien
catgatcacaccactgcattcactc

SEQ ID NO: 646984 - DNA, 25 bp, Homo sapien
tgatcacaccactgcattcactcca

SEQ ID NO: 646985 - DNA, 25 bp, Homo sapien
atcacaccactgcattcactccagc

SEQ ID NO: 646986 - DNA, 25 bp, Homo sapien
caggagtccaaggttgcaatgagcc

SEQ ID NO: 646987 - DNA, 25 bp, Homo sapien
tcctatttaaagaaagtccatggtg

SEQ ID NO: 646988 - DNA, 25 bp, Homo sapien
taccctgtacaaggctgtttgccag

SEQ ID NO: 646989 - DNA, 25 bp, Homo sapien
taagcattcttctcaaacagggagg

SEQ ID NO: 646990 - DNA, 25 bp, Homo sapien
ttcaatctgctcgtcctttccatag

SEQ ID NO: 646991 - DNA, 25 bp, Homo sapien
tatgagaaatggttatgaaagcagc

SEQ ID NO: 646992 - DNA, 25 bp, Homo sapien
gagaaatggttatgaaagcagcaaa

SEQ ID NO: 646993 - DNA, 25 bp, Homo sapien
aaatggttatgaaagcagcaaatac

SEQ ID NO: 646994 - DNA, 25 bp, Homo sapien
ttatgagaaatggttatgaaagcag

SEQ ID NO: 646995 - DNA, 25 bp, Homo sapien
gagtaggggttatgagctccagtat

SEQ ID NO: 646996 - DNA, 25 bp, Homo sapien
tgtggagtaggggttatgagctcca

SEQ ID NO: 646997 - DNA, 25 bp, Homo sapien
ggggttatgagctccagtattttca

SEQ ID NO: 646998 - DNA, 25 bp, Homo sapien
taggggttatgagctccagtatttt

SEQ ID NO: 646999 - DNA, 25 bp, Homo sapien
ttcgtggtccacaaccacagcgcct

SEQ ID NO: 647000 - DNA, 25 bp, Homo sapien
acagcgcctaccgtgtccaaagtgc

SEQ ID NO: 647001 - DNA, 25 bp, Homo sapien
ccaactctccccggatgtttcaagg

SEQ ID NO: 647002 - DNA, 25 bp, Homo sapien
aaggccaagcctccactggagacag

SEQ ID NO: 647003 - DNA, 25 bp, Homo sapien
tgcagagcaaaagtggcacaagtat

SEQ ID NO: 647004 - DNA, 25 bp, Homo sapien
gcagagcaaaagtggcacaagtatt

SEQ ID NO: 647005 - DNA, 25 bp, Homo sapien
agccctcctcgtatacctctgtcag

SEQ ID NO: 647006 - DNA, 25 bp, Homo sapien
ccctcctcgtatacctctgtcaggt

SEQ ID NO: 647007 - DNA, 25 bp, Homo sapien
tacctctgtcaggtttgagagcagc

SEQ ID NO: 647008 - DNA, 25 bp, Homo sapien
caagccctcctcgtatacctctgtc

SEQ ID NO: 647009 - DNA, 25 bp, Homo sapien
gagaaatgcagatgacttataccct

SEQ ID NO: 647010 - DNA, 25 bp, Homo sapien
aatgcagatgacttataccctaaca

SEQ ID NO: 647011 - DNA, 25 bp, Homo sapien
gagcttccacttgagaaatgcagat

SEQ ID NO: 647012 - DNA, 25 bp, Homo sapien
gaaatgcagatgacttataccctaa

SEQ ID NO: 647013 - DNA, 25 bp, Homo sapien
ccagcgtttggtttgaccagcaaag

SEQ ID NO: 647014 - DNA, 25 bp, Homo sapien
ccccaccaggaattacaagctgcaa

SEQ ID NO: 647015 - DNA, 25 bp, Homo sapien
ctgcaaaaaccagcgtttggtttga

SEQ ID NO: 647016 - DNA, 25 bp, Homo sapien
tgctaaattctgcagacagtttaac

SEQ ID NO: 647017 - DNA, 25 bp, Homo sapien
aattcttatcctttgccggcagaaa

SEQ ID NO: 647018 - DNA, 25 bp, Homo sapien
caagatctacttattaatttgttca

SEQ ID NO: 647019 - DNA, 25 bp, Homo sapien
tcacatccgatgcagaaacccaaga

SEQ ID NO: 647020 - DNA, 25 bp, Homo sapien
gaaatagactatccaccatcatatc

SEQ ID NO: 647021 - DNA, 25 bp, Homo sapien
ctttaaagtacatatgtgacacaca

SEQ ID NO: 647022 - DNA, 25 bp, Homo sapien
cttttatgagcctaatattatgaac

SEQ ID NO: 647023 - DNA, 25 bp, Homo sapien
tctactgaattgtatcgtcctaaag

SEQ ID NO: 647024 - DNA, 25 bp, Homo sapien
caaactggttctgaagacttaatac

SEQ ID NO: 647025 - DNA, 25 bp, Homo sapien
tgcataaaatctgtgtccacccttt

SEQ ID NO: 647026 - DNA, 25 bp, Homo sapien
ctgccagctctagtttcctcttgtt

SEQ ID NO: 647027 - DNA, 25 bp, Homo sapien
gccagctctagtttcctcttgtttc

SEQ ID NO: 647028 - DNA, 25 bp, Homo sapien
tctttagttgcataaaatctgtgtc

SEQ ID NO: 647029 - DNA, 25 bp, Homo sapien
gggcaatgggtcaaataagatatct

SEQ ID NO: 647030 - DNA, 25 bp, Homo sapien
catttaagaaatattagggcaatgg

SEQ ID NO: 647031 - DNA, 25 bp, Homo sapien
tgggtcaaataagatatctgaagag

SEQ ID NO: 647032 - DNA, 25 bp, Homo sapien
gaaatattagggcaatgggtcaaat

SEQ ID NO: 647033 - DNA, 25 bp, Homo sapien
taaaggtattattgcactgtgaaca

SEQ ID NO: 647034 - DNA, 25 bp, Homo sapien
aactgaggactaaaggtattattgc

SEQ ID NO: 647035 - DNA, 25 bp, Homo sapien
gtgaacatttgccaacactagcaca

SEQ ID NO: 647036 - DNA, 25 bp, Homo sapien
gccaacactagcacacttgcattcg

SEQ ID NO: 647037 - DNA, 25 bp, Homo sapien
tggtcatgatgttaggagggcaaga

SEQ ID NO: 647038 - DNA, 25 bp, Homo sapien
ggtattccatgatctactgcccatc

SEQ ID NO: 647039 - DNA, 25 bp, Homo sapien
tgtaggctccttctccaactaaaaa

SEQ ID NO: 647040 - DNA, 25 bp, Homo sapien
gagggcaagagggtattccatgatc

SEQ ID NO: 647041 - DNA, 25 bp, Homo sapien
tatttttaaaattcacagtgtcatc

SEQ ID NO: 647042 - DNA, 25 bp, Homo sapien
tttaaaattcacagtgtcatcttct

SEQ ID NO: 647043 - DNA, 25 bp, Homo sapien
ttaaaattcacagtgtcatcttctc

SEQ ID NO: 647044 - DNA, 25 bp, Homo sapien
tttttaaaattcacagtgtcatctt

SEQ ID NO: 647045 - DNA, 25 bp, Homo sapien
caaaatctaagtagaccctcagaaa

SEQ ID NO: 647046 - DNA, 25 bp, Homo sapien
gacagactggcaaaacaaaatctaa

SEQ ID NO: 647047 - DNA, 25 bp, Homo sapien
gaaaccaaatggttaatctcaataa

SEQ ID NO: 647048 - DNA, 25 bp, Homo sapien
catatccaaatggttccaatgggaa

SEQ ID NO: 647049 - DNA, 25 bp, Homo sapien
tcttcgcaaaggcatgctacctggt

SEQ ID NO: 647050 - DNA, 25 bp, Homo sapien
gctacctggtatgtaaccaacagca

SEQ ID NO: 647051 - DNA, 25 bp, Homo sapien
tccaagatcacggaacaaagtttgt

SEQ ID NO: 647052 - DNA, 25 bp, Homo sapien
aaatgagcccagttgaacactgatc

SEQ ID NO: 647053 - DNA, 25 bp, Homo sapien
ggaattctgccagccgagagcttgc

SEQ ID NO: 647054 - DNA, 25 bp, Homo sapien
gcaaccgagactgggttcttgattc

SEQ ID NO: 647055 - DNA, 25 bp, Homo sapien
agtctgttggcaaccgagactgggt

SEQ ID NO: 647056 - DNA, 25 bp, Homo sapien
tgcccttcacataagagtctgttgg

SEQ ID NO: 647057 - DNA, 25 bp, Homo sapien
caataagagttaaatcaaaaaatgt

SEQ ID NO: 647058 - DNA, 25 bp, Homo sapien
gcaataagagttaaatcaaaaaatg

SEQ ID NO: 647059 - DNA, 25 bp, Homo sapien
ggcatttagtgaccacaaaaccata

SEQ ID NO: 647060 - DNA, 25 bp, Homo sapien
tgattataaacagcttcaaattgac

SEQ ID NO: 647061 - DNA, 25 bp, Homo sapien
tatcaaaactatatacatgctccag

SEQ ID NO: 647062 - DNA, 25 bp, Homo sapien
aaaactatatacatgctccaggcat

SEQ ID NO: 647063 - DNA, 25 bp, Homo sapien
ggtcacgtgcatgattttccaaaga

SEQ ID NO: 647064 - DNA, 25 bp, Homo sapien
tagaaggcatgaaatggtcacgtgc

SEQ ID NO: 647065 - DNA, 25 bp, Homo sapien
caaagatagtaggtcataatgccca

SEQ ID NO: 647066 - DNA, 25 bp, Homo sapien
taatctcttcaagggatacaggaga

SEQ ID NO: 647067 - DNA, 25 bp, Homo sapien
cagatttagattagatcccattcct

SEQ ID NO: 647068 - DNA, 25 bp, Homo sapien
tcacctaacagatttagattagatc

SEQ ID NO: 647069 - DNA, 25 bp, Homo sapien
ttcacctaacagatttagattagat

SEQ ID NO: 647070 - DNA, 25 bp, Homo sapien
tgaccaatgcagaagacaagtgatt

SEQ ID NO: 647071 - DNA, 25 bp, Homo sapien
cccaacatgaccaatgcagaagaca

SEQ ID NO: 647072 - DNA, 25 bp, Homo sapien
caacatgaccaatgcagaagacaag

SEQ ID NO: 647073 - DNA, 25 bp, Homo sapien
catgaccaatgcagaagacaagtga

SEQ ID NO: 647074 - DNA, 25 bp, Homo sapien
gcttgaataggtaaacgaagtggct

SEQ ID NO: 647075 - DNA, 25 bp, Homo sapien
atttcagctctgagaacgaacagac

SEQ ID NO: 647076 - DNA, 25 bp, Homo sapien
cttgaataggtaaacgaagtggctg

SEQ ID NO: 647077 - DNA, 25 bp, Homo sapien
atttcatttcagctctgagaacgaa

SEQ ID NO: 647078 - DNA, 25 bp, Homo sapien
gaaaaggaccatacacctacatgta

SEQ ID NO: 647079 - DNA, 25 bp, Homo sapien
ttttgaaaaggaccatacacctaca

SEQ ID NO: 647080 - DNA, 25 bp, Homo sapien
ttgaaaaggaccatacacctacatg

SEQ ID NO: 647081 - DNA, 25 bp, Homo sapien
aaggaccatacacctacatgtaggg

SEQ ID NO: 647082 - DNA, 25 bp, Homo sapien
accacatctggagggggcttgtaaa

SEQ ID NO: 647083 - DNA, 25 bp, Homo sapien
cagtgtaaatgaactccgtcagctg

SEQ ID NO: 647084 - DNA, 25 bp, Homo sapien
atattctccatgaaccacatctgga

SEQ ID NO: 647085 - DNA, 25 bp, Homo sapien
acttcatattctccatgaaccacat

SEQ ID NO: 647086 - DNA, 25 bp, Homo sapien
catatttacagatgcactggctgct

SEQ ID NO: 647087 - DNA, 25 bp, Homo sapien
tatgatcttctttaagtgcccaagc

SEQ ID NO: 647088 - DNA, 25 bp, Homo sapien
gaaattactcaacttagacagcctg

SEQ ID NO: 647089 - DNA, 25 bp, Homo sapien
gctatcctggatgtaagttgagaga

SEQ ID NO: 647090 - DNA, 25 bp, Homo sapien
acagtacagttacttgtcaaaaaca

SEQ ID NO: 647091 - DNA, 25 bp, Homo sapien
aaacataacacaaatctctaaaata

SEQ ID NO: 647092 - DNA, 25 bp, Homo sapien
cataacacaaatctctaaaatagaa

SEQ ID NO: 647093 - DNA, 25 bp, Homo sapien
ttacagtacagttacttgtcaaaaa

SEQ ID NO: 647094 - DNA, 25 bp, Homo sapien
aagaggttagttagcacacacagta

SEQ ID NO: 647095 - DNA, 25 bp, Homo sapien
gtccaggaagaggttagttagcaca

SEQ ID NO: 647096 - DNA, 25 bp, Homo sapien
tttagttggattctttatgatgtcc

SEQ ID NO: 647097 - DNA, 25 bp, Homo sapien
ttggattctttatgatgtccaggaa

SEQ ID NO: 647098 - DNA, 25 bp, Homo sapien
tcaagaaatggccggaaaagcctaa

SEQ ID NO: 647099 - DNA, 25 bp, Homo sapien
aatggccggaaaagcctaaaatcat

SEQ ID NO: 647100 - DNA, 25 bp, Homo sapien
ctcatcaagaaatggccggaaaagc

SEQ ID NO: 647101 - DNA, 25 bp, Homo sapien
atggccggaaaagcctaaaatcatt

SEQ ID NO: 647102 - DNA, 25 bp, Homo sapien
ctaaatgggctctgtctggtgcttc

SEQ ID NO: 647103 - DNA, 25 bp, Homo sapien
gatgcaactccatgaagtgtaactg

SEQ ID NO: 647104 - DNA, 25 bp, Homo sapien
ttttactgtcccaggctaaatgggc

SEQ ID NO: 647105 - DNA, 25 bp, Homo sapien
acatggatacttggctggatgcaac

SEQ ID NO: 647106 - DNA, 25 bp, Homo sapien
gaagacctcaatatcccctgcacaa

SEQ ID NO: 647107 - DNA, 25 bp, Homo sapien
ttctgaagacctcaatatcccctgc

SEQ ID NO: 647108 - DNA, 25 bp, Homo sapien
ctgcacaaattcatcaaggttccaa

SEQ ID NO: 647109 - DNA, 25 bp, Homo sapien
tgcacaaattcatcaaggttccaaa

SEQ ID NO: 647110 - DNA, 25 bp, Homo sapien
gtgactgcgtcagttgcaagagcac

SEQ ID NO: 647111 - DNA, 25 bp, Homo sapien
gtgctgcagtgactgcgtcagttgc

SEQ ID NO: 647112 - DNA, 25 bp, Homo sapien
tgcagtgactgcgtcagttgcaaga

SEQ ID NO: 647113 - DNA, 25 bp, Homo sapien
cagtgactgcgtcagttgcaagagc

SEQ ID NO: 647114 - DNA, 25 bp, Homo sapien
tgacaagctcgtttgcatacatgtt

SEQ ID NO: 647115 - DNA, 25 bp, Homo sapien
gacaagctcgtttgcatacatgttt

SEQ ID NO: 647116 - DNA, 25 bp, Homo sapien
caagctcgtttgcatacatgtttat

SEQ ID NO: 647117 - DNA, 25 bp, Homo sapien
tctgacaagctcgtttgcatacatg

SEQ ID NO: 647118 - DNA, 25 bp, Homo sapien
ctcgtttctctttataggactgctt

SEQ ID NO: 647119 - DNA, 25 bp, Homo sapien
caaagcctcctcgtttctctttata

SEQ ID NO: 647120 - DNA, 25 bp, Homo sapien
tctttataggactgctttgtttcca

SEQ ID NO: 647121 - DNA, 25 bp, Homo sapien
gcctcctcgtttctctttataggac

SEQ ID NO: 647122 - DNA, 25 bp, Homo sapien
aacctgagatgatctggaaggcagc

SEQ ID NO: 647123 - DNA, 25 bp, Homo sapien
agcccttctccagaactcatcccct

SEQ ID NO: 647124 - DNA, 25 bp, Homo sapien
gccgaaacctgagatgatctggaag

SEQ ID NO: 647125 - DNA, 25 bp, Homo sapien
cgaaacctgagatgatctggaaggc

SEQ ID NO: 647126 - DNA, 25 bp, Homo sapien
aagtaattgcaggagaggaattacc

SEQ ID NO: 647127 - DNA, 25 bp, Homo sapien
ttctactgagaaaggggcatacttc

SEQ ID NO: 647128 - DNA, 25 bp, Homo sapien
tccaagattaccatcttctactgag

SEQ ID NO: 647129 - DNA, 25 bp, Homo sapien
tacttccatccaaaagtaattgcag

SEQ ID NO: 647130 - DNA, 25 bp, Homo sapien
tgggtgaagaactgcgagaactccc

SEQ ID NO: 647131 - DNA, 25 bp, Homo sapien
gtgggtgaagaactgcgagaactcc

SEQ ID NO: 647132 - DNA, 25 bp, Homo sapien
agaggacgtcccagctagcgtacgg

SEQ ID NO: 647133 - DNA, 25 bp, Homo sapien
cggacagcgtgggaaagagggacac

SEQ ID NO: 647134 - DNA, 25 bp, Homo sapien
ctagagcgaccaagactagggaact

SEQ ID NO: 647135 - DNA, 25 bp, Homo sapien
tctcggacccggagaggacgtccca

SEQ ID NO: 647136 - DNA, 25 bp, Homo sapien
ttcactgcaccggaagtagtcaccc

SEQ ID NO: 647137 - DNA, 25 bp, Homo sapien
gagccttcactgcaccggaagtagt

SEQ ID NO: 647138 - DNA, 25 bp, Homo sapien
gccttcactgcaccggaagtagtca

SEQ ID NO: 647139 - DNA, 25 bp, Homo sapien
cgagccttcactgcaccggaagtag

SEQ ID NO: 647140 - DNA, 25 bp, Homo sapien
gggcagccaacctatctgtcttctt

SEQ ID NO: 647141 - DNA, 25 bp, Homo sapien
aaacacattttatccgcaagcctgg

SEQ ID NO: 647142 - DNA, 25 bp, Homo sapien
ggaccaatcgagctgtataaacaca

SEQ ID NO: 647143 - DNA, 25 bp, Homo sapien
gctccttctggaccaatcgagctgt

SEQ ID NO: 647144 - DNA, 25 bp, Homo sapien
caccaatgcttagcccaatctgtct

SEQ ID NO: 647145 - DNA, 25 bp, Homo sapien
ccaatctgtctgtcaagaacatgta

SEQ ID NO: 647146 - DNA, 25 bp, Homo sapien
tctgtctgtcaagaacatgtaccat

SEQ ID NO: 647147 - DNA, 25 bp, Homo sapien
atttcaccaatgcttagcccaatct

SEQ ID NO: 647148 - DNA, 25 bp, Homo sapien
taatcactccgaataatgagcctgg

SEQ ID NO: 647149 - DNA, 25 bp, Homo sapien
tgagcctggacttagaacaagggca

SEQ ID NO: 647150 - DNA, 25 bp, Homo sapien
cctggcacaccatgcagaccattga

SEQ ID NO: 647151 - DNA, 25 bp, Homo sapien
tgccttcttgccacacaatagctgt

SEQ ID NO: 647152 - DNA, 25 bp, Homo sapien
caaaaacccagtagcccaaaatgag

SEQ ID NO: 647153 - DNA, 25 bp, Homo sapien
tataaacttagcaaatgacctaggc

SEQ ID NO: 647154 - DNA, 25 bp, Homo sapien
caactggaactcatatatgggaacg

SEQ ID NO: 647155 - DNA, 25 bp, Homo sapien
gagtatcaagcaaaccctaacacct

SEQ ID NO: 647156 - DNA, 25 bp, Homo sapien
ccagagagtactttgagatgcataa

SEQ ID NO: 647157 - DNA, 25 bp, Homo sapien
tacgagcaatgcaactctagaactg

SEQ ID NO: 647158 - DNA, 25 bp, Homo sapien
cttggcttgttatacgcacgcgtgc

SEQ ID NO: 647159 - DNA, 25 bp, Homo sapien
gagatccaagagtgttaaggcctta

SEQ ID NO: 647160 - DNA, 25 bp, Homo sapien
gacttccatcctttatggctagaaa

SEQ ID NO: 647161 - DNA, 25 bp, Homo sapien
gatactgctctatttttacacagaa

SEQ ID NO: 647162 - DNA, 25 bp, Homo sapien
gtcagtcatccacaattaagtacaa

SEQ ID NO: 647163 - DNA, 25 bp, Homo sapien
ttatttaaacatgcctcctgcttcc

SEQ ID NO: 647164 - DNA, 25 bp, Homo sapien
aggaaaagatgtattcagttcaaaa

SEQ ID NO: 647165 - DNA, 25 bp, Homo sapien
gaaaagatgtattcagttcaaaaat

SEQ ID NO: 647166 - DNA, 25 bp, Homo sapien
ggaaaagatgtattcagttcaaaaa

SEQ ID NO: 647167 - DNA, 25 bp, Homo sapien
caggatcaatggacttcctttgtga

SEQ ID NO: 647168 - DNA, 25 bp, Homo sapien
tagatttaatcaacattgacaaagc

SEQ ID NO: 647169 - DNA, 25 bp, Homo sapien
tccgttctctttgccgggccttctc

SEQ ID NO: 647170 - DNA, 25 bp, Homo sapien
gcctgaaaccgtgcatcgttaacat

SEQ ID NO: 647171 - DNA, 25 bp, Homo sapien
ctttaagaggctatgcctggtgtct

SEQ ID NO: 647172 - DNA, 25 bp, Homo sapien
ttcaattccagctttaagaggctat

SEQ ID NO: 647173 - DNA, 25 bp, Homo sapien
caagggtaactttgactatgctcaa

SEQ ID NO: 647174 - DNA, 25 bp, Homo sapien
ggctatgcctggtgtctatggttac

SEQ ID NO: 647175 - DNA, 25 bp, Homo sapien
tcgtcctcatccatcataagcaaag

SEQ ID NO: 647176 - DNA, 25 bp, Homo sapien
agtgtttcttactgtcctcgtcctc

SEQ ID NO: 647177 - DNA, 25 bp, Homo sapien
gtgtttcttactgtcctcgtcctca

SEQ ID NO: 647178 - DNA, 25 bp, Homo sapien
tcctcgtcctcatccatcataagca

SEQ ID NO: 647179 - DNA, 25 bp, Homo sapien
tggagatgtgccatcttttgcagat

SEQ ID NO: 647180 - DNA, 25 bp, Homo sapien
cttcttctggagatgtgccatcttt

SEQ ID NO: 647181 - DNA, 25 bp, Homo sapien
tcttctggagatgtgccatcttttg

SEQ ID NO: 647182 - DNA, 25 bp, Homo sapien
ttctggagatgtgccatcttttgca

SEQ ID NO: 647183 - DNA, 25 bp, Homo sapien
gagaaacacccaatactgccctgct

SEQ ID NO: 647184 - DNA, 25 bp, Homo sapien
gaagactcgatgaagagaaacaccc

SEQ ID NO: 647185 - DNA, 25 bp, Homo sapien
tgaactgccgtgaagactcgatgaa

SEQ ID NO: 647186 - DNA, 25 bp, Homo sapien
ccaagctgtactgctgagtgaactg

SEQ ID NO: 647187 - DNA, 25 bp, Homo sapien
gaaaactacagatatgagctggctt

SEQ ID NO: 647188 - DNA, 25 bp, Homo sapien
aaaactacagatatgagctggctta

SEQ ID NO: 647189 - DNA, 25 bp, Homo sapien
aaactacagatatgagctggcttac

SEQ ID NO: 647190 - DNA, 25 bp, Homo sapien
acttcttcagcaaagtatgggtcat

SEQ ID NO: 647191 - DNA, 25 bp, Homo sapien
tatttgtttaacttcttcagcaaag

SEQ ID NO: 647192 - DNA, 25 bp, Homo sapien
taacttcttcagcaaagtatgggtc

SEQ ID NO: 647193 - DNA, 25 bp, Homo sapien
gtttaacttcttcagcaaagtatgg

SEQ ID NO: 647194 - DNA, 25 bp, Homo sapien
tcaaatcaacatcagagggaagttc

SEQ ID NO: 647195 - DNA, 25 bp, Homo sapien
tcttcactggcctcttcagcaagag

SEQ ID NO: 647196 - DNA, 25 bp, Homo sapien
cagagggaagttcctcttcactggc

SEQ ID NO: 647197 - DNA, 25 bp, Homo sapien
ctcttcactggcctcttcagcaaga

SEQ ID NO: 647198 - DNA, 25 bp, Homo sapien
acagatggaaagtatggcataattt

SEQ ID NO: 647199 - DNA, 25 bp, Homo sapien
cagatggaaagtatggcataatttc

SEQ ID NO: 647200 - DNA, 25 bp, Homo sapien
ttgggatgataacaaggcctacttc

SEQ ID NO: 647201 - DNA, 25 bp, Homo sapien
ttgaagtggctctggactgtgacca

SEQ ID NO: 647202 - DNA, 25 bp, Homo sapien
taatggattccaagcacctggtacc

SEQ ID NO: 647203 - DNA, 25 bp, Homo sapien
tgaccaggctttgtacaccattatg

SEQ ID NO: 647204 - DNA, 25 bp, Homo sapien
tccaatttgtttttgaccatctctt

SEQ ID NO: 647205 - DNA, 25 bp, Homo sapien
ccttccaatttgtttttgaccatct

SEQ ID NO: 647206 - DNA, 25 bp, Homo sapien
tcttcttctctaaaaattgttccca

SEQ ID NO: 647207 - DNA, 25 bp, Homo sapien
cagtttatcctttccttccaatttg

SEQ ID NO: 647208 - DNA, 25 bp, Homo sapien
tatggactctaacactgtactggaa

SEQ ID NO: 647209 - DNA, 25 bp, Homo sapien
aaacttgcatccaatgttcaggagg

SEQ ID NO: 647210 - DNA, 25 bp, Homo sapien
tgaatcaccatgatgctaaggaggg

SEQ ID NO: 647211 - DNA, 25 bp, Homo sapien
taggtcagcacacaatcagttcagt

SEQ ID NO: 647212 - DNA, 25 bp, Homo sapien
gcacaagataaaatcaggtccctac

SEQ ID NO: 647213 - DNA, 25 bp, Homo sapien
caactcaaggacttaaatgtcccaa

SEQ ID NO: 647214 - DNA, 25 bp, Homo sapien
aaaatcaaagggaacattcttctca

SEQ ID NO: 647215 - DNA, 25 bp, Homo sapien
attaactataaaagataaatctgac

SEQ ID NO: 647216 - DNA, 25 bp, Homo sapien
tatagtctagaaacggtggctacac

SEQ ID NO: 647217 - DNA, 25 bp, Homo sapien
tggctacacatgcaaacagcgggaa

SEQ ID NO: 647218 - DNA, 25 bp, Homo sapien
gaaaagtgacagcttactagccaga

SEQ ID NO: 647219 - DNA, 25 bp, Homo sapien
gagttctgtcaaaataacacacgga

SEQ ID NO: 647220 - DNA, 25 bp, Homo sapien
gagctgcctgtatttagcaatttgt

SEQ ID NO: 647221 - DNA, 25 bp, Homo sapien
ttttcttgaataacctgcaagagct

SEQ ID NO: 647222 - DNA, 25 bp, Homo sapien
tcttgaataacctgcaagagctgcc

SEQ ID NO: 647223 - DNA, 25 bp, Homo sapien
tcatcatccttctgacttttctttg

SEQ ID NO: 647224 - DNA, 25 bp, Homo sapien
tgatcagtctcatcccaagtgattt

SEQ ID NO: 647225 - DNA, 25 bp, Homo sapien
aggcttgaaaatccatgtccaaaag

SEQ ID NO: 647226 - DNA, 25 bp, Homo sapien
ttcactagaggaagctaagtaggct

SEQ ID NO: 647227 - DNA, 25 bp, Homo sapien
taaacttcctgttgagcattgtaat

SEQ ID NO: 647228 - DNA, 25 bp, Homo sapien
ttctgaggctacatccttaggctca

SEQ ID NO: 647229 - DNA, 25 bp, Homo sapien
taatagtacttcagtcgtttgaatt

SEQ ID NO: 647230 - DNA, 25 bp, Homo sapien
atcacagtctactactgcataatag

SEQ ID NO: 647231 - DNA, 25 bp, Homo sapien
tagtacttcagtcgtttgaattgat

SEQ ID NO: 647232 - DNA, 25 bp, Homo sapien
tacttcagtcgtttgaattgataat

SEQ ID NO: 647233 - DNA, 25 bp, Homo sapien
taatagctctactggtccttgaact

SEQ ID NO: 647234 - DNA, 25 bp, Homo sapien
gaatacttaatagctctactggtcc

SEQ ID NO: 647235 - DNA, 25 bp, Homo sapien
gggcatcttcaggaatacttaatag

SEQ ID NO: 647236 - DNA, 25 bp, Homo sapien
cttcaggaatacttaatagctctac

SEQ ID NO: 647237 - DNA, 25 bp, Homo sapien
cttgacggaaaatattacacctcct

SEQ ID NO: 647238 - DNA, 25 bp, Homo sapien
tgaacagagccagcaaatcttttgc

SEQ ID NO: 647239 - DNA, 25 bp, Homo sapien
tatcccagtccatgttacaaactgc

SEQ ID NO: 647240 - DNA, 25 bp, Homo sapien
tacaaactgctaatcgacgtgtaat

SEQ ID NO: 647241 - DNA, 25 bp, Homo sapien
cacgaggagcatctttatctaattc

SEQ ID NO: 647242 - DNA, 25 bp, Homo sapien
ccaagcatgctcaaaaccagattct

SEQ ID NO: 647243 - DNA, 25 bp, Homo sapien
ctcatcagcacgaggagcatcttta

SEQ ID NO: 647244 - DNA, 25 bp, Homo sapien
tctctccaagcatgctcaaaaccag

SEQ ID NO: 647245 - DNA, 25 bp, Homo sapien
tcttcagaactagtttctatatttc

SEQ ID NO: 647246 - DNA, 25 bp, Homo sapien
caaatctgccgtatcatcttcatct

SEQ ID NO: 647247 - DNA, 25 bp, Homo sapien
tcttcatcttcagaactagtttcta

SEQ ID NO: 647248 - DNA, 25 bp, Homo sapien
ctggaaacaaatctgccgtatcatc

SEQ ID NO: 647249 - DNA, 25 bp, Homo sapien
cttttatcatcatcctcactatcct

SEQ ID NO: 647250 - DNA, 25 bp, Homo sapien
tccatcgtcatcacctgaagctcta

SEQ ID NO: 647251 - DNA, 25 bp, Homo sapien
cttccatcgtcatcacctgaagctc

SEQ ID NO: 647252 - DNA, 25 bp, Homo sapien
ttatcatcatcctcactatcctcat

SEQ ID NO: 647253 - DNA, 25 bp, Homo sapien
ttcattttcagattcctcatcactt

SEQ ID NO: 647254 - DNA, 25 bp, Homo sapien
gattcctcatcacttcctatttcac

SEQ ID NO: 647255 - DNA, 25 bp, Homo sapien
tcctcatcacttcctatttcactaa

SEQ ID NO: 647256 - DNA, 25 bp, Homo sapien
ttttcagattcctcatcacttccta

SEQ ID NO: 647257 - DNA, 25 bp, Homo sapien
gctttctgaatcttcctccagagca

SEQ ID NO: 647258 - DNA, 25 bp, Homo sapien
ctttctgaatcttcctccagagcat

SEQ ID NO: 647259 - DNA, 25 bp, Homo sapien
catcactgtctcttgtcattatgag

SEQ ID NO: 647260 - DNA, 25 bp, Homo sapien
tctcttgtcattatgagttgaacca

SEQ ID NO: 647261 - DNA, 25 bp, Homo sapien
tgtctcttgtcattatgagttgaac

SEQ ID NO: 647262 - DNA, 25 bp, Homo sapien
cactgtctcttgtcattatgagttg

SEQ ID NO: 647263 - DNA, 25 bp, Homo sapien
cactcgattctgggagatttcacaa

SEQ ID NO: 647264 - DNA, 25 bp, Homo sapien
acaatttcagaggtgcctgagtcta

SEQ ID NO: 647265 - DNA, 25 bp, Homo sapien
aaattctttgctatccttcttcgga

SEQ ID NO: 647266 - DNA, 25 bp, Homo sapien
tgtttttcttcgagagaagagtctg

SEQ ID NO: 647267 - DNA, 25 bp, Homo sapien
tatagaattatctaaatcagtttta

SEQ ID NO: 647268 - DNA, 25 bp, Homo sapien
tctttttctcaactagattttttga

SEQ ID NO: 647269 - DNA, 25 bp, Homo sapien
caactagattttttgaatcgatttc

SEQ ID NO: 647270 - DNA, 25 bp, Homo sapien
ccttgtgattagccttcttggtttc

SEQ ID NO: 647271 - DNA, 25 bp, Homo sapien
cttgtgattagccttcttggtttct

SEQ ID NO: 647272 - DNA, 25 bp, Homo sapien
ttttcttttgactcaatgctttgct

SEQ ID NO: 647273 - DNA, 25 bp, Homo sapien
tttcttttgactcaatgctttgcta

SEQ ID NO: 647274 - DNA, 25 bp, Homo sapien
tcttttgactcaatgctttgctatc

SEQ ID NO: 647275 - DNA, 25 bp, Homo sapien
ttattttcttttgactcaatgcttt

SEQ ID NO: 647276 - DNA, 25 bp, Homo sapien
gtaaaaacgcttcaaatcctctgta

SEQ ID NO: 647277 - DNA, 25 bp, Homo sapien
gaaacatggctcgaaatctcttgtc

SEQ ID NO: 647278 - DNA, 25 bp, Homo sapien
tctgaaaggtcgtaaaaacgcttca

SEQ ID NO: 647279 - DNA, 25 bp, Homo sapien
catggctcgaaatctcttgtcaatt

SEQ ID NO: 647280 - DNA, 25 bp, Homo sapien
tttaattcttaatctcgaccaaatg

SEQ ID NO: 647281 - DNA, 25 bp, Homo sapien
taattcttaatctcgaccaaatgct

SEQ ID NO: 647282 - DNA, 25 bp, Homo sapien
cttaatctcgaccaaatgcttgaag

SEQ ID NO: 647283 - DNA, 25 bp, Homo sapien
attcttaatctcgaccaaatgcttg

SEQ ID NO: 647284 - DNA, 25 bp, Homo sapien
tctctaattcggagaacacagggct

SEQ ID NO: 647285 - DNA, 25 bp, Homo sapien
cctcaaccaggagaagtactgcatg

SEQ ID NO: 647286 - DNA, 25 bp, Homo sapien
gactgattcgagaagcgaccctgaa

SEQ ID NO: 647287 - DNA, 25 bp, Homo sapien
ccctgaaaaggatcgatgaagactg

SEQ ID NO: 647288 - DNA, 25 bp, Homo sapien
cgccctcaagcccttcatctcgagc

SEQ ID NO: 647289 - DNA, 25 bp, Homo sapien
gctcttcaactccagtccatcccca

SEQ ID NO: 647290 - DNA, 25 bp, Homo sapien
cctcaagcccttcatctcgagctct

SEQ ID NO: 647291 - DNA, 25 bp, Homo sapien
aagcccttcatctcgagctcttcaa

SEQ ID NO: 647292 - DNA, 25 bp, Homo sapien
gccgtaatggcaagcgaactaggcc

SEQ ID NO: 647293 - DNA, 25 bp, Homo sapien
tccgcgtgacgctccgccgtaatgg

SEQ ID NO: 647294 - DNA, 25 bp, Homo sapien
gaactaggccaaactacttgcacgt

SEQ ID NO: 647295 - DNA, 25 bp, Homo sapien
gcagtcctaccaagcctcacgtggg

SEQ ID NO: 647296 - DNA, 25 bp, Homo sapien
cactgctgatgtcgtgtacttagaa

SEQ ID NO: 647297 - DNA, 25 bp, Homo sapien
ttgtaaggcatggtgcacgtactac

SEQ ID NO: 647298 - DNA, 25 bp, Homo sapien
tcgtgtacttagaagatgtgcgctc

SEQ ID NO: 647299 - DNA, 25 bp, Homo sapien
agatgtgcgctcatagccctttccc

SEQ ID NO: 647300 - DNA, 25 bp, Homo sapien
taacatctgtcagtattcactatat

SEQ ID NO: 647301 - DNA, 25 bp, Homo sapien
gctaacaataatatacctattactt

SEQ ID NO: 647302 - DNA, 25 bp, Homo sapien
tttgtatagtgaattaacatctgtc

SEQ ID NO: 647303 - DNA, 25 bp, Homo sapien
tggtctcaggaccccactacacact

SEQ ID NO: 647304 - DNA, 25 bp, Homo sapien
tatgtattcagtcttgcaacaaaca

SEQ ID NO: 647305 - DNA, 25 bp, Homo sapien
tgtgtgtctggtactatcctaggta

SEQ ID NO: 647306 - DNA, 25 bp, Homo sapien
ttttgccaatagtagcaatgctgca

SEQ ID NO: 647307 - DNA, 25 bp, Homo sapien
tatagacagtcatatgtattcacac

SEQ ID NO: 647308 - DNA, 25 bp, Homo sapien
ctgtttagcttccttgagcattggc

SEQ ID NO: 647309 - DNA, 25 bp, Homo sapien
tctgcctcttcagctaactgtttag

SEQ ID NO: 647310 - DNA, 25 bp, Homo sapien
tgtttagcttccttgagcattggca

SEQ ID NO: 647311 - DNA, 25 bp, Homo sapien
ataaccagggttccaacagccccag

SEQ ID NO: 647312 - DNA, 25 bp, Homo sapien
tgcaataaccagggttccaacagcc

SEQ ID NO: 647313 - DNA, 25 bp, Homo sapien
ctgcaataaccagggttccaacagc

SEQ ID NO: 647314 - DNA, 25 bp, Homo sapien
gcaataaccagggttccaacagccc

SEQ ID NO: 647315 - DNA, 25 bp, Homo sapien
cacggcacagcaggagaccggaaga

SEQ ID NO: 647316 - DNA, 25 bp, Homo sapien
agcacggcacagcaggagaccggaa

SEQ ID NO: 647317 - DNA, 25 bp, Homo sapien
tgtgagcacggcacagcaggagacc

SEQ ID NO: 647318 - DNA, 25 bp, Homo sapien
cacagcaggagaccggaagaacagg

SEQ ID NO: 647319 - DNA, 25 bp, Homo sapien
tctccattccaaagacctccagtga

SEQ ID NO: 647320 - DNA, 25 bp, Homo sapien
aaaggtatgaaggttctcatggtcc

SEQ ID NO: 647321 - DNA, 25 bp, Homo sapien
caaagacctccagtgaggagtcctt

SEQ ID NO: 647322 - DNA, 25 bp, Homo sapien
gagtccttcacaaagtccagagtca

SEQ ID NO: 647323 - DNA, 25 bp, Homo sapien
gctgtctgtgtggtggaacaggtgg

SEQ ID NO: 647324 - DNA, 25 bp, Homo sapien
gaacaggtggtatcaggaaagactt

SEQ ID NO: 647325 - DNA, 25 bp, Homo sapien
gagttccaaggaaagtgagtgctgt

SEQ ID NO: 647326 - DNA, 25 bp, Homo sapien
aaggaaagtgagtgctgtctgtgtg

SEQ ID NO: 647327 - DNA, 25 bp, Homo sapien
tcatcagctagcatcgatactacga

SEQ ID NO: 647328 - DNA, 25 bp, Homo sapien
tctagaggcggaaactgttcatcag

SEQ ID NO: 647329 - DNA, 25 bp, Homo sapien
gatactacgatcctgcttttaaata

SEQ ID NO: 647330 - DNA, 25 bp, Homo sapien
ctgctcgcatctgcgtttcttctag

SEQ ID NO: 647331 - DNA, 25 bp, Homo sapien
cttcacacatctgcatttcttcagt

SEQ ID NO: 647332 - DNA, 25 bp, Homo sapien
ccttggagtgaactgattcccgtga

SEQ ID NO: 647333 - DNA, 25 bp, Homo sapien
tatttagtggggataccttggagtg

SEQ ID NO: 647334 - DNA, 25 bp, Homo sapien
gggataccttggagtgaactgattc

SEQ ID NO: 647335 - DNA, 25 bp, Homo sapien
gagtgaactgattcccgtgagcagg

SEQ ID NO: 647336 - DNA, 25 bp, Homo sapien
caatggtgttgtccagtttcagcca

SEQ ID NO: 647337 - DNA, 25 bp, Homo sapien
taagtcccagtgtggtccaatggtg

SEQ ID NO: 647338 - DNA, 25 bp, Homo sapien
caaataagtcccagtgtggtccaat

SEQ ID NO: 647339 - DNA, 25 bp, Homo sapien
tcagccagttccatctcgttgtgaa

SEQ ID NO: 647340 - DNA, 25 bp, Homo sapien
ttcatgacggcaaagagcacaggta

SEQ ID NO: 647341 - DNA, 25 bp, Homo sapien
gactcgtttgagcagccatgtcgta

SEQ ID NO: 647342 - DNA, 25 bp, Homo sapien
caggatatcccggagcaaatgcgta

SEQ ID NO: 647343 - DNA, 25 bp, Homo sapien
catgtcgtacaatcttctggccaag

SEQ ID NO: 647344 - DNA, 25 bp, Homo sapien
tatccattgtctttaaacaggcctg

SEQ ID NO: 647345 - DNA, 25 bp, Homo sapien
gttgtcatatgtttctcgtactcca

SEQ ID NO: 647346 - DNA, 25 bp, Homo sapien
taaaaaggttgtcatatgtttctcg

SEQ ID NO: 647347 - DNA, 25 bp, Homo sapien
ttctgccatactttagaacagcttt

SEQ ID NO: 647348 - DNA, 25 bp, Homo sapien
atatttttgaacaggacctggcagt

SEQ ID NO: 647349 - DNA, 25 bp, Homo sapien
gacctggcagtgctgattcccctac

SEQ ID NO: 647350 - DNA, 25 bp, Homo sapien
ggacctggcagtgctgattccccta

SEQ ID NO: 647351 - DNA, 25 bp, Homo sapien
caaaaatatttttgaacaggacctg

SEQ ID NO: 647352 - DNA, 25 bp, Homo sapien
ctttgtgatgcctaagccgtgttca

SEQ ID NO: 647353 - DNA, 25 bp, Homo sapien
gtggctgctgtttgatagtctttct

SEQ ID NO: 647354 - DNA, 25 bp, Homo sapien
cttgcgcgttgtggtatttgttggc

SEQ ID NO: 647355 - DNA, 25 bp, Homo sapien
tacatataagccagattgaacatgg

SEQ ID NO: 647356 - DNA, 25 bp, Homo sapien
tggcagctcgattccataggagaag

SEQ ID NO: 647357 - DNA, 25 bp, Homo sapien
gctcgattccataggagaagcgcca

SEQ ID NO: 647358 - DNA, 25 bp, Homo sapien
gattccataggagaagcgccattgg

SEQ ID NO: 647359 - DNA, 25 bp, Homo sapien
cttgaatggcagctcgattccatag

SEQ ID NO: 647360 - DNA, 25 bp, Homo sapien
gagaagaatctatatcaccatcctt

SEQ ID NO: 647361 - DNA, 25 bp, Homo sapien
ccttataggcaaagtaagctgtcag

SEQ ID NO: 647362 - DNA, 25 bp, Homo sapien
gcagtgcatactgaacaagagaaga

SEQ ID NO: 647363 - DNA, 25 bp, Homo sapien
agcccagtggcctagttcacagaca

SEQ ID NO: 647364 - DNA, 25 bp, Homo sapien
ccacagcagttctgcatgatcttac

SEQ ID NO: 647365 - DNA, 25 bp, Homo sapien
tccacagcagttctgcatgatctta

SEQ ID NO: 647366 - DNA, 25 bp, Homo sapien
ctccacagcagttctgcatgatctt

SEQ ID NO: 647367 - DNA, 25 bp, Homo sapien
tataatccttccatattccagagcc

SEQ ID NO: 647368 - DNA, 25 bp, Homo sapien
gcccactctgagatgccaggtaaaa

SEQ ID NO: 647369 - DNA, 25 bp, Homo sapien
cttggccagataataaatggcaagg

SEQ ID NO: 647370 - DNA, 25 bp, Homo sapien
tatttgaaggcaagtttataatcct

SEQ ID NO: 647371 - DNA, 25 bp, Homo sapien
ccctttttccgcagctttctgaaag

SEQ ID NO: 647372 - DNA, 25 bp, Homo sapien
gaagcctaactggaactgtgcgtcg

SEQ ID NO: 647373 - DNA, 25 bp, Homo sapien
agtagtacatgaagcctaactggaa

SEQ ID NO: 647374 - DNA, 25 bp, Homo sapien
tggaactgtgcgtcgggccaccctt

SEQ ID NO: 647375 - DNA, 25 bp, Homo sapien
gaccaagcccatgaaggccgattgc

SEQ ID NO: 647376 - DNA, 25 bp, Homo sapien
tttccatgaaagtaaagaagaccaa

SEQ ID NO: 647377 - DNA, 25 bp, Homo sapien
aaagtaaagaagaccaagcccatga

SEQ ID NO: 647378 - DNA, 25 bp, Homo sapien
taaagaagaccaagcccatgaaggc

SEQ ID NO: 647379 - DNA, 25 bp, Homo sapien
aaagtacttgaaggcagtagcgtta

SEQ ID NO: 647380 - DNA, 25 bp, Homo sapien
ttattttgcggcacggcagcattcc

SEQ ID NO: 647381 - DNA, 25 bp, Homo sapien
cagtagcgttattttgcggcacggc

SEQ ID NO: 647382 - DNA, 25 bp, Homo sapien
cttgaaggcagtagcgttattttgc

SEQ ID NO: 647383 - DNA, 25 bp, Homo sapien
ggcatttgcactcccggcctttgct

SEQ ID NO: 647384 - DNA, 25 bp, Homo sapien
tgctgcctttaagaagtagtgtaat

SEQ ID NO: 647385 - DNA, 25 bp, Homo sapien
atggcatttgcactcccggcctttg

SEQ ID NO: 647386 - DNA, 25 bp, Homo sapien
tggcatttgcactcccggcctttgc

SEQ ID NO: 647387 - DNA, 25 bp, Homo sapien
acctttcctgccaattagatgtaat

SEQ ID NO: 647388 - DNA, 25 bp, Homo sapien
tagtaatcctgatctagacctttcc

SEQ ID NO: 647389 - DNA, 25 bp, Homo sapien
ttagatgtaattgtccaagagagac

SEQ ID NO: 647390 - DNA, 25 bp, Homo sapien
gtagtaatcctgatctagacctttc

SEQ ID NO: 647391 - DNA, 25 bp, Homo sapien
tatgtcccaatccaaaatctcactg

SEQ ID NO: 647392 - DNA, 25 bp, Homo sapien
aatttatagtattggtatatgtccc

SEQ ID NO: 647393 - DNA, 25 bp, Homo sapien
aatctcactgttagaactcagattt

SEQ ID NO: 647394 - DNA, 25 bp, Homo sapien
tcaggtctttccgttagtctcactt

SEQ ID NO: 647395 - DNA, 25 bp, Homo sapien
ctgtgaataaaaacaagccagagaa

SEQ ID NO: 647396 - DNA, 25 bp, Homo sapien
tgaataaaaacaagccagagaatag

SEQ ID NO: 647397 - DNA, 25 bp, Homo sapien
gtgaataaaaacaagccagagaata

SEQ ID NO: 647398 - DNA, 25 bp, Homo sapien
tgtgaataaaaacaagccagagaat

SEQ ID NO: 647399 - DNA, 25 bp, Homo sapien
cacaattctgtagaacattgattcc

SEQ ID NO: 647400 - DNA, 25 bp, Homo sapien
taatctgccactttcttgtaataac

SEQ ID NO: 647401 - DNA, 25 bp, Homo sapien
tgattcccgacaaatatctgtaccc

SEQ ID NO: 647402 - DNA, 25 bp, Homo sapien
ttgtaataacttagggcaacttcac

SEQ ID NO: 647403 - DNA, 25 bp, Homo sapien
ttccaaaggtgtaatatatcagtgc

SEQ ID NO: 647404 - DNA, 25 bp, Homo sapien
cttccaaaggtgtaatatatcagtg

SEQ ID NO: 647405 - DNA, 25 bp, Homo sapien
ttccataagaagacaaaaatcctaa

SEQ ID NO: 647406 - DNA, 25 bp, Homo sapien
tccattcctattccataagaagaca

SEQ ID NO: 647407 - DNA, 25 bp, Homo sapien
cttagcttgatcatattccattcct

SEQ ID NO: 647408 - DNA, 25 bp, Homo sapien
tattccataagaagacaaaaatcct

SEQ ID NO: 647409 - DNA, 25 bp, Homo sapien
agctggcacaaacggcccaagaaga

SEQ ID NO: 647410 - DNA, 25 bp, Homo sapien
caatacttccagcagtgcgggcagg

SEQ ID NO: 647411 - DNA, 25 bp, Homo sapien
cagcagtgcgggcaggatttctgta

SEQ ID NO: 647412 - DNA, 25 bp, Homo sapien
tctgtaccaagctggcacaaacggc

SEQ ID NO: 647413 - DNA, 25 bp, Homo sapien
cagcagagctggaatactattgctc

SEQ ID NO: 647414 - DNA, 25 bp, Homo sapien
catgcaaacatgtcaccctaagata

SEQ ID NO: 647415 - DNA, 25 bp, Homo sapien
ccctagactgggttcatgcagcaga

SEQ ID NO: 647416 - DNA, 25 bp, Homo sapien
caggatggagctatttaaggtttca

SEQ ID NO: 647417 - DNA, 25 bp, Homo sapien
ttgcacgccaaaatttccaaatagc

SEQ ID NO: 647418 - DNA, 25 bp, Homo sapien
gactcatataattggatagctgctg

SEQ ID NO: 647419 - DNA, 25 bp, Homo sapien
gggctttacatgatccttctttagc

SEQ ID NO: 647420 - DNA, 25 bp, Homo sapien
tagcaaagcgtcagccattttctcc

SEQ ID NO: 647421 - DNA, 25 bp, Homo sapien
gctgctttggcaaaaagtaggtagg

SEQ ID NO: 647422 - DNA, 25 bp, Homo sapien
tgctttggcaaaaagtaggtaggct

SEQ ID NO: 647423 - DNA, 25 bp, Homo sapien
ctgctttggcaaaaagtaggtaggc

SEQ ID NO: 647424 - DNA, 25 bp, Homo sapien
agctgctttggcaaaaagtaggtag

SEQ ID NO: 647425 - DNA, 25 bp, Homo sapien
acagagaaacatccaggtaggcatt

SEQ ID NO: 647426 - DNA, 25 bp, Homo sapien
cttgatgtaacacacctagttgggc

SEQ ID NO: 647427 - DNA, 25 bp, Homo sapien
tgaaggttcccacactaatggatgg

SEQ ID NO: 647428 - DNA, 25 bp, Homo sapien
aaactgaatgacacccaggtaggca

SEQ ID NO: 647429 - DNA, 25 bp, Homo sapien
agagtgattttgtcccattgggcca

SEQ ID NO: 647430 - DNA, 25 bp, Homo sapien
tttttggcttttagactgctggaga

SEQ ID NO: 647431 - DNA, 25 bp, Homo sapien
tttggcttttagactgctggagaac

SEQ ID NO: 647432 - DNA, 25 bp, Homo sapien
tgtttttggcttttagactgctgga

SEQ ID NO: 647433 - DNA, 25 bp, Homo sapien
tggcttttagactgctggagaacct

SEQ ID NO: 647434 - DNA, 25 bp, Homo sapien
cttaaatagctggtctccttcatct

SEQ ID NO: 647435 - DNA, 25 bp, Homo sapien
ttaaatagctggtctccttcatctg

SEQ ID NO: 647436 - DNA, 25 bp, Homo sapien
ttgttctctaatccttggacttaag

SEQ ID NO: 647437 - DNA, 25 bp, Homo sapien
tgttctctaatccttggacttaagt

SEQ ID NO: 647438 - DNA, 25 bp, Homo sapien
gagaagatgagttatcctaggaaca

SEQ ID NO: 647439 - DNA, 25 bp, Homo sapien
ttaatggtcaccttagacattgctg

SEQ ID NO: 647440 - DNA, 25 bp, Homo sapien
taacttttcagtttagcgcagccaa

SEQ ID NO: 647441 - DNA, 25 bp, Homo sapien
taaaaatatcagttggaatccccca

SEQ ID NO: 647442 - DNA, 25 bp, Homo sapien
tctgtagggcaatgtctttccatcc

SEQ ID NO: 647443 - DNA, 25 bp, Homo sapien
ctagttctgtagggcaatgtctttc

SEQ ID NO: 647444 - DNA, 25 bp, Homo sapien
tagggcaatgtctttccatccttga

SEQ ID NO: 647445 - DNA, 25 bp, Homo sapien
acttggcatcagctgacaccaggct

SEQ ID NO: 647446 - DNA, 25 bp, Homo sapien
tctttgttccaatatgtgtgataaa

SEQ ID NO: 647447 - DNA, 25 bp, Homo sapien
attcttattttacgttgattcttct

SEQ ID NO: 647448 - DNA, 25 bp, Homo sapien
acattactagatgttctttgttcca

SEQ ID NO: 647449 - DNA, 25 bp, Homo sapien
aatattgtttgatttcgttcactga

SEQ ID NO: 647450 - DNA, 25 bp, Homo sapien
gaccaacaactctgggaatgagctg

SEQ ID NO: 647451 - DNA, 25 bp, Homo sapien
gacacgaccaacaactctgggaatg

SEQ ID NO: 647452 - DNA, 25 bp, Homo sapien
taaaagacacgaccaacaactctgg

SEQ ID NO: 647453 - DNA, 25 bp, Homo sapien
acagaaataaaagacacgaccaaca

SEQ ID NO: 647454 - DNA, 25 bp, Homo sapien
cggcctcgtaagaacaggttgatgg

SEQ ID NO: 647455 - DNA, 25 bp, Homo sapien
ttgatggcccctgcagaaggtcacc

SEQ ID NO: 647456 - DNA, 25 bp, Homo sapien
ccctgcagaaggtcaccggcattga

SEQ ID NO: 647457 - DNA, 25 bp, Homo sapien
gaacaggttgatggcccctgcagaa

SEQ ID NO: 647458 - DNA, 25 bp, Homo sapien
cttttattatgttcctctgctttga

SEQ ID NO: 647459 - DNA, 25 bp, Homo sapien
ctgtgtggtgacatttctttccttt

SEQ ID NO: 647460 - DNA, 25 bp, Homo sapien
gtcttttattatgttcctctgcttt

SEQ ID NO: 647461 - DNA, 25 bp, Homo sapien
tttattatgttcctctgctttgata

SEQ ID NO: 647462 - DNA, 25 bp, Homo sapien
ttgtccctggtgttgtctaactcca

SEQ ID NO: 647463 - DNA, 25 bp, Homo sapien
cataggctgccacttaagaagtaaa

SEQ ID NO: 647464 - DNA, 25 bp, Homo sapien
tcaggaagtaggaagggatactgat

SEQ ID NO: 647465 - DNA, 25 bp, Homo sapien
tactgattcccacataggctgccac

SEQ ID NO: 647466 - DNA, 25 bp, Homo sapien
ctggcatgatgtgagggttgagctg

SEQ ID NO: 647467 - DNA, 25 bp, Homo sapien
cttcccattctgaaggacacagctt

SEQ ID NO: 647468 - DNA, 25 bp, Homo sapien
cccattctgaaggacacagcttttc

SEQ ID NO: 647469 - DNA, 25 bp, Homo sapien
cattctgaaggacacagcttttctc

SEQ ID NO: 647470 - DNA, 25 bp, Homo sapien
gctcttcccattctgaaggacacag

SEQ ID NO: 647471 - DNA, 25 bp, Homo sapien
gccttttcccaatttagtcagtgag

SEQ ID NO: 647472 - DNA, 25 bp, Homo sapien
tttcccaatttagtcagtgagttgc

SEQ ID NO: 647473 - DNA, 25 bp, Homo sapien
tggccttttcccaatttagtcagtg

SEQ ID NO: 647474 - DNA, 25 bp, Homo sapien
ccaatttagtcagtgagttgctcat

SEQ ID NO: 647475 - DNA, 25 bp, Homo sapien
ctgtcaaggggatcatcactttctc

SEQ ID NO: 647476 - DNA, 25 bp, Homo sapien
cctgtcaaggggatcatcactttct

SEQ ID NO: 647477 - DNA, 25 bp, Homo sapien
tgcccctgtcaaggggatcatcact

SEQ ID NO: 647478 - DNA, 25 bp, Homo sapien
cccctgtcaaggggatcatcacttt

SEQ ID NO: 647479 - DNA, 25 bp, Homo sapien
caagggccatgccaatattctctga

SEQ ID NO: 647480 - DNA, 25 bp, Homo sapien
tctgaattgttcaaactgtagaata

SEQ ID NO: 647481 - DNA, 25 bp, Homo sapien
gaattgttcaaactgtagaatatgt

SEQ ID NO: 647482 - DNA, 25 bp, Homo sapien
ttgtgagtcacccttgtgcaagggc

SEQ ID NO: 647483 - DNA, 25 bp, Homo sapien
atcagtcctgtcataacacctggtc

SEQ ID NO: 647484 - DNA, 25 bp, Homo sapien
tgtcataacacctggtctctcctgc

SEQ ID NO: 647485 - DNA, 25 bp, Homo sapien
tcataacacctggtctctcctgctt

SEQ ID NO: 647486 - DNA, 25 bp, Homo sapien
gtcctgtcataacacctggtctctc

SEQ ID NO: 647487 - DNA, 25 bp, Homo sapien
agtgagagtgctgaattctaaccac

SEQ ID NO: 647488 - DNA, 25 bp, Homo sapien
tgggctgtggcagtgagagtgctga

SEQ ID NO: 647489 - DNA, 25 bp, Homo sapien
taacacaggcagaaactaggtgatt

SEQ ID NO: 647490 - DNA, 25 bp, Homo sapien
ggcagaaactaggtgattggcccaa

SEQ ID NO: 647491 - DNA, 25 bp, Homo sapien
attaacagagacaagggcttcatct

SEQ ID NO: 647492 - DNA, 25 bp, Homo sapien
ttaacagagacaagggcttcatctt

SEQ ID NO: 647493 - DNA, 25 bp, Homo sapien
tccctgaggcggctttccgctagct

SEQ ID NO: 647494 - DNA, 25 bp, Homo sapien
gacaattcgtgttgaccctcggtct

SEQ ID NO: 647495 - DNA, 25 bp, Homo sapien
cagttggagtgagcacggacaattc

SEQ ID NO: 647496 - DNA, 25 bp, Homo sapien
gctagctcgcctgtcacttggcgca

SEQ ID NO: 647497 - DNA, 25 bp, Homo sapien
aggccagcggtaagcgcggtccacc

SEQ ID NO: 647498 - DNA, 25 bp, Homo sapien
ctcaagtcttccaagaggccagcgg

SEQ ID NO: 647499 - DNA, 25 bp, Homo sapien
ttccaagaggccagcggtaagcgcg

SEQ ID NO: 647500 - DNA, 25 bp, Homo sapien
ctacaggccacgccctcaagtcttc

SEQ ID NO: 647501 - DNA, 25 bp, Homo sapien
agagcggcgggcagtgcagccaatg

SEQ ID NO: 647502 - DNA, 25 bp, Homo sapien
gtggctagaacacggagagcggcgg

SEQ ID NO: 647503 - DNA, 25 bp, Homo sapien
gcgtcgagcccgagcctgcgcctgc

SEQ ID NO: 647504 - DNA, 25 bp, Homo sapien
gcggcgctgcctagcggctggtagg

SEQ ID NO: 647505 - DNA, 25 bp, Homo sapien
ccgcggacaggtgcccgtcggcggg

SEQ ID NO: 647506 - DNA, 25 bp, Homo sapien
tgctgcgttcgcctcgcttgcggcg

SEQ ID NO: 647507 - DNA, 25 bp, Homo sapien
cccgggcgcggcacaagttcctctg

SEQ ID NO: 647508 - DNA, 25 bp, Homo sapien
cggcctgggtgtcccgcggacaggt

SEQ ID NO: 647509 - DNA, 25 bp, Homo sapien
ccaatcttgaatgagtgtcagtact

SEQ ID NO: 647510 - DNA, 25 bp, Homo sapien
gatgtttcatctcctactggaagcg

SEQ ID NO: 647511 - DNA, 25 bp, Homo sapien
tcagtctttcagcatgccagatgtt

SEQ ID NO: 647512 - DNA, 25 bp, Homo sapien
ggaagcgtggattcccctccatcct

SEQ ID NO: 647513 - DNA, 25 bp, Homo sapien
ttatattggcacacttttggactga

SEQ ID NO: 647514 - DNA, 25 bp, Homo sapien
ttctccacgtacagatggattctcc

SEQ ID NO: 647515 - DNA, 25 bp, Homo sapien
cttttggactgagagtggattattt

SEQ ID NO: 647516 - DNA, 25 bp, Homo sapien
ttattttttctccacgtacagatgg

SEQ ID NO: 647517 - DNA, 25 bp, Homo sapien
ctctgtaatatggttctagtaaatt

SEQ ID NO: 647518 - DNA, 25 bp, Homo sapien
taaatttccgatggccacagtttcc

SEQ ID NO: 647519 - DNA, 25 bp, Homo sapien
tctagtaaatttccgatggccacag

SEQ ID NO: 647520 - DNA, 25 bp, Homo sapien
taatatggttctagtaaatttccga

SEQ ID NO: 647521 - DNA, 25 bp, Homo sapien
gttttctctgtcttccctgcaggct

SEQ ID NO: 647522 - DNA, 25 bp, Homo sapien
tttctctgtcttccctgcaggcttc

SEQ ID NO: 647523 - DNA, 25 bp, Homo sapien
tgttttctctgtcttccctgcaggc

SEQ ID NO: 647524 - DNA, 25 bp, Homo sapien
tctctgtcttccctgcaggcttcat

SEQ ID NO: 647525 - DNA, 25 bp, Homo sapien
ccacacttagaacaacccaatattt

SEQ ID NO: 647526 - DNA, 25 bp, Homo sapien
ctaatattatgggtagtaggtgtgt

SEQ ID NO: 647527 - DNA, 25 bp, Homo sapien
taagggttcatcaaacaggcctgcc

SEQ ID NO: 647528 - DNA, 25 bp, Homo sapien
tttcccaaagcactactaatattat

SEQ ID NO: 647529 - DNA, 25 bp, Homo sapien
tagtggttggccttgataagctgag

SEQ ID NO: 647530 - DNA, 25 bp, Homo sapien
tgtatgtcactgtagaatccactga

SEQ ID NO: 647531 - DNA, 25 bp, Homo sapien
tagctgtaggcttgggtagaattca

SEQ ID NO: 647532 - DNA, 25 bp, Homo sapien
gaagagaggctccacaatccagttg

SEQ ID NO: 647533 - DNA, 25 bp, Homo sapien
ttgaagtatttgactagggaatcca

SEQ ID NO: 647534 - DNA, 25 bp, Homo sapien
agtatttgactagggaatccacaga

SEQ ID NO: 647535 - DNA, 25 bp, Homo sapien
tatttgactagggaatccacagaca

SEQ ID NO: 647536 - DNA, 25 bp, Homo sapien
gaagtatttgactagggaatccaca

SEQ ID NO: 647537 - DNA, 25 bp, Homo sapien
tattgctttataagtagtgcaggta

SEQ ID NO: 647538 - DNA, 25 bp, Homo sapien
gtttctaacctaagccattatcctc

SEQ ID NO: 647539 - DNA, 25 bp, Homo sapien
tgcctcccatcctttataatatttt

SEQ ID NO: 647540 - DNA, 25 bp, Homo sapien
tagtgcaggtattcccaattcctgc

SEQ ID NO: 647541 - DNA, 25 bp, Homo sapien
tttatatgttctgacgcactctcag

SEQ ID NO: 647542 - DNA, 25 bp, Homo sapien
tgtaatacactgctggatgctgagg

SEQ ID NO: 647543 - DNA, 25 bp, Homo sapien
tatgccattaaagcagagttataac

SEQ ID NO: 647544 - DNA, 25 bp, Homo sapien
tacacctagggagagctacgtttct

SEQ ID NO: 647545 - DNA, 25 bp, Homo sapien
tcaaattaatattccatctgagaag

SEQ ID NO: 647546 - DNA, 25 bp, Homo sapien
caaattaatattccatctgagaagc

SEQ ID NO: 647547 - DNA, 25 bp, Homo sapien
ccaatttgtcatctgcctgtttggg

SEQ ID NO: 647548 - DNA, 25 bp, Homo sapien
tgataccgtattccagtgagcactg

SEQ ID NO: 647549 - DNA, 25 bp, Homo sapien
tgctgcccagcatttcagattggat

SEQ ID NO: 647550 - DNA, 25 bp, Homo sapien
aagtttctttcaggttgtaggtcag

SEQ ID NO: 647551 - DNA, 25 bp, Homo sapien
gggtcacagagctatgtctccagca

SEQ ID NO: 647552 - DNA, 25 bp, Homo sapien
taccaccctcaattgtggcaggaaa

SEQ ID NO: 647553 - DNA, 25 bp, Homo sapien
tagagggcccaaagacataattcag

SEQ ID NO: 647554 - DNA, 25 bp, Homo sapien
gctttccaagagataggcttcgtct

SEQ ID NO: 647555 - DNA, 25 bp, Homo sapien
tattcaaaggttagactgggctagg

SEQ ID NO: 647556 - DNA, 25 bp, Homo sapien
tgaagatgactgactcacgtggctg

SEQ ID NO: 647557 - DNA, 25 bp, Homo sapien
tgtgacctgggcttcttacagcctg

SEQ ID NO: 647558 - DNA, 25 bp, Homo sapien
acagcctgatgggtggattccaaaa

SEQ ID NO: 647559 - DNA, 25 bp, Homo sapien
ctgacgctggccgtagagtccttgc

SEQ ID NO: 647560 - DNA, 25 bp, Homo sapien
gtagagtccttgcaagcatccacca

SEQ ID NO: 647561 - DNA, 25 bp, Homo sapien
catccacagtattcacatcccttag

SEQ ID NO: 647562 - DNA, 25 bp, Homo sapien
tattcacatcccttagatcctctct

SEQ ID NO: 647563 - DNA, 25 bp, Homo sapien
cataatctgagaatgagatggcctc

SEQ ID NO: 647564 - DNA, 25 bp, Homo sapien
aatctgagaatgagatggcctccat

SEQ ID NO: 647565 - DNA, 25 bp, Homo sapien
ataatctgagaatgagatggcctcc

SEQ ID NO: 647566 - DNA, 25 bp, Homo sapien
taatctgagaatgagatggcctcca

SEQ ID NO: 647567 - DNA, 25 bp, Homo sapien
tatagttgcctgagacatgtacctg

SEQ ID NO: 647568 - DNA, 25 bp, Homo sapien
aaggagcctggattttgcaacatgc

SEQ ID NO: 647569 - DNA, 25 bp, Homo sapien
tctctctcaagaacaaaggcatgct

SEQ ID NO: 647570 - DNA, 25 bp, Homo sapien
gcagcagagtaatgtaatgagccca

SEQ ID NO: 647571 - DNA, 25 bp, Homo sapien
gagctttcaccaagattgtctcagg

SEQ ID NO: 647572 - DNA, 25 bp, Homo sapien
cagagtggcttacggtttacaaaga

SEQ ID NO: 647573 - DNA, 25 bp, Homo sapien
taatactctacatttgcagagtggc

SEQ ID NO: 647574 - DNA, 25 bp, Homo sapien
agtgtccactaggtttcaagcattg

SEQ ID NO: 647575 - DNA, 25 bp, Homo sapien
gttccaatttcccatgtgattggca

SEQ ID NO: 647576 - DNA, 25 bp, Homo sapien
gaagtaattgacgtttttgcttgag

SEQ ID NO: 647577 - DNA, 25 bp, Homo sapien
ttgacgtttttgcttgaggatgacc

SEQ ID NO: 647578 - DNA, 25 bp, Homo sapien
acagtcttgaagtaattgacgtttt

SEQ ID NO: 647579 - DNA, 25 bp, Homo sapien
tctctttggattcctcatgaaattg

SEQ ID NO: 647580 - DNA, 25 bp, Homo sapien
cttaaaaagtatcaggacagtggca

SEQ ID NO: 647581 - DNA, 25 bp, Homo sapien
caaaggatccagatggcaggaaaca

SEQ ID NO: 647582 - DNA, 25 bp, Homo sapien
tagggcctgccagctatcagtgaac

SEQ ID NO: 647583 - DNA, 25 bp, Homo sapien
gacaccagttgcaagactagtcagc

SEQ ID NO: 647584 - DNA, 25 bp, Homo sapien
aatacatgggacgtttaggactaat

SEQ ID NO: 647585 - DNA, 25 bp, Homo sapien
taacacaatcctgaaaaagcaagca

SEQ ID NO: 647586 - DNA, 25 bp, Homo sapien
catgggacgtttaggactaatgtgc

SEQ ID NO: 647587 - DNA, 25 bp, Homo sapien
gcaatttgctacttagtgatagtaa

SEQ ID NO: 647588 - DNA, 25 bp, Homo sapien
gcagtcctgattgttcgacacagca

SEQ ID NO: 647589 - DNA, 25 bp, Homo sapien
tggccaaagggcgtacaatgcactt

SEQ ID NO: 647590 - DNA, 25 bp, Homo sapien
ggatcaaggcacatacaagactggc

SEQ ID NO: 647591 - DNA, 25 bp, Homo sapien
aatacatgtagcgttggatcaaggc

SEQ ID NO: 647592 - DNA, 25 bp, Homo sapien
gatagttgctgtctcggaatgctcc

SEQ ID NO: 647593 - DNA, 25 bp, Homo sapien
cagcccaattttagtcccgatgagg

SEQ ID NO: 647594 - DNA, 25 bp, Homo sapien
tatagggtgaatcaggctccagggc

SEQ ID NO: 647595 - DNA, 25 bp, Homo sapien
caaaccccagggaattgtgctaagg

SEQ ID NO: 647596 - DNA, 25 bp, Homo sapien
tctttatacaaggtagcttccgtta

SEQ ID NO: 647597 - DNA, 25 bp, Homo sapien
tatacaaggtagcttccgttacttc

SEQ ID NO: 647598 - DNA, 25 bp, Homo sapien
tgaggtctttatacaaggtagcttc

SEQ ID NO: 647599 - DNA, 25 bp, Homo sapien
acaaggtagcttccgttacttcaga

SEQ ID NO: 647600 - DNA, 25 bp, Homo sapien
caagtaatcctatggcgtacacacc

SEQ ID NO: 647601 - DNA, 25 bp, Homo sapien
cagcatggtgggcaagctcattaaa

SEQ ID NO: 647602 - DNA, 25 bp, Homo sapien
tttgtacagtagctacatcctgagg

SEQ ID NO: 647603 - DNA, 25 bp, Homo sapien
tactatgtaggacacatggcttcct

SEQ ID NO: 647604 - DNA, 25 bp, Homo sapien
ttttcagaatgtctggtgcagtcac

SEQ ID NO: 647605 - DNA, 25 bp, Homo sapien
cagaatgtctggtgcagtcacgtta

SEQ ID NO: 647606 - DNA, 25 bp, Homo sapien
gtctggtgcagtcacgttatacaag

SEQ ID NO: 647607 - DNA, 25 bp, Homo sapien
cagtcacgttatacaagaacaggta

SEQ ID NO: 647608 - DNA, 25 bp, Homo sapien
aggataaaatttccaatgctaagta

SEQ ID NO: 647609 - DNA, 25 bp, Homo sapien
tagaggataaaatttccaatgctaa

SEQ ID NO: 647610 - DNA, 25 bp, Homo sapien
aaatagaggataaaatttccaatgc

SEQ ID NO: 647611 - DNA, 25 bp, Homo sapien
gaggataaaatttccaatgctaagt

SEQ ID NO: 647612 - DNA, 25 bp, Homo sapien
caagagttgtaagaacgagtaagat

SEQ ID NO: 647613 - DNA, 25 bp, Homo sapien
aactgggatattatccgtcagcata

SEQ ID NO: 647614 - DNA, 25 bp, Homo sapien
gatattatccgtcagcatagtgaat

SEQ ID NO: 647615 - DNA, 25 bp, Homo sapien
aaaccacgttttaccattgcagact

SEQ ID NO: 647616 - DNA, 25 bp, Homo sapien
ttattaagacaaggccaattccctg

SEQ ID NO: 647617 - DNA, 25 bp, Homo sapien
tacatcaggcatagcttccagggtg

SEQ ID NO: 647618 - DNA, 25 bp, Homo sapien
tcttgtgtccctaggcaggagatgc

SEQ ID NO: 647619 - DNA, 25 bp, Homo sapien
caagcactatactggtcggtgagac

SEQ ID NO: 647620 - DNA, 25 bp, Homo sapien
ttcattgctggcttgcacgcacata

SEQ ID NO: 647621 - DNA, 25 bp, Homo sapien
tttctcatagtatcaagtcgtttct

SEQ ID NO: 647622 - DNA, 25 bp, Homo sapien
tatattgcttgttgtggtgacagag

SEQ ID NO: 647623 - DNA, 25 bp, Homo sapien
caaacgttcctatttggatttctca

SEQ ID NO: 647624 - DNA, 25 bp, Homo sapien
ctagagagtaaaaccaagcaaactt

SEQ ID NO: 647625 - DNA, 25 bp, Homo sapien
agctctgcgtccagtccacacaaag

SEQ ID NO: 647626 - DNA, 25 bp, Homo sapien
gcaatcctatatacactgccgctat

SEQ ID NO: 647627 - DNA, 25 bp, Homo sapien
gaaaaagcaatcctatatacactgc

SEQ ID NO: 647628 - DNA, 25 bp, Homo sapien
cactgccgctatagctgtaattcca

SEQ ID NO: 647629 - DNA, 25 bp, Homo sapien
gagcgagggagagcattccagttta

SEQ ID NO: 647630 - DNA, 25 bp, Homo sapien
ttccagtttactgcacacagcccac

SEQ ID NO: 647631 - DNA, 25 bp, Homo sapien
ctgaggagtgagcgagggagagcat

SEQ ID NO: 647632 - DNA, 25 bp, Homo sapien
gagtgagcgagggagagcattccag

SEQ ID NO: 647633 - DNA, 25 bp, Homo sapien
tgatgtcatagatgggcaggactta

SEQ ID NO: 647634 - DNA, 25 bp, Homo sapien
ggacttagccaagatcttgttcagt

SEQ ID NO: 647635 - DNA, 25 bp, Homo sapien
cagtgaggtaactggataatcagac

SEQ ID NO: 647636 - DNA, 25 bp, Homo sapien
gataatcagacagatgagctttgca

SEQ ID NO: 647637 - DNA, 25 bp, Homo sapien
cgttgtcttaaactaatatctttat

SEQ ID NO: 647638 - DNA, 25 bp, Homo sapien
cttagaggtgcatgaccttctcctt

SEQ ID NO: 647639 - DNA, 25 bp, Homo sapien
gcatttttctcactagaccatgctg

SEQ ID NO: 647640 - DNA, 25 bp, Homo sapien
ttctcactagaccatgctgtgatgg

SEQ ID NO: 647641 - DNA, 25 bp, Homo sapien
tcactagaccatgctgtgatggttt

SEQ ID NO: 647642 - DNA, 25 bp, Homo sapien
atttttctcactagaccatgctgtg

SEQ ID NO: 647643 - DNA, 25 bp, Homo sapien
ggtactctcttactcctgtttgctg

SEQ ID NO: 647644 - DNA, 25 bp, Homo sapien
tgataatggtactctcttactcctg

SEQ ID NO: 647645 - DNA, 25 bp, Homo sapien
tagaattcttgataatggtactctc

SEQ ID NO: 647646 - DNA, 25 bp, Homo sapien
tctcttactcctgtttgctgatctt

SEQ ID NO: 647647 - DNA, 25 bp, Homo sapien
gcattcataagagtgcaggctgtac

SEQ ID NO: 647648 - DNA, 25 bp, Homo sapien
tccagtagtattggacatcagtcca

SEQ ID NO: 647649 - DNA, 25 bp, Homo sapien
cttcgagtctgtaaaccaacagctc

SEQ ID NO: 647650 - DNA, 25 bp, Homo sapien
caacagctctgtgattgaccagaag

SEQ ID NO: 647651 - DNA, 25 bp, Homo sapien
ccaatttttaagtgcatgtgtttct

SEQ ID NO: 647652 - DNA, 25 bp, Homo sapien
ttgcagaagccaatttttaagtgca

SEQ ID NO: 647653 - DNA, 25 bp, Homo sapien
aatttttaagtgcatgtgtttcttt

SEQ ID NO: 647654 - DNA, 25 bp, Homo sapien
gaagccaatttttaagtgcatgtgt

SEQ ID NO: 647655 - DNA, 25 bp, Homo sapien
cttagttcctctgcctggaatctct

SEQ ID NO: 647656 - DNA, 25 bp, Homo sapien
ctgcctggaatctctttctgctcat

SEQ ID NO: 647657 - DNA, 25 bp, Homo sapien
tctgcctggaatctctttctgctca

SEQ ID NO: 647658 - DNA, 25 bp, Homo sapien
tcctctgcctggaatctctttctgc

SEQ ID NO: 647659 - DNA, 25 bp, Homo sapien
tacaagaatgctcaaagactaagcc

SEQ ID NO: 647660 - DNA, 25 bp, Homo sapien
tggagagcgcattgatacaagaatg

SEQ ID NO: 647661 - DNA, 25 bp, Homo sapien
catgaaagtatagcagagctgtagc

SEQ ID NO: 647662 - DNA, 25 bp, Homo sapien
ttaattgctgctcgggttggagagc

SEQ ID NO: 647663 - DNA, 25 bp, Homo sapien
tccaggttgagagagtgtattgatc

SEQ ID NO: 647664 - DNA, 25 bp, Homo sapien
cctccagcctcaggattttggccga

SEQ ID NO: 647665 - DNA, 25 bp, Homo sapien
ggtcactctcatggatcccttccag

SEQ ID NO: 647666 - DNA, 25 bp, Homo sapien
ttttggccgacttgaggtcactctc

SEQ ID NO: 647667 - DNA, 25 bp, Homo sapien
tataatttataaccaggatgatttc

SEQ ID NO: 647668 - DNA, 25 bp, Homo sapien
aatgtccacagtgcttgataatttc

SEQ ID NO: 647669 - DNA, 25 bp, Homo sapien
tttataaccaggatgatttctgtgg

SEQ ID NO: 647670 - DNA, 25 bp, Homo sapien
tctgtggcctttaaatgtccacagt

SEQ ID NO: 647671 - DNA, 25 bp, Homo sapien
tcaacattccaaacaagaggccaca

SEQ ID NO: 647672 - DNA, 25 bp, Homo sapien
cacagtaatcccacatcccgtaggt

SEQ ID NO: 647673 - DNA, 25 bp, Homo sapien
ccacactcagagatttgaaccttat

SEQ ID NO: 647674 - DNA, 25 bp, Homo sapien
acttgggccaggtcttagaggttct

SEQ ID NO: 647675 - DNA, 25 bp, Homo sapien
cttgcatgtggttgttccagttcat

SEQ ID NO: 647676 - DNA, 25 bp, Homo sapien
gtccctgcacgtttttccctctcaa

SEQ ID NO: 647677 - DNA, 25 bp, Homo sapien
tggaattaaggagatcttctggtcc

SEQ ID NO: 647678 - DNA, 25 bp, Homo sapien
tcttgtccctgcacgtttttccctc

SEQ ID NO: 647679 - DNA, 25 bp, Homo sapien
tgtatggaattaaggagatcttctg

SEQ ID NO: 647680 - DNA, 25 bp, Homo sapien
tttcgaggcctcaccaatagatggc

SEQ ID NO: 647681 - DNA, 25 bp, Homo sapien
gtttccctacctcctagagcagtgt

SEQ ID NO: 647682 - DNA, 25 bp, Homo sapien
aaaaaagacgctggcatgtttctgc

SEQ ID NO: 647683 - DNA, 25 bp, Homo sapien
tgtttagtaatctgtaggcactcag

SEQ ID NO: 647684 - DNA, 25 bp, Homo sapien
gggatgctcatgctcttgtcccctg

SEQ ID NO: 647685 - DNA, 25 bp, Homo sapien
cctgggatgctcatgctcttgtccc

SEQ ID NO: 647686 - DNA, 25 bp, Homo sapien
ctgcctgcgttagccttggactcac

SEQ ID NO: 647687 - DNA, 25 bp, Homo sapien
cttgtcccctgcctgcgttagcctt

SEQ ID NO: 647688 - DNA, 25 bp, Homo sapien
ctttatctggaagggtaatttcatt

SEQ ID NO: 647689 - DNA, 25 bp, Homo sapien
gggccacaccgtcagattcgagcgt

SEQ ID NO: 647690 - DNA, 25 bp, Homo sapien
cacaggaagggccacaccgtcagat

SEQ ID NO: 647691 - DNA, 25 bp, Homo sapien
agattcgagcgttgctttatctgga

SEQ ID NO: 647692 - DNA, 25 bp, Homo sapien
tgtctcaaaccaactaaatgaccaa

SEQ ID NO: 647693 - DNA, 25 bp, Homo sapien
agcttcagggctctattaatgtata

SEQ ID NO: 647694 - DNA, 25 bp, Homo sapien
gaaatggcaccagtggttcatcctg

SEQ ID NO: 647695 - DNA, 25 bp, Homo sapien
tcaccaatgtaagttccatgcggtt

SEQ ID NO: 647696 - DNA, 25 bp, Homo sapien
tataaaaaggccaatcctgccagtc

SEQ ID NO: 647697 - DNA, 25 bp, Homo sapien
aacttttctgaatctggcatgatgg

SEQ ID NO: 647698 - DNA, 25 bp, Homo sapien
gcacaattaccttcaatcttgacag

SEQ ID NO: 647699 - DNA, 25 bp, Homo sapien
catgatgggtgacaaaagacaggga

SEQ ID NO: 647700 - DNA, 25 bp, Homo sapien
cgaagtcagatgagagagcctggct

SEQ ID NO: 647701 - DNA, 25 bp, Homo sapien
tgtctcctcgccagagctagcctgg

SEQ ID NO: 647702 - DNA, 25 bp, Homo sapien
cagtcaactgagctgcaaatcgagt

SEQ ID NO: 647703 - DNA, 25 bp, Homo sapien
tggatggtagagcaaaactggaact

SEQ ID NO: 647704 - DNA, 25 bp, Homo sapien
ctgagatacgtgaagcagagagatg

SEQ ID NO: 647705 - DNA, 25 bp, Homo sapien
tgagatacgtgaagcagagagatgt

SEQ ID NO: 647706 - DNA, 25 bp, Homo sapien
acattccagccctcctaattgattt

SEQ ID NO: 647707 - DNA, 25 bp, Homo sapien
ggagtagggtggaattgacctcaat

SEQ ID NO: 647708 - DNA, 25 bp, Homo sapien
agtagggtggaattgacctcaattc

SEQ ID NO: 647709 - DNA, 25 bp, Homo sapien
agggtggaattgacctcaattctgc

SEQ ID NO: 647710 - DNA, 25 bp, Homo sapien
ctcctctgcctgtatgactgactgg

SEQ ID NO: 647711 - DNA, 25 bp, Homo sapien
ctctgcctgtatgactgactggcag

SEQ ID NO: 647712 - DNA, 25 bp, Homo sapien
tcctcctctgcctgtatgactgact

SEQ ID NO: 647713 - DNA, 25 bp, Homo sapien
tcctctgcctgtatgactgactggc

SEQ ID NO: 647714 - DNA, 25 bp, Homo sapien
gaaggtaaattgtgcaacctcttta

SEQ ID NO: 647715 - DNA, 25 bp, Homo sapien
taaattgtgcaacctctttagaaaa

SEQ ID NO: 647716 - DNA, 25 bp, Homo sapien
aaagccacaataccatttcacaaca

SEQ ID NO: 647717 - DNA, 25 bp, Homo sapien
cacaataccatttcacaacagtcag

SEQ ID NO: 647718 - DNA, 25 bp, Homo sapien
gaagagttccaaagtccagaggaat

SEQ ID NO: 647719 - DNA, 25 bp, Homo sapien
tggttaaacccatccaaagtccagc

SEQ ID NO: 647720 - DNA, 25 bp, Homo sapien
tatgggatcccttatatcgaggctc

SEQ ID NO: 647721 - DNA, 25 bp, Homo sapien
gccttagttcactggtaggagccaa

SEQ ID NO: 647722 - DNA, 25 bp, Homo sapien
cttaaccacgtggagctgatcttcc

SEQ ID NO: 647723 - DNA, 25 bp, Homo sapien
gataatcaagaacgacactgctgcc

SEQ ID NO: 647724 - DNA, 25 bp, Homo sapien
tcaaggtcccataaggcatagagat

SEQ ID NO: 647725 - DNA, 25 bp, Homo sapien
tttttgagcacatgaagtagtagcc

SEQ ID NO: 647726 - DNA, 25 bp, Homo sapien
ttccattatcttggttactccattt

SEQ ID NO: 647727 - DNA, 25 bp, Homo sapien
ttttcaattggtctgaataaataga

SEQ ID NO: 647728 - DNA, 25 bp, Homo sapien
tttttcaattggtctgaataaatag

SEQ ID NO: 647729 - DNA, 25 bp, Homo sapien
gagccctatccccatgttatctgtt

SEQ ID NO: 647730 - DNA, 25 bp, Homo sapien
agccctatccccatgttatctgtta

SEQ ID NO: 647731 - DNA, 25 bp, Homo sapien
ccctatccccatgttatctgttacc

SEQ ID NO: 647732 - DNA, 25 bp, Homo sapien
gccctatccccatgttatctgttac

SEQ ID NO: 647733 - DNA, 25 bp, Homo sapien
gaattctgaaagacatcagtggagt

SEQ ID NO: 647734 - DNA, 25 bp, Homo sapien
tcagaagatggtgcatgattgggac

SEQ ID NO: 647735 - DNA, 25 bp, Homo sapien
gtaatactcctgtttggctgtgaag

SEQ ID NO: 647736 - DNA, 25 bp, Homo sapien
gatatccgggtagtcaagtagcagg

SEQ ID NO: 647737 - DNA, 25 bp, Homo sapien
tttttcagcagcagtgcgtaggatg

SEQ ID NO: 647738 - DNA, 25 bp, Homo sapien
ctgctggactcccatttgtaggaag

SEQ ID NO: 647739 - DNA, 25 bp, Homo sapien
ttttcagcagcagtgcgtaggatgg

SEQ ID NO: 647740 - DNA, 25 bp, Homo sapien
aaaataggtagagactggattgagg

SEQ ID NO: 647741 - DNA, 25 bp, Homo sapien
aggcatactccacattgagtgccat

SEQ ID NO: 647742 - DNA, 25 bp, Homo sapien
tgaagtaggacatttccctctctca

SEQ ID NO: 647743 - DNA, 25 bp, Homo sapien
ctgaagtaggacatttccctctctc

SEQ ID NO: 647744 - DNA, 25 bp, Homo sapien
gaagtaggacatttccctctctcat

SEQ ID NO: 647745 - DNA, 25 bp, Homo sapien
ctatatggaaattctggagccccca

SEQ ID NO: 647746 - DNA, 25 bp, Homo sapien
gctttcaaagtactgttgctgccca

SEQ ID NO: 647747 - DNA, 25 bp, Homo sapien
tgttgctgcccaatgtcatatcccc

SEQ ID NO: 647748 - DNA, 25 bp, Homo sapien
aaagtactgttgctgcccaatgtca

SEQ ID NO: 647749 - DNA, 25 bp, Homo sapien
tgtatgtttgtgaactccagaggtc

SEQ ID NO: 647750 - DNA, 25 bp, Homo sapien
gtcctgtgtatgtttgtgaactcca

SEQ ID NO: 647751 - DNA, 25 bp, Homo sapien
cctgtgtatgtttgtgaactccaga

SEQ ID NO: 647752 - DNA, 25 bp, Homo sapien
tgtgtatgtttgtgaactccagagg

SEQ ID NO: 647753 - DNA, 25 bp, Homo sapien
gaggaggatatatgcctctccagat

SEQ ID NO: 647754 - DNA, 25 bp, Homo sapien
gcccaattcctggaggaggatatat

SEQ ID NO: 647755 - DNA, 25 bp, Homo sapien
gaggatatatgcctctccagatcca

SEQ ID NO: 647756 - DNA, 25 bp, Homo sapien
tcctggaggaggatatatgcctctc

SEQ ID NO: 647757 - DNA, 25 bp, Homo sapien
tgccgaccagtgtctcatcaaatcc

SEQ ID NO: 647758 - DNA, 25 bp, Homo sapien
tggactccaactatcttcctgtggg

SEQ ID NO: 647759 - DNA, 25 bp, Homo sapien
cagttctgcatggactccaactatc

SEQ ID NO: 647760 - DNA, 25 bp, Homo sapien
cctgtggggactgccgaccagtgtc

SEQ ID NO: 647761 - DNA, 25 bp, Homo sapien
agagacctcatttgtacacctcagg

SEQ ID NO: 647762 - DNA, 25 bp, Homo sapien
tgtccagtcgcccatagaagttgct

SEQ ID NO: 647763 - DNA, 25 bp, Homo sapien
gcatggttggctcattccaaggcaa

SEQ ID NO: 647764 - DNA, 25 bp, Homo sapien
cagcagactgtgttaagagacctca

SEQ ID NO: 647765 - DNA, 25 bp, Homo sapien
gaaaaagcgcctggtgaacaaatgc

SEQ ID NO: 647766 - DNA, 25 bp, Homo sapien
tagttcctgagatcacactgtggga

SEQ ID NO: 647767 - DNA, 25 bp, Homo sapien
ttagtacaagaggtgctggctctcc

SEQ ID NO: 647768 - DNA, 25 bp, Homo sapien
gctaaaagttctgtgtgggcctaaa

SEQ ID NO: 647769 - DNA, 25 bp, Homo sapien
gataagtaatctattcttgaacttg

SEQ ID NO: 647770 - DNA, 25 bp, Homo sapien
tagataagtaatctattcttgaact

SEQ ID NO: 647771 - DNA, 25 bp, Homo sapien
agtaatctattcttgaacttgttga

SEQ ID NO: 647772 - DNA, 25 bp, Homo sapien
accttagataagtaatctattcttg

SEQ ID NO: 647773 - DNA, 25 bp, Homo sapien
cagcaggtgtctgattgtgaaagca

SEQ ID NO: 647774 - DNA, 25 bp, Homo sapien
tgcaaagggtgacctgatttcagcc

SEQ ID NO: 647775 - DNA, 25 bp, Homo sapien
tttcagccatcgtggactctcccag

SEQ ID NO: 647776 - DNA, 25 bp, Homo sapien
catgctgctaggagtatgactctgc

SEQ ID NO: 647777 - DNA, 25 bp, Homo sapien
attgttgatggcctgaagtccactg

SEQ ID NO: 647778 - DNA, 25 bp, Homo sapien
tattgttgatggcctgaagtccact

SEQ ID NO: 647779 - DNA, 25 bp, Homo sapien
cttggacctcagagtgggctttcca

SEQ ID NO: 647780 - DNA, 25 bp, Homo sapien
tgggctttccagtttgtagtaatgg

SEQ ID NO: 647781 - DNA, 25 bp, Homo sapien
ttccacagccttcgaagtttcttcc

SEQ ID NO: 647782 - DNA, 25 bp, Homo sapien
tagccttggaaggttcgtcctggcc

SEQ ID NO: 647783 - DNA, 25 bp, Homo sapien
tcctctctctagcttgattccacag

SEQ ID NO: 647784 - DNA, 25 bp, Homo sapien
tctagcttcattctatagccttgga

SEQ ID NO: 647785 - DNA, 25 bp, Homo sapien
cccaggactgattttgtggatgcca

SEQ ID NO: 647786 - DNA, 25 bp, Homo sapien
attaacttcccattagacttgtggt

SEQ ID NO: 647787 - DNA, 25 bp, Homo sapien
gagtaagtctatatccccaggactg

SEQ ID NO: 647788 - DNA, 25 bp, Homo sapien
gacttgtggttcttagtgacctcct

SEQ ID NO: 647789 - DNA, 25 bp, Homo sapien
gcagaaagcaagcaccgccgagact

SEQ ID NO: 647790 - DNA, 25 bp, Homo sapien
caccgccgagactgaagggcacaat

SEQ ID NO: 647791 - DNA, 25 bp, Homo sapien
tatctctgcttgttggcagaaagca

SEQ ID NO: 647792 - DNA, 25 bp, Homo sapien
tgccgaaaggttcttctttcagttc

SEQ ID NO: 647793 - DNA, 25 bp, Homo sapien
ggcttcacggaggagcactgagggc

SEQ ID NO: 647794 - DNA, 25 bp, Homo sapien
gcttcacggaggagcactgagggca

SEQ ID NO: 647795 - DNA, 25 bp, Homo sapien
cttcacggaggagcactgagggcag

SEQ ID NO: 647796 - DNA, 25 bp, Homo sapien
ttcacggaggagcactgagggcaga

SEQ ID NO: 647797 - DNA, 25 bp, Homo sapien
cacaggcataaagatcggggtgaat

SEQ ID NO: 647798 - DNA, 25 bp, Homo sapien
gcctacatccgggaatctctcattc

SEQ ID NO: 647799 - DNA, 25 bp, Homo sapien
tttcccagccgcctacatccgggaa

SEQ ID NO: 647800 - DNA, 25 bp, Homo sapien
tctcattcggactcagcaagatcat

SEQ ID NO: 647801 - DNA, 25 bp, Homo sapien
gaggatgttatcaggccctttgacc

SEQ ID NO: 647802 - DNA, 25 bp, Homo sapien
gaaaaccagggagatagggaggatg

SEQ ID NO: 647803 - DNA, 25 bp, Homo sapien
tggacttagcaaaagctagttggag

SEQ ID NO: 647804 - DNA, 25 bp, Homo sapien
actgtggacttagcaaaagctagtt

SEQ ID NO: 647805 - DNA, 25 bp, Homo sapien
ggttgataacagttgtcatagtcat

SEQ ID NO: 647806 - DNA, 25 bp, Homo sapien
agggtgctgaacattcatcctgagt

SEQ ID NO: 647807 - DNA, 25 bp, Homo sapien
tgttttggttgataacagttgtcat

SEQ ID NO: 647808 - DNA, 25 bp, Homo sapien
acattcatcctgagtaatgtgctgt

SEQ ID NO: 647809 - DNA, 25 bp, Homo sapien
gcacgcgttagctgggctgcagttt

SEQ ID NO: 647810 - DNA, 25 bp, Homo sapien
tcatcaggagcatgattcagattgt

SEQ ID NO: 647811 - DNA, 25 bp, Homo sapien
agtccctgctttggcacgcgttagc

SEQ ID NO: 647812 - DNA, 25 bp, Homo sapien
tctcatcaggagcatgattcagatt

SEQ ID NO: 647813 - DNA, 25 bp, Homo sapien
ggaaacgtgcctgtcctgagttcat

SEQ ID NO: 647814 - DNA, 25 bp, Homo sapien
gaggaaacgtgcctgtcctgagttc

SEQ ID NO: 647815 - DNA, 25 bp, Homo sapien
ctgggaggaaacgtgcctgtcctga

SEQ ID NO: 647816 - DNA, 25 bp, Homo sapien
gggaggaaacgtgcctgtcctgagt

SEQ ID NO: 647817 - DNA, 25 bp, Homo sapien
ctttttgaaaccgacaccttcaatg

SEQ ID NO: 647818 - DNA, 25 bp, Homo sapien
gaaaccgacaccttcaatgtctcct

SEQ ID NO: 647819 - DNA, 25 bp, Homo sapien
ttttgaaaccgacaccttcaatgtc

SEQ ID NO: 647820 - DNA, 25 bp, Homo sapien
ttgaaaccgacaccttcaatgtctc

SEQ ID NO: 647821 - DNA, 25 bp, Homo sapien
catgttctcatcattcctcctctgg

SEQ ID NO: 647822 - DNA, 25 bp, Homo sapien
ggggcatttcggatgaggttaccat

SEQ ID NO: 647823 - DNA, 25 bp, Homo sapien
atgttctcatcattcctcctctggg

SEQ ID NO: 647824 - DNA, 25 bp, Homo sapien
tcctctggggcatttcggatgaggt

SEQ ID NO: 647825 - DNA, 25 bp, Homo sapien
tagatatgtgtactctcagggataa

SEQ ID NO: 647826 - DNA, 25 bp, Homo sapien
tatgatatgcctaaactaaatggta

SEQ ID NO: 647827 - DNA, 25 bp, Homo sapien
aaatttaggcctatatcgaaacctg

SEQ ID NO: 647828 - DNA, 25 bp, Homo sapien
ccctggttttcattagttagatatg

SEQ ID NO: 647829 - DNA, 25 bp, Homo sapien
ctttgggttgtgtttgtaacatgta

SEQ ID NO: 647830 - DNA, 25 bp, Homo sapien
gtttgtaacatgtatccacaatcag

SEQ ID NO: 647831 - DNA, 25 bp, Homo sapien
tgtctctccaaaggcttcgttcagg

SEQ ID NO: 647832 - DNA, 25 bp, Homo sapien
tctccaaaggcttcgttcagggaca

SEQ ID NO: 647833 - DNA, 25 bp, Homo sapien
tatcgacgtgactgtttagaggcat

SEQ ID NO: 647834 - DNA, 25 bp, Homo sapien
atattttcagttttatcgacgtgac

SEQ ID NO: 647835 - DNA, 25 bp, Homo sapien
acgtatgcatttgccatttgggaat

SEQ ID NO: 647836 - DNA, 25 bp, Homo sapien
gactgaatgaacgtatgcatttgcc

SEQ ID NO: 647837 - DNA, 25 bp, Homo sapien
tatgggtgagaaagttggcccttgc

SEQ ID NO: 647838 - DNA, 25 bp, Homo sapien
tgaattaatgagctgtttgccacct

SEQ ID NO: 647839 - DNA, 25 bp, Homo sapien
cacttactggacttcctagggctta

SEQ ID NO: 647840 - DNA, 25 bp, Homo sapien
cagctcacagaaggttgcaggatta

SEQ ID NO: 647841 - DNA, 25 bp, Homo sapien
ttctcctacacctgaagagatctat

SEQ ID NO: 647842 - DNA, 25 bp, Homo sapien
tcatcgtagcaaatttggatgcaag

SEQ ID NO: 647843 - DNA, 25 bp, Homo sapien
tggatgcaagaaagctattgaaact

SEQ ID NO: 647844 - DNA, 25 bp, Homo sapien
tctggcatttgtgtttcatcgtagc

SEQ ID NO: 647845 - DNA, 25 bp, Homo sapien
acactgaaattctgcttgcaacttg

SEQ ID NO: 647846 - DNA, 25 bp, Homo sapien
tcaaaatatcgaagagctgactcca

SEQ ID NO: 647847 - DNA, 25 bp, Homo sapien
gatgccactggtacctctaaataat

SEQ ID NO: 647848 - DNA, 25 bp, Homo sapien
aatatcgaagagctgactccacaca

SEQ ID NO: 647849 - DNA, 25 bp, Homo sapien
gtttccaaatgttccgctcttagat

SEQ ID NO: 647850 - DNA, 25 bp, Homo sapien
tgataagcgagcaggccccttaggt

SEQ ID NO: 647851 - DNA, 25 bp, Homo sapien
caggtaggatcctcattttggagag

SEQ ID NO: 647852 - DNA, 25 bp, Homo sapien
ttggagagcctctggtaacatctga

SEQ ID NO: 647853 - DNA, 25 bp, Homo sapien
ccccttaggtggctctgtgacagag

SEQ ID NO: 647854 - DNA, 25 bp, Homo sapien
tgatttttgtccgtgagttcaggga

SEQ ID NO: 647855 - DNA, 25 bp, Homo sapien
agttcagggaggcaccaatcagaga

SEQ ID NO: 647856 - DNA, 25 bp, Homo sapien
gtcgatagctttctagcacatccat

SEQ ID NO: 647857 - DNA, 25 bp, Homo sapien
ggaggcaccaatcagagaatgtcga

SEQ ID NO: 647858 - DNA, 25 bp, Homo sapien
agaaaaacgagatccctgaagggca

SEQ ID NO: 647859 - DNA, 25 bp, Homo sapien
tctgtgggctcattgcacaggcagc

SEQ ID NO: 647860 - DNA, 25 bp, Homo sapien
gcagttttgccaatgcacatatctg

SEQ ID NO: 647861 - DNA, 25 bp, Homo sapien
actgatacaggccacttccagtgcc

SEQ ID NO: 647862 - DNA, 25 bp, Homo sapien
gcttatatctatgggcacatttcac

SEQ ID NO: 647863 - DNA, 25 bp, Homo sapien
accttgaccagccttctatctacat

SEQ ID NO: 647864 - DNA, 25 bp, Homo sapien
ccttgaccagccttctatctacatc

SEQ ID NO: 647865 - DNA, 25 bp, Homo sapien
ttaaccttgaccagccttctatcta

SEQ ID NO: 647866 - DNA, 25 bp, Homo sapien
taaccttgaccagccttctatctac

SEQ ID NO: 647867 - DNA, 25 bp, Homo sapien
cattgagagggtttgccattttaca

SEQ ID NO: 647868 - DNA, 25 bp, Homo sapien
gagaattcctttgtgaagtaaaatg

SEQ ID NO: 647869 - DNA, 25 bp, Homo sapien
tttcaacttgactcagagccaaatg

SEQ ID NO: 647870 - DNA, 25 bp, Homo sapien
tgtgtaagcattgagagggtttgcc

SEQ ID NO: 647871 - DNA, 25 bp, Homo sapien
actcatctctgttgtactgacaaat

SEQ ID NO: 647872 - DNA, 25 bp, Homo sapien
ctctgttgtactgacaaatggactg

SEQ ID NO: 647873 - DNA, 25 bp, Homo sapien
tcatctctgttgtactgacaaatgg

SEQ ID NO: 647874 - DNA, 25 bp, Homo sapien
catctctgttgtactgacaaatgga

SEQ ID NO: 647875 - DNA, 25 bp, Homo sapien
tttcctgggaactctactgggtctg

SEQ ID NO: 647876 - DNA, 25 bp, Homo sapien
ccaaatttaagaggaagggacatag

SEQ ID NO: 647877 - DNA, 25 bp, Homo sapien
atcttaccaacatggctggtgctgg

SEQ ID NO: 647878 - DNA, 25 bp, Homo sapien
gaaaaggcttgactgtgctccaggt

SEQ ID NO: 647879 - DNA, 25 bp, Homo sapien
gactctatgctgaactaatgctagg

SEQ ID NO: 647880 - DNA, 25 bp, Homo sapien
taatgctagggatggagatgtcctg

SEQ ID NO: 647881 - DNA, 25 bp, Homo sapien
aggcttcatactagtccacatgtat

SEQ ID NO: 647882 - DNA, 25 bp, Homo sapien
catgtgtgtctgcaaaggcttcata

SEQ ID NO: 647883 - DNA, 25 bp, Homo sapien
tggccactatttggagtatcacaat

SEQ ID NO: 647884 - DNA, 25 bp, Homo sapien
tttaatgggtaagactggagaagga

SEQ ID NO: 647885 - DNA, 25 bp, Homo sapien
ggacttgtctcgtgatgtcacaaaa

SEQ ID NO: 647886 - DNA, 25 bp, Homo sapien
ttggtttaatgggtaagactggaga

SEQ ID NO: 647887 - DNA, 25 bp, Homo sapien
tcctggagcctgagtacactgtgat

SEQ ID NO: 647888 - DNA, 25 bp, Homo sapien
gagcctgagtacactgtgatggctt

SEQ ID NO: 647889 - DNA, 25 bp, Homo sapien
catctagacacgctgttatcagtcc

SEQ ID NO: 647890 - DNA, 25 bp, Homo sapien
tctcactccatctagacacgctgtt

SEQ ID NO: 647891 - DNA, 25 bp, Homo sapien
ccacagccagctttaacaccatgca

SEQ ID NO: 647892 - DNA, 25 bp, Homo sapien
cacagccagctttaacaccatgcac

SEQ ID NO: 647893 - DNA, 25 bp, Homo sapien
ctccagttagttccagagctgtcat

SEQ ID NO: 647894 - DNA, 25 bp, Homo sapien
tgcattcagcttgccagtccccagg

SEQ ID NO: 647895 - DNA, 25 bp, Homo sapien
gagttttgaggcttgcagggtttgt

SEQ ID NO: 647896 - DNA, 25 bp, Homo sapien
tcagcttgccagtccccaggagagc

SEQ ID NO: 647897 - DNA, 25 bp, Homo sapien
tctatggcctgagttattgctcttc

SEQ ID NO: 647898 - DNA, 25 bp, Homo sapien
tatgtagttccagattaagggttaa

SEQ ID NO: 647899 - DNA, 25 bp, Homo sapien
ggtttactgagctctatggcctgag

SEQ ID NO: 647900 - DNA, 25 bp, Homo sapien
taatctgcattcctgcagttaggtt

SEQ ID NO: 647901 - DNA, 25 bp, Homo sapien
caggcagagaataggtcagccacat

SEQ ID NO: 647902 - DNA, 25 bp, Homo sapien
caaaagttggcaggccgcaggcaga

SEQ ID NO: 647903 - DNA, 25 bp, Homo sapien
aagcaaaagttggcaggccgcaggc

SEQ ID NO: 647904 - DNA, 25 bp, Homo sapien
caggccgcaggcagagaataggtca

SEQ ID NO: 647905 - DNA, 25 bp, Homo sapien
cactgtcattctccgtctgctggaa

SEQ ID NO: 647906 - DNA, 25 bp, Homo sapien
cagtaaatactgctcggcccttaat

SEQ ID NO: 647907 - DNA, 25 bp, Homo sapien
tcacagtctgggagaccactacatc

SEQ ID NO: 647908 - DNA, 25 bp, Homo sapien
tgaagtcaaactgcaaagtcaagcc

SEQ ID NO: 647909 - DNA, 25 bp, Homo sapien
tgggcatgggcagctaattcattct

SEQ ID NO: 647910 - DNA, 25 bp, Homo sapien
gggcatgggcagctaattcattctt

SEQ ID NO: 647911 - DNA, 25 bp, Homo sapien
ttcgagaagcattaagctcaagctc

SEQ ID NO: 647912 - DNA, 25 bp, Homo sapien
gcattaagctcaagctcagcccttt

SEQ ID NO: 647913 - DNA, 25 bp, Homo sapien
gtcttccaaaaccttcgagaagcat

SEQ ID NO: 647914 - DNA, 25 bp, Homo sapien
aaccttcgagaagcattaagctcaa

SEQ ID NO: 647915 - DNA, 25 bp, Homo sapien
cctgttgctcctgtcagcttgttaa

SEQ ID NO: 647916 - DNA, 25 bp, Homo sapien
ctgtgcccgactgtgtgaggccgcc

SEQ ID NO: 647917 - DNA, 25 bp, Homo sapien
tgctttgcttgcctcggcgtccgag

SEQ ID NO: 647918 - DNA, 25 bp, Homo sapien
ccagtgccaagggtaactactggca

SEQ ID NO: 647919 - DNA, 25 bp, Homo sapien
tttaaaagtttcatgtccacagcac

SEQ ID NO: 647920 - DNA, 25 bp, Homo sapien
cacagcacggttgacaaaataaatt

SEQ ID NO: 647921 - DNA, 25 bp, Homo sapien
ttaaaagtttcatgtccacagcacg

SEQ ID NO: 647922 - DNA, 25 bp, Homo sapien
atgtccacagcacggttgacaaaat

SEQ ID NO: 647923 - DNA, 25 bp, Homo sapien
cttctagtatagaccttaagcatgt

SEQ ID NO: 647924 - DNA, 25 bp, Homo sapien
agtatagaccttaagcatgttatca

SEQ ID NO: 647925 - DNA, 25 bp, Homo sapien
tagctatgtgcaataaaggtgatat

SEQ ID NO: 647926 - DNA, 25 bp, Homo sapien
gttatcatagctatgtgcaataaag

SEQ ID NO: 647927 - DNA, 25 bp, Homo sapien
aagagaaccagatactctgccgcca

SEQ ID NO: 647928 - DNA, 25 bp, Homo sapien
agagaaccagatactctgccgccat

SEQ ID NO: 647929 - DNA, 25 bp, Homo sapien
tgattataaagcacacaactcagaa

SEQ ID NO: 647930 - DNA, 25 bp, Homo sapien
cgtggggaatccacgtcctcgctgg

SEQ ID NO: 647931 - DNA, 25 bp, Homo sapien
cattgtcagttgattataaagcaca

SEQ ID NO: 647932 - DNA, 25 bp, Homo sapien
ccaaatgaaagaacggggtatgtgg

SEQ ID NO: 647933 - DNA, 25 bp, Homo sapien
tataggtgataactcattcaatcat

SEQ ID NO: 647934 - DNA, 25 bp, Homo sapien
gatgctctttataggtgataactca

SEQ ID NO: 647935 - DNA, 25 bp, Homo sapien
cttattttgttctagggatgctctt

SEQ ID NO: 647936 - DNA, 25 bp, Homo sapien
gttctagggatgctctttataggtg

SEQ ID NO: 647937 - DNA, 25 bp, Homo sapien
gggactcttccttggcctactggat

SEQ ID NO: 647938 - DNA, 25 bp, Homo sapien
tggcctactggataccagagggtga

SEQ ID NO: 647939 - DNA, 25 bp, Homo sapien
agggtgagggacaccattgatgaaa

SEQ ID NO: 647940 - DNA, 25 bp, Homo sapien
ggtgagggacaccattgatgaaatc

SEQ ID NO: 647941 - DNA, 25 bp, Homo sapien
cctcaagtctagtagtagcatctca

SEQ ID NO: 647942 - DNA, 25 bp, Homo sapien
tctggttccatcattcaacacagtg

SEQ ID NO: 647943 - DNA, 25 bp, Homo sapien
gcctgttaaggtcttcttgaattct

SEQ ID NO: 647944 - DNA, 25 bp, Homo sapien
tgtcttttttggcacattgctcaag

SEQ ID NO: 647945 - DNA, 25 bp, Homo sapien
cgtaatctcatttaccaagttttgc

SEQ ID NO: 647946 - DNA, 25 bp, Homo sapien
gaatctttagcttgacgtaatctca

SEQ ID NO: 647947 - DNA, 25 bp, Homo sapien
aattttcctagcaccttcattgaag

SEQ ID NO: 647948 - DNA, 25 bp, Homo sapien
tcttacatactctggttatcaatcc

SEQ ID NO: 647949 - DNA, 25 bp, Homo sapien
aaaggctggcagcttgtattcatca

SEQ ID NO: 647950 - DNA, 25 bp, Homo sapien
aaggctggcagcttgtattcatcac

SEQ ID NO: 647951 - DNA, 25 bp, Homo sapien
tcaaaggctggcagcttgtattcat

SEQ ID NO: 647952 - DNA, 25 bp, Homo sapien
ggctggcagcttgtattcatcacct

SEQ ID NO: 647953 - DNA, 25 bp, Homo sapien
ggcttgtctgctgtcaatttgacat

SEQ ID NO: 647954 - DNA, 25 bp, Homo sapien
gctgtcaatttgacatcatcccatc

SEQ ID NO: 647955 - DNA, 25 bp, Homo sapien
gtactgtcagtactaggcttgtctg

SEQ ID NO: 647956 - DNA, 25 bp, Homo sapien
ctgtcagtactaggcttgtctgctg

SEQ ID NO: 647957 - DNA, 25 bp, Homo sapien
ccagtgaagggaatgcgtacaggat

SEQ ID NO: 647958 - DNA, 25 bp, Homo sapien
attcccagtgaagggaatgcgtaca

SEQ ID NO: 647959 - DNA, 25 bp, Homo sapien
tctgattccagattcccagtgaagg

SEQ ID NO: 647960 - DNA, 25 bp, Homo sapien
tcccagtgaagggaatgcgtacagg

SEQ ID NO: 647961 - DNA, 25 bp, Homo sapien
aagctgttttctaggaactcctggg

SEQ ID NO: 647962 - DNA, 25 bp, Homo sapien
gcttttaaagagcttgggggaatga

SEQ ID NO: 647963 - DNA, 25 bp, Homo sapien
cttccttgctaaataacatcacctt

SEQ ID NO: 647964 - DNA, 25 bp, Homo sapien
tatttattaaaggattaccaattgc

SEQ ID NO: 647965 - DNA, 25 bp, Homo sapien
tgtcctgtgatagcaaagtacttgc

SEQ ID NO: 647966 - DNA, 25 bp, Homo sapien
tgtgatagcaaagtacttgcatgga

SEQ ID NO: 647967 - DNA, 25 bp, Homo sapien
gcaaagtacttgcatggaatgatcc

SEQ ID NO: 647968 - DNA, 25 bp, Homo sapien
tagcaaagtacttgcatggaatgat

SEQ ID NO: 647969 - DNA, 25 bp, Homo sapien
catgcttaaaagataacccctttgg

SEQ ID NO: 647970 - DNA, 25 bp, Homo sapien
tgcagctgtttcaaactattcctgt

SEQ ID NO: 647971 - DNA, 25 bp, Homo sapien
tctgacaatcctccatgcttaaaag

SEQ ID NO: 647972 - DNA, 25 bp, Homo sapien
aaactctgacaatcctccatgctta

SEQ ID NO: 647973 - DNA, 25 bp, Homo sapien
tatgtctgccatcaagtgtgtattc

SEQ ID NO: 647974 - DNA, 25 bp, Homo sapien
tcattgccctccacacaagttagtg

SEQ ID NO: 647975 - DNA, 25 bp, Homo sapien
ttcatgatatatccaaggtagaagg

SEQ ID NO: 647976 - DNA, 25 bp, Homo sapien
agttagtgttatcgtatattgcgat

SEQ ID NO: 647977 - DNA, 25 bp, Homo sapien
tgtttaagtaaacttgcctattcca

SEQ ID NO: 647978 - DNA, 25 bp, Homo sapien
gcttttgagttctatgtgagaagtc

SEQ ID NO: 647979 - DNA, 25 bp, Homo sapien
gtgtcttgccacttcactctcttag

SEQ ID NO: 647980 - DNA, 25 bp, Homo sapien
actctcttagtgtcaacttttgatg

SEQ ID NO: 647981 - DNA, 25 bp, Homo sapien
gacgtagtctgtataatcagcttct

SEQ ID NO: 647982 - DNA, 25 bp, Homo sapien
gcagtttgcactgcaagtccaaggg

SEQ ID NO: 647983 - DNA, 25 bp, Homo sapien
aagagagtcctgttgacgtagtctg

SEQ ID NO: 647984 - DNA, 25 bp, Homo sapien
ctgcagtttgcactgcaagtccaag

SEQ ID NO: 647985 - DNA, 25 bp, Homo sapien
catatttagctttgttgagattctt

SEQ ID NO: 647986 - DNA, 25 bp, Homo sapien
tatttagctttgttgagattcttcc

SEQ ID NO: 647987 - DNA, 25 bp, Homo sapien
agcatatttagctttgttgagattc

SEQ ID NO: 647988 - DNA, 25 bp, Homo sapien
atttagctttgttgagattcttcca

SEQ ID NO: 647989 - DNA, 25 bp, Homo sapien
gatactcagtaactggttgccattt

SEQ ID NO: 647990 - DNA, 25 bp, Homo sapien
tactcagtaactggttgccattttt

SEQ ID NO: 647991 - DNA, 25 bp, Homo sapien
tcagtaactggttgccatttttatt

SEQ ID NO: 647992 - DNA, 25 bp, Homo sapien
atactcagtaactggttgccatttt

SEQ ID NO: 647993 - DNA, 25 bp, Homo sapien
cggccattctgagacaaagttggag

SEQ ID NO: 647994 - DNA, 25 bp, Homo sapien
gacaaagttggagaagtgtcatgca

SEQ ID NO: 647995 - DNA, 25 bp, Homo sapien
acttcacacggccattctgagacaa

SEQ ID NO: 647996 - DNA, 25 bp, Homo sapien
tctgagacaaagttggagaagtgtc

SEQ ID NO: 647997 - DNA, 25 bp, Homo sapien
tccaaaggaaacttgtcagggctca

SEQ ID NO: 647998 - DNA, 25 bp, Homo sapien
taacaagtgcttccagctaatggag

SEQ ID NO: 647999 - DNA, 25 bp, Homo sapien
tcagggctactcataaaaggctaac

SEQ ID NO: 648000 - DNA, 25 bp, Homo sapien
caacatatttgggagtggtcacacc

SEQ ID NO: 648001 - DNA, 25 bp, Homo sapien
ctaaggttcccggtggctgcacatt

SEQ ID NO: 648002 - DNA, 25 bp, Homo sapien
gttcccggtggctgcacatttttgt

SEQ ID NO: 648003 - DNA, 25 bp, Homo sapien
tgaccttcagttcctgcagatccat

SEQ ID NO: 648004 - DNA, 25 bp, Homo sapien
atgaccttcagttcctgcagatcca

SEQ ID NO: 648005 - DNA, 25 bp, Homo sapien
atttcccggtctccggttgtctgca

SEQ ID NO: 648006 - DNA, 25 bp, Homo sapien
tcccggtctccggttgtctgcacag

SEQ ID NO: 648007 - DNA, 25 bp, Homo sapien
cggtctccggttgtctgcacagctg

SEQ ID NO: 648008 - DNA, 25 bp, Homo sapien
ccatttcccggtctccggttgtctg

SEQ ID NO: 648009 - DNA, 25 bp, Homo sapien
tgcaccttggccatgaccccttgga

SEQ ID NO: 648010 - DNA, 25 bp, Homo sapien
ctcagaagcacaattgcagtttgaa

SEQ ID NO: 648011 - DNA, 25 bp, Homo sapien
tcagccgtcccagtctcagaagcac

SEQ ID NO: 648012 - DNA, 25 bp, Homo sapien
aattgcagtttgaatgcagctcctg

SEQ ID NO: 648013 - DNA, 25 bp, Homo sapien
ttcacaagtttccatgtcatccatg

SEQ ID NO: 648014 - DNA, 25 bp, Homo sapien
gcttcacaagtttccatgtcatcca

SEQ ID NO: 648015 - DNA, 25 bp, Homo sapien
acaagtttccatgtcatccatgcac

SEQ ID NO: 648016 - DNA, 25 bp, Homo sapien
cacaagtttccatgtcatccatgca

SEQ ID NO: 648017 - DNA, 25 bp, Homo sapien
tgacaaaaagaagattacaggcaaa

SEQ ID NO: 648018 - DNA, 25 bp, Homo sapien
gtgacaaaaagaagattacaggcaa

SEQ ID NO: 648019 - DNA, 25 bp, Homo sapien
aatgtcattatcagaacctagttgt

SEQ ID NO: 648020 - DNA, 25 bp, Homo sapien
tacaccagggtttactttcatcatc

SEQ ID NO: 648021 - DNA, 25 bp, Homo sapien
tgttgtaaagttttggatgctccca

SEQ ID NO: 648022 - DNA, 25 bp, Homo sapien
cagcagatatttatagctggcgtcc

SEQ ID NO: 648023 - DNA, 25 bp, Homo sapien
gattgtatcttgcaaatttagagcc

SEQ ID NO: 648024 - DNA, 25 bp, Homo sapien
aagaagcctagattgtatcttgcaa

SEQ ID NO: 648025 - DNA, 25 bp, Homo sapien
tttaatgggatcatggaactggtag

SEQ ID NO: 648026 - DNA, 25 bp, Homo sapien
gaactggtaggcaagaagcctagat

SEQ ID NO: 648027 - DNA, 25 bp, Homo sapien
tgaaagattgtcttgggcccctgta

SEQ ID NO: 648028 - DNA, 25 bp, Homo sapien
gtcttgggcccctgtactcctgggc

SEQ ID NO: 648029 - DNA, 25 bp, Homo sapien
aaagattgtcttgggcccctgtact

SEQ ID NO: 648030 - DNA, 25 bp, Homo sapien
ttgtcttgggcccctgtactcctgg

SEQ ID NO: 648031 - DNA, 25 bp, Homo sapien
taactgagtactaaagtcttgccaa

SEQ ID NO: 648032 - DNA, 25 bp, Homo sapien
cgaagccgcagtctacacatgaaat

SEQ ID NO: 648033 - DNA, 25 bp, Homo sapien
tggcaagcttaaactccatagggca

SEQ ID NO: 648034 - DNA, 25 bp, Homo sapien
cagatccaaaatccgtagaactggg

SEQ ID NO: 648035 - DNA, 25 bp, Homo sapien
gctgcagcgtttggaagtgttgata

SEQ ID NO: 648036 - DNA, 25 bp, Homo sapien
gttgctgcagcgtttggaagtgttg

SEQ ID NO: 648037 - DNA, 25 bp, Homo sapien
tgcagcgtttggaagtgttgatatg

SEQ ID NO: 648038 - DNA, 25 bp, Homo sapien
tgctgcagcgtttggaagtgttgat

SEQ ID NO: 648039 - DNA, 25 bp, Homo sapien
ctgagtctccctctactctggcccc

SEQ ID NO: 648040 - DNA, 25 bp, Homo sapien
ctccctctactctggccccaatccc

SEQ ID NO: 648041 - DNA, 25 bp, Homo sapien
gtctccctctactctggccccaatc

SEQ ID NO: 648042 - DNA, 25 bp, Homo sapien
gagtctccctctactctggccccaa

SEQ ID NO: 648043 - DNA, 25 bp, Homo sapien
cagtttgctggttgtgatttcttat

SEQ ID NO: 648044 - DNA, 25 bp, Homo sapien
tgccttcttctcagctgttcactaa

SEQ ID NO: 648045 - DNA, 25 bp, Homo sapien
gccacactgaaggcctgccttcttc

SEQ ID NO: 648046 - DNA, 25 bp, Homo sapien
ttcaagaggattgagagacttagaa

SEQ ID NO: 648047 - DNA, 25 bp, Homo sapien
ctgaatttgggtggcggctctgtag

SEQ ID NO: 648048 - DNA, 25 bp, Homo sapien
tttctgtatcccttactctgcctac

SEQ ID NO: 648049 - DNA, 25 bp, Homo sapien
tagctgctctcctcataacagtgtt

SEQ ID NO: 648050 - DNA, 25 bp, Homo sapien
accctctgggatgctaagttctctg

SEQ ID NO: 648051 - DNA, 25 bp, Homo sapien
ttcatccatggagactgagcccttt

SEQ ID NO: 648052 - DNA, 25 bp, Homo sapien
agtcttcatccatggagactgagcc

SEQ ID NO: 648053 - DNA, 25 bp, Homo sapien
tccatggagactgagccctttttgt

SEQ ID NO: 648054 - DNA, 25 bp, Homo sapien
tcttcatccatggagactgagccct

SEQ ID NO: 648055 - DNA, 25 bp, Homo sapien
cttcatatcatgtattatgactgaa

SEQ ID NO: 648056 - DNA, 25 bp, Homo sapien
gagtcttgagcatgcgttgaccatc

SEQ ID NO: 648057 - DNA, 25 bp, Homo sapien
tttccagtagagatttgattgagtc

SEQ ID NO: 648058 - DNA, 25 bp, Homo sapien
gcgttgaccatcttcatatcatgta

SEQ ID NO: 648059 - DNA, 25 bp, Homo sapien
tcttaggtggtctttgctgcgtcgt

SEQ ID NO: 648060 - DNA, 25 bp, Homo sapien
cgtttgctgtcaaccattaacacca

SEQ ID NO: 648061 - DNA, 25 bp, Homo sapien
caacaatgttgactaccctctctta

SEQ ID NO: 648062 - DNA, 25 bp, Homo sapien
tgctgcgtcgtttgctgtcaaccat

SEQ ID NO: 648063 - DNA, 25 bp, Homo sapien
cagaagcgctgtcggaaagccaggt

SEQ ID NO: 648064 - DNA, 25 bp, Homo sapien
ccaggtctgctgatattgattcttt

SEQ ID NO: 648065 - DNA, 25 bp, Homo sapien
cgctgtcggaaagccaggtctgctg

SEQ ID NO: 648066 - DNA, 25 bp, Homo sapien
ctgtatccagaagcgctgtcggaaa

SEQ ID NO: 648067 - DNA, 25 bp, Homo sapien
tttctgtttgtcaattccatttgat

SEQ ID NO: 648068 - DNA, 25 bp, Homo sapien
ttctgtttgtcaattccatttgata

SEQ ID NO: 648069 - DNA, 25 bp, Homo sapien
caatttgcccgcatggttgccaaca

SEQ ID NO: 648070 - DNA, 25 bp, Homo sapien
caaggaaccactaaacagcttttca

SEQ ID NO: 648071 - DNA, 25 bp, Homo sapien
aatcttgcagcttacagtagttcac

SEQ ID NO: 648072 - DNA, 25 bp, Homo sapien
cagcagcgacgtatgcaagttccaa

SEQ ID NO: 648073 - DNA, 25 bp, Homo sapien
tatcgccattgaggcagcaagccca

SEQ ID NO: 648074 - DNA, 25 bp, Homo sapien
gagccacttgaatactgatccttga

SEQ ID NO: 648075 - DNA, 25 bp, Homo sapien
gcagttcgcaactgaaaaaagagcc

SEQ ID NO: 648076 - DNA, 25 bp, Homo sapien
tgatccttgatgatgggtatcgcca

SEQ ID NO: 648077 - DNA, 25 bp, Homo sapien
cattcctatattttagaaaagtaat

SEQ ID NO: 648078 - DNA, 25 bp, Homo sapien
tcctatattttagaaaagtaatagc

SEQ ID NO: 648079 - DNA, 25 bp, Homo sapien
ttcattcctatattttagaaaagta

SEQ ID NO: 648080 - DNA, 25 bp, Homo sapien
ctatattttagaaaagtaatagctt

SEQ ID NO: 648081 - DNA, 25 bp, Homo sapien
tttgcttctttctttagtcctgctt

SEQ ID NO: 648082 - DNA, 25 bp, Homo sapien
ctgatgacaagtaatttgcttcttt

SEQ ID NO: 648083 - DNA, 25 bp, Homo sapien
tgatgacaagtaatttgcttctttc

SEQ ID NO: 648084 - DNA, 25 bp, Homo sapien
gcttctttctttagtcctgctttta

SEQ ID NO: 648085 - DNA, 25 bp, Homo sapien
cagaaatttctagcagcgatatttc

SEQ ID NO: 648086 - DNA, 25 bp, Homo sapien
tttctagcagcgatatttcttcagc

SEQ ID NO: 648087 - DNA, 25 bp, Homo sapien
gttcagaaatttctagcagcgatat

SEQ ID NO: 648088 - DNA, 25 bp, Homo sapien
aaatttctagcagcgatatttcttc

SEQ ID NO: 648089 - DNA, 25 bp, Homo sapien
tgctagtcaactctgagtcagacat

SEQ ID NO: 648090 - DNA, 25 bp, Homo sapien
cagcaatgctagtcaactctgagtc

SEQ ID NO: 648091 - DNA, 25 bp, Homo sapien
aatgctagtcaactctgagtcagac

SEQ ID NO: 648092 - DNA, 25 bp, Homo sapien
gcaatgctagtcaactctgagtcag

SEQ ID NO: 648093 - DNA, 25 bp, Homo sapien
gacatcctgggttgggagactgcat

SEQ ID NO: 648094 - DNA, 25 bp, Homo sapien
ggattaggcaagagacatcctgggt

SEQ ID NO: 648095 - DNA, 25 bp, Homo sapien
caagagacatcctgggttgggagac

SEQ ID NO: 648096 - DNA, 25 bp, Homo sapien
caaggatgtgaaggattaggcaaga

SEQ ID NO: 648097 - DNA, 25 bp, Homo sapien
gatgtgacgtctataaacatgtaca

SEQ ID NO: 648098 - DNA, 25 bp, Homo sapien
tgatgtgacgtctataaacatgtac

SEQ ID NO: 648099 - DNA, 25 bp, Homo sapien
ctatgctttcattgatgtgacgtct

SEQ ID NO: 648100 - DNA, 25 bp, Homo sapien
tttcattgatgtgacgtctataaac

SEQ ID NO: 648101 - DNA, 25 bp, Homo sapien
gcatttgactcacttccttctggga

SEQ ID NO: 648102 - DNA, 25 bp, Homo sapien
catattgtctatttggaccttcacc

SEQ ID NO: 648103 - DNA, 25 bp, Homo sapien
gctgacatctcttgaaccagaacaa

SEQ ID NO: 648104 - DNA, 25 bp, Homo sapien
gctattgaagcactagaaatgccat

SEQ ID NO: 648105 - DNA, 25 bp, Homo sapien
cccccactggtgatgtacttgtcta

SEQ ID NO: 648106 - DNA, 25 bp, Homo sapien
gaactccatgggcacagacgttgca

SEQ ID NO: 648107 - DNA, 25 bp, Homo sapien
tgcattcgctttgactttgctggca

SEQ ID NO: 648108 - DNA, 25 bp, Homo sapien
tattgggattatgtccatttagctt

SEQ ID NO: 648109 - DNA, 25 bp, Homo sapien
aatattctattgtccatgtgactcc

SEQ ID NO: 648110 - DNA, 25 bp, Homo sapien
cacgtcaaacatgcccaatattcta

SEQ ID NO: 648111 - DNA, 25 bp, Homo sapien
tcatttgactgttggcagtcgatca

SEQ ID NO: 648112 - DNA, 25 bp, Homo sapien
gatcattggatttatacggtttggc

SEQ ID NO: 648113 - DNA, 25 bp, Homo sapien
ttctccttctgctttggtctgccag

SEQ ID NO: 648114 - DNA, 25 bp, Homo sapien
tgttcccaggttttctccttctgct

SEQ ID NO: 648115 - DNA, 25 bp, Homo sapien
ctccttctgctttggtctgccagtc

SEQ ID NO: 648116 - DNA, 25 bp, Homo sapien
cctgttcccaggttttctccttctg

SEQ ID NO: 648117 - DNA, 25 bp, Homo sapien
tattacgtggataatgggaattcat

SEQ ID NO: 648118 - DNA, 25 bp, Homo sapien
gtcttgaaggcatagagtgaagaaa

SEQ ID NO: 648119 - DNA, 25 bp, Homo sapien
ttattcagcattgtacgcatgtacc

SEQ ID NO: 648120 - DNA, 25 bp, Homo sapien
gattattgttaagggctgttctttc

SEQ ID NO: 648121 - DNA, 25 bp, Homo sapien
tagggcacaaagctatatctggcac

SEQ ID NO: 648122 - DNA, 25 bp, Homo sapien
gacttgtgttagacctggagactca

SEQ ID NO: 648123 - DNA, 25 bp, Homo sapien
ccagtgggaaatatggaaacacttt

SEQ ID NO: 648124 - DNA, 25 bp, Homo sapien
tgtctcttagcattgaaggttcctg

SEQ ID NO: 648125 - DNA, 25 bp, Homo sapien
ccacaacaggtagttagtggaaact

SEQ ID NO: 648126 - DNA, 25 bp, Homo sapien
ctgaatgtgaaatggatgcctcgcg

SEQ ID NO: 648127 - DNA, 25 bp, Homo sapien
tgctttcgccttgcagtctgactat

SEQ ID NO: 648128 - DNA, 25 bp, Homo sapien
ttgaaggtacgagttatgagcgact

SEQ ID NO: 648129 - DNA, 25 bp, Homo sapien
cagggtgtaggaaacttctaaatag

SEQ ID NO: 648130 - DNA, 25 bp, Homo sapien
cttcttgcagggtgtaggaaacttc

SEQ ID NO: 648131 - DNA, 25 bp, Homo sapien
ttgcagggtgtaggaaacttctaaa

SEQ ID NO: 648132 - DNA, 25 bp, Homo sapien
atatggggcttcttgcagggtgtag

SEQ ID NO: 648133 - DNA, 25 bp, Homo sapien
gaacaaaaaggtcatggcattttga

SEQ ID NO: 648134 - DNA, 25 bp, Homo sapien
tgaacaaaaaggtcatggcattttg

SEQ ID NO: 648135 - DNA, 25 bp, Homo sapien
atgaacaaaaaggtcatggcatttt

SEQ ID NO: 648136 - DNA, 25 bp, Homo sapien
tgccttctttacaattacccatatg

SEQ ID NO: 648137 - DNA, 25 bp, Homo sapien
tgctgccttctttacaattacccat

SEQ ID NO: 648138 - DNA, 25 bp, Homo sapien
gctgccttctttacaattacccata

SEQ ID NO: 648139 - DNA, 25 bp, Homo sapien
ccttctttacaattacccatatgac

SEQ ID NO: 648140 - DNA, 25 bp, Homo sapien
tctcggagaacaccagggatttgca

SEQ ID NO: 648141 - DNA, 25 bp, Homo sapien
gcttggcctggctactttctacaga

SEQ ID NO: 648142 - DNA, 25 bp, Homo sapien
ggatttgcaggaaagccgggctgct

SEQ ID NO: 648143 - DNA, 25 bp, Homo sapien
ctttggagaggcatctcggagaaca

SEQ ID NO: 648144 - DNA, 25 bp, Homo sapien
ttagatgagactgggcacatttagg

SEQ ID NO: 648145 - DNA, 25 bp, Homo sapien
taatcagggcagaccttgcttagct

SEQ ID NO: 648146 - DNA, 25 bp, Homo sapien
caagtactaatcagggcagaccttg

SEQ ID NO: 648147 - DNA, 25 bp, Homo sapien
agactgggcacatttagggtggcat

SEQ ID NO: 648148 - DNA, 25 bp, Homo sapien
tatgtgcccagatgtaacctttgtc

SEQ ID NO: 648149 - DNA, 25 bp, Homo sapien
ctgccatgctgcctgataaatggta

SEQ ID NO: 648150 - DNA, 25 bp, Homo sapien
ggtattctcctgtgggctacattct

SEQ ID NO: 648151 - DNA, 25 bp, Homo sapien
ttttaacaatgctcacttgggctgc

SEQ ID NO: 648152 - DNA, 25 bp, Homo sapien
gtctgcaagccccatggtcagatac

SEQ ID NO: 648153 - DNA, 25 bp, Homo sapien
ggtcagataccctgtggtttccagt

SEQ ID NO: 648154 - DNA, 25 bp, Homo sapien
tcccagcgtagtaaattgtttggcc

SEQ ID NO: 648155 - DNA, 25 bp, Homo sapien
caacattaaggccaaaatgaaggta

SEQ ID NO: 648156 - DNA, 25 bp, Homo sapien
ctttgagatgtaaacaccaaacaac

SEQ ID NO: 648157 - DNA, 25 bp, Homo sapien
tgagatgtaaacaccaaacaacctc

SEQ ID NO: 648158 - DNA, 25 bp, Homo sapien
gagatgtaaacaccaaacaacctcc

SEQ ID NO: 648159 - DNA, 25 bp, Homo sapien
cttcagaggaaggacagcgagcaag

SEQ ID NO: 648160 - DNA, 25 bp, Homo sapien
gaagcaactgggttgggtgtcctca

SEQ ID NO: 648161 - DNA, 25 bp, Homo sapien
gaagtcagtgaccattcgcctgcct

SEQ ID NO: 648162 - DNA, 25 bp, Homo sapien
taaggctggtcaatgataaacctgg

SEQ ID NO: 648163 - DNA, 25 bp, Homo sapien
acagcctgacatgggcctctggtat

SEQ ID NO: 648164 - DNA, 25 bp, Homo sapien
gacatgggcctctggtatcaatggc

SEQ ID NO: 648165 - DNA, 25 bp, Homo sapien
tccagtcgagttactgtgacagcct

SEQ ID NO: 648166 - DNA, 25 bp, Homo sapien
aatggctgggtccaccaggtctgac

SEQ ID NO: 648167 - DNA, 25 bp, Homo sapien
ggagccagtcagagctattacaatg

SEQ ID NO: 648168 - DNA, 25 bp, Homo sapien
aggagccagtcagagctattacaat

SEQ ID NO: 648169 - DNA, 25 bp, Homo sapien
aaagcaatgtggtaacaggcgtacc

SEQ ID NO: 648170 - DNA, 25 bp, Homo sapien
tatctctacacatttagctgttatc

SEQ ID NO: 648171 - DNA, 25 bp, Homo sapien
gggtctgtcgcttctctgtcctata

SEQ ID NO: 648172 - DNA, 25 bp, Homo sapien
gcgtacccattaaaactcgtccata

SEQ ID NO: 648173 - DNA, 25 bp, Homo sapien
ttagcttctatctgactaggtcttt

SEQ ID NO: 648174 - DNA, 25 bp, Homo sapien
gcttctatctgactaggtctttgtg

SEQ ID NO: 648175 - DNA, 25 bp, Homo sapien
tagcttctatctgactaggtctttg

SEQ ID NO: 648176 - DNA, 25 bp, Homo sapien
cttctatctgactaggtctttgtgt

SEQ ID NO: 648177 - DNA, 25 bp, Homo sapien
tgcttcatcttggactcctcatatg

SEQ ID NO: 648178 - DNA, 25 bp, Homo sapien
accttcaggtccaaactgtttgatt

SEQ ID NO: 648179 - DNA, 25 bp, Homo sapien
ccaaactgtttgatttgctgcttca

SEQ ID NO: 648180 - DNA, 25 bp, Homo sapien
atcgtagttaggttcttgatgtccc

SEQ ID NO: 648181 - DNA, 25 bp, Homo sapien
ttggataagctaatataaaagatgt

SEQ ID NO: 648182 - DNA, 25 bp, Homo sapien
cttattggataagctaatataaaag

SEQ ID NO: 648183 - DNA, 25 bp, Homo sapien
tattggataagctaatataaaagat

SEQ ID NO: 648184 - DNA, 25 bp, Homo sapien
ggataagctaatataaaagatgttt

SEQ ID NO: 648185 - DNA, 25 bp, Homo sapien
acattgttgtgttgaattttgatga

SEQ ID NO: 648186 - DNA, 25 bp, Homo sapien
ccacattgttgtgttgaattttgat

SEQ ID NO: 648187 - DNA, 25 bp, Homo sapien
cacattgttgtgttgaattttgatg

SEQ ID NO: 648188 - DNA, 25 bp, Homo sapien
tcaacagtactctgctcgggcttcc

SEQ ID NO: 648189 - DNA, 25 bp, Homo sapien
tgatagcccagatgcacctaggaat

SEQ ID NO: 648190 - DNA, 25 bp, Homo sapien
cccttggagggatgttgtaaggcat

SEQ ID NO: 648191 - DNA, 25 bp, Homo sapien
gtgttttgctactgacctcccttgg

SEQ ID NO: 648192 - DNA, 25 bp, Homo sapien
ccttttggggctccggatcagccag

SEQ ID NO: 648193 - DNA, 25 bp, Homo sapien
aaccacggtgaagtccagcagagat

SEQ ID NO: 648194 - DNA, 25 bp, Homo sapien
tacgatgactgtcctaagctttagt

SEQ ID NO: 648195 - DNA, 25 bp, Homo sapien
tagtgtgctgagtcaggagattcca

SEQ ID NO: 648196 - DNA, 25 bp, Homo sapien
tagttccttgacaccaaccacggtg

SEQ ID NO: 648197 - DNA, 25 bp, Homo sapien
ctgagagaagagagagagtgaatac

SEQ ID NO: 648198 - DNA, 25 bp, Homo sapien
ctgccagaggcttggtacgccttgc

SEQ ID NO: 648199 - DNA, 25 bp, Homo sapien
ggcttggtacgccttgcttttggca

SEQ ID NO: 648200 - DNA, 25 bp, Homo sapien
cagaggcttggtacgccttgctttt

SEQ ID NO: 648201 - DNA, 25 bp, Homo sapien
ggtacgccttgcttttggcatttgt

SEQ ID NO: 648202 - DNA, 25 bp, Homo sapien
ctggccagaattctgtgataggcca

SEQ ID NO: 648203 - DNA, 25 bp, Homo sapien
tggccagaattctgtgataggccat

SEQ ID NO: 648204 - DNA, 25 bp, Homo sapien
tttcatcttttacatgcatgtgttg

SEQ ID NO: 648205 - DNA, 25 bp, Homo sapien
tcatcttttacatgcatgtgttgta

SEQ ID NO: 648206 - DNA, 25 bp, Homo sapien
attttcatcttttacatgcatgtgt

SEQ ID NO: 648207 - DNA, 25 bp, Homo sapien
ttacatgcatgtgttgtaacttcat

SEQ ID NO: 648208 - DNA, 25 bp, Homo sapien
gggtcaatacagagctgcctaaagt

SEQ ID NO: 648209 - DNA, 25 bp, Homo sapien
gactaactgggtcaatacagagctg

SEQ ID NO: 648210 - DNA, 25 bp, Homo sapien
gagctgcctaaagttgtatttaccg

SEQ ID NO: 648211 - DNA, 25 bp, Homo sapien
caatatctctgcattgactaactgg

SEQ ID NO: 648212 - DNA, 25 bp, Homo sapien
atcaagaaagggacactttactaag

SEQ ID NO: 648213 - DNA, 25 bp, Homo sapien
gaattggtgtcttacttcactttaa

SEQ ID NO: 648214 - DNA, 25 bp, Homo sapien
gggatactgtgaattggtgtcttac

SEQ ID NO: 648215 - DNA, 25 bp, Homo sapien
ccgagagagcacagactatatcccc

SEQ ID NO: 648216 - DNA, 25 bp, Homo sapien
aagggggcagctttgaaccgctgaa

SEQ ID NO: 648217 - DNA, 25 bp, Homo sapien
tttgaaccgctgaaagaggagagtg

SEQ ID NO: 648218 - DNA, 25 bp, Homo sapien
tactactagtcacaataggactttg

SEQ ID NO: 648219 - DNA, 25 bp, Homo sapien
caataggactttgctgctccatttc

SEQ ID NO: 648220 - DNA, 25 bp, Homo sapien
aacaacattcgcttcccagtaggag

SEQ ID NO: 648221 - DNA, 25 bp, Homo sapien
tttcataacaacattcgcttcccag

SEQ ID NO: 648222 - DNA, 25 bp, Homo sapien
cattcgcttcccagtaggagtttta

SEQ ID NO: 648223 - DNA, 25 bp, Homo sapien
ttagagtagggttttcataacaaca

SEQ ID NO: 648224 - DNA, 25 bp, Homo sapien
catgggataagggtggcggcaatgt

SEQ ID NO: 648225 - DNA, 25 bp, Homo sapien
gttctcggtgctgctaagagggttt

SEQ ID NO: 648226 - DNA, 25 bp, Homo sapien
agggtggcggcaatgtggctgcaac

SEQ ID NO: 648227 - DNA, 25 bp, Homo sapien
tttgagaagcatgggataagggtgg

SEQ ID NO: 648228 - DNA, 25 bp, Homo sapien
ttcccctctgcaccactcatgacct

SEQ ID NO: 648229 - DNA, 25 bp, Homo sapien
ctccttggcggcattttccaggtct

SEQ ID NO: 648230 - DNA, 25 bp, Homo sapien
ccactcatgacctcatactccttgg

SEQ ID NO: 648231 - DNA, 25 bp, Homo sapien
gcctgtggaaatgctgtgacatttt

SEQ ID NO: 648232 - DNA, 25 bp, Homo sapien
gaaatatagttcagattcgcagcag

SEQ ID NO: 648233 - DNA, 25 bp, Homo sapien
atatagttcagattcgcagcagtag

SEQ ID NO: 648234 - DNA, 25 bp, Homo sapien
aaatatagttcagattcgcagcagt

SEQ ID NO: 648235 - DNA, 25 bp, Homo sapien
tatagttcagattcgcagcagtagt

SEQ ID NO: 648236 - DNA, 25 bp, Homo sapien
tatatttgatgaatatcatctctca

SEQ ID NO: 648237 - DNA, 25 bp, Homo sapien
atatttgatgaatatcatctctcat

SEQ ID NO: 648238 - DNA, 25 bp, Homo sapien
attcctggatgtgctagcacagcca

SEQ ID NO: 648239 - DNA, 25 bp, Homo sapien
cataatcttgcaagcttgtgcattc

SEQ ID NO: 648240 - DNA, 25 bp, Homo sapien
tcctggatgtgctagcacagccacc

SEQ ID NO: 648241 - DNA, 25 bp, Homo sapien
gccaccatcacatcaacataatctt

SEQ ID NO: 648242 - DNA, 25 bp, Homo sapien
catatctccttgcagactggctgct

SEQ ID NO: 648243 - DNA, 25 bp, Homo sapien
tcatatctccttgcagactggctgc

SEQ ID NO: 648244 - DNA, 25 bp, Homo sapien
tatctccttgcagactggctgctcc

SEQ ID NO: 648245 - DNA, 25 bp, Homo sapien
tgtcatatctccttgcagactggct

SEQ ID NO: 648246 - DNA, 25 bp, Homo sapien
cataatagactctggttgataaaac

SEQ ID NO: 648247 - DNA, 25 bp, Homo sapien
gctcatttccataatagactctggt

SEQ ID NO: 648248 - DNA, 25 bp, Homo sapien
ccattttcaggccacgagtagcaat

SEQ ID NO: 648249 - DNA, 25 bp, Homo sapien
tcttcactgtgattgatggtccaca

SEQ ID NO: 648250 - DNA, 25 bp, Homo sapien
gaaactcggacctcagcatcacact

SEQ ID NO: 648251 - DNA, 25 bp, Homo sapien
ccatttcctggaaactcggacctca

SEQ ID NO: 648252 - DNA, 25 bp, Homo sapien
tggaaactcggacctcagcatcaca

SEQ ID NO: 648253 - DNA, 25 bp, Homo sapien
tttcctggaaactcggacctcagca

SEQ ID NO: 648254 - DNA, 25 bp, Homo sapien
agcctttttgtaaggcacagcctga

SEQ ID NO: 648255 - DNA, 25 bp, Homo sapien
cagtgaaaccaccttagcctttttg

SEQ ID NO: 648256 - DNA, 25 bp, Homo sapien
cctggccaggcgccagtactttggg

SEQ ID NO: 648257 - DNA, 25 bp, Homo sapien
cacaaaccatcaattgcagtgaaac

SEQ ID NO: 648258 - DNA, 25 bp, Homo sapien
caacagggagagtttcctacaagtg

SEQ ID NO: 648259 - DNA, 25 bp, Homo sapien
tgtttcccatttcagccgtgaacaa

SEQ ID NO: 648260 - DNA, 25 bp, Homo sapien
tcagccgtgaacaacagggagagtt

SEQ ID NO: 648261 - DNA, 25 bp, Homo sapien
ggagagtttcctacaagtgactgca

SEQ ID NO: 648262 - DNA, 25 bp, Homo sapien
ggctctccagccccagggctgccat

SEQ ID NO: 648263 - DNA, 25 bp, Homo sapien
caggctctccagccccagggctgcc

SEQ ID NO: 648264 - DNA, 25 bp, Homo sapien
aggctctccagccccagggctgcca

SEQ ID NO: 648265 - DNA, 25 bp, Homo sapien
gtccagtgtccaatcgagttgccat

SEQ ID NO: 648266 - DNA, 25 bp, Homo sapien
gaagtccagtgtccaatcgagttgc

SEQ ID NO: 648267 - DNA, 25 bp, Homo sapien
tgccataatctccacccagctttct

SEQ ID NO: 648268 - DNA, 25 bp, Homo sapien
tattatcttgtctctagcagtagcc

SEQ ID NO: 648269 - DNA, 25 bp, Homo sapien
caggcctgtcgaaatctttttgtaa

SEQ ID NO: 648270 - DNA, 25 bp, Homo sapien
gactgtgaaattatagttgtgaaat

SEQ ID NO: 648271 - DNA, 25 bp, Homo sapien
tctgcttgtgaaatatcatatggct

SEQ ID NO: 648272 - DNA, 25 bp, Homo sapien
tacagcagattcactttcattaccc

SEQ ID NO: 648273 - DNA, 25 bp, Homo sapien
cacttgactccagcaaaggataatg

SEQ ID NO: 648274 - DNA, 25 bp, Homo sapien
tagactatgtggaccacttgactcc

SEQ ID NO: 648275 - DNA, 25 bp, Homo sapien
tgacttagactatgtggaccacttg

SEQ ID NO: 648276 - DNA, 25 bp, Homo sapien
gactccagcaaaggataatggagat

SEQ ID NO: 648277 - DNA, 25 bp, Homo sapien
ctaagcgtgtgaggcatgagaaaac

SEQ ID NO: 648278 - DNA, 25 bp, Homo sapien
tccatagtccacaatcgggcagggt

SEQ ID NO: 648279 - DNA, 25 bp, Homo sapien
tagattccttgaggggagcgccagc

SEQ ID NO: 648280 - DNA, 25 bp, Homo sapien
tcgggcagggtgttgggcttcaatt

SEQ ID NO: 648281 - DNA, 25 bp, Homo sapien
tttggtggcatctcttctttcgtac

SEQ ID NO: 648282 - DNA, 25 bp, Homo sapien
ctttggtggcatctcttctttcgta

SEQ ID NO: 648283 - DNA, 25 bp, Homo sapien
ttggtggcatctcttctttcgtacc

SEQ ID NO: 648284 - DNA, 25 bp, Homo sapien
ctgcggagtacggaggaagagccag

SEQ ID NO: 648285 - DNA, 25 bp, Homo sapien
ttgcacttccgggccactttcttgt

SEQ ID NO: 648286 - DNA, 25 bp, Homo sapien
gccagggcatcccttgcacttccgg

SEQ ID NO: 648287 - DNA, 25 bp, Homo sapien
tgcggagtacggaggaagagccagg

SEQ ID NO: 648288 - DNA, 25 bp, Homo sapien
cttggcttgtgtccacaaccctcat

SEQ ID NO: 648289 - DNA, 25 bp, Homo sapien
ttctcagtggcaggacactggccac

SEQ ID NO: 648290 - DNA, 25 bp, Homo sapien
caccaatcccatcttggcttgtgtc

SEQ ID NO: 648291 - DNA, 25 bp, Homo sapien
ttgtgtccacaaccctcatgggctc

SEQ ID NO: 648292 - DNA, 25 bp, Homo sapien
actcatctctattcttgggcttata

SEQ ID NO: 648293 - DNA, 25 bp, Homo sapien
tgtgattctgaacatagaactcctc

SEQ ID NO: 648294 - DNA, 25 bp, Homo sapien
tctgaacatagaactcctctctgcc

SEQ ID NO: 648295 - DNA, 25 bp, Homo sapien
ttcctggtctcccaactcatctcta

SEQ ID NO: 648296 - DNA, 25 bp, Homo sapien
agctgaccctggctggatgtcagcc

SEQ ID NO: 648297 - DNA, 25 bp, Homo sapien
cagctgaccctggctggatgtcagc

SEQ ID NO: 648298 - DNA, 25 bp, Homo sapien
tgtcagccctatccactccttgact

SEQ ID NO: 648299 - DNA, 25 bp, Homo sapien
cactccttgacttagcacaacctgc

SEQ ID NO: 648300 - DNA, 25 bp, Homo sapien
gatgaatctgcaagaaagtttgaaa

SEQ ID NO: 648301 - DNA, 25 bp, Homo sapien
tgatgaatctgcaagaaagtttgaa

SEQ ID NO: 648302 - DNA, 25 bp, Homo sapien
catgcctatccaggctcggatttcc

SEQ ID NO: 648303 - DNA, 25 bp, Homo sapien
tatccaggctcggatttcctccttt

SEQ ID NO: 648304 - DNA, 25 bp, Homo sapien
tgcctatccaggctcggatttcctc

SEQ ID NO: 648305 - DNA, 25 bp, Homo sapien
ccaggctcggatttcctcctttact

SEQ ID NO: 648306 - DNA, 25 bp, Homo sapien
ggttttccaggcctactgtgcacaa

SEQ ID NO: 648307 - DNA, 25 bp, Homo sapien
caggcctactgtgcacaacagcatt

SEQ ID NO: 648308 - DNA, 25 bp, Homo sapien
tttccaggcctactgtgcacaacag

SEQ ID NO: 648309 - DNA, 25 bp, Homo sapien
tactgtgcacaacagcattcctgta

SEQ ID NO: 648310 - DNA, 25 bp, Homo sapien
tagcttatgcagaaggccatgtgtt

SEQ ID NO: 648311 - DNA, 25 bp, Homo sapien
gggtcctctgggcatagcttatgca

SEQ ID NO: 648312 - DNA, 25 bp, Homo sapien
ggcatagcttatgcagaaggccatg

SEQ ID NO: 648313 - DNA, 25 bp, Homo sapien
tctgggcatagcttatgcagaaggc

SEQ ID NO: 648314 - DNA, 25 bp, Homo sapien
tcaaaccgtgtaacatccagactgg

SEQ ID NO: 648315 - DNA, 25 bp, Homo sapien
tgtgggctggtatactggtcctgtc

SEQ ID NO: 648316 - DNA, 25 bp, Homo sapien
ggagtgtctgacatagaggctttct

SEQ ID NO: 648317 - DNA, 25 bp, Homo sapien
gaggctttctggtatgttccatcca

SEQ ID NO: 648318 - DNA, 25 bp, Homo sapien
ttgtatatccatgtccactgaaagc

SEQ ID NO: 648319 - DNA, 25 bp, Homo sapien
gtccactgaaagcaggcatattatc

SEQ ID NO: 648320 - DNA, 25 bp, Homo sapien
cttgtatatccatgtccactgaaag

SEQ ID NO: 648321 - DNA, 25 bp, Homo sapien
gaaagcaggcatattatcagggata

SEQ ID NO: 648322 - DNA, 25 bp, Homo sapien
tagatcagctatggtgacattctga

SEQ ID NO: 648323 - DNA, 25 bp, Homo sapien
agaatgtttgatgactctgcaggtc

SEQ ID NO: 648324 - DNA, 25 bp, Homo sapien
gagactctgagcatgtacgcttctg

SEQ ID NO: 648325 - DNA, 25 bp, Homo sapien
aggaatgtgtttggtttagatcagc

SEQ ID NO: 648326 - DNA, 25 bp, Homo sapien
ctgctggccttgtgactggcagaac

SEQ ID NO: 648327 - DNA, 25 bp, Homo sapien
ctgtggtatgtttcattggtggagt

SEQ ID NO: 648328 - DNA, 25 bp, Homo sapien
agaactgaccctggactaactgcat

SEQ ID NO: 648329 - DNA, 25 bp, Homo sapien
gtggagttctgctggccttgtgact

SEQ ID NO: 648330 - DNA, 25 bp, Homo sapien
taatagctgagatgatagtggtcaa

SEQ ID NO: 648331 - DNA, 25 bp, Homo sapien
tgagatgtctgaatctgacatttaa

SEQ ID NO: 648332 - DNA, 25 bp, Homo sapien
cttctcgaggtcagattcatgcaga

SEQ ID NO: 648333 - DNA, 25 bp, Homo sapien
attgttgccagaatgtagtgtcttg

SEQ ID NO: 648334 - DNA, 25 bp, Homo sapien
cagcaatgggtatggcaagggtttc

SEQ ID NO: 648335 - DNA, 25 bp, Homo sapien
agatatacgtaagcctgccttttgg

SEQ ID NO: 648336 - DNA, 25 bp, Homo sapien
tagctggcaactggtgctaactgct

SEQ ID NO: 648337 - DNA, 25 bp, Homo sapien
gggtttctggtagatatacgtaagc

SEQ ID NO: 648338 - DNA, 25 bp, Homo sapien
cactcatcctgatgcagtaacttgg

SEQ ID NO: 648339 - DNA, 25 bp, Homo sapien
acactcatcctgatgcagtaacttg

SEQ ID NO: 648340 - DNA, 25 bp, Homo sapien
actcatcctgatgcagtaacttgga

SEQ ID NO: 648341 - DNA, 25 bp, Homo sapien
cacactcatcctgatgcagtaactt

SEQ ID NO: 648342 - DNA, 25 bp, Homo sapien
gcactaccctgcaaatcctcagaga

SEQ ID NO: 648343 - DNA, 25 bp, Homo sapien
tcagagactgcccataggccatctg

SEQ ID NO: 648344 - DNA, 25 bp, Homo sapien
catctgatcatcagtgtaaggcttc

SEQ ID NO: 648345 - DNA, 25 bp, Homo sapien
tgatctgaggtccactactggcctc

SEQ ID NO: 648346 - DNA, 25 bp, Homo sapien
cttggagtccattcacacaatttag

SEQ ID NO: 648347 - DNA, 25 bp, Homo sapien
ttggagtccattcacacaatttagt

SEQ ID NO: 648348 - DNA, 25 bp, Homo sapien
gagaacagccttcttaatatgaagg

SEQ ID NO: 648349 - DNA, 25 bp, Homo sapien
gcactggcaagacagaaagacaaat

SEQ ID NO: 648350 - DNA, 25 bp, Homo sapien
agacaaataaattgcatggtgtgag

SEQ ID NO: 648351 - DNA, 25 bp, Homo sapien
catcttgcaattcagaattctgaga

SEQ ID NO: 648352 - DNA, 25 bp, Homo sapien
tagtcatcaccaaactagatctggt

SEQ ID NO: 648353 - DNA, 25 bp, Homo sapien
cttgccagaagtagcatctgggcct

SEQ ID NO: 648354 - DNA, 25 bp, Homo sapien
gaagacagaggaattatcactgcct

SEQ ID NO: 648355 - DNA, 25 bp, Homo sapien
cagcttgtaaacgtgcatagatgtt

SEQ ID NO: 648356 - DNA, 25 bp, Homo sapien
tactcagttctggtgaatagcagcc

SEQ ID NO: 648357 - DNA, 25 bp, Homo sapien
tggtatctcagtccctcattggcac

SEQ ID NO: 648358 - DNA, 25 bp, Homo sapien
tcagttgcctacatgggttaccctc

SEQ ID NO: 648359 - DNA, 25 bp, Homo sapien
aagaatgtcctatatgagtcctcag

SEQ ID NO: 648360 - DNA, 25 bp, Homo sapien
gctacccgacgtaacactggtatct

SEQ ID NO: 648361 - DNA, 25 bp, Homo sapien
cactggtatctttttgacagcaaaa

SEQ ID NO: 648362 - DNA, 25 bp, Homo sapien
ctatgctacccgacgtaacactggt

SEQ ID NO: 648363 - DNA, 25 bp, Homo sapien
acactggtatctttttgacagcaaa

SEQ ID NO: 648364 - DNA, 25 bp, Homo sapien
ctctgacattacttatagcacattt

SEQ ID NO: 648365 - DNA, 25 bp, Homo sapien
cattacttatagcacatttcgcagc

SEQ ID NO: 648366 - DNA, 25 bp, Homo sapien
tacttatagcacatttcgcagctgg

SEQ ID NO: 648367 - DNA, 25 bp, Homo sapien
ttatagcacatttcgcagctgggtt

SEQ ID NO: 648368 - DNA, 25 bp, Homo sapien
agtcttgtgaatacaggttggagct

SEQ ID NO: 648369 - DNA, 25 bp, Homo sapien
gagcttgggaacaccaggattttag

SEQ ID NO: 648370 - DNA, 25 bp, Homo sapien
ggagcttgggaacaccaggatttta

SEQ ID NO: 648371 - DNA, 25 bp, Homo sapien
agcttgggaacaccaggattttaga

SEQ ID NO: 648372 - DNA, 25 bp, Homo sapien
tattttcaagacaacattccatatt

SEQ ID NO: 648373 - DNA, 25 bp, Homo sapien
ggtgcaactgtggcatcaccagcct

SEQ ID NO: 648374 - DNA, 25 bp, Homo sapien
aaaatattaggggtgcaactgtggc

SEQ ID NO: 648375 - DNA, 25 bp, Homo sapien
gaattggtcgttctaaactcttctc

SEQ ID NO: 648376 - DNA, 25 bp, Homo sapien
cactaatgaacagcgtcacatcaga

SEQ ID NO: 648377 - DNA, 25 bp, Homo sapien
taatgaacagcgtcacatcagacac

SEQ ID NO: 648378 - DNA, 25 bp, Homo sapien
gaacagcgtcacatcagacacacac

SEQ ID NO: 648379 - DNA, 25 bp, Homo sapien
tcagccactaatgaacagcgtcaca

SEQ ID NO: 648380 - DNA, 25 bp, Homo sapien
tgttcccttccttgcgtagtgtacc

SEQ ID NO: 648381 - DNA, 25 bp, Homo sapien
catgttcccttccttgcgtagtgta

SEQ ID NO: 648382 - DNA, 25 bp, Homo sapien
ttcatgttcccttccttgcgtagtg

SEQ ID NO: 648383 - DNA, 25 bp, Homo sapien
tcccttccttgcgtagtgtacccac

SEQ ID NO: 648384 - DNA, 25 bp, Homo sapien
agggggcactggtacccatgccggg

SEQ ID NO: 648385 - DNA, 25 bp, Homo sapien
cactggtacccatgccggggctggt

SEQ ID NO: 648386 - DNA, 25 bp, Homo sapien
tcccagcaatgctccaggagcatgg

SEQ ID NO: 648387 - DNA, 25 bp, Homo sapien
taccaccttcccgtgggccacagca

SEQ ID NO: 648388 - DNA, 25 bp, Homo sapien
cagaggcagctcaatacagccatcc

SEQ ID NO: 648389 - DNA, 25 bp, Homo sapien
gcttctctgagttaatttggaatac

SEQ ID NO: 648390 - DNA, 25 bp, Homo sapien
gaaggtgatctgtaccaccacatgc

SEQ ID NO: 648391 - DNA, 25 bp, Homo sapien
aactgtccccatgaacatttgtaaa

SEQ ID NO: 648392 - DNA, 25 bp, Homo sapien
ccctctcaggggatacagattgacc

SEQ ID NO: 648393 - DNA, 25 bp, Homo sapien
cagccctctcaggggatacagattg

SEQ ID NO: 648394 - DNA, 25 bp, Homo sapien
gccctctcaggggatacagattgac

SEQ ID NO: 648395 - DNA, 25 bp, Homo sapien
ctctcaggggatacagattgaccat

SEQ ID NO: 648396 - DNA, 25 bp, Homo sapien
ctccaacctctaaatcggtgttggc

SEQ ID NO: 648397 - DNA, 25 bp, Homo sapien
cctctaaatcggtgttggcagtgga

SEQ ID NO: 648398 - DNA, 25 bp, Homo sapien
taattgcgtttctggcctggctgtg

SEQ ID NO: 648399 - DNA, 25 bp, Homo sapien
cactggaccagtaaaaataattgcg

SEQ ID NO: 648400 - DNA, 25 bp, Homo sapien
attctcctatttggctttggccatg

SEQ ID NO: 648401 - DNA, 25 bp, Homo sapien
tattctcctatttggctttggccat

SEQ ID NO: 648402 - DNA, 25 bp, Homo sapien
gagagtacattctttctcccgcatg

SEQ ID NO: 648403 - DNA, 25 bp, Homo sapien
gagtacattctttctcccgcatgcc

SEQ ID NO: 648404 - DNA, 25 bp, Homo sapien
agggagagtacattctttctcccgc

SEQ ID NO: 648405 - DNA, 25 bp, Homo sapien
ctcctccacggtgttctcgtttagt

SEQ ID NO: 648406 - DNA, 25 bp, Homo sapien
ctctaggaacttaattaagttcctg

SEQ ID NO: 648407 - DNA, 25 bp, Homo sapien
ttttgacaaatccagattacaaaca

SEQ ID NO: 648408 - DNA, 25 bp, Homo sapien
tccagattacaaacaataaccacca

SEQ ID NO: 648409 - DNA, 25 bp, Homo sapien
tgcctttgtcttgggtattgacttg

SEQ ID NO: 648410 - DNA, 25 bp, Homo sapien
ggctcccgataaatgctttctggaa

SEQ ID NO: 648411 - DNA, 25 bp, Homo sapien
ttcctaaaaggctcccgataaatgc

SEQ ID NO: 648412 - DNA, 25 bp, Homo sapien
tctgtttcctaaaaggctcccgata

SEQ ID NO: 648413 - DNA, 25 bp, Homo sapien
taaaaggctcccgataaatgctttc

SEQ ID NO: 648414 - DNA, 25 bp, Homo sapien
tagtacacagagaatcatccctctc

SEQ ID NO: 648415 - DNA, 25 bp, Homo sapien
ccagtaatatagtacacagagaatc

SEQ ID NO: 648416 - DNA, 25 bp, Homo sapien
tctgcagggatctttggtagactgt

SEQ ID NO: 648417 - DNA, 25 bp, Homo sapien
cctctctgcagggatctttggtaga

SEQ ID NO: 648418 - DNA, 25 bp, Homo sapien
ggaaaagctcactgcctcatcttgc

SEQ ID NO: 648419 - DNA, 25 bp, Homo sapien
aaaaactcggaaaagctcactgcct

SEQ ID NO: 648420 - DNA, 25 bp, Homo sapien
ggtagtgagacatacattgaagatg

SEQ ID NO: 648421 - DNA, 25 bp, Homo sapien
aactctgaggtagtgagacatacat

SEQ ID NO: 648422 - DNA, 25 bp, Homo sapien
atgttgatgaagatagaagccaagg

SEQ ID NO: 648423 - DNA, 25 bp, Homo sapien
acggcagaggtgtaacactcaggga

SEQ ID NO: 648424 - DNA, 25 bp, Homo sapien
tcaaaacactgtaatggatgacggc

SEQ ID NO: 648425 - DNA, 25 bp, Homo sapien
tgccaccagggaatttaatgttgat

SEQ ID NO: 648426 - DNA, 25 bp, Homo sapien
tattaaacttaacagggtcaatatg

SEQ ID NO: 648427 - DNA, 25 bp, Homo sapien
gtggcacctggaaagtggtgtatca

SEQ ID NO: 648428 - DNA, 25 bp, Homo sapien
cagtgactccgctttcaatccaatc

SEQ ID NO: 648429 - DNA, 25 bp, Homo sapien
ttaacagggtcaatatgatgcaaag

SEQ ID NO: 648430 - DNA, 25 bp, Homo sapien
caggcacctccactcgagattattc

SEQ ID NO: 648431 - DNA, 25 bp, Homo sapien
tttcaactccagtggtcctgaggct

SEQ ID NO: 648432 - DNA, 25 bp, Homo sapien
gggtcccatctcgatctctataaat

SEQ ID NO: 648433 - DNA, 25 bp, Homo sapien
ttattcctggatatgtgctcacccc

SEQ ID NO: 648434 - DNA, 25 bp, Homo sapien
gactgactataaatccctatcccgt

SEQ ID NO: 648435 - DNA, 25 bp, Homo sapien
gacatcctctttctgggactgacta

SEQ ID NO: 648436 - DNA, 25 bp, Homo sapien
cagtgcactgggttgttgggatata

SEQ ID NO: 648437 - DNA, 25 bp, Homo sapien
gaccttgtaaccctcagcattcttt

SEQ ID NO: 648438 - DNA, 25 bp, Homo sapien
gcatcaaccagaagttttttgttgc

SEQ ID NO: 648439 - DNA, 25 bp, Homo sapien
tcaaccagaagttttttgttgcttc

SEQ ID NO: 648440 - DNA, 25 bp, Homo sapien
ctgcatcaaccagaagttttttgtt

SEQ ID NO: 648441 - DNA, 25 bp, Homo sapien
catcaaccagaagttttttgttgct

SEQ ID NO: 648442 - DNA, 25 bp, Homo sapien
taacatactgattgagcctctttat

SEQ ID NO: 648443 - DNA, 25 bp, Homo sapien
ttaacatactgattgagcctcttta

SEQ ID NO: 648444 - DNA, 25 bp, Homo sapien
aacatactgattgagcctctttatc

SEQ ID NO: 648445 - DNA, 25 bp, Homo sapien
tttaacatactgattgagcctcttt

SEQ ID NO: 648446 - DNA, 25 bp, Homo sapien
ctggtgaagctctgcctgttttatg

SEQ ID NO: 648447 - DNA, 25 bp, Homo sapien
tctgcctgttttatgatctgacgtc

SEQ ID NO: 648448 - DNA, 25 bp, Homo sapien
gatctgacgtcccagatcttcatct

SEQ ID NO: 648449 - DNA, 25 bp, Homo sapien
gcctgttttatgatctgacgtccca

SEQ ID NO: 648450 - DNA, 25 bp, Homo sapien
cagtctccgtcctgatgcaacacga

SEQ ID NO: 648451 - DNA, 25 bp, Homo sapien
tgagctttcagccataaagccaaga

SEQ ID NO: 648452 - DNA, 25 bp, Homo sapien
ggttctggctggcacgacattgtcc

SEQ ID NO: 648453 - DNA, 25 bp, Homo sapien
tgtccccgactaatgctaggatggt

SEQ ID NO: 648454 - DNA, 25 bp, Homo sapien
taatagctacaatacccagagcctc

SEQ ID NO: 648455 - DNA, 25 bp, Homo sapien
agctacaatacccagagcctctaac

SEQ ID NO: 648456 - DNA, 25 bp, Homo sapien
gctacaatacccagagcctctaaca

SEQ ID NO: 648457 - DNA, 25 bp, Homo sapien
atagctacaatacccagagcctcta

SEQ ID NO: 648458 - DNA, 25 bp, Homo sapien
tctccccatgaaggcaggtccaggt

SEQ ID NO: 648459 - DNA, 25 bp, Homo sapien
catgtgtggccatcacttatgcagt

SEQ ID NO: 648460 - DNA, 25 bp, Homo sapien
gagcctttggtgactactgctacta

SEQ ID NO: 648461 - DNA, 25 bp, Homo sapien
agagctggggcaccgtgcctgctct

SEQ ID NO: 648462 - DNA, 25 bp, Homo sapien
tcatgccatactctgaatcttcctc

SEQ ID NO: 648463 - DNA, 25 bp, Homo sapien
ctgtcatgccatactctgaatcttc

SEQ ID NO: 648464 - DNA, 25 bp, Homo sapien
tttgcatctgctgaggtttctgtca

SEQ ID NO: 648465 - DNA, 25 bp, Homo sapien
tctgctgaggtttctgtcatgccat

SEQ ID NO: 648466 - DNA, 25 bp, Homo sapien
ccatcatttgctttctgtcctgcta

SEQ ID NO: 648467 - DNA, 25 bp, Homo sapien
tgtagaaatttcagcaagaatttcc

SEQ ID NO: 648468 - DNA, 25 bp, Homo sapien
aagtgaatgtagaaatttcagcaag

SEQ ID NO: 648469 - DNA, 25 bp, Homo sapien
ctttctgtcctgctataattgtcat

SEQ ID NO: 648470 - DNA, 25 bp, Homo sapien
tgtgtactgcttgattactctgctg

SEQ ID NO: 648471 - DNA, 25 bp, Homo sapien
gttccctttctggagtagttgctca

SEQ ID NO: 648472 - DNA, 25 bp, Homo sapien
ccctttaggattgaaggtgttccag

SEQ ID NO: 648473 - DNA, 25 bp, Homo sapien
ggtgttccagtcacccatagaggtg

SEQ ID NO: 648474 - DNA, 25 bp, Homo sapien
aaccttgcctttgcagcatcactag

SEQ ID NO: 648475 - DNA, 25 bp, Homo sapien
tatggtctcctaaccttgcctttgc

SEQ ID NO: 648476 - DNA, 25 bp, Homo sapien
gagctttatggtctcctaaccttgc

SEQ ID NO: 648477 - DNA, 25 bp, Homo sapien
accttgcctttgcagcatcactagc

SEQ ID NO: 648478 - DNA, 25 bp, Homo sapien
ctactttttgtattggcaggacttg

SEQ ID NO: 648479 - DNA, 25 bp, Homo sapien
gatatgccgctgtgtaactttcaat

SEQ ID NO: 648480 - DNA, 25 bp, Homo sapien
tgtaccaggatatgccgctgtgtaa

SEQ ID NO: 648481 - DNA, 25 bp, Homo sapien
actttttgtattggcaggacttggc

SEQ ID NO: 648482 - DNA, 25 bp, Homo sapien
tacttgctgtacttgcagttaccaa

SEQ ID NO: 648483 - DNA, 25 bp, Homo sapien
gctgcctccattgaagttgaccaag

SEQ ID NO: 648484 - DNA, 25 bp, Homo sapien
aaatttttgattctggctgcctcca

SEQ ID NO: 648485 - DNA, 25 bp, Homo sapien
taaagctggcagagttatacttgct

SEQ ID NO: 648486 - DNA, 25 bp, Homo sapien
tctcggcttcacgaaaatgacccag

SEQ ID NO: 648487 - DNA, 25 bp, Homo sapien
ggattgaatcatcgtgaggagtgtc

SEQ ID NO: 648488 - DNA, 25 bp, Homo sapien
cactcgtgggatcaaaaaaggacct

SEQ ID NO: 648489 - DNA, 25 bp, Homo sapien
ggacctcagggtcatatctgatcct

SEQ ID NO: 648490 - DNA, 25 bp, Homo sapien
caaagggaatgcctcaagagagcca

SEQ ID NO: 648491 - DNA, 25 bp, Homo sapien
tctgctatgttgagaagtgcagctt

SEQ ID NO: 648492 - DNA, 25 bp, Homo sapien
tacagggagtagaggctctgctatg

SEQ ID NO: 648493 - DNA, 25 bp, Homo sapien
tatgttgagaagtgcagcttcggca

SEQ ID NO: 648494 - DNA, 25 bp, Homo sapien
agctcagtaggcacctgcctttcca

SEQ ID NO: 648495 - DNA, 25 bp, Homo sapien
ctgagaaagacacagctcagtaggc

SEQ ID NO: 648496 - DNA, 25 bp, Homo sapien
gaaagacacagctcagtaggcacct

SEQ ID NO: 648497 - DNA, 25 bp, Homo sapien
gctcagtaggcacctgcctttccag

SEQ ID NO: 648498 - DNA, 25 bp, Homo sapien
tatgaaagatctgctaggagaatcg

SEQ ID NO: 648499 - DNA, 25 bp, Homo sapien
gctaggagaatcgagtttcagagaa

SEQ ID NO: 648500 - DNA, 25 bp, Homo sapien
catattttgcatgacagcagtagta

SEQ ID NO: 648501 - DNA, 25 bp, Homo sapien
cattttcattgtcacccactatgaa

SEQ ID NO: 648502 - DNA, 25 bp, Homo sapien
ggacaaggttgacctgtctggctgc

SEQ ID NO: 648503 - DNA, 25 bp, Homo sapien
acaaggttgacctgtctggctgcct

SEQ ID NO: 648504 - DNA, 25 bp, Homo sapien
gaaggacaaggttgacctgtctggc

SEQ ID NO: 648505 - DNA, 25 bp, Homo sapien
aaggacaaggttgacctgtctggct

SEQ ID NO: 648506 - DNA, 25 bp, Homo sapien
ggtcctcaggtgtccaacattcctg

SEQ ID NO: 648507 - DNA, 25 bp, Homo sapien
catcatacatatcccaccgtgcttt

SEQ ID NO: 648508 - DNA, 25 bp, Homo sapien
ccaacattcctgagcagccactgtg

SEQ ID NO: 648509 - DNA, 25 bp, Homo sapien
cagagagccctaactgaaaggcttt

SEQ ID NO: 648510 - DNA, 25 bp, Homo sapien
cctttcccctaaagatcaaatctgg

SEQ ID NO: 648511 - DNA, 25 bp, Homo sapien
ggttcattagctattctggctgatc

SEQ ID NO: 648512 - DNA, 25 bp, Homo sapien
tgtcggcagcaaagcaagctgtagt

SEQ ID NO: 648513 - DNA, 25 bp, Homo sapien
gctgtagtcaggttcccaagggaat

SEQ ID NO: 648514 - DNA, 25 bp, Homo sapien
tgggcgtttgagaatgcgtcacact

SEQ ID NO: 648515 - DNA, 25 bp, Homo sapien
gaaaggcatcaaagagaagacgaca

SEQ ID NO: 648516 - DNA, 25 bp, Homo sapien
tcagcaatgagggtgtagtaaattc

SEQ ID NO: 648517 - DNA, 25 bp, Homo sapien
gaatgccactgttgcccgccattgt

SEQ ID NO: 648518 - DNA, 25 bp, Homo sapien
cgttggtggcattcgttctactgta

SEQ ID NO: 648519 - DNA, 25 bp, Homo sapien
tgccgactgtgggaacatccgttgg

SEQ ID NO: 648520 - DNA, 25 bp, Homo sapien
tgggccatctctgagtgccgactgt

SEQ ID NO: 648521 - DNA, 25 bp, Homo sapien
gtatagataaaaggctcaccaatgc

SEQ ID NO: 648522 - DNA, 25 bp, Homo sapien
caaaagaacagaccctgtgaaacct

SEQ ID NO: 648523 - DNA, 25 bp, Homo sapien
ctgtgaaacctctggagatatagtc

SEQ ID NO: 648524 - DNA, 25 bp, Homo sapien
tccaaaagaacagaccctgtgaaac

SEQ ID NO: 648525 - DNA, 25 bp, Homo sapien
cctgtgaaacctctggagatatagt

SEQ ID NO: 648526 - DNA, 25 bp, Homo sapien
tactgtacacaaaagtcgctgtcag

SEQ ID NO: 648527 - DNA, 25 bp, Homo sapien
ggtgtttgatctggttatccatact

SEQ ID NO: 648528 - DNA, 25 bp, Homo sapien
ttttattggttggtgtttgatctgg

SEQ ID NO: 648529 - DNA, 25 bp, Homo sapien
tgatctggttatccatactgtacac

SEQ ID NO: 648530 - DNA, 25 bp, Homo sapien
attggaaaagtctataggctcttgt

SEQ ID NO: 648531 - DNA, 25 bp, Homo sapien
tctataggctcttgtagagatctgt

SEQ ID NO: 648532 - DNA, 25 bp, Homo sapien
agatctgtagggcaatttgttactt

SEQ ID NO: 648533 - DNA, 25 bp, Homo sapien
gctcttgtagagatctgtagggcaa

SEQ ID NO: 648534 - DNA, 25 bp, Homo sapien
tttgtgcctattcctttcatggtcc

SEQ ID NO: 648535 - DNA, 25 bp, Homo sapien
ttgtgcctattcctttcatggtcca

SEQ ID NO: 648536 - DNA, 25 bp, Homo sapien
ttcatggtccatcctcctgactgct

SEQ ID NO: 648537 - DNA, 25 bp, Homo sapien
attcctttcatggtccatcctcctg

SEQ ID NO: 648538 - DNA, 25 bp, Homo sapien
agtccatttccacatgggaccccag

SEQ ID NO: 648539 - DNA, 25 bp, Homo sapien
aagtccatttccacatgggacccca

SEQ ID NO: 648540 - DNA, 25 bp, Homo sapien
agaacccctcgagggctctactgtg

SEQ ID NO: 648541 - DNA, 25 bp, Homo sapien
gatcactagccccatcaatctgttt

SEQ ID NO: 648542 - DNA, 25 bp, Homo sapien
tctactgtgtcctcagtagcagaca

SEQ ID NO: 648543 - DNA, 25 bp, Homo sapien
cactgtatcatgttcaggtgcttgt

SEQ ID NO: 648544 - DNA, 25 bp, Homo sapien
gtgtcagctgccctatgactggtgg

SEQ ID NO: 648545 - DNA, 25 bp, Homo sapien
aaaaatggaggttggctgcagatac

SEQ ID NO: 648546 - DNA, 25 bp, Homo sapien
tcactgaacacaggataatcttggc

SEQ ID NO: 648547 - DNA, 25 bp, Homo sapien
gcttcgctgtgtcaccctcttcagg

SEQ ID NO: 648548 - DNA, 25 bp, Homo sapien
ggtgaggtccctcttcctgtagaga

SEQ ID NO: 648549 - DNA, 25 bp, Homo sapien
gggtgagaggtctctcttaggtctc

SEQ ID NO: 648550 - DNA, 25 bp, Homo sapien
gtccctcttcctgtagagagccatc

SEQ ID NO: 648551 - DNA, 25 bp, Homo sapien
tcctgtgtccatgcatggaggaagg

SEQ ID NO: 648552 - DNA, 25 bp, Homo sapien
caaccacttcttacgctcatgagca

SEQ ID NO: 648553 - DNA, 25 bp, Homo sapien
taacacttaaggctattgcagttgc

SEQ ID NO: 648554 - DNA, 25 bp, Homo sapien
gctgggaccatctgaagattcactc

SEQ ID NO: 648555 - DNA, 25 bp, Homo sapien
tcctgttcacaaggtttggagctca

SEQ ID NO: 648556 - DNA, 25 bp, Homo sapien
gattgaaatcgaacactcttggagg

SEQ ID NO: 648557 - DNA, 25 bp, Homo sapien
ttcggacctcaacaacagatgctgg

SEQ ID NO: 648558 - DNA, 25 bp, Homo sapien
tccggtgctaagtaatgacgctgct

SEQ ID NO: 648559 - DNA, 25 bp, Homo sapien
tagtttggcaagaaagtggccggcc

SEQ ID NO: 648560 - DNA, 25 bp, Homo sapien
tctacacaaggagcaaaggaggaat

SEQ ID NO: 648561 - DNA, 25 bp, Homo sapien
tagaccaagactgccctgatcagct

SEQ ID NO: 648562 - DNA, 25 bp, Homo sapien
ggtgtcctcagcttcctagaccaag

SEQ ID NO: 648563 - DNA, 25 bp, Homo sapien
tcacaggcgagtgcaggtgtcctca

SEQ ID NO: 648564 - DNA, 25 bp, Homo sapien
aaagcctgattagtaccagttgcat

SEQ ID NO: 648565 - DNA, 25 bp, Homo sapien
caagtccacgcagtttgttaatgtc

SEQ ID NO: 648566 - DNA, 25 bp, Homo sapien
agatctctcagcttaatgccccaac

SEQ ID NO: 648567 - DNA, 25 bp, Homo sapien
gtgaaccagcaaggcatagacagaa

SEQ ID NO: 648568 - DNA, 25 bp, Homo sapien
tggtcccttgagatctgttgactct

SEQ ID NO: 648569 - DNA, 25 bp, Homo sapien
tgtttggtcctcatggtcccttgag

SEQ ID NO: 648570 - DNA, 25 bp, Homo sapien
agatctgttgactctcagctatttc

SEQ ID NO: 648571 - DNA, 25 bp, Homo sapien
tagttatcggccctcagttcagagc

SEQ ID NO: 648572 - DNA, 25 bp, Homo sapien
tgaggtcctctatagttgtgcaaaa

SEQ ID NO: 648573 - DNA, 25 bp, Homo sapien
ggtcctctatagttgtgcaaaatga

SEQ ID NO: 648574 - DNA, 25 bp, Homo sapien
gtgtgcatgaggtcctctatagttg

SEQ ID NO: 648575 - DNA, 25 bp, Homo sapien
gcatgaggtcctctatagttgtgca

SEQ ID NO: 648576 - DNA, 25 bp, Homo sapien
tctgttcctgtgcatagatacagag

SEQ ID NO: 648577 - DNA, 25 bp, Homo sapien
catctgttcctgtgcatagatacag

SEQ ID NO: 648578 - DNA, 25 bp, Homo sapien
ctgttcctgtgcatagatacagaga

SEQ ID NO: 648579 - DNA, 25 bp, Homo sapien
tgttcctgtgcatagatacagagat

SEQ ID NO: 648580 - DNA, 25 bp, Homo sapien
tcagtggcaccaagcgttatttcaa

SEQ ID NO: 648581 - DNA, 25 bp, Homo sapien
ttcaagagttattcttcctttgtgt

SEQ ID NO: 648582 - DNA, 25 bp, Homo sapien
gtcacactgctgtctatgcagctcc

SEQ ID NO: 648583 - DNA, 25 bp, Homo sapien
tccactaaatcaagtgtgagcttca

SEQ ID NO: 648584 - DNA, 25 bp, Homo sapien
cctgcagtctgccttacgggtagtg

SEQ ID NO: 648585 - DNA, 25 bp, Homo sapien
tacgggtagtgtgctctatcatccc

SEQ ID NO: 648586 - DNA, 25 bp, Homo sapien
tatcatccctccaccatcggactgt

SEQ ID NO: 648587 - DNA, 25 bp, Homo sapien
ttcttataagcaaactgctgagaag

SEQ ID NO: 648588 - DNA, 25 bp, Homo sapien
cctccaggactggaattaggtgctt

SEQ ID NO: 648589 - DNA, 25 bp, Homo sapien
ttaggtgcttaagagcacctgctgc

SEQ ID NO: 648590 - DNA, 25 bp, Homo sapien
aatgttagctgtacctaactgggtc

SEQ ID NO: 648591 - DNA, 25 bp, Homo sapien
cctaactgggtcttgtattcactca

SEQ ID NO: 648592 - DNA, 25 bp, Homo sapien
actcttcttccatggcggtggcaag

SEQ ID NO: 648593 - DNA, 25 bp, Homo sapien
gactcatggcgggaagtgaaagact

SEQ ID NO: 648594 - DNA, 25 bp, Homo sapien
cagactcatggcgggaagtgaaaga

SEQ ID NO: 648595 - DNA, 25 bp, Homo sapien
actcatggcgggaagtgaaagactc

SEQ ID NO: 648596 - DNA, 25 bp, Homo sapien
agagctgcaggtaaaatgcttcccc

SEQ ID NO: 648597 - DNA, 25 bp, Homo sapien
tcagctctgctactagtggcctcct

SEQ ID NO: 648598 - DNA, 25 bp, Homo sapien
caagcaagacaacgttaagtgattc

SEQ ID NO: 648599 - DNA, 25 bp, Homo sapien
taagtgattcagtcctgcttgtggg

SEQ ID NO: 648600 - DNA, 25 bp, Homo sapien
catgtgtcaccaactgatcattgta

SEQ ID NO: 648601 - DNA, 25 bp, Homo sapien
tgaggaaggagggtgtgttaaccta

SEQ ID NO: 648602 - DNA, 25 bp, Homo sapien
acagcagcaggactctcatagcagg

SEQ ID NO: 648603 - DNA, 25 bp, Homo sapien
ttgtaaataaagtggacctgcttct

SEQ ID NO: 648604 - DNA, 25 bp, Homo sapien
gaccactctagacttggatatccaa

SEQ ID NO: 648605 - DNA, 25 bp, Homo sapien
taccagaatcctagtgtagaccact

SEQ ID NO: 648606 - DNA, 25 bp, Homo sapien
acctgatttatcatctaatactgac

SEQ ID NO: 648607 - DNA, 25 bp, Homo sapien
gcagctttctgcctaccagaatcct

SEQ ID NO: 648608 - DNA, 25 bp, Homo sapien
accaccaagcatccagctcaagctt

SEQ ID NO: 648609 - DNA, 25 bp, Homo sapien
ccaccaagcatccagctcaagctta

SEQ ID NO: 648610 - DNA, 25 bp, Homo sapien
caccaagcatccagctcaagcttac

SEQ ID NO: 648611 - DNA, 25 bp, Homo sapien
cgcacgtacatctccctcttctcca

SEQ ID NO: 648612 - DNA, 25 bp, Homo sapien
ttcgcacgtacatctccctcttctc

SEQ ID NO: 648613 - DNA, 25 bp, Homo sapien
cctttcgcacgtacatctccctctt

SEQ ID NO: 648614 - DNA, 25 bp, Homo sapien
ccctcttctccacagtattgtccat

SEQ ID NO: 648615 - DNA, 25 bp, Homo sapien
acacattagttgaagagctgccctg

SEQ ID NO: 648616 - DNA, 25 bp, Homo sapien
tcaaagcccctcccagattctttcc

SEQ ID NO: 648617 - DNA, 25 bp, Homo sapien
gtcaaagcccctcccagattctttc

SEQ ID NO: 648618 - DNA, 25 bp, Homo sapien
cattagttgaagagctgccctgtat

SEQ ID NO: 648619 - DNA, 25 bp, Homo sapien
catttgctgattctacagaaggtgt

SEQ ID NO: 648620 - DNA, 25 bp, Homo sapien
tttgctgattctacagaaggtgtct

SEQ ID NO: 648621 - DNA, 25 bp, Homo sapien
tgctgattctacagaaggtgtctgg

SEQ ID NO: 648622 - DNA, 25 bp, Homo sapien
ctgattctacagaaggtgtctggag

SEQ ID NO: 648623 - DNA, 25 bp, Homo sapien
gtttagctatgcaataattgagact

SEQ ID NO: 648624 - DNA, 25 bp, Homo sapien
aggctgtttatgctagggtctagtc

SEQ ID NO: 648625 - DNA, 25 bp, Homo sapien
tctttttctatcaatgcctaatgat

SEQ ID NO: 648626 - DNA, 25 bp, Homo sapien
ctaagtcatcttacagaatgagtga

SEQ ID NO: 648627 - DNA, 25 bp, Homo sapien
ctgcagctgagacacagggcattac

SEQ ID NO: 648628 - DNA, 25 bp, Homo sapien
tcttcccgcatatgccctctttgtg

SEQ ID NO: 648629 - DNA, 25 bp, Homo sapien
tgtcggagatcagccacttataagc

SEQ ID NO: 648630 - DNA, 25 bp, Homo sapien
gactccaacccacagtatgtcggag

SEQ ID NO: 648631 - DNA, 25 bp, Homo sapien
atgaggacctcttcccgactccaac

SEQ ID NO: 648632 - DNA, 25 bp, Homo sapien
ataagctgtttgccatattgaatca

SEQ ID NO: 648633 - DNA, 25 bp, Homo sapien
tctgaaagctaaacgcaggctgttc

SEQ ID NO: 648634 - DNA, 25 bp, Homo sapien
gagcgtacttcaccagggctccatc

SEQ ID NO: 648635 - DNA, 25 bp, Homo sapien
gctgttcacctggattgccaagtat

SEQ ID NO: 648636 - DNA, 25 bp, Homo sapien
cactgacatcagagagagcgtactt

SEQ ID NO: 648637 - DNA, 25 bp, Homo sapien
tgaatagccacatgtattgtggtag

SEQ ID NO: 648638 - DNA, 25 bp, Homo sapien
gagtgatggtgaacccccttgattc

SEQ ID NO: 648639 - DNA, 25 bp, Homo sapien
gtggtagttgatcccacagcccaag

SEQ ID NO: 648640 - DNA, 25 bp, Homo sapien
tgtattgtggtagttgatcccacag

SEQ ID NO: 648641 - DNA, 25 bp, Homo sapien
tttcatcctttgaagttccttgact

SEQ ID NO: 648642 - DNA, 25 bp, Homo sapien
taatccattaaatcaagtcctatat

SEQ ID NO: 648643 - DNA, 25 bp, Homo sapien
tgggttggggttagagctctcttat

SEQ ID NO: 648644 - DNA, 25 bp, Homo sapien
catcctttgaagttccttgacttgt

SEQ ID NO: 648645 - DNA, 25 bp, Homo sapien
ggtgctcgcagagtccattctgtca

SEQ ID NO: 648646 - DNA, 25 bp, Homo sapien
tcattggaggtgctgttttcacaca

SEQ ID NO: 648647 - DNA, 25 bp, Homo sapien
agctgtgggcccattatttggtgct

SEQ ID NO: 648648 - DNA, 25 bp, Homo sapien
cattatttggtgctcgcagagtcca

SEQ ID NO: 648649 - DNA, 25 bp, Homo sapien
caaacagagggcaaagaacatctgt

SEQ ID NO: 648650 - DNA, 25 bp, Homo sapien
ctgagatatgaggcaaggaggcaaa

SEQ ID NO: 648651 - DNA, 25 bp, Homo sapien
cccaaacagagggcaaagaacatct

SEQ ID NO: 648652 - DNA, 25 bp, Homo sapien
agcccaaacagagggcaaagaacat

SEQ ID NO: 648653 - DNA, 25 bp, Homo sapien
ttggctggcttgtgaactccatgag

SEQ ID NO: 648654 - DNA, 25 bp, Homo sapien
taggcattgaagtacctggtggaca

SEQ ID NO: 648655 - DNA, 25 bp, Homo sapien
gatgactgatgaagcatttccaaac

SEQ ID NO: 648656 - DNA, 25 bp, Homo sapien
tatcccagaacataataggcattga

SEQ ID NO: 648657 - DNA, 25 bp, Homo sapien
tcatcacttggtaaagacagtttct

SEQ ID NO: 648658 - DNA, 25 bp, Homo sapien
gagtattcccaactaatacatgaaa

SEQ ID NO: 648659 - DNA, 25 bp, Homo sapien
tttcatcacttggtaaagacagttt

SEQ ID NO: 648660 - DNA, 25 bp, Homo sapien
tgattagggtagagtattcccaact

SEQ ID NO: 648661 - DNA, 25 bp, Homo sapien
cagctatgtggcatgaagagttaca

SEQ ID NO: 648662 - DNA, 25 bp, Homo sapien
tatagccagatcaaagacacctgaa

SEQ ID NO: 648663 - DNA, 25 bp, Homo sapien
tgcacaggctgtacaatgaaataga

SEQ ID NO: 648664 - DNA, 25 bp, Homo sapien
gctgattgattttcccgcacataaa

SEQ ID NO: 648665 - DNA, 25 bp, Homo sapien
gggacttccaaaggcgcttcaagta

SEQ ID NO: 648666 - DNA, 25 bp, Homo sapien
tctgtgtcctggcccataagggtta

SEQ ID NO: 648667 - DNA, 25 bp, Homo sapien
tcctggcccataagggttaatggga

SEQ ID NO: 648668 - DNA, 25 bp, Homo sapien
ttccaaaggcgcttcaagtacattg

SEQ ID NO: 648669 - DNA, 25 bp, Homo sapien
agatactgaatccttgagaaccaac

SEQ ID NO: 648670 - DNA, 25 bp, Homo sapien
gatgcagctcagtccaagcacagct

SEQ ID NO: 648671 - DNA, 25 bp, Homo sapien
gatggtattagctcctagacgccct

SEQ ID NO: 648672 - DNA, 25 bp, Homo sapien
gaatcctcaactgaccagatgcact

SEQ ID NO: 648673 - DNA, 25 bp, Homo sapien
tagacgcccttttaggtatccttgc

SEQ ID NO: 648674 - DNA, 25 bp, Homo sapien
gcccttgataaagggacaaatgtca

SEQ ID NO: 648675 - DNA, 25 bp, Homo sapien
agcccttgataaagggacaaatgtc

SEQ ID NO: 648676 - DNA, 25 bp, Homo sapien
ccttgataaagggacaaatgtcaca

SEQ ID NO: 648677 - DNA, 25 bp, Homo sapien
gagcccttgataaagggacaaatgt

SEQ ID NO: 648678 - DNA, 25 bp, Homo sapien
ggtgcctaccagattcagttgagag

SEQ ID NO: 648679 - DNA, 25 bp, Homo sapien
aagcaaaggtcagcggccatctctt

SEQ ID NO: 648680 - DNA, 25 bp, Homo sapien
ccagaagatcagtgacaaggagacc

SEQ ID NO: 648681 - DNA, 25 bp, Homo sapien
agagggaatggtgcctaccagattc

SEQ ID NO: 648682 - DNA, 25 bp, Homo sapien
aatgctctagcacggaattgccagc

SEQ ID NO: 648683 - DNA, 25 bp, Homo sapien
tgtgctcccgtgaagaactggtttc

SEQ ID NO: 648684 - DNA, 25 bp, Homo sapien
tattgaagaaggcactcgacatccg

SEQ ID NO: 648685 - DNA, 25 bp, Homo sapien
cagcagcagatagtggcctccgttg

SEQ ID NO: 648686 - DNA, 25 bp, Homo sapien
aaatctgctaactacttcttccctg

SEQ ID NO: 648687 - DNA, 25 bp, Homo sapien
ttaaacaaatctgctaactacttct

SEQ ID NO: 648688 - DNA, 25 bp, Homo sapien
tgctaactacttcttccctgaaaac

SEQ ID NO: 648689 - DNA, 25 bp, Homo sapien
aacaaatctgctaactacttcttcc

SEQ ID NO: 648690 - DNA, 25 bp, Homo sapien
gctgtttcctcatgagatcccagaa

SEQ ID NO: 648691 - DNA, 25 bp, Homo sapien
actgagtggaaagctcctttaaatg

SEQ ID NO: 648692 - DNA, 25 bp, Homo sapien
ctgagtggaaagctcctttaaatgg

SEQ ID NO: 648693 - DNA, 25 bp, Homo sapien
ttgctgtttcctcatgagatcccag

SEQ ID NO: 648694 - DNA, 25 bp, Homo sapien
aatggcacctccaaatgtcttctct

SEQ ID NO: 648695 - DNA, 25 bp, Homo sapien
tggcacctccaaatgtcttctctcc

SEQ ID NO: 648696 - DNA, 25 bp, Homo sapien
ttcttcacgatccctctgtcaaatg

SEQ ID NO: 648697 - DNA, 25 bp, Homo sapien
cttcttcacgatccctctgtcaaat

SEQ ID NO: 648698 - DNA, 25 bp, Homo sapien
ttgtcctcttgtctttcctataccc

SEQ ID NO: 648699 - DNA, 25 bp, Homo sapien
gatcatcattaatctgatacctcaa

SEQ ID NO: 648700 - DNA, 25 bp, Homo sapien
tcagggctggcaatgtggcctttca

SEQ ID NO: 648701 - DNA, 25 bp, Homo sapien
atatgtgtattggtggacatcagag

SEQ ID NO: 648702 - DNA, 25 bp, Homo sapien
ctagggaagcccaacagcgaaaaca

SEQ ID NO: 648703 - DNA, 25 bp, Homo sapien
aaacaatgaaaaggctctgctctgc

SEQ ID NO: 648704 - DNA, 25 bp, Homo sapien
ttccgaaatagagccggtgagcctg

SEQ ID NO: 648705 - DNA, 25 bp, Homo sapien
tgtgatgggcagctggcgttcaggg

SEQ ID NO: 648706 - DNA, 25 bp, Homo sapien
ttaaccagctgatcttcccaaaagt

SEQ ID NO: 648707 - DNA, 25 bp, Homo sapien
ccctttatttgagatgcacttccca

SEQ ID NO: 648708 - DNA, 25 bp, Homo sapien
catgtgcacattggacaaacaccac

SEQ ID NO: 648709 - DNA, 25 bp, Homo sapien
ccatttgtaattccgcatctcctcc

SEQ ID NO: 648710 - DNA, 25 bp, Homo sapien
cctccacgtgtggagattcaggcgg

SEQ ID NO: 648711 - DNA, 25 bp, Homo sapien
taatttgcccggtgatgggatccag

SEQ ID NO: 648712 - DNA, 25 bp, Homo sapien
gacgtatagttgttccagcttccac

SEQ ID NO: 648713 - DNA, 25 bp, Homo sapien
ccccagaggtacatggtttttgaga

SEQ ID NO: 648714 - DNA, 25 bp, Homo sapien
gcactgccaggagacgtgtgtctga

SEQ ID NO: 648715 - DNA, 25 bp, Homo sapien
gggccttgcattgggcactgtccag

SEQ ID NO: 648716 - DNA, 25 bp, Homo sapien
tgtgtctgatgttccctggcactgg

SEQ ID NO: 648717 - DNA, 25 bp, Homo sapien
caggaatctgactaagggccttgca

SEQ ID NO: 648718 - DNA, 25 bp, Homo sapien
ggctggggggagctttgggatttgc

SEQ ID NO: 648719 - DNA, 25 bp, Homo sapien
caagaggggctggggggagctttgg

SEQ ID NO: 648720 - DNA, 25 bp, Homo sapien
tgcaagaggggctggggggagcttt

SEQ ID NO: 648721 - DNA, 25 bp, Homo sapien
ctgcaagaggggctggggggagctt

SEQ ID NO: 648722 - DNA, 25 bp, Homo sapien
cagccttggtgacatagcatgattc

SEQ ID NO: 648723 - DNA, 25 bp, Homo sapien
tcagaatagaccacgttagatccaa

SEQ ID NO: 648724 - DNA, 25 bp, Homo sapien
caagtatgttctcaattacagtgaa

SEQ ID NO: 648725 - DNA, 25 bp, Homo sapien
tatatgcaactaacaacagagtccc

SEQ ID NO: 648726 - DNA, 25 bp, Homo sapien
ccatgcttcataaggagagccagga

SEQ ID NO: 648727 - DNA, 25 bp, Homo sapien
cataaggagagccaggaataggaca

SEQ ID NO: 648728 - DNA, 25 bp, Homo sapien
gagagccaggaataggacagacaat

SEQ ID NO: 648729 - DNA, 25 bp, Homo sapien
gccaggaataggacagacaatacct

SEQ ID NO: 648730 - DNA, 25 bp, Homo sapien
tgtagggtagaagtccaaggtcaag

SEQ ID NO: 648731 - DNA, 25 bp, Homo sapien
ttctgtagggtagaagtccaaggtc

SEQ ID NO: 648732 - DNA, 25 bp, Homo sapien
tctgtagggtagaagtccaaggtca

SEQ ID NO: 648733 - DNA, 25 bp, Homo sapien
agttctgtagggtagaagtccaagg

SEQ ID NO: 648734 - DNA, 25 bp, Homo sapien
tggtttgtagatgatgctttctccc

SEQ ID NO: 648735 - DNA, 25 bp, Homo sapien
ctggtttgtagatgatgctttctcc

SEQ ID NO: 648736 - DNA, 25 bp, Homo sapien
taggtttctagtaagggctctcttc

SEQ ID NO: 648737 - DNA, 25 bp, Homo sapien
cctggtttgtagatgatgctttctc

SEQ ID NO: 648738 - DNA, 25 bp, Homo sapien
ggtcagtatctagtgaaggctctct

SEQ ID NO: 648739 - DNA, 25 bp, Homo sapien
agatgtcagcatggtcagtatctag

SEQ ID NO: 648740 - DNA, 25 bp, Homo sapien
cagtatctagtgaaggctctcttcc

SEQ ID NO: 648741 - DNA, 25 bp, Homo sapien
caagatgtcagcatggtcagtatct

SEQ ID NO: 648742 - DNA, 25 bp, Homo sapien
tcaggcctttgtggacggtctcctt

SEQ ID NO: 648743 - DNA, 25 bp, Homo sapien
caacctggcataacagcagaaacca

SEQ ID NO: 648744 - DNA, 25 bp, Homo sapien
aaagcagcaaggtggattctaaatc

SEQ ID NO: 648745 - DNA, 25 bp, Homo sapien
cactgaagtcctcaagaatttccag

SEQ ID NO: 648746 - DNA, 25 bp, Homo sapien
tcataacactaagcaagtctctcca

SEQ ID NO: 648747 - DNA, 25 bp, Homo sapien
cataacactaagcaagtctctccat

SEQ ID NO: 648748 - DNA, 25 bp, Homo sapien
ttctagagactactgcatcccttgg

SEQ ID NO: 648749 - DNA, 25 bp, Homo sapien
gaaattaggatgtcagcaggctgta

SEQ ID NO: 648750 - DNA, 25 bp, Homo sapien
gcttgttgactgtaagctgagggcc

SEQ ID NO: 648751 - DNA, 25 bp, Homo sapien
cagcaatatgggttgggttcttccc

SEQ ID NO: 648752 - DNA, 25 bp, Homo sapien
gaactgaggttgaattggatggaaa

SEQ ID NO: 648753 - DNA, 25 bp, Homo sapien
gttgaattggatggaaagcagatcc

SEQ ID NO: 648754 - DNA, 25 bp, Homo sapien
tcacacgggatcattggaaagccgg

SEQ ID NO: 648755 - DNA, 25 bp, Homo sapien
cacgggatcattggaaagccggaga

SEQ ID NO: 648756 - DNA, 25 bp, Homo sapien
gacaccacgactgccttaagaaatg

SEQ ID NO: 648757 - DNA, 25 bp, Homo sapien
gcacagacaccacgactgccttaag

SEQ ID NO: 648758 - DNA, 25 bp, Homo sapien
acagacaccacgactgccttaagaa

SEQ ID NO: 648759 - DNA, 25 bp, Homo sapien
ggacggacatttgcctgcacagaca

SEQ ID NO: 648760 - DNA, 25 bp, Homo sapien
taccaatgaccataggcttgccatc

SEQ ID NO: 648761 - DNA, 25 bp, Homo sapien
gctgtcttgccaatcctagagcaaa

SEQ ID NO: 648762 - DNA, 25 bp, Homo sapien
tggtccagccaatcagtatgaatag

SEQ ID NO: 648763 - DNA, 25 bp, Homo sapien
tactggtgcagcagtggtaatcttc

SEQ ID NO: 648764 - DNA, 25 bp, Homo sapien
caatggggatgtgttgcattataca

SEQ ID NO: 648765 - DNA, 25 bp, Homo sapien
acagcttgaaagagatacagtgtgg

SEQ ID NO: 648766 - DNA, 25 bp, Homo sapien
ccattgcaaaaagcactgacatttt

SEQ ID NO: 648767 - DNA, 25 bp, Homo sapien
cctttggaacctggactgaaacagc

SEQ ID NO: 648768 - DNA, 25 bp, Homo sapien
gaaagtctcgttagtatctgcataa

SEQ ID NO: 648769 - DNA, 25 bp, Homo sapien
cttggtagccattgaccgtgaggaa

SEQ ID NO: 648770 - DNA, 25 bp, Homo sapien
ccagtaagtggattagcggtgcctt

SEQ ID NO: 648771 - DNA, 25 bp, Homo sapien
taatgtacaattgagcatgggaacc

SEQ ID NO: 648772 - DNA, 25 bp, Homo sapien
aaatggcaatgggcaaggtaggcaa

SEQ ID NO: 648773 - DNA, 25 bp, Homo sapien
tggcaatgggcaaggtaggcaaaaa

SEQ ID NO: 648774 - DNA, 25 bp, Homo sapien
gcatctaactttgcctttatccctt

SEQ ID NO: 648775 - DNA, 25 bp, Homo sapien
tgcatctaactttgcctttatccct

SEQ ID NO: 648776 - DNA, 25 bp, Homo sapien
agattcagctgtggaccgacagttt

SEQ ID NO: 648777 - DNA, 25 bp, Homo sapien
ctggagatctttgttggccagattc

SEQ ID NO: 648778 - DNA, 25 bp, Homo sapien
tgacagctggttcatagaagaacca

SEQ ID NO: 648779 - DNA, 25 bp, Homo sapien
gaagaaccacccttcaaacttgtgc

SEQ ID NO: 648780 - DNA, 25 bp, Homo sapien
acgaaacggcagacccagagatagc

SEQ ID NO: 648781 - DNA, 25 bp, Homo sapien
tacaactgctttatcacgaaacggc

SEQ ID NO: 648782 - DNA, 25 bp, Homo sapien
gatacactgggctactggctgtaaa

SEQ ID NO: 648783 - DNA, 25 bp, Homo sapien
gtgacacagctcttagatacactgg

SEQ ID NO: 648784 - DNA, 25 bp, Homo sapien
aaccctgaggcgatttttagacgtg

SEQ ID NO: 648785 - DNA, 25 bp, Homo sapien
tttagacgtgaacaggagacaggca

SEQ ID NO: 648786 - DNA, 25 bp, Homo sapien
tgtctgtaaataaaggccacgtgca

SEQ ID NO: 648787 - DNA, 25 bp, Homo sapien
gcagataaccggagaagaggaaccc

SEQ ID NO: 648788 - DNA, 25 bp, Homo sapien
gcatcaagttgtgcaccgtctccag

SEQ ID NO: 648789 - DNA, 25 bp, Homo sapien
tgaaaagcatcaagttgtgcaccgt

SEQ ID NO: 648790 - DNA, 25 bp, Homo sapien
gttgtgcaccgtctccagatgggcc

SEQ ID NO: 648791 - DNA, 25 bp, Homo sapien
gaagggccttgaaaagcatcaagtt

SEQ ID NO: 648792 - DNA, 25 bp, Homo sapien
tctgggcccaacctaagcctgcaag

SEQ ID NO: 648793 - DNA, 25 bp, Homo sapien
tgcctttgtcagtggtgttcttggg

SEQ ID NO: 648794 - DNA, 25 bp, Homo sapien
gagagagggtctgggcccaacctaa

SEQ ID NO: 648795 - DNA, 25 bp, Homo sapien
gatgcctttgtcagtggtgttcttg

SEQ ID NO: 648796 - DNA, 25 bp, Homo sapien
caggttgggaccatctggctgcagt

SEQ ID NO: 648797 - DNA, 25 bp, Homo sapien
tgtcccacagacgtgcacatgcatc

SEQ ID NO: 648798 - DNA, 25 bp, Homo sapien
tgcagtgtgcagtttccagacttcc

SEQ ID NO: 648799 - DNA, 25 bp, Homo sapien
aaatccgatttcatgccccagtgtg

SEQ ID NO: 648800 - DNA, 25 bp, Homo sapien
agcctcaccacgtggtccctgatgg

SEQ ID NO: 648801 - DNA, 25 bp, Homo sapien
tgcagcctcaccacgtggtccctga

SEQ ID NO: 648802 - DNA, 25 bp, Homo sapien
gatggccccagcatatcaggtcacc

SEQ ID NO: 648803 - DNA, 25 bp, Homo sapien
gtggtccctgatggccccagcatat

SEQ ID NO: 648804 - DNA, 25 bp, Homo sapien
tggccctctcgcacccaggtggcct

SEQ ID NO: 648805 - DNA, 25 bp, Homo sapien
tgttttcgcctataggaagtcttcc

SEQ ID NO: 648806 - DNA, 25 bp, Homo sapien
cctctgttactttctggcgaattcc

SEQ ID NO: 648807 - DNA, 25 bp, Homo sapien
gaagtcttcctagaggcttgcagga

SEQ ID NO: 648808 - DNA, 25 bp, Homo sapien
tgacctaatctggaccaatgctctt

SEQ ID NO: 648809 - DNA, 25 bp, Homo sapien
cctaatctggaccaatgctctttta

SEQ ID NO: 648810 - DNA, 25 bp, Homo sapien
tgctgacctaatctggaccaatgct

SEQ ID NO: 648811 - DNA, 25 bp, Homo sapien
atcatgctgacctaatctggaccaa

SEQ ID NO: 648812 - DNA, 25 bp, Homo sapien
gaaatggtggaaacattctggacac

SEQ ID NO: 648813 - DNA, 25 bp, Homo sapien
aatggtggaaacattctggacactc

SEQ ID NO: 648814 - DNA, 25 bp, Homo sapien
ctgaaatggtggaaacattctggac

SEQ ID NO: 648815 - DNA, 25 bp, Homo sapien
tggtggaaacattctggacactcat

SEQ ID NO: 648816 - DNA, 25 bp, Homo sapien
cattgatactaggacatttaatgaa

SEQ ID NO: 648817 - DNA, 25 bp, Homo sapien
tgagcttcctggacagcatccattt

SEQ ID NO: 648818 - DNA, 25 bp, Homo sapien
tgagttgatcgtctgtcattgatac

SEQ ID NO: 648819 - DNA, 25 bp, Homo sapien
aaccatgagttgatcgtctgtcatt

SEQ ID NO: 648820 - DNA, 25 bp, Homo sapien
tgtgagcattgtcagcataaaggag

SEQ ID NO: 648821 - DNA, 25 bp, Homo sapien
gctttagtatacactctgagaaaga

SEQ ID NO: 648822 - DNA, 25 bp, Homo sapien
aaagaaggcctttgaggtggaacag

SEQ ID NO: 648823 - DNA, 25 bp, Homo sapien
gagagactgcctttgaaggatcttc

SEQ ID NO: 648824 - DNA, 25 bp, Homo sapien
cttgcttgtgtgggaagctgtcact

SEQ ID NO: 648825 - DNA, 25 bp, Homo sapien
tggctgcaaccacggccagtggcaa

SEQ ID NO: 648826 - DNA, 25 bp, Homo sapien
actggctgcaaccacggccagtggc

SEQ ID NO: 648827 - DNA, 25 bp, Homo sapien
tgtcactggctgcaaccacggccag

SEQ ID NO: 648828 - DNA, 25 bp, Homo sapien
tgggccctgggccacgatatagaag

SEQ ID NO: 648829 - DNA, 25 bp, Homo sapien
tcattgactgaatggtggattgcgg

SEQ ID NO: 648830 - DNA, 25 bp, Homo sapien
ttgcgggtccctgatgaggagccaa

SEQ ID NO: 648831 - DNA, 25 bp, Homo sapien
ctgcgtgtccggcactgggccctgg

SEQ ID NO: 648832 - DNA, 25 bp, Homo sapien
ctaacaaggagtaagaaggacacag

SEQ ID NO: 648833 - DNA, 25 bp, Homo sapien
taacaaggagtaagaaggacacagc

SEQ ID NO: 648834 - DNA, 25 bp, Homo sapien
aaggacacagccagcttgctctgca

SEQ ID NO: 648835 - DNA, 25 bp, Homo sapien
agccagcttgctctgcactctctgt

SEQ ID NO: 648836 - DNA, 25 bp, Homo sapien
gcaccggtgtcttctgggcagagct

SEQ ID NO: 648837 - DNA, 25 bp, Homo sapien
gcaagtcttccgatgcccaactcgt

SEQ ID NO: 648838 - DNA, 25 bp, Homo sapien
caactcgtccaagttcttcggataa

SEQ ID NO: 648839 - DNA, 25 bp, Homo sapien
cagagctgtacacacgggcaagtct

SEQ ID NO: 648840 - DNA, 25 bp, Homo sapien
ggaatgctgcactccttgaccagaa

SEQ ID NO: 648841 - DNA, 25 bp, Homo sapien
aagggaatgctgcactccttgacca

SEQ ID NO: 648842 - DNA, 25 bp, Homo sapien
ctgaagggaatgctgcactccttga

SEQ ID NO: 648843 - DNA, 25 bp, Homo sapien
gggaatgctgcactccttgaccaga

SEQ ID NO: 648844 - DNA, 25 bp, Homo sapien
gattgtcccggcagctttgacagag

SEQ ID NO: 648845 - DNA, 25 bp, Homo sapien
tctggagattgtcccggcagctttg

SEQ ID NO: 648846 - DNA, 25 bp, Homo sapien
tgtcccggcagctttgacagagcag

SEQ ID NO: 648847 - DNA, 25 bp, Homo sapien
ttcttttctctggagattgtcccgg

SEQ ID NO: 648848 - DNA, 25 bp, Homo sapien
taagtgcacgcatgtgctatttgca

SEQ ID NO: 648849 - DNA, 25 bp, Homo sapien
ccagagttcccggatggtaagtgca

SEQ ID NO: 648850 - DNA, 25 bp, Homo sapien
catgtgctatttgcaggtaacaagg

SEQ ID NO: 648851 - DNA, 25 bp, Homo sapien
ccttgggagatgtgccacagcctag

SEQ ID NO: 648852 - DNA, 25 bp, Homo sapien
cttcagttcagtcaactgccttttt

SEQ ID NO: 648853 - DNA, 25 bp, Homo sapien
ccccttcagttcagtcaactgcctt

SEQ ID NO: 648854 - DNA, 25 bp, Homo sapien
ccttcagttcagtcaactgcctttt

SEQ ID NO: 648855 - DNA, 25 bp, Homo sapien
cccttcagttcagtcaactgccttt

SEQ ID NO: 648856 - DNA, 25 bp, Homo sapien
taattccctatgtgcaaagttcaaa

SEQ ID NO: 648857 - DNA, 25 bp, Homo sapien
tcaaaggtaccactacgggatcaat

SEQ ID NO: 648858 - DNA, 25 bp, Homo sapien
taacatcacccctctaactcaaagg

SEQ ID NO: 648859 - DNA, 25 bp, Homo sapien
caatttgaaacaggatgcttcagaa

SEQ ID NO: 648860 - DNA, 25 bp, Homo sapien
gacgaactttgctgcgcagtgagaa

SEQ ID NO: 648861 - DNA, 25 bp, Homo sapien
caatggaacggtaacggctgcctgt

SEQ ID NO: 648862 - DNA, 25 bp, Homo sapien
gaaaaggccacgttcaaccgcaatg

SEQ ID NO: 648863 - DNA, 25 bp, Homo sapien
catttaagggtggtctggtaagcca

SEQ ID NO: 648864 - DNA, 25 bp, Homo sapien
acgctgaaaaagtccctgaggtatt

SEQ ID NO: 648865 - DNA, 25 bp, Homo sapien
tatgtttcgagagagtcagtcccac

SEQ ID NO: 648866 - DNA, 25 bp, Homo sapien
agtcccactttgttgatgtggaggg

SEQ ID NO: 648867 - DNA, 25 bp, Homo sapien
gagatgttgcggactggagcatcac

SEQ ID NO: 648868 - DNA, 25 bp, Homo sapien
ccagcacgtgaggaatgccctccac

SEQ ID NO: 648869 - DNA, 25 bp, Homo sapien
ttgtcattaaaaccagcacgtgagg

SEQ ID NO: 648870 - DNA, 25 bp, Homo sapien
tgtcattaaaaccagcacgtgagga

SEQ ID NO: 648871 - DNA, 25 bp, Homo sapien
agcacgtgaggaatgccctccactg

SEQ ID NO: 648872 - DNA, 25 bp, Homo sapien
ttgttcacctggtggacagtgacac

SEQ ID NO: 648873 - DNA, 25 bp, Homo sapien
tcacctggtggacagtgacacacct

SEQ ID NO: 648874 - DNA, 25 bp, Homo sapien
gctttgtcaaatgtcctgtgtcagg

SEQ ID NO: 648875 - DNA, 25 bp, Homo sapien
ttgctttgtcaaatgtcctgtgtca

SEQ ID NO: 648876 - DNA, 25 bp, Homo sapien
tcttagctgcttgggtcagatgcac

SEQ ID NO: 648877 - DNA, 25 bp, Homo sapien
cgggcaagtctgtctacaccgggca

SEQ ID NO: 648878 - DNA, 25 bp, Homo sapien
agtctgtctacaccgggcatcttag

SEQ ID NO: 648879 - DNA, 25 bp, Homo sapien
ctaggcctgatggtgctttcgtggg

SEQ ID NO: 648880 - DNA, 25 bp, Homo sapien
tctctgggaattggttaactggttg

SEQ ID NO: 648881 - DNA, 25 bp, Homo sapien
gcataggacagataagcttttccca

SEQ ID NO: 648882 - DNA, 25 bp, Homo sapien
gacttaaggcataggacagataagc

SEQ ID NO: 648883 - DNA, 25 bp, Homo sapien
ggttaactggttgacttaaggcata

SEQ ID NO: 648884 - DNA, 25 bp, Homo sapien
ccccagtgtgtaggcggtgaccagc

SEQ ID NO: 648885 - DNA, 25 bp, Homo sapien
agtgtgtaggcggtgaccagcacag

SEQ ID NO: 648886 - DNA, 25 bp, Homo sapien
gtccccagtgtgtaggcggtgacca

SEQ ID NO: 648887 - DNA, 25 bp, Homo sapien
ttggtgactggcagttgccaacaag

SEQ ID NO: 648888 - DNA, 25 bp, Homo sapien
gaatgacagttcttattgtacaacc

SEQ ID NO: 648889 - DNA, 25 bp, Homo sapien
tatttgttaggactgatgaatctac

SEQ ID NO: 648890 - DNA, 25 bp, Homo sapien
agaaatcgccaaaactgtgcaaagt

SEQ ID NO: 648891 - DNA, 25 bp, Homo sapien
cagatctttgagagggcacgtttca

SEQ ID NO: 648892 - DNA, 25 bp, Homo sapien
tgtagggagatctacccacattaga

SEQ ID NO: 648893 - DNA, 25 bp, Homo sapien
tgcccacaacatgcacagttacact

SEQ ID NO: 648894 - DNA, 25 bp, Homo sapien
cacaacatgcacagttacactgaac

SEQ ID NO: 648895 - DNA, 25 bp, Homo sapien
ggcagtgtagggagatctacccaca

SEQ ID NO: 648896 - DNA, 25 bp, Homo sapien
aaactctgctcatcaacagctgatg

SEQ ID NO: 648897 - DNA, 25 bp, Homo sapien
tgcctaggcagagacattaacataa

SEQ ID NO: 648898 - DNA, 25 bp, Homo sapien
ttccataaggtgtggaagctgttct

SEQ ID NO: 648899 - DNA, 25 bp, Homo sapien
ggataatgccacagataaataacag

SEQ ID NO: 648900 - DNA, 25 bp, Homo sapien
acatacacagaggaaaaacagctta

SEQ ID NO: 648901 - DNA, 25 bp, Homo sapien
tctcagcaatcacacgttcatcctt

SEQ ID NO: 648902 - DNA, 25 bp, Homo sapien
caatcacacgttcatccttatttcc

SEQ ID NO: 648903 - DNA, 25 bp, Homo sapien
agcaatcacacgttcatccttattt

SEQ ID NO: 648904 - DNA, 25 bp, Homo sapien
ctctaagtgacttcgtctctcagca

SEQ ID NO: 648905 - DNA, 25 bp, Homo sapien
caggacaatgggaactccatggaag

SEQ ID NO: 648906 - DNA, 25 bp, Homo sapien
tcacattccccagtggtcaaatgag

SEQ ID NO: 648907 - DNA, 25 bp, Homo sapien
taaagcaaccttgggtcacattccc

SEQ ID NO: 648908 - DNA, 25 bp, Homo sapien
gccttgctttatcaccaactgtgtg

SEQ ID NO: 648909 - DNA, 25 bp, Homo sapien
taagttttactacagattcccaggc

SEQ ID NO: 648910 - DNA, 25 bp, Homo sapien
agttaccaccgtgaatgaagactgc

SEQ ID NO: 648911 - DNA, 25 bp, Homo sapien
tctgatgagaatccaactagccagt

SEQ ID NO: 648912 - DNA, 25 bp, Homo sapien
tgaagactgcccatgtgaaaagagg

SEQ ID NO: 648913 - DNA, 25 bp, Homo sapien
cccgatgctgtggtgctgaaagctt

SEQ ID NO: 648914 - DNA, 25 bp, Homo sapien
aagcttggcaagcatgctttcacag

SEQ ID NO: 648915 - DNA, 25 bp, Homo sapien
gcttcccccgatgctgtggtgctga

SEQ ID NO: 648916 - DNA, 25 bp, Homo sapien
tccagtacaaacgtgcctcccgctt

SEQ ID NO: 648917 - DNA, 25 bp, Homo sapien
cccagggtcagcagagcagtggaga

SEQ ID NO: 648918 - DNA, 25 bp, Homo sapien
tcagcagagcagtggagaacagcag

SEQ ID NO: 648919 - DNA, 25 bp, Homo sapien
gggctggagctccccagaagtccat

SEQ ID NO: 648920 - DNA, 25 bp, Homo sapien
agaacagcaggaagcaggatggggc

SEQ ID NO: 648921 - DNA, 25 bp, Homo sapien
ggcaagcagtgattcttgtcctgtg

SEQ ID NO: 648922 - DNA, 25 bp, Homo sapien
ccagggaaactgacgctgagcatgg

SEQ ID NO: 648923 - DNA, 25 bp, Homo sapien
ctccagagactgcttggggggcttc

SEQ ID NO: 648924 - DNA, 25 bp, Homo sapien
tcagacagccgagtggactgctcca

SEQ ID NO: 648925 - DNA, 25 bp, Homo sapien
tctcgaaaacgactgtaacgcctga

SEQ ID NO: 648926 - DNA, 25 bp, Homo sapien
tttatgcatttctcgaaaacgactg

SEQ ID NO: 648927 - DNA, 25 bp, Homo sapien
ctgtaacgcctgaatacagtccatg

SEQ ID NO: 648928 - DNA, 25 bp, Homo sapien
tccatgtctcatctaggacagtaat

SEQ ID NO: 648929 - DNA, 25 bp, Homo sapien
ctgctgcatccctgaatgcgcatat

SEQ ID NO: 648930 - DNA, 25 bp, Homo sapien
gcctctcctgctaggtgtcttcact

SEQ ID NO: 648931 - DNA, 25 bp, Homo sapien
ctgctaggtgtcttcactcctgctg

SEQ ID NO: 648932 - DNA, 25 bp, Homo sapien
ccctgaatgcgcatattctctgcca

SEQ ID NO: 648933 - DNA, 25 bp, Homo sapien
gaaagggcagtccaatgccagtcct

SEQ ID NO: 648934 - DNA, 25 bp, Homo sapien
gaagagcctggttctaaagacagca

SEQ ID NO: 648935 - DNA, 25 bp, Homo sapien
gagagacttggtcagcagccatcca

SEQ ID NO: 648936 - DNA, 25 bp, Homo sapien
caagggaacagttgccatctggacc

SEQ ID NO: 648937 - DNA, 25 bp, Homo sapien
ctgtgggtaacacaaatgggaggtg

SEQ ID NO: 648938 - DNA, 25 bp, Homo sapien
tgggaggtgtatggagcttggagag

SEQ ID NO: 648939 - DNA, 25 bp, Homo sapien
ggaggtgtatggagcttggagagtg

SEQ ID NO: 648940 - DNA, 25 bp, Homo sapien
gggaggtgtatggagcttggagagt

SEQ ID NO: 648941 - DNA, 25 bp, Homo sapien
gctctgggcaccctttgtctgccat

SEQ ID NO: 648942 - DNA, 25 bp, Homo sapien
tggctggctgggtgtgcctgtgcct

SEQ ID NO: 648943 - DNA, 25 bp, Homo sapien
tgtgcctgcttcctttcatggagaa

SEQ ID NO: 648944 - DNA, 25 bp, Homo sapien
tcatggagaaggtgcactggctctg

SEQ ID NO: 648945 - DNA, 25 bp, Homo sapien
ttctcaggccactgatcaggagtca

SEQ ID NO: 648946 - DNA, 25 bp, Homo sapien
tagcagatggtcgacaagttttccc

SEQ ID NO: 648947 - DNA, 25 bp, Homo sapien
cctcggagcgtagccggaatgcaga

SEQ ID NO: 648948 - DNA, 25 bp, Homo sapien
ggagactgttactatggcacctaaa

SEQ ID NO: 648949 - DNA, 25 bp, Homo sapien
taatggcattacttgtggcaggtgc

SEQ ID NO: 648950 - DNA, 25 bp, Homo sapien
gctgagcgcaggcacaaattttgca

SEQ ID NO: 648951 - DNA, 25 bp, Homo sapien
gactgctgtcatccggttaatggca

SEQ ID NO: 648952 - DNA, 25 bp, Homo sapien
taatgcagcgtaactgatgccacgt

SEQ ID NO: 648953 - DNA, 25 bp, Homo sapien
gacgtagcgtgggatactaatttta

SEQ ID NO: 648954 - DNA, 25 bp, Homo sapien
taattgggtccttcaggtcatctgg

SEQ ID NO: 648955 - DNA, 25 bp, Homo sapien
tccttgcccgcagaggacgtagcgt

SEQ ID NO: 648956 - DNA, 25 bp, Homo sapien
tgcgcccaaagagcgagaaaccatc

SEQ ID NO: 648957 - DNA, 25 bp, Homo sapien
aagagcatcaaaccagtagggttta

SEQ ID NO: 648958 - DNA, 25 bp, Homo sapien
aaatgtgtttcaagtagagaaaaga

SEQ ID NO: 648959 - DNA, 25 bp, Homo sapien
caaatatcctgctcgggtaggaggg

SEQ ID NO: 648960 - DNA, 25 bp, Homo sapien
aatcactccactgcaaatatcctgc

SEQ ID NO: 648961 - DNA, 25 bp, Homo sapien
ggagctcctaggattgaagccacag

SEQ ID NO: 648962 - DNA, 25 bp, Homo sapien
gaaatcacagtggataatggcacca

SEQ ID NO: 648963 - DNA, 25 bp, Homo sapien
aactcctgaagaaacgagcagaggg

SEQ ID NO: 648964 - DNA, 25 bp, Homo sapien
tacagccgagatgtcgttatagcag

SEQ ID NO: 648965 - DNA, 25 bp, Homo sapien
ctgtggatcgtaacacattctccaa

SEQ ID NO: 648966 - DNA, 25 bp, Homo sapien
ccaccagtctgtggatcgtaacaca

SEQ ID NO: 648967 - DNA, 25 bp, Homo sapien
accaaatgcctccactggtcagaag

SEQ ID NO: 648968 - DNA, 25 bp, Homo sapien
cctccactggtcagaagcacacatg

SEQ ID NO: 648969 - DNA, 25 bp, Homo sapien
tcagctgcatccaacgtccactgag

SEQ ID NO: 648970 - DNA, 25 bp, Homo sapien
tactgtgggctaaagatggtttggc

SEQ ID NO: 648971 - DNA, 25 bp, Homo sapien
actctagatttaggagaacacacac

SEQ ID NO: 648972 - DNA, 25 bp, Homo sapien
gcaagacagaagcacgtctccttcc

SEQ ID NO: 648973 - DNA, 25 bp, Homo sapien
cacaaatttacaagcctgagtttca

SEQ ID NO: 648974 - DNA, 25 bp, Homo sapien
caaaaaacatgtagtgcatctttaa

SEQ ID NO: 648975 - DNA, 25 bp, Homo sapien
tccaattcaattagctacacggaga

SEQ ID NO: 648976 - DNA, 25 bp, Homo sapien
tcagaaatgctttaatcacctcaca

SEQ ID NO: 648977 - DNA, 25 bp, Homo sapien
gtcaaatgtgagattagccaaagag

SEQ ID NO: 648978 - DNA, 25 bp, Homo sapien
gagcctcatcttgagaattgaaagt

SEQ ID NO: 648979 - DNA, 25 bp, Homo sapien
tgagattagccaaagagcctcatct

SEQ ID NO: 648980 - DNA, 25 bp, Homo sapien
aaagagcctcatcttgagaattgaa

SEQ ID NO: 648981 - DNA, 25 bp, Homo sapien
cccggaggaggtatgtttcgagatc

SEQ ID NO: 648982 - DNA, 25 bp, Homo sapien
ttcagaaggactagcgactggcact

SEQ ID NO: 648983 - DNA, 25 bp, Homo sapien
acatcaaattgtgcacccggaggag

SEQ ID NO: 648984 - DNA, 25 bp, Homo sapien
ctcaggtggactatttctggaaccc

SEQ ID NO: 648985 - DNA, 25 bp, Homo sapien
tctggaatttggatgacacctgaac

SEQ ID NO: 648986 - DNA, 25 bp, Homo sapien
cagtaactgaacttctgccagggaa

SEQ ID NO: 648987 - DNA, 25 bp, Homo sapien
tccatttggcaaaactaaatcaggg

SEQ ID NO: 648988 - DNA, 25 bp, Homo sapien
tccaatcaagagaaagctgaaccag

SEQ ID NO: 648989 - DNA, 25 bp, Homo sapien
tctgcagagctcaggaatcgaacac

SEQ ID NO: 648990 - DNA, 25 bp, Homo sapien
cagagctcaggaatcgaacactctg

SEQ ID NO: 648991 - DNA, 25 bp, Homo sapien
ctgcagagctcaggaatcgaacact

SEQ ID NO: 648992 - DNA, 25 bp, Homo sapien
tgcagagctcaggaatcgaacactc

SEQ ID NO: 648993 - DNA, 25 bp, Homo sapien
gcagtttcagcatttggtccgggaa

SEQ ID NO: 648994 - DNA, 25 bp, Homo sapien
caaacacgctggttgagggtcaggt

SEQ ID NO: 648995 - DNA, 25 bp, Homo sapien
tctggtagagaacaagtcacatgcc

SEQ ID NO: 648996 - DNA, 25 bp, Homo sapien
tccgggaattgcacaaggctctgct

SEQ ID NO: 648997 - DNA, 25 bp, Homo sapien
cacttcttgggacgtatgttgcagc

SEQ ID NO: 648998 - DNA, 25 bp, Homo sapien
aagcagagcaccttgccttgcctgg

SEQ ID NO: 648999 - DNA, 25 bp, Homo sapien
tttcactgtcctggaatacctcggg

SEQ ID NO: 649000 - DNA, 25 bp, Homo sapien
tacctcgggtactgaggactgatcc

SEQ ID NO: 649001 - DNA, 25 bp, Homo sapien
aagtgtcagtggcatctctgggcag

SEQ ID NO: 649002 - DNA, 25 bp, Homo sapien
cgggtcaagataccatgctgggcaa

SEQ ID NO: 649003 - DNA, 25 bp, Homo sapien
tgggatgatcccagtggtcgttctg

SEQ ID NO: 649004 - DNA, 25 bp, Homo sapien
gagacgctccacagcatgggatgat

SEQ ID NO: 649005 - DNA, 25 bp, Homo sapien
tacgttgaatggtgccattgtgaag

SEQ ID NO: 649006 - DNA, 25 bp, Homo sapien
ctcatattttagtttacgttgaatg

SEQ ID NO: 649007 - DNA, 25 bp, Homo sapien
tagtttacgttgaatggtgccattg

SEQ ID NO: 649008 - DNA, 25 bp, Homo sapien
ttgaatggtgccattgtgaagtttc

SEQ ID NO: 649009 - DNA, 25 bp, Homo sapien
catcgtgtctgcagatgtactgcag

SEQ ID NO: 649010 - DNA, 25 bp, Homo sapien
ctgaaggcgtctttggacttcttct

SEQ ID NO: 649011 - DNA, 25 bp, Homo sapien
cactaatcacacgatgcaaatcctg

SEQ ID NO: 649012 - DNA, 25 bp, Homo sapien
aatcacacgatgcaaatcctgaagg

SEQ ID NO: 649013 - DNA, 25 bp, Homo sapien
catcgacctcataaatcttctgttt

SEQ ID NO: 649014 - DNA, 25 bp, Homo sapien
tgaacaccatcgacctcataaatct

SEQ ID NO: 649015 - DNA, 25 bp, Homo sapien
caccatcgacctcataaatcttctg

SEQ ID NO: 649016 - DNA, 25 bp, Homo sapien
cagctgctggatttcatattctaac

SEQ ID NO: 649017 - DNA, 25 bp, Homo sapien
caggctacaaattgagagtgtgccc

SEQ ID NO: 649018 - DNA, 25 bp, Homo sapien
tgagggaactaccagacagcgatgg

SEQ ID NO: 649019 - DNA, 25 bp, Homo sapien
tgcatcagctaaatgccaaggtggg

SEQ ID NO: 649020 - DNA, 25 bp, Homo sapien
gccaaggacatcaagctaaaagctc

SEQ ID NO: 649021 - DNA, 25 bp, Homo sapien
tctcctggtccttctccagggcttc

SEQ ID NO: 649022 - DNA, 25 bp, Homo sapien
ctctcctggtccttctccagggctt

SEQ ID NO: 649023 - DNA, 25 bp, Homo sapien
tgttggcagtgaattcaaaggtggc

SEQ ID NO: 649024 - DNA, 25 bp, Homo sapien
tttcctcctgacgtgcaatgttggc

SEQ ID NO: 649025 - DNA, 25 bp, Homo sapien
tggcaagtgattctgcaggaggtac

SEQ ID NO: 649026 - DNA, 25 bp, Homo sapien
ttgtctaagctgagagggcctctgt

SEQ ID NO: 649027 - DNA, 25 bp, Homo sapien
tattttctcgaaatcttgaggcact

SEQ ID NO: 649028 - DNA, 25 bp, Homo sapien
gctttattttctcgaaatcttgagg

SEQ ID NO: 649029 - DNA, 25 bp, Homo sapien
atcttgaggcacttccgtgacatct

SEQ ID NO: 649030 - DNA, 25 bp, Homo sapien
tcttgaggcacttccgtgacatctg

SEQ ID NO: 649031 - DNA, 25 bp, Homo sapien
attttaaacactctaggatctcctg

SEQ ID NO: 649032 - DNA, 25 bp, Homo sapien
tttaaacactctaggatctcctgtt

SEQ ID NO: 649033 - DNA, 25 bp, Homo sapien
ttttaaacactctaggatctcctgt

SEQ ID NO: 649034 - DNA, 25 bp, Homo sapien
taaacactctaggatctcctgttct

SEQ ID NO: 649035 - DNA, 25 bp, Homo sapien
ttcttggacgcggagaaaggtctct

SEQ ID NO: 649036 - DNA, 25 bp, Homo sapien
aattcgaagaaacgcagttgagcct

SEQ ID NO: 649037 - DNA, 25 bp, Homo sapien
cgcaggagggattcccgaatgcctt

SEQ ID NO: 649038 - DNA, 25 bp, Homo sapien
gctgctcttccagatgggccacgag

SEQ ID NO: 649039 - DNA, 25 bp, Homo sapien
ttctccgcaagtaaatcctttagct

SEQ ID NO: 649040 - DNA, 25 bp, Homo sapien
ccttctccgcaagtaaatcctttag

SEQ ID NO: 649041 - DNA, 25 bp, Homo sapien
tccttctccgcaagtaaatccttta

SEQ ID NO: 649042 - DNA, 25 bp, Homo sapien
ctccgcaagtaaatcctttagcttg

SEQ ID NO: 649043 - DNA, 25 bp, Homo sapien
ggagctgcacgatttctgtctcctt

SEQ ID NO: 649044 - DNA, 25 bp, Homo sapien
cctgcttgcgaatctggagctgcac

SEQ ID NO: 649045 - DNA, 25 bp, Homo sapien
ctcgatgtggaagctgcggcgtttg

SEQ ID NO: 649046 - DNA, 25 bp, Homo sapien
gaagctgcggcgtttgaggctctcc

SEQ ID NO: 649047 - DNA, 25 bp, Homo sapien
aatttttcaagttcttcacgctgtt

SEQ ID NO: 649048 - DNA, 25 bp, Homo sapien
tcacgctgttgcctctcaaattcaa

SEQ ID NO: 649049 - DNA, 25 bp, Homo sapien
acgctgttgcctctcaaattcaagt

SEQ ID NO: 649050 - DNA, 25 bp, Homo sapien
tttcaagttcttcacgctgttgcct

SEQ ID NO: 649051 - DNA, 25 bp, Homo sapien
cttagacagatgggtccttttatag

SEQ ID NO: 649052 - DNA, 25 bp, Homo sapien
agacagatgggtccttttataggga

SEQ ID NO: 649053 - DNA, 25 bp, Homo sapien
tagacagatgggtccttttataggg

SEQ ID NO: 649054 - DNA, 25 bp, Homo sapien
gacagatgggtccttttatagggaa

SEQ ID NO: 649055 - DNA, 25 bp, Homo sapien
cacgacaagtaagatgcctgcctgg

SEQ ID NO: 649056 - DNA, 25 bp, Homo sapien
tgtagccaggatcaagtgagacacg

SEQ ID NO: 649057 - DNA, 25 bp, Homo sapien
cacctggacacatcgagggctgagt

SEQ ID NO: 649058 - DNA, 25 bp, Homo sapien
gctgaagaatgtaacaggccccacc

SEQ ID NO: 649059 - DNA, 25 bp, Homo sapien
tccagtcaatgcttgagcaggcagc

SEQ ID NO: 649060 - DNA, 25 bp, Homo sapien
taatcttcctgttatcatcggcaat

SEQ ID NO: 649061 - DNA, 25 bp, Homo sapien
taaacagagtatgactgcccaggtc

SEQ ID NO: 649062 - DNA, 25 bp, Homo sapien
tcttcatggtgattcgtgttgtacc

SEQ ID NO: 649063 - DNA, 25 bp, Homo sapien
ttcttggtcaatgcgtaggcctggc

SEQ ID NO: 649064 - DNA, 25 bp, Homo sapien
catctttgaaagaactcctggcctt

SEQ ID NO: 649065 - DNA, 25 bp, Homo sapien
gaactcaatggacggtgtttcacct

SEQ ID NO: 649066 - DNA, 25 bp, Homo sapien
tagttccgactacagagggttcttc

SEQ ID NO: 649067 - DNA, 25 bp, Homo sapien
gggtctgcactagccctgatgctaa

SEQ ID NO: 649068 - DNA, 25 bp, Homo sapien
cccgattgtcggtgacttcagacca

SEQ ID NO: 649069 - DNA, 25 bp, Homo sapien
cactccttgggatgatgctccttca

SEQ ID NO: 649070 - DNA, 25 bp, Homo sapien
cttcagaccaacctctgagttaggg

SEQ ID NO: 649071 - DNA, 25 bp, Homo sapien
taaatgaagcatagtgcctgccctc

SEQ ID NO: 649072 - DNA, 25 bp, Homo sapien
gacaaaagacctgggcagacctgtg

SEQ ID NO: 649073 - DNA, 25 bp, Homo sapien
aaatgcctgcgagaggatacacggg

SEQ ID NO: 649074 - DNA, 25 bp, Homo sapien
cagacgcatcctttgtgctgagagc

SEQ ID NO: 649075 - DNA, 25 bp, Homo sapien
tcaactgctggtgcttccagaaatc

SEQ ID NO: 649076 - DNA, 25 bp, Homo sapien
gacaggttctcacgggacttcgaga

SEQ ID NO: 649077 - DNA, 25 bp, Homo sapien
cagacaggttctcacgggacttcga

SEQ ID NO: 649078 - DNA, 25 bp, Homo sapien
ggttctcacgggacttcgagaggtc

SEQ ID NO: 649079 - DNA, 25 bp, Homo sapien
caggttctcacgggacttcgagagg

SEQ ID NO: 649080 - DNA, 25 bp, Homo sapien
tggacaagctgaaggaggacagaag

SEQ ID NO: 649081 - DNA, 25 bp, Homo sapien
catggacaagctgaaggaggacaga

SEQ ID NO: 649082 - DNA, 25 bp, Homo sapien
ggtcatggacaagctgaaggaggac

SEQ ID NO: 649083 - DNA, 25 bp, Homo sapien
tcatggacaagctgaaggaggacag

SEQ ID NO: 649084 - DNA, 25 bp, Homo sapien
ctgagcttggcggcttcctttggat

SEQ ID NO: 649085 - DNA, 25 bp, Homo sapien
gttcttcccaagagaatcacagcac

SEQ ID NO: 649086 - DNA, 25 bp, Homo sapien
ctttggatggttaaagcgaaacata

SEQ ID NO: 649087 - DNA, 25 bp, Homo sapien
taaagcgaaacatattggttcttcc

SEQ ID NO: 649088 - DNA, 25 bp, Homo sapien
cactgtccccccgatattttcaaag

SEQ ID NO: 649089 - DNA, 25 bp, Homo sapien
aagatgcaatgctcactctccaagt

SEQ ID NO: 649090 - DNA, 25 bp, Homo sapien
gatgtgtggcctccacgatctgaac

SEQ ID NO: 649091 - DNA, 25 bp, Homo sapien
gggtatcagagtcactgtccccccg

SEQ ID NO: 649092 - DNA, 25 bp, Homo sapien
tgtagagtgatttaagtaactgtgt

SEQ ID NO: 649093 - DNA, 25 bp, Homo sapien
agtgatttaagtaactgtgttcctc

SEQ ID NO: 649094 - DNA, 25 bp, Homo sapien
ttgttccattgtgagacaatgtaga

SEQ ID NO: 649095 - DNA, 25 bp, Homo sapien
ccattgtgagacaatgtagagtgat

SEQ ID NO: 649096 - DNA, 25 bp, Homo sapien
caatatcttgctccgtggaagcatc

SEQ ID NO: 649097 - DNA, 25 bp, Homo sapien
gaagcatcgtctctaccaacgtatg

SEQ ID NO: 649098 - DNA, 25 bp, Homo sapien
tgctccgtggaagcatcgtctctac

SEQ ID NO: 649099 - DNA, 25 bp, Homo sapien
tctctaccaacgtatgtctgacctt

SEQ ID NO: 649100 - DNA, 25 bp, Homo sapien
aaatgatataagatgattccagtac

SEQ ID NO: 649101 - DNA, 25 bp, Homo sapien
ggtcatcatcgatgccaatcaaatg

SEQ ID NO: 649102 - DNA, 25 bp, Homo sapien
attccagtactcaaaaggtcatcat

SEQ ID NO: 649103 - DNA, 25 bp, Homo sapien
ctttcctgagggctagagtttgttc

SEQ ID NO: 649104 - DNA, 25 bp, Homo sapien
ctctcggatattagcagaattcatg

SEQ ID NO: 649105 - DNA, 25 bp, Homo sapien
acttcattccagttaccaccactgg

SEQ ID NO: 649106 - DNA, 25 bp, Homo sapien
tctcacttcattccagttaccacca

SEQ ID NO: 649107 - DNA, 25 bp, Homo sapien
tcacttcattccagttaccaccact

SEQ ID NO: 649108 - DNA, 25 bp, Homo sapien
ttcattccagttaccaccactggcc

SEQ ID NO: 649109 - DNA, 25 bp, Homo sapien
tgaaccaatgcacatggcctcagct

SEQ ID NO: 649110 - DNA, 25 bp, Homo sapien
taccccagggtatgtgaacatagca

SEQ ID NO: 649111 - DNA, 25 bp, Homo sapien
tatgggccaggaagtatatgggaac

SEQ ID NO: 649112 - DNA, 25 bp, Homo sapien
tctactgaacgaggttttgaacaga

SEQ ID NO: 649113 - DNA, 25 bp, Homo sapien
ttcagacaactccactaccaagggc

SEQ ID NO: 649114 - DNA, 25 bp, Homo sapien
ggtatctgtcacgtcttcagacaac

SEQ ID NO: 649115 - DNA, 25 bp, Homo sapien
agcaaccaggcccaattccatggta

SEQ ID NO: 649116 - DNA, 25 bp, Homo sapien
catccagtaattatcagcaaccagg

SEQ ID NO: 649117 - DNA, 25 bp, Homo sapien
cctcagaaggtaccgatgggcatct

SEQ ID NO: 649118 - DNA, 25 bp, Homo sapien
tgggcatctgcgacaagtggtgact

SEQ ID NO: 649119 - DNA, 25 bp, Homo sapien
gtgtgagtgacagctctccaagatg

SEQ ID NO: 649120 - DNA, 25 bp, Homo sapien
agaccacggcaatggaataccccga

SEQ ID NO: 649121 - DNA, 25 bp, Homo sapien
caaaatcatccacgctagtctgcaa

SEQ ID NO: 649122 - DNA, 25 bp, Homo sapien
ggtggcttttgttcaaaccgactca

SEQ ID NO: 649123 - DNA, 25 bp, Homo sapien
ggaagacaggaacatacactcatac

SEQ ID NO: 649124 - DNA, 25 bp, Homo sapien
gccagagtctaactttaatgagagg

SEQ ID NO: 649125 - DNA, 25 bp, Homo sapien
gaatccattacactcccaatacaca

SEQ ID NO: 649126 - DNA, 25 bp, Homo sapien
gagctgcttccgaatccattacact

SEQ ID NO: 649127 - DNA, 25 bp, Homo sapien
cctacaagcctgctgagcaacagcc

SEQ ID NO: 649128 - DNA, 25 bp, Homo sapien
caacagccccagttacgagagctgc

SEQ ID NO: 649129 - DNA, 25 bp, Homo sapien
gagcatttttctttaattgttcata

SEQ ID NO: 649130 - DNA, 25 bp, Homo sapien
cttgagcatttttctttaattgttc

SEQ ID NO: 649131 - DNA, 25 bp, Homo sapien
ttgagcatttttctttaattgttca

SEQ ID NO: 649132 - DNA, 25 bp, Homo sapien
gcatttttctttaattgttcataaa

SEQ ID NO: 649133 - DNA, 25 bp, Homo sapien
aacgtatgcaggacagataaaccca

SEQ ID NO: 649134 - DNA, 25 bp, Homo sapien
acgtatgcaggacagataaacccaa

SEQ ID NO: 649135 - DNA, 25 bp, Homo sapien
cagatgataccgacaaggagattag

SEQ ID NO: 649136 - DNA, 25 bp, Homo sapien
atgataccgacaaggagattagtgc

SEQ ID NO: 649137 - DNA, 25 bp, Homo sapien
taggacagatgataccgacaaggag

SEQ ID NO: 649138 - DNA, 25 bp, Homo sapien
gtgctaggacagatgataccgacaa

SEQ ID NO: 649139 - DNA, 25 bp, Homo sapien
tgtaggggccaggcaaagaagtctg

SEQ ID NO: 649140 - DNA, 25 bp, Homo sapien
taggggccaggcaaagaagtctgga

SEQ ID NO: 649141 - DNA, 25 bp, Homo sapien
gtaggggccaggcaaagaagtctgg

SEQ ID NO: 649142 - DNA, 25 bp, Homo sapien
tgagttctgcagatcaaagcccaag

SEQ ID NO: 649143 - DNA, 25 bp, Homo sapien
agttctgcagatcaaagcccaaggc

SEQ ID NO: 649144 - DNA, 25 bp, Homo sapien
ttgggtttcattccacttatttgtc

SEQ ID NO: 649145 - DNA, 25 bp, Homo sapien
tgggtttcattccacttatttgtcc

SEQ ID NO: 649146 - DNA, 25 bp, Homo sapien
ttcctccatacttaaagctgtgggg

SEQ ID NO: 649147 - DNA, 25 bp, Homo sapien
tcctccatacttaaagctgtggggg

SEQ ID NO: 649148 - DNA, 25 bp, Homo sapien
tttcctccatacttaaagctgtggg

SEQ ID NO: 649149 - DNA, 25 bp, Homo sapien
cctccatacttaaagctgtggggga

SEQ ID NO: 649150 - DNA, 25 bp, Homo sapien
tgaatgcaaaggctgacaagaggtt

SEQ ID NO: 649151 - DNA, 25 bp, Homo sapien
gagggactggctaactcattcaaag

SEQ ID NO: 649152 - DNA, 25 bp, Homo sapien
cacatgcagcccgtaatgaatgcaa

SEQ ID NO: 649153 - DNA, 25 bp, Homo sapien
caagaggttgatgtaaacgagggac

SEQ ID NO: 649154 - DNA, 25 bp, Homo sapien
tccataattgacatcagcaggtgaa

SEQ ID NO: 649155 - DNA, 25 bp, Homo sapien
tttgcatagcgaagagtacttaggg

SEQ ID NO: 649156 - DNA, 25 bp, Homo sapien
gataagtttgacgttggcatcctca

SEQ ID NO: 649157 - DNA, 25 bp, Homo sapien
ggctatttcagctcgcagctcacgg

SEQ ID NO: 649158 - DNA, 25 bp, Homo sapien
ttcaaaaaataatttatccagcact

SEQ ID NO: 649159 - DNA, 25 bp, Homo sapien
caaaaaataatttatccagcactcc

SEQ ID NO: 649160 - DNA, 25 bp, Homo sapien
ctgtgaagaatgtattcaaaaaata

SEQ ID NO: 649161 - DNA, 25 bp, Homo sapien
aaaaataatttatccagcactccat

SEQ ID NO: 649162 - DNA, 25 bp, Homo sapien
tctttgcaagagtatttgcagcatc

SEQ ID NO: 649163 - DNA, 25 bp, Homo sapien
gtcaacacagaatccctgtaaggca

SEQ ID NO: 649164 - DNA, 25 bp, Homo sapien
tcatgatagttttagagtttcctcc

SEQ ID NO: 649165 - DNA, 25 bp, Homo sapien
tccctgtaaggcacgaaaacttgct

SEQ ID NO: 649166 - DNA, 25 bp, Homo sapien
gcacgctcacttccggcaagatcaa

SEQ ID NO: 649167 - DNA, 25 bp, Homo sapien
tcaaccaagtggatcttactgacgg

SEQ ID NO: 649168 - DNA, 25 bp, Homo sapien
ggcagaaatgacgttccccagagtc

SEQ ID NO: 649169 - DNA, 25 bp, Homo sapien
tactgacggtttcacatggcatttc

SEQ ID NO: 649170 - DNA, 25 bp, Homo sapien
ttaagcacagagcaagttgttttat

SEQ ID NO: 649171 - DNA, 25 bp, Homo sapien
cagctggtctgactcgcaatccatt

SEQ ID NO: 649172 - DNA, 25 bp, Homo sapien
tatcccacagagtttgcaacaatga

SEQ ID NO: 649173 - DNA, 25 bp, Homo sapien
tgcttaattaagcacagagcaagtt

SEQ ID NO: 649174 - DNA, 25 bp, Homo sapien
cagctggtcccgcagcagcccttac

SEQ ID NO: 649175 - DNA, 25 bp, Homo sapien
cagggatggagccagctggtcccgc

SEQ ID NO: 649176 - DNA, 25 bp, Homo sapien
ctcagggatggagccagctggtccc

SEQ ID NO: 649177 - DNA, 25 bp, Homo sapien
gccagctggtcccgcagcagccctt

SEQ ID NO: 649178 - DNA, 25 bp, Homo sapien
gatattgcccgcatccataagttct

SEQ ID NO: 649179 - DNA, 25 bp, Homo sapien
cgttcatcccagtcgctgcggtggt

SEQ ID NO: 649180 - DNA, 25 bp, Homo sapien
tgcggtggtccggttgatattgccc

SEQ ID NO: 649181 - DNA, 25 bp, Homo sapien
gcatgagacctgctactgacgtcgt

SEQ ID NO: 649182 - DNA, 25 bp, Homo sapien
caaattgaaggttttagatgacttc

SEQ ID NO: 649183 - DNA, 25 bp, Homo sapien
tcacacgttcgttataaatttctaa

SEQ ID NO: 649184 - DNA, 25 bp, Homo sapien
caacataagggccttctttgggatg

SEQ ID NO: 649185 - DNA, 25 bp, Homo sapien
gacttccgccgaagtagatctctca

SEQ ID NO: 649186 - DNA, 25 bp, Homo sapien
ggtggtttcatttatccgactgaag

SEQ ID NO: 649187 - DNA, 25 bp, Homo sapien
tccgaggtattaagccagaatctcc

SEQ ID NO: 649188 - DNA, 25 bp, Homo sapien
gagtccttcacagatccgaggtatt

SEQ ID NO: 649189 - DNA, 25 bp, Homo sapien
tcagttcgaaaagaagcttcatccc

SEQ ID NO: 649190 - DNA, 25 bp, Homo sapien
tcccatcatagtgtatgactttcca

SEQ ID NO: 649191 - DNA, 25 bp, Homo sapien
tcaaatgcagacttcacgacatctg

SEQ ID NO: 649192 - DNA, 25 bp, Homo sapien
catctgtgccgagggttttgaaaac

SEQ ID NO: 649193 - DNA, 25 bp, Homo sapien
tatgactttccagatccagtttgcc

SEQ ID NO: 649194 - DNA, 25 bp, Homo sapien
tgcaaacgggtctagaaaatccagg

SEQ ID NO: 649195 - DNA, 25 bp, Homo sapien
attgcccagaaagttaacccaggcg

SEQ ID NO: 649196 - DNA, 25 bp, Homo sapien
ttcattgcccagaaagttaacccag

SEQ ID NO: 649197 - DNA, 25 bp, Homo sapien
tttggggccaggagacatgactgca

SEQ ID NO: 649198 - DNA, 25 bp, Homo sapien
caaacttggcgctatgacctggaaa

SEQ ID NO: 649199 - DNA, 25 bp, Homo sapien
ctgctttatgagactgacaactgct

SEQ ID NO: 649200 - DNA, 25 bp, Homo sapien
tcccacagaggatgcaccgagcatc

SEQ ID NO: 649201 - DNA, 25 bp, Homo sapien
gcctggttacctgaaatccaccttg

SEQ ID NO: 649202 - DNA, 25 bp, Homo sapien
aggtgaaggtcttggtccgttctct

SEQ ID NO: 649203 - DNA, 25 bp, Homo sapien
catttcttgtgaaacgtaatctggg

SEQ ID NO: 649204 - DNA, 25 bp, Homo sapien
tgtgaaacgtaatctgggctttttg

SEQ ID NO: 649205 - DNA, 25 bp, Homo sapien
acgtaatctgggctttttgtatcag

SEQ ID NO: 649206 - DNA, 25 bp, Homo sapien
ttggaacttaagcaaggccaggtca

SEQ ID NO: 649207 - DNA, 25 bp, Homo sapien
gggctcttggaacttaagcaaggcc

SEQ ID NO: 649208 - DNA, 25 bp, Homo sapien
tcttggaacttaagcaaggccaggt

SEQ ID NO: 649209 - DNA, 25 bp, Homo sapien
ggaacttaagcaaggccaggtcatg

SEQ ID NO: 649210 - DNA, 25 bp, Homo sapien
aagtttgtgattgtcgttttgcttt

SEQ ID NO: 649211 - DNA, 25 bp, Homo sapien
taagtttgtgattgtcgttttgctt

SEQ ID NO: 649212 - DNA, 25 bp, Homo sapien
tgtgattgtcgttttgcttttctcc

SEQ ID NO: 649213 - DNA, 25 bp, Homo sapien
gattgtcgttttgcttttctccatc

SEQ ID NO: 649214 - DNA, 25 bp, Homo sapien
cttctttctacatctgttcagaaac

SEQ ID NO: 649215 - DNA, 25 bp, Homo sapien
tctttctacatctgttcagaaactg

SEQ ID NO: 649216 - DNA, 25 bp, Homo sapien
ttctttctacatctgttcagaaact

SEQ ID NO: 649217 - DNA, 25 bp, Homo sapien
ctttctacatctgttcagaaactgc

SEQ ID NO: 649218 - DNA, 25 bp, Homo sapien
tctccaattagtccagagaacctca

SEQ ID NO: 649219 - DNA, 25 bp, Homo sapien
caagcacaagggcaccacccacaat

SEQ ID NO: 649220 - DNA, 25 bp, Homo sapien
cccacaatcagcactgagtgctttg

SEQ ID NO: 649221 - DNA, 25 bp, Homo sapien
tctctccaattagtccagagaacct

SEQ ID NO: 649222 - DNA, 25 bp, Homo sapien
gtcatggaaaaaagatacggctgtg

SEQ ID NO: 649223 - DNA, 25 bp, Homo sapien
aaaaagatacggctgtgcacgtggc

SEQ ID NO: 649224 - DNA, 25 bp, Homo sapien
tggaaaaaagatacggctgtgcacg

SEQ ID NO: 649225 - DNA, 25 bp, Homo sapien
tgtgcacgtggccaaacttctttga

SEQ ID NO: 649226 - DNA, 25 bp, Homo sapien
ctcaggggatctgccggcctcggtc

SEQ ID NO: 649227 - DNA, 25 bp, Homo sapien
tatttatttacttcagatggagtct

SEQ ID NO: 649228 - DNA, 25 bp, Homo sapien
gacctcaggggatctgccggcctcg

SEQ ID NO: 649229 - DNA, 25 bp, Homo sapien
ttatttacttcagatggagtctcac

SEQ ID NO: 649230 - DNA, 25 bp, Homo sapien
ggtcaagctggtctcagtctcctga

SEQ ID NO: 649231 - DNA, 25 bp, Homo sapien
aagtagcggagattacaggcactcg

SEQ ID NO: 649232 - DNA, 25 bp, Homo sapien
gttggtcaagctggtctcagtctcc

SEQ ID NO: 649233 - DNA, 25 bp, Homo sapien
ctaagtagcggagattacaggcact

SEQ ID NO: 649234 - DNA, 25 bp, Homo sapien
caatccctggagctgtaaagcaggg

SEQ ID NO: 649235 - DNA, 25 bp, Homo sapien
taaagcagggacaataatagcaggt

SEQ ID NO: 649236 - DNA, 25 bp, Homo sapien
cccaaggccctaaaggtgtgcaact

SEQ ID NO: 649237 - DNA, 25 bp, Homo sapien
gaagaatgaggctgccaatccctgg

SEQ ID NO: 649238 - DNA, 25 bp, Homo sapien
taatgctacccactgtctgaggcca

SEQ ID NO: 649239 - DNA, 25 bp, Homo sapien
aactgtgcctagcttggagaccact

SEQ ID NO: 649240 - DNA, 25 bp, Homo sapien
gagaacagctacatgtgcctctgaa

SEQ ID NO: 649241 - DNA, 25 bp, Homo sapien
taaaatcatatcacgctgaagccag

SEQ ID NO: 649242 - DNA, 25 bp, Homo sapien
tctacctcgtcaaatgaaaacacca

SEQ ID NO: 649243 - DNA, 25 bp, Homo sapien
aagggcccatctacctcgtcaaatg

SEQ ID NO: 649244 - DNA, 25 bp, Homo sapien
catctacctcgtcaaatgaaaacac

SEQ ID NO: 649245 - DNA, 25 bp, Homo sapien
gcccatctacctcgtcaaatgaaaa

SEQ ID NO: 649246 - DNA, 25 bp, Homo sapien
ggccggaccctcacggccaccttga

SEQ ID NO: 649247 - DNA, 25 bp, Homo sapien
gccggaccctcacggccaccttgac

SEQ ID NO: 649248 - DNA, 25 bp, Homo sapien
atgggccggaccctcacggccacct

SEQ ID NO: 649249 - DNA, 25 bp, Homo sapien
catgggccggaccctcacggccacc

SEQ ID NO: 649250 - DNA, 25 bp, Homo sapien
ggccggacctggagttccgcggcag

SEQ ID NO: 649251 - DNA, 25 bp, Homo sapien
ggtcgccggcgacgctggctactca

SEQ ID NO: 649252 - DNA, 25 bp, Homo sapien
gacgctggctactcagatcgcggct

SEQ ID NO: 649253 - DNA, 25 bp, Homo sapien
tcccactagcccagaactccgcggt

SEQ ID NO: 649254 - DNA, 25 bp, Homo sapien
ctttgcacagatggtaacaagcaat

SEQ ID NO: 649255 - DNA, 25 bp, Homo sapien
ggtacaaaaaagtcctagagctagc

SEQ ID NO: 649256 - DNA, 25 bp, Homo sapien
cactatatctgggtattctacatgt

SEQ ID NO: 649257 - DNA, 25 bp, Homo sapien
cagaggcaactcctgttaccagtgt

SEQ ID NO: 649258 - DNA, 25 bp, Homo sapien
gggaagcaaccaccaatgcagccgg

SEQ ID NO: 649259 - DNA, 25 bp, Homo sapien
gggaaggtgaactcagtctccatag

SEQ ID NO: 649260 - DNA, 25 bp, Homo sapien
ttcctttgcttcaacctcggctggg

SEQ ID NO: 649261 - DNA, 25 bp, Homo sapien
caatgcagccggatcaacaaagaag

SEQ ID NO: 649262 - DNA, 25 bp, Homo sapien
gacatcacaggtggatacccagtcg

SEQ ID NO: 649263 - DNA, 25 bp, Homo sapien
tacccagtcggcatgcacatggtgg

SEQ ID NO: 649264 - DNA, 25 bp, Homo sapien
cactgatgatagacaaggaactgac

SEQ ID NO: 649265 - DNA, 25 bp, Homo sapien
tgttgccgttggcaagcgcctgctg

SEQ ID NO: 649266 - DNA, 25 bp, Homo sapien
aaatgtttcctctccgaggtcacac

SEQ ID NO: 649267 - DNA, 25 bp, Homo sapien
aaaggatccgattccagcaacaaag

SEQ ID NO: 649268 - DNA, 25 bp, Homo sapien
caccaagaagaacggcttctgtgga

SEQ ID NO: 649269 - DNA, 25 bp, Homo sapien
gcaacaaagtgtcgacttcactcct

SEQ ID NO: 649270 - DNA, 25 bp, Homo sapien
ctccatccagttcctgtacattgct

SEQ ID NO: 649271 - DNA, 25 bp, Homo sapien
cagctcttgtgttgcagattgatcc

SEQ ID NO: 649272 - DNA, 25 bp, Homo sapien
agattgatccattgccacatccttg

SEQ ID NO: 649273 - DNA, 25 bp, Homo sapien
taagtttccagctctactgtttctc

SEQ ID NO: 649274 - DNA, 25 bp, Homo sapien
cacgcagacatacaagagaacttgc

SEQ ID NO: 649275 - DNA, 25 bp, Homo sapien
gtgcatacacacatcttgtacacgc

SEQ ID NO: 649276 - DNA, 25 bp, Homo sapien
acacgcagacatacaagagaacttg

SEQ ID NO: 649277 - DNA, 25 bp, Homo sapien
cacacatcttgtacacgcagacata

SEQ ID NO: 649278 - DNA, 25 bp, Homo sapien
ctgtgagcaatttgagaaatgaata

SEQ ID NO: 649279 - DNA, 25 bp, Homo sapien
tgagcaatttgagaaatgaatagtg

SEQ ID NO: 649280 - DNA, 25 bp, Homo sapien
caatttgagaaatgaatagtgaatc

SEQ ID NO: 649281 - DNA, 25 bp, Homo sapien
gagcaatttgagaaatgaatagtga

SEQ ID NO: 649282 - DNA, 25 bp, Homo sapien
agtgtctctgtacacgcctctcccg

SEQ ID NO: 649283 - DNA, 25 bp, Homo sapien
ttctcaagcccctattcctgggtgg

SEQ ID NO: 649284 - DNA, 25 bp, Homo sapien
gcccctattcctgggtggacctggc

SEQ ID NO: 649285 - DNA, 25 bp, Homo sapien
ttccccttctgatccttggtggcca

SEQ ID NO: 649286 - DNA, 25 bp, Homo sapien
cagagcatgtcaccttcagtcttca

SEQ ID NO: 649287 - DNA, 25 bp, Homo sapien
gtcaccttcagtcttcaagcaccag

SEQ ID NO: 649288 - DNA, 25 bp, Homo sapien
ttcaagcaccagataattaagttgc

SEQ ID NO: 649289 - DNA, 25 bp, Homo sapien
tttccccagagcatgtcaccttcag

SEQ ID NO: 649290 - DNA, 25 bp, Homo sapien
tgggcaagaatgttcgctggagata

SEQ ID NO: 649291 - DNA, 25 bp, Homo sapien
tcagctttccaattttgggcaagaa

SEQ ID NO: 649292 - DNA, 25 bp, Homo sapien
gataaatacgtaagggaataaatga

SEQ ID NO: 649293 - DNA, 25 bp, Homo sapien
ctctcagctttccaattttgggcaa

SEQ ID NO: 649294 - DNA, 25 bp, Homo sapien
tcataggcatggcttgaatgagagc

SEQ ID NO: 649295 - DNA, 25 bp, Homo sapien
aagtcatctctcagactaagctcag

SEQ ID NO: 649296 - DNA, 25 bp, Homo sapien
tgtagggacattggcaacaactgca

SEQ ID NO: 649297 - DNA, 25 bp, Homo sapien
tagtgatgtccaggtatgtgtctgc

SEQ ID NO: 649298 - DNA, 25 bp, Homo sapien
tggaagcttttctccccgcactcta

SEQ ID NO: 649299 - DNA, 25 bp, Homo sapien
atttggaagcttttctccccgcact

SEQ ID NO: 649300 - DNA, 25 bp, Homo sapien
ggaagcttttctccccgcactctat

SEQ ID NO: 649301 - DNA, 25 bp, Homo sapien
ctgagaaaggcattcatttggaagc

SEQ ID NO: 649302 - DNA, 25 bp, Homo sapien
gactggagtcatggctccaggctct

SEQ ID NO: 649303 - DNA, 25 bp, Homo sapien
agcactgcccagagtcccgtgctgg

SEQ ID NO: 649304 - DNA, 25 bp, Homo sapien
tgtgactggagtcatggctccaggc

SEQ ID NO: 649305 - DNA, 25 bp, Homo sapien
gctctgccggcttcatgcacctggg

SEQ ID NO: 649306 - DNA, 25 bp, Homo sapien
caaaggccttgcaggatacgcagtc

SEQ ID NO: 649307 - DNA, 25 bp, Homo sapien
gcaggatacgcagtcgtcgtgacat

SEQ ID NO: 649308 - DNA, 25 bp, Homo sapien
aggaacaaaggccttgcaggatacg

SEQ ID NO: 649309 - DNA, 25 bp, Homo sapien
ccttgcaggatacgcagtcgtcgtg

SEQ ID NO: 649310 - DNA, 25 bp, Homo sapien
gcttgtgacgaatcactttcattga

SEQ ID NO: 649311 - DNA, 25 bp, Homo sapien
ctgctggagcttgtgacgaatcact

SEQ ID NO: 649312 - DNA, 25 bp, Homo sapien
ccaagccatacccatatttgctaac

SEQ ID NO: 649313 - DNA, 25 bp, Homo sapien
tgctaacaaagataacggcatcccc

SEQ ID NO: 649314 - DNA, 25 bp, Homo sapien
cactttacccacaaacgtgtaggct

SEQ ID NO: 649315 - DNA, 25 bp, Homo sapien
cccacaaacgtgtaggctttctcca

SEQ ID NO: 649316 - DNA, 25 bp, Homo sapien
tacccacaaacgtgtaggctttctc

SEQ ID NO: 649317 - DNA, 25 bp, Homo sapien
gtgtgctgttgggacagtgggatcc

SEQ ID NO: 649318 - DNA, 25 bp, Homo sapien
tgggaagtccccgagaagctagaac

SEQ ID NO: 649319 - DNA, 25 bp, Homo sapien
ggtttgggagccagatccagaagaa

SEQ ID NO: 649320 - DNA, 25 bp, Homo sapien
cccgagaagctagaacctggaggct

SEQ ID NO: 649321 - DNA, 25 bp, Homo sapien
attccctcttgtctgaattctacct

SEQ ID NO: 649322 - DNA, 25 bp, Homo sapien
tgaattctacctgtccgtgtcttct

SEQ ID NO: 649323 - DNA, 25 bp, Homo sapien
tcttctgaggcttgttcttaaaagc

SEQ ID NO: 649324 - DNA, 25 bp, Homo sapien
ttccctcttgtctgaattctacctg

SEQ ID NO: 649325 - DNA, 25 bp, Homo sapien
agctggtagaatgactgtaccattt

SEQ ID NO: 649326 - DNA, 25 bp, Homo sapien
gctggtagaatgactgtaccattta

SEQ ID NO: 649327 - DNA, 25 bp, Homo sapien
ctggtagaatgactgtaccatttac

SEQ ID NO: 649328 - DNA, 25 bp, Homo sapien
catgtgtcccatgctgagaagattc

SEQ ID NO: 649329 - DNA, 25 bp, Homo sapien
cagctttgacaaagaggccatgtgt

SEQ ID NO: 649330 - DNA, 25 bp, Homo sapien
cataagacggtagagggcatgcttc

SEQ ID NO: 649331 - DNA, 25 bp, Homo sapien
tagaggttattccacaggagcgtct

SEQ ID NO: 649332 - DNA, 25 bp, Homo sapien
taatagatcccattgaaattatttc

SEQ ID NO: 649333 - DNA, 25 bp, Homo sapien
tggagctcagtgactagacctggac

SEQ ID NO: 649334 - DNA, 25 bp, Homo sapien
gacctggacgtgcttcaaggtgtat

SEQ ID NO: 649335 - DNA, 25 bp, Homo sapien
gactagacctggacgtgcttcaagg

SEQ ID NO: 649336 - DNA, 25 bp, Homo sapien
aaacaccactgcactcgagccggcc

SEQ ID NO: 649337 - DNA, 25 bp, Homo sapien
cctgatacaggccaagtccatattc

SEQ ID NO: 649338 - DNA, 25 bp, Homo sapien
ttcctgatacaggccaagtccatat

SEQ ID NO: 649339 - DNA, 25 bp, Homo sapien
tgatacaggccaagtccatattccc

SEQ ID NO: 649340 - DNA, 25 bp, Homo sapien
tacaggccaagtccatattccccat

SEQ ID NO: 649341 - DNA, 25 bp, Homo sapien
tggttgagtgcacaagacaaatgtc

SEQ ID NO: 649342 - DNA, 25 bp, Homo sapien
tagtcagtaaatcacccagttggtt

SEQ ID NO: 649343 - DNA, 25 bp, Homo sapien
ccatgatacgcgtccatttgggcag

SEQ ID NO: 649344 - DNA, 25 bp, Homo sapien
tatgaggccctccattagctggtcc

SEQ ID NO: 649345 - DNA, 25 bp, Homo sapien
tgtggatcagacgtcccattcttgc

SEQ ID NO: 649346 - DNA, 25 bp, Homo sapien
ctaagttaacctgcatgaaggtgac

SEQ ID NO: 649347 - DNA, 25 bp, Homo sapien
aaggcgcaggtcatcttgtggatca

SEQ ID NO: 649348 - DNA, 25 bp, Homo sapien
tctttcaacacaaggcaggtgggaa

SEQ ID NO: 649349 - DNA, 25 bp, Homo sapien
gcctgccatgaagttggtagaagca

SEQ ID NO: 649350 - DNA, 25 bp, Homo sapien
tgtattgcctgccatgaagttggta

SEQ ID NO: 649351 - DNA, 25 bp, Homo sapien
tattgcctgccatgaagttggtaga

SEQ ID NO: 649352 - DNA, 25 bp, Homo sapien
ttgcctgccatgaagttggtagaag

SEQ ID NO: 649353 - DNA, 25 bp, Homo sapien
tacgatttttctgcgtgtttttcca

SEQ ID NO: 649354 - DNA, 25 bp, Homo sapien
gaagccctgaccattcagagatgga

SEQ ID NO: 649355 - DNA, 25 bp, Homo sapien
ctactcagtgtacgatttttctgcg

SEQ ID NO: 649356 - DNA, 25 bp, Homo sapien
agaggggtgccgagtccaccctgct

SEQ ID NO: 649357 - DNA, 25 bp, Homo sapien
tgaacgattaattattagcttcaca

SEQ ID NO: 649358 - DNA, 25 bp, Homo sapien
agcttcacatcatattggtcatcaa

SEQ ID NO: 649359 - DNA, 25 bp, Homo sapien
catgcacatagaaccaagctgagca

SEQ ID NO: 649360 - DNA, 25 bp, Homo sapien
tgctttgatgcctccagtaattata

SEQ ID NO: 649361 - DNA, 25 bp, Homo sapien
tcaagataggcctggcctcttcaag

SEQ ID NO: 649362 - DNA, 25 bp, Homo sapien
gataggcctggcctcttcaagaagg

SEQ ID NO: 649363 - DNA, 25 bp, Homo sapien
caagataggcctggcctcttcaaga

SEQ ID NO: 649364 - DNA, 25 bp, Homo sapien
aggcctggcctcttcaagaaggcac

SEQ ID NO: 649365 - DNA, 25 bp, Homo sapien
tcacatccagcagttgggtcctggt

SEQ ID NO: 649366 - DNA, 25 bp, Homo sapien
catccagcagttgggtcctggtgct

SEQ ID NO: 649367 - DNA, 25 bp, Homo sapien
cacatccagcagttgggtcctggtg

SEQ ID NO: 649368 - DNA, 25 bp, Homo sapien
catcacatccagcagttgggtcctg

SEQ ID NO: 649369 - DNA, 25 bp, Homo sapien
ctgtgggtagaccatcatgccacat

SEQ ID NO: 649370 - DNA, 25 bp, Homo sapien
tccatggtaaacagagctctggctc

SEQ ID NO: 649371 - DNA, 25 bp, Homo sapien
gagctctggctctaagagatcacaa

SEQ ID NO: 649372 - DNA, 25 bp, Homo sapien
tatgcatcctcctggatagatggtc

SEQ ID NO: 649373 - DNA, 25 bp, Homo sapien
gggttatcttggcaggaatccatgg

SEQ ID NO: 649374 - DNA, 25 bp, Homo sapien
ggattggggcttcacatccttgcct

SEQ ID NO: 649375 - DNA, 25 bp, Homo sapien
tatgaagcgctgacacagagggatt

SEQ ID NO: 649376 - DNA, 25 bp, Homo sapien
tcaggtttactatgaagcgctgaca

SEQ ID NO: 649377 - DNA, 25 bp, Homo sapien
tctttgaccaaatgttcaggtttac

SEQ ID NO: 649378 - DNA, 25 bp, Homo sapien
tgtggacagtccgcctggtgtcctt

SEQ ID NO: 649379 - DNA, 25 bp, Homo sapien
tcatcttggaacccctgtaggtggg

SEQ ID NO: 649380 - DNA, 25 bp, Homo sapien
tccgcctggtgtcctttgtgcttct

SEQ ID NO: 649381 - DNA, 25 bp, Homo sapien
gacagtccgcctggtgtcctttgtg

SEQ ID NO: 649382 - DNA, 25 bp, Homo sapien
cataacgagctgatcggatgggagc

SEQ ID NO: 649383 - DNA, 25 bp, Homo sapien
catgctccataacgagctgatcgga

SEQ ID NO: 649384 - DNA, 25 bp, Homo sapien
gctccataacgagctgatcggatgg

SEQ ID NO: 649385 - DNA, 25 bp, Homo sapien
gagcatgctccataacgagctgatc

SEQ ID NO: 649386 - DNA, 25 bp, Homo sapien
gaaaagggcctcatgcaagagaaga

SEQ ID NO: 649387 - DNA, 25 bp, Homo sapien
caaacagggcaggttcggcaatttg

SEQ ID NO: 649388 - DNA, 25 bp, Homo sapien
cagcagctgcgataaggagggttaa

SEQ ID NO: 649389 - DNA, 25 bp, Homo sapien
gaaaatgtggttatagcagcagcct

SEQ ID NO: 649390 - DNA, 25 bp, Homo sapien
ggctcacacctgtaatcccaacatt

SEQ ID NO: 649391 - DNA, 25 bp, Homo sapien
taaaagagtgggggctaggcacagt

SEQ ID NO: 649392 - DNA, 25 bp, Homo sapien
ttgggaggctgaggcaagaggattg

SEQ ID NO: 649393 - DNA, 25 bp, Homo sapien
cctgggcaacagaaggagacctcgt

SEQ ID NO: 649394 - DNA, 25 bp, Homo sapien
ggcttcctccactatttgtgactgt

SEQ ID NO: 649395 - DNA, 25 bp, Homo sapien
tgtgactgtaactatcaggcttgtc

SEQ ID NO: 649396 - DNA, 25 bp, Homo sapien
ctatcaggcttgtccagtttattcc

SEQ ID NO: 649397 - DNA, 25 bp, Homo sapien
cttcagttctgggttgatcgcaaga

SEQ ID NO: 649398 - DNA, 25 bp, Homo sapien
gttttacctgttacctgcacaagtg

SEQ ID NO: 649399 - DNA, 25 bp, Homo sapien
caatagtgtggtatatgaggaagac

SEQ ID NO: 649400 - DNA, 25 bp, Homo sapien
taggcaagttccttacctggtaata

SEQ ID NO: 649401 - DNA, 25 bp, Homo sapien
tccaggcctgatgcttattagctgt

SEQ ID NO: 649402 - DNA, 25 bp, Homo sapien
gacaaaattctccaatcacgactca

SEQ ID NO: 649403 - DNA, 25 bp, Homo sapien
ctgagtgatactgagtgtggtaacc

SEQ ID NO: 649404 - DNA, 25 bp, Homo sapien
tcacctccagaagcttaaaacataa

SEQ ID NO: 649405 - DNA, 25 bp, Homo sapien
tgctgggaagtagtaacagtacaga

SEQ ID NO: 649406 - DNA, 25 bp, Homo sapien
cagtgtttctttagccttggtgaac

SEQ ID NO: 649407 - DNA, 25 bp, Homo sapien
tttgttttgataacatttggctggg

SEQ ID NO: 649408 - DNA, 25 bp, Homo sapien
tgaaggacttaaattatccagtgtt

SEQ ID NO: 649409 - DNA, 25 bp, Homo sapien
catttgggatagtcgtctttaaaag

SEQ ID NO: 649410 - DNA, 25 bp, Homo sapien
cagcaggtggtaaaggtgctgcccc

SEQ ID NO: 649411 - DNA, 25 bp, Homo sapien
tagcaaatagctggttaggaagctg

SEQ ID NO: 649412 - DNA, 25 bp, Homo sapien
gttaggaagctgattgatgagcctc

SEQ ID NO: 649413 - DNA, 25 bp, Homo sapien
ccaggtctccagatagcaaatagct

SEQ ID NO: 649414 - DNA, 25 bp, Homo sapien
accagtggcttctcgaatttgggag

SEQ ID NO: 649415 - DNA, 25 bp, Homo sapien
tctggccccatagacaccagtggct

SEQ ID NO: 649416 - DNA, 25 bp, Homo sapien
catcttcctgcatacgtgttggctg

SEQ ID NO: 649417 - DNA, 25 bp, Homo sapien
tagtttccctggtgggtcgcttctg

SEQ ID NO: 649418 - DNA, 25 bp, Homo sapien
ccagaatgtgctcctttaggttcag

SEQ ID NO: 649419 - DNA, 25 bp, Homo sapien
gtaaatgtctgtattaaatccttcc

SEQ ID NO: 649420 - DNA, 25 bp, Homo sapien
cctcatcttcctggatcggtaagtc

SEQ ID NO: 649421 - DNA, 25 bp, Homo sapien
ctaatattatatggcgatgccaaag

SEQ ID NO: 649422 - DNA, 25 bp, Homo sapien
aatattatatggcgatgccaaagac

SEQ ID NO: 649423 - DNA, 25 bp, Homo sapien
tctaatattatatggcgatgccaaa

SEQ ID NO: 649424 - DNA, 25 bp, Homo sapien
attctaatattatatggcgatgcca

SEQ ID NO: 649425 - DNA, 25 bp, Homo sapien
ttttcagcatgtggggattttcccc

SEQ ID NO: 649426 - DNA, 25 bp, Homo sapien
tgagtttgccagtgcctgtggcagt

SEQ ID NO: 649427 - DNA, 25 bp, Homo sapien
tgtggcagtcagtcctcagcatgct

SEQ ID NO: 649428 - DNA, 25 bp, Homo sapien
cacccccagagggtgaaatgacacc

SEQ ID NO: 649429 - DNA, 25 bp, Homo sapien
atttctaagtacatttgctgcaggc

SEQ ID NO: 649430 - DNA, 25 bp, Homo sapien
caccactgttagtattgtcagtggc

SEQ ID NO: 649431 - DNA, 25 bp, Homo sapien
actctcgatgtcagggacttgctga

SEQ ID NO: 649432 - DNA, 25 bp, Homo sapien
tggaaattcaccactgttagtattg

SEQ ID NO: 649433 - DNA, 25 bp, Homo sapien
cttgctgtgaaactctcgatgtcag

SEQ ID NO: 649434 - DNA, 25 bp, Homo sapien
gtgtatgtgccttcaggataagttc

SEQ ID NO: 649435 - DNA, 25 bp, Homo sapien
tctttatgaggctcacccgtgatca

SEQ ID NO: 649436 - DNA, 25 bp, Homo sapien
aaatgtaagataggttgtgggttat

SEQ ID NO: 649437 - DNA, 25 bp, Homo sapien
ggcccttgttaaaggtgtatgtgcc

SEQ ID NO: 649438 - DNA, 25 bp, Homo sapien
tccgttggatcttgagcagttctct

SEQ ID NO: 649439 - DNA, 25 bp, Homo sapien
tgcaggtccgttggatcttgagcag

SEQ ID NO: 649440 - DNA, 25 bp, Homo sapien
cagttctctgcttattctgagtaag

SEQ ID NO: 649441 - DNA, 25 bp, Homo sapien
ggtccgttggatcttgagcagttct

SEQ ID NO: 649442 - DNA, 25 bp, Homo sapien
atattgcacaattttggttaaataa

SEQ ID NO: 649443 - DNA, 25 bp, Homo sapien
aaataatccaattattcgcattagg

SEQ ID NO: 649444 - DNA, 25 bp, Homo sapien
tccaattattcgcattaggacattc

SEQ ID NO: 649445 - DNA, 25 bp, Homo sapien
tttaggtgaggaggggaatattgca

SEQ ID NO: 649446 - DNA, 25 bp, Homo sapien
ccacagacctgactcttggttttgc

SEQ ID NO: 649447 - DNA, 25 bp, Homo sapien
aaacacccacagacctgactcttgg

SEQ ID NO: 649448 - DNA, 25 bp, Homo sapien
ggagtatcactcaaaacacccacag

SEQ ID NO: 649449 - DNA, 25 bp, Homo sapien
aggagcagttgatggagtatcactc

SEQ ID NO: 649450 - DNA, 25 bp, Homo sapien
tcctgtgtagcattgagtccctctc

SEQ ID NO: 649451 - DNA, 25 bp, Homo sapien
tctcctgtgtagcattggcccctct

SEQ ID NO: 649452 - DNA, 25 bp, Homo sapien
tggcccctctcctgtgtagcattga

SEQ ID NO: 649453 - DNA, 25 bp, Homo sapien
cctgtgtagcattggccgcaaaggg

SEQ ID NO: 649454 - DNA, 25 bp, Homo sapien
gaaatgtggtaacagtcttgcccat

SEQ ID NO: 649455 - DNA, 25 bp, Homo sapien
gaaggcaagaatactcatgaacctg

SEQ ID NO: 649456 - DNA, 25 bp, Homo sapien
tgaaatgtggtaacagtcttgccca

SEQ ID NO: 649457 - DNA, 25 bp, Homo sapien
gcaagaatactcatgaacctgctga

SEQ ID NO: 649458 - DNA, 25 bp, Homo sapien
aaatactctaactgactggacctga

SEQ ID NO: 649459 - DNA, 25 bp, Homo sapien
catgcatagattagtgaagaaccac

SEQ ID NO: 649460 - DNA, 25 bp, Homo sapien
cactgggaattcatgagctaagagg

SEQ ID NO: 649461 - DNA, 25 bp, Homo sapien
gatgggcacccattatacaatccct

SEQ ID NO: 649462 - DNA, 25 bp, Homo sapien
ctcccatcaagctgagaacttctct

SEQ ID NO: 649463 - DNA, 25 bp, Homo sapien
catccactgagttaactgcagctgc

SEQ ID NO: 649464 - DNA, 25 bp, Homo sapien
ctacatccactgagttaactgcagc

SEQ ID NO: 649465 - DNA, 25 bp, Homo sapien
tgcagcccatatctcccatcaagct

SEQ ID NO: 649466 - DNA, 25 bp, Homo sapien
aaaagtgagagggtgaatgccttca

SEQ ID NO: 649467 - DNA, 25 bp, Homo sapien
gagagggtgaatgccttcaggggca

SEQ ID NO: 649468 - DNA, 25 bp, Homo sapien
ctgaaaagtgagagggtgaatgcct

SEQ ID NO: 649469 - DNA, 25 bp, Homo sapien
aagtgagagggtgaatgccttcagg

SEQ ID NO: 649470 - DNA, 25 bp, Homo sapien
ggctagatggtcacttgtcaacagc

SEQ ID NO: 649471 - DNA, 25 bp, Homo sapien
ttcctgggctagatggtcacttgtc

SEQ ID NO: 649472 - DNA, 25 bp, Homo sapien
aaagaacattggtagtgtggggact

SEQ ID NO: 649473 - DNA, 25 bp, Homo sapien
ggcttgcaaatatggttgtcatcct

SEQ ID NO: 649474 - DNA, 25 bp, Homo sapien
gactgaatcggtatttaacttctcc

SEQ ID NO: 649475 - DNA, 25 bp, Homo sapien
ggtggctttaagatctgtccgtaca

SEQ ID NO: 649476 - DNA, 25 bp, Homo sapien
cactgcttcccttactctctggtgg

SEQ ID NO: 649477 - DNA, 25 bp, Homo sapien
cagccgagcaccgtgaagactgaat

SEQ ID NO: 649478 - DNA, 25 bp, Homo sapien
gcagcatgtcctttcggtgcatgaa

SEQ ID NO: 649479 - DNA, 25 bp, Homo sapien
cagctatggcttctgaagacctcat

SEQ ID NO: 649480 - DNA, 25 bp, Homo sapien
tgcatgaaagtcagctatggcttct

SEQ ID NO: 649481 - DNA, 25 bp, Homo sapien
tcctttcggtgcatgaaagtcagct

SEQ ID NO: 649482 - DNA, 25 bp, Homo sapien
gaggatatacagcaaaagacctgac

SEQ ID NO: 649483 - DNA, 25 bp, Homo sapien
acctgacagaataaagtgatgtcag

SEQ ID NO: 649484 - DNA, 25 bp, Homo sapien
gagtgaggatatacagcaaaagacc

SEQ ID NO: 649485 - DNA, 25 bp, Homo sapien
gcaagaaggagtgaggatatacagc

SEQ ID NO: 649486 - DNA, 25 bp, Homo sapien
taataacttggtgtagattgctttg

SEQ ID NO: 649487 - DNA, 25 bp, Homo sapien
tagttttgtaataacttggtgtaga

SEQ ID NO: 649488 - DNA, 25 bp, Homo sapien
tgtgttcgtacaaatcagtgagatc

SEQ ID NO: 649489 - DNA, 25 bp, Homo sapien
gtagattgctttgtgttcgtacaaa

SEQ ID NO: 649490 - DNA, 25 bp, Homo sapien
tcatgggaacagcatccttctcaga

SEQ ID NO: 649491 - DNA, 25 bp, Homo sapien
gggaacagcatccttctcagataaa

SEQ ID NO: 649492 - DNA, 25 bp, Homo sapien
tcctccttttccatgttgaactaca

SEQ ID NO: 649493 - DNA, 25 bp, Homo sapien
tacagcggtctgatctgaggtgcca

SEQ ID NO: 649494 - DNA, 25 bp, Homo sapien
tatttacttcagtccaataatcagt

SEQ ID NO: 649495 - DNA, 25 bp, Homo sapien
gcttgtataaactgaacactcaggg

SEQ ID NO: 649496 - DNA, 25 bp, Homo sapien
cagttcagccagaaatatatttgct

SEQ ID NO: 649497 - DNA, 25 bp, Homo sapien
tatatttgcttgtataaactgaaca

SEQ ID NO: 649498 - DNA, 25 bp, Homo sapien
tctgactctccacaatcacgaatgg

SEQ ID NO: 649499 - DNA, 25 bp, Homo sapien
cacaatcacgaatggcaaatagcag

SEQ ID NO: 649500 - DNA, 25 bp, Homo sapien
gactctccacaatcacgaatggcaa

SEQ ID NO: 649501 - DNA, 25 bp, Homo sapien
ggaaagcagcgccaagagccagctt

SEQ ID NO: 649502 - DNA, 25 bp, Homo sapien
tgtcattttctttgtcccctggctc

SEQ ID NO: 649503 - DNA, 25 bp, Homo sapien
ttagttctgtgatgtcattttcttt

SEQ ID NO: 649504 - DNA, 25 bp, Homo sapien
cattttctttgtcccctggctctca

SEQ ID NO: 649505 - DNA, 25 bp, Homo sapien
tagttctgtgatgtcattttctttg

SEQ ID NO: 649506 - DNA, 25 bp, Homo sapien
gggaccccagtagccatcttatagt

SEQ ID NO: 649507 - DNA, 25 bp, Homo sapien
ccagtagccatcttatagtttcctt

SEQ ID NO: 649508 - DNA, 25 bp, Homo sapien
gttagactggctttgcctctcaaaa

SEQ ID NO: 649509 - DNA, 25 bp, Homo sapien
caggtgtgttagactggctttgcct

SEQ ID NO: 649510 - DNA, 25 bp, Homo sapien
tctaactgaatagcctgactgtagc

SEQ ID NO: 649511 - DNA, 25 bp, Homo sapien
agctgtgacctgacttcatttttga

SEQ ID NO: 649512 - DNA, 25 bp, Homo sapien
gggacagacagattttcccactcag

SEQ ID NO: 649513 - DNA, 25 bp, Homo sapien
tccttcaattatctgtagtttcagc

SEQ ID NO: 649514 - DNA, 25 bp, Homo sapien
cagttaggggctctgtatttctgaa

SEQ ID NO: 649515 - DNA, 25 bp, Homo sapien
tttctgaattggattaaatgccacc

SEQ ID NO: 649516 - DNA, 25 bp, Homo sapien
aataaagtaggataatcaggtgtgc

SEQ ID NO: 649517 - DNA, 25 bp, Homo sapien
cctgtcttctgggaggatttgaagc

SEQ ID NO: 649518 - DNA, 25 bp, Homo sapien
ctctaggtcaatatttgtgctgtct

SEQ ID NO: 649519 - DNA, 25 bp, Homo sapien
ctcctctaggtcaatatttgtgctg

SEQ ID NO: 649520 - DNA, 25 bp, Homo sapien
cctctaggtcaatatttgtgctgtc

SEQ ID NO: 649521 - DNA, 25 bp, Homo sapien
tcctctaggtcaatatttgtgctgt

SEQ ID NO: 649522 - DNA, 25 bp, Homo sapien
cttctataggcctccactgtttttc

SEQ ID NO: 649523 - DNA, 25 bp, Homo sapien
tgaacttctataggcctccactgtt

SEQ ID NO: 649524 - DNA, 25 bp, Homo sapien
cttgaacttctataggcctccactg

SEQ ID NO: 649525 - DNA, 25 bp, Homo sapien
aacttctataggcctccactgtttt

SEQ ID NO: 649526 - DNA, 25 bp, Homo sapien
aacttggttgtgaaggtgagaaggg

SEQ ID NO: 649527 - DNA, 25 bp, Homo sapien
tcttggaaacttggttgtgaaggtg

SEQ ID NO: 649528 - DNA, 25 bp, Homo sapien
tggaaacttggttgtgaaggtgaga

SEQ ID NO: 649529 - DNA, 25 bp, Homo sapien
gggcagtaattacatgggtctgcat

SEQ ID NO: 649530 - DNA, 25 bp, Homo sapien
gcatttcccaaatgtgcttggctga

SEQ ID NO: 649531 - DNA, 25 bp, Homo sapien
tgcctggactccaaggaagctgatc

SEQ ID NO: 649532 - DNA, 25 bp, Homo sapien
caggatttgtgacacagcaagggag

SEQ ID NO: 649533 - DNA, 25 bp, Homo sapien
aagggagactctatggaaccactga

SEQ ID NO: 649534 - DNA, 25 bp, Homo sapien
caatgcctcctctgaacaactgaca

SEQ ID NO: 649535 - DNA, 25 bp, Homo sapien
tctgaacaactgacaccgagacact

SEQ ID NO: 649536 - DNA, 25 bp, Homo sapien
ttattgcaatgcctcctctgaacaa

SEQ ID NO: 649537 - DNA, 25 bp, Homo sapien
tgacaccgagacactggagcctgtc

SEQ ID NO: 649538 - DNA, 25 bp, Homo sapien
caaaaagcaatgatactaaaactga

SEQ ID NO: 649539 - DNA, 25 bp, Homo sapien
ctcaatgttctgtgctacaaaaagc

SEQ ID NO: 649540 - DNA, 25 bp, Homo sapien
gcaatgatactaaaactgattggac

SEQ ID NO: 649541 - DNA, 25 bp, Homo sapien
ctgattggacatggcattcatcact

SEQ ID NO: 649542 - DNA, 25 bp, Homo sapien
ttttccattgggcaaccagggatgt

SEQ ID NO: 649543 - DNA, 25 bp, Homo sapien
gaaaatcattttgaggcaataatgc

SEQ ID NO: 649544 - DNA, 25 bp, Homo sapien
ggcaataatgcttcaagagtggcaa

SEQ ID NO: 649545 - DNA, 25 bp, Homo sapien
tggcaaagagctgtggtctattagc

SEQ ID NO: 649546 - DNA, 25 bp, Homo sapien
gggagtgctctccagtctgcttaag

SEQ ID NO: 649547 - DNA, 25 bp, Homo sapien
tgaagtatctccaggtctaaaagtg

SEQ ID NO: 649548 - DNA, 25 bp, Homo sapien
cataggcttgattgaccgtattgag

SEQ ID NO: 649549 - DNA, 25 bp, Homo sapien
gctagatcgggccacatttgaataa

SEQ ID NO: 649550 - DNA, 25 bp, Homo sapien
cagaaagggtggacttacgttccag

SEQ ID NO: 649551 - DNA, 25 bp, Homo sapien
tcaaggcaaccattgtacaagggaa

SEQ ID NO: 649552 - DNA, 25 bp, Homo sapien
tgcttctttgggcaactgggacctg

SEQ ID NO: 649553 - DNA, 25 bp, Homo sapien
tgttgggtaagcagtcaacttcagc

SEQ ID NO: 649554 - DNA, 25 bp, Homo sapien
ccctgtgagctcagaagcaggtgca

SEQ ID NO: 649555 - DNA, 25 bp, Homo sapien
tttgagtgcatagctttcctgccag

SEQ ID NO: 649556 - DNA, 25 bp, Homo sapien
catctcaggtacacaccctgtgagc

SEQ ID NO: 649557 - DNA, 25 bp, Homo sapien
caggtgcagtcaggatgagaacttc

SEQ ID NO: 649558 - DNA, 25 bp, Homo sapien
catagttggctccaaatgcagtttc

SEQ ID NO: 649559 - DNA, 25 bp, Homo sapien
gcctactagaaacatagttggctcc

SEQ ID NO: 649560 - DNA, 25 bp, Homo sapien
cctctgtgcaggtaagcctactaga

SEQ ID NO: 649561 - DNA, 25 bp, Homo sapien
aaaaatagtaagaagtcctctgtgc

SEQ ID NO: 649562 - DNA, 25 bp, Homo sapien
ctccttctgaatgtctgtgctgatc

SEQ ID NO: 649563 - DNA, 25 bp, Homo sapien
tccttctgaatgtctgtgctgatct

SEQ ID NO: 649564 - DNA, 25 bp, Homo sapien
cctccttctgaatgtctgtgctgat

SEQ ID NO: 649565 - DNA, 25 bp, Homo sapien
tagtcactagaaagagcattcatcc

SEQ ID NO: 649566 - DNA, 25 bp, Homo sapien
catgaacctttctccatgcacgtat

SEQ ID NO: 649567 - DNA, 25 bp, Homo sapien
tcaaatactctggagaccactcata

SEQ ID NO: 649568 - DNA, 25 bp, Homo sapien
tctggagaccactcatagcattcac

SEQ ID NO: 649569 - DNA, 25 bp, Homo sapien
tagatggcgatttgttgcattttgc

SEQ ID NO: 649570 - DNA, 25 bp, Homo sapien
tcagatggaatttactgctagtaga

SEQ ID NO: 649571 - DNA, 25 bp, Homo sapien
tgtctttgattgctagcactgccat

SEQ ID NO: 649572 - DNA, 25 bp, Homo sapien
tgcattttgcattctccgttgtaca

SEQ ID NO: 649573 - DNA, 25 bp, Homo sapien
gcactctttctttgcattcgtttat

SEQ ID NO: 649574 - DNA, 25 bp, Homo sapien
ggtttctcctctgcgggcactcttt

SEQ ID NO: 649575 - DNA, 25 bp, Homo sapien
gggtttctcctctgcgggcactctt

SEQ ID NO: 649576 - DNA, 25 bp, Homo sapien
gcattcgtttatcacaaaccttctg

SEQ ID NO: 649577 - DNA, 25 bp, Homo sapien
tgcttatgtaacaaggcccctttcc

SEQ ID NO: 649578 - DNA, 25 bp, Homo sapien
tctgcaaggactttttctcgctggg

SEQ ID NO: 649579 - DNA, 25 bp, Homo sapien
caggtgtaaacaccctgcttatgta

SEQ ID NO: 649580 - DNA, 25 bp, Homo sapien
ggtgatgggccaggtgtaaacaccc

SEQ ID NO: 649581 - DNA, 25 bp, Homo sapien
cttgactactgtgcattctcttgtc

SEQ ID NO: 649582 - DNA, 25 bp, Homo sapien
actactgtgcattctcttgtcaata

SEQ ID NO: 649583 - DNA, 25 bp, Homo sapien
ggattaaggttgctttctgagatat

SEQ ID NO: 649584 - DNA, 25 bp, Homo sapien
tcctccctcccacaagaagtaagaa

SEQ ID NO: 649585 - DNA, 25 bp, Homo sapien
agatgaaacacctttctgtgaaaca

SEQ ID NO: 649586 - DNA, 25 bp, Homo sapien
caagtcttcacaggagatgaaacac

SEQ ID NO: 649587 - DNA, 25 bp, Homo sapien
tcaaaccaagtcttcacaggagatg

SEQ ID NO: 649588 - DNA, 25 bp, Homo sapien
tttctgtgaaacacagtagatgttc

SEQ ID NO: 649589 - DNA, 25 bp, Homo sapien
tcaccttcccattttgtacttggct

SEQ ID NO: 649590 - DNA, 25 bp, Homo sapien
gaatcaccttcccattttgtacttg

SEQ ID NO: 649591 - DNA, 25 bp, Homo sapien
ccttcccattttgtacttggctcac

SEQ ID NO: 649592 - DNA, 25 bp, Homo sapien
ccttgcttgaatcaccttcccattt

SEQ ID NO: 649593 - DNA, 25 bp, Homo sapien
tgagtaggaggctctatggtgaaca

SEQ ID NO: 649594 - DNA, 25 bp, Homo sapien
gtcaattccgtgaagtgagtaggag

SEQ ID NO: 649595 - DNA, 25 bp, Homo sapien
tccgtgaagtgagtaggaggctcta

SEQ ID NO: 649596 - DNA, 25 bp, Homo sapien
ggctctatggtgaacactgtgtgct

SEQ ID NO: 649597 - DNA, 25 bp, Homo sapien
ggattgagagccagatgtcgtgttc

SEQ ID NO: 649598 - DNA, 25 bp, Homo sapien
atgtcgtgttctgcagagagctggt

SEQ ID NO: 649599 - DNA, 25 bp, Homo sapien
ccagatgtcgtgttctgcagagagc

SEQ ID NO: 649600 - DNA, 25 bp, Homo sapien
taatcctccaaattcggctcctgga

SEQ ID NO: 649601 - DNA, 25 bp, Homo sapien
tgctggctggttggcctttatccat

SEQ ID NO: 649602 - DNA, 25 bp, Homo sapien
cccagtgtatcttgggcctggattt

SEQ ID NO: 649603 - DNA, 25 bp, Homo sapien
catttttgcctttacactgagctcc

SEQ ID NO: 649604 - DNA, 25 bp, Homo sapien
tccaacaaggctcttatcccagtgt

SEQ ID NO: 649605 - DNA, 25 bp, Homo sapien
agcccatcggttctgcaaatcttca

SEQ ID NO: 649606 - DNA, 25 bp, Homo sapien
tgtccagcaggtgggaatttcggtc

SEQ ID NO: 649607 - DNA, 25 bp, Homo sapien
catggttagtatctttcctttgtcc

SEQ ID NO: 649608 - DNA, 25 bp, Homo sapien
tgaagtgcatctggaggttagccca

SEQ ID NO: 649609 - DNA, 25 bp, Homo sapien
tgagccttttttccacggttgtcaa

SEQ ID NO: 649610 - DNA, 25 bp, Homo sapien
tcctctctcaaagaattgagccttt

SEQ ID NO: 649611 - DNA, 25 bp, Homo sapien
tttcaggggtattttcaccacatcc

SEQ ID NO: 649612 - DNA, 25 bp, Homo sapien
cccatgctggtcttagtgcctttca

SEQ ID NO: 649613 - DNA, 25 bp, Homo sapien
ctgcatcaatcttctcacgtctggg

SEQ ID NO: 649614 - DNA, 25 bp, Homo sapien
ggctcctatcaaggtttccctcgct

SEQ ID NO: 649615 - DNA, 25 bp, Homo sapien
tattccctgcatcaatcttctcacg

SEQ ID NO: 649616 - DNA, 25 bp, Homo sapien
ggtttccctcgctcaggaagccttc

SEQ ID NO: 649617 - DNA, 25 bp, Homo sapien
cagtggaagtgccaatccagtacag

SEQ ID NO: 649618 - DNA, 25 bp, Homo sapien
ctcctctgaaggcattactaggtcc

SEQ ID NO: 649619 - DNA, 25 bp, Homo sapien
gaaggcattactaggtcctcctgtt

SEQ ID NO: 649620 - DNA, 25 bp, Homo sapien
aatccagtacagaccaccacgtggt

SEQ ID NO: 649621 - DNA, 25 bp, Homo sapien
gctaaacctcatgcaaaggcagggg

SEQ ID NO: 649622 - DNA, 25 bp, Homo sapien
aacctcatgcaaaggcaggggcaat

SEQ ID NO: 649623 - DNA, 25 bp, Homo sapien
ctcatgcaaaggcaggggcaatgtg

SEQ ID NO: 649624 - DNA, 25 bp, Homo sapien
caaaggcaggggcaatgtggatggg

SEQ ID NO: 649625 - DNA, 25 bp, Homo sapien
tatcaaagctgtgaaactgccagat

SEQ ID NO: 649626 - DNA, 25 bp, Homo sapien
tgaagctggaaagacacttcctgcc

SEQ ID NO: 649627 - DNA, 25 bp, Homo sapien
ttcaaaaaccactgcaatgctccca

SEQ ID NO: 649628 - DNA, 25 bp, Homo sapien
tattcttgtcatcgaacccagagac

SEQ ID NO: 649629 - DNA, 25 bp, Homo sapien
aaaacacatcagttaggcactaaga

SEQ ID NO: 649630 - DNA, 25 bp, Homo sapien
tgaattggccaaaaccatggacaga

SEQ ID NO: 649631 - DNA, 25 bp, Homo sapien
tattctcagatcaattgctggtggt

SEQ ID NO: 649632 - DNA, 25 bp, Homo sapien
taatagctgggagacaaatgagatc

SEQ ID NO: 649633 - DNA, 25 bp, Homo sapien
tcctgctaggcctaaagagacaagg

SEQ ID NO: 649634 - DNA, 25 bp, Homo sapien
tgtttggccctgaggacttttccca

SEQ ID NO: 649635 - DNA, 25 bp, Homo sapien
tagtatgtaatgagccagcaggaag

SEQ ID NO: 649636 - DNA, 25 bp, Homo sapien
ccatgggactagcaacagattggag

SEQ ID NO: 649637 - DNA, 25 bp, Homo sapien
tagcatagcttggaaaaaccttcag

SEQ ID NO: 649638 - DNA, 25 bp, Homo sapien
ggtttttgacgaatcaccccagcta

SEQ ID NO: 649639 - DNA, 25 bp, Homo sapien
ggtaatcgtcattgcctaacactag

SEQ ID NO: 649640 - DNA, 25 bp, Homo sapien
tgttcttgccaaggaaatttgccag

SEQ ID NO: 649641 - DNA, 25 bp, Homo sapien
ggcatgatgctctatgaatccaaag

SEQ ID NO: 649642 - DNA, 25 bp, Homo sapien
catgatgctctatgaatccaaagtt

SEQ ID NO: 649643 - DNA, 25 bp, Homo sapien
agtccaaagaatattcaaaggtttg

SEQ ID NO: 649644 - DNA, 25 bp, Homo sapien
cttggcatgatgctctatgaatcca

SEQ ID NO: 649645 - DNA, 25 bp, Homo sapien
tctaccgatggtgcttttcttgcat

SEQ ID NO: 649646 - DNA, 25 bp, Homo sapien
tgtattcatttctaccgatggtgct

SEQ ID NO: 649647 - DNA, 25 bp, Homo sapien
tcaaagtgtattcatttctaccgat

SEQ ID NO: 649648 - DNA, 25 bp, Homo sapien
tcatttctaccgatggtgcttttct

SEQ ID NO: 649649 - DNA, 25 bp, Homo sapien
taagtaaagcagaattttgagcttt

SEQ ID NO: 649650 - DNA, 25 bp, Homo sapien
atctaagtaaagcagaattttgagc

SEQ ID NO: 649651 - DNA, 25 bp, Homo sapien
ctcttatctaagtaaagcagaattt

SEQ ID NO: 649652 - DNA, 25 bp, Homo sapien
gtaaagcagaattttgagctttgaa

SEQ ID NO: 649653 - DNA, 25 bp, Homo sapien
tacagattcccacaaacaatgacat

SEQ ID NO: 649654 - DNA, 25 bp, Homo sapien
agagcctacagattcccacaaacaa

SEQ ID NO: 649655 - DNA, 25 bp, Homo sapien
cgtaattcccttcccagagcctaca

SEQ ID NO: 649656 - DNA, 25 bp, Homo sapien
agcctacagattcccacaaacaatg

SEQ ID NO: 649657 - DNA, 25 bp, Homo sapien
gcagaacacggctttggagtccgaa

SEQ ID NO: 649658 - DNA, 25 bp, Homo sapien
cgaggctggacgtttggacactgca

SEQ ID NO: 649659 - DNA, 25 bp, Homo sapien
cctacggagaagtcgaggtgtcctc

SEQ ID NO: 649660 - DNA, 25 bp, Homo sapien
ggtaccaagttctcgaggctgcctg

SEQ ID NO: 649661 - DNA, 25 bp, Homo sapien
cgctgggtgaatgtgaatcgccgac

SEQ ID NO: 649662 - DNA, 25 bp, Homo sapien
agccagtgtgaatccatggcccgcg

SEQ ID NO: 649663 - DNA, 25 bp, Homo sapien
aaaattaactgtccggccttgctgg

SEQ ID NO: 649664 - DNA, 25 bp, Homo sapien
ctgtcattctgtcccggtgcttcac

SEQ ID NO: 649665 - DNA, 25 bp, Homo sapien
attagtgtccctcttgacaaacttg

SEQ ID NO: 649666 - DNA, 25 bp, Homo sapien
tggctgtgtccattagtgtccctct

SEQ ID NO: 649667 - DNA, 25 bp, Homo sapien
ctgtgctgccgccaattctggctgt

SEQ ID NO: 649668 - DNA, 25 bp, Homo sapien
ctaaatcttcatttattagacgtgt

SEQ ID NO: 649669 - DNA, 25 bp, Homo sapien
gaaacctgaattcctcctcctacag

SEQ ID NO: 649670 - DNA, 25 bp, Homo sapien
aacctgaattcctcctcctacagtg

SEQ ID NO: 649671 - DNA, 25 bp, Homo sapien
tctgaaacctgaattcctcctccta

SEQ ID NO: 649672 - DNA, 25 bp, Homo sapien
cctgaattcctcctcctacagtgca

SEQ ID NO: 649673 - DNA, 25 bp, Homo sapien
cacatcctcctggaatcagtgtctt

SEQ ID NO: 649674 - DNA, 25 bp, Homo sapien
tagggagactcgttcccttggtcgc

SEQ ID NO: 649675 - DNA, 25 bp, Homo sapien
cagttatccactgcagcagagaaga

SEQ ID NO: 649676 - DNA, 25 bp, Homo sapien
ttggtcgcaagacacatcctcctgg

SEQ ID NO: 649677 - DNA, 25 bp, Homo sapien
gttctacgtctaaatcacctgcggt

SEQ ID NO: 649678 - DNA, 25 bp, Homo sapien
gattggctggtgatcagtcggtacc

SEQ ID NO: 649679 - DNA, 25 bp, Homo sapien
ggttttccaggaccgacactgtgcc

SEQ ID NO: 649680 - DNA, 25 bp, Homo sapien
gatagttgtacagctcaggttctac

SEQ ID NO: 649681 - DNA, 25 bp, Homo sapien
tctcatgcacttccttaaagggact

SEQ ID NO: 649682 - DNA, 25 bp, Homo sapien
gactatggctgactccgctagtgcc

SEQ ID NO: 649683 - DNA, 25 bp, Homo sapien
gcattgatattctccacagttccct

SEQ ID NO: 649684 - DNA, 25 bp, Homo sapien
gcagccacgtggagttctgctcact

SEQ ID NO: 649685 - DNA, 25 bp, Homo sapien
ccgaggaagcggcatttctgacctg

SEQ ID NO: 649686 - DNA, 25 bp, Homo sapien
agaagacccattgctcgtggccagg

SEQ ID NO: 649687 - DNA, 25 bp, Homo sapien
gcagggagaagacccattgctcgtg

SEQ ID NO: 649688 - DNA, 25 bp, Homo sapien
ttcttccctgtcacataccttagaa

SEQ ID NO: 649689 - DNA, 25 bp, Homo sapien
gggtcctgacaggtgactgtctctg

SEQ ID NO: 649690 - DNA, 25 bp, Homo sapien
cagaagtgtgcacattgggccccag

SEQ ID NO: 649691 - DNA, 25 bp, Homo sapien
ccttgagcttgacagaagtgtgcac

SEQ ID NO: 649692 - DNA, 25 bp, Homo sapien
gactgtctctgaagtgggtgcctgc

SEQ ID NO: 649693 - DNA, 25 bp, Homo sapien
ccctgccgtggttctgatatttctc

SEQ ID NO: 649694 - DNA, 25 bp, Homo sapien
tatgagaaccatgtgttgtctccca

SEQ ID NO: 649695 - DNA, 25 bp, Homo sapien
agttggctaacgaagtatgagaacc

SEQ ID NO: 649696 - DNA, 25 bp, Homo sapien
tcctcccgtggagagttggtagttg

SEQ ID NO: 649697 - DNA, 25 bp, Homo sapien
agtcagcagtgagcttaaagcctcg

SEQ ID NO: 649698 - DNA, 25 bp, Homo sapien
ccacagagagcgctgaatagcattt

SEQ ID NO: 649699 - DNA, 25 bp, Homo sapien
gagtcttgtgcacaggaaattcagg

SEQ ID NO: 649700 - DNA, 25 bp, Homo sapien
aatcagaaagcatgcagcgttgatc

SEQ ID NO: 649701 - DNA, 25 bp, Homo sapien
tggagcctagaaaacagtgcggttg

SEQ ID NO: 649702 - DNA, 25 bp, Homo sapien
cattcttacttggatagccttggtc

SEQ ID NO: 649703 - DNA, 25 bp, Homo sapien
gaaaatgtgacagtcctcagagtca

SEQ ID NO: 649704 - DNA, 25 bp, Homo sapien
ctatgataggcgttgtgtagccgtt

SEQ ID NO: 649705 - DNA, 25 bp, Homo sapien
cagaagccccaatagcctggagcct

SEQ ID NO: 649706 - DNA, 25 bp, Homo sapien
tggagcctggcacttgttgttggct

SEQ ID NO: 649707 - DNA, 25 bp, Homo sapien
gttgttggctggcataggacccagc

SEQ ID NO: 649708 - DNA, 25 bp, Homo sapien
tcagaagccccaatagcctggagcc

SEQ ID NO: 649709 - DNA, 25 bp, Homo sapien
tatagggctgacatgctgagcagcg

SEQ ID NO: 649710 - DNA, 25 bp, Homo sapien
tcaggtgttttctgggcataggcac

SEQ ID NO: 649711 - DNA, 25 bp, Homo sapien
gcatgccctgaaactccagtatagg

SEQ ID NO: 649712 - DNA, 25 bp, Homo sapien
gaaaggctggtgtcagcatgccctg

SEQ ID NO: 649713 - DNA, 25 bp, Homo sapien
cacgttttgtcaataatcttgcagc

SEQ ID NO: 649714 - DNA, 25 bp, Homo sapien
gttgagtggccttgacatctgtcca

SEQ ID NO: 649715 - DNA, 25 bp, Homo sapien
catctgtccattgtcaagctgcctg

SEQ ID NO: 649716 - DNA, 25 bp, Homo sapien
caaccatgccaagatgttgagtggc

SEQ ID NO: 649717 - DNA, 25 bp, Homo sapien
atgggtgcttgccagcagactcagg

SEQ ID NO: 649718 - DNA, 25 bp, Homo sapien
gcaatgggtgcttgccagcagactc

SEQ ID NO: 649719 - DNA, 25 bp, Homo sapien
gaaagcaatgggtgcttgccagcag

SEQ ID NO: 649720 - DNA, 25 bp, Homo sapien
ccagaaagcaatgggtgcttgccag

SEQ ID NO: 649721 - DNA, 25 bp, Homo sapien
gctcgagaccacatcaaggagtcgt

SEQ ID NO: 649722 - DNA, 25 bp, Homo sapien
ttactgtgggcaccttcctgttgca

SEQ ID NO: 649723 - DNA, 25 bp, Homo sapien
atggaagctggcggacaggtcccct

SEQ ID NO: 649724 - DNA, 25 bp, Homo sapien
gagtcgtaacactgtctcctgcctt

SEQ ID NO: 649725 - DNA, 25 bp, Homo sapien
ggcaccagggctagccacagtgcat

SEQ ID NO: 649726 - DNA, 25 bp, Homo sapien
gcaccagggctagccacagtgcatg

SEQ ID NO: 649727 - DNA, 25 bp, Homo sapien
ccagttgagtgggccattcagtcct

SEQ ID NO: 649728 - DNA, 25 bp, Homo sapien
ttccagttgagtgggccattcagtc

SEQ ID NO: 649729 - DNA, 25 bp, Homo sapien
tccagttgagtgggccattcagtcc

SEQ ID NO: 649730 - DNA, 25 bp, Homo sapien
cagttgagtgggccattcagtcctg

SEQ ID NO: 649731 - DNA, 25 bp, Homo sapien
gaaatgagaaacctgctagccagcc

SEQ ID NO: 649732 - DNA, 25 bp, Homo sapien
ttctccaggcatcagaagtacagcc

SEQ ID NO: 649733 - DNA, 25 bp, Homo sapien
tgtcctacagtctccaaaacagtga

SEQ ID NO: 649734 - DNA, 25 bp, Homo sapien
caaatagcaggtcaaacagtgtcat

SEQ ID NO: 649735 - DNA, 25 bp, Homo sapien
aaagtgcccctgagatggctccatg

SEQ ID NO: 649736 - DNA, 25 bp, Homo sapien
acctggcgggacatgcagcatctga

SEQ ID NO: 649737 - DNA, 25 bp, Homo sapien
gaaccagcttcacgacgaggtccat

SEQ ID NO: 649738 - DNA, 25 bp, Homo sapien
gaaaaccgtgcctgagagattccac

SEQ ID NO: 649739 - DNA, 25 bp, Homo sapien
cacgggccagtgtcctcccgtagat

SEQ ID NO: 649740 - DNA, 25 bp, Homo sapien
acgggccagtgtcctcccgtagatg

SEQ ID NO: 649741 - DNA, 25 bp, Homo sapien
cgggccagtgtcctcccgtagatgg

SEQ ID NO: 649742 - DNA, 25 bp, Homo sapien
atgggccagcatcctgccgtagacg

SEQ ID NO: 649743 - DNA, 25 bp, Homo sapien
ggccagcatcctgccatatacgggc

SEQ ID NO: 649744 - DNA, 25 bp, Homo sapien
atcctgccgtagacgagcagccaac

SEQ ID NO: 649745 - DNA, 25 bp, Homo sapien
acaggccagcatcctgccatatacg

SEQ ID NO: 649746 - DNA, 25 bp, Homo sapien
ataggtcagcatcctccacgggcca

SEQ ID NO: 649747 - DNA, 25 bp, Homo sapien
tcagcatcctccacgggccagcgtc

SEQ ID NO: 649748 - DNA, 25 bp, Homo sapien
cataggtcagcatcctccacgggcc

SEQ ID NO: 649749 - DNA, 25 bp, Homo sapien
aggtcagcatcctccacgggccagc

SEQ ID NO: 649750 - DNA, 25 bp, Homo sapien
gaagggtagcccactataggtgagc

SEQ ID NO: 649751 - DNA, 25 bp, Homo sapien
cacgggccagtgtcctcccgtagaa

SEQ ID NO: 649752 - DNA, 25 bp, Homo sapien
tcccgtagaagggtagcccactata

SEQ ID NO: 649753 - DNA, 25 bp, Homo sapien
ggcagcctaccataggtcagctcct

SEQ ID NO: 649754 - DNA, 25 bp, Homo sapien
accagcatcctgctatagacgggca

SEQ ID NO: 649755 - DNA, 25 bp, Homo sapien
cacagaccagcatcctgctatagac

SEQ ID NO: 649756 - DNA, 25 bp, Homo sapien
gaccagcatcctgctatagacgggc

SEQ ID NO: 649757 - DNA, 25 bp, Homo sapien
cagaccagcatcctgctatagacgg

SEQ ID NO: 649758 - DNA, 25 bp, Homo sapien
aagaacagcaatggcaaaaacattg

SEQ ID NO: 649759 - DNA, 25 bp, Homo sapien
gataattccactatgcttgcggtcc

SEQ ID NO: 649760 - DNA, 25 bp, Homo sapien
caggagctgctgtgcgaaagccata

SEQ ID NO: 649761 - DNA, 25 bp, Homo sapien
tcccagcttaggcagatgtgttaac

SEQ ID NO: 649762 - DNA, 25 bp, Homo sapien
gataattcactctactcagccggcg

SEQ ID NO: 649763 - DNA, 25 bp, Homo sapien
gacactgtgctataaatcctttggg

SEQ ID NO: 649764 - DNA, 25 bp, Homo sapien
tgttaaaatccgctagagcagccca

SEQ ID NO: 649765 - DNA, 25 bp, Homo sapien
tttgtatagagttcatcccagcccc

SEQ ID NO: 649766 - DNA, 25 bp, Homo sapien
tagttctccagttgtatggagcctc

SEQ ID NO: 649767 - DNA, 25 bp, Homo sapien
cacgtttgaagatgcgagcgctatc

SEQ ID NO: 649768 - DNA, 25 bp, Homo sapien
aattcatcccagaggaacctgaggc

SEQ ID NO: 649769 - DNA, 25 bp, Homo sapien
cctctgtcccggaagagtcatggga

SEQ ID NO: 649770 - DNA, 25 bp, Homo sapien
atccccagtcccaatgcacatccat

SEQ ID NO: 649771 - DNA, 25 bp, Homo sapien
tgcacatccattcccaagaaatgct

SEQ ID NO: 649772 - DNA, 25 bp, Homo sapien
gtcccaatgcacatccattcccaag

SEQ ID NO: 649773 - DNA, 25 bp, Homo sapien
ccaatgcacatccattcccaagaaa

SEQ ID NO: 649774 - DNA, 25 bp, Homo sapien
ctaaaatatgtctcgctagtgatgt

SEQ ID NO: 649775 - DNA, 25 bp, Homo sapien
caattcccattgcatcacctctgta

SEQ ID NO: 649776 - DNA, 25 bp, Homo sapien
gatatccctgatcctaactgaagag

SEQ ID NO: 649777 - DNA, 25 bp, Homo sapien
gaaagcaacttatcagctacttaag

SEQ ID NO: 649778 - DNA, 25 bp, Homo sapien
gcagctagctaccacctaagaggag

SEQ ID NO: 649779 - DNA, 25 bp, Homo sapien
tatggaatacaagtgcctagtgggc

SEQ ID NO: 649780 - DNA, 25 bp, Homo sapien
caagtgcacgtgttaggacctgaaa

SEQ ID NO: 649781 - DNA, 25 bp, Homo sapien
aattcagcgtctggcaaaggcccac

SEQ ID NO: 649782 - DNA, 25 bp, Homo sapien
tgatacaacagcagtgacgggtcac

SEQ ID NO: 649783 - DNA, 25 bp, Homo sapien
caatctgcccaggtatggaccaagc

SEQ ID NO: 649784 - DNA, 25 bp, Homo sapien
caggtcccgtccacccttgattgag

SEQ ID NO: 649785 - DNA, 25 bp, Homo sapien
gaccaagcatgtgcctgtggccaca

SEQ ID NO: 649786 - DNA, 25 bp, Homo sapien
cacgtgatctatgctgtctgccaga

SEQ ID NO: 649787 - DNA, 25 bp, Homo sapien
cctgacctaggttgcaatctctgag

SEQ ID NO: 649788 - DNA, 25 bp, Homo sapien
cagatgacactggtgcactgcctat

SEQ ID NO: 649789 - DNA, 25 bp, Homo sapien
gcctatgaccccttgacccttagta

SEQ ID NO: 649790 - DNA, 25 bp, Homo sapien
cctaaatgaggacggtatggtggcc

SEQ ID NO: 649791 - DNA, 25 bp, Homo sapien
tatggtggccatttaacagagcatc

SEQ ID NO: 649792 - DNA, 25 bp, Homo sapien
gaaacttcgcattctctgctttggg

SEQ ID NO: 649793 - DNA, 25 bp, Homo sapien
tctctaacgagacttatgaaccagg

SEQ ID NO: 649794 - DNA, 25 bp, Homo sapien
tatcaaagcattacccctacagtgg

SEQ ID NO: 649795 - DNA, 25 bp, Homo sapien
cattttatcccatcaagcctgggca

SEQ ID NO: 649796 - DNA, 25 bp, Homo sapien
tatggtctaatccaaacaggaaccc

SEQ ID NO: 649797 - DNA, 25 bp, Homo sapien
gccagatgggtcaactatggtctaa

SEQ ID NO: 649798 - DNA, 25 bp, Homo sapien
ctctcctgatttcttcttgtctgac

SEQ ID NO: 649799 - DNA, 25 bp, Homo sapien
ttccaatcatggtctccacgatcac

SEQ ID NO: 649800 - DNA, 25 bp, Homo sapien
tgactttgtctttccaatcatggtc

SEQ ID NO: 649801 - DNA, 25 bp, Homo sapien
gatttcttcttgtctgactttgtct

SEQ ID NO: 649802 - DNA, 25 bp, Homo sapien
ttctcgatagattccaccacttcca

SEQ ID NO: 649803 - DNA, 25 bp, Homo sapien
tctccgtggaaatcttctcgataga

SEQ ID NO: 649804 - DNA, 25 bp, Homo sapien
tgtctgaatgctctccgtggaaatc

SEQ ID NO: 649805 - DNA, 25 bp, Homo sapien
tcttcatatgtctgaatgctctccg

SEQ ID NO: 649806 - DNA, 25 bp, Homo sapien
gatggttcctctgcaccgggtgtga

SEQ ID NO: 649807 - DNA, 25 bp, Homo sapien
tggaggctcaggtatagatggttcc

SEQ ID NO: 649808 - DNA, 25 bp, Homo sapien
atcagccgcaggctttggaggctca

SEQ ID NO: 649809 - DNA, 25 bp, Homo sapien
tccttgtctataggctgctggtcaa

SEQ ID NO: 649810 - DNA, 25 bp, Homo sapien
tctggagccccttcttgtgtcaggg

SEQ ID NO: 649811 - DNA, 25 bp, Homo sapien
taaagcacagagtcttccgcaacag

SEQ ID NO: 649812 - DNA, 25 bp, Homo sapien
gacatagaatctagggtccacgtaa

SEQ ID NO: 649813 - DNA, 25 bp, Homo sapien
cgtaattggcatcccctgtgaccag

SEQ ID NO: 649814 - DNA, 25 bp, Homo sapien
tttctgattcaaacttagattcact

SEQ ID NO: 649815 - DNA, 25 bp, Homo sapien
tgcatcttccagagctccgttggtt

SEQ ID NO: 649816 - DNA, 25 bp, Homo sapien
caaaccttttaatggtgcatcttcc

SEQ ID NO: 649817 - DNA, 25 bp, Homo sapien
ccagagctccgttggttttgtcttt

SEQ ID NO: 649818 - DNA, 25 bp, Homo sapien
cacttggatccacagaagcccattc

SEQ ID NO: 649819 - DNA, 25 bp, Homo sapien
gcaaggccattgtcctgacactcaa

SEQ ID NO: 649820 - DNA, 25 bp, Homo sapien
tatgcaaggccattgtcctgacact

SEQ ID NO: 649821 - DNA, 25 bp, Homo sapien
cagccccactgagctcacagcagac

SEQ ID NO: 649822 - DNA, 25 bp, Homo sapien
agatgccacatttaccagccaagct

SEQ ID NO: 649823 - DNA, 25 bp, Homo sapien
ggcagatgccacatttaccagccaa

SEQ ID NO: 649824 - DNA, 25 bp, Homo sapien
gaaggcagatgccacatttaccagc

SEQ ID NO: 649825 - DNA, 25 bp, Homo sapien
atgttgaaggcagatgccacattta

SEQ ID NO: 649826 - DNA, 25 bp, Homo sapien
acaggggaatgggagtttcaatgaa

SEQ ID NO: 649827 - DNA, 25 bp, Homo sapien
caccggatccagtgctgagagagac

SEQ ID NO: 649828 - DNA, 25 bp, Homo sapien
catggctctgggtgaacaggggaat

SEQ ID NO: 649829 - DNA, 25 bp, Homo sapien
ggaatgggagtttcaatgaaggcag

SEQ ID NO: 649830 - DNA, 25 bp, Homo sapien
gatgatacgatgataccggtccagc

SEQ ID NO: 649831 - DNA, 25 bp, Homo sapien
cagctgccggcagtcgtaagaagac

SEQ ID NO: 649832 - DNA, 25 bp, Homo sapien
tgttgccttcaatctcgatgatacg

SEQ ID NO: 649833 - DNA, 25 bp, Homo sapien
tcatcgtcataacactcatgggcac

SEQ ID NO: 649834 - DNA, 25 bp, Homo sapien
ggcaacaatatgcaagcacacacgt

SEQ ID NO: 649835 - DNA, 25 bp, Homo sapien
caatatgcaagcacacacgtgcgtg

SEQ ID NO: 649836 - DNA, 25 bp, Homo sapien
ctgctgcaggcaacaatatgcaagc

SEQ ID NO: 649837 - DNA, 25 bp, Homo sapien
cagggcccctgcaaactccccattc

SEQ ID NO: 649838 - DNA, 25 bp, Homo sapien
gtgtgagccatgcagagacctctcc

SEQ ID NO: 649839 - DNA, 25 bp, Homo sapien
gtgagccatgcagagacctctcctt

SEQ ID NO: 649840 - DNA, 25 bp, Homo sapien
tgtgagccatgcagagacctctcct

SEQ ID NO: 649841 - DNA, 25 bp, Homo sapien
agtgtgagccatgcagagacctctc

SEQ ID NO: 649842 - DNA, 25 bp, Homo sapien
gagaagcggtctccatcagaatgcc

SEQ ID NO: 649843 - DNA, 25 bp, Homo sapien
gaaaccaggttaatctgttgtgaaa

SEQ ID NO: 649844 - DNA, 25 bp, Homo sapien
caggcggccaaccagcggtttcatt

SEQ ID NO: 649845 - DNA, 25 bp, Homo sapien
ccctgctttagagacgagggcagca

SEQ ID NO: 649846 - DNA, 25 bp, Homo sapien
tcctccagctgactccgcagggcgg

SEQ ID NO: 649847 - DNA, 25 bp, Homo sapien
cctgcaggtgggagagcacctcccg

SEQ ID NO: 649848 - DNA, 25 bp, Homo sapien
aggtgggagagcacctcccggccct

SEQ ID NO: 649849 - DNA, 25 bp, Homo sapien
gcgcctgcaggtgggagagcacctc

SEQ ID NO: 649850 - DNA, 25 bp, Homo sapien
ctgcacagagaaggccagagtcaga

SEQ ID NO: 649851 - DNA, 25 bp, Homo sapien
tgcacagagaaggccagagtcagac

SEQ ID NO: 649852 - DNA, 25 bp, Homo sapien
cacagagaaggccagagtcagactc

SEQ ID NO: 649853 - DNA, 25 bp, Homo sapien
cagagaaggccagagtcagactcat

SEQ ID NO: 649854 - DNA, 25 bp, Homo sapien
ttcaaagtctgaacctccttgggag

SEQ ID NO: 649855 - DNA, 25 bp, Homo sapien
tcttcaaagtctgaacctccttggg

SEQ ID NO: 649856 - DNA, 25 bp, Homo sapien
gtcttcaaagtctgaacctccttgg

SEQ ID NO: 649857 - DNA, 25 bp, Homo sapien
cttcaaagtctgaacctccttggga

SEQ ID NO: 649858 - DNA, 25 bp, Homo sapien
gcaggatgctgatataggtctgaac

SEQ ID NO: 649859 - DNA, 25 bp, Homo sapien
ctcatcccactcgtcacaatggatg

SEQ ID NO: 649860 - DNA, 25 bp, Homo sapien
tcgtcacaatggatgctggaggagt

SEQ ID NO: 649861 - DNA, 25 bp, Homo sapien
gctgatataggtctgaacttccaga

SEQ ID NO: 649862 - DNA, 25 bp, Homo sapien
tcttgcagaaattgggcttccagct

SEQ ID NO: 649863 - DNA, 25 bp, Homo sapien
taggttatgcagcaaggcttcatca

SEQ ID NO: 649864 - DNA, 25 bp, Homo sapien
gccgcactgatatcatcttgcagaa

SEQ ID NO: 649865 - DNA, 25 bp, Homo sapien
ggcttccagctgaaggcgtaggtta

SEQ ID NO: 649866 - DNA, 25 bp, Homo sapien
tgcaatgagagccacatatccctgg

SEQ ID NO: 649867 - DNA, 25 bp, Homo sapien
tgagagccacatatccctggccaca

SEQ ID NO: 649868 - DNA, 25 bp, Homo sapien
aatgagagccacatatccctggcca

SEQ ID NO: 649869 - DNA, 25 bp, Homo sapien
ctgcaatgagagccacatatccctg

SEQ ID NO: 649870 - DNA, 25 bp, Homo sapien
actataaggtagacgagaatggcaa

SEQ ID NO: 649871 - DNA, 25 bp, Homo sapien
cctgaaatactataaggtagacgag

SEQ ID NO: 649872 - DNA, 25 bp, Homo sapien
accttcatcgagagtgcccttctga

SEQ ID NO: 649873 - DNA, 25 bp, Homo sapien
ggcaaaattagtcaccttcatcgag

SEQ ID NO: 649874 - DNA, 25 bp, Homo sapien
tgcaggccaaaatcactcacacgac

SEQ ID NO: 649875 - DNA, 25 bp, Homo sapien
caaaaaggtccagtgttcacctggc

SEQ ID NO: 649876 - DNA, 25 bp, Homo sapien
ctcacacgaccagctgatgcgatgt

SEQ ID NO: 649877 - DNA, 25 bp, Homo sapien
ccactgagactgagctaaaacctcg

SEQ ID NO: 649878 - DNA, 25 bp, Homo sapien
taagctacgtaaacccaaggatgtg

SEQ ID NO: 649879 - DNA, 25 bp, Homo sapien
agctacgtaaacccaaggatgtgtt

SEQ ID NO: 649880 - DNA, 25 bp, Homo sapien
aagctacgtaaacccaaggatgtgt

SEQ ID NO: 649881 - DNA, 25 bp, Homo sapien
tagcaggagttgacattcgcactca

SEQ ID NO: 649882 - DNA, 25 bp, Homo sapien
gttgacattcgcactcattttcata

SEQ ID NO: 649883 - DNA, 25 bp, Homo sapien
aagcatttcttttagcaggagttga

SEQ ID NO: 649884 - DNA, 25 bp, Homo sapien
cttgttaagccgttcaagcatttct

SEQ ID NO: 649885 - DNA, 25 bp, Homo sapien
aatcagcattaaattcaacctgggt

SEQ ID NO: 649886 - DNA, 25 bp, Homo sapien
gctttcacatgtatggatcacataa

SEQ ID NO: 649887 - DNA, 25 bp, Homo sapien
cacataagtgagagttgggtaacta

SEQ ID NO: 649888 - DNA, 25 bp, Homo sapien
ttcaacctgggtacgatgccctctc

SEQ ID NO: 649889 - DNA, 25 bp, Homo sapien
cgctggcggttgctctcgacttggc

SEQ ID NO: 649890 - DNA, 25 bp, Homo sapien
ggagcccggcatggcgctgctcgag

SEQ ID NO: 649891 - DNA, 25 bp, Homo sapien
ttgcttcggaactcgtcgagcgcgc

SEQ ID NO: 649892 - DNA, 25 bp, Homo sapien
tcccggacgcgctggcggttgctct

SEQ ID NO: 649893 - DNA, 25 bp, Homo sapien
ggaagacgtagctgcgccggtacat

SEQ ID NO: 649894 - DNA, 25 bp, Homo sapien
tgctccttgcgggtctggaagacgt

SEQ ID NO: 649895 - DNA, 25 bp, Homo sapien
gcgaagcctcgtcggcgtgctcgta

SEQ ID NO: 649896 - DNA, 25 bp, Homo sapien
gtcggcgtgctcgtactgctccttg

SEQ ID NO: 649897 - DNA, 25 bp, Homo sapien
ggctgctctggcgcgggcgcgcggg

SEQ ID NO: 649898 - DNA, 25 bp, Homo sapien
ggcgcgcgggcggcgccgagccggc

SEQ ID NO: 649899 - DNA, 25 bp, Homo sapien
cgcgggcgcgcgggcggcgccgagc

SEQ ID NO: 649900 - DNA, 25 bp, Homo sapien
cgggcgcgcgggcggcgccgagccg

SEQ ID NO: 649901 - DNA, 25 bp, Homo sapien
cagagccgatcagcagttgggcgcc

SEQ ID NO: 649902 - DNA, 25 bp, Homo sapien
ctttgtgcggcggattagcggccca

SEQ ID NO: 649903 - DNA, 25 bp, Homo sapien
gattgttcaggcctgttgcttttga

SEQ ID NO: 649904 - DNA, 25 bp, Homo sapien
gctgctgggacgttccagagccgat

SEQ ID NO: 649905 - DNA, 25 bp, Homo sapien
cagttgagatacattctgagtttgc

SEQ ID NO: 649906 - DNA, 25 bp, Homo sapien
tttgagccatccctttcagttgaga

SEQ ID NO: 649907 - DNA, 25 bp, Homo sapien
ccccatgtcgacaaaaaatataggc

SEQ ID NO: 649908 - DNA, 25 bp, Homo sapien
tatctaaaagcctgagtaaaatagg

SEQ ID NO: 649909 - DNA, 25 bp, Homo sapien
gaggccccagtctctaaagacgcac

SEQ ID NO: 649910 - DNA, 25 bp, Homo sapien
cacacgcagttgactctgaagagtt

SEQ ID NO: 649911 - DNA, 25 bp, Homo sapien
ccaggcctctccatgaggccccagt

SEQ ID NO: 649912 - DNA, 25 bp, Homo sapien
gacgcacccgtgaagtatgctcagt

SEQ ID NO: 649913 - DNA, 25 bp, Homo sapien
aatgatggtacggattttcagagac

SEQ ID NO: 649914 - DNA, 25 bp, Homo sapien
tgatggtacggattttcagagacat

SEQ ID NO: 649915 - DNA, 25 bp, Homo sapien
cgaaatgatggtacggattttcaga

SEQ ID NO: 649916 - DNA, 25 bp, Homo sapien
ggtacggattttcagagacatctgg

SEQ ID NO: 649917 - DNA, 25 bp, Homo sapien
gtatcttcactagactgcagctctt

SEQ ID NO: 649918 - DNA, 25 bp, Homo sapien
tgctgtatgagtatcttcactagac

SEQ ID NO: 649919 - DNA, 25 bp, Homo sapien
ctggcagacctgctgtatgagtatc

SEQ ID NO: 649920 - DNA, 25 bp, Homo sapien
tgagtatcttcactagactgcagct

SEQ ID NO: 649921 - DNA, 25 bp, Homo sapien
cgaggtgatcttgccagagctatcc

SEQ ID NO: 649922 - DNA, 25 bp, Homo sapien
ttgccagagctatcccaactgctgc

SEQ ID NO: 649923 - DNA, 25 bp, Homo sapien
gatcttgccagagctatcccaactg

SEQ ID NO: 649924 - DNA, 25 bp, Homo sapien
cagccagcgaggtgatcttgccaga

SEQ ID NO: 649925 - DNA, 25 bp, Homo sapien
caggccgtgcaaaggagaagtccgt

SEQ ID NO: 649926 - DNA, 25 bp, Homo sapien
gcagcattgataccaggtcccacgt

SEQ ID NO: 649927 - DNA, 25 bp, Homo sapien
tctgaataatctggccctcgcagtt

SEQ ID NO: 649928 - DNA, 25 bp, Homo sapien
ttgagatacgcttcccagcagctgg

SEQ ID NO: 649929 - DNA, 25 bp, Homo sapien
tataaatgagcaagcaattccttcc

SEQ ID NO: 649930 - DNA, 25 bp, Homo sapien
gagggaaggctttccacaggataga

SEQ ID NO: 649931 - DNA, 25 bp, Homo sapien
aaggaggctttagaggtttgcagag

SEQ ID NO: 649932 - DNA, 25 bp, Homo sapien
tgctgcctgaggtaccctgcctacc

SEQ ID NO: 649933 - DNA, 25 bp, Homo sapien
catattcctggtagctaacatggcc

SEQ ID NO: 649934 - DNA, 25 bp, Homo sapien
ctgtggatgctccactcatcaaaga

SEQ ID NO: 649935 - DNA, 25 bp, Homo sapien
caaagatccagtaacatctccctgg

SEQ ID NO: 649936 - DNA, 25 bp, Homo sapien
acagtaggacctcaggaaacatcct

SEQ ID NO: 649937 - DNA, 25 bp, Homo sapien
cctgccctgtagttgcagcgggtga

SEQ ID NO: 649938 - DNA, 25 bp, Homo sapien
ttttcctgccctgtagttgcagcgg

SEQ ID NO: 649939 - DNA, 25 bp, Homo sapien
tagttgcagcgggtgaggcagaagt

SEQ ID NO: 649940 - DNA, 25 bp, Homo sapien
ggcgctttgctggttctgagttttt

SEQ ID NO: 649941 - DNA, 25 bp, Homo sapien
ctgcagggaataatgggacgagctg

SEQ ID NO: 649942 - DNA, 25 bp, Homo sapien
ataatgggacgagctggggaaaaat

SEQ ID NO: 649943 - DNA, 25 bp, Homo sapien
gcagggaataatgggacgagctggg

SEQ ID NO: 649944 - DNA, 25 bp, Homo sapien
agagagcttgccacaaccagcccat

SEQ ID NO: 649945 - DNA, 25 bp, Homo sapien
agatcctgtactcctctgggctccc

SEQ ID NO: 649946 - DNA, 25 bp, Homo sapien
tgtcatgcggcctgttggtaaaggg

SEQ ID NO: 649947 - DNA, 25 bp, Homo sapien
cttgttcagcctcactcacaagtgc

SEQ ID NO: 649948 - DNA, 25 bp, Homo sapien
gggctcccaaggaacgtctcttcac

SEQ ID NO: 649949 - DNA, 25 bp, Homo sapien
ggacaatcattaactgcacaaaagc

SEQ ID NO: 649950 - DNA, 25 bp, Homo sapien
cgaaacacaaaacatatgcccaagg

SEQ ID NO: 649951 - DNA, 25 bp, Homo sapien
gttacaagatgctacataaccaaca

SEQ ID NO: 649952 - DNA, 25 bp, Homo sapien
tacacttgtgtcttagaggattaag

SEQ ID NO: 649953 - DNA, 25 bp, Homo sapien
ctgaaattaacggtgactcacagag

SEQ ID NO: 649954 - DNA, 25 bp, Homo sapien
tgaaattaacggtgactcacagagc

SEQ ID NO: 649955 - DNA, 25 bp, Homo sapien
gaagccctggattggagcatacata

SEQ ID NO: 649956 - DNA, 25 bp, Homo sapien
cttaggtttttacacgcatgctgca

SEQ ID NO: 649957 - DNA, 25 bp, Homo sapien
tgtatatctagaagcggaagccctg

SEQ ID NO: 649958 - DNA, 25 bp, Homo sapien
tagccccagtgtgtatctctccatg

SEQ ID NO: 649959 - DNA, 25 bp, Homo sapien
ctttgaccgagtgcatagctttgag

SEQ ID NO: 649960 - DNA, 25 bp, Homo sapien
ccgagtgcatagctttgagagggat

SEQ ID NO: 649961 - DNA, 25 bp, Homo sapien
tttgaccgagtgcatagctttgaga

SEQ ID NO: 649962 - DNA, 25 bp, Homo sapien
tgaccgagtgcatagctttgagagg

SEQ ID NO: 649963 - DNA, 25 bp, Homo sapien
taagttcattctacacctggaaggt

SEQ ID NO: 649964 - DNA, 25 bp, Homo sapien
gaaagcaaggatgaatttcctaccc

SEQ ID NO: 649965 - DNA, 25 bp, Homo sapien
gctattttcatgtacaggtggagca

SEQ ID NO: 649966 - DNA, 25 bp, Homo sapien
gaacgtctgttgcagcacggcatag

SEQ ID NO: 649967 - DNA, 25 bp, Homo sapien
gttcagaagcatcaattatagcagc

SEQ ID NO: 649968 - DNA, 25 bp, Homo sapien
tttctattggcccttgtgcaaggca

SEQ ID NO: 649969 - DNA, 25 bp, Homo sapien
atgtagccaaggtcaggtgtctgtc

SEQ ID NO: 649970 - DNA, 25 bp, Homo sapien
taatataggacctgtgaggccctga

SEQ ID NO: 649971 - DNA, 25 bp, Homo sapien
ttaatagccactaggctgcagcctg

SEQ ID NO: 649972 - DNA, 25 bp, Homo sapien
ggcaacataacgagaccccatctct

SEQ ID NO: 649973 - DNA, 25 bp, Homo sapien
ataacgagaccccatctctcatgca

SEQ ID NO: 649974 - DNA, 25 bp, Homo sapien
aacataacgagaccccatctctcat

SEQ ID NO: 649975 - DNA, 25 bp, Homo sapien
tcctgcatcatggctgaacattcca

SEQ ID NO: 649976 - DNA, 25 bp, Homo sapien
tgcttagccagggaagggccttgct

SEQ ID NO: 649977 - DNA, 25 bp, Homo sapien
tggtcactccacaggtcccttttgg

SEQ ID NO: 649978 - DNA, 25 bp, Homo sapien
gctgaggagtcattggcacttggct

SEQ ID NO: 649979 - DNA, 25 bp, Homo sapien
tgtctcatggtcactccacaggtcc

SEQ ID NO: 649980 - DNA, 25 bp, Homo sapien
cagatacattgaggcaatgatggga

SEQ ID NO: 649981 - DNA, 25 bp, Homo sapien
acagatacattgaggcaatgatggg

SEQ ID NO: 649982 - DNA, 25 bp, Homo sapien
gggataggagaacagtcgcagttgg

SEQ ID NO: 649983 - DNA, 25 bp, Homo sapien
taggagaacagtcgcagttggtcat

SEQ ID NO: 649984 - DNA, 25 bp, Homo sapien
agaacagtcgcagttggtcatattc

SEQ ID NO: 649985 - DNA, 25 bp, Homo sapien
gacagagatattggtcttggggata

SEQ ID NO: 649986 - DNA, 25 bp, Homo sapien
ctgatgatttggccatccacagatg

SEQ ID NO: 649987 - DNA, 25 bp, Homo sapien
tgatgatttggccatccacagatgt

SEQ ID NO: 649988 - DNA, 25 bp, Homo sapien
gatgatttggccatccacagatgtc

SEQ ID NO: 649989 - DNA, 25 bp, Homo sapien
acatctcctgcaatcacacatttga

SEQ ID NO: 649990 - DNA, 25 bp, Homo sapien
cacatctcctgcaatcacacatttg

SEQ ID NO: 649991 - DNA, 25 bp, Homo sapien
ggcagacaggccagctaatggttta

SEQ ID NO: 649992 - DNA, 25 bp, Homo sapien
tcagggtgcacgtattcaggcagct

SEQ ID NO: 649993 - DNA, 25 bp, Homo sapien
ggcattcacagctgagtggcagaca

SEQ ID NO: 649994 - DNA, 25 bp, Homo sapien
tacacgccagctattgtgcgagggc

SEQ ID NO: 649995 - DNA, 25 bp, Homo sapien
cactgattggaagagtgacctggca

SEQ ID NO: 649996 - DNA, 25 bp, Homo sapien
tgttcactgacacttggaagcggtc

SEQ ID NO: 649997 - DNA, 25 bp, Homo sapien
gcaaagcgctatttcaggcacatca

SEQ ID NO: 649998 - DNA, 25 bp, Homo sapien
caaatgtgtaatggagattgcctca

SEQ ID NO: 649999 - DNA, 25 bp, Homo sapien
tcggaccaccagagactgaatatgc

SEQ ID NO: 650000 - DNA, 25 bp, Homo sapien
aaaacagtggacacagtgacttgga

SEQ ID NO: 650001 - DNA, 25 bp, Homo sapien
cctttctgcagagtaccggctgccg

SEQ ID NO: 650002 - DNA, 25 bp, Homo sapien
tttctgaaattgagaacgggctcta

SEQ ID NO: 650003 - DNA, 25 bp, Homo sapien
tcaaaggttagaccttgttcagtgc

SEQ ID NO: 650004 - DNA, 25 bp, Homo sapien
tatttccaccacctcaggagaattc

SEQ ID NO: 650005 - DNA, 25 bp, Homo sapien
tgaaggaagtgtagtgatggcatct

SEQ ID NO: 650006 - DNA, 25 bp, Homo sapien
tgcctaaggttaatcgactcacaag

SEQ ID NO: 650007 - DNA, 25 bp, Homo sapien
tgggaggtaccactgccgggcctga

SEQ ID NO: 650008 - DNA, 25 bp, Homo sapien
gtaccactgccgggcctgaggactg

SEQ ID NO: 650009 - DNA, 25 bp, Homo sapien
cactgccgggcctgaggactgctct

SEQ ID NO: 650010 - DNA, 25 bp, Homo sapien
aggtaccactgccgggcctgaggac

SEQ ID NO: 650011 - DNA, 25 bp, Homo sapien
taatggcatcaacacccaggaggtc

SEQ ID NO: 650012 - DNA, 25 bp, Homo sapien
ggctgcgcccaggatagtgtttatc

SEQ ID NO: 650013 - DNA, 25 bp, Homo sapien
catggcttctctcggagctaccgga

SEQ ID NO: 650014 - DNA, 25 bp, Homo sapien
cacacgtcagttctggttggcaacg

SEQ ID NO: 650015 - DNA, 25 bp, Homo sapien
ttatttgtaaggaatgtgtaaggca

SEQ ID NO: 650016 - DNA, 25 bp, Homo sapien
agaggtgccctcctttgagctgctg

SEQ ID NO: 650017 - DNA, 25 bp, Homo sapien
gaggtgccctcctttgagctgctgc

SEQ ID NO: 650018 - DNA, 25 bp, Homo sapien
tcagacagaggtgccctcctttgag

SEQ ID NO: 650019 - DNA, 25 bp, Homo sapien
gtgccctcctttgagctgctgccgt

SEQ ID NO: 650020 - DNA, 25 bp, Homo sapien
gctgggccacgagccatggcagaac

SEQ ID NO: 650021 - DNA, 25 bp, Homo sapien
tgaacgaaggcaggtggcgtgaggg

SEQ ID NO: 650022 - DNA, 25 bp, Homo sapien
ggggggctgggccacgagccatggc

SEQ ID NO: 650023 - DNA, 25 bp, Homo sapien
tgtgaacgaaggcaggtggcgtgag

SEQ ID NO: 650024 - DNA, 25 bp, Homo sapien
gccctgctttggcgccaggcacgca

SEQ ID NO: 650025 - DNA, 25 bp, Homo sapien
ccgccctgctttggcgccaggcacg

SEQ ID NO: 650026 - DNA, 25 bp, Homo sapien
cgccctgctttggcgccaggcacgc

SEQ ID NO: 650027 - DNA, 25 bp, Homo sapien
ggcggcgcgccccaggtcacttgtt

SEQ ID NO: 650028 - DNA, 25 bp, Homo sapien
gcgcgccccaggtcacttgttaact

SEQ ID NO: 650029 - DNA, 25 bp, Homo sapien
ccaggtcacttgttaacttcttctc

SEQ ID NO: 650030 - DNA, 25 bp, Homo sapien
cgccccaggtcacttgttaacttct

SEQ ID NO: 650031 - DNA, 25 bp, Homo sapien
aaggcaactcctggtcacccggaga

SEQ ID NO: 650032 - DNA, 25 bp, Homo sapien
aaccgcccatgctgaccgtgagggc

SEQ ID NO: 650033 - DNA, 25 bp, Homo sapien
gtcagaaggttgacgggcatcagcc

SEQ ID NO: 650034 - DNA, 25 bp, Homo sapien
tgacgacagggaggaaaccgcccat

SEQ ID NO: 650035 - DNA, 25 bp, Homo sapien
ctggggcaggagcagtttactccgc

SEQ ID NO: 650036 - DNA, 25 bp, Homo sapien
tggggcaggagcagtttactccgca

SEQ ID NO: 650037 - DNA, 25 bp, Homo sapien
tttcgacagccaccaggactaatgg

SEQ ID NO: 650038 - DNA, 25 bp, Homo sapien
cacttcacgttctacatgcttcaca

SEQ ID NO: 650039 - DNA, 25 bp, Homo sapien
actactgagcgctggacgtgtggct

SEQ ID NO: 650040 - DNA, 25 bp, Homo sapien
tgtggctgaggaacgcacttcacgt

SEQ ID NO: 650041 - DNA, 25 bp, Homo sapien
cccctttccgaggccaagagtggcg

SEQ ID NO: 650042 - DNA, 25 bp, Homo sapien
gaggccaagagtggcgccagcccca

SEQ ID NO: 650043 - DNA, 25 bp, Homo sapien
ctgcagggctaggagtccccacccc

SEQ ID NO: 650044 - DNA, 25 bp, Homo sapien
caccccagccccgggtagtgacaag

SEQ ID NO: 650045 - DNA, 25 bp, Homo sapien
ctgaagactctagggggccggctgt

SEQ ID NO: 650046 - DNA, 25 bp, Homo sapien
cttcttgtaaccgacatgccgaggt

SEQ ID NO: 650047 - DNA, 25 bp, Homo sapien
gccggctgtgcggagcttctccaat

SEQ ID NO: 650048 - DNA, 25 bp, Homo sapien
tccaattcttcttgtaaccgacatg

SEQ ID NO: 650049 - DNA, 25 bp, Homo sapien
tataaacggctgtgctgtcaagacc

SEQ ID NO: 650050 - DNA, 25 bp, Homo sapien
tgaggtctgggtgagacgtcttata

SEQ ID NO: 650051 - DNA, 25 bp, Homo sapien
tctgggtgagacgtcttataaacgg

SEQ ID NO: 650052 - DNA, 25 bp, Homo sapien
gacgtcttataaacggctgtgctgt

SEQ ID NO: 650053 - DNA, 25 bp, Homo sapien
agggatgcagaccacccacagggct

SEQ ID NO: 650054 - DNA, 25 bp, Homo sapien
catcctgtagctggaatgagtgggc

SEQ ID NO: 650055 - DNA, 25 bp, Homo sapien
agtgggccagacccacaagttctga

SEQ ID NO: 650056 - DNA, 25 bp, Homo sapien
taccgagcacgcctggggaccaggg

SEQ ID NO: 650057 - DNA, 25 bp, Homo sapien
caggggctgatgggggctgagagcc

SEQ ID NO: 650058 - DNA, 25 bp, Homo sapien
ccactcattccctggagactcaggg

SEQ ID NO: 650059 - DNA, 25 bp, Homo sapien
ggggctgagagccaccaggcagggc

SEQ ID NO: 650060 - DNA, 25 bp, Homo sapien
cactcattccctggagactcagggc

SEQ ID NO: 650061 - DNA, 25 bp, Homo sapien
agcttctgccgctgtgtctgctcat

SEQ ID NO: 650062 - DNA, 25 bp, Homo sapien
tcatcctccaggatggcttctgtcc

SEQ ID NO: 650063 - DNA, 25 bp, Homo sapien
ctcctcaaactcggccgtgagcttc

SEQ ID NO: 650064 - DNA, 25 bp, Homo sapien
caaactcggccgtgagcttctgccg

SEQ ID NO: 650065 - DNA, 25 bp, Homo sapien
aaacataacccggcagcccggtgag

SEQ ID NO: 650066 - DNA, 25 bp, Homo sapien
aacataacccggcagcccggtgagg

SEQ ID NO: 650067 - DNA, 25 bp, Homo sapien
aaacaccgcaaacataacccggcag

SEQ ID NO: 650068 - DNA, 25 bp, Homo sapien
ctgtgcaaacaccgcaaacataacc

SEQ ID NO: 650069 - DNA, 25 bp, Homo sapien
gagggcacctcagcccctggtacag

SEQ ID NO: 650070 - DNA, 25 bp, Homo sapien
cacaggcaccgctctctagctgctt

SEQ ID NO: 650071 - DNA, 25 bp, Homo sapien
acagacttcggtgtggctcaggagc

SEQ ID NO: 650072 - DNA, 25 bp, Homo sapien
tctctagctgcttctagcttcccct

SEQ ID NO: 650073 - DNA, 25 bp, Homo sapien
tcatttcactcaactgctgcctgac

SEQ ID NO: 650074 - DNA, 25 bp, Homo sapien
tgtcaccatcctctacgtggctctt

SEQ ID NO: 650075 - DNA, 25 bp, Homo sapien
ctgaacggggtcctgctcggctggg

SEQ ID NO: 650076 - DNA, 25 bp, Homo sapien
gctggggccccagctatgtcaccat

SEQ ID NO: 650077 - DNA, 25 bp, Homo sapien
tgcaaataacgaactgcacagctgg

SEQ ID NO: 650078 - DNA, 25 bp, Homo sapien
tccccagggaacatgggcggtctct

SEQ ID NO: 650079 - DNA, 25 bp, Homo sapien
tccgggtaagacctgaatgaccaag

SEQ ID NO: 650080 - DNA, 25 bp, Homo sapien
aaggcttcagtgagtggcccctaga

SEQ ID NO: 650081 - DNA, 25 bp, Homo sapien
gggaatgcagacgcccagagctctc

SEQ ID NO: 650082 - DNA, 25 bp, Homo sapien
ggaatgcagacgcccagagctctca

SEQ ID NO: 650083 - DNA, 25 bp, Homo sapien
aatgcagacgcccagagctctcact

SEQ ID NO: 650084 - DNA, 25 bp, Homo sapien
tgcagacgcccagagctctcactac

SEQ ID NO: 650085 - DNA, 25 bp, Homo sapien
catgctgctcaacgggtgacactgt

SEQ ID NO: 650086 - DNA, 25 bp, Homo sapien
tgctcaacgggtgacactgtccctt

SEQ ID NO: 650087 - DNA, 25 bp, Homo sapien
gccccatgctgctcaacgggtgaca

SEQ ID NO: 650088 - DNA, 25 bp, Homo sapien
gctgctcaacgggtgacactgtccc

SEQ ID NO: 650089 - DNA, 25 bp, Homo sapien
ggcttcgctcttggcggcatcgagc

SEQ ID NO: 650090 - DNA, 25 bp, Homo sapien
cagggcaagctcatcgctctgtttc

SEQ ID NO: 650091 - DNA, 25 bp, Homo sapien
gggcaagctcatcgctctgtttctg

SEQ ID NO: 650092 - DNA, 25 bp, Homo sapien
ctgggcttcgctcttggcggcatcg

SEQ ID NO: 650093 - DNA, 25 bp, Homo sapien
ccccgtgagttagcgccgaaacata

SEQ ID NO: 650094 - DNA, 25 bp, Homo sapien
tccccttgcggagggataacctaga

SEQ ID NO: 650095 - DNA, 25 bp, Homo sapien
cctttttgaaacctgccctgagaga

SEQ ID NO: 650096 - DNA, 25 bp, Homo sapien
tggtctcaatctgtcatccacgctg

SEQ ID NO: 650097 - DNA, 25 bp, Homo sapien
cctgtgaggcttcgggcaaacgcct

SEQ ID NO: 650098 - DNA, 25 bp, Homo sapien
tcaaggcttatgtcaccgagagctg

SEQ ID NO: 650099 - DNA, 25 bp, Homo sapien
cctgaggactcggacttcaaggctt

SEQ ID NO: 650100 - DNA, 25 bp, Homo sapien
tcaggcctgacagcccaacgagggg

SEQ ID NO: 650101 - DNA, 25 bp, Homo sapien
tccttggcgtagttctggcactcgg

SEQ ID NO: 650102 - DNA, 25 bp, Homo sapien
cggccgccatgtgcttttccagctc

SEQ ID NO: 650103 - DNA, 25 bp, Homo sapien
agctctgcctccaaatgcgacgtgt

SEQ ID NO: 650104 - DNA, 25 bp, Homo sapien
tccaaatgcgacgtgtgctccctca

SEQ ID NO: 650105 - DNA, 25 bp, Homo sapien
cccttacggaaagtggcaggctgca

SEQ ID NO: 650106 - DNA, 25 bp, Homo sapien
tagtccgcggcaagagaacccctta

SEQ ID NO: 650107 - DNA, 25 bp, Homo sapien
ccaccagctaccaagcaaacgagaa

SEQ ID NO: 650108 - DNA, 25 bp, Homo sapien
gataggtgaggcctctcgggagatc

SEQ ID NO: 650109 - DNA, 25 bp, Homo sapien
caccttgactgtgaaggccgtggca

SEQ ID NO: 650110 - DNA, 25 bp, Homo sapien
cctgtggcgtctgaagggggcagtg

SEQ ID NO: 650111 - DNA, 25 bp, Homo sapien
aagccctgttcaccagggctgggca

SEQ ID NO: 650112 - DNA, 25 bp, Homo sapien
ccagggctccctgtggcgtctgaag

SEQ ID NO: 650113 - DNA, 25 bp, Homo sapien
gagaaagagttctctgagcagagca

SEQ ID NO: 650114 - DNA, 25 bp, Homo sapien
agaggctcccgggacaagagaaaga

SEQ ID NO: 650115 - DNA, 25 bp, Homo sapien
tcttaaggcacacggtccatgagga

SEQ ID NO: 650116 - DNA, 25 bp, Homo sapien
agaaatcagtgaagtgtcctctgca

SEQ ID NO: 650117 - DNA, 25 bp, Homo sapien
caatctcttcgagatgcttcactgt

SEQ ID NO: 650118 - DNA, 25 bp, Homo sapien
cgagatgcttcactgtgacccggga

SEQ ID NO: 650119 - DNA, 25 bp, Homo sapien
tcttcgagatgcttcactgtgaccc

SEQ ID NO: 650120 - DNA, 25 bp, Homo sapien
tctcttcgagatgcttcactgtgac

SEQ ID NO: 650121 - DNA, 25 bp, Homo sapien
acaatcctgtcaactctcccctggg

SEQ ID NO: 650122 - DNA, 25 bp, Homo sapien
tcatcccgcaactgtgcttcatagg

SEQ ID NO: 650123 - DNA, 25 bp, Homo sapien
aaaagccccaccgagacacacgagt

SEQ ID NO: 650124 - DNA, 25 bp, Homo sapien
tgcttcatagggtgtcgtggaaaag

SEQ ID NO: 650125 - DNA, 25 bp, Homo sapien
cctccacgctcttctgcaggtctct

SEQ ID NO: 650126 - DNA, 25 bp, Homo sapien
cacgctcttctgcaggtctctgagc

SEQ ID NO: 650127 - DNA, 25 bp, Homo sapien
tcctcctctgcggcgcccaccttgg

SEQ ID NO: 650128 - DNA, 25 bp, Homo sapien
gagctcctcctctgcggcgcccacc

SEQ ID NO: 650129 - DNA, 25 bp, Homo sapien
agccctggtgacctgccgtgctccg

SEQ ID NO: 650130 - DNA, 25 bp, Homo sapien
gccgtgctccgcctgctgacttcat

SEQ ID NO: 650131 - DNA, 25 bp, Homo sapien
ttcatgagcgccagcgttaggtggg

SEQ ID NO: 650132 - DNA, 25 bp, Homo sapien
cacacaaccgcatcttcctgtccct

SEQ ID NO: 650133 - DNA, 25 bp, Homo sapien
tgtcaatggcccaggacgaggagca

SEQ ID NO: 650134 - DNA, 25 bp, Homo sapien
agcaccaagtgtgtcaatggcccag

SEQ ID NO: 650135 - DNA, 25 bp, Homo sapien
ttactgccggggtttgccaccagca

SEQ ID NO: 650136 - DNA, 25 bp, Homo sapien
cacaggaccactaggatgcttgtta

SEQ ID NO: 650137 - DNA, 25 bp, Homo sapien
tgcagtgtgctctgcgtctcctcgg

SEQ ID NO: 650138 - DNA, 25 bp, Homo sapien
agtgtgctctgcgtctcctcggcct

SEQ ID NO: 650139 - DNA, 25 bp, Homo sapien
gtactggtcacactcggcctgcagt

SEQ ID NO: 650140 - DNA, 25 bp, Homo sapien
cgtctccgccaggatgctgcggtac

SEQ ID NO: 650141 - DNA, 25 bp, Homo sapien
ggtgcttcagcagcgtggggccttt

SEQ ID NO: 650142 - DNA, 25 bp, Homo sapien
gggagctggcgggtgcttcagcagc

SEQ ID NO: 650143 - DNA, 25 bp, Homo sapien
ctgttgtgccaagacagagagttct

SEQ ID NO: 650144 - DNA, 25 bp, Homo sapien
agacagagagttctgggagcagagc

SEQ ID NO: 650145 - DNA, 25 bp, Homo sapien
gacagagagttctgggagcagagcc

SEQ ID NO: 650146 - DNA, 25 bp, Homo sapien
tgcgcctcaatcagacagagctgct

SEQ ID NO: 650147 - DNA, 25 bp, Homo sapien
ggtctgcgcctcaatcagacagagc

SEQ ID NO: 650148 - DNA, 25 bp, Homo sapien
gcctcaatcagacagagctgcttct

SEQ ID NO: 650149 - DNA, 25 bp, Homo sapien
gacagagctgcttctccgattcctc

SEQ ID NO: 650150 - DNA, 25 bp, Homo sapien
caggtctttactgatatgcccgggt

SEQ ID NO: 650151 - DNA, 25 bp, Homo sapien
ccccaggtctttactgatatgcccg

SEQ ID NO: 650152 - DNA, 25 bp, Homo sapien
ggtctttactgatatgcccgggtct

SEQ ID NO: 650153 - DNA, 25 bp, Homo sapien
gggaagagcggaaggtgttcagctg

SEQ ID NO: 650154 - DNA, 25 bp, Homo sapien
tgccccagaaagggcacatcctcag

SEQ ID NO: 650155 - DNA, 25 bp, Homo sapien
ccccagaaagggcacatcctcagct

SEQ ID NO: 650156 - DNA, 25 bp, Homo sapien
ctgccccagaaagggcacatcctca

SEQ ID NO: 650157 - DNA, 25 bp, Homo sapien
gccccagaaagggcacatcctcagc

SEQ ID NO: 650158 - DNA, 25 bp, Homo sapien
ttggggggtccgcagttgatgtgtg

SEQ ID NO: 650159 - DNA, 25 bp, Homo sapien
gagctctctgggcatgtgtgcatgt

SEQ ID NO: 650160 - DNA, 25 bp, Homo sapien
agttgatgtgtgagagccagggcag

SEQ ID NO: 650161 - DNA, 25 bp, Homo sapien
ccagctcccgggacatctcccagca

SEQ ID NO: 650162 - DNA, 25 bp, Homo sapien
catggtagccagacagtctctgagg

SEQ ID NO: 650163 - DNA, 25 bp, Homo sapien
cactgaggcctctagttgtgagtca

SEQ ID NO: 650164 - DNA, 25 bp, Homo sapien
gctggccaagttatccacaggtagg

SEQ ID NO: 650165 - DNA, 25 bp, Homo sapien
taactatagctctcacagggtggcc

SEQ ID NO: 650166 - DNA, 25 bp, Homo sapien
catctgtacgtcttagtgcatttgt

SEQ ID NO: 650167 - DNA, 25 bp, Homo sapien
tctggtgtcctagtgcatctgtacg

SEQ ID NO: 650168 - DNA, 25 bp, Homo sapien
catctgtgcgtcctagagcatctgg

SEQ ID NO: 650169 - DNA, 25 bp, Homo sapien
tgcatcctagtgcactttccatggt

SEQ ID NO: 650170 - DNA, 25 bp, Homo sapien
gccgtggccagtgcctccatggcct

SEQ ID NO: 650171 - DNA, 25 bp, Homo sapien
ctcggccgtggccagtgcctccatg

SEQ ID NO: 650172 - DNA, 25 bp, Homo sapien
ggccgtggccagtgcctccatggcc

SEQ ID NO: 650173 - DNA, 25 bp, Homo sapien
tcggccgtggccagtgcctccatgg

SEQ ID NO: 650174 - DNA, 25 bp, Homo sapien
gaacacaaggcctgggtgccgtagc

SEQ ID NO: 650175 - DNA, 25 bp, Homo sapien
ggtggcgccctttcgataaagacac

SEQ ID NO: 650176 - DNA, 25 bp, Homo sapien
gcctaagctggtgtcagacaggaca

SEQ ID NO: 650177 - DNA, 25 bp, Homo sapien
gacacaggtgaaaggtcagcagcct

SEQ ID NO: 650178 - DNA, 25 bp, Homo sapien
ttctccagacccgacacctgggact

SEQ ID NO: 650179 - DNA, 25 bp, Homo sapien
ccagacccgacacctgggactccag

SEQ ID NO: 650180 - DNA, 25 bp, Homo sapien
cactttctgctgctcgacggcctcc

SEQ ID NO: 650181 - DNA, 25 bp, Homo sapien
ctccttctccagacccgacacctgg

SEQ ID NO: 650182 - DNA, 25 bp, Homo sapien
gggctacagcccctacagatcccac

SEQ ID NO: 650183 - DNA, 25 bp, Homo sapien
tccaaggggctacagcccctacaga

SEQ ID NO: 650184 - DNA, 25 bp, Homo sapien
gaagggacacaacgaggtcaccgcc

SEQ ID NO: 650185 - DNA, 25 bp, Homo sapien
gaggtcaccgcctaggctccaaggg

SEQ ID NO: 650186 - DNA, 25 bp, Homo sapien
cgagtctgctgctggtcagcctccg

SEQ ID NO: 650187 - DNA, 25 bp, Homo sapien
gctggtcagcctccgcctggctggc

SEQ ID NO: 650188 - DNA, 25 bp, Homo sapien
gctgctggtcagcctccgcctggct

SEQ ID NO: 650189 - DNA, 25 bp, Homo sapien
gagtctgctgctggtcagcctccgc

SEQ ID NO: 650190 - DNA, 25 bp, Homo sapien
gcagggcctcaatggaacggattct

SEQ ID NO: 650191 - DNA, 25 bp, Homo sapien
tcagctcctcgcatttgctgcgcac

SEQ ID NO: 650192 - DNA, 25 bp, Homo sapien
agctgggagttctccgccctggcct

SEQ ID NO: 650193 - DNA, 25 bp, Homo sapien
gaacggattctctctgtgagctggg

SEQ ID NO: 650194 - DNA, 25 bp, Homo sapien
ctccgcctcggaggactgtaacttg

SEQ ID NO: 650195 - DNA, 25 bp, Homo sapien
tccgcctcggaggactgtaacttgc

SEQ ID NO: 650196 - DNA, 25 bp, Homo sapien
ccgcctcggaggactgtaacttgct

SEQ ID NO: 650197 - DNA, 25 bp, Homo sapien
ctggtgcagaggaagggaaacgaga

SEQ ID NO: 650198 - DNA, 25 bp, Homo sapien
gcagaggaagggaaacgagaagtta

SEQ ID NO: 650199 - DNA, 25 bp, Homo sapien
ggtgcagaggaagggaaacgagaag

SEQ ID NO: 650200 - DNA, 25 bp, Homo sapien
tgcagaggaagggaaacgagaagtt

SEQ ID NO: 650201 - DNA, 25 bp, Homo sapien
ttgggcctcagcaactgcaaggcct

SEQ ID NO: 650202 - DNA, 25 bp, Homo sapien
ctcttcactagcacctctgcggcca

SEQ ID NO: 650203 - DNA, 25 bp, Homo sapien
aactgcaaggcctcatccctggtct

SEQ ID NO: 650204 - DNA, 25 bp, Homo sapien
gccatctgtcaagttgccctcttca

SEQ ID NO: 650205 - DNA, 25 bp, Homo sapien
acaggcttgtaaatcctgcctggcc

SEQ ID NO: 650206 - DNA, 25 bp, Homo sapien
ctgtcaccctttccatgatcgactg

SEQ ID NO: 650207 - DNA, 25 bp, Homo sapien
aggcttgtaaatcctgcctggcctt

SEQ ID NO: 650208 - DNA, 25 bp, Homo sapien
ccctttccatgatcgactgcagcaa

SEQ ID NO: 650209 - DNA, 25 bp, Homo sapien
tccgcccggaggctggcgtggctgc

SEQ ID NO: 650210 - DNA, 25 bp, Homo sapien
ccttctcggcatccgcccggaggct

SEQ ID NO: 650211 - DNA, 25 bp, Homo sapien
gggccttctcggcatccgcccggag

SEQ ID NO: 650212 - DNA, 25 bp, Homo sapien
ggcatccgcccggaggctggcgtgg

SEQ ID NO: 650213 - DNA, 25 bp, Homo sapien
agatgagcaccatccgggcagaggc

SEQ ID NO: 650214 - DNA, 25 bp, Homo sapien
tgctcagatgagcaccatccgggca

SEQ ID NO: 650215 - DNA, 25 bp, Homo sapien
aactgctcagatgagcaccatccgg

SEQ ID NO: 650216 - DNA, 25 bp, Homo sapien
ctcagatgagcaccatccgggcaga

SEQ ID NO: 650217 - DNA, 25 bp, Homo sapien
aaggaggtggccactaggccgtggt

SEQ ID NO: 650218 - DNA, 25 bp, Homo sapien
ggaggtggccactaggccgtggttc

SEQ ID NO: 650219 - DNA, 25 bp, Homo sapien
caaggaggtggccactaggccgtgg

SEQ ID NO: 650220 - DNA, 25 bp, Homo sapien
aggtggccactaggccgtggttcac

SEQ ID NO: 650221 - DNA, 25 bp, Homo sapien
ggggcagctttaggatgggcagtgc

SEQ ID NO: 650222 - DNA, 25 bp, Homo sapien
ctttctgcattagaacgtagcaggg

SEQ ID NO: 650223 - DNA, 25 bp, Homo sapien
cgtagcaggggattactcagttcca

SEQ ID NO: 650224 - DNA, 25 bp, Homo sapien
tactgtgcagtgaaaactgggggca

SEQ ID NO: 650225 - DNA, 25 bp, Homo sapien
ctcatcttgccgcacagcctctgac

SEQ ID NO: 650226 - DNA, 25 bp, Homo sapien
catcttgccgcacagcctctgactt

SEQ ID NO: 650227 - DNA, 25 bp, Homo sapien
ccttgctgagctcctgccgaagctt

SEQ ID NO: 650228 - DNA, 25 bp, Homo sapien
tgctgctcatcttgccgcacagcct

SEQ ID NO: 650229 - DNA, 25 bp, Homo sapien
acagcagatcctatgtggggagacg

SEQ ID NO: 650230 - DNA, 25 bp, Homo sapien
agtccccacatatgccttctgctgt

SEQ ID NO: 650231 - DNA, 25 bp, Homo sapien
cagatcctatgtggggagacgccag

SEQ ID NO: 650232 - DNA, 25 bp, Homo sapien
ccacaaacctccaaccagccgatgg

SEQ ID NO: 650233 - DNA, 25 bp, Homo sapien
ggttcaaggcatcccgcaggatgga

SEQ ID NO: 650234 - DNA, 25 bp, Homo sapien
tggctcgtggcctggttcaaggcat

SEQ ID NO: 650235 - DNA, 25 bp, Homo sapien
cccgcaggatggagttctcctgctg

SEQ ID NO: 650236 - DNA, 25 bp, Homo sapien
ggcctggttcaaggcatcccgcagg

SEQ ID NO: 650237 - DNA, 25 bp, Homo sapien
ctctctggctccctccgtcctggac

SEQ ID NO: 650238 - DNA, 25 bp, Homo sapien
atgcccccgccagccactacaccca

SEQ ID NO: 650239 - DNA, 25 bp, Homo sapien
gactgggtcctgtcccttcccatgc

SEQ ID NO: 650240 - DNA, 25 bp, Homo sapien
tccgtcctggacctggactgggtcc

SEQ ID NO: 650241 - DNA, 25 bp, Homo sapien
tccttcacgtgctcccggtagctgg

SEQ ID NO: 650242 - DNA, 25 bp, Homo sapien
cggtagctggcctgcatgcgtgcct

SEQ ID NO: 650243 - DNA, 25 bp, Homo sapien
acagccgtgatctcctgctcccggg

SEQ ID NO: 650244 - DNA, 25 bp, Homo sapien
acgtgctcccggtagctggcctgca

SEQ ID NO: 650245 - DNA, 25 bp, Homo sapien
ccatccccaggtaaaccctctgagg

SEQ ID NO: 650246 - DNA, 25 bp, Homo sapien
caggtaaaccctctgagggtcccag

SEQ ID NO: 650247 - DNA, 25 bp, Homo sapien
cctccaccaagaaggcctggtaaca

SEQ ID NO: 650248 - DNA, 25 bp, Homo sapien
caccaagaaggcctggtaacaggaa

SEQ ID NO: 650249 - DNA, 25 bp, Homo sapien
tttcagaatcgccacagggtcaccc

SEQ ID NO: 650250 - DNA, 25 bp, Homo sapien
cttccagctggcgtttcagaatcgc

SEQ ID NO: 650251 - DNA, 25 bp, Homo sapien
ttgctcttggcgacagccgcatctt

SEQ ID NO: 650252 - DNA, 25 bp, Homo sapien
cagtttgctcttggcgacagccgca

SEQ ID NO: 650253 - DNA, 25 bp, Homo sapien
tgggcctcgccctcgttgaacacca

SEQ ID NO: 650254 - DNA, 25 bp, Homo sapien
tcagacaggatctcgatgagccgct

SEQ ID NO: 650255 - DNA, 25 bp, Homo sapien
cagccttctcagacaggatctcgat

SEQ ID NO: 650256 - DNA, 25 bp, Homo sapien
tgctcccaaccgtggagaccagcgt

SEQ ID NO: 650257 - DNA, 25 bp, Homo sapien
ggaaagagctgagacttaggcccat

SEQ ID NO: 650258 - DNA, 25 bp, Homo sapien
aacacacgtggccacaatgcccatc

SEQ ID NO: 650259 - DNA, 25 bp, Homo sapien
ccatcacaccaagaaggttctggtc

SEQ ID NO: 650260 - DNA, 25 bp, Homo sapien
aggcccataagccacaacacacgtg

SEQ ID NO: 650261 - DNA, 25 bp, Homo sapien
cgagtctgctccagtgtctcctgct

SEQ ID NO: 650262 - DNA, 25 bp, Homo sapien
gcgagtctgctccagtgtctcctgc

SEQ ID NO: 650263 - DNA, 25 bp, Homo sapien
ggcgagtctgctccagtgtctcctg

SEQ ID NO: 650264 - DNA, 25 bp, Homo sapien
gagccatctgccaacaaacgtcact

SEQ ID NO: 650265 - DNA, 25 bp, Homo sapien
tgactgggcagcgaatttaccgtcc

SEQ ID NO: 650266 - DNA, 25 bp, Homo sapien
gaaagggtgaaccaagatgccacgc

SEQ ID NO: 650267 - DNA, 25 bp, Homo sapien
ttgaatgcagcctcggaagcaagaa

SEQ ID NO: 650268 - DNA, 25 bp, Homo sapien
gacgcaagacgctctctagggagga

SEQ ID NO: 650269 - DNA, 25 bp, Homo sapien
tctgctgtaagaaggtgaagaccct

SEQ ID NO: 650270 - DNA, 25 bp, Homo sapien
tctgcagaccaagattcagaggctg

SEQ ID NO: 650271 - DNA, 25 bp, Homo sapien
tgctcgttcttggactgtggccgtg

SEQ ID NO: 650272 - DNA, 25 bp, Homo sapien
cttggctcgcttccctaggggatgt

SEQ ID NO: 650273 - DNA, 25 bp, Homo sapien
ctgatacttggctcgcttccctagg

SEQ ID NO: 650274 - DNA, 25 bp, Homo sapien
actgatacttggctcgcttccctag

SEQ ID NO: 650275 - DNA, 25 bp, Homo sapien
ctcgcttccctaggggatgtttttg

SEQ ID NO: 650276 - DNA, 25 bp, Homo sapien
tctttttcccacatggacttatctg

SEQ ID NO: 650277 - DNA, 25 bp, Homo sapien
gacttatctgacaacgtggcaagaa

SEQ ID NO: 650278 - DNA, 25 bp, Homo sapien
tttgacttagagacacataatggag

SEQ ID NO: 650279 - DNA, 25 bp, Homo sapien
ggaagatactaacatttacccataa

SEQ ID NO: 650280 - DNA, 25 bp, Homo sapien
tggaccagccaggtaacaggtaggg

SEQ ID NO: 650281 - DNA, 25 bp, Homo sapien
ctggaccagccaggtaacaggtagg

SEQ ID NO: 650282 - DNA, 25 bp, Homo sapien
gctggaccagccaggtaacaggtag

SEQ ID NO: 650283 - DNA, 25 bp, Homo sapien
aataattctggaacatgaaaactcc

SEQ ID NO: 650284 - DNA, 25 bp, Homo sapien
ggtcacagccgccaatgttaagtgg

SEQ ID NO: 650285 - DNA, 25 bp, Homo sapien
aaaccaattccacaagccactggtg

SEQ ID NO: 650286 - DNA, 25 bp, Homo sapien
tataagacgtagcaagggtgaaacc

SEQ ID NO: 650287 - DNA, 25 bp, Homo sapien
gtggactcacagatttctgcctcat

SEQ ID NO: 650288 - DNA, 25 bp, Homo sapien
ttctttgcttcatcagttcgttgga

SEQ ID NO: 650289 - DNA, 25 bp, Homo sapien
gaagggcattatatcaggaaggttt

SEQ ID NO: 650290 - DNA, 25 bp, Homo sapien
gaattcctgtcccagtagcattaat

SEQ ID NO: 650291 - DNA, 25 bp, Homo sapien
tttccaaagggcgttcccagctcca

SEQ ID NO: 650292 - DNA, 25 bp, Homo sapien
ttttgaagagaaaactactactaca

SEQ ID NO: 650293 - DNA, 25 bp, Homo sapien
tggctgccacagtttacactgtttc

SEQ ID NO: 650294 - DNA, 25 bp, Homo sapien
ctggctgccacagtttacactgttt

SEQ ID NO: 650295 - DNA, 25 bp, Homo sapien
atgaaatgctgacttgaaatgccct

SEQ ID NO: 650296 - DNA, 25 bp, Homo sapien
gttgtaactatgaagggcctctgcc

SEQ ID NO: 650297 - DNA, 25 bp, Homo sapien
tgttgtaactatgaagggcctctgc

SEQ ID NO: 650298 - DNA, 25 bp, Homo sapien
ggcagagccaccaaccgagaaagct

SEQ ID NO: 650299 - DNA, 25 bp, Homo sapien
ggcactccccgagagaatccataag

SEQ ID NO: 650300 - DNA, 25 bp, Homo sapien
cgagaaagctcacatctgccaacct

SEQ ID NO: 650301 - DNA, 25 bp, Homo sapien
taaatgactgctgttgaaggccact

SEQ ID NO: 650302 - DNA, 25 bp, Homo sapien
ttctttgaaccagacttcttcttgg

SEQ ID NO: 650303 - DNA, 25 bp, Homo sapien
ctttgaaccagacttcttcttggca

SEQ ID NO: 650304 - DNA, 25 bp, Homo sapien
tttgaaccagacttcttcttggcag

SEQ ID NO: 650305 - DNA, 25 bp, Homo sapien
ctctacctttgtgccctgattagca

SEQ ID NO: 650306 - DNA, 25 bp, Homo sapien
tttgtgccctgattagcaaccgaat

SEQ ID NO: 650307 - DNA, 25 bp, Homo sapien
tttaccctgattggcagctgcgtct

SEQ ID NO: 650308 - DNA, 25 bp, Homo sapien
tgtctttttaccctgattggcagct

SEQ ID NO: 650309 - DNA, 25 bp, Homo sapien
ttgccttggttgggactcctttctg

SEQ ID NO: 650310 - DNA, 25 bp, Homo sapien
gccctgagccccttctgtcttttta

SEQ ID NO: 650311 - DNA, 25 bp, Homo sapien
ctggttctgggcaccctcagccttc

SEQ ID NO: 650312 - DNA, 25 bp, Homo sapien
ttgccctggttctgggccccttcta

SEQ ID NO: 650313 - DNA, 25 bp, Homo sapien
tacttttttgccctggttctgagcc

SEQ ID NO: 650314 - DNA, 25 bp, Homo sapien
gactttttgccctggttctgagccc

SEQ ID NO: 650315 - DNA, 25 bp, Homo sapien
ttggggctccttcagcctttttgct

SEQ ID NO: 650316 - DNA, 25 bp, Homo sapien
ttgattctgagtcccctccgccttt

SEQ ID NO: 650317 - DNA, 25 bp, Homo sapien
gctttgattctgagtcccctccgcc

SEQ ID NO: 650318 - DNA, 25 bp, Homo sapien
ctccgcctttttgccctgagtagtg

SEQ ID NO: 650319 - DNA, 25 bp, Homo sapien
gcagccttcgaagtgagaacctgga

SEQ ID NO: 650320 - DNA, 25 bp, Homo sapien
agtgagaacctggatggaattcact

SEQ ID NO: 650321 - DNA, 25 bp, Homo sapien
gaacctggatggaattcactacaga

SEQ ID NO: 650322 - DNA, 25 bp, Homo sapien
gatggcagccttcgaagtgagaacc

SEQ ID NO: 650323 - DNA, 25 bp, Homo sapien
agcaacgataatggggggctgcact

SEQ ID NO: 650324 - DNA, 25 bp, Homo sapien
ctgtggcgacaggagcaacgataat

SEQ ID NO: 650325 - DNA, 25 bp, Homo sapien
ggagcccgcactggttctcgaagga

SEQ ID NO: 650326 - DNA, 25 bp, Homo sapien
cactggttctcgaaggaggacagtc

SEQ ID NO: 650327 - DNA, 25 bp, Homo sapien
cttctccactgttttctccttcttt

SEQ ID NO: 650328 - DNA, 25 bp, Homo sapien
tttcttctccactgttttctccttc

SEQ ID NO: 650329 - DNA, 25 bp, Homo sapien
ttcttggtctttcctttcttctcca

SEQ ID NO: 650330 - DNA, 25 bp, Homo sapien
tcctttcttctccactgttttctcc

SEQ ID NO: 650331 - DNA, 25 bp, Homo sapien
cttgcgctggttggctagggcttct

SEQ ID NO: 650332 - DNA, 25 bp, Homo sapien
gagttttcgccatctccttgcgctg

SEQ ID NO: 650333 - DNA, 25 bp, Homo sapien
caaggtttgagtgtcgtaaatatcc

SEQ ID NO: 650334 - DNA, 25 bp, Homo sapien
ccttcatggagaaagtcgacaccag

SEQ ID NO: 650335 - DNA, 25 bp, Homo sapien
tccccatacaaagcaacagcagagt

SEQ ID NO: 650336 - DNA, 25 bp, Homo sapien
ctgctcctctttaggagtgagcgat

SEQ ID NO: 650337 - DNA, 25 bp, Homo sapien
gattcgtacccaaggcatgagcagt

SEQ ID NO: 650338 - DNA, 25 bp, Homo sapien
tgagcagtccccatacaaagcaaca

SEQ ID NO: 650339 - DNA, 25 bp, Homo sapien
cgagtcgcgattggcactggttgca

SEQ ID NO: 650340 - DNA, 25 bp, Homo sapien
tgcagaccgtgacacagtgaacagc

SEQ ID NO: 650341 - DNA, 25 bp, Homo sapien
agtgaacagccacgcacaaagcggg

SEQ ID NO: 650342 - DNA, 25 bp, Homo sapien
cctgttcacagccgaggactgtggg

SEQ ID NO: 650343 - DNA, 25 bp, Homo sapien
ctaaactccagcagaaaagccaagg

SEQ ID NO: 650344 - DNA, 25 bp, Homo sapien
cacagtctaataatgccagttcaca

SEQ ID NO: 650345 - DNA, 25 bp, Homo sapien
gaacttgcccataaaaccatcagga

SEQ ID NO: 650346 - DNA, 25 bp, Homo sapien
caatgatgattctaggaccagctgc

SEQ ID NO: 650347 - DNA, 25 bp, Homo sapien
tgaatttcatgaatgtctccagctg

SEQ ID NO: 650348 - DNA, 25 bp, Homo sapien
taaagaaacaatgttactcatttta

SEQ ID NO: 650349 - DNA, 25 bp, Homo sapien
aatgtactctattataagcctttgc

SEQ ID NO: 650350 - DNA, 25 bp, Homo sapien
cagccatttcagattcaatttctat

SEQ ID NO: 650351 - DNA, 25 bp, Homo sapien
gccatttcagattcaatttctatgc

SEQ ID NO: 650352 - DNA, 25 bp, Homo sapien
catcagccatttcagattcaatttc

SEQ ID NO: 650353 - DNA, 25 bp, Homo sapien
ttattcatcagccatttcagattca

SEQ ID NO: 650354 - DNA, 25 bp, Homo sapien
cctacgggcttcaccttattgagga

SEQ ID NO: 650355 - DNA, 25 bp, Homo sapien
taaacagacctaaatcttctgcgaa

SEQ ID NO: 650356 - DNA, 25 bp, Homo sapien
ttgaggaagacagcatgcctatgcg

SEQ ID NO: 650357 - DNA, 25 bp, Homo sapien
cctatgcggtaggaatcaagaactg

SEQ ID NO: 650358 - DNA, 25 bp, Homo sapien
ccccttgtggttccaactcagggag

SEQ ID NO: 650359 - DNA, 25 bp, Homo sapien
catggccccttgtggttccaactca

SEQ ID NO: 650360 - DNA, 25 bp, Homo sapien
ccatgaaggtgtcatggccccttgt

SEQ ID NO: 650361 - DNA, 25 bp, Homo sapien
tgaaggtgtcatggccccttgtggt

SEQ ID NO: 650362 - DNA, 25 bp, Homo sapien
caaggaattaaaggatgctcacagc

SEQ ID NO: 650363 - DNA, 25 bp, Homo sapien
ctcacactcattggttatacaagga

SEQ ID NO: 650364 - DNA, 25 bp, Homo sapien
tccccagaactggtgcaagcacctg

SEQ ID NO: 650365 - DNA, 25 bp, Homo sapien
cctggtgagtgtgtcgtcactgaaa

SEQ ID NO: 650366 - DNA, 25 bp, Homo sapien
tgccccggcctttgcttcaacagag

SEQ ID NO: 650367 - DNA, 25 bp, Homo sapien
ccggcctttgcttcaacagagaggg

SEQ ID NO: 650368 - DNA, 25 bp, Homo sapien
ttgcttcaacagagagggaaatggc

SEQ ID NO: 650369 - DNA, 25 bp, Homo sapien
ctttgcttcaacagagagggaaatg

SEQ ID NO: 650370 - DNA, 25 bp, Homo sapien
tttcttcgcccaacttcggagcgcg

SEQ ID NO: 650371 - DNA, 25 bp, Homo sapien
acgtcgcgcccgtctgccgccgcag

SEQ ID NO: 650372 - DNA, 25 bp, Homo sapien
gggagcggtcgccacgtcgcgcccg

SEQ ID NO: 650373 - DNA, 25 bp, Homo sapien
ggagcgcgctggccggcccgacggc

SEQ ID NO: 650374 - DNA, 25 bp, Homo sapien
gcgcgcggccgctgcagggcccggc

SEQ ID NO: 650375 - DNA, 25 bp, Homo sapien
cggccgctgcagggcccggccaagt

SEQ ID NO: 650376 - DNA, 25 bp, Homo sapien
gcccgcgcgcggccgctgcagggcc

SEQ ID NO: 650377 - DNA, 25 bp, Homo sapien
gccgctgcagggcccggccaagttt

SEQ ID NO: 650378 - DNA, 25 bp, Homo sapien
cagagacgcgagagggaaagcgaga

SEQ ID NO: 650379 - DNA, 25 bp, Homo sapien
tgcagccagagacgcgagagggaaa

SEQ ID NO: 650380 - DNA, 25 bp, Homo sapien
ctgcagccagagacgcgagagggaa

SEQ ID NO: 650381 - DNA, 25 bp, Homo sapien
agccagagacgcgagagggaaagcg

SEQ ID NO: 650382 - DNA, 25 bp, Homo sapien
gccggccaagcctccgccaagaaac

SEQ ID NO: 650383 - DNA, 25 bp, Homo sapien
tgtagacgctgcgaccctgacgccg

SEQ ID NO: 650384 - DNA, 25 bp, Homo sapien
gaaaccgcccccgagcagctgtaga

SEQ ID NO: 650385 - DNA, 25 bp, Homo sapien
cagctgtagacgctgcgaccctgac

SEQ ID NO: 650386 - DNA, 25 bp, Homo sapien
gtgtggagtcgtggcactttctgcc

SEQ ID NO: 650387 - DNA, 25 bp, Homo sapien
tttctgcctcagagctggcgaacgg

SEQ ID NO: 650388 - DNA, 25 bp, Homo sapien
tgcgcgcgtgtggagtcgtggcact

SEQ ID NO: 650389 - DNA, 25 bp, Homo sapien
cagccattcatcgagccgcctcttc

SEQ ID NO: 650390 - DNA, 25 bp, Homo sapien
ttattcccgcatcttcacaccacgg

SEQ ID NO: 650391 - DNA, 25 bp, Homo sapien
ttcccgcatcttcacaccacggtgg

SEQ ID NO: 650392 - DNA, 25 bp, Homo sapien
cctgatgggcagtggcaagcgttca

SEQ ID NO: 650393 - DNA, 25 bp, Homo sapien
catcttcacaccacggtggctgact

SEQ ID NO: 650394 - DNA, 25 bp, Homo sapien
cgggcacgtcttggacggattcctt

SEQ ID NO: 650395 - DNA, 25 bp, Homo sapien
ctatggccgacgggcacgtcttgga

SEQ ID NO: 650396 - DNA, 25 bp, Homo sapien
ccgacgggcacgtcttggacggatt

SEQ ID NO: 650397 - DNA, 25 bp, Homo sapien
cgtcttggacggattccttcagcca

SEQ ID NO: 650398 - DNA, 25 bp, Homo sapien
tcacagtctctccttgttgcgatga

SEQ ID NO: 650399 - DNA, 25 bp, Homo sapien
ccttgttgcgatgaattggcagatt

SEQ ID NO: 650400 - DNA, 25 bp, Homo sapien
tctctccttgttgcgatgaattggc

SEQ ID NO: 650401 - DNA, 25 bp, Homo sapien
gtgggaacaagcagcatttgcctca

SEQ ID NO: 650402 - DNA, 25 bp, Homo sapien
caagcagcctcaacgtcatgtggga

SEQ ID NO: 650403 - DNA, 25 bp, Homo sapien
gaatagatcctcagtaaagcgtgct

SEQ ID NO: 650404 - DNA, 25 bp, Homo sapien
caatgaagttgtaaggccaagaggc

SEQ ID NO: 650405 - DNA, 25 bp, Homo sapien
taaagtgtgtagtctcagagcaagc

SEQ ID NO: 650406 - DNA, 25 bp, Homo sapien
tccatcacagaagatgtgcaaggag

SEQ ID NO: 650407 - DNA, 25 bp, Homo sapien
tggaatttcaagtccatcacagaag

SEQ ID NO: 650408 - DNA, 25 bp, Homo sapien
tcacgggtatactggtagaagaaaa

SEQ ID NO: 650409 - DNA, 25 bp, Homo sapien
ggaaagtcacgggtatactggtaga

SEQ ID NO: 650410 - DNA, 25 bp, Homo sapien
aataggaaccgtggcagcaagtggc

SEQ ID NO: 650411 - DNA, 25 bp, Homo sapien
cagcaggtggattcataagcagtct

SEQ ID NO: 650412 - DNA, 25 bp, Homo sapien
tttaactgaattgacgcaggccagg

SEQ ID NO: 650413 - DNA, 25 bp, Homo sapien
ggtacccacggaagtcactttgtgc

SEQ ID NO: 650414 - DNA, 25 bp, Homo sapien
tttccatggatgaggccttgctgat

SEQ ID NO: 650415 - DNA, 25 bp, Homo sapien
catggatgaggccttgctgatgctc

SEQ ID NO: 650416 - DNA, 25 bp, Homo sapien
gctccttggataggacccgtgtgca

SEQ ID NO: 650417 - DNA, 25 bp, Homo sapien
ctgatgctccttggataggacccgt

SEQ ID NO: 650418 - DNA, 25 bp, Homo sapien
aatttggacccactgttgggctgga

SEQ ID NO: 650419 - DNA, 25 bp, Homo sapien
ataatttggacccactgttgggctg

SEQ ID NO: 650420 - DNA, 25 bp, Homo sapien
tttggacccactgttgggctggaaa

SEQ ID NO: 650421 - DNA, 25 bp, Homo sapien
tggacccactgttgggctggaaaag

SEQ ID NO: 650422 - DNA, 25 bp, Homo sapien
ggtctacatgatcggtcccttcttc

SEQ ID NO: 650423 - DNA, 25 bp, Homo sapien
ggcttgtgcccacatagggtaactg

SEQ ID NO: 650424 - DNA, 25 bp, Homo sapien
tgttgctgaggtctacatgatcggt

SEQ ID NO: 650425 - DNA, 25 bp, Homo sapien
ttgtgcccacatagggtaactgtcc

SEQ ID NO: 650426 - DNA, 25 bp, Homo sapien
ggtttgtgggcttctatggcactgc

SEQ ID NO: 650427 - DNA, 25 bp, Homo sapien
ttctcccacatatccctgcataagg

SEQ ID NO: 650428 - DNA, 25 bp, Homo sapien
tgtcctcctggttgtgttcctgctg

SEQ ID NO: 650429 - DNA, 25 bp, Homo sapien
tatggcactgctcctgtgagggccc

SEQ ID NO: 650430 - DNA, 25 bp, Homo sapien
agggctatcttagtttccactgctg

SEQ ID NO: 650431 - DNA, 25 bp, Homo sapien
ttagggctatcttagtttccactgc

SEQ ID NO: 650432 - DNA, 25 bp, Homo sapien
tagggctatcttagtttccactgct

SEQ ID NO: 650433 - DNA, 25 bp, Homo sapien
tttagggctatcttagtttccactg

SEQ ID NO: 650434 - DNA, 25 bp, Homo sapien
agcaagaaggcgtacacgaggagct

SEQ ID NO: 650435 - DNA, 25 bp, Homo sapien
gaggagctcgactctgtagaaaggt

SEQ ID NO: 650436 - DNA, 25 bp, Homo sapien
ggcgtacacgaggagctcgactctg

SEQ ID NO: 650437 - DNA, 25 bp, Homo sapien
ttacaaaacgtccttcagagcaaga

SEQ ID NO: 650438 - DNA, 25 bp, Homo sapien
gctggtgttggattggggagcaaag

SEQ ID NO: 650439 - DNA, 25 bp, Homo sapien
tggtgttggattggggagcaaaggc

SEQ ID NO: 650440 - DNA, 25 bp, Homo sapien
gggctggtgttggattggggagcaa

SEQ ID NO: 650441 - DNA, 25 bp, Homo sapien
tgttggattggggagcaaaggccat

SEQ ID NO: 650442 - DNA, 25 bp, Homo sapien
cagcccttcggggcttcatgatctg

SEQ ID NO: 650443 - DNA, 25 bp, Homo sapien
ttcatgatctgctggggaatgtgtg

SEQ ID NO: 650444 - DNA, 25 bp, Homo sapien
tcagccatcggctctctctagagac

SEQ ID NO: 650445 - DNA, 25 bp, Homo sapien
tctagagacccaagggtgctggatg

SEQ ID NO: 650446 - DNA, 25 bp, Homo sapien
ttgggttccgcccttgcttgtgacg

SEQ ID NO: 650447 - DNA, 25 bp, Homo sapien
gcttgtgacggcgttcctggcctcg

SEQ ID NO: 650448 - DNA, 25 bp, Homo sapien
actacagctcccagtatgagagagg

SEQ ID NO: 650449 - DNA, 25 bp, Homo sapien
taatttgcagagcacaccgtgtgca

SEQ ID NO: 650450 - DNA, 25 bp, Homo sapien
tatgctcctcctacagaactacagc

SEQ ID NO: 650451 - DNA, 25 bp, Homo sapien
actgagatccaggttctgtgggttc

SEQ ID NO: 650452 - DNA, 25 bp, Homo sapien
tgtttccaagagaaatgcttcactg

SEQ ID NO: 650453 - DNA, 25 bp, Homo sapien
gggaatgtctcttactctgtctggg

SEQ ID NO: 650454 - DNA, 25 bp, Homo sapien
tagaaaccccgtgctatgggcacag

SEQ ID NO: 650455 - DNA, 25 bp, Homo sapien
gaaatcccatgctacaacaattgca

SEQ ID NO: 650456 - DNA, 25 bp, Homo sapien
gggtgctagaacactcatcgtggaa

SEQ ID NO: 650457 - DNA, 25 bp, Homo sapien
tctgagacggcctcgaaaaggggcc

SEQ ID NO: 650458 - DNA, 25 bp, Homo sapien
gaacactcatcgtggaaaattccgg

SEQ ID NO: 650459 - DNA, 25 bp, Homo sapien
gcccgtggcccatggttccatagca

SEQ ID NO: 650460 - DNA, 25 bp, Homo sapien
agaattctacatgcttcctctgtgg

SEQ ID NO: 650461 - DNA, 25 bp, Homo sapien
cacccttctagtgggagaattctac

SEQ ID NO: 650462 - DNA, 25 bp, Homo sapien
agtccacacaaaggcacaattctgg

SEQ ID NO: 650463 - DNA, 25 bp, Homo sapien
gtcagtgcgtgtgcacggcccacat

SEQ ID NO: 650464 - DNA, 25 bp, Homo sapien
atgaccaccagttgtggccatgggc

SEQ ID NO: 650465 - DNA, 25 bp, Homo sapien
cctgaaggtatcaggggtgagccat

SEQ ID NO: 650466 - DNA, 25 bp, Homo sapien
cctttgtccacatgaccaccagttg

SEQ ID NO: 650467 - DNA, 25 bp, Homo sapien
ggtgagccattcacagcaaagcaca

SEQ ID NO: 650468 - DNA, 25 bp, Homo sapien
agctgctgttggcagtccaggccat

SEQ ID NO: 650469 - DNA, 25 bp, Homo sapien
aagaattctagaaaccctctgctgg

SEQ ID NO: 650470 - DNA, 25 bp, Homo sapien
gctggggtgacatcgggaaagccca

SEQ ID NO: 650471 - DNA, 25 bp, Homo sapien
ggctggggtgacatcgggaaagccc

SEQ ID NO: 650472 - DNA, 25 bp, Homo sapien
attctagaaaccctctgctggggag

SEQ ID NO: 650473 - DNA, 25 bp, Homo sapien
tgctgcgtcccagaactgctgacgt

SEQ ID NO: 650474 - DNA, 25 bp, Homo sapien
tggctgctgcgtcccagaactgctg

SEQ ID NO: 650475 - DNA, 25 bp, Homo sapien
tcccagaactgctgacgtcacagtc

SEQ ID NO: 650476 - DNA, 25 bp, Homo sapien
gcgtcccagaactgctgacgtcaca

SEQ ID NO: 650477 - DNA, 25 bp, Homo sapien
gagtggagcctcctatgctgacctc

SEQ ID NO: 650478 - DNA, 25 bp, Homo sapien
gcccagtgtatgtccggttgctcag

SEQ ID NO: 650479 - DNA, 25 bp, Homo sapien
gcagagccccagttcttgtcgttca

SEQ ID NO: 650480 - DNA, 25 bp, Homo sapien
taacataagactcatgggcagtagt

SEQ ID NO: 650481 - DNA, 25 bp, Homo sapien
ggagaaagttcacggcagcagcact

SEQ ID NO: 650482 - DNA, 25 bp, Homo sapien
tgtgggagaaagttcacggcagcag

SEQ ID NO: 650483 - DNA, 25 bp, Homo sapien
tgggagaaagttcacggcagcagca

SEQ ID NO: 650484 - DNA, 25 bp, Homo sapien
gtgtgggagaaagttcacggcagca

SEQ ID NO: 650485 - DNA, 25 bp, Homo sapien
gtcccagaggcgaagaagactgctt

SEQ ID NO: 650486 - DNA, 25 bp, Homo sapien
ccgagtgtcccagaggcgaagaaga

SEQ ID NO: 650487 - DNA, 25 bp, Homo sapien
tgaaagctcttgacactagcagaca

SEQ ID NO: 650488 - DNA, 25 bp, Homo sapien
tcttgacactagcagacattaaatc

SEQ ID NO: 650489 - DNA, 25 bp, Homo sapien
cagccgacaggggtacccggcccag

SEQ ID NO: 650490 - DNA, 25 bp, Homo sapien
caggggaatgcccagcccttgggac

SEQ ID NO: 650491 - DNA, 25 bp, Homo sapien
ggcctggactcctagcagaggctca

SEQ ID NO: 650492 - DNA, 25 bp, Homo sapien
cccaggggaatgcccagcccttggg

SEQ ID NO: 650493 - DNA, 25 bp, Homo sapien
actgagaacttaaaaacgtcctcat

SEQ ID NO: 650494 - DNA, 25 bp, Homo sapien
taaatgctaataacagcctgaaggc

SEQ ID NO: 650495 - DNA, 25 bp, Homo sapien
aaatgctaataacagcctgaaggct

SEQ ID NO: 650496 - DNA, 25 bp, Homo sapien
cctctccttgcagaaccaaattgtt

SEQ ID NO: 650497 - DNA, 25 bp, Homo sapien
ctccttgcagaaccaaattgttatg

SEQ ID NO: 650498 - DNA, 25 bp, Homo sapien
tggctgacagcacggactgtctttg

SEQ ID NO: 650499 - DNA, 25 bp, Homo sapien
tgttatgtctaattctcggttgact

SEQ ID NO: 650500 - DNA, 25 bp, Homo sapien
ggcagtccctgcatcgagtcatggt

SEQ ID NO: 650501 - DNA, 25 bp, Homo sapien
agtccctgcatcgagtcatggtggc

SEQ ID NO: 650502 - DNA, 25 bp, Homo sapien
cagtccctgcatcgagtcatggtgg

SEQ ID NO: 650503 - DNA, 25 bp, Homo sapien
tccctgcatcgagtcatggtggccc

SEQ ID NO: 650504 - DNA, 25 bp, Homo sapien
ggatttctctgcagatccggagcag

SEQ ID NO: 650505 - DNA, 25 bp, Homo sapien
agcccatttgcgatcatgacctacg

SEQ ID NO: 650506 - DNA, 25 bp, Homo sapien
cagaatcccgggagggctgtgaaac

SEQ ID NO: 650507 - DNA, 25 bp, Homo sapien
cactctttagcatggatcagaatcc

SEQ ID NO: 650508 - DNA, 25 bp, Homo sapien
cctagcgaccagaccaaggttgggt

SEQ ID NO: 650509 - DNA, 25 bp, Homo sapien
gaagcttgttgttactccattcagt

SEQ ID NO: 650510 - DNA, 25 bp, Homo sapien
ctcccgctttgagacccaggctctc

SEQ ID NO: 650511 - DNA, 25 bp, Homo sapien
tgagaactgccctcacctgaagaga

SEQ ID NO: 650512 - DNA, 25 bp, Homo sapien
gaaagttcagacattgggagtagtg

SEQ ID NO: 650513 - DNA, 25 bp, Homo sapien
tagtgagctaaatgctcatcttagg

SEQ ID NO: 650514 - DNA, 25 bp, Homo sapien
gctgttgtctaaagatggtaactga

SEQ ID NO: 650515 - DNA, 25 bp, Homo sapien
atcagcgactgctgtcagaagagga

SEQ ID NO: 650516 - DNA, 25 bp, Homo sapien
ttctagattgacatggtcaccttgg

SEQ ID NO: 650517 - DNA, 25 bp, Homo sapien
ttgtgcttctgcacacgtcccagcc

SEQ ID NO: 650518 - DNA, 25 bp, Homo sapien
gcctgctggagacttcccatccaaa

SEQ ID NO: 650519 - DNA, 25 bp, Homo sapien
ttctctgtcccgtgcaacccatggt

SEQ ID NO: 650520 - DNA, 25 bp, Homo sapien
ccaacttcagtgacactaacgttaa

SEQ ID NO: 650521 - DNA, 25 bp, Homo sapien
cttcagtgacactaacgttaataag

SEQ ID NO: 650522 - DNA, 25 bp, Homo sapien
caacttcagtgacactaacgttaat

SEQ ID NO: 650523 - DNA, 25 bp, Homo sapien
taccaacttcagtgacactaacgtt

SEQ ID NO: 650524 - DNA, 25 bp, Homo sapien
gctgtggacttgtggcctcgttaag

SEQ ID NO: 650525 - DNA, 25 bp, Homo sapien
gagactgtaacaagatcctggcagg

SEQ ID NO: 650526 - DNA, 25 bp, Homo sapien
cctgtcttcataatgcaacaccctg

SEQ ID NO: 650527 - DNA, 25 bp, Homo sapien
tatctcaatggaagccattgtctcc

SEQ ID NO: 650528 - DNA, 25 bp, Homo sapien
tgaccaggtcatcatagatattgcg

SEQ ID NO: 650529 - DNA, 25 bp, Homo sapien
gaatcactcacgatggcgagagtca

SEQ ID NO: 650530 - DNA, 25 bp, Homo sapien
tggaaatgacagactgtgaccaggt

SEQ ID NO: 650531 - DNA, 25 bp, Homo sapien
cctgtgcaggcgtccagaaggtgaa

SEQ ID NO: 650532 - DNA, 25 bp, Homo sapien
cgaggctcatggagtaccccagtga

SEQ ID NO: 650533 - DNA, 25 bp, Homo sapien
caatctgggctgtctcagtgagccg

SEQ ID NO: 650534 - DNA, 25 bp, Homo sapien
ggttcagggagaccaacgctattgg

SEQ ID NO: 650535 - DNA, 25 bp, Homo sapien
tccatgggattcaagcaggctaatc

SEQ ID NO: 650536 - DNA, 25 bp, Homo sapien
ggtcgaactctcacagctcccagag

SEQ ID NO: 650537 - DNA, 25 bp, Homo sapien
ttctgggtcgaactctcacagctcc

SEQ ID NO: 650538 - DNA, 25 bp, Homo sapien
cacctttctgggtcgaactctcaca

SEQ ID NO: 650539 - DNA, 25 bp, Homo sapien
cagcaccaaaagggacccgtcgctt

SEQ ID NO: 650540 - DNA, 25 bp, Homo sapien
catgggaattggtgaagtgaataaa

SEQ ID NO: 650541 - DNA, 25 bp, Homo sapien
atgggaattggtgaagtgaataaag

SEQ ID NO: 650542 - DNA, 25 bp, Homo sapien
tgggaattggtgaagtgaataaagc

SEQ ID NO: 650543 - DNA, 25 bp, Homo sapien
gggaattggtgaagtgaataaagca

SEQ ID NO: 650544 - DNA, 25 bp, Homo sapien
tcttactgtcagtttagccaagatt

SEQ ID NO: 650545 - DNA, 25 bp, Homo sapien
tgaggatgcagtagcctcccatctg

SEQ ID NO: 650546 - DNA, 25 bp, Homo sapien
tctgcgaagtcaatgaccactcctc

SEQ ID NO: 650547 - DNA, 25 bp, Homo sapien
ggtcttgctcatcttactgtcagtt

SEQ ID NO: 650548 - DNA, 25 bp, Homo sapien
gtgcaaccaagcatcggcgatgcct

SEQ ID NO: 650549 - DNA, 25 bp, Homo sapien
cgtgactttgcccttgatatgcttg

SEQ ID NO: 650550 - DNA, 25 bp, Homo sapien
tggccagggcggctcttttcacgtg

SEQ ID NO: 650551 - DNA, 25 bp, Homo sapien
tcttttcacgtgactttgcccttga

SEQ ID NO: 650552 - DNA, 25 bp, Homo sapien
gggctccgcctggttttaactgctc

SEQ ID NO: 650553 - DNA, 25 bp, Homo sapien
cataagccgtaaaagacagcagagt

SEQ ID NO: 650554 - DNA, 25 bp, Homo sapien
tctagcccgtagttgatatcaagca

SEQ ID NO: 650555 - DNA, 25 bp, Homo sapien
taagttttgagcataatctagcccg

SEQ ID NO: 650556 - DNA, 25 bp, Homo sapien
tcaggatgaggagcctatccacggg

SEQ ID NO: 650557 - DNA, 25 bp, Homo sapien
tatccacgggatcagttgctggtgt

SEQ ID NO: 650558 - DNA, 25 bp, Homo sapien
ttcaacagcgcgttcagtggatccc

SEQ ID NO: 650559 - DNA, 25 bp, Homo sapien
tagcctctgacggtgccacggctgg

SEQ ID NO: 650560 - DNA, 25 bp, Homo sapien
tcatgtcgtggattccagaccccgg

SEQ ID NO: 650561 - DNA, 25 bp, Homo sapien
catatgtgcagtcttcatgtcgtgg

SEQ ID NO: 650562 - DNA, 25 bp, Homo sapien
ccccaccttctcatatgtgcagtct

SEQ ID NO: 650563 - DNA, 25 bp, Homo sapien
tggctgctgtcacgttccccaccaa

SEQ ID NO: 650564 - DNA, 25 bp, Homo sapien
ttagctataagctgataatctgagc

SEQ ID NO: 650565 - DNA, 25 bp, Homo sapien
cggaaatcgcccttcacagagctga

SEQ ID NO: 650566 - DNA, 25 bp, Homo sapien
gaaagcggatggtgcaaggtttcct

SEQ ID NO: 650567 - DNA, 25 bp, Homo sapien
taagctgataatctgagcagctctg

SEQ ID NO: 650568 - DNA, 25 bp, Homo sapien
tggcacctccctgacaatcatgggt

SEQ ID NO: 650569 - DNA, 25 bp, Homo sapien
taccagtggagtaacagggcaaaac

SEQ ID NO: 650570 - DNA, 25 bp, Homo sapien
ccagaaggctaatgtgtcctacacc

SEQ ID NO: 650571 - DNA, 25 bp, Homo sapien
tgttaccgacctcaagtagctgaat

SEQ ID NO: 650572 - DNA, 25 bp, Homo sapien
gaagctaatatatcttccgtggtaa

SEQ ID NO: 650573 - DNA, 25 bp, Homo sapien
tgaagctaatatatcttccgtggta

SEQ ID NO: 650574 - DNA, 25 bp, Homo sapien
ttgaagctaatatatcttccgtggt

SEQ ID NO: 650575 - DNA, 25 bp, Homo sapien
tcagttattcttgaacaagtcaata

SEQ ID NO: 650576 - DNA, 25 bp, Homo sapien
cagttattcttgaacaagtcaatac

SEQ ID NO: 650577 - DNA, 25 bp, Homo sapien
gttattcttgaacaagtcaatacag

SEQ ID NO: 650578 - DNA, 25 bp, Homo sapien
tattcttgaacaagtcaatacagct

SEQ ID NO: 650579 - DNA, 25 bp, Homo sapien
gccatatacctggaatgactcaagt

SEQ ID NO: 650580 - DNA, 25 bp, Homo sapien
caccaacacggcttttcacgggagg

SEQ ID NO: 650581 - DNA, 25 bp, Homo sapien
ggaaaaaaggcaaggcagaccagtg

SEQ ID NO: 650582 - DNA, 25 bp, Homo sapien
tcacgggaggtttaaagtcagccag

SEQ ID NO: 650583 - DNA, 25 bp, Homo sapien
tgagtggctcccatcaactaagtac

SEQ ID NO: 650584 - DNA, 25 bp, Homo sapien
tcagtgcgttgttccatgaaggcaa

SEQ ID NO: 650585 - DNA, 25 bp, Homo sapien
tccctcagtgggtaaggctaccagc

SEQ ID NO: 650586 - DNA, 25 bp, Homo sapien
ctacagacgattaataccacaaggc

SEQ ID NO: 650587 - DNA, 25 bp, Homo sapien
ttccagttcagacatttcaattaga

SEQ ID NO: 650588 - DNA, 25 bp, Homo sapien
cagttcagacatttcaattagattc

SEQ ID NO: 650589 - DNA, 25 bp, Homo sapien
gattctttctaaatgctgccactct

SEQ ID NO: 650590 - DNA, 25 bp, Homo sapien
actctcttccgtttgaaatttatca

SEQ ID NO: 650591 - DNA, 25 bp, Homo sapien
cagcagcttatgacttggagaacac

SEQ ID NO: 650592 - DNA, 25 bp, Homo sapien
ggttcatgcaaacaacgttcagcag

SEQ ID NO: 650593 - DNA, 25 bp, Homo sapien
gaactcttctacaccgttgctggga

SEQ ID NO: 650594 - DNA, 25 bp, Homo sapien
tggagaacacgttgatgagcagcct

SEQ ID NO: 650595 - DNA, 25 bp, Homo sapien
gtgatccctgaaacctgcatgtgtg

SEQ ID NO: 650596 - DNA, 25 bp, Homo sapien
cagagataccccgaaacgatgagca

SEQ ID NO: 650597 - DNA, 25 bp, Homo sapien
gaaggctgcagctaaactcaaggaa

SEQ ID NO: 650598 - DNA, 25 bp, Homo sapien
tatcctgggtgaagataagctccct

SEQ ID NO: 650599 - DNA, 25 bp, Homo sapien
tgccaggagcccataaccagatcta

SEQ ID NO: 650600 - DNA, 25 bp, Homo sapien
ttgtaagcacgcaaagccatgagga

SEQ ID NO: 650601 - DNA, 25 bp, Homo sapien
accaggtgtgtaacgtttgtaagca

SEQ ID NO: 650602 - DNA, 25 bp, Homo sapien
tagctaagacaaccagatgcaatcc

SEQ ID NO: 650603 - DNA, 25 bp, Homo sapien
ctttggtgcgtctgtataagagatc

SEQ ID NO: 650604 - DNA, 25 bp, Homo sapien
cggaaagttgttcaaatttctggca

SEQ ID NO: 650605 - DNA, 25 bp, Homo sapien
cttgacgtctttgctctttaaccgg

SEQ ID NO: 650606 - DNA, 25 bp, Homo sapien
agttctcatagtcaatgagggcttt

SEQ ID NO: 650607 - DNA, 25 bp, Homo sapien
cagtctaaaaaatagcccaagtgcc

SEQ ID NO: 650608 - DNA, 25 bp, Homo sapien
caagtgccaatgtaccacctgagat

SEQ ID NO: 650609 - DNA, 25 bp, Homo sapien
tttttaaatctccagcttcgcaggg

SEQ ID NO: 650610 - DNA, 25 bp, Homo sapien
tagtggcaataatctacctctacac

SEQ ID NO: 650611 - DNA, 25 bp, Homo sapien
catctgatgaaactcgaccctctac

SEQ ID NO: 650612 - DNA, 25 bp, Homo sapien
ttcaatgttgagcatgtagtatcgg

SEQ ID NO: 650613 - DNA, 25 bp, Homo sapien
tgtagtatcggaggagctctgttag

SEQ ID NO: 650614 - DNA, 25 bp, Homo sapien
ctgatgaaactcgaccctctacttt

SEQ ID NO: 650615 - DNA, 25 bp, Homo sapien
atagctcagcaaccttcaataggta

SEQ ID NO: 650616 - DNA, 25 bp, Homo sapien
ccttagtttttcaaatagctcagca

SEQ ID NO: 650617 - DNA, 25 bp, Homo sapien
tagtttttcaaatagctcagcaacc

SEQ ID NO: 650618 - DNA, 25 bp, Homo sapien
tagctcagcaaccttcaataggtac

SEQ ID NO: 650619 - DNA, 25 bp, Homo sapien
aaattgcaagcaccaattgccaggg

SEQ ID NO: 650620 - DNA, 25 bp, Homo sapien
atttgtttacatatagaagagccca

SEQ ID NO: 650621 - DNA, 25 bp, Homo sapien
tgtcttacaagtgtcttatgtccag

SEQ ID NO: 650622 - DNA, 25 bp, Homo sapien
agtgtgacagaaactactgctttga

SEQ ID NO: 650623 - DNA, 25 bp, Homo sapien
ctgcggtgtggatatagtcatcggc

SEQ ID NO: 650624 - DNA, 25 bp, Homo sapien
ggtgtggatatagtcatcggcaaca

SEQ ID NO: 650625 - DNA, 25 bp, Homo sapien
tgtgggctcttctaaagccaggcta

SEQ ID NO: 650626 - DNA, 25 bp, Homo sapien
ccaggctatgtaagcaggctgcggt

SEQ ID NO: 650627 - DNA, 25 bp, Homo sapien
aagtctttttatccaaacacagcca

SEQ ID NO: 650628 - DNA, 25 bp, Homo sapien
agcaaagctctgactagcggtaaat

SEQ ID NO: 650629 - DNA, 25 bp, Homo sapien
ggacaagtctttttatccaaacaca

SEQ ID NO: 650630 - DNA, 25 bp, Homo sapien
ctgactagcggtaaatgatatttac

SEQ ID NO: 650631 - DNA, 25 bp, Homo sapien
tcttgctcaaagaagtcatctacct

SEQ ID NO: 650632 - DNA, 25 bp, Homo sapien
tttgtcagctttcacacaagaatct

SEQ ID NO: 650633 - DNA, 25 bp, Homo sapien
ttatgagatctggtcattttgtcag

SEQ ID NO: 650634 - DNA, 25 bp, Homo sapien
cctattgtaatagttaataaggaag

SEQ ID NO: 650635 - DNA, 25 bp, Homo sapien
caagtccgagtttcctaatttctga

SEQ ID NO: 650636 - DNA, 25 bp, Homo sapien
tggcaaagccagataccagacagta

SEQ ID NO: 650637 - DNA, 25 bp, Homo sapien
gcccgagaagtagtaaagtaaatca

SEQ ID NO: 650638 - DNA, 25 bp, Homo sapien
tctacttagcacctgtattctgggc

SEQ ID NO: 650639 - DNA, 25 bp, Homo sapien
tatcacctgtagttggtgaccaaac

SEQ ID NO: 650640 - DNA, 25 bp, Homo sapien
tgtgctaacgccttgaaatccagta

SEQ ID NO: 650641 - DNA, 25 bp, Homo sapien
ttagttgtgccagctaggttgcatg

SEQ ID NO: 650642 - DNA, 25 bp, Homo sapien
ccaagtgtggaaaggttcaagttgc

SEQ ID NO: 650643 - DNA, 25 bp, Homo sapien
aggtcacctattcccgatgaagtaa

SEQ ID NO: 650644 - DNA, 25 bp, Homo sapien
aaaaggtcacctattcccgatgaag

SEQ ID NO: 650645 - DNA, 25 bp, Homo sapien
aaaggtcacctattcccgatgaagt

SEQ ID NO: 650646 - DNA, 25 bp, Homo sapien
tcacctattcccgatgaagtaaaaa

SEQ ID NO: 650647 - DNA, 25 bp, Homo sapien
gacttcatcagcacttttcaccaca

SEQ ID NO: 650648 - DNA, 25 bp, Homo sapien
aaggacttcatcagcacttttcacc

SEQ ID NO: 650649 - DNA, 25 bp, Homo sapien
taactccagtaaaaaggacttcatc

SEQ ID NO: 650650 - DNA, 25 bp, Homo sapien
tttgaagaagccaccaaacatctct

SEQ ID NO: 650651 - DNA, 25 bp, Homo sapien
agaagaaagccgctgaagaaagact

SEQ ID NO: 650652 - DNA, 25 bp, Homo sapien
ccatcaaagtcgggcttcgtaggag

SEQ ID NO: 650653 - DNA, 25 bp, Homo sapien
tcaaagtcgggcttcgtaggagcag

SEQ ID NO: 650654 - DNA, 25 bp, Homo sapien
gaccatcaaagtcgggcttcgtagg

SEQ ID NO: 650655 - DNA, 25 bp, Homo sapien
ggaccatcaaagtcgggcttcgtag

SEQ ID NO: 650656 - DNA, 25 bp, Homo sapien
tcccagcagcgatgttttctagttg

SEQ ID NO: 650657 - DNA, 25 bp, Homo sapien
tgctggtccacaggagacaaccact

SEQ ID NO: 650658 - DNA, 25 bp, Homo sapien
gaactcatgagcctcttgtcccagc

SEQ ID NO: 650659 - DNA, 25 bp, Homo sapien
ggtgcctcattctactcttgctggt

SEQ ID NO: 650660 - DNA, 25 bp, Homo sapien
ataagagtgtcatgtagccacacaa

SEQ ID NO: 650661 - DNA, 25 bp, Homo sapien
tcaataagagtgtcatgtagccaca

SEQ ID NO: 650662 - DNA, 25 bp, Homo sapien
caataagagtgtcatgtagccacac

SEQ ID NO: 650663 - DNA, 25 bp, Homo sapien
gtttcaataagagtgtcatgtagcc

SEQ ID NO: 650664 - DNA, 25 bp, Homo sapien
tgtgtgcactgtaaatttgactttg

SEQ ID NO: 650665 - DNA, 25 bp, Homo sapien
cattcaggtccacagatacagatct

SEQ ID NO: 650666 - DNA, 25 bp, Homo sapien
gtctctctcactgagcgcatcaggt

SEQ ID NO: 650667 - DNA, 25 bp, Homo sapien
caggtatgtcaatctgaagcgaggg

SEQ ID NO: 650668 - DNA, 25 bp, Homo sapien
ggatgtaatcaagtaaatggagctc

SEQ ID NO: 650669 - DNA, 25 bp, Homo sapien
catttgtgcaccacagttaaagctg

SEQ ID NO: 650670 - DNA, 25 bp, Homo sapien
caatggatgctaccagctgctttag

SEQ ID NO: 650671 - DNA, 25 bp, Homo sapien
cttggaattcgaataggaggaccca

SEQ ID NO: 650672 - DNA, 25 bp, Homo sapien
ccacagcatatcaaacatccgaggt

SEQ ID NO: 650673 - DNA, 25 bp, Homo sapien
ggttatgagtgactgcaaccacagc

SEQ ID NO: 650674 - DNA, 25 bp, Homo sapien
catccgaggttcactagcagccatt

SEQ ID NO: 650675 - DNA, 25 bp, Homo sapien
tgcccagacatttcgccctaggaag

SEQ ID NO: 650676 - DNA, 25 bp, Homo sapien
gcaggctttagaaccaagtccagcc

SEQ ID NO: 650677 - DNA, 25 bp, Homo sapien
aacaaagcaggctttagaaccaagt

SEQ ID NO: 650678 - DNA, 25 bp, Homo sapien
ggctttagaaccaagtccagccttg

SEQ ID NO: 650679 - DNA, 25 bp, Homo sapien
caaagcaggctttagaaccaagtcc

SEQ ID NO: 650680 - DNA, 25 bp, Homo sapien
cgcagtgcttttggtaagagagcca

SEQ ID NO: 650681 - DNA, 25 bp, Homo sapien
aaagtagttacggaatccctgtgca

SEQ ID NO: 650682 - DNA, 25 bp, Homo sapien
ttcacggtaaacaagcacggcttca

SEQ ID NO: 650683 - DNA, 25 bp, Homo sapien
gagagccaaggcacttccctaaaag

SEQ ID NO: 650684 - DNA, 25 bp, Homo sapien
gcaagagggccaatatgacaaatca

SEQ ID NO: 650685 - DNA, 25 bp, Homo sapien
catggatacaatatgcagtgctagc

SEQ ID NO: 650686 - DNA, 25 bp, Homo sapien
tattaaagctactcaggcatcggct

SEQ ID NO: 650687 - DNA, 25 bp, Homo sapien
gaaagatatccacaccttgcctagt

SEQ ID NO: 650688 - DNA, 25 bp, Homo sapien
aggctgcccgctttttggttggaca

SEQ ID NO: 650689 - DNA, 25 bp, Homo sapien
cagcacaatgtcctagctctgcggt

SEQ ID NO: 650690 - DNA, 25 bp, Homo sapien
tgactagaatgcttaggagtgtgcc

SEQ ID NO: 650691 - DNA, 25 bp, Homo sapien
gctctgcggtgctcttgaaagaaaa

SEQ ID NO: 650692 - DNA, 25 bp, Homo sapien
cctgaactattttctgaggaagaag

SEQ ID NO: 650693 - DNA, 25 bp, Homo sapien
accagtaaatagaggaccagttagg

SEQ ID NO: 650694 - DNA, 25 bp, Homo sapien
gttaggaaccaaattaaccatgcat

SEQ ID NO: 650695 - DNA, 25 bp, Homo sapien
cactaggctgcgaaggtcgagttca

SEQ ID NO: 650696 - DNA, 25 bp, Homo sapien
catgcatcgcaaagctaccgaggca

SEQ ID NO: 650697 - DNA, 25 bp, Homo sapien
ccaatgaaaaagagtggaggctcgt

SEQ ID NO: 650698 - DNA, 25 bp, Homo sapien
gaaatgtgtaagttaagacggctcc

SEQ ID NO: 650699 - DNA, 25 bp, Homo sapien
aacaagtttctctatggaggtgcct

SEQ ID NO: 650700 - DNA, 25 bp, Homo sapien
cagcatgttcggacgcttgatgcaa

SEQ ID NO: 650701 - DNA, 25 bp, Homo sapien
gacagtttacatcaatgggcaagac

SEQ ID NO: 650702 - DNA, 25 bp, Homo sapien
ttttagacctcaagatacacgtgac

SEQ ID NO: 650703 - DNA, 25 bp, Homo sapien
tacacgtgacctagggacagtttac

SEQ ID NO: 650704 - DNA, 25 bp, Homo sapien
taaggtcccgcgtctctggttctgt

SEQ ID NO: 650705 - DNA, 25 bp, Homo sapien
gggtctcacgggtgcttcccgcgct

SEQ ID NO: 650706 - DNA, 25 bp, Homo sapien
tgtcctaatagaatccgggacatcc

SEQ ID NO: 650707 - DNA, 25 bp, Homo sapien
ggtctccagagatcatctctccaag

SEQ ID NO: 650708 - DNA, 25 bp, Homo sapien
agaatgcagcgaccccggagctcgc

SEQ ID NO: 650709 - DNA, 25 bp, Homo sapien
aagaatgcagcgaccccggagctcg

SEQ ID NO: 650710 - DNA, 25 bp, Homo sapien
ctatggacgcgcaagggaaagaatg

SEQ ID NO: 650711 - DNA, 25 bp, Homo sapien
cgcgcaagggaaagaatgcagcgac

SEQ ID NO: 650712 - DNA, 25 bp, Homo sapien
gctgcagcaactcgggaaccgcggc

SEQ ID NO: 650713 - DNA, 25 bp, Homo sapien
gcagcaactcgggaaccgcggccat

SEQ ID NO: 650714 - DNA, 25 bp, Homo sapien
ctgctgctgcagcaactcgggaacc

SEQ ID NO: 650715 - DNA, 25 bp, Homo sapien
ctgctgcagcaactcgggaaccgcg

SEQ ID NO: 650716 - DNA, 25 bp, Homo sapien
gcgacgcgggactcgagcaggggcc

SEQ ID NO: 650717 - DNA, 25 bp, Homo sapien
ggcgacgcgggactcgagcaggggc

SEQ ID NO: 650718 - DNA, 25 bp, Homo sapien
cgacgcgggactcgagcaggggccg

SEQ ID NO: 650719 - DNA, 25 bp, Homo sapien
gtgcgaggaaagaagaagctgggcc

SEQ ID NO: 650720 - DNA, 25 bp, Homo sapien
ggaggcctccggactccgccaccat

SEQ ID NO: 650721 - DNA, 25 bp, Homo sapien
ctgtgcgaggaaagaagaagctggg

SEQ ID NO: 650722 - DNA, 25 bp, Homo sapien
gcctccctgcccgacggcggcagga

SEQ ID NO: 650723 - DNA, 25 bp, Homo sapien
ggcaaagacgccacgtggggcctac

SEQ ID NO: 650724 - DNA, 25 bp, Homo sapien
ctgccgtccatcttggagccgggca

SEQ ID NO: 650725 - DNA, 25 bp, Homo sapien
aggcgagcagggcgccacgtgctcc

SEQ ID NO: 650726 - DNA, 25 bp, Homo sapien
gtccccgctgccgtccatcttggag

SEQ ID NO: 650727 - DNA, 25 bp, Homo sapien
ccgcgacacggacgggaagcaacgg

SEQ ID NO: 650728 - DNA, 25 bp, Homo sapien
gcagggccgcgacacggacgggaag

SEQ ID NO: 650729 - DNA, 25 bp, Homo sapien
agcaacggacactctcccagcaaga

SEQ ID NO: 650730 - DNA, 25 bp, Homo sapien
ttgctccgctccacgaggaggccgc

SEQ ID NO: 650731 - DNA, 25 bp, Homo sapien
tccaagatggcagcgagcgctgacg

SEQ ID NO: 650732 - DNA, 25 bp, Homo sapien
gatttggaggctcccgcgcttcgga

SEQ ID NO: 650733 - DNA, 25 bp, Homo sapien
gggaatttattactcagcccgagtc

SEQ ID NO: 650734 - DNA, 25 bp, Homo sapien
gcgctgacgtcaccagatctcgtga

SEQ ID NO: 650735 - DNA, 25 bp, Homo sapien
ggcaagtataaacccgaccaggata

SEQ ID NO: 650736 - DNA, 25 bp, Homo sapien
accgatagagtcctttgagagtcac

SEQ ID NO: 650737 - DNA, 25 bp, Homo sapien
tgaaagacagattgaaccgatagag

SEQ ID NO: 650738 - DNA, 25 bp, Homo sapien
tgcatgaggtgtaactgtctagagc

SEQ ID NO: 650739 - DNA, 25 bp, Homo sapien
tagtaactatttctggcgtgagtca

SEQ ID NO: 650740 - DNA, 25 bp, Homo sapien
catttaagttatacagttgctgcct

SEQ ID NO: 650741 - DNA, 25 bp, Homo sapien
tgctgccttaaaatagtagcctgct

SEQ ID NO: 650742 - DNA, 25 bp, Homo sapien
cagaggccagtttgaacatcacaat

SEQ ID NO: 650743 - DNA, 25 bp, Homo sapien
gcagtcagcaactgacagaagttcc

SEQ ID NO: 650744 - DNA, 25 bp, Homo sapien
caatgcagtcagcaactgacagaag

SEQ ID NO: 650745 - DNA, 25 bp, Homo sapien
tgcagtcagcaactgacagaagttc

SEQ ID NO: 650746 - DNA, 25 bp, Homo sapien
agtcagcaactgacagaagttccat

SEQ ID NO: 650747 - DNA, 25 bp, Homo sapien
tgcaggtcatacaggcactgcaggg

SEQ ID NO: 650748 - DNA, 25 bp, Homo sapien
caattcccacgttggtgcaggtcat

SEQ ID NO: 650749 - DNA, 25 bp, Homo sapien
gttaatgcgtcccaatcagcctcag

SEQ ID NO: 650750 - DNA, 25 bp, Homo sapien
cagcaggagagatggcaattcccac

SEQ ID NO: 650751 - DNA, 25 bp, Homo sapien
tggtgtacttggtaagtcagttacc

SEQ ID NO: 650752 - DNA, 25 bp, Homo sapien
catagcctggcgagccctggattaa

SEQ ID NO: 650753 - DNA, 25 bp, Homo sapien
tggtaagtcagttaccaagcagtca

SEQ ID NO: 650754 - DNA, 25 bp, Homo sapien
taccaagcagtcatagcctggcgag

SEQ ID NO: 650755 - DNA, 25 bp, Homo sapien
tacaggttagtgacaggtgcctggc

SEQ ID NO: 650756 - DNA, 25 bp, Homo sapien
caggttagtgacaggtgcctggcta

SEQ ID NO: 650757 - DNA, 25 bp, Homo sapien
gaaacagggtctcatatgctgccca

SEQ ID NO: 650758 - DNA, 25 bp, Homo sapien
ggattacaggttagtgacaggtgcc

SEQ ID NO: 650759 - DNA, 25 bp, Homo sapien
agccgccattgtcatcccggcccgt

SEQ ID NO: 650760 - DNA, 25 bp, Homo sapien
ccacaaagccgccattgtcatcccg

SEQ ID NO: 650761 - DNA, 25 bp, Homo sapien
aaagccgccattgtcatcccggccc

SEQ ID NO: 650762 - DNA, 25 bp, Homo sapien
acaaagccgccattgtcatcccggc

SEQ ID NO: 650763 - DNA, 25 bp, Homo sapien
ccagactgggcagccggtgcctggc

SEQ ID NO: 650764 - DNA, 25 bp, Homo sapien
ctgggcagccggtgcctggctaatt

SEQ ID NO: 650765 - DNA, 25 bp, Homo sapien
agactgggcagccggtgcctggcta

SEQ ID NO: 650766 - DNA, 25 bp, Homo sapien
actgggcagccggtgcctggctaat

SEQ ID NO: 650767 - DNA, 25 bp, Homo sapien
agttctcgcgctctccaggtaagtc

SEQ ID NO: 650768 - DNA, 25 bp, Homo sapien
gcagccagagtaagcccgttaaaaa

SEQ ID NO: 650769 - DNA, 25 bp, Homo sapien
aaaatggcctacagcagcagtccgt

SEQ ID NO: 650770 - DNA, 25 bp, Homo sapien
gaaaatactcggcagttcagaggaa

SEQ ID NO: 650771 - DNA, 25 bp, Homo sapien
tctctgtcctgcttctaacgtcact

SEQ ID NO: 650772 - DNA, 25 bp, Homo sapien
gcttctaacgtcacttgtgatgtga

SEQ ID NO: 650773 - DNA, 25 bp, Homo sapien
taacgtcacttgtgatgtgaccatg

SEQ ID NO: 650774 - DNA, 25 bp, Homo sapien
cacttgtgatgtgaccatgttcgtt

SEQ ID NO: 650775 - DNA, 25 bp, Homo sapien
ttttggaaagaaccactagatgtac

SEQ ID NO: 650776 - DNA, 25 bp, Homo sapien
gaagaaacagtggacagcaagaata

SEQ ID NO: 650777 - DNA, 25 bp, Homo sapien
ccactagatgtactattaaaagaaa

SEQ ID NO: 650778 - DNA, 25 bp, Homo sapien
tggaaagaaccactagatgtactat

SEQ ID NO: 650779 - DNA, 25 bp, Homo sapien
tgtagccagattctgtggaccgccg

SEQ ID NO: 650780 - DNA, 25 bp, Homo sapien
caagttaatagctcatgggtctcca

SEQ ID NO: 650781 - DNA, 25 bp, Homo sapien
tgctattgctgaaaatgcccggtgg

SEQ ID NO: 650782 - DNA, 25 bp, Homo sapien
taagggactcgtttgcagatatgac

SEQ ID NO: 650783 - DNA, 25 bp, Homo sapien
tgagagcaggacaggtaaacagagt

SEQ ID NO: 650784 - DNA, 25 bp, Homo sapien
gactttgcctgccatggtagagact

SEQ ID NO: 650785 - DNA, 25 bp, Homo sapien
gacacaatcatcatctcactgggtt

SEQ ID NO: 650786 - DNA, 25 bp, Homo sapien
agagtggacatcagttgactttgcc

SEQ ID NO: 650787 - DNA, 25 bp, Homo sapien
tccttgcctcggaattggcttctgg

SEQ ID NO: 650788 - DNA, 25 bp, Homo sapien
tttaatccttgcctcggaattggct

SEQ ID NO: 650789 - DNA, 25 bp, Homo sapien
taatccttgcctcggaattggcttc

SEQ ID NO: 650790 - DNA, 25 bp, Homo sapien
atccttgcctcggaattggcttctg

SEQ ID NO: 650791 - DNA, 25 bp, Homo sapien
cagtggtgtagctgacctgcgctct

SEQ ID NO: 650792 - DNA, 25 bp, Homo sapien
tgtcttaactagcatagccgcccaa

SEQ ID NO: 650793 - DNA, 25 bp, Homo sapien
tgcgctctctccactcaattcaggg

SEQ ID NO: 650794 - DNA, 25 bp, Homo sapien
taggcctgggctaagagagctgcac

SEQ ID NO: 650795 - DNA, 25 bp, Homo sapien
aacccggagcttcacatgaggcaga

SEQ ID NO: 650796 - DNA, 25 bp, Homo sapien
gactgttgagtgctacagcctcagc

SEQ ID NO: 650797 - DNA, 25 bp, Homo sapien
tgaaacttgccagttcaaacagcag

SEQ ID NO: 650798 - DNA, 25 bp, Homo sapien
acttgagtgccaggttcaaccccta

SEQ ID NO: 650799 - DNA, 25 bp, Homo sapien
ggtgtaggtgatgggatgttggcaa

SEQ ID NO: 650800 - DNA, 25 bp, Homo sapien
ggtgtaggtgatcaggatgtaggtg

SEQ ID NO: 650801 - DNA, 25 bp, Homo sapien
atggggtgtagacgatcagggtgta

SEQ ID NO: 650802 - DNA, 25 bp, Homo sapien
tcaaggtgattgaggtgtaggtgat

SEQ ID NO: 650803 - DNA, 25 bp, Homo sapien
ttctcatgctccagggttggccaca

SEQ ID NO: 650804 - DNA, 25 bp, Homo sapien
agcgcatcctaaccgcagaaagcca

SEQ ID NO: 650805 - DNA, 25 bp, Homo sapien
gaggagccagcatttctcatgctcc

SEQ ID NO: 650806 - DNA, 25 bp, Homo sapien
agagccttcggccagcgcatcctaa

SEQ ID NO: 650807 - DNA, 25 bp, Homo sapien
tcaaacccacacaactaatataaag

SEQ ID NO: 650808 - DNA, 25 bp, Homo sapien
tttaaaagcttcacaagaacatttc

SEQ ID NO: 650809 - DNA, 25 bp, Homo sapien
taatataaagtaatcaacctcccca

SEQ ID NO: 650810 - DNA, 25 bp, Homo sapien
cagagagctgtaggtcaatgttcca

SEQ ID NO: 650811 - DNA, 25 bp, Homo sapien
ttacagggcctgacgtcactaacgg

SEQ ID NO: 650812 - DNA, 25 bp, Homo sapien
tggaatggaccctactgctgatgtt

SEQ ID NO: 650813 - DNA, 25 bp, Homo sapien
cgtagacatacgtggcagtgtgaac

SEQ ID NO: 650814 - DNA, 25 bp, Homo sapien
gaaatacctctccttccgtgtgtga

SEQ ID NO: 650815 - DNA, 25 bp, Homo sapien
tttttgagaaacgagctgcccggat

SEQ ID NO: 650816 - DNA, 25 bp, Homo sapien
attctcctggtgtgcggatgtcagc

SEQ ID NO: 650817 - DNA, 25 bp, Homo sapien
ttctcctggtgtgcggatgtcagct

SEQ ID NO: 650818 - DNA, 25 bp, Homo sapien
agctgcccggatgggcactgttcac

SEQ ID NO: 650819 - DNA, 25 bp, Homo sapien
tgctgcaccccatggattttcttca

SEQ ID NO: 650820 - DNA, 25 bp, Homo sapien
tattgcagacgttgcatttgtaggg

SEQ ID NO: 650821 - DNA, 25 bp, Homo sapien
tgcttataggcatactgctgctgca

SEQ ID NO: 650822 - DNA, 25 bp, Homo sapien
tcctcgcagacgtagagcttgtccc

SEQ ID NO: 650823 - DNA, 25 bp, Homo sapien
tttgggctccaaacaaagacaccat

SEQ ID NO: 650824 - DNA, 25 bp, Homo sapien
aataaaacaatgaagcgagggtttg

SEQ ID NO: 650825 - DNA, 25 bp, Homo sapien
ggtggaggtgacttgactctttctt

SEQ ID NO: 650826 - DNA, 25 bp, Homo sapien
gaccaggcaattccgcatgacagca

SEQ ID NO: 650827 - DNA, 25 bp, Homo sapien
tttcacctggttgtggcacttgagg

SEQ ID NO: 650828 - DNA, 25 bp, Homo sapien
cacttgaggtgacggttcagcatgc

SEQ ID NO: 650829 - DNA, 25 bp, Homo sapien
gcggacgtgcctcttcaggtcgaag

SEQ ID NO: 650830 - DNA, 25 bp, Homo sapien
tgtgaaccaccgagtcgctgcacgt

SEQ ID NO: 650831 - DNA, 25 bp, Homo sapien
tggagctggaatgtagtcaaagggc

SEQ ID NO: 650832 - DNA, 25 bp, Homo sapien
ggctttcctatcacccacgcagttc

SEQ ID NO: 650833 - DNA, 25 bp, Homo sapien
gctttcctatcacccacgcagttca

SEQ ID NO: 650834 - DNA, 25 bp, Homo sapien
ctttcctatcacccacgcagttcat

SEQ ID NO: 650835 - DNA, 25 bp, Homo sapien
tgcaccgccgaagctagagaagtga

SEQ ID NO: 650836 - DNA, 25 bp, Homo sapien
caccagttacatgcactatcaggag

SEQ ID NO: 650837 - DNA, 25 bp, Homo sapien
gaattcagccccgagttaactgggc

SEQ ID NO: 650838 - DNA, 25 bp, Homo sapien
agcttcagctcctaggtggcccagt

SEQ ID NO: 650839 - DNA, 25 bp, Homo sapien
tctgtgttttccttcaaatgctatc

SEQ ID NO: 650840 - DNA, 25 bp, Homo sapien
agcatttttccagtatcccttttct

SEQ ID NO: 650841 - DNA, 25 bp, Homo sapien
aatccattccaagcatttttccagt

SEQ ID NO: 650842 - DNA, 25 bp, Homo sapien
cttcatcaagaatccattccaagca

SEQ ID NO: 650843 - DNA, 25 bp, Homo sapien
aggccagctgactttgaacctcacc

SEQ ID NO: 650844 - DNA, 25 bp, Homo sapien
tcacacttaccgctaagctgccggc

SEQ ID NO: 650845 - DNA, 25 bp, Homo sapien
gcctcaggccagctgactttgaacc

SEQ ID NO: 650846 - DNA, 25 bp, Homo sapien
gcccgcacggtttcggcagcttctt

SEQ ID NO: 650847 - DNA, 25 bp, Homo sapien
agcactcggcatcaggcggggccac

SEQ ID NO: 650848 - DNA, 25 bp, Homo sapien
ctgctggcggaaggcagtgatgcct

SEQ ID NO: 650849 - DNA, 25 bp, Homo sapien
ggcagtgatgcctgtgccttttcgg

SEQ ID NO: 650850 - DNA, 25 bp, Homo sapien
cctgtgccttttcggcagttccaga

SEQ ID NO: 650851 - DNA, 25 bp, Homo sapien
gcggcgggggcagagtcgacacagt

SEQ ID NO: 650852 - DNA, 25 bp, Homo sapien
cggcgggggcagagtcgacacagta

SEQ ID NO: 650853 - DNA, 25 bp, Homo sapien
ggcgggggcagagtcgacacagtac

SEQ ID NO: 650854 - DNA, 25 bp, Homo sapien
cttgattttcgatctggcgaccggg

SEQ ID NO: 650855 - DNA, 25 bp, Homo sapien
tgcttggtcgccaggtgtccatcgg

SEQ ID NO: 650856 - DNA, 25 bp, Homo sapien
cgaccgggcgctgcttggtcgccag

SEQ ID NO: 650857 - DNA, 25 bp, Homo sapien
tgattttcgatctggcgaccgggcg

SEQ ID NO: 650858 - DNA, 25 bp, Homo sapien
tcgggggggtcgtggagcaggcggc

SEQ ID NO: 650859 - DNA, 25 bp, Homo sapien
gggggtcgtggagcaggcggcctag

SEQ ID NO: 650860 - DNA, 25 bp, Homo sapien
cagtcctcgggggggtcgtggagca

SEQ ID NO: 650861 - DNA, 25 bp, Homo sapien
tcctcgggggggtcgtggagcaggc

SEQ ID NO: 650862 - DNA, 25 bp, Homo sapien
gaatcggcccacagagctagcttgg

SEQ ID NO: 650863 - DNA, 25 bp, Homo sapien
agccaaggcgcccacgaggaaccgg

SEQ ID NO: 650864 - DNA, 25 bp, Homo sapien
tgggcacctcgccaagtgggcaacg

SEQ ID NO: 650865 - DNA, 25 bp, Homo sapien
ggtgctcggagcctctttccggtcc

SEQ ID NO: 650866 - DNA, 25 bp, Homo sapien
gggaggcggatctgacctctcccca

SEQ ID NO: 650867 - DNA, 25 bp, Homo sapien
ggcgggggaggcggatctgacctct

SEQ ID NO: 650868 - DNA, 25 bp, Homo sapien
ggggaggcggatctgacctctcccc

SEQ ID NO: 650869 - DNA, 25 bp, Homo sapien
cgggggaggcggatctgacctctcc

SEQ ID NO: 650870 - DNA, 25 bp, Homo sapien
tgcagccaacggtcccgccgccggg

SEQ ID NO: 650871 - DNA, 25 bp, Homo sapien
gccgccgggcaattagaggctccca

SEQ ID NO: 650872 - DNA, 25 bp, Homo sapien
ccgccgccgggcaattagaggctcc

SEQ ID NO: 650873 - DNA, 25 bp, Homo sapien
gtcccgccgccgggcaattagaggc

SEQ ID NO: 650874 - DNA, 25 bp, Homo sapien
tcttcaccaggaagactttgggcat

SEQ ID NO: 650875 - DNA, 25 bp, Homo sapien
tttctcatccgggagctcatcccag

SEQ ID NO: 650876 - DNA, 25 bp, Homo sapien
gcccttttctcatccgggagctcat

SEQ ID NO: 650877 - DNA, 25 bp, Homo sapien
ctgggatgtaggtgtctgccctttt

SEQ ID NO: 650878 - DNA, 25 bp, Homo sapien
gcggccccctcctcccggctgctcc

SEQ ID NO: 650879 - DNA, 25 bp, Homo sapien
tgcggccccctcctcccggctgctc

SEQ ID NO: 650880 - DNA, 25 bp, Homo sapien
ctgcggccccctcctcccggctgct

SEQ ID NO: 650881 - DNA, 25 bp, Homo sapien
cggctcggcgacacctatgccttaa

SEQ ID NO: 650882 - DNA, 25 bp, Homo sapien
ttaaatcgcgagtgagaccacgccg

SEQ ID NO: 650883 - DNA, 25 bp, Homo sapien
gacacctatgccttaaatcgcgagt

SEQ ID NO: 650884 - DNA, 25 bp, Homo sapien
tatgccttaaatcgcgagtgagacc

SEQ ID NO: 650885 - DNA, 25 bp, Homo sapien
gccggggctgcctgttccagccctt

SEQ ID NO: 650886 - DNA, 25 bp, Homo sapien
cctgttccagcccttccttaggcat

SEQ ID NO: 650887 - DNA, 25 bp, Homo sapien
tgcctgttccagcccttccttaggc

SEQ ID NO: 650888 - DNA, 25 bp, Homo sapien
ggctgcctgttccagcccttcctta

SEQ ID NO: 650889 - DNA, 25 bp, Homo sapien
cagcttctcctcacaagacgttgca

SEQ ID NO: 650890 - DNA, 25 bp, Homo sapien
ggaaatacctttccaggaagctagc

SEQ ID NO: 650891 - DNA, 25 bp, Homo sapien
cctatcaacctttatgcctggaggg

SEQ ID NO: 650892 - DNA, 25 bp, Homo sapien
ggaagctagcatagtgaacattggc

SEQ ID NO: 650893 - DNA, 25 bp, Homo sapien
tccaggaggtcgtcagacgtgtgcc

SEQ ID NO: 650894 - DNA, 25 bp, Homo sapien
acgtgtgccagctgccgggtgctgc

SEQ ID NO: 650895 - DNA, 25 bp, Homo sapien
ggacaaccggcacagcctcttgtgt

SEQ ID NO: 650896 - DNA, 25 bp, Homo sapien
tcccaaggccttgttcgggtgcgcc

SEQ ID NO: 650897 - DNA, 25 bp, Homo sapien
ggaatcaacacagcggttttccctg

SEQ ID NO: 650898 - DNA, 25 bp, Homo sapien
atcaacacagcggttttccctgttc

SEQ ID NO: 650899 - DNA, 25 bp, Homo sapien
gaatcaacacagcggttttccctgt

SEQ ID NO: 650900 - DNA, 25 bp, Homo sapien
ccctgttcccttccgccctgaatgg

SEQ ID NO: 650901 - DNA, 25 bp, Homo sapien
ggctcctcagtctgtaaacacactt

SEQ ID NO: 650902 - DNA, 25 bp, Homo sapien
tgtcttctccacaccaacgagctct

SEQ ID NO: 650903 - DNA, 25 bp, Homo sapien
ccaacgagctctgcatgctctgggc

SEQ ID NO: 650904 - DNA, 25 bp, Homo sapien
attttccaagaacaagatatcagtg

SEQ ID NO: 650905 - DNA, 25 bp, Homo sapien
agaaaagagtcacagtctttttctg

SEQ ID NO: 650906 - DNA, 25 bp, Homo sapien
ccatagaagggcacgaggaaagatg

SEQ ID NO: 650907 - DNA, 25 bp, Homo sapien
gtacgtggttaggagatggattctc

SEQ ID NO: 650908 - DNA, 25 bp, Homo sapien
catcattgatctccatagaagggca

SEQ ID NO: 650909 - DNA, 25 bp, Homo sapien
tggagctggagattatcacattttc

SEQ ID NO: 650910 - DNA, 25 bp, Homo sapien
ggagctggagattatcacattttct

SEQ ID NO: 650911 - DNA, 25 bp, Homo sapien
ctggagattatcacattttctccaa

SEQ ID NO: 650912 - DNA, 25 bp, Homo sapien
agctggagattatcacattttctcc

SEQ ID NO: 650913 - DNA, 25 bp, Homo sapien
ctgggcttgtagactgattggtgat

SEQ ID NO: 650914 - DNA, 25 bp, Homo sapien
ggcttgtagactgattggtgatcca

SEQ ID NO: 650915 - DNA, 25 bp, Homo sapien
ttcttctgacagcttaatggaatgc

SEQ ID NO: 650916 - DNA, 25 bp, Homo sapien
ctgacagcttaatggaatgcatcaa

SEQ ID NO: 650917 - DNA, 25 bp, Homo sapien
tcttctgacagcttaatggaatgca

SEQ ID NO: 650918 - DNA, 25 bp, Homo sapien
ttctgacagcttaatggaatgcatc

SEQ ID NO: 650919 - DNA, 25 bp, Homo sapien
gtccagcttgctcctctgcaatgga

SEQ ID NO: 650920 - DNA, 25 bp, Homo sapien
tggtgtccagcttgctcctctgcaa

SEQ ID NO: 650921 - DNA, 25 bp, Homo sapien
agtggtgtccagcttgctcctctgc

SEQ ID NO: 650922 - DNA, 25 bp, Homo sapien
ggtgtccagcttgctcctctgcaat

SEQ ID NO: 650923 - DNA, 25 bp, Homo sapien
atgttcaggcttgccgtaagttgca

SEQ ID NO: 650924 - DNA, 25 bp, Homo sapien
tgatgttcaggcttgccgtaagttg

SEQ ID NO: 650925 - DNA, 25 bp, Homo sapien
ccatgatgttcaggcttgccgtaag

SEQ ID NO: 650926 - DNA, 25 bp, Homo sapien
acaccatgatgttcaggcttgccgt

SEQ ID NO: 650927 - DNA, 25 bp, Homo sapien
catcaccgcacacatgaatcctata

SEQ ID NO: 650928 - DNA, 25 bp, Homo sapien
gtcggcgcactttatggggccaagt

SEQ ID NO: 650929 - DNA, 25 bp, Homo sapien
ggtgtttttggccatcaccgcacac

SEQ ID NO: 650930 - DNA, 25 bp, Homo sapien
tagccttgtagttcagtcggcgcac

SEQ ID NO: 650931 - DNA, 25 bp, Homo sapien
agcgcatgagatcagactgcttctc

SEQ ID NO: 650932 - DNA, 25 bp, Homo sapien
gagaagaaagcgcatgagatcagac

SEQ ID NO: 650933 - DNA, 25 bp, Homo sapien
gcatgagatcagactgcttctccct

SEQ ID NO: 650934 - DNA, 25 bp, Homo sapien
agatcagactgcttctccctccata

SEQ ID NO: 650935 - DNA, 25 bp, Homo sapien
tctgatccagctggactttgccgga

SEQ ID NO: 650936 - DNA, 25 bp, Homo sapien
tccagctggactttgccggaaagca

SEQ ID NO: 650937 - DNA, 25 bp, Homo sapien
ttgccggaaagcacatagacaactt

SEQ ID NO: 650938 - DNA, 25 bp, Homo sapien
tgccggaaagcacatagacaacttt

SEQ ID NO: 650939 - DNA, 25 bp, Homo sapien
gtctgtgaacaatcaatggagataa

SEQ ID NO: 650940 - DNA, 25 bp, Homo sapien
caagtgcagtggtgagaaggggaga

SEQ ID NO: 650941 - DNA, 25 bp, Homo sapien
gtaactgtctgtgaacaatcaatgg

SEQ ID NO: 650942 - DNA, 25 bp, Homo sapien
gcagtggtgagaaggggagaaagag

SEQ ID NO: 650943 - DNA, 25 bp, Homo sapien
ttgttactgagaagcactgccgagc

SEQ ID NO: 650944 - DNA, 25 bp, Homo sapien
gatagtagcatccacctgagtagtc

SEQ ID NO: 650945 - DNA, 25 bp, Homo sapien
tctgggtgatcctggtagaagcccc

SEQ ID NO: 650946 - DNA, 25 bp, Homo sapien
tggacttatcgcacgaccagagtgg

SEQ ID NO: 650947 - DNA, 25 bp, Homo sapien
gatgtgtcatacagatagaaggcag

SEQ ID NO: 650948 - DNA, 25 bp, Homo sapien
taaattgtaagatgtgtcatacaga

SEQ ID NO: 650949 - DNA, 25 bp, Homo sapien
tcttgtgggcctgtctgtttactgc

SEQ ID NO: 650950 - DNA, 25 bp, Homo sapien
tctgtttactgcctatacttaattt

SEQ ID NO: 650951 - DNA, 25 bp, Homo sapien
tcccaaccaaagtgagaaaagcggc

SEQ ID NO: 650952 - DNA, 25 bp, Homo sapien
cgcatgtgctattggagaacaggtc

SEQ ID NO: 650953 - DNA, 25 bp, Homo sapien
tgcgaatacagctcacagagaaacg

SEQ ID NO: 650954 - DNA, 25 bp, Homo sapien
tacccattggagagtacagagtgta

SEQ ID NO: 650955 - DNA, 25 bp, Homo sapien
tgaggactgagagtatactgacctc

SEQ ID NO: 650956 - DNA, 25 bp, Homo sapien
tttcctgccggctcccacagagagt

SEQ ID NO: 650957 - DNA, 25 bp, Homo sapien
tcagccctcgtgctttctttgtttc

SEQ ID NO: 650958 - DNA, 25 bp, Homo sapien
tctgacgagctgacaatacagagct

SEQ ID NO: 650959 - DNA, 25 bp, Homo sapien
aatcccactccaaacagcaagggag

SEQ ID NO: 650960 - DNA, 25 bp, Homo sapien
aggcccaatcccactccaaacagca

SEQ ID NO: 650961 - DNA, 25 bp, Homo sapien
tagtcacaggcccaatcccactcca

SEQ ID NO: 650962 - DNA, 25 bp, Homo sapien
cccaatcccactccaaacagcaagg

SEQ ID NO: 650963 - DNA, 25 bp, Homo sapien
gaacagattctacacttgaacttaa

SEQ ID NO: 650964 - DNA, 25 bp, Homo sapien
acatatcagcatattaaactggtaa

SEQ ID NO: 650965 - DNA, 25 bp, Homo sapien
tcagataaaggacatatcagcatat

SEQ ID NO: 650966 - DNA, 25 bp, Homo sapien
aggtactcaataccaggtccatgtg

SEQ ID NO: 650967 - DNA, 25 bp, Homo sapien
cgacatgacgttcgcccggtgttta

SEQ ID NO: 650968 - DNA, 25 bp, Homo sapien
cgtgactttccaagcaggcggctgg

SEQ ID NO: 650969 - DNA, 25 bp, Homo sapien
taaatggagctaaagggtatacgac

SEQ ID NO: 650970 - DNA, 25 bp, Homo sapien
tgaacaagcttggtcagccagcggt

SEQ ID NO: 650971 - DNA, 25 bp, Homo sapien
gaaacggatccgtcagaggccaatg

SEQ ID NO: 650972 - DNA, 25 bp, Homo sapien
gctgatgccataagtccccggtttt

SEQ ID NO: 650973 - DNA, 25 bp, Homo sapien
ttctgcgcgaaaaggaaggtcccga

SEQ ID NO: 650974 - DNA, 25 bp, Homo sapien
ggtgaagcccatccgtgaaactgga

SEQ ID NO: 650975 - DNA, 25 bp, Homo sapien
ctggatcaacactggtgatcaatgt

SEQ ID NO: 650976 - DNA, 25 bp, Homo sapien
tggatcaacactggtgatcaatgtg

SEQ ID NO: 650977 - DNA, 25 bp, Homo sapien
gaagactggtcctcccctatgtggg

SEQ ID NO: 650978 - DNA, 25 bp, Homo sapien
tggtcctcccctatgtgggatggtc

SEQ ID NO: 650979 - DNA, 25 bp, Homo sapien
taagcatatatagtgttgatggacg

SEQ ID NO: 650980 - DNA, 25 bp, Homo sapien
tattgcatgagaacactttgtatag

SEQ ID NO: 650981 - DNA, 25 bp, Homo sapien
cctaacagagatcttagaaattgaa

SEQ ID NO: 650982 - DNA, 25 bp, Homo sapien
gaggacagaaatacaccaagttata

SEQ ID NO: 650983 - DNA, 25 bp, Homo sapien
caggttagattgttggttcctctgt

SEQ ID NO: 650984 - DNA, 25 bp, Homo sapien
tcagtgaaagcaggtaggatttact

SEQ ID NO: 650985 - DNA, 25 bp, Homo sapien
tgtcctgaatacaagggctggaaga

SEQ ID NO: 650986 - DNA, 25 bp, Homo sapien
gcctgaggtaaaggccaccagagct

SEQ ID NO: 650987 - DNA, 25 bp, Homo sapien
tcagtgtgcatggttgtgagttaga

SEQ ID NO: 650988 - DNA, 25 bp, Homo sapien
ccttgtcctcatagggaaataagga

SEQ ID NO: 650989 - DNA, 25 bp, Homo sapien
aataactgctttctcaatccatccc

SEQ ID NO: 650990 - DNA, 25 bp, Homo sapien
gacatttccacatgagtcctagggt

SEQ ID NO: 650991 - DNA, 25 bp, Homo sapien
cagagctctacctcgatcctttctg

SEQ ID NO: 650992 - DNA, 25 bp, Homo sapien
agagctctacctcgatcctttctgc

SEQ ID NO: 650993 - DNA, 25 bp, Homo sapien
agccagagctctacctcgatccttt

SEQ ID NO: 650994 - DNA, 25 bp, Homo sapien
cagagccagagctctacctcgatcc

SEQ ID NO: 650995 - DNA, 25 bp, Homo sapien
ggagaagccctacatgtgcaggcag

SEQ ID NO: 650996 - DNA, 25 bp, Homo sapien
ctcatcaggcacaagcggaagcact

SEQ ID NO: 650997 - DNA, 25 bp, Homo sapien
cgtgtgcagggcaaccttcggattc

SEQ ID NO: 650998 - DNA, 25 bp, Homo sapien
tctaattacacacaagcgggctcac

SEQ ID NO: 650999 - DNA, 25 bp, Homo sapien
gatagggtggggtgtgcttccaggc

SEQ ID NO: 651000 - DNA, 25 bp, Homo sapien
tattctgagccgagtgaccgtggcc

SEQ ID NO: 651001 - DNA, 25 bp, Homo sapien
gtgccccaggtggtcagggcacggc

SEQ ID NO: 651002 - DNA, 25 bp, Homo sapien
tctggaagtcttatggtggctgccc

SEQ ID NO: 651003 - DNA, 25 bp, Homo sapien
cccgacttggtcaaatctgaagaaa

SEQ ID NO: 651004 - DNA, 25 bp, Homo sapien
ctacccgacttggtcaaatctgaag

SEQ ID NO: 651005 - DNA, 25 bp, Homo sapien
gatcatctctacccgacttggtcaa

SEQ ID NO: 651006 - DNA, 25 bp, Homo sapien
tcatctctacccgacttggtcaaat

SEQ ID NO: 651007 - DNA, 25 bp, Homo sapien
ctgaaagaactatggtggctgcccc

SEQ ID NO: 651008 - DNA, 25 bp, Homo sapien
tgaaatatcagcaggttgtcccagc

SEQ ID NO: 651009 - DNA, 25 bp, Homo sapien
tgccccgcagcgtagttcagtagct

SEQ ID NO: 651010 - DNA, 25 bp, Homo sapien
taatgcgggccttcataacaactgt

SEQ ID NO: 651011 - DNA, 25 bp, Homo sapien
tagacatatggcttagaagacatat

SEQ ID NO: 651012 - DNA, 25 bp, Homo sapien
ttggtctagcagtgttttccaggtc

SEQ ID NO: 651013 - DNA, 25 bp, Homo sapien
atggcttagaagacatataagctct

SEQ ID NO: 651014 - DNA, 25 bp, Homo sapien
attttgagttggtctagcagtgttt

SEQ ID NO: 651015 - DNA, 25 bp, Homo sapien
ctgatgtattgacttcggagtaata

SEQ ID NO: 651016 - DNA, 25 bp, Homo sapien
tgacttcggagtaatatggcctata

SEQ ID NO: 651017 - DNA, 25 bp, Homo sapien
gtagaatataagacttcataactgg

SEQ ID NO: 651018 - DNA, 25 bp, Homo sapien
gaatataagacttcataactggcta

SEQ ID NO: 651019 - DNA, 25 bp, Homo sapien
ccctctaggaatgggccatcccaat

SEQ ID NO: 651020 - DNA, 25 bp, Homo sapien
catcccaatcgtgagagatcagaca

SEQ ID NO: 651021 - DNA, 25 bp, Homo sapien
gatcagacaaatcctgagatcagag

SEQ ID NO: 651022 - DNA, 25 bp, Homo sapien
tgggccatcccaatcgtgagagatc

SEQ ID NO: 651023 - DNA, 25 bp, Homo sapien
caaccaaaatcctggaataaacatt

SEQ ID NO: 651024 - DNA, 25 bp, Homo sapien
tcaaccaaaatcctggaataaacat

SEQ ID NO: 651025 - DNA, 25 bp, Homo sapien
ggtgtttgtgctcttgcatccaagg

SEQ ID NO: 651026 - DNA, 25 bp, Homo sapien
ctccagaggaaaccttcacactgag

SEQ ID NO: 651027 - DNA, 25 bp, Homo sapien
tcacactgaggtgtttgtgctcttg

SEQ ID NO: 651028 - DNA, 25 bp, Homo sapien
tccagaggaaaccttcacactgagg

SEQ ID NO: 651029 - DNA, 25 bp, Homo sapien
gacgtcaccattactggaccacaga

SEQ ID NO: 651030 - DNA, 25 bp, Homo sapien
gcccaggctgccagttagggacgtc

SEQ ID NO: 651031 - DNA, 25 bp, Homo sapien
acagaggaagccctaccatccccag

SEQ ID NO: 651032 - DNA, 25 bp, Homo sapien
tgccagttagggacgtcaccattac

SEQ ID NO: 651033 - DNA, 25 bp, Homo sapien
gcaggagggggtccaagggaacata

SEQ ID NO: 651034 - DNA, 25 bp, Homo sapien
tcttcagacccctcaggcaggaggg

SEQ ID NO: 651035 - DNA, 25 bp, Homo sapien
caaaggaatccagtgtcttcagacc

SEQ ID NO: 651036 - DNA, 25 bp, Homo sapien
ggtccaagggaacatacaccaacca

SEQ ID NO: 651037 - DNA, 25 bp, Homo sapien
gacagaatgggagggacgtatccct

SEQ ID NO: 651038 - DNA, 25 bp, Homo sapien
ccgggaaaggcaagtcgacgctgat

SEQ ID NO: 651039 - DNA, 25 bp, Homo sapien
aaatgaagtcccgtggaggcctcag

SEQ ID NO: 651040 - DNA, 25 bp, Homo sapien
gattaaagaatagccagagctgcac

SEQ ID NO: 651041 - DNA, 25 bp, Homo sapien
cagcaaagagtgaggtgacaaggtc

SEQ ID NO: 651042 - DNA, 25 bp, Homo sapien
ggtcgtatgctgtctggcctcctgc

SEQ ID NO: 651043 - DNA, 25 bp, Homo sapien
cctagtttgagcgagttggtcctca

SEQ ID NO: 651044 - DNA, 25 bp, Homo sapien
tccagtgttcagagccaggtcgtat

SEQ ID NO: 651045 - DNA, 25 bp, Homo sapien
gtaaagtggcggtgctctctcttcc

SEQ ID NO: 651046 - DNA, 25 bp, Homo sapien
taaagtggcggtgctctctcttcct

SEQ ID NO: 651047 - DNA, 25 bp, Homo sapien
cagtaaagtggcggtgctctctctt

SEQ ID NO: 651048 - DNA, 25 bp, Homo sapien
cccagtaaagtggcggtgctctctc

SEQ ID NO: 651049 - DNA, 25 bp, Homo sapien
ggactcctgaaaggctcctatgcag

SEQ ID NO: 651050 - DNA, 25 bp, Homo sapien
tttggcttggacctcttgggcacga

SEQ ID NO: 651051 - DNA, 25 bp, Homo sapien
tggtatcggtctcctaacctcgtgc

SEQ ID NO: 651052 - DNA, 25 bp, Homo sapien
cacgatagtagcttctcagggctga

SEQ ID NO: 651053 - DNA, 25 bp, Homo sapien
ggtcgattgtcttcatcacagcagt

SEQ ID NO: 651054 - DNA, 25 bp, Homo sapien
ctcctctctgcacgagaactggaat

SEQ ID NO: 651055 - DNA, 25 bp, Homo sapien
actggaatcgcttcatggtgcttat

SEQ ID NO: 651056 - DNA, 25 bp, Homo sapien
taacagccacggttatgacgggtcg

SEQ ID NO: 651057 - DNA, 25 bp, Homo sapien
aggacaaactctccaaaacaccctg

SEQ ID NO: 651058 - DNA, 25 bp, Homo sapien
tgcactcaacagcatccagtcgcca

SEQ ID NO: 651059 - DNA, 25 bp, Homo sapien
ctgcagcaaacggaaaaggacaaac

SEQ ID NO: 651060 - DNA, 25 bp, Homo sapien
tgcagcaaacggaaaaggacaaact

SEQ ID NO: 651061 - DNA, 25 bp, Homo sapien
tgttcaatcacagagactcttcctt

SEQ ID NO: 651062 - DNA, 25 bp, Homo sapien
ccgtgggtccgacttccttcagcag

SEQ ID NO: 651063 - DNA, 25 bp, Homo sapien
tcatccagcagctgttcaatcacag

SEQ ID NO: 651064 - DNA, 25 bp, Homo sapien
gcagctgttcaatcacagagactct

SEQ ID NO: 651065 - DNA, 25 bp, Homo sapien
gtatctgaggtactctggctgtagt

SEQ ID NO: 651066 - DNA, 25 bp, Homo sapien
tagtatctgaggtactctggctgta

SEQ ID NO: 651067 - DNA, 25 bp, Homo sapien
ttcaatagtatctgaggtactctgg

SEQ ID NO: 651068 - DNA, 25 bp, Homo sapien
caatagtatctgaggtactctggct

SEQ ID NO: 651069 - DNA, 25 bp, Homo sapien
gaaggtgatcgctgaaattcactgc

SEQ ID NO: 651070 - DNA, 25 bp, Homo sapien
cagctggacctgctgccgcacagcc

SEQ ID NO: 651071 - DNA, 25 bp, Homo sapien
ggtgatcgctgaaattcactgcctt

SEQ ID NO: 651072 - DNA, 25 bp, Homo sapien
gctcagaaggtgatcgctgaaattc

SEQ ID NO: 651073 - DNA, 25 bp, Homo sapien
gtcccactagaaagaaggatctccc

SEQ ID NO: 651074 - DNA, 25 bp, Homo sapien
cactagaaagaaggatctcccttct

SEQ ID NO: 651075 - DNA, 25 bp, Homo sapien
tagaaagaaggatctcccttctaac

SEQ ID NO: 651076 - DNA, 25 bp, Homo sapien
cccactagaaagaaggatctccctt

SEQ ID NO: 651077 - DNA, 25 bp, Homo sapien
tttagatcctttataagtgattgtg

SEQ ID NO: 651078 - DNA, 25 bp, Homo sapien
ctttagatcctttataagtgattgt

SEQ ID NO: 651079 - DNA, 25 bp, Homo sapien
agatcctttataagtgattgtgtca

SEQ ID NO: 651080 - DNA, 25 bp, Homo sapien
tagatcctttataagtgattgtgtc

SEQ ID NO: 651081 - DNA, 25 bp, Homo sapien
catcttcgtggacagtagcagagat

SEQ ID NO: 651082 - DNA, 25 bp, Homo sapien
gtttgagacttgactataattcagt

SEQ ID NO: 651083 - DNA, 25 bp, Homo sapien
cttcgtggacagtagcagagataag

SEQ ID NO: 651084 - DNA, 25 bp, Homo sapien
ctgatgctaacttcacaaccatctt

SEQ ID NO: 651085 - DNA, 25 bp, Homo sapien
cttcagcctgatcccgtggacactt

SEQ ID NO: 651086 - DNA, 25 bp, Homo sapien
aaagtccatggagggttccttcagc

SEQ ID NO: 651087 - DNA, 25 bp, Homo sapien
tttattagagcagagctcacaaggc

SEQ ID NO: 651088 - DNA, 25 bp, Homo sapien
cccgtggacacttgtggagtggaaa

SEQ ID NO: 651089 - DNA, 25 bp, Homo sapien
tctgagcataacacctgaggtgagc

SEQ ID NO: 651090 - DNA, 25 bp, Homo sapien
aatcaaggcccggaattcagggttg

SEQ ID NO: 651091 - DNA, 25 bp, Homo sapien
gatgtgatccagctgtcttctccag

SEQ ID NO: 651092 - DNA, 25 bp, Homo sapien
catcctgggttctgcaatcaaggcc

SEQ ID NO: 651093 - DNA, 25 bp, Homo sapien
ccttttttgctagcagcttgccaga

SEQ ID NO: 651094 - DNA, 25 bp, Homo sapien
ttatggtcactcattttctcctgcc

SEQ ID NO: 651095 - DNA, 25 bp, Homo sapien
caggaggggtttatggtcactcatt

SEQ ID NO: 651096 - DNA, 25 bp, Homo sapien
gcttttgagaggctagttcctgttc

SEQ ID NO: 651097 - DNA, 25 bp, Homo sapien
ggacttcacacaaataccacaggag

SEQ ID NO: 651098 - DNA, 25 bp, Homo sapien
tagagccaggcttctgtccaagcta

SEQ ID NO: 651099 - DNA, 25 bp, Homo sapien
tccaagctaagtttcactagggact

SEQ ID NO: 651100 - DNA, 25 bp, Homo sapien
cacaggagccacagaatcgggcaga

SEQ ID NO: 651101 - DNA, 25 bp, Homo sapien
cagcgaccacatctgtagcaggaaa

SEQ ID NO: 651102 - DNA, 25 bp, Homo sapien
cgaccacatctgtagcaggaaatgg

SEQ ID NO: 651103 - DNA, 25 bp, Homo sapien
ggctccacaccagccgcagaaggac

SEQ ID NO: 651104 - DNA, 25 bp, Homo sapien
tccagcgaccacatctgtagcagga

SEQ ID NO: 651105 - DNA, 25 bp, Homo sapien
ggaggggctttatccccactgcaca

SEQ ID NO: 651106 - DNA, 25 bp, Homo sapien
ctgagtgggcggaggaggggcttta

SEQ ID NO: 651107 - DNA, 25 bp, Homo sapien
gggctttatccccactgcacatcga

SEQ ID NO: 651108 - DNA, 25 bp, Homo sapien
cggaggaggggctttatccccactg

SEQ ID NO: 651109 - DNA, 25 bp, Homo sapien
gaaactggtaccttgcacatcttaa

SEQ ID NO: 651110 - DNA, 25 bp, Homo sapien
ttcccaaaggagtacagctatgatg

SEQ ID NO: 651111 - DNA, 25 bp, Homo sapien
agatgagccccggaaatagtgtttt

SEQ ID NO: 651112 - DNA, 25 bp, Homo sapien
aaaaattcccagacaagatgagccc

SEQ ID NO: 651113 - DNA, 25 bp, Homo sapien
tgttgcttcctcactattgcctggt

SEQ ID NO: 651114 - DNA, 25 bp, Homo sapien
ggtaggagacttgctcacttcccaa

SEQ ID NO: 651115 - DNA, 25 bp, Homo sapien
gaattcctgggactatgttaggtaa

SEQ ID NO: 651116 - DNA, 25 bp, Homo sapien
cttcccaaatgggagtgacagcaca

SEQ ID NO: 651117 - DNA, 25 bp, Homo sapien
ccaaagctttatgcctcagatgctc

SEQ ID NO: 651118 - DNA, 25 bp, Homo sapien
ctccaaagctttatgcctcagatgc

SEQ ID NO: 651119 - DNA, 25 bp, Homo sapien
aaagtctccaaagctttatgcctca

SEQ ID NO: 651120 - DNA, 25 bp, Homo sapien
taaagtctccaaagctttatgcctc

SEQ ID NO: 651121 - DNA, 25 bp, Homo sapien
tagcaacggcatgcattccagacaa

SEQ ID NO: 651122 - DNA, 25 bp, Homo sapien
cgtataagcttgcacccataggtgt

SEQ ID NO: 651123 - DNA, 25 bp, Homo sapien
cttaaggcgaatgagccagggactt

SEQ ID NO: 651124 - DNA, 25 bp, Homo sapien
tggctccgaaaatgcatgctgagtg

SEQ ID NO: 651125 - DNA, 25 bp, Homo sapien
ttgggttttttcatcctctagcaca

SEQ ID NO: 651126 - DNA, 25 bp, Homo sapien
gacagtccccacatgtgtcagcttt

SEQ ID NO: 651127 - DNA, 25 bp, Homo sapien
tcgcacccactccataaacttttgg

SEQ ID NO: 651128 - DNA, 25 bp, Homo sapien
ggaggatgccctttgacagtcccca

SEQ ID NO: 651129 - DNA, 25 bp, Homo sapien
tttgagactgtcttcacccattaac

SEQ ID NO: 651130 - DNA, 25 bp, Homo sapien
ttggctttgagactgtcttcaccca

SEQ ID NO: 651131 - DNA, 25 bp, Homo sapien
gagactgtcttcacccattaacaac

SEQ ID NO: 651132 - DNA, 25 bp, Homo sapien
actgtcttcacccattaacaacttg

SEQ ID NO: 651133 - DNA, 25 bp, Homo sapien
taataggaaaatccatactacaaac

SEQ ID NO: 651134 - DNA, 25 bp, Homo sapien
ttttaataggaaaatccatactaca

SEQ ID NO: 651135 - DNA, 25 bp, Homo sapien
taggaaaatccatactacaaacatg

SEQ ID NO: 651136 - DNA, 25 bp, Homo sapien
gaaaatccatactacaaacatgtat

SEQ ID NO: 651137 - DNA, 25 bp, Homo sapien
gccagaacccgactccacaaggcat

SEQ ID NO: 651138 - DNA, 25 bp, Homo sapien
cagtctgcactcactgtgcagaggt

SEQ ID NO: 651139 - DNA, 25 bp, Homo sapien
aggtcagccagaacccgactccaca

SEQ ID NO: 651140 - DNA, 25 bp, Homo sapien
cagaggtccctcatgcagttgaggt

SEQ ID NO: 651141 - DNA, 25 bp, Homo sapien
gacgcttacagatttggacttttga

SEQ ID NO: 651142 - DNA, 25 bp, Homo sapien
tctggagcctgtcaagcgtttcagt

SEQ ID NO: 651143 - DNA, 25 bp, Homo sapien
caggtatacaccaagggcacttagt

SEQ ID NO: 651144 - DNA, 25 bp, Homo sapien
gatgttactgaaatgacccaatgcc

SEQ ID NO: 651145 - DNA, 25 bp, Homo sapien
gatttcctgtaccacaggcccggca

SEQ ID NO: 651146 - DNA, 25 bp, Homo sapien
cacaggtgacacagtatctcaggtg

SEQ ID NO: 651147 - DNA, 25 bp, Homo sapien
gagcaggatttcctgtaccacaggc

SEQ ID NO: 651148 - DNA, 25 bp, Homo sapien
cagtatctcaggtgagcaggatttc

SEQ ID NO: 651149 - DNA, 25 bp, Homo sapien
cactattctctcaggatacaatctt

SEQ ID NO: 651150 - DNA, 25 bp, Homo sapien
tccattgataatgaccagtggtgct

SEQ ID NO: 651151 - DNA, 25 bp, Homo sapien
tgttcctttctagtccagcactgcg

SEQ ID NO: 651152 - DNA, 25 bp, Homo sapien
tccagcactgcggtccctagatgtc

SEQ ID NO: 651153 - DNA, 25 bp, Homo sapien
caaacagtgtgttcagaagctgata

SEQ ID NO: 651154 - DNA, 25 bp, Homo sapien
cagaggccaactgactgctattaaa

SEQ ID NO: 651155 - DNA, 25 bp, Homo sapien
taaacaactcctaaagggcagaggc

SEQ ID NO: 651156 - DNA, 25 bp, Homo sapien
gtagctctatggagtctcagccttt

SEQ ID NO: 651157 - DNA, 25 bp, Homo sapien
actcttcatgctaaagggagcttga

SEQ ID NO: 651158 - DNA, 25 bp, Homo sapien
cactagctgaaaaaggacatatacc

SEQ ID NO: 651159 - DNA, 25 bp, Homo sapien
aattgttaccccatcccactagctg

SEQ ID NO: 651160 - DNA, 25 bp, Homo sapien
tatcaattgttaccccatcctggcg

SEQ ID NO: 651161 - DNA, 25 bp, Homo sapien
ctgcagctgtagagcaagaggggcc

SEQ ID NO: 651162 - DNA, 25 bp, Homo sapien
tggctgcagctgtagagcaagaggg

SEQ ID NO: 651163 - DNA, 25 bp, Homo sapien
gtggctgcagctgtagagcaagagg

SEQ ID NO: 651164 - DNA, 25 bp, Homo sapien
gctgcagctgtagagcaagaggggc

SEQ ID NO: 651165 - DNA, 25 bp, Homo sapien
ccacacagatgggagtgttcatggg

SEQ ID NO: 651166 - DNA, 25 bp, Homo sapien
gagtgttcatgggtaccaagcttct

SEQ ID NO: 651167 - DNA, 25 bp, Homo sapien
acagatgggagtgttcatgggtacc

SEQ ID NO: 651168 - DNA, 25 bp, Homo sapien
gggagtgttcatgggtaccaagctt

SEQ ID NO: 651169 - DNA, 25 bp, Homo sapien
cacaaggaaaaggtctggtttatct

SEQ ID NO: 651170 - DNA, 25 bp, Homo sapien
cattcttgacagaagcgagcaaagg

SEQ ID NO: 651171 - DNA, 25 bp, Homo sapien
cgagcaaagggatctgatggccggg

SEQ ID NO: 651172 - DNA, 25 bp, Homo sapien
gacaggagagccacattcttgacag

SEQ ID NO: 651173 - DNA, 25 bp, Homo sapien
tgggagacgacagccaaatatgggt

SEQ ID NO: 651174 - DNA, 25 bp, Homo sapien
tgaccgcttacgtgtgcaaaaccgg

SEQ ID NO: 651175 - DNA, 25 bp, Homo sapien
tatctccgtgcttgtcaaacacttc

SEQ ID NO: 651176 - DNA, 25 bp, Homo sapien
cacttctgaccgcttacgtgtgcaa

SEQ ID NO: 651177 - DNA, 25 bp, Homo sapien
tcaaacacttctgaccgcttacgtg

SEQ ID NO: 651178 - DNA, 25 bp, Homo sapien
cgtgcagccatgattgagaaccaca

SEQ ID NO: 651179 - DNA, 25 bp, Homo sapien
acagctctagatactctggccccag

SEQ ID NO: 651180 - DNA, 25 bp, Homo sapien
cagaatttctgacgctaaaccttgg

SEQ ID NO: 651181 - DNA, 25 bp, Homo sapien
ttcaaataagttcccacgtgatgct

SEQ ID NO: 651182 - DNA, 25 bp, Homo sapien
ctagaacctgatcctccaccataag

SEQ ID NO: 651183 - DNA, 25 bp, Homo sapien
tccaccataagctgggatttccaat

SEQ ID NO: 651184 - DNA, 25 bp, Homo sapien
tcctccaccataagctgggatttcc

SEQ ID NO: 651185 - DNA, 25 bp, Homo sapien
ggtgggtggtctagaacctgatcct

SEQ ID NO: 651186 - DNA, 25 bp, Homo sapien
ctgaaaagtgaagatctttcaaagt

SEQ ID NO: 651187 - DNA, 25 bp, Homo sapien
tagggtcagttctttcacctacctg

SEQ ID NO: 651188 - DNA, 25 bp, Homo sapien
tcagttctttcacctacctggacgt

SEQ ID NO: 651189 - DNA, 25 bp, Homo sapien
agatctttcaaagttttagggtcag

SEQ ID NO: 651190 - DNA, 25 bp, Homo sapien
tgatattaaaaacattattctttga

SEQ ID NO: 651191 - DNA, 25 bp, Homo sapien
tattaaaaacattattctttgagca

SEQ ID NO: 651192 - DNA, 25 bp, Homo sapien
ctacaatgatattaaaaacattatt

SEQ ID NO: 651193 - DNA, 25 bp, Homo sapien
attaaaaacattattctttgagcat

SEQ ID NO: 651194 - DNA, 25 bp, Homo sapien
tagttttgatccaacaaatccattt

SEQ ID NO: 651195 - DNA, 25 bp, Homo sapien
ttctttagttttgatccaacaaatc

SEQ ID NO: 651196 - DNA, 25 bp, Homo sapien
ttttgatccaacaaatccatttttg

SEQ ID NO: 651197 - DNA, 25 bp, Homo sapien
ctttagttttgatccaacaaatcca

SEQ ID NO: 651198 - DNA, 25 bp, Homo sapien
caactgtgggagtctgggtaacaac

SEQ ID NO: 651199 - DNA, 25 bp, Homo sapien
tgcccagtgtagatccttgccttga

SEQ ID NO: 651200 - DNA, 25 bp, Homo sapien
catggtcaagcttaagtgaaacccc

SEQ ID NO: 651201 - DNA, 25 bp, Homo sapien
tggatgtagccctcaccaggtgaag

SEQ ID NO: 651202 - DNA, 25 bp, Homo sapien
atctgaatggattatagtttcatta

SEQ ID NO: 651203 - DNA, 25 bp, Homo sapien
atacagtgacaatctgaatggatta

SEQ ID NO: 651204 - DNA, 25 bp, Homo sapien
agtctacgtgaaacacctttgtcac

SEQ ID NO: 651205 - DNA, 25 bp, Homo sapien
tatatttggtggttcatagtctacg

SEQ ID NO: 651206 - DNA, 25 bp, Homo sapien
tgtcacaatgccactctgtctgcag

SEQ ID NO: 651207 - DNA, 25 bp, Homo sapien
gaaacacctttgtcacaatgccact

SEQ ID NO: 651208 - DNA, 25 bp, Homo sapien
tccccataaccaattctctttagaa

SEQ ID NO: 651209 - DNA, 25 bp, Homo sapien
taatatatgttgacatctggagtgt

SEQ ID NO: 651210 - DNA, 25 bp, Homo sapien
aattcaggtttgctgccatccagag

SEQ ID NO: 651211 - DNA, 25 bp, Homo sapien
tagagacagcaatagctttaacttg

SEQ ID NO: 651212 - DNA, 25 bp, Homo sapien
aggctgaggcactcgtaatggtatg

SEQ ID NO: 651213 - DNA, 25 bp, Homo sapien
caaaagcgtattgttatcaatttca

SEQ ID NO: 651214 - DNA, 25 bp, Homo sapien
gctgaggcactcgtaatggtatgat

SEQ ID NO: 651215 - DNA, 25 bp, Homo sapien
tgttatcaatttcatggttagcttt

SEQ ID NO: 651216 - DNA, 25 bp, Homo sapien
gggacacacactgaaccagcagtca

SEQ ID NO: 651217 - DNA, 25 bp, Homo sapien
ggacacacactgaaccagcagtcat

SEQ ID NO: 651218 - DNA, 25 bp, Homo sapien
ctgagggacacacactgaaccagca

SEQ ID NO: 651219 - DNA, 25 bp, Homo sapien
gagggacacacactgaaccagcagt

SEQ ID NO: 651220 - DNA, 25 bp, Homo sapien
catataaattccaatgtacacaaaa

SEQ ID NO: 651221 - DNA, 25 bp, Homo sapien
gaagagcagcacttaatttaaatgc

SEQ ID NO: 651222 - DNA, 25 bp, Homo sapien
aagctgaagagcagcacttaattta

SEQ ID NO: 651223 - DNA, 25 bp, Homo sapien
acatataaattccaatgtacacaaa

SEQ ID NO: 651224 - DNA, 25 bp, Homo sapien
ggttgttcccgcccatcaggggctg

SEQ ID NO: 651225 - DNA, 25 bp, Homo sapien
ttggttgttcccgcccatcaggggc

SEQ ID NO: 651226 - DNA, 25 bp, Homo sapien
cagcccggatccggaatcccgtttg

SEQ ID NO: 651227 - DNA, 25 bp, Homo sapien
ccgtttggttgttcccgcccatcag

SEQ ID NO: 651228 - DNA, 25 bp, Homo sapien
tcctttcggctggagtaagggaagc

SEQ ID NO: 651229 - DNA, 25 bp, Homo sapien
gcccgggatcgggacccctaatgca

SEQ ID NO: 651230 - DNA, 25 bp, Homo sapien
cggctggagtaagggaagctcttcc

SEQ ID NO: 651231 - DNA, 25 bp, Homo sapien
gatcgggacccctaatgcatctctg

SEQ ID NO: 651232 - DNA, 25 bp, Homo sapien
tcttgcctcctccttcgccgccgcc

SEQ ID NO: 651233 - DNA, 25 bp, Homo sapien
ttgcctcctccttcgccgccgcccg

SEQ ID NO: 651234 - DNA, 25 bp, Homo sapien
cttgcctcctccttcgccgccgccc

SEQ ID NO: 651235 - DNA, 25 bp, Homo sapien
tgcctcctccttcgccgccgcccgg

SEQ ID NO: 651236 - DNA, 25 bp, Homo sapien
cactttgaaactccggaggaccaca

SEQ ID NO: 651237 - DNA, 25 bp, Homo sapien
taaaggcaggaatagcaaagagtgc

SEQ ID NO: 651238 - DNA, 25 bp, Homo sapien
gaaaaagatgccaacatacccgtat

SEQ ID NO: 651239 - DNA, 25 bp, Homo sapien
caagacttctgatgggtcaaggaaa

SEQ ID NO: 651240 - DNA, 25 bp, Homo sapien
catatataagatacacagccttttg

SEQ ID NO: 651241 - DNA, 25 bp, Homo sapien
tcacctgagaatagatactccccag

SEQ ID NO: 651242 - DNA, 25 bp, Homo sapien
gaggcccctgtatattcaatgatga

SEQ ID NO: 651243 - DNA, 25 bp, Homo sapien
tattcggtattttgctcacctgaga

SEQ ID NO: 651244 - DNA, 25 bp, Homo sapien
tactccccagagtgtatagaggccc

SEQ ID NO: 651245 - DNA, 25 bp, Homo sapien
ggtcaaattagtgctaaacagcctc

SEQ ID NO: 651246 - DNA, 25 bp, Homo sapien
taaggtaaccaatagccaccagtgg

SEQ ID NO: 651247 - DNA, 25 bp, Homo sapien
tgaaacacccctgatcttagttggg

SEQ ID NO: 651248 - DNA, 25 bp, Homo sapien
ttggtggtgatcagctaagcaaact

SEQ ID NO: 651249 - DNA, 25 bp, Homo sapien
tgaacgattagggtacctttcctga

SEQ ID NO: 651250 - DNA, 25 bp, Homo sapien
aaaatgcccattccccaaagatgat

SEQ ID NO: 651251 - DNA, 25 bp, Homo sapien
caacatcaagtgtggattcactgga

SEQ ID NO: 651252 - DNA, 25 bp, Homo sapien
gacttttggttttgagcgatagctc

SEQ ID NO: 651253 - DNA, 25 bp, Homo sapien
ggtcttgctgtgttgccctggctgg

SEQ ID NO: 651254 - DNA, 25 bp, Homo sapien
gtcttgctgtgttgccctggctggc

SEQ ID NO: 651255 - DNA, 25 bp, Homo sapien
tgctgtgttgccctggctggcctca

SEQ ID NO: 651256 - DNA, 25 bp, Homo sapien
cttgctgtgttgccctggctggcct

SEQ ID NO: 651257 - DNA, 25 bp, Homo sapien
aaaatggaatgtgcttgaaagagat

SEQ ID NO: 651258 - DNA, 25 bp, Homo sapien
tggaatgtgcttgaaagagatctaa

SEQ ID NO: 651259 - DNA, 25 bp, Homo sapien
aatggaatgtgcttgaaagagatct

SEQ ID NO: 651260 - DNA, 25 bp, Homo sapien
ggaatgtgcttgaaagagatctaaa

SEQ ID NO: 651261 - DNA, 25 bp, Homo sapien
tgagctctaagctaacactctggac

SEQ ID NO: 651262 - DNA, 25 bp, Homo sapien
gcccctggctaagtgaatgcttatg

SEQ ID NO: 651263 - DNA, 25 bp, Homo sapien
gcaagtgtcagaggtgaaggcccta

SEQ ID NO: 651264 - DNA, 25 bp, Homo sapien
gacaattatctaaaagcccctggct

SEQ ID NO: 651265 - DNA, 25 bp, Homo sapien
ctatgctggtactttcagcaaagac

SEQ ID NO: 651266 - DNA, 25 bp, Homo sapien
tatgctggtactttcagcaaagact

SEQ ID NO: 651267 - DNA, 25 bp, Homo sapien
ctggtactttcagcaaagactttac

SEQ ID NO: 651268 - DNA, 25 bp, Homo sapien
tgctggtactttcagcaaagacttt

SEQ ID NO: 651269 - DNA, 25 bp, Homo sapien
tgcaatttggtttccaacctatcgg

SEQ ID NO: 651270 - DNA, 25 bp, Homo sapien
gccacagtcagtgaatttgtgcaat

SEQ ID NO: 651271 - DNA, 25 bp, Homo sapien
aaggaacgggtcgtcagtagagcca

SEQ ID NO: 651272 - DNA, 25 bp, Homo sapien
tgcacaatgtaagggcagttggcct

SEQ ID NO: 651273 - DNA, 25 bp, Homo sapien
gtgtacgcagacactaatacaatag

SEQ ID NO: 651274 - DNA, 25 bp, Homo sapien
atacaatagcatatactcgatgtgt

SEQ ID NO: 651275 - DNA, 25 bp, Homo sapien
tcatcccccaagtctgatgtgtacg

SEQ ID NO: 651276 - DNA, 25 bp, Homo sapien
caatagcatatactcgatgtgtttc

SEQ ID NO: 651277 - DNA, 25 bp, Homo sapien
actgtggccaatgatgatagtcttc

SEQ ID NO: 651278 - DNA, 25 bp, Homo sapien
catggccgcgatggccccagaactg

SEQ ID NO: 651279 - DNA, 25 bp, Homo sapien
agaactgtggccaatgatgatagtc

SEQ ID NO: 651280 - DNA, 25 bp, Homo sapien
tcatggccgcgatggccccagaact

SEQ ID NO: 651281 - DNA, 25 bp, Homo sapien
tgggtcgggcatgtttttagccaaa

SEQ ID NO: 651282 - DNA, 25 bp, Homo sapien
ttgggtcgggcatgtttttagccaa

SEQ ID NO: 651283 - DNA, 25 bp, Homo sapien
ggtcgggcatgtttttagccaaaca

SEQ ID NO: 651284 - DNA, 25 bp, Homo sapien
cataccagccgtgggtggtcacatc

SEQ ID NO: 651285 - DNA, 25 bp, Homo sapien
tcactgccttgctaggagaagccat

SEQ ID NO: 651286 - DNA, 25 bp, Homo sapien
ccagctcctttttcacccagccata

SEQ ID NO: 651287 - DNA, 25 bp, Homo sapien
tcccgggaacaatcactgccttgct

SEQ ID NO: 651288 - DNA, 25 bp, Homo sapien
gtgcagcgaggccagagttccccag

SEQ ID NO: 651289 - DNA, 25 bp, Homo sapien
cgaggccagagttccccagcgcggg

SEQ ID NO: 651290 - DNA, 25 bp, Homo sapien
tgcagcgaggccagagttccccagc

SEQ ID NO: 651291 - DNA, 25 bp, Homo sapien
agcgaggccagagttccccagcgcg

SEQ ID NO: 651292 - DNA, 25 bp, Homo sapien
actggttctacacacgagccggttc

SEQ ID NO: 651293 - DNA, 25 bp, Homo sapien
cggaagccgcacgatgcctggagtt

SEQ ID NO: 651294 - DNA, 25 bp, Homo sapien
cctgtaaaccacgtgaaccagcggg

SEQ ID NO: 651295 - DNA, 25 bp, Homo sapien
aaccagcgggacttcgtcagagctc

SEQ ID NO: 651296 - DNA, 25 bp, Homo sapien
tcaagagtgtcctccgccgggtcct

SEQ ID NO: 651297 - DNA, 25 bp, Homo sapien
ccacttcggccgaggcttcaagagt

SEQ ID NO: 651298 - DNA, 25 bp, Homo sapien
tatggggacgtcagagaaacggcgt

SEQ ID NO: 651299 - DNA, 25 bp, Homo sapien
agatgggggccgcaaactgacacct

SEQ ID NO: 651300 - DNA, 25 bp, Homo sapien
tttgattggccagtggacagcgccg

SEQ ID NO: 651301 - DNA, 25 bp, Homo sapien
tagctaaggcgatcagcgggacttc

SEQ ID NO: 651302 - DNA, 25 bp, Homo sapien
tatcagggcgaacctctgaggagcg

SEQ ID NO: 651303 - DNA, 25 bp, Homo sapien
tcccactgagacgagcggatgtcat

SEQ ID NO: 651304 - DNA, 25 bp, Homo sapien
ttgagaggagctgcccttaaaagcc

SEQ ID NO: 651305 - DNA, 25 bp, Homo sapien
gacttgatgaagactctaagagcac

SEQ ID NO: 651306 - DNA, 25 bp, Homo sapien
cattctaggaaagaggccaacagcc

SEQ ID NO: 651307 - DNA, 25 bp, Homo sapien
ccaggtgtagagtccagctgtgaca

SEQ ID NO: 651308 - DNA, 25 bp, Homo sapien
caaataagttacctccactctataa

SEQ ID NO: 651309 - DNA, 25 bp, Homo sapien
gataactgcttttaacctctcctta

SEQ ID NO: 651310 - DNA, 25 bp, Homo sapien
cctaaagagctcataacaaataagt

SEQ ID NO: 651311 - DNA, 25 bp, Homo sapien
taattttagcccatgtctcaattct

SEQ ID NO: 651312 - DNA, 25 bp, Homo sapien
ggctccttaatggttccggcggcag

SEQ ID NO: 651313 - DNA, 25 bp, Homo sapien
gacgctgaaaactggcggctcctta

SEQ ID NO: 651314 - DNA, 25 bp, Homo sapien
taaaaagtatcgcacgcccacagtt

SEQ ID NO: 651315 - DNA, 25 bp, Homo sapien
tggcgtacccatgtatcgaaatgag

SEQ ID NO: 651316 - DNA, 25 bp, Homo sapien
ggctcactgctttactatagccgga

SEQ ID NO: 651317 - DNA, 25 bp, Homo sapien
tacgggatcggcacctggtctgtgt

SEQ ID NO: 651318 - DNA, 25 bp, Homo sapien
aagtcgtcaggtagggctcttcggc

SEQ ID NO: 651319 - DNA, 25 bp, Homo sapien
tatagccggacaatggcgaagtcgt

SEQ ID NO: 651320 - DNA, 25 bp, Homo sapien
aaaaaatcatggttagatgctacga

SEQ ID NO: 651321 - DNA, 25 bp, Homo sapien
aaatcatggttagatgctacgaagt

SEQ ID NO: 651322 - DNA, 25 bp, Homo sapien
taaccttatgcatgttatcaggccc

SEQ ID NO: 651323 - DNA, 25 bp, Homo sapien
ttatgcatgttatcaggcccaaggg

SEQ ID NO: 651324 - DNA, 25 bp, Homo sapien
tgtgtagagagggagttttaccatg

SEQ ID NO: 651325 - DNA, 25 bp, Homo sapien
cagatttttaaagtggaacataatc

SEQ ID NO: 651326 - DNA, 25 bp, Homo sapien
tcaactgatccacctagggcctcag

SEQ ID NO: 651327 - DNA, 25 bp, Homo sapien
catgcctggccaaagccagattttt

SEQ ID NO: 651328 - DNA, 25 bp, Homo sapien
ggaaccaaatttggactcttgactc

SEQ ID NO: 651329 - DNA, 25 bp, Homo sapien
gactcttgactctggagcaccaatt

SEQ ID NO: 651330 - DNA, 25 bp, Homo sapien
tttctctgaagatgaaatctagatc

SEQ ID NO: 651331 - DNA, 25 bp, Homo sapien
ctgaagatgaaatctagatctttga

SEQ ID NO: 651332 - DNA, 25 bp, Homo sapien
ttgagaggtgctgtaggtagtacga

SEQ ID NO: 651333 - DNA, 25 bp, Homo sapien
gagtgcgtagttgagaggtgctgta

SEQ ID NO: 651334 - DNA, 25 bp, Homo sapien
aaatgccttgttgagagtgcgtagt

SEQ ID NO: 651335 - DNA, 25 bp, Homo sapien
taaatgccttgttgagagtgcgtag

SEQ ID NO: 651336 - DNA, 25 bp, Homo sapien
ggcgtctacctcacatttgtgtcca

SEQ ID NO: 651337 - DNA, 25 bp, Homo sapien
cgtctacctcacatttgtgtccaag

SEQ ID NO: 651338 - DNA, 25 bp, Homo sapien
ttaggcgtctacctcacatttgtgt

SEQ ID NO: 651339 - DNA, 25 bp, Homo sapien
taggcgtctacctcacatttgtgtc

SEQ ID NO: 651340 - DNA, 25 bp, Homo sapien
ttctgtaggtggctgaaatgcccat

SEQ ID NO: 651341 - DNA, 25 bp, Homo sapien
caacgcctgtgacgagttggcagct

SEQ ID NO: 651342 - DNA, 25 bp, Homo sapien
ctggctttggtctggcatttgttct

SEQ ID NO: 651343 - DNA, 25 bp, Homo sapien
actatgtaccccgtctttgtggctg

SEQ ID NO: 651344 - DNA, 25 bp, Homo sapien
cattggcagttcaagcaggccagca

SEQ ID NO: 651345 - DNA, 25 bp, Homo sapien
gaagctaacgtggaactgtctgcag

SEQ ID NO: 651346 - DNA, 25 bp, Homo sapien
ggcactgagaagtgtctggatttga

SEQ ID NO: 651347 - DNA, 25 bp, Homo sapien
tgcctggtgaggagtactgactgtc

SEQ ID NO: 651348 - DNA, 25 bp, Homo sapien
taagcggactctgctagctttgaca

SEQ ID NO: 651349 - DNA, 25 bp, Homo sapien
gctttgacatttccatcccgctgga

SEQ ID NO: 651350 - DNA, 25 bp, Homo sapien
agcactttggtctcatttttgatga

SEQ ID NO: 651351 - DNA, 25 bp, Homo sapien
ctgccttgtcctgtgtagtcttagg

SEQ ID NO: 651352 - DNA, 25 bp, Homo sapien
ttctgctgtgtttctccaggccaga

SEQ ID NO: 651353 - DNA, 25 bp, Homo sapien
ggccagagctctgggagtcacactg

SEQ ID NO: 651354 - DNA, 25 bp, Homo sapien
agctctgggagtcacactggctcat

SEQ ID NO: 651355 - DNA, 25 bp, Homo sapien
tgtgtttctccaggccagagctctg

SEQ ID NO: 651356 - DNA, 25 bp, Homo sapien
ctctctgtagaaaggtggcacattt

SEQ ID NO: 651357 - DNA, 25 bp, Homo sapien
tctctgtagaaaggtggcacatttg

SEQ ID NO: 651358 - DNA, 25 bp, Homo sapien
tagaaaggtggcacatttgtgcact

SEQ ID NO: 651359 - DNA, 25 bp, Homo sapien
ctgtagaaaggtggcacatttgtgc

SEQ ID NO: 651360 - DNA, 25 bp, Homo sapien
cagcaggattcaagattctgcggtg

SEQ ID NO: 651361 - DNA, 25 bp, Homo sapien
tgcggtgatgctgtcctgaatccat

SEQ ID NO: 651362 - DNA, 25 bp, Homo sapien
tcatgccccttgtgttcctgctttc

SEQ ID NO: 651363 - DNA, 25 bp, Homo sapien
gatgctgtcctgaatccatgagcag

SEQ ID NO: 651364 - DNA, 25 bp, Homo sapien
ctgtgtggtggtggccaggggtgat

SEQ ID NO: 651365 - DNA, 25 bp, Homo sapien
gtgtggtggtggccaggggtgatgg

SEQ ID NO: 651366 - DNA, 25 bp, Homo sapien
tgtgtggtggtggccaggggtgatg

SEQ ID NO: 651367 - DNA, 25 bp, Homo sapien
tgtggtggtggccaggggtgatggg

SEQ ID NO: 651368 - DNA, 25 bp, Homo sapien
cagcagctggtacccatcaaattgg

SEQ ID NO: 651369 - DNA, 25 bp, Homo sapien
tctcagcagctggtacccatcaaat

SEQ ID NO: 651370 - DNA, 25 bp, Homo sapien
tttgttctcagcagctggtacccat

SEQ ID NO: 651371 - DNA, 25 bp, Homo sapien
tgttctcagcagctggtacccatca

SEQ ID NO: 651372 - DNA, 25 bp, Homo sapien
catcggatcaggctcttgggatcta

SEQ ID NO: 651373 - DNA, 25 bp, Homo sapien
tcctcatctgtaaccagggcttgtt

SEQ ID NO: 651374 - DNA, 25 bp, Homo sapien
ggatcaggctcttgggatctacccc

SEQ ID NO: 651375 - DNA, 25 bp, Homo sapien
gtaaccagggcttgttcatccacat

SEQ ID NO: 651376 - DNA, 25 bp, Homo sapien
gggaaaggcctagagtgatgaaaac

SEQ ID NO: 651377 - DNA, 25 bp, Homo sapien
cctttttagaatggtgtctgtctca

SEQ ID NO: 651378 - DNA, 25 bp, Homo sapien
atgggagggacttaattcttcccag

SEQ ID NO: 651379 - DNA, 25 bp, Homo sapien
tgtgactgctactcctttttacaag

SEQ ID NO: 651380 - DNA, 25 bp, Homo sapien
gaagtctggctgacacacagtggca

SEQ ID NO: 651381 - DNA, 25 bp, Homo sapien
cacagtggcaaacataccttccggt

SEQ ID NO: 651382 - DNA, 25 bp, Homo sapien
tgtgacctcgtgactccagattgat

SEQ ID NO: 651383 - DNA, 25 bp, Homo sapien
tgtaatttggacaggcaggagcgcc

SEQ ID NO: 651384 - DNA, 25 bp, Homo sapien
tgtgcatgcgctggagtaattctcg

SEQ ID NO: 651385 - DNA, 25 bp, Homo sapien
tggtgtttcacacttgtgcatgcgc

SEQ ID NO: 651386 - DNA, 25 bp, Homo sapien
cacacttgtgcatgcgctggagtaa

SEQ ID NO: 651387 - DNA, 25 bp, Homo sapien
tgcgctggagtaattctcgttcgcc

SEQ ID NO: 651388 - DNA, 25 bp, Homo sapien
cataagccatgggtgttcaacaaac

SEQ ID NO: 651389 - DNA, 25 bp, Homo sapien
gaacagttcgttgatgagatgctcc

SEQ ID NO: 651390 - DNA, 25 bp, Homo sapien
tggacgtggtggaaatctgctccca

SEQ ID NO: 651391 - DNA, 25 bp, Homo sapien
ttttaatggactggagctgtgactg

SEQ ID NO: 651392 - DNA, 25 bp, Homo sapien
tcacattccttgatagagagttgat

SEQ ID NO: 651393 - DNA, 25 bp, Homo sapien
atcagtagaccctgccggacacagg

SEQ ID NO: 651394 - DNA, 25 bp, Homo sapien
tcttctcagtatgtcgtaggcttag

SEQ ID NO: 651395 - DNA, 25 bp, Homo sapien
ccatgttgtctggtcatccattaga

SEQ ID NO: 651396 - DNA, 25 bp, Homo sapien
gaaaatgcccgcagaatattgagta

SEQ ID NO: 651397 - DNA, 25 bp, Homo sapien
gagaaaatgcccgcagaatattgag

SEQ ID NO: 651398 - DNA, 25 bp, Homo sapien
ctgggagaaaatgcccgcagaatat

SEQ ID NO: 651399 - DNA, 25 bp, Homo sapien
aaatgcccgcagaatattgagtagg

SEQ ID NO: 651400 - DNA, 25 bp, Homo sapien
aaagaggcagagaccaaagaggttg

SEQ ID NO: 651401 - DNA, 25 bp, Homo sapien
tggtgtctgtgccatgaaaagaggc

SEQ ID NO: 651402 - DNA, 25 bp, Homo sapien
gtgtctgtgccatgaaaagaggcag

SEQ ID NO: 651403 - DNA, 25 bp, Homo sapien
gaggcagagaccaaagaggttgtgc

SEQ ID NO: 651404 - DNA, 25 bp, Homo sapien
tttctagctgcataacccacatgcg

SEQ ID NO: 651405 - DNA, 25 bp, Homo sapien
cttgtctttctagctgcataaccca

SEQ ID NO: 651406 - DNA, 25 bp, Homo sapien
tctttctagctgcataacccacatg

SEQ ID NO: 651407 - DNA, 25 bp, Homo sapien
tgtctttctagctgcataacccaca

SEQ ID NO: 651408 - DNA, 25 bp, Homo sapien
ggtgagaactgtactttgtagaatg

SEQ ID NO: 651409 - DNA, 25 bp, Homo sapien
cctgtggacagtgggaaaccattga

SEQ ID NO: 651410 - DNA, 25 bp, Homo sapien
tgaacttgttagctgtctgcaggat

SEQ ID NO: 651411 - DNA, 25 bp, Homo sapien
aaccattgactgtttccgagcagag

SEQ ID NO: 651412 - DNA, 25 bp, Homo sapien
gaagtgaggagctggtcatccatgt

SEQ ID NO: 651413 - DNA, 25 bp, Homo sapien
gaggagctggtcatccatgtccagc

SEQ ID NO: 651414 - DNA, 25 bp, Homo sapien
agtgaggagctggtcatccatgtcc

SEQ ID NO: 651415 - DNA, 25 bp, Homo sapien
gtgaggagctggtcatccatgtcca

SEQ ID NO: 651416 - DNA, 25 bp, Homo sapien
agtctctcgaattgccgatttgtcc

SEQ ID NO: 651417 - DNA, 25 bp, Homo sapien
tctctcgaattgccgatttgtcctt

SEQ ID NO: 651418 - DNA, 25 bp, Homo sapien
taagtctctcgaattgccgatttgt

SEQ ID NO: 651419 - DNA, 25 bp, Homo sapien
ttaagtctctcgaattgccgatttg

SEQ ID NO: 651420 - DNA, 25 bp, Homo sapien
tatcaggtgttgtggctgccaacac

SEQ ID NO: 651421 - DNA, 25 bp, Homo sapien
gagaccgcagagacattgatctact

SEQ ID NO: 651422 - DNA, 25 bp, Homo sapien
ctttgatgtctctgtgtcagcacct

SEQ ID NO: 651423 - DNA, 25 bp, Homo sapien
tttaactcctcagtaatatcaggtg

SEQ ID NO: 651424 - DNA, 25 bp, Homo sapien
caatataccaaactgtggtggtggg

SEQ ID NO: 651425 - DNA, 25 bp, Homo sapien
ggccatagagtgctgtgcagtacag

SEQ ID NO: 651426 - DNA, 25 bp, Homo sapien
tgtcttggaaatgtgccagcttctc

SEQ ID NO: 651427 - DNA, 25 bp, Homo sapien
ttctctggccatagagtgctgtgca

SEQ ID NO: 651428 - DNA, 25 bp, Homo sapien
ttgggcagtcctccatggtcatcac

SEQ ID NO: 651429 - DNA, 25 bp, Homo sapien
ggttgggcagtcctccatggtcatc

SEQ ID NO: 651430 - DNA, 25 bp, Homo sapien
cagatggttgggcagtcctccatgg

SEQ ID NO: 651431 - DNA, 25 bp, Homo sapien
gatggttgggcagtcctccatggtc

SEQ ID NO: 651432 - DNA, 25 bp, Homo sapien
tgtggcttgctctaagcatagaaca

SEQ ID NO: 651433 - DNA, 25 bp, Homo sapien
ccagtagctgtgtggacaccggaat

SEQ ID NO: 651434 - DNA, 25 bp, Homo sapien
gaacaatcatgaccttacgtggctc

SEQ ID NO: 651435 - DNA, 25 bp, Homo sapien
gcagaacccattttaccagtagctg

SEQ ID NO: 651436 - DNA, 25 bp, Homo sapien
taaggtaccagtttcatcagaggca

SEQ ID NO: 651437 - DNA, 25 bp, Homo sapien
ccacataaggtaccagtttcatcag

SEQ ID NO: 651438 - DNA, 25 bp, Homo sapien
ggtaccagtttcatcagaggcatct

SEQ ID NO: 651439 - DNA, 25 bp, Homo sapien
cagtttcatcagaggcatctggcaa

SEQ ID NO: 651440 - DNA, 25 bp, Homo sapien
aggctcatgtgtcaggttgtcattc

SEQ ID NO: 651441 - DNA, 25 bp, Homo sapien
caggttgtcattcataggcttcaca

SEQ ID NO: 651442 - DNA, 25 bp, Homo sapien
cataaactctaaaggctcatgtgtc

SEQ ID NO: 651443 - DNA, 25 bp, Homo sapien
catttcccataaactctaaaggctc

SEQ ID NO: 651444 - DNA, 25 bp, Homo sapien
cagcgaccttcaagggccagtgtgg

SEQ ID NO: 651445 - DNA, 25 bp, Homo sapien
gcagccatccctgcaagtcgtggca

SEQ ID NO: 651446 - DNA, 25 bp, Homo sapien
gaccatagggtgctgttacctccag

SEQ ID NO: 651447 - DNA, 25 bp, Homo sapien
aaagacaaccactaggactgtgtga

SEQ ID NO: 651448 - DNA, 25 bp, Homo sapien
gggaggatgtatgggataatgaggg

SEQ ID NO: 651449 - DNA, 25 bp, Homo sapien
ggaggatgtatgggataatgagggg

SEQ ID NO: 651450 - DNA, 25 bp, Homo sapien
gatgtaattcgcactgtagtctgtg

SEQ ID NO: 651451 - DNA, 25 bp, Homo sapien
ccagtagatgtaattcgcactgtag

SEQ ID NO: 651452 - DNA, 25 bp, Homo sapien
agctccagtagatgtaattcgcact

SEQ ID NO: 651453 - DNA, 25 bp, Homo sapien
gtaattcgcactgtagtctgtgggc

SEQ ID NO: 651454 - DNA, 25 bp, Homo sapien
ggatgatgatggtcagtatcaccat

SEQ ID NO: 651455 - DNA, 25 bp, Homo sapien
ctggatgatgatggtcagtatcacc

SEQ ID NO: 651456 - DNA, 25 bp, Homo sapien
tctctggatgatgatggtcagtatc

SEQ ID NO: 651457 - DNA, 25 bp, Homo sapien
catttctctggatgatgatggtcag

SEQ ID NO: 651458 - DNA, 25 bp, Homo sapien
tcctggagggtaaagtgcaaggcga

SEQ ID NO: 651459 - DNA, 25 bp, Homo sapien
ggagactggtgaggctgtttgaagc

SEQ ID NO: 651460 - DNA, 25 bp, Homo sapien
ccaggcatgaatgtaggcttgggca

SEQ ID NO: 651461 - DNA, 25 bp, Homo sapien
gatgaggtggtagggctgaggaggg

SEQ ID NO: 651462 - DNA, 25 bp, Homo sapien
tcctcagtcctatttcggtgtctgg

SEQ ID NO: 651463 - DNA, 25 bp, Homo sapien
caaacaggtcgttgctcctcagtcc

SEQ ID NO: 651464 - DNA, 25 bp, Homo sapien
tcaattccaaacaggtcgttgctcc

SEQ ID NO: 651465 - DNA, 25 bp, Homo sapien
cctatttcggtgtctggatgtggga

SEQ ID NO: 651466 - DNA, 25 bp, Homo sapien
tttgtgagctactggtagatcctga

SEQ ID NO: 651467 - DNA, 25 bp, Homo sapien
cctatcctacagatgactggatttc

SEQ ID NO: 651468 - DNA, 25 bp, Homo sapien
tacagttcctatcctacagatgact

SEQ ID NO: 651469 - DNA, 25 bp, Homo sapien
ttttacagttcctatcctacagatg

SEQ ID NO: 651470 - DNA, 25 bp, Homo sapien
agttcctatcctacagatgactgga

SEQ ID NO: 651471 - DNA, 25 bp, Homo sapien
tagacacgtaaaccaatgtaagcgt

SEQ ID NO: 651472 - DNA, 25 bp, Homo sapien
gcctctttaagtgccttgcagggtg

SEQ ID NO: 651473 - DNA, 25 bp, Homo sapien
tggccttccaatatgtagacacgta

SEQ ID NO: 651474 - DNA, 25 bp, Homo sapien
gagtaatcctgaacatccgccatgg

SEQ ID NO: 651475 - DNA, 25 bp, Homo sapien
tggacctgtggcagttacgagaagc

SEQ ID NO: 651476 - DNA, 25 bp, Homo sapien
tgtttgcgccacaaagaaccaggtc

SEQ ID NO: 651477 - DNA, 25 bp, Homo sapien
cagttacgagaagcccctgtgcagg

SEQ ID NO: 651478 - DNA, 25 bp, Homo sapien
agaatggaaacagggtgtgctgtcc

SEQ ID NO: 651479 - DNA, 25 bp, Homo sapien
ctgctgctgtgattgcctgtgcaga

SEQ ID NO: 651480 - DNA, 25 bp, Homo sapien
tggaacctgtttgtgccaccttctc

SEQ ID NO: 651481 - DNA, 25 bp, Homo sapien
ttgcctgtgcagaacactcactcac

SEQ ID NO: 651482 - DNA, 25 bp, Homo sapien
gaacctgtttgtgccaccttctctg

SEQ ID NO: 651483 - DNA, 25 bp, Homo sapien
gcagagtccacttgcgctcctgcat

SEQ ID NO: 651484 - DNA, 25 bp, Homo sapien
gatgcagagtccacttgcgctcctg

SEQ ID NO: 651485 - DNA, 25 bp, Homo sapien
tgcagatgcagagtccacttgcgct

SEQ ID NO: 651486 - DNA, 25 bp, Homo sapien
cagatgcagagtccacttgcgctcc

SEQ ID NO: 651487 - DNA, 25 bp, Homo sapien
tctgtgggctgactctcggtcctgg

SEQ ID NO: 651488 - DNA, 25 bp, Homo sapien
ggctgactctcggtcctggatagaa

SEQ ID NO: 651489 - DNA, 25 bp, Homo sapien
gaaagctgtgttgggtctgtgggct

SEQ ID NO: 651490 - DNA, 25 bp, Homo sapien
actctcggtcctggatagaagtggt

SEQ ID NO: 651491 - DNA, 25 bp, Homo sapien
tgttcttctttacgtcagggtcagc

SEQ ID NO: 651492 - DNA, 25 bp, Homo sapien
ggtcagcagtgacggtgtcaggcat

SEQ ID NO: 651493 - DNA, 25 bp, Homo sapien
tttacgtcagggtcagcagtgacgg

SEQ ID NO: 651494 - DNA, 25 bp, Homo sapien
atccagttgttcttctttacgtcag

SEQ ID NO: 651495 - DNA, 25 bp, Homo sapien
acttgcaagcaataagagccatgtg

SEQ ID NO: 651496 - DNA, 25 bp, Homo sapien
tcatcaacagcaaagggacccagaa

SEQ ID NO: 651497 - DNA, 25 bp, Homo sapien
aatggcggcatcacccgatttgaag

SEQ ID NO: 651498 - DNA, 25 bp, Homo sapien
tgtgctgtcaccaaccaggttgcca

SEQ ID NO: 651499 - DNA, 25 bp, Homo sapien
tgatgttgacttgagcaaaggtgca

SEQ ID NO: 651500 - DNA, 25 bp, Homo sapien
taatagtgcatttcagcagacttca

SEQ ID NO: 651501 - DNA, 25 bp, Homo sapien
gtatccacgctaggcttgagagcac

SEQ ID NO: 651502 - DNA, 25 bp, Homo sapien
caaaggtgcagtatccacgctaggc

SEQ ID NO: 651503 - DNA, 25 bp, Homo sapien
gacatccttgaagggcagacaaaag

SEQ ID NO: 651504 - DNA, 25 bp, Homo sapien
gggcagtattgataccaccaatatt

SEQ ID NO: 651505 - DNA, 25 bp, Homo sapien
gttggacaagttgatggtagaatgc

SEQ ID NO: 651506 - DNA, 25 bp, Homo sapien
caccaatattgtggacatccttgaa

SEQ ID NO: 651507 - DNA, 25 bp, Homo sapien
tgtctgggctgtaggcaatttctta

SEQ ID NO: 651508 - DNA, 25 bp, Homo sapien
cattgccactgataattggcccaaa

SEQ ID NO: 651509 - DNA, 25 bp, Homo sapien
caccattgccactgataattggccc

SEQ ID NO: 651510 - DNA, 25 bp, Homo sapien
ctgtgtctgggctgtaggcaatttc

SEQ ID NO: 651511 - DNA, 25 bp, Homo sapien
gcgttaaggtggctcagtgaatcca

SEQ ID NO: 651512 - DNA, 25 bp, Homo sapien
gacaggatagacagccccagatgtt

SEQ ID NO: 651513 - DNA, 25 bp, Homo sapien
tctggtaaagactcagtgtcctggg

SEQ ID NO: 651514 - DNA, 25 bp, Homo sapien
tctgcccatcttggagataacaggt

SEQ ID NO: 651515 - DNA, 25 bp, Homo sapien
tctaatagatgcatagtggcaacac

SEQ ID NO: 651516 - DNA, 25 bp, Homo sapien
tccaacatcttctgtgagacaaggc

SEQ ID NO: 651517 - DNA, 25 bp, Homo sapien
tctgaacttctcaggcgggatgcca

SEQ ID NO: 651518 - DNA, 25 bp, Homo sapien
ggtagctttgctcctgtaccacagg

SEQ ID NO: 651519 - DNA, 25 bp, Homo sapien
ctgtagcaagagggtatgtccaagt

SEQ ID NO: 651520 - DNA, 25 bp, Homo sapien
tcccataaggacagacttgggatgc

SEQ ID NO: 651521 - DNA, 25 bp, Homo sapien
ctgacagcattggtccagagaaagc

SEQ ID NO: 651522 - DNA, 25 bp, Homo sapien
tgacagcattggtccagagaaagca

SEQ ID NO: 651523 - DNA, 25 bp, Homo sapien
tgtgcttgtgtaggatgtcttgccc

SEQ ID NO: 651524 - DNA, 25 bp, Homo sapien
gaggattccagctcatgtcactagc

SEQ ID NO: 651525 - DNA, 25 bp, Homo sapien
ttttagatctggatatttggaggcc

SEQ ID NO: 651526 - DNA, 25 bp, Homo sapien
taaggagcttgaggtgaacactcca

SEQ ID NO: 651527 - DNA, 25 bp, Homo sapien
tcagcagtacatccttagtaggcct

SEQ ID NO: 651528 - DNA, 25 bp, Homo sapien
ggttgggcgatcagagtccatagca

SEQ ID NO: 651529 - DNA, 25 bp, Homo sapien
tagtaggcctcacaatagtgtgtcc

SEQ ID NO: 651530 - DNA, 25 bp, Homo sapien
tagtgtgtccacaatacgggttagt

SEQ ID NO: 651531 - DNA, 25 bp, Homo sapien
tattccctagacttagcatgaggcg

SEQ ID NO: 651532 - DNA, 25 bp, Homo sapien
aaaaatcaaagccacacttagcgtg

SEQ ID NO: 651533 - DNA, 25 bp, Homo sapien
taatgtggctttgtaccatgtcaac

SEQ ID NO: 651534 - DNA, 25 bp, Homo sapien
gaatagctaaaggtcagcgctcacc

SEQ ID NO: 651535 - DNA, 25 bp, Homo sapien
tgggcgtggatcccctctaactttc

SEQ ID NO: 651536 - DNA, 25 bp, Homo sapien
tgtgggcgtggatcccctctaactt

SEQ ID NO: 651537 - DNA, 25 bp, Homo sapien
gcgtggatcccctctaactttccta

SEQ ID NO: 651538 - DNA, 25 bp, Homo sapien
cttgtgggcgtggatcccctctaac

SEQ ID NO: 651539 - DNA, 25 bp, Homo sapien
tgggtgttcctggagacctcaaaag

SEQ ID NO: 651540 - DNA, 25 bp, Homo sapien
cctcgtagtctgaagtgtatccagc

SEQ ID NO: 651541 - DNA, 25 bp, Homo sapien
taaaatgtttttccgaggctgccgc

SEQ ID NO: 651542 - DNA, 25 bp, Homo sapien
tagcttgtgtctgaacctcgtagtc

SEQ ID NO: 651543 - DNA, 25 bp, Homo sapien
ggaaatgacctttgttattgaaatg

SEQ ID NO: 651544 - DNA, 25 bp, Homo sapien
ttgaaatgtaatgacaccaaagctc

SEQ ID NO: 651545 - DNA, 25 bp, Homo sapien
gttattgaaatgtaatgacaccaaa

SEQ ID NO: 651546 - DNA, 25 bp, Homo sapien
gaaatgacctttgttattgaaatgt

SEQ ID NO: 651547 - DNA, 25 bp, Homo sapien
ttgccagtgagaccagtggaggcct

SEQ ID NO: 651548 - DNA, 25 bp, Homo sapien
agccaggcagccgtgaagtgacaaa

SEQ ID NO: 651549 - DNA, 25 bp, Homo sapien
tctttctggtaagcaataggtccaa

SEQ ID NO: 651550 - DNA, 25 bp, Homo sapien
aactccaattctgtccaagggacgg

SEQ ID NO: 651551 - DNA, 25 bp, Homo sapien
actgctcagctttgataacagcagc

SEQ ID NO: 651552 - DNA, 25 bp, Homo sapien
gctcagctttgataacagcagctca

SEQ ID NO: 651553 - DNA, 25 bp, Homo sapien
tcagctttgataacagcagctcatc

SEQ ID NO: 651554 - DNA, 25 bp, Homo sapien
tgctcagctttgataacagcagctc

SEQ ID NO: 651555 - DNA, 25 bp, Homo sapien
ggaagaagtctacacattctaagtg

SEQ ID NO: 651556 - DNA, 25 bp, Homo sapien
ccgtgtaaccaacacaacatgtggc

SEQ ID NO: 651557 - DNA, 25 bp, Homo sapien
aacacccgtgtaaccaacacaacat

SEQ ID NO: 651558 - DNA, 25 bp, Homo sapien
caacacaacatgtggctcaagaaat

SEQ ID NO: 651559 - DNA, 25 bp, Homo sapien
ctctctaatgggctcttgtgggacc

SEQ ID NO: 651560 - DNA, 25 bp, Homo sapien
ctgtttcccttggatatttataatc

SEQ ID NO: 651561 - DNA, 25 bp, Homo sapien
cttgtgggacccctccacaacgtag

SEQ ID NO: 651562 - DNA, 25 bp, Homo sapien
cacaacgtagggatgactccagatg

SEQ ID NO: 651563 - DNA, 25 bp, Homo sapien
tctccagcatgtggcttaaatacct

SEQ ID NO: 651564 - DNA, 25 bp, Homo sapien
ctctccagcatgtggcttaaatacc

SEQ ID NO: 651565 - DNA, 25 bp, Homo sapien
catgtggcttaaatacctggaacat

SEQ ID NO: 651566 - DNA, 25 bp, Homo sapien
cagcatgtggcttaaatacctggaa

SEQ ID NO: 651567 - DNA, 25 bp, Homo sapien
tcctgtccggttgcccacactgtgc

SEQ ID NO: 651568 - DNA, 25 bp, Homo sapien
ctgtccggttgcccacactgtgctg

SEQ ID NO: 651569 - DNA, 25 bp, Homo sapien
tctttataaattcaaatccatcctg

SEQ ID NO: 651570 - DNA, 25 bp, Homo sapien
caaatccatcctgtccggttgccca

SEQ ID NO: 651571 - DNA, 25 bp, Homo sapien
taaaccatcctttgtgtgtcagacc

SEQ ID NO: 651572 - DNA, 25 bp, Homo sapien
gacccctcataccactcaggagttg

SEQ ID NO: 651573 - DNA, 25 bp, Homo sapien
ggagcagccctggactagtcagtga

SEQ ID NO: 651574 - DNA, 25 bp, Homo sapien
ggtcagcaagcaaaactcaaggttc

SEQ ID NO: 651575 - DNA, 25 bp, Homo sapien
tgtgaattgcaccaagagttcgctc

SEQ ID NO: 651576 - DNA, 25 bp, Homo sapien
gagttcgctccacctcaaggccagg

SEQ ID NO: 651577 - DNA, 25 bp, Homo sapien
gaggctttcataccctgcaccaggg

SEQ ID NO: 651578 - DNA, 25 bp, Homo sapien
ctttgttctgggtcatagttccagc

SEQ ID NO: 651579 - DNA, 25 bp, Homo sapien
tcttaattaagattgctgagtggcc

SEQ ID NO: 651580 - DNA, 25 bp, Homo sapien
aattaagattgctgagtggccaagc

SEQ ID NO: 651581 - DNA, 25 bp, Homo sapien
taagcaaagaggagcttatggagct

SEQ ID NO: 651582 - DNA, 25 bp, Homo sapien
gctttgtgacaggttgaatatttat

SEQ ID NO: 651583 - DNA, 25 bp, Homo sapien
gggaagatttggcgattgaatgagc

SEQ ID NO: 651584 - DNA, 25 bp, Homo sapien
tgggggaagatttggcgattgaatg

SEQ ID NO: 651585 - DNA, 25 bp, Homo sapien
tcactggcggtcaggtttttgggat

SEQ ID NO: 651586 - DNA, 25 bp, Homo sapien
aagatttggcgattgaatgagccac

SEQ ID NO: 651587 - DNA, 25 bp, Homo sapien
tttctccatagacttgcttgaagcc

SEQ ID NO: 651588 - DNA, 25 bp, Homo sapien
tctccatagacttgcttgaagccta

SEQ ID NO: 651589 - DNA, 25 bp, Homo sapien
tccatagacttgcttgaagcctaag

SEQ ID NO: 651590 - DNA, 25 bp, Homo sapien
catagacttgcttgaagcctaaggg

SEQ ID NO: 651591 - DNA, 25 bp, Homo sapien
tctgcacccaacacttgcccttcat

SEQ ID NO: 651592 - DNA, 25 bp, Homo sapien
tggtgccttgtccatctgcacccaa

SEQ ID NO: 651593 - DNA, 25 bp, Homo sapien
gagagagcagtgttgcagatgtggt

SEQ ID NO: 651594 - DNA, 25 bp, Homo sapien
tgcagatgtggttggtgccttgtcc

SEQ ID NO: 651595 - DNA, 25 bp, Homo sapien
ccttttgcatcctagagagcccaga

SEQ ID NO: 651596 - DNA, 25 bp, Homo sapien
gccttttgcatcctagagagcccag

SEQ ID NO: 651597 - DNA, 25 bp, Homo sapien
agccttttgcatcctagagagccca

SEQ ID NO: 651598 - DNA, 25 bp, Homo sapien
caccaactgttcttggtaacatgca

SEQ ID NO: 651599 - DNA, 25 bp, Homo sapien
tttcgaatcatactcccttctgcat

SEQ ID NO: 651600 - DNA, 25 bp, Homo sapien
gaatcatactcccttctgcattaga

SEQ ID NO: 651601 - DNA, 25 bp, Homo sapien
atgagcatactttcgaatcatactc

SEQ ID NO: 651602 - DNA, 25 bp, Homo sapien
gcatactttcgaatcatactccctt

SEQ ID NO: 651603 - DNA, 25 bp, Homo sapien
tctgtctgaccggttctggttaagg

SEQ ID NO: 651604 - DNA, 25 bp, Homo sapien
ttcctgggctcgttctcacatttcc

SEQ ID NO: 651605 - DNA, 25 bp, Homo sapien
cccttgctgtctgtctgaccggttc

SEQ ID NO: 651606 - DNA, 25 bp, Homo sapien
accggttctggttaaggcactgcct

SEQ ID NO: 651607 - DNA, 25 bp, Homo sapien
aggccacgtgtctgcaacgtgggtc

SEQ ID NO: 651608 - DNA, 25 bp, Homo sapien
cgtgtctgcaacgtgggtcttcaga

SEQ ID NO: 651609 - DNA, 25 bp, Homo sapien
tagaggccacgtgtctgcaacgtgg

SEQ ID NO: 651610 - DNA, 25 bp, Homo sapien
cacgtgtctgcaacgtgggtcttca

SEQ ID NO: 651611 - DNA, 25 bp, Homo sapien
acctgtgcttgaatcctccacaccc

SEQ ID NO: 651612 - DNA, 25 bp, Homo sapien
cctctgacctgtgcttgaatcctcc

SEQ ID NO: 651613 - DNA, 25 bp, Homo sapien
cctgtgcttgaatcctccacaccca

SEQ ID NO: 651614 - DNA, 25 bp, Homo sapien
tgtgcttgaatcctccacacccacc

SEQ ID NO: 651615 - DNA, 25 bp, Homo sapien
tgtggacaatgaggaaattgtccct

SEQ ID NO: 651616 - DNA, 25 bp, Homo sapien
cttgtggacaatgaggaaattgtcc

SEQ ID NO: 651617 - DNA, 25 bp, Homo sapien
tgcttgtggacaatgaggaaattgt

SEQ ID NO: 651618 - DNA, 25 bp, Homo sapien
ctgcttgtggacaatgaggaaattg

SEQ ID NO: 651619 - DNA, 25 bp, Homo sapien
gtgtggaggagcttcagtgccaaac

SEQ ID NO: 651620 - DNA, 25 bp, Homo sapien
tggggcctaggcgaggggcagcggg

SEQ ID NO: 651621 - DNA, 25 bp, Homo sapien
caaggggctggagaagtgtgtggag

SEQ ID NO: 651622 - DNA, 25 bp, Homo sapien
gggcagcgggtggaggcctgggcca

SEQ ID NO: 651623 - DNA, 25 bp, Homo sapien
agagcctggactgtcggtctggcca

SEQ ID NO: 651624 - DNA, 25 bp, Homo sapien
agcgacggggtcagagcctggactg

SEQ ID NO: 651625 - DNA, 25 bp, Homo sapien
gagcctggactgtcggtctggccat

SEQ ID NO: 651626 - DNA, 25 bp, Homo sapien
gggagcgacggggtcagagcctgga

SEQ ID NO: 651627 - DNA, 25 bp, Homo sapien
tcatacccgtttaatccatctaact

SEQ ID NO: 651628 - DNA, 25 bp, Homo sapien
tagctcgaatctcatacccgtttaa

SEQ ID NO: 651629 - DNA, 25 bp, Homo sapien
tcttttgactttctgttcaccttgc

SEQ ID NO: 651630 - DNA, 25 bp, Homo sapien
tttgtttttagctcgaatctcatac

SEQ ID NO: 651631 - DNA, 25 bp, Homo sapien
tacaatgaagcatgtagatttgaga

SEQ ID NO: 651632 - DNA, 25 bp, Homo sapien
cattctttgtacaatgaagcatgta

SEQ ID NO: 651633 - DNA, 25 bp, Homo sapien
ctttgtacaatgaagcatgtagatt

SEQ ID NO: 651634 - DNA, 25 bp, Homo sapien
gactctgatgtccagttgttgcatt

SEQ ID NO: 651635 - DNA, 25 bp, Homo sapien
tggctgctctgctactggacctgaa

SEQ ID NO: 651636 - DNA, 25 bp, Homo sapien
ctggctgctctgctactggacctga

SEQ ID NO: 651637 - DNA, 25 bp, Homo sapien
cctgaaagggtctggtgcactgtgg

SEQ ID NO: 651638 - DNA, 25 bp, Homo sapien
ctgaatgtctgtgatatgcaggaaa

SEQ ID NO: 651639 - DNA, 25 bp, Homo sapien
tgaatgtctgtgatatgcaggaaac

SEQ ID NO: 651640 - DNA, 25 bp, Homo sapien
gaatgtctgtgatatgcaggaaact

SEQ ID NO: 651641 - DNA, 25 bp, Homo sapien
atgtctgtgatatgcaggaaactgg

SEQ ID NO: 651642 - DNA, 25 bp, Homo sapien
ctaaatggttctgtggataatggtg

SEQ ID NO: 651643 - DNA, 25 bp, Homo sapien
cttggctgacatcttctaaatggtt

SEQ ID NO: 651644 - DNA, 25 bp, Homo sapien
ttctgtggataatggtgtttatccc

SEQ ID NO: 651645 - DNA, 25 bp, Homo sapien
gacatcttctaaatggttctgtgga

SEQ ID NO: 651646 - DNA, 25 bp, Homo sapien
attctctgtgggaactgagagggag

SEQ ID NO: 651647 - DNA, 25 bp, Homo sapien
ccattctctgtgggaactgagaggg

SEQ ID NO: 651648 - DNA, 25 bp, Homo sapien
cccattctctgtgggaactgagagg

SEQ ID NO: 651649 - DNA, 25 bp, Homo sapien
cattctctgtgggaactgagaggga

SEQ ID NO: 651650 - DNA, 25 bp, Homo sapien
gtgggctcagctgtatggtgactct

SEQ ID NO: 651651 - DNA, 25 bp, Homo sapien
tcttgtgtccgagtggcatgtggct

SEQ ID NO: 651652 - DNA, 25 bp, Homo sapien
caggcccggtcttgtgtccgagtgg

SEQ ID NO: 651653 - DNA, 25 bp, Homo sapien
gctcagctgtatggtgactctttca

SEQ ID NO: 651654 - DNA, 25 bp, Homo sapien
tcaaggaatgtgcgcagcatcagtt

SEQ ID NO: 651655 - DNA, 25 bp, Homo sapien
gcccttttgaccagtcagtggagat

SEQ ID NO: 651656 - DNA, 25 bp, Homo sapien
tgctggttgcctggtgcttgttatg

SEQ ID NO: 651657 - DNA, 25 bp, Homo sapien
ctggtgcttgttatgtccttgatga

SEQ ID NO: 651658 - DNA, 25 bp, Homo sapien
ggttgcctggtgcttgttatgtcct

SEQ ID NO: 651659 - DNA, 25 bp, Homo sapien
cctttctgacatccaggcaggtaga

SEQ ID NO: 651660 - DNA, 25 bp, Homo sapien
cgcctttctgacatccaggcaggta

SEQ ID NO: 651661 - DNA, 25 bp, Homo sapien
gccgcctttctgacatccaggcagg

SEQ ID NO: 651662 - DNA, 25 bp, Homo sapien
tttctgacatccaggcaggtagagg

SEQ ID NO: 651663 - DNA, 25 bp, Homo sapien
actcagctctccattgctctggacg

SEQ ID NO: 651664 - DNA, 25 bp, Homo sapien
gactgtgtctggtgccaccgactta

SEQ ID NO: 651665 - DNA, 25 bp, Homo sapien
ggactgtgtctggtgccaccgactt

SEQ ID NO: 651666 - DNA, 25 bp, Homo sapien
cattgctctggacggggactgtgtc

SEQ ID NO: 651667 - DNA, 25 bp, Homo sapien
ctggagggtagcctcccatgccgaa

SEQ ID NO: 651668 - DNA, 25 bp, Homo sapien
gaagcacagatatgtggatgtgaat

SEQ ID NO: 651669 - DNA, 25 bp, Homo sapien
tcccatgccgaagttcaggcagaag

SEQ ID NO: 651670 - DNA, 25 bp, Homo sapien
caagggagcgctttctgcagttagg

SEQ ID NO: 651671 - DNA, 25 bp, Homo sapien
aagggggatagaagtcacaaaaatg

SEQ ID NO: 651672 - DNA, 25 bp, Homo sapien
atctgaaaccaggttagaactccca

SEQ ID NO: 651673 - DNA, 25 bp, Homo sapien
gcagaaaagggttgatactttgcca

SEQ ID NO: 651674 - DNA, 25 bp, Homo sapien
tgcaccatgctgtctaaattaggat

SEQ ID NO: 651675 - DNA, 25 bp, Homo sapien
ctcctcatcaggcatagggactgat

SEQ ID NO: 651676 - DNA, 25 bp, Homo sapien
ccattgaacttgtttggctcctcat

SEQ ID NO: 651677 - DNA, 25 bp, Homo sapien
acggtgtggtactgcggaatgccat

SEQ ID NO: 651678 - DNA, 25 bp, Homo sapien
tcatcaggcatagggactgatacaa

SEQ ID NO: 651679 - DNA, 25 bp, Homo sapien
taacattggaactgagcaaaatgga

SEQ ID NO: 651680 - DNA, 25 bp, Homo sapien
ctttcttaacattggaactgagcaa

SEQ ID NO: 651681 - DNA, 25 bp, Homo sapien
aacattggaactgagcaaaatggag

SEQ ID NO: 651682 - DNA, 25 bp, Homo sapien
tcttaacattggaactgagcaaaat

SEQ ID NO: 651683 - DNA, 25 bp, Homo sapien
ctcccgcttggacagcatcctatgt

SEQ ID NO: 651684 - DNA, 25 bp, Homo sapien
gcgtcccggaggctccccatctgca

SEQ ID NO: 651685 - DNA, 25 bp, Homo sapien
ctgttggtcctctggcgtcccggag

SEQ ID NO: 651686 - DNA, 25 bp, Homo sapien
acagcatcctatgttcataatgggc

SEQ ID NO: 651687 - DNA, 25 bp, Homo sapien
gaagtgttgcagagggaatttggga

SEQ ID NO: 651688 - DNA, 25 bp, Homo sapien
caaggtgtctataaaagattgggaa

SEQ ID NO: 651689 - DNA, 25 bp, Homo sapien
tccaaaagcatttgccagggtcaag

SEQ ID NO: 651690 - DNA, 25 bp, Homo sapien
aactagatggaagaagtgttgcaga

SEQ ID NO: 651691 - DNA, 25 bp, Homo sapien
aaatgccacaccaccaggtgcaaac

SEQ ID NO: 651692 - DNA, 25 bp, Homo sapien
tgagctggacctaggaacacaaatg

SEQ ID NO: 651693 - DNA, 25 bp, Homo sapien
taggaacacaaatgccacaccacca

SEQ ID NO: 651694 - DNA, 25 bp, Homo sapien
ctgagctggacctaggaacacaaat

SEQ ID NO: 651695 - DNA, 25 bp, Homo sapien
caggatcaaccgagctgagagatca

SEQ ID NO: 651696 - DNA, 25 bp, Homo sapien
tgtctgcaggatcaaccgagctgag

SEQ ID NO: 651697 - DNA, 25 bp, Homo sapien
atcaaccgagctgagagatcaccca

SEQ ID NO: 651698 - DNA, 25 bp, Homo sapien
gctgagagatcacccagaggcctct

SEQ ID NO: 651699 - DNA, 25 bp, Homo sapien
ctggccttgtgttggcctcgctgac

SEQ ID NO: 651700 - DNA, 25 bp, Homo sapien
tggccttgtgttggcctcgctgacc

SEQ ID NO: 651701 - DNA, 25 bp, Homo sapien
gccttgtgttggcctcgctgaccct

SEQ ID NO: 651702 - DNA, 25 bp, Homo sapien
tctggccttgtgttggcctcgctga

SEQ ID NO: 651703 - DNA, 25 bp, Homo sapien
ctgtcattgccaaagatgccaggat

SEQ ID NO: 651704 - DNA, 25 bp, Homo sapien
atggggcctggaacttcaaggcagc

SEQ ID NO: 651705 - DNA, 25 bp, Homo sapien
attgccaaagatgccaggatggggc

SEQ ID NO: 651706 - DNA, 25 bp, Homo sapien
tcattgccaaagatgccaggatggg

SEQ ID NO: 651707 - DNA, 25 bp, Homo sapien
ggccatctgcttgcatgctcactgt

SEQ ID NO: 651708 - DNA, 25 bp, Homo sapien
gggctatacctaggacactggctct

SEQ ID NO: 651709 - DNA, 25 bp, Homo sapien
tctccgggctatacctaggacactg

SEQ ID NO: 651710 - DNA, 25 bp, Homo sapien
gctcactgtctccgggctataccta

SEQ ID NO: 651711 - DNA, 25 bp, Homo sapien
gcaaggaggctctcggaaggttccc

SEQ ID NO: 651712 - DNA, 25 bp, Homo sapien
tgggccctgagatgaacgcagattt

SEQ ID NO: 651713 - DNA, 25 bp, Homo sapien
gatttcacgacatcctcatgaggga

SEQ ID NO: 651714 - DNA, 25 bp, Homo sapien
gaagatgtgggtcatcaactcaagc

SEQ ID NO: 651715 - DNA, 25 bp, Homo sapien
cccgggagtctgtggtagattattt

SEQ ID NO: 651716 - DNA, 25 bp, Homo sapien
agaaaaaggctggatgcacatagga

SEQ ID NO: 651717 - DNA, 25 bp, Homo sapien
ttgttgtgccgcactgttgcagcag

SEQ ID NO: 651718 - DNA, 25 bp, Homo sapien
cagaaccctacttatcctgcagagg

SEQ ID NO: 651719 - DNA, 25 bp, Homo sapien
ctgagtctgtttgactcctgcaaca

SEQ ID NO: 651720 - DNA, 25 bp, Homo sapien
caacaatgttgaggagtaagagctc

SEQ ID NO: 651721 - DNA, 25 bp, Homo sapien
tcctgcaacaatgttgaggagtaag

SEQ ID NO: 651722 - DNA, 25 bp, Homo sapien
aatgttgaggagtaagagctcctcc

SEQ ID NO: 651723 - DNA, 25 bp, Homo sapien
gcagctaccaagactctactgtgaa

SEQ ID NO: 651724 - DNA, 25 bp, Homo sapien
tgttttcctgctccgtagacacggg

SEQ ID NO: 651725 - DNA, 25 bp, Homo sapien
tcatcattaactgggctgctggtcc

SEQ ID NO: 651726 - DNA, 25 bp, Homo sapien
taagtcctgttgatcagaacgatcg

SEQ ID NO: 651727 - DNA, 25 bp, Homo sapien
tggtttggccgcagttacattggca

SEQ ID NO: 651728 - DNA, 25 bp, Homo sapien
acagtcatcaccagctcccgttggt

SEQ ID NO: 651729 - DNA, 25 bp, Homo sapien
gcacagtcattggaaaaatcatttc

SEQ ID NO: 651730 - DNA, 25 bp, Homo sapien
tacatcgcatcactggtgcatctgg

SEQ ID NO: 651731 - DNA, 25 bp, Homo sapien
ctgaagcacatgtcaggaggaattg

SEQ ID NO: 651732 - DNA, 25 bp, Homo sapien
aagcacatgtcaggaggaattgttg

SEQ ID NO: 651733 - DNA, 25 bp, Homo sapien
catgtcaggaggaattgttggcaac

SEQ ID NO: 651734 - DNA, 25 bp, Homo sapien
atgtcaggaggaattgttggcaacc

SEQ ID NO: 651735 - DNA, 25 bp, Homo sapien
ggcaaggacgcatctgccttgggct

SEQ ID NO: 651736 - DNA, 25 bp, Homo sapien
gagggcaaggacgcatctgccttgg

SEQ ID NO: 651737 - DNA, 25 bp, Homo sapien
gggcaaggacgcatctgccttgggc

SEQ ID NO: 651738 - DNA, 25 bp, Homo sapien
agggcaaggacgcatctgccttggg

SEQ ID NO: 651739 - DNA, 25 bp, Homo sapien
tcacggccctcaagagaggccaaag

SEQ ID NO: 651740 - DNA, 25 bp, Homo sapien
tactctcacttgcatcctctgatga

SEQ ID NO: 651741 - DNA, 25 bp, Homo sapien
ggccaaagcttgtgttactctcact

SEQ ID NO: 651742 - DNA, 25 bp, Homo sapien
tgcggcaaaagcctgtgcatgtgct

SEQ ID NO: 651743 - DNA, 25 bp, Homo sapien
tcatcttgctgcctggggtcattaa

SEQ ID NO: 651744 - DNA, 25 bp, Homo sapien
tccattctggggtagctgggcacat

SEQ ID NO: 651745 - DNA, 25 bp, Homo sapien
ttttctagtccagttatccattctg

SEQ ID NO: 651746 - DNA, 25 bp, Homo sapien
cctggggtcattaacagttcagctt

SEQ ID NO: 651747 - DNA, 25 bp, Homo sapien
aggtggaaggccttaatacatgtgt

SEQ ID NO: 651748 - DNA, 25 bp, Homo sapien
tgttgcctgcaataagtgtctttag

SEQ ID NO: 651749 - DNA, 25 bp, Homo sapien
acttaatctcccctgcagttctggc

SEQ ID NO: 651750 - DNA, 25 bp, Homo sapien
ctgctagtaactgaaggtggaaggc

SEQ ID NO: 651751 - DNA, 25 bp, Homo sapien
gcacgggtggcaccaacagtagcca

SEQ ID NO: 651752 - DNA, 25 bp, Homo sapien
acagtagccaccactttagaatttt

SEQ ID NO: 651753 - DNA, 25 bp, Homo sapien
cagtagccaccactttagaattttt

SEQ ID NO: 651754 - DNA, 25 bp, Homo sapien
caggctgaggggcacgggtggcacc

SEQ ID NO: 651755 - DNA, 25 bp, Homo sapien
ggtgtcaccaactgttggactgtga

SEQ ID NO: 651756 - DNA, 25 bp, Homo sapien
tcaccaactgttggactgtgacaac

SEQ ID NO: 651757 - DNA, 25 bp, Homo sapien
aactgttggactgtgacaactggca

SEQ ID NO: 651758 - DNA, 25 bp, Homo sapien
ggtggtgtcaccaactgttggactg

SEQ ID NO: 651759 - DNA, 25 bp, Homo sapien
ctccttaatggtggagcctgagtct

SEQ ID NO: 651760 - DNA, 25 bp, Homo sapien
cttggaatctgacgcacacttgctg

SEQ ID NO: 651761 - DNA, 25 bp, Homo sapien
acccctgccttgttacacacttgga

SEQ ID NO: 651762 - DNA, 25 bp, Homo sapien
tgacgcacacttgctgagttgaact

SEQ ID NO: 651763 - DNA, 25 bp, Homo sapien
gcgtgggcaaggacttcatgtccaa

SEQ ID NO: 651764 - DNA, 25 bp, Homo sapien
ggcgtgggcaaggacttcatgtcca

SEQ ID NO: 651765 - DNA, 25 bp, Homo sapien
gtgggcaaggacttcatgtccaaaa

SEQ ID NO: 651766 - DNA, 25 bp, Homo sapien
taggcgtgggcaaggacttcatgtc

SEQ ID NO: 651767 - DNA, 25 bp, Homo sapien
ggtctgaagggtgtccgatggcaaa

SEQ ID NO: 651768 - DNA, 25 bp, Homo sapien
aagggtgtccgatggcaaagggaga

SEQ ID NO: 651769 - DNA, 25 bp, Homo sapien
tctgaagggtgtccgatggcaaagg

SEQ ID NO: 651770 - DNA, 25 bp, Homo sapien
ttggtctgaagggtgtccgatggca

SEQ ID NO: 651771 - DNA, 25 bp, Homo sapien
cgcaatctttccgtgagtttggcct

SEQ ID NO: 651772 - DNA, 25 bp, Homo sapien
gctcctttgcccatcgttgctgaca

SEQ ID NO: 651773 - DNA, 25 bp, Homo sapien
gtggcaatgcttggcgagcgcaatc

SEQ ID NO: 651774 - DNA, 25 bp, Homo sapien
atcgttgctgacaccagagcaactg

SEQ ID NO: 651775 - DNA, 25 bp, Homo sapien
aggggccgagagagggcgtccagaa

SEQ ID NO: 651776 - DNA, 25 bp, Homo sapien
ggccgagagagggcgtccagaaatg

SEQ ID NO: 651777 - DNA, 25 bp, Homo sapien
gccgagagagggcgtccagaaatgt

SEQ ID NO: 651778 - DNA, 25 bp, Homo sapien
gggccgagagagggcgtccagaaat

SEQ ID NO: 651779 - DNA, 25 bp, Homo sapien
gaatagcgtctatgaggtcgtgctg

SEQ ID NO: 651780 - DNA, 25 bp, Homo sapien
tgtaataggtggaatagcgtctatg

SEQ ID NO: 651781 - DNA, 25 bp, Homo sapien
ctatgaggtcgtgctgtgtacagag

SEQ ID NO: 651782 - DNA, 25 bp, Homo sapien
aataggtggaatagcgtctatgagg

SEQ ID NO: 651783 - DNA, 25 bp, Homo sapien
tcaggtctctctgaggatgacgact

SEQ ID NO: 651784 - DNA, 25 bp, Homo sapien
accactcaagtttttgcactggaca

SEQ ID NO: 651785 - DNA, 25 bp, Homo sapien
agctgggcttgaagtggattccgca

SEQ ID NO: 651786 - DNA, 25 bp, Homo sapien
ggattccgcagtcagatttgaggcc

SEQ ID NO: 651787 - DNA, 25 bp, Homo sapien
tttggcatctctctcatctgaatgt

SEQ ID NO: 651788 - DNA, 25 bp, Homo sapien
tggcatctctctcatctgaatgttt

SEQ ID NO: 651789 - DNA, 25 bp, Homo sapien
gcatctctctcatctgaatgttttg

SEQ ID NO: 651790 - DNA, 25 bp, Homo sapien
ctctctcatctgaatgttttgtatt

SEQ ID NO: 651791 - DNA, 25 bp, Homo sapien
aaaataacgtgagcccaccttgcag

SEQ ID NO: 651792 - DNA, 25 bp, Homo sapien
taagcagtctatttgaactccagtc

SEQ ID NO: 651793 - DNA, 25 bp, Homo sapien
tcttcctgggctacatttgagtgag

SEQ ID NO: 651794 - DNA, 25 bp, Homo sapien
aatacagccggctcagaaagtgtct

SEQ ID NO: 651795 - DNA, 25 bp, Homo sapien
cgccgccgccggagggaccttctgc

SEQ ID NO: 651796 - DNA, 25 bp, Homo sapien
cgccgccggagggaccttctgctga

SEQ ID NO: 651797 - DNA, 25 bp, Homo sapien
tccggcgacgaggaccgcgcgcgtc

SEQ ID NO: 651798 - DNA, 25 bp, Homo sapien
cggcgacgaggaccgcgcgcgtcgc

SEQ ID NO: 651799 - DNA, 25 bp, Homo sapien
cgcctgtgcgctgcttactcgcgag

SEQ ID NO: 651800 - DNA, 25 bp, Homo sapien
agttgtccgtatgttctccatccag

SEQ ID NO: 651801 - DNA, 25 bp, Homo sapien
tactcgcgagctggaggtactgctg

SEQ ID NO: 651802 - DNA, 25 bp, Homo sapien
taaagttgtggtggtagacccggca

SEQ ID NO: 651803 - DNA, 25 bp, Homo sapien
ggtgctctgcgcaaagtctgccctt

SEQ ID NO: 651804 - DNA, 25 bp, Homo sapien
aatagatcttgtgtgctcccaacag

SEQ ID NO: 651805 - DNA, 25 bp, Homo sapien
tcccaacagttgtctgctgaaacag

SEQ ID NO: 651806 - DNA, 25 bp, Homo sapien
tgctgaaacagcttcgatcctggga

SEQ ID NO: 651807 - DNA, 25 bp, Homo sapien
ggcaggctctttgctagttgctagg

SEQ ID NO: 651808 - DNA, 25 bp, Homo sapien
gacaccgtgatgttcatcctcgtgg

SEQ ID NO: 651809 - DNA, 25 bp, Homo sapien
ggcagcgttgtcttcgagggacacc

SEQ ID NO: 651810 - DNA, 25 bp, Homo sapien
ctttgctagttgctagggtggcagc

SEQ ID NO: 651811 - DNA, 25 bp, Homo sapien
ctggtcacaattgtcaggttactgt

SEQ ID NO: 651812 - DNA, 25 bp, Homo sapien
tgtgagcatcgcttatgctgaaggg

SEQ ID NO: 651813 - DNA, 25 bp, Homo sapien
aggttactgtgagcatcgcttatgc

SEQ ID NO: 651814 - DNA, 25 bp, Homo sapien
caattgtcaggttactgtgagcatc

SEQ ID NO: 651815 - DNA, 25 bp, Homo sapien
ttttctattaatctccagaaggctc

SEQ ID NO: 651816 - DNA, 25 bp, Homo sapien
ctttgcctagttgagttgcatttcc

SEQ ID NO: 651817 - DNA, 25 bp, Homo sapien
agaaggctccataccaccctccttt

SEQ ID NO: 651818 - DNA, 25 bp, Homo sapien
cttttgcttctttgcctagttgagt

SEQ ID NO: 651819 - DNA, 25 bp, Homo sapien
tgcacaggagcaccgtgatgtcatt

SEQ ID NO: 651820 - DNA, 25 bp, Homo sapien
cacaggagcaccgtgatgtcattgg

SEQ ID NO: 651821 - DNA, 25 bp, Homo sapien
gtgcacaggagcaccgtgatgtcat

SEQ ID NO: 651822 - DNA, 25 bp, Homo sapien
caggagcaccgtgatgtcattggtg

SEQ ID NO: 651823 - DNA, 25 bp, Homo sapien
ggttcggcacctgttcccgtcatgt

SEQ ID NO: 651824 - DNA, 25 bp, Homo sapien
gaatctgtgctttgtgggttcggca

SEQ ID NO: 651825 - DNA, 25 bp, Homo sapien
tgttcccgtcatgtgctagctcagc

SEQ ID NO: 651826 - DNA, 25 bp, Homo sapien
cagcttgcagaacagcttgggtcca

SEQ ID NO: 651827 - DNA, 25 bp, Homo sapien
tgaggacctgcacgggcaactggaa

SEQ ID NO: 651828 - DNA, 25 bp, Homo sapien
acctgcacgggcaactggaaggggc

SEQ ID NO: 651829 - DNA, 25 bp, Homo sapien
ctgaggacctgcacgggcaactgga

SEQ ID NO: 651830 - DNA, 25 bp, Homo sapien
tgcacgggcaactggaaggggccag

SEQ ID NO: 651831 - DNA, 25 bp, Homo sapien
caaaggtccccctcgatggctttgc

SEQ ID NO: 651832 - DNA, 25 bp, Homo sapien
tcaaaggtccccctcgatggctttg

SEQ ID NO: 651833 - DNA, 25 bp, Homo sapien
tggtgtacatctgaggttcctgttg

SEQ ID NO: 651834 - DNA, 25 bp, Homo sapien
agccattgcagcctcaatggtgtac

SEQ ID NO: 651835 - DNA, 25 bp, Homo sapien
ctagaggctcgtgatgttcttgtga

SEQ ID NO: 651836 - DNA, 25 bp, Homo sapien
atgcagaccctcaataccacactgt

SEQ ID NO: 651837 - DNA, 25 bp, Homo sapien
ttcccaagactgtactgaaagcagc

SEQ ID NO: 651838 - DNA, 25 bp, Homo sapien
tgtcggtcgtctctaaattcacggg

SEQ ID NO: 651839 - DNA, 25 bp, Homo sapien
tcattaagtcaatgggcaggtgtgg

SEQ ID NO: 651840 - DNA, 25 bp, Homo sapien
tgatgttttccacacgtggctgtaa

SEQ ID NO: 651841 - DNA, 25 bp, Homo sapien
ctgagcatgattccagtattcccca

SEQ ID NO: 651842 - DNA, 25 bp, Homo sapien
ttcttacactcgttactcagagtgg

SEQ ID NO: 651843 - DNA, 25 bp, Homo sapien
cacgaccactggaggtttccacctg

SEQ ID NO: 651844 - DNA, 25 bp, Homo sapien
gaggtttccacctgaatgttcttac

SEQ ID NO: 651845 - DNA, 25 bp, Homo sapien
tagataccgtgaaccaggtgctgac

SEQ ID NO: 651846 - DNA, 25 bp, Homo sapien
tcttccagtgaaatatagctccctt

SEQ ID NO: 651847 - DNA, 25 bp, Homo sapien
gctgacgtgcctggtagggctacaa

SEQ ID NO: 651848 - DNA, 25 bp, Homo sapien
ttccattgtcaagccataatccagg

SEQ ID NO: 651849 - DNA, 25 bp, Homo sapien
gaacaatggtttgatttgatggaca

SEQ ID NO: 651850 - DNA, 25 bp, Homo sapien
tttaataacatagtctcaacatgtc

SEQ ID NO: 651851 - DNA, 25 bp, Homo sapien
tcactttgtacgtggccataacaca

SEQ ID NO: 651852 - DNA, 25 bp, Homo sapien
tagaagatttgaacaatggtttgat

SEQ ID NO: 651853 - DNA, 25 bp, Homo sapien
tccactatcttgattgctgggatac

SEQ ID NO: 651854 - DNA, 25 bp, Homo sapien
ttgcacaaatttccactatcttgat

SEQ ID NO: 651855 - DNA, 25 bp, Homo sapien
aatttccactatcttgattgctggg

SEQ ID NO: 651856 - DNA, 25 bp, Homo sapien
ctatcttgattgctgggatacacat

SEQ ID NO: 651857 - DNA, 25 bp, Homo sapien
gagcatcaggttcctccggttggga

SEQ ID NO: 651858 - DNA, 25 bp, Homo sapien
cctccggttgggatacagtccccat

SEQ ID NO: 651859 - DNA, 25 bp, Homo sapien
caggttcctccggttgggatacagt

SEQ ID NO: 651860 - DNA, 25 bp, Homo sapien
catcaggttcctccggttgggatac

SEQ ID NO: 651861 - DNA, 25 bp, Homo sapien
caattcttggacacttgggcttccc

SEQ ID NO: 651862 - DNA, 25 bp, Homo sapien
cccaggcaacagacgggatggtatc

SEQ ID NO: 651863 - DNA, 25 bp, Homo sapien
taattatgcaatgggtgcttcgcct

SEQ ID NO: 651864 - DNA, 25 bp, Homo sapien
catgtggcaacttgtggagcaattc

SEQ ID NO: 651865 - DNA, 25 bp, Homo sapien
gaacagcggtttccttaatcgatcc

SEQ ID NO: 651866 - DNA, 25 bp, Homo sapien
tggcgtcagccaagaacaggtgctt

SEQ ID NO: 651867 - DNA, 25 bp, Homo sapien
cagacggttgactccgctgagactg

SEQ ID NO: 651868 - DNA, 25 bp, Homo sapien
cagtaaattcccagctggcgtcagc

SEQ ID NO: 651869 - DNA, 25 bp, Homo sapien
gaagtctcacttatatctcttttca

SEQ ID NO: 651870 - DNA, 25 bp, Homo sapien
tgctggagggaaattcagaagtctc

SEQ ID NO: 651871 - DNA, 25 bp, Homo sapien
agtctcacttatatctcttttcaga

SEQ ID NO: 651872 - DNA, 25 bp, Homo sapien
gaaattcagaagtctcacttatatc

SEQ ID NO: 651873 - DNA, 25 bp, Homo sapien
atgtaaacagctgatagaagcaccg

SEQ ID NO: 651874 - DNA, 25 bp, Homo sapien
tgtaaacagctgatagaagcaccgc

SEQ ID NO: 651875 - DNA, 25 bp, Homo sapien
aaacagctgatagaagcaccgccat

SEQ ID NO: 651876 - DNA, 25 bp, Homo sapien
taaacagctgatagaagcaccgcca

SEQ ID NO: 651877 - DNA, 25 bp, Homo sapien
cattctcagtatgagatgtggttac

SEQ ID NO: 651878 - DNA, 25 bp, Homo sapien
gatgtggttactggagctctgcctt

SEQ ID NO: 651879 - DNA, 25 bp, Homo sapien
gaaggcctgcgaggcatcattgctg

SEQ ID NO: 651880 - DNA, 25 bp, Homo sapien
gctgtaggcatcattctcagtatga

SEQ ID NO: 651881 - DNA, 25 bp, Homo sapien
cctgtttatcatctggcggtagaca

SEQ ID NO: 651882 - DNA, 25 bp, Homo sapien
tcctgtttatcatctggcggtagac

SEQ ID NO: 651883 - DNA, 25 bp, Homo sapien
ctgtttatcatctggcggtagacag

SEQ ID NO: 651884 - DNA, 25 bp, Homo sapien
tgtttatcatctggcggtagacagc

SEQ ID NO: 651885 - DNA, 25 bp, Homo sapien
caggaagaagtttatgcattcgtaa

SEQ ID NO: 651886 - DNA, 25 bp, Homo sapien
gaagtttatgcattcgtaaggccac

SEQ ID NO: 651887 - DNA, 25 bp, Homo sapien
acgtaggtccgaaagttgcagagca

SEQ ID NO: 651888 - DNA, 25 bp, Homo sapien
cattcgtaaggccacgtaggtccga

SEQ ID NO: 651889 - DNA, 25 bp, Homo sapien
taatctgacatataagtcatgaggc

SEQ ID NO: 651890 - DNA, 25 bp, Homo sapien
tgcttatatcttcttaacaaaaggc

SEQ ID NO: 651891 - DNA, 25 bp, Homo sapien
taacaaaaggcttaatctgacatat

SEQ ID NO: 651892 - DNA, 25 bp, Homo sapien
tcttcttaacaaaaggcttaatctg

SEQ ID NO: 651893 - DNA, 25 bp, Homo sapien
gctagctaatttccaccactacact

SEQ ID NO: 651894 - DNA, 25 bp, Homo sapien
ctgtagttctagctagctaatttcc

SEQ ID NO: 651895 - DNA, 25 bp, Homo sapien
gattggcctggctcagttacaggca

SEQ ID NO: 651896 - DNA, 25 bp, Homo sapien
tatgtgccatctgcggactctcagc

SEQ ID NO: 651897 - DNA, 25 bp, Homo sapien
gaaccaatcattatggcctacagga

SEQ ID NO: 651898 - DNA, 25 bp, Homo sapien
ggctctcctacttccaggttcaagg

SEQ ID NO: 651899 - DNA, 25 bp, Homo sapien
cagagggtgaggacaccaggctcat

SEQ ID NO: 651900 - DNA, 25 bp, Homo sapien
ctgtacgaagccagggcctccactg

SEQ ID NO: 651901 - DNA, 25 bp, Homo sapien
ttcatccacagagggtgaggacacc

SEQ ID NO: 651902 - DNA, 25 bp, Homo sapien
cctcttcatccacagagggtgagga

SEQ ID NO: 651903 - DNA, 25 bp, Homo sapien
caagtatagctttgtggagcggcct

SEQ ID NO: 651904 - DNA, 25 bp, Homo sapien
catgtgacatgtgagcctgctgcct

SEQ ID NO: 651905 - DNA, 25 bp, Homo sapien
ctgtagcagagaaatccaaggaagc

SEQ ID NO: 651906 - DNA, 25 bp, Homo sapien
ttaggccaacatgcaacttccaggg

SEQ ID NO: 651907 - DNA, 25 bp, Homo sapien
aacagagccagaccatgtctctaat

SEQ ID NO: 651908 - DNA, 25 bp, Homo sapien
cagagccagaccatgtctctaatta

SEQ ID NO: 651909 - DNA, 25 bp, Homo sapien
agagccagaccatgtctctaattaa

SEQ ID NO: 651910 - DNA, 25 bp, Homo sapien
gagccagaccatgtctctaattaaa

SEQ ID NO: 651911 - DNA, 25 bp, Homo sapien
catgtcagagaattgcaggtctgcg

SEQ ID NO: 651912 - DNA, 25 bp, Homo sapien
tgtcagagaattgcaggtctgcgat

SEQ ID NO: 651913 - DNA, 25 bp, Homo sapien
acatgtcagagaattgcaggtctgc

SEQ ID NO: 651914 - DNA, 25 bp, Homo sapien
gacatgtcagagaattgcaggtctg

SEQ ID NO: 651915 - DNA, 25 bp, Homo sapien
ttcagaaccaaattccacaaggaag

SEQ ID NO: 651916 - DNA, 25 bp, Homo sapien
tgcagaccaaaagaaccgggcttgg

SEQ ID NO: 651917 - DNA, 25 bp, Homo sapien
ctgcagaccaaaagaaccgggcttg

SEQ ID NO: 651918 - DNA, 25 bp, Homo sapien
gaggccctgggcacaatgaatacta

SEQ ID NO: 651919 - DNA, 25 bp, Homo sapien
taacagagcctacggagcaggcttc

SEQ ID NO: 651920 - DNA, 25 bp, Homo sapien
gaatgctgtcgaagctggctcctcg

SEQ ID NO: 651921 - DNA, 25 bp, Homo sapien
tatgatgatgtcagcggcagcagta

SEQ ID NO: 651922 - DNA, 25 bp, Homo sapien
gagccacgtggcacttactttaaaa

SEQ ID NO: 651923 - DNA, 25 bp, Homo sapien
gctttagctaaggaatcaattcaac

SEQ ID NO: 651924 - DNA, 25 bp, Homo sapien
cactgtcaatattaggccattgaga

SEQ ID NO: 651925 - DNA, 25 bp, Homo sapien
tctttctagcttttcgatatggtca

SEQ ID NO: 651926 - DNA, 25 bp, Homo sapien
catgtgtcagggtctttggaaggaa

SEQ ID NO: 651927 - DNA, 25 bp, Homo sapien
cccctgcatgaacacgggagttgca

SEQ ID NO: 651928 - DNA, 25 bp, Homo sapien
tgtagggatacaaggccccctgcat

SEQ ID NO: 651929 - DNA, 25 bp, Homo sapien
gatgcctggaatagatgtagggata

SEQ ID NO: 651930 - DNA, 25 bp, Homo sapien
agccactctgcacaagggtaactga

SEQ ID NO: 651931 - DNA, 25 bp, Homo sapien
tctgcacaagggtaactgaccattg

SEQ ID NO: 651932 - DNA, 25 bp, Homo sapien
caagggtaactgaccattgtgaaca

SEQ ID NO: 651933 - DNA, 25 bp, Homo sapien
ggtaactgaccattgtgaacaagga

SEQ ID NO: 651934 - DNA, 25 bp, Homo sapien
cagctggcctgtgcccatttgacca

SEQ ID NO: 651935 - DNA, 25 bp, Homo sapien
tttggagggcagttatttaccagct

SEQ ID NO: 651936 - DNA, 25 bp, Homo sapien
gcagttatttaccagctggtacaga

SEQ ID NO: 651937 - DNA, 25 bp, Homo sapien
tgtacatgtgtaccccagctggcct

SEQ ID NO: 651938 - DNA, 25 bp, Homo sapien
gctgttgagctgccttcagtcttga

SEQ ID NO: 651939 - DNA, 25 bp, Homo sapien
cattactttgacacatgccaagaat

SEQ ID NO: 651940 - DNA, 25 bp, Homo sapien
gttgagctgccttcagtcttgagca

SEQ ID NO: 651941 - DNA, 25 bp, Homo sapien
aacattactttgacacatgccaaga

SEQ ID NO: 651942 - DNA, 25 bp, Homo sapien
gtttctctctgattcggtcaacagt

SEQ ID NO: 651943 - DNA, 25 bp, Homo sapien
ggtggcaattgaccttgctccccga

SEQ ID NO: 651944 - DNA, 25 bp, Homo sapien
tgccagccgatgacaggcagttccc

SEQ ID NO: 651945 - DNA, 25 bp, Homo sapien
ggtcaacagttgtgccatttttggc

SEQ ID NO: 651946 - DNA, 25 bp, Homo sapien
tatacatattaatgccctggctttc

SEQ ID NO: 651947 - DNA, 25 bp, Homo sapien
tttatacatattaatgccctggctt

SEQ ID NO: 651948 - DNA, 25 bp, Homo sapien
ctttatacatattaatgccctggct

SEQ ID NO: 651949 - DNA, 25 bp, Homo sapien
ttatacatattaatgccctggcttt

SEQ ID NO: 651950 - DNA, 25 bp, Homo sapien
ctttttgatggtggccaatggtcca

SEQ ID NO: 651951 - DNA, 25 bp, Homo sapien
ccagcctccattattgacattacct

SEQ ID NO: 651952 - DNA, 25 bp, Homo sapien
tacctgtccttagatgctttgatgt

SEQ ID NO: 651953 - DNA, 25 bp, Homo sapien
cattattgacattacctgtccttag

SEQ ID NO: 651954 - DNA, 25 bp, Homo sapien
aagcaggctgaacacagtaatatcc

SEQ ID NO: 651955 - DNA, 25 bp, Homo sapien
cagtttccaccaggtggttagtttg

SEQ ID NO: 651956 - DNA, 25 bp, Homo sapien
acacagtaatatccagagactccat

SEQ ID NO: 651957 - DNA, 25 bp, Homo sapien
ggctgaacacagtaatatccagaga

SEQ ID NO: 651958 - DNA, 25 bp, Homo sapien
tgtgccctctattcatactgttggc

SEQ ID NO: 651959 - DNA, 25 bp, Homo sapien
aggccactgcattcaactgaggtct

SEQ ID NO: 651960 - DNA, 25 bp, Homo sapien
acatgctgtcggccctgcatctcca

SEQ ID NO: 651961 - DNA, 25 bp, Homo sapien
ctggtgtgtgccctctattcatact

SEQ ID NO: 651962 - DNA, 25 bp, Homo sapien
gaaaggacaaatggagggctatcag

SEQ ID NO: 651963 - DNA, 25 bp, Homo sapien
gagggctatcagtgttcaagatggc

SEQ ID NO: 651964 - DNA, 25 bp, Homo sapien
cacattcaataagaacccaaagagt

SEQ ID NO: 651965 - DNA, 25 bp, Homo sapien
ggtgctaggcgccacattcaataag

SEQ ID NO: 651966 - DNA, 25 bp, Homo sapien
tttgtagtgaatctgagctggatca

SEQ ID NO: 651967 - DNA, 25 bp, Homo sapien
gtgaatctgagctggatcatgttgt

SEQ ID NO: 651968 - DNA, 25 bp, Homo sapien
cagatttgtagtgaatctgagctgg

SEQ ID NO: 651969 - DNA, 25 bp, Homo sapien
tgtagtgaatctgagctggatcatg

SEQ ID NO: 651970 - DNA, 25 bp, Homo sapien
ctgtttgccaggcaatggtcctcct

SEQ ID NO: 651971 - DNA, 25 bp, Homo sapien
tgtgccgttgagattgatgatctcc

SEQ ID NO: 651972 - DNA, 25 bp, Homo sapien
ggcaatggtcctcctgttaccctag

SEQ ID NO: 651973 - DNA, 25 bp, Homo sapien
ttatgtgccgttgagattgatgatc

SEQ ID NO: 651974 - DNA, 25 bp, Homo sapien
ctctgttcgtctgacagttctgtag

SEQ ID NO: 651975 - DNA, 25 bp, Homo sapien
gctctgttcgtctgacagttctgta

SEQ ID NO: 651976 - DNA, 25 bp, Homo sapien
tctgttcgtctgacagttctgtagg

SEQ ID NO: 651977 - DNA, 25 bp, Homo sapien
tgctctgttcgtctgacagttctgt

SEQ ID NO: 651978 - DNA, 25 bp, Homo sapien
gaaccactagcacatcactctcaag

SEQ ID NO: 651979 - DNA, 25 bp, Homo sapien
aggaaccactagcacatcactctca

SEQ ID NO: 651980 - DNA, 25 bp, Homo sapien
gaaaaccaggaaccactagcacatc

SEQ ID NO: 651981 - DNA, 25 bp, Homo sapien
aaccaggaaccactagcacatcact

SEQ ID NO: 651982 - DNA, 25 bp, Homo sapien
aatcatggcactcttttctgttgat

SEQ ID NO: 651983 - DNA, 25 bp, Homo sapien
cagcagcactaagaggatggcggta

SEQ ID NO: 651984 - DNA, 25 bp, Homo sapien
cccttcagatggaaagcattcgcca

SEQ ID NO: 651985 - DNA, 25 bp, Homo sapien
cattaatccagagacgatggaggca

SEQ ID NO: 651986 - DNA, 25 bp, Homo sapien
tggagcgcctccttgtcacagagtc

SEQ ID NO: 651987 - DNA, 25 bp, Homo sapien
ctgtgtcccggtgctgtgtcctcat

SEQ ID NO: 651988 - DNA, 25 bp, Homo sapien
ttagtttttctgtgtcccggtgctg

SEQ ID NO: 651989 - DNA, 25 bp, Homo sapien
ttctgtgtcccggtgctgtgtcctc

SEQ ID NO: 651990 - DNA, 25 bp, Homo sapien
agtttttctgtgtcccggtgctgtg

SEQ ID NO: 651991 - DNA, 25 bp, Homo sapien
gctgcttccagtgtgaaggggcacc

SEQ ID NO: 651992 - DNA, 25 bp, Homo sapien
ggggcaggtcgtgctctgatgctgc

SEQ ID NO: 651993 - DNA, 25 bp, Homo sapien
gagaacggggcaggtcgtgctctga

SEQ ID NO: 651994 - DNA, 25 bp, Homo sapien
ctgctgcttccagtgtgaaggggca

SEQ ID NO: 651995 - DNA, 25 bp, Homo sapien
agcaaaatactggtcaaagggttat

SEQ ID NO: 651996 - DNA, 25 bp, Homo sapien
cccggcctaaaaatactgttctgat

SEQ ID NO: 651997 - DNA, 25 bp, Homo sapien
catccatataatgtggcaaataatt

SEQ ID NO: 651998 - DNA, 25 bp, Homo sapien
tggtcaaagggttatggacaattta

SEQ ID NO: 651999 - DNA, 25 bp, Homo sapien
tttgcagcagactgatgattacatt

SEQ ID NO: 652000 - DNA, 25 bp, Homo sapien
tgattacattttgatttgcaacttc

SEQ ID NO: 652001 - DNA, 25 bp, Homo sapien
tgatgattacattttgatttgcaac

SEQ ID NO: 652002 - DNA, 25 bp, Homo sapien
ctttgcagcagactgatgattacat

SEQ ID NO: 652003 - DNA, 25 bp, Homo sapien
acatgggagaaaattttcgcaacct

SEQ ID NO: 652004 - DNA, 25 bp, Homo sapien
caaagggctaatatccagaatctac

SEQ ID NO: 652005 - DNA, 25 bp, Homo sapien
cctacaacatgggagaaaattttcg

SEQ ID NO: 652006 - DNA, 25 bp, Homo sapien
actcatctgacaaagggctaatatc

SEQ ID NO: 652007 - DNA, 25 bp, Homo sapien
cggtagtcagcagttcatgtcccac

SEQ ID NO: 652008 - DNA, 25 bp, Homo sapien
caggatgccaggtttgtcggtagtc

SEQ ID NO: 652009 - DNA, 25 bp, Homo sapien
atgtcccacaacagagtgcatgata

SEQ ID NO: 652010 - DNA, 25 bp, Homo sapien
tgatacgatggaggtaggcacccaa

SEQ ID NO: 652011 - DNA, 25 bp, Homo sapien
ctatgtctttctttgagctaagatt

SEQ ID NO: 652012 - DNA, 25 bp, Homo sapien
tgagctaagatttggctcttgctgg

SEQ ID NO: 652013 - DNA, 25 bp, Homo sapien
tctttgagctaagatttggctcttg

SEQ ID NO: 652014 - DNA, 25 bp, Homo sapien
tctttctttgagctaagatttggct

SEQ ID NO: 652015 - DNA, 25 bp, Homo sapien
atggccaaagacatcattgttcttc

SEQ ID NO: 652016 - DNA, 25 bp, Homo sapien
cagcatctggttgaggtcatcaaag

SEQ ID NO: 652017 - DNA, 25 bp, Homo sapien
catctggttgaggtcatcaaaggca

SEQ ID NO: 652018 - DNA, 25 bp, Homo sapien
ctggttgaggtcatcaaaggcacca

SEQ ID NO: 652019 - DNA, 25 bp, Homo sapien
tcagcatctggttgaggtcatcaaa

SEQ ID NO: 652020 - DNA, 25 bp, Homo sapien
tgacatggcaggtagtatagacact

SEQ ID NO: 652021 - DNA, 25 bp, Homo sapien
tacaggacatccctacatggtaggt

SEQ ID NO: 652022 - DNA, 25 bp, Homo sapien
gcttgctggcctctatacaggacat

SEQ ID NO: 652023 - DNA, 25 bp, Homo sapien
tagtaagctgctcgttggcctctgc

SEQ ID NO: 652024 - DNA, 25 bp, Homo sapien
ccccacagggtaggcaatatagaca

SEQ ID NO: 652025 - DNA, 25 bp, Homo sapien
tatagacagcaagctgcttttgacc

SEQ ID NO: 652026 - DNA, 25 bp, Homo sapien
cctcaacttgtgactgcctgaggca

SEQ ID NO: 652027 - DNA, 25 bp, Homo sapien
taggcaatatagacagcaagctgct

SEQ ID NO: 652028 - DNA, 25 bp, Homo sapien
gtaaatcatgcccagagtcaagcgc

SEQ ID NO: 652029 - DNA, 25 bp, Homo sapien
taaatcatgcccagagtcaagcgca

SEQ ID NO: 652030 - DNA, 25 bp, Homo sapien
aaatcatgcccagagtcaagcgcat

SEQ ID NO: 652031 - DNA, 25 bp, Homo sapien
ctgtaaatcatgcccagagtcaagc

SEQ ID NO: 652032 - DNA, 25 bp, Homo sapien
gagcggagccaatctttatctcctt

SEQ ID NO: 652033 - DNA, 25 bp, Homo sapien
tatcagtcgctatccacttggtcca

SEQ ID NO: 652034 - DNA, 25 bp, Homo sapien
tctgtagccctttgagcggagccaa

SEQ ID NO: 652035 - DNA, 25 bp, Homo sapien
tcatcatgttgagcctctgtagccc

SEQ ID NO: 652036 - DNA, 25 bp, Homo sapien
ttaggaacaaatgtcaaagcgtcca

SEQ ID NO: 652037 - DNA, 25 bp, Homo sapien
aaaatatgtgcattcgctgattagg

SEQ ID NO: 652038 - DNA, 25 bp, Homo sapien
gaacaaatgtcaaagcgtccaccat

SEQ ID NO: 652039 - DNA, 25 bp, Homo sapien
tgcattcgctgattaggaacaaatg

SEQ ID NO: 652040 - DNA, 25 bp, Homo sapien
tgcggctgcatacagggccggcatc

SEQ ID NO: 652041 - DNA, 25 bp, Homo sapien
cacgttcacacccttgggcatgcgg

SEQ ID NO: 652042 - DNA, 25 bp, Homo sapien
gcagggttcccctgcggctgcatac

SEQ ID NO: 652043 - DNA, 25 bp, Homo sapien
ggcatgcggacttcctgggccccta

SEQ ID NO: 652044 - DNA, 25 bp, Homo sapien
tgccagtcttacacgtgaatatagt

SEQ ID NO: 652045 - DNA, 25 bp, Homo sapien
gacatcccaattaaggcaaatggct

SEQ ID NO: 652046 - DNA, 25 bp, Homo sapien
gtatacactgtacctactgactcta

SEQ ID NO: 652047 - DNA, 25 bp, Homo sapien
gattatggtcttgctcctctgacaa

SEQ ID NO: 652048 - DNA, 25 bp, Homo sapien
tcattgatggccagattggccatca

SEQ ID NO: 652049 - DNA, 25 bp, Homo sapien
aattgtccttttgatccaaggccac

SEQ ID NO: 652050 - DNA, 25 bp, Homo sapien
ggccatcagaactgttgccagttca

SEQ ID NO: 652051 - DNA, 25 bp, Homo sapien
cttttgatccaaggccacatgtcct

SEQ ID NO: 652052 - DNA, 25 bp, Homo sapien
agaaggtgcatgtgctggctgttac

SEQ ID NO: 652053 - DNA, 25 bp, Homo sapien
cagggcagcagtgtcattattgccc

SEQ ID NO: 652054 - DNA, 25 bp, Homo sapien
cagtgtcattattgcccatgctctt

SEQ ID NO: 652055 - DNA, 25 bp, Homo sapien
aggtgcatgtgctggctgttacaaa

SEQ ID NO: 652056 - DNA, 25 bp, Homo sapien
gtgcaagccgaccaggtgaccagct

SEQ ID NO: 652057 - DNA, 25 bp, Homo sapien
ggatcctgaggttgcttgtgaggct

SEQ ID NO: 652058 - DNA, 25 bp, Homo sapien
cactgccgatatctgactctgggaa

SEQ ID NO: 652059 - DNA, 25 bp, Homo sapien
tgccatggtgacaggaatcagtgca

SEQ ID NO: 652060 - DNA, 25 bp, Homo sapien
agctcttttgcaagccccagtatca

SEQ ID NO: 652061 - DNA, 25 bp, Homo sapien
gccttctccttgtgagttccaacac

SEQ ID NO: 652062 - DNA, 25 bp, Homo sapien
cagaggagtttgtgggagcaataac

SEQ ID NO: 652063 - DNA, 25 bp, Homo sapien
tttgcaagccccagtatcaactcct

SEQ ID NO: 652064 - DNA, 25 bp, Homo sapien
tgaggagcagaatcccagacgctat

SEQ ID NO: 652065 - DNA, 25 bp, Homo sapien
cagacgctatgtcctccggggtcat

SEQ ID NO: 652066 - DNA, 25 bp, Homo sapien
cagtgaggagcagaatcccagacgc

SEQ ID NO: 652067 - DNA, 25 bp, Homo sapien
tgcagtgaggagcagaatcccagac

SEQ ID NO: 652068 - DNA, 25 bp, Homo sapien
cttgctgttaccatgaatttcaatt

SEQ ID NO: 652069 - DNA, 25 bp, Homo sapien
catgaatttcaatttggcgacttca

SEQ ID NO: 652070 - DNA, 25 bp, Homo sapien
ttgcaggaaacatctaagagatccc

SEQ ID NO: 652071 - DNA, 25 bp, Homo sapien
tggcgacttcacatgggacatcaaa

SEQ ID NO: 652072 - DNA, 25 bp, Homo sapien
catcaatccatttgaatctgaactt

SEQ ID NO: 652073 - DNA, 25 bp, Homo sapien
caatccatttgaatctgaactttgt

SEQ ID NO: 652074 - DNA, 25 bp, Homo sapien
cacatcaatccatttgaatctgaac

SEQ ID NO: 652075 - DNA, 25 bp, Homo sapien
tcacacatcaatccatttgaatctg

SEQ ID NO: 652076 - DNA, 25 bp, Homo sapien
tggcctgctccatttgatcaatatg

SEQ ID NO: 652077 - DNA, 25 bp, Homo sapien
tttgatcaatatgtgatgagtatgt

SEQ ID NO: 652078 - DNA, 25 bp, Homo sapien
atttgatcaatatgtgatgagtatg

SEQ ID NO: 652079 - DNA, 25 bp, Homo sapien
gaagctgattgctgttgccttggta

SEQ ID NO: 652080 - DNA, 25 bp, Homo sapien
ctctgtgaacctccgtttagactca

SEQ ID NO: 652081 - DNA, 25 bp, Homo sapien
caaactcgggtctcatgaaagcagc

SEQ ID NO: 652082 - DNA, 25 bp, Homo sapien
gtttccatgggaacagcaccgcttg

SEQ ID NO: 652083 - DNA, 25 bp, Homo sapien
cctggagctcccacattctacccac

SEQ ID NO: 652084 - DNA, 25 bp, Homo sapien
cagttttgatagaggagctcccagc

SEQ ID NO: 652085 - DNA, 25 bp, Homo sapien
gctggccgctccattcacaagctgt

SEQ ID NO: 652086 - DNA, 25 bp, Homo sapien
gaggctctcattgccccatggagaa

SEQ ID NO: 652087 - DNA, 25 bp, Homo sapien
ccagctgggcatggatcagagagca

SEQ ID NO: 652088 - DNA, 25 bp, Homo sapien
aggtcactggtaagctgcccactcc

SEQ ID NO: 652089 - DNA, 25 bp, Homo sapien
tcaggtcactggtaagctgcccact

SEQ ID NO: 652090 - DNA, 25 bp, Homo sapien
gatcaggtcactggtaagctgccca

SEQ ID NO: 652091 - DNA, 25 bp, Homo sapien
agatcaggtcactggtaagctgccc

SEQ ID NO: 652092 - DNA, 25 bp, Homo sapien
atcagctggaggtggagggggttca

SEQ ID NO: 652093 - DNA, 25 bp, Homo sapien
agctggaggtggagggggttcattt

SEQ ID NO: 652094 - DNA, 25 bp, Homo sapien
tgagtcatcagctggaggtggaggg

SEQ ID NO: 652095 - DNA, 25 bp, Homo sapien
tggagggggttcatttttcttgctc

SEQ ID NO: 652096 - DNA, 25 bp, Homo sapien
ccccttattgaacttgttccagctg

SEQ ID NO: 652097 - DNA, 25 bp, Homo sapien
cccttattgaacttgttccagctgt

SEQ ID NO: 652098 - DNA, 25 bp, Homo sapien
ttccccttattgaacttgttccagc

SEQ ID NO: 652099 - DNA, 25 bp, Homo sapien
tccccttattgaacttgttccagct

SEQ ID NO: 652100 - DNA, 25 bp, Homo sapien
gagtaaacaggtatggctccatgcc

SEQ ID NO: 652101 - DNA, 25 bp, Homo sapien
ctgtccagagtaaacaggtatggct

SEQ ID NO: 652102 - DNA, 25 bp, Homo sapien
tccagagtaaacaggtatggctcca

SEQ ID NO: 652103 - DNA, 25 bp, Homo sapien
ccagagtaaacaggtatggctccat

SEQ ID NO: 652104 - DNA, 25 bp, Homo sapien
gcttcagcatgccttaccccagtgt

SEQ ID NO: 652105 - DNA, 25 bp, Homo sapien
tcatggctcctaaacattggtggca

SEQ ID NO: 652106 - DNA, 25 bp, Homo sapien
caagggtaaccagctagcaaatttc

SEQ ID NO: 652107 - DNA, 25 bp, Homo sapien
tctgcaaactgcaagtgtaggtcct

SEQ ID NO: 652108 - DNA, 25 bp, Homo sapien
ttcttaccaaccttgaagtgaagag

SEQ ID NO: 652109 - DNA, 25 bp, Homo sapien
ctaataagaacctttaggcaagaag

SEQ ID NO: 652110 - DNA, 25 bp, Homo sapien
ttattgtgataaccctcggaaaggc

SEQ ID NO: 652111 - DNA, 25 bp, Homo sapien
gctctatcatcttgtagacagttga

SEQ ID NO: 652112 - DNA, 25 bp, Homo sapien
agcagcctctgacaacaccagggac

SEQ ID NO: 652113 - DNA, 25 bp, Homo sapien
ctctgacaacaccagggactcccac

SEQ ID NO: 652114 - DNA, 25 bp, Homo sapien
ctgtttcctgtgggcagttgaggtc

SEQ ID NO: 652115 - DNA, 25 bp, Homo sapien
gcctctgacaacaccagggactccc

SEQ ID NO: 652116 - DNA, 25 bp, Homo sapien
aattcaaaccacaagtagatgccat

SEQ ID NO: 652117 - DNA, 25 bp, Homo sapien
taataacacagccaacaagcgcatg

SEQ ID NO: 652118 - DNA, 25 bp, Homo sapien
ttcaaaccacaagtagatgccatct

SEQ ID NO: 652119 - DNA, 25 bp, Homo sapien
ttaaagacataataacacagccaac

SEQ ID NO: 652120 - DNA, 25 bp, Homo sapien
gctgataaacacagcgggacaccca

SEQ ID NO: 652121 - DNA, 25 bp, Homo sapien
tatcttattgttccccagacaaaac

SEQ ID NO: 652122 - DNA, 25 bp, Homo sapien
aacacagcgggacacccacaggctg

SEQ ID NO: 652123 - DNA, 25 bp, Homo sapien
ttctatcttattgttccccagacaa

SEQ ID NO: 652124 - DNA, 25 bp, Homo sapien
acggtgttgacacatgattcatgca

SEQ ID NO: 652125 - DNA, 25 bp, Homo sapien
gatgtagccctttctcagaacggtg

SEQ ID NO: 652126 - DNA, 25 bp, Homo sapien
gagacgtcagaatgttcacggccat

SEQ ID NO: 652127 - DNA, 25 bp, Homo sapien
catgattcatgcaagggctcctgag

SEQ ID NO: 652128 - DNA, 25 bp, Homo sapien
tgagaaatggaatttgagcttctgt

SEQ ID NO: 652129 - DNA, 25 bp, Homo sapien
gagaaatggaatttgagcttctgtc

SEQ ID NO: 652130 - DNA, 25 bp, Homo sapien
ctgagaaatggaatttgagcttctg

SEQ ID NO: 652131 - DNA, 25 bp, Homo sapien
gacaggtcccaggtaacgtgggcca

SEQ ID NO: 652132 - DNA, 25 bp, Homo sapien
agcagataggcctatgggacaggtc

SEQ ID NO: 652133 - DNA, 25 bp, Homo sapien
tggcacagcagcgaggttcctttac

SEQ ID NO: 652134 - DNA, 25 bp, Homo sapien
tcagggcaacctgaacactggcaca

SEQ ID NO: 652135 - DNA, 25 bp, Homo sapien
tctcctcagatgaaatcaccatggc

SEQ ID NO: 652136 - DNA, 25 bp, Homo sapien
tggccttagctaagccgtctgcacc

SEQ ID NO: 652137 - DNA, 25 bp, Homo sapien
cagcttcccagtgtattccactgga

SEQ ID NO: 652138 - DNA, 25 bp, Homo sapien
taagtgatactggtgcctaacagcc

SEQ ID NO: 652139 - DNA, 25 bp, Homo sapien
gattcgccggcctgatgtaagcccg

SEQ ID NO: 652140 - DNA, 25 bp, Homo sapien
tgtaagcccgtcttgcttggaagaa

SEQ ID NO: 652141 - DNA, 25 bp, Homo sapien
ccttggcagctctctgggttgttct

SEQ ID NO: 652142 - DNA, 25 bp, Homo sapien
ttctgatatccagggattcgccggc

SEQ ID NO: 652143 - DNA, 25 bp, Homo sapien
ccatggtacccagccgtttctctga

SEQ ID NO: 652144 - DNA, 25 bp, Homo sapien
agccggtttccatggtacccagccg

SEQ ID NO: 652145 - DNA, 25 bp, Homo sapien
tttccatggtacccagccgtttctc

SEQ ID NO: 652146 - DNA, 25 bp, Homo sapien
tccatggtacccagccgtttctctg

SEQ ID NO: 652147 - DNA, 25 bp, Homo sapien
aagcccacaacaggaggtccgtcaa

SEQ ID NO: 652148 - DNA, 25 bp, Homo sapien
aacaggaggtccgtcaagtgcaact

SEQ ID NO: 652149 - DNA, 25 bp, Homo sapien
aggacagagtgttgaccccaggaca

SEQ ID NO: 652150 - DNA, 25 bp, Homo sapien
caagtgcaactcatcgttgaggaca

SEQ ID NO: 652151 - DNA, 25 bp, Homo sapien
gagggagcgattcaaatgctccatc

SEQ ID NO: 652152 - DNA, 25 bp, Homo sapien
ttctgagggagcgattcaaatgctc

SEQ ID NO: 652153 - DNA, 25 bp, Homo sapien
tgccgtttgtagagttttctgaggg

SEQ ID NO: 652154 - DNA, 25 bp, Homo sapien
ccatcaagatggtccagcaaggtac

SEQ ID NO: 652155 - DNA, 25 bp, Homo sapien
taatttccagtcttcggaagaggcg

SEQ ID NO: 652156 - DNA, 25 bp, Homo sapien
aggcgatgaccagctgcttgttctc

SEQ ID NO: 652157 - DNA, 25 bp, Homo sapien
cgttctgcaaacagcgccagtccta

SEQ ID NO: 652158 - DNA, 25 bp, Homo sapien
aatgttcacaggcagttgatagctc

SEQ ID NO: 652159 - DNA, 25 bp, Homo sapien
gatggtgagtgcaatcgggacccca

SEQ ID NO: 652160 - DNA, 25 bp, Homo sapien
cacctggccgctgagtttcgtctta

SEQ ID NO: 652161 - DNA, 25 bp, Homo sapien
gatcgcagccttctcctacatgatg

SEQ ID NO: 652162 - DNA, 25 bp, Homo sapien
ggttcatggtgacgtttgcttcctc

SEQ ID NO: 652163 - DNA, 25 bp, Homo sapien
gagtctccatcagaagaatcatggg

SEQ ID NO: 652164 - DNA, 25 bp, Homo sapien
gatagcccagaccatagcctgttgt

SEQ ID NO: 652165 - DNA, 25 bp, Homo sapien
cagacattgcaccccacagagatag

SEQ ID NO: 652166 - DNA, 25 bp, Homo sapien
acatagtgtttgtcaccctctgtat

SEQ ID NO: 652167 - DNA, 25 bp, Homo sapien
acctgccgtgttgtctgggcttgca

SEQ ID NO: 652168 - DNA, 25 bp, Homo sapien
gctaaagtcttatgggcgtcccctg

SEQ ID NO: 652169 - DNA, 25 bp, Homo sapien
catcccagatgtgttggagtatgca

SEQ ID NO: 652170 - DNA, 25 bp, Homo sapien
cattttatagccaaggacgcctcgc

SEQ ID NO: 652171 - DNA, 25 bp, Homo sapien
tgtgggtcccctctaaatcttgaag

SEQ ID NO: 652172 - DNA, 25 bp, Homo sapien
tcttgaagggactttaggcctatca

SEQ ID NO: 652173 - DNA, 25 bp, Homo sapien
cagattacgagaatgaagtggccag

SEQ ID NO: 652174 - DNA, 25 bp, Homo sapien
aaagctggcgtacgtgtggcagatt

SEQ ID NO: 652175 - DNA, 25 bp, Homo sapien
gggtccacattagaaccacctagga

SEQ ID NO: 652176 - DNA, 25 bp, Homo sapien
caagcagagtattttgagaagccca

SEQ ID NO: 652177 - DNA, 25 bp, Homo sapien
gaaccactggtttaaggaagcataa

SEQ ID NO: 652178 - DNA, 25 bp, Homo sapien
ttctcacaccgtgcgtcagtgcagg

SEQ ID NO: 652179 - DNA, 25 bp, Homo sapien
agtcttggggcggtgaaaatttgtg

SEQ ID NO: 652180 - DNA, 25 bp, Homo sapien
catttgttgtgtagaattattggtg

SEQ ID NO: 652181 - DNA, 25 bp, Homo sapien
aatttgtgggggttggtgtggagag

SEQ ID NO: 652182 - DNA, 25 bp, Homo sapien
gaattgggacgactcaggacatctg

SEQ ID NO: 652183 - DNA, 25 bp, Homo sapien
atctcggcctaataagggaagtggg

SEQ ID NO: 652184 - DNA, 25 bp, Homo sapien
tggttaaaatatctcggcctaataa

SEQ ID NO: 652185 - DNA, 25 bp, Homo sapien
ttggttaaaatatctcggcctaata

SEQ ID NO: 652186 - DNA, 25 bp, Homo sapien
aaatatctcggcctaataagggaag

SEQ ID NO: 652187 - DNA, 25 bp, Homo sapien
gcaattaattcccaaaggtgaggtc

SEQ ID NO: 652188 - DNA, 25 bp, Homo sapien
gaggttccctccgtgacactggcta

SEQ ID NO: 652189 - DNA, 25 bp, Homo sapien
caagcattagaactgcgcctggcac

SEQ ID NO: 652190 - DNA, 25 bp, Homo sapien
cctgattccgaaaaggctggatgct

SEQ ID NO: 652191 - DNA, 25 bp, Homo sapien
ccagccaagtttgctccggcttaga

SEQ ID NO: 652192 - DNA, 25 bp, Homo sapien
cgtgcgcgtttgtgctaaaacaaga

SEQ ID NO: 652193 - DNA, 25 bp, Homo sapien
caagaaaggcaagaatctccgagaa

SEQ ID NO: 652194 - DNA, 25 bp, Homo sapien
gaacaaaactctggtcctcgcctgg

SEQ ID NO: 652195 - DNA, 25 bp, Homo sapien
ccccatctcctctgcgagctcagga

SEQ ID NO: 652196 - DNA, 25 bp, Homo sapien
ttggtcgctgcctccgatccgatca

SEQ ID NO: 652197 - DNA, 25 bp, Homo sapien
cttggtcgctgcctccgatccgatc

SEQ ID NO: 652198 - DNA, 25 bp, Homo sapien
atctcctctgcgagctcaggaaggt

SEQ ID NO: 652199 - DNA, 25 bp, Homo sapien
gcgagaggtaaggggcggtggcagc

SEQ ID NO: 652200 - DNA, 25 bp, Homo sapien
cgcgagaggtaaggggcggtggcag

SEQ ID NO: 652201 - DNA, 25 bp, Homo sapien
cccggagaggctccgggcacgggcg

SEQ ID NO: 652202 - DNA, 25 bp, Homo sapien
tgctgtgcgcactctctccctactc

SEQ ID NO: 652203 - DNA, 25 bp, Homo sapien
cagacgtgggtgctgctgtgcgcac

SEQ ID NO: 652204 - DNA, 25 bp, Homo sapien
ctccctactccggaggggacttgag

SEQ ID NO: 652205 - DNA, 25 bp, Homo sapien
gaccccactggtgagtccagccagt

SEQ ID NO: 652206 - DNA, 25 bp, Homo sapien
gggtgtcaagtgctccctgcgcctg

SEQ ID NO: 652207 - DNA, 25 bp, Homo sapien
tgtcgcacagctttgatccccagcg

SEQ ID NO: 652208 - DNA, 25 bp, Homo sapien
cacttgggctgtcgcggtgattgat

SEQ ID NO: 652209 - DNA, 25 bp, Homo sapien
gtagtcatcatcatcgaccctccat

SEQ ID NO: 652210 - DNA, 25 bp, Homo sapien
ctccatctctggtaggttgcacaag

SEQ ID NO: 652211 - DNA, 25 bp, Homo sapien
catccgttctgtgccgtagtcatca

SEQ ID NO: 652212 - DNA, 25 bp, Homo sapien
ccatctctggtaggttgcacaagcc

SEQ ID NO: 652213 - DNA, 25 bp, Homo sapien
tgtgcaagcccttcagaacgctggg

SEQ ID NO: 652214 - DNA, 25 bp, Homo sapien
tggaagggactttgctccgacagag

SEQ ID NO: 652215 - DNA, 25 bp, Homo sapien
gcagcgagaccataaacccagtgtg

SEQ ID NO: 652216 - DNA, 25 bp, Homo sapien
tccgacagagcaacagggaggatgt

SEQ ID NO: 652217 - DNA, 25 bp, Homo sapien
ctttattgaaatattttcctttgtg

SEQ ID NO: 652218 - DNA, 25 bp, Homo sapien
tgatcctttattgaaatattttcct

SEQ ID NO: 652219 - DNA, 25 bp, Homo sapien
atgatcctttattgaaatattttcc

SEQ ID NO: 652220 - DNA, 25 bp, Homo sapien
tttattgaaatattttcctttgtgc

SEQ ID NO: 652221 - DNA, 25 bp, Homo sapien
ggattggtgccgcatctgtcgagca

SEQ ID NO: 652222 - DNA, 25 bp, Homo sapien
ctggctaaggattggtgccgcatct

SEQ ID NO: 652223 - DNA, 25 bp, Homo sapien
taaggattggtgccgcatctgtcga

SEQ ID NO: 652224 - DNA, 25 bp, Homo sapien
tctctggctaaggattggtgccgca

SEQ ID NO: 652225 - DNA, 25 bp, Homo sapien
gcagaagtggcaccgacttcacctc

SEQ ID NO: 652226 - DNA, 25 bp, Homo sapien
agtggcaccgacttcacctccggtg

SEQ ID NO: 652227 - DNA, 25 bp, Homo sapien
agaagtggcaccgacttcacctccg

SEQ ID NO: 652228 - DNA, 25 bp, Homo sapien
gggcagaagtggcaccgacttcacc

SEQ ID NO: 652229 - DNA, 25 bp, Homo sapien
tctcgttcgggtcgaacttcggcag

SEQ ID NO: 652230 - DNA, 25 bp, Homo sapien
ttgatctcgttcgggtcgaacttcg

SEQ ID NO: 652231 - DNA, 25 bp, Homo sapien
tcgttcgggtcgaacttcggcagca

SEQ ID NO: 652232 - DNA, 25 bp, Homo sapien
gatctcgttcgggtcgaacttcggc

SEQ ID NO: 652233 - DNA, 25 bp, Homo sapien
gccccccagggactggtatgcacat

SEQ ID NO: 652234 - DNA, 25 bp, Homo sapien
gccgaaagccgagagagctgctctg

SEQ ID NO: 652235 - DNA, 25 bp, Homo sapien
cacatgtgctgagttaattgtataa

SEQ ID NO: 652236 - DNA, 25 bp, Homo sapien
aaagccgagagagctgctctgcctg

SEQ ID NO: 652237 - DNA, 25 bp, Homo sapien
tgccacatgagggataccttaataa

SEQ ID NO: 652238 - DNA, 25 bp, Homo sapien
tatcacaacctactcaaggccagtc

SEQ ID NO: 652239 - DNA, 25 bp, Homo sapien
tggcatgaccttagaatcctttctt

SEQ ID NO: 652240 - DNA, 25 bp, Homo sapien
gactctcaatgaggttgggccggaa

SEQ ID NO: 652241 - DNA, 25 bp, Homo sapien
tgctctcagcaaggagatgtctggt

SEQ ID NO: 652242 - DNA, 25 bp, Homo sapien
tctggtacttggtgcttggaagtag

SEQ ID NO: 652243 - DNA, 25 bp, Homo sapien
gccaactgctctcagcaaggagatg

SEQ ID NO: 652244 - DNA, 25 bp, Homo sapien
caaggagatgtctggtacttggtgc

SEQ ID NO: 652245 - DNA, 25 bp, Homo sapien
gataagtcgccctgttctgcatccc

SEQ ID NO: 652246 - DNA, 25 bp, Homo sapien
gcctttgttcctttggggcatggcc

SEQ ID NO: 652247 - DNA, 25 bp, Homo sapien
cactgtgctaggaccgggactggct

SEQ ID NO: 652248 - DNA, 25 bp, Homo sapien
gccatctggtattccgggctaccag

SEQ ID NO: 652249 - DNA, 25 bp, Homo sapien
gggaggcctctaggatcattttaaa

SEQ ID NO: 652250 - DNA, 25 bp, Homo sapien
gcttgtcagcctggatggcccggga

SEQ ID NO: 652251 - DNA, 25 bp, Homo sapien
agtggcctgacaacaccagcttgtc

SEQ ID NO: 652252 - DNA, 25 bp, Homo sapien
taaatccatccatgagtggaccaac

SEQ ID NO: 652253 - DNA, 25 bp, Homo sapien
acaggattccagcaggactgttggg

SEQ ID NO: 652254 - DNA, 25 bp, Homo sapien
gatgattgggaacaggattccagca

SEQ ID NO: 652255 - DNA, 25 bp, Homo sapien
agcaggactgttgggtgagattgtt

SEQ ID NO: 652256 - DNA, 25 bp, Homo sapien
ctgatgattgggaacaggattccag

SEQ ID NO: 652257 - DNA, 25 bp, Homo sapien
ccccacagtttataggaatgcctta

SEQ ID NO: 652258 - DNA, 25 bp, Homo sapien
tacaaggtgcctgattttcaccagc

SEQ ID NO: 652259 - DNA, 25 bp, Homo sapien
ttttaaagcgcaaacacacattgtc

SEQ ID NO: 652260 - DNA, 25 bp, Homo sapien
tttcaccagcgtgaccgtgagcagg

SEQ ID NO: 652261 - DNA, 25 bp, Homo sapien
gttgacatagcctgttcatgggctt

SEQ ID NO: 652262 - DNA, 25 bp, Homo sapien
tgttgacatagcctgttcatgggct

SEQ ID NO: 652263 - DNA, 25 bp, Homo sapien
tcagtcacgccttgaagtgctggga

SEQ ID NO: 652264 - DNA, 25 bp, Homo sapien
catgggcacctcattatgctcagag

SEQ ID NO: 652265 - DNA, 25 bp, Homo sapien
gggacccgtagagcatttttcatgc

SEQ ID NO: 652266 - DNA, 25 bp, Homo sapien
gagagacaaagccttgaatccacac

SEQ ID NO: 652267 - DNA, 25 bp, Homo sapien
gagttgggagtaacaaacgcagccc

SEQ ID NO: 652268 - DNA, 25 bp, Homo sapien
ttgggagtaacaaacgcagccccat

SEQ ID NO: 652269 - DNA, 25 bp, Homo sapien
ctggagttgggagtaacaaacgcag

SEQ ID NO: 652270 - DNA, 25 bp, Homo sapien
ggagttgggagtaacaaacgcagcc

SEQ ID NO: 652271 - DNA, 25 bp, Homo sapien
ggatacagctgcgttgacacaaagc

SEQ ID NO: 652272 - DNA, 25 bp, Homo sapien
tatcaatgtggtgcttgaaccggac

SEQ ID NO: 652273 - DNA, 25 bp, Homo sapien
tactgggacccataattgctgcctt

SEQ ID NO: 652274 - DNA, 25 bp, Homo sapien
atgatgtctcggaagcctggcacca

SEQ ID NO: 652275 - DNA, 25 bp, Homo sapien
aaaggaagccttgattgggatctca

SEQ ID NO: 652276 - DNA, 25 bp, Homo sapien
gaaatgacagcttggaccatgggcg

SEQ ID NO: 652277 - DNA, 25 bp, Homo sapien
cggtctggacaagcgaggaagtttc

SEQ ID NO: 652278 - DNA, 25 bp, Homo sapien
tgggatctcaactcgtcggcttgct

SEQ ID NO: 652279 - DNA, 25 bp, Homo sapien
tagtgctttcatacaggcacaggac

SEQ ID NO: 652280 - DNA, 25 bp, Homo sapien
tccagtgaatcaatgctgtcgtcca

SEQ ID NO: 652281 - DNA, 25 bp, Homo sapien
cagctgctgattgttaccagggctt

SEQ ID NO: 652282 - DNA, 25 bp, Homo sapien
tcctggaccgcaccttagaatgatg

SEQ ID NO: 652283 - DNA, 25 bp, Homo sapien
tatggaaacctcgtcatcaatgcct

SEQ ID NO: 652284 - DNA, 25 bp, Homo sapien
caaatattctgtccactgtaagtcc

SEQ ID NO: 652285 - DNA, 25 bp, Homo sapien
tcagtaggagtaccacgtgctccat

SEQ ID NO: 652286 - DNA, 25 bp, Homo sapien
gaggaggtagcaccactcagtagga

SEQ ID NO: 652287 - DNA, 25 bp, Homo sapien
ccagcttctaaaggcaacacatcac

SEQ ID NO: 652288 - DNA, 25 bp, Homo sapien
cttctaaaggcaacacatcacccct

SEQ ID NO: 652289 - DNA, 25 bp, Homo sapien
agcttctaaaggcaacacatcaccc

SEQ ID NO: 652290 - DNA, 25 bp, Homo sapien
cccagcttctaaaggcaacacatca

SEQ ID NO: 652291 - DNA, 25 bp, Homo sapien
tccagcgtgtgcaaagtagaattca

SEQ ID NO: 652292 - DNA, 25 bp, Homo sapien
taaaattgtctgtgccatatccacc

SEQ ID NO: 652293 - DNA, 25 bp, Homo sapien
gaattcagtgtagccgtgtgagtct

SEQ ID NO: 652294 - DNA, 25 bp, Homo sapien
catatccacctactcccaatgatgg

SEQ ID NO: 652295 - DNA, 25 bp, Homo sapien
cgtgctgtgctgttgaaggcgatac

SEQ ID NO: 652296 - DNA, 25 bp, Homo sapien
gattggaaactggatgtggttgtaa

SEQ ID NO: 652297 - DNA, 25 bp, Homo sapien
aattcgatacaaagggaaggcggcg

SEQ ID NO: 652298 - DNA, 25 bp, Homo sapien
gaaaagccgtgcagtgattggaaac

SEQ ID NO: 652299 - DNA, 25 bp, Homo sapien
actgcacaccgtctgaataggaggc

SEQ ID NO: 652300 - DNA, 25 bp, Homo sapien
atactgcacaccgtctgaataggag

SEQ ID NO: 652301 - DNA, 25 bp, Homo sapien
gcacatactgcacaccgtctgaata

SEQ ID NO: 652302 - DNA, 25 bp, Homo sapien
acatactgcacaccgtctgaatagg

SEQ ID NO: 652303 - DNA, 25 bp, Homo sapien
cctggctctgcacgtctgacggctg

SEQ ID NO: 652304 - DNA, 25 bp, Homo sapien
cacgtctgacggctgcaggaaatgc

SEQ ID NO: 652305 - DNA, 25 bp, Homo sapien
gtagcagagttgctttcagcaaaac

SEQ ID NO: 652306 - DNA, 25 bp, Homo sapien
tgcaggaaatgcaccgccgtcagct

SEQ ID NO: 652307 - DNA, 25 bp, Homo sapien
taaccacaggaaacccagaaggctc

SEQ ID NO: 652308 - DNA, 25 bp, Homo sapien
gacattataaccacaggaaacccag

SEQ ID NO: 652309 - DNA, 25 bp, Homo sapien
aggctcctcccttgtacaattgttc

SEQ ID NO: 652310 - DNA, 25 bp, Homo sapien
gaaggctcctcccttgtacaattgt

SEQ ID NO: 652311 - DNA, 25 bp, Homo sapien
agagtggagcctgaagatttacaca

SEQ ID NO: 652312 - DNA, 25 bp, Homo sapien
catgagagtggagcctgaagattta

SEQ ID NO: 652313 - DNA, 25 bp, Homo sapien
tgagagtggagcctgaagatttaca

SEQ ID NO: 652314 - DNA, 25 bp, Homo sapien
agtggagcctgaagatttacacaac

SEQ ID NO: 652315 - DNA, 25 bp, Homo sapien
tggaggcagacatgagcttttgttc

SEQ ID NO: 652316 - DNA, 25 bp, Homo sapien
ctcccgaaatggcagcgtctccctg

SEQ ID NO: 652317 - DNA, 25 bp, Homo sapien
ctggaggcagacatgagcttttgtt

SEQ ID NO: 652318 - DNA, 25 bp, Homo sapien
caattgttgtcctgctgttctggtc

SEQ ID NO: 652319 - DNA, 25 bp, Homo sapien
gacggcacttctgtgctttgaggaa

SEQ ID NO: 652320 - DNA, 25 bp, Homo sapien
gaaatccagtgtagtgcatctcgcg

SEQ ID NO: 652321 - DNA, 25 bp, Homo sapien
gacagcacagacatctagagtaacg

SEQ ID NO: 652322 - DNA, 25 bp, Homo sapien
tagcactattaccttatctgcaggc

SEQ ID NO: 652323 - DNA, 25 bp, Homo sapien
gatgccccactaatgtcctttatag

SEQ ID NO: 652324 - DNA, 25 bp, Homo sapien
cacatactatatttaggtggatcta

SEQ ID NO: 652325 - DNA, 25 bp, Homo sapien
tatttaggtggatctatttcctcag

SEQ ID NO: 652326 - DNA, 25 bp, Homo sapien
tttacacggtcatggagaacaactc

SEQ ID NO: 652327 - DNA, 25 bp, Homo sapien
gaaggactttcacatggccgatggc

SEQ ID NO: 652328 - DNA, 25 bp, Homo sapien
tattcgccggaaaagaaggtcatgc

SEQ ID NO: 652329 - DNA, 25 bp, Homo sapien
gaacaactcaggtgaggccgctgga

SEQ ID NO: 652330 - DNA, 25 bp, Homo sapien
tgaaataatgagtgagttggcaaat

SEQ ID NO: 652331 - DNA, 25 bp, Homo sapien
tatgaaataatgagtgagttggcaa

SEQ ID NO: 652332 - DNA, 25 bp, Homo sapien
caacacaattcctgatttgctcatt

SEQ ID NO: 652333 - DNA, 25 bp, Homo sapien
aacacaattcctgatttgctcattg

SEQ ID NO: 652334 - DNA, 25 bp, Homo sapien
tgcctttggaaatcggatgtactgt

SEQ ID NO: 652335 - DNA, 25 bp, Homo sapien
taaagcaacgtattcctgacactgg

SEQ ID NO: 652336 - DNA, 25 bp, Homo sapien
gaactagaaccctcagcacatactg

SEQ ID NO: 652337 - DNA, 25 bp, Homo sapien
gagggtcttgtatccacgtaacaca

SEQ ID NO: 652338 - DNA, 25 bp, Homo sapien
gcgtgcttccgatttctcaccactt

SEQ ID NO: 652339 - DNA, 25 bp, Homo sapien
aagaatacagaggttgacgtgatta

SEQ ID NO: 652340 - DNA, 25 bp, Homo sapien
tttatttctgatgtgcgtgcttccg

SEQ ID NO: 652341 - DNA, 25 bp, Homo sapien
tggtgctttaccaagaagaatacag

SEQ ID NO: 652342 - DNA, 25 bp, Homo sapien
agtggatgatttaaaacatcgctgg

SEQ ID NO: 652343 - DNA, 25 bp, Homo sapien
tgtggaatccccagcagacaatttc

SEQ ID NO: 652344 - DNA, 25 bp, Homo sapien
tggtgaatttcgcagaactctttca

SEQ ID NO: 652345 - DNA, 25 bp, Homo sapien
gctggaaaaagctcctgtggaatcc

SEQ ID NO: 652346 - DNA, 25 bp, Homo sapien
caggtaaccattgtggacaatcctg

SEQ ID NO: 652347 - DNA, 25 bp, Homo sapien
ggtaaccattgtggacaatcctgag

SEQ ID NO: 652348 - DNA, 25 bp, Homo sapien
cattgtggacaatcctgagccctca

SEQ ID NO: 652349 - DNA, 25 bp, Homo sapien
taaccattgtggacaatcctgagcc

SEQ ID NO: 652350 - DNA, 25 bp, Homo sapien
agcaccgggtggctgcgaactccgc

SEQ ID NO: 652351 - DNA, 25 bp, Homo sapien
ggtggctgcgaactccgctcttctg

SEQ ID NO: 652352 - DNA, 25 bp, Homo sapien
gaactccgctcttctgcttgggttt

SEQ ID NO: 652353 - DNA, 25 bp, Homo sapien
cgaactccgctcttctgcttgggtt

SEQ ID NO: 652354 - DNA, 25 bp, Homo sapien
gcgacgacctgttccgcttcaacaa

SEQ ID NO: 652355 - DNA, 25 bp, Homo sapien
gctgctgtcgttgcccagcaactcg

SEQ ID NO: 652356 - DNA, 25 bp, Homo sapien
gcgatgaccacgctacgggccttta

SEQ ID NO: 652357 - DNA, 25 bp, Homo sapien
cagcaactcgtagcccggaagcagt

SEQ ID NO: 652358 - DNA, 25 bp, Homo sapien
cagttatgggtaaagcagaaggctc

SEQ ID NO: 652359 - DNA, 25 bp, Homo sapien
gaatttcgacgccttggtttggctg

SEQ ID NO: 652360 - DNA, 25 bp, Homo sapien
actaactgttagctggatgacctca

SEQ ID NO: 652361 - DNA, 25 bp, Homo sapien
tatggagttactagaggagatttca

SEQ ID NO: 652362 - DNA, 25 bp, Homo sapien
tggcattattgtatagtgaacaggg

SEQ ID NO: 652363 - DNA, 25 bp, Homo sapien
atagtgaacagggagttagaaagtg

SEQ ID NO: 652364 - DNA, 25 bp, Homo sapien
cattattgtatagtgaacagggagt

SEQ ID NO: 652365 - DNA, 25 bp, Homo sapien
aagtgggttgttcaatgagaacaca

SEQ ID NO: 652366 - DNA, 25 bp, Homo sapien
caggccacctaaagtcttggttaca

SEQ ID NO: 652367 - DNA, 25 bp, Homo sapien
tcaagcctatagaacaagaatcagc

SEQ ID NO: 652368 - DNA, 25 bp, Homo sapien
taaatattcaggcattacaggccac

SEQ ID NO: 652369 - DNA, 25 bp, Homo sapien
taaagaatttcaatcagtagcccaa

SEQ ID NO: 652370 - DNA, 25 bp, Homo sapien
agtgctatgcaagacctctctgaca

SEQ ID NO: 652371 - DNA, 25 bp, Homo sapien
caatgtaattgcagtcaaaatccca

SEQ ID NO: 652372 - DNA, 25 bp, Homo sapien
gccctgataagtggagcgataaact

SEQ ID NO: 652373 - DNA, 25 bp, Homo sapien
taaacaggtaatcgaccgcagttcc

SEQ ID NO: 652374 - DNA, 25 bp, Homo sapien
caacagaagtattcacaggagcatc

SEQ ID NO: 652375 - DNA, 25 bp, Homo sapien
gctatagaccttacgtgagacactc

SEQ ID NO: 652376 - DNA, 25 bp, Homo sapien
caacaggaccgtgaatgacttgtgc

SEQ ID NO: 652377 - DNA, 25 bp, Homo sapien
taaaagccagaaacgtatcaacagg

SEQ ID NO: 652378 - DNA, 25 bp, Homo sapien
caaagtaattgtcataaatcctaag

SEQ ID NO: 652379 - DNA, 25 bp, Homo sapien
gtaattgtcataaatcctaagtaat

SEQ ID NO: 652380 - DNA, 25 bp, Homo sapien
aagtaattgtcataaatcctaagta

SEQ ID NO: 652381 - DNA, 25 bp, Homo sapien
ctgcaaagtaattgtcataaatcct

SEQ ID NO: 652382 - DNA, 25 bp, Homo sapien
ggttagcatctggtacacttggcaa

SEQ ID NO: 652383 - DNA, 25 bp, Homo sapien
tagagtactattcggccagcaacgg

SEQ ID NO: 652384 - DNA, 25 bp, Homo sapien
caaaaaggcagctaggtcagaagga

SEQ ID NO: 652385 - DNA, 25 bp, Homo sapien
taacatgtacaagcagttgggctac

SEQ ID NO: 652386 - DNA, 25 bp, Homo sapien
tatatcataggccaaccatgtattt

SEQ ID NO: 652387 - DNA, 25 bp, Homo sapien
ttttatgtgtagtgtcttcctctgt

SEQ ID NO: 652388 - DNA, 25 bp, Homo sapien
gaaaggccatataactatatcatag

SEQ ID NO: 652389 - DNA, 25 bp, Homo sapien
ttatgtgtagtgtcttcctctgtaa

SEQ ID NO: 652390 - DNA, 25 bp, Homo sapien
tgactctgggtgagccaaaggctat

SEQ ID NO: 652391 - DNA, 25 bp, Homo sapien
gaagtgatctgacaccgcagtagct

SEQ ID NO: 652392 - DNA, 25 bp, Homo sapien
cagtagctgatgctcgtccagtgac

SEQ ID NO: 652393 - DNA, 25 bp, Homo sapien
ggcagacctctactcgagaagtgat

SEQ ID NO: 652394 - DNA, 25 bp, Homo sapien
cactgttatttattttcaagataaa

SEQ ID NO: 652395 - DNA, 25 bp, Homo sapien
aacactgttatttattttcaagata

SEQ ID NO: 652396 - DNA, 25 bp, Homo sapien
ctgtcctcaaacactgttatttatt

SEQ ID NO: 652397 - DNA, 25 bp, Homo sapien
ttcaagataaaatttagtaacaaca

SEQ ID NO: 652398 - DNA, 25 bp, Homo sapien
taagtttaacatgtcagcagtgagg

SEQ ID NO: 652399 - DNA, 25 bp, Homo sapien
tctggagaactgatgagcgcctaac

SEQ ID NO: 652400 - DNA, 25 bp, Homo sapien
aatgagctgtcaaactattggccca

SEQ ID NO: 652401 - DNA, 25 bp, Homo sapien
tctactatagcacactgggagatgt

SEQ ID NO: 652402 - DNA, 25 bp, Homo sapien
tcgacgtcctcatctggatggtgct

SEQ ID NO: 652403 - DNA, 25 bp, Homo sapien
ggaaagatgtaatcaaagtattctt

SEQ ID NO: 652404 - DNA, 25 bp, Homo sapien
atcaaagtattcttcccagcctgca

SEQ ID NO: 652405 - DNA, 25 bp, Homo sapien
tgaggttaggttggttggcagcatc

SEQ ID NO: 652406 - DNA, 25 bp, Homo sapien
tccagcagcataagtctctcttcct

SEQ ID NO: 652407 - DNA, 25 bp, Homo sapien
cacagtttcgcatggttttgttagc

SEQ ID NO: 652408 - DNA, 25 bp, Homo sapien
catcatcagtctggacctttcttct

SEQ ID NO: 652409 - DNA, 25 bp, Homo sapien
aaacttcgccaagattccagcagca

SEQ ID NO: 652410 - DNA, 25 bp, Homo sapien
catgctgcgtccgttgaagcaaccg

SEQ ID NO: 652411 - DNA, 25 bp, Homo sapien
gcgtccgttgaagcaaccgccggta

SEQ ID NO: 652412 - DNA, 25 bp, Homo sapien
tgctgcgtccgttgaagcaaccgcc

SEQ ID NO: 652413 - DNA, 25 bp, Homo sapien
ttgacatgctgcgtccgttgaagca

SEQ ID NO: 652414 - DNA, 25 bp, Homo sapien
catccaaagcacagctgaagtatca

SEQ ID NO: 652415 - DNA, 25 bp, Homo sapien
gaacataggatttttactgaacaac

SEQ ID NO: 652416 - DNA, 25 bp, Homo sapien
tcttgacatttacaaagcagcatgc

SEQ ID NO: 652417 - DNA, 25 bp, Homo sapien
tctaacctacatctaggaacatagg

SEQ ID NO: 652418 - DNA, 25 bp, Homo sapien
ttatgagagttcagtgcaacaagca

SEQ ID NO: 652419 - DNA, 25 bp, Homo sapien
attatgagagttcagtgcaacaagc

SEQ ID NO: 652420 - DNA, 25 bp, Homo sapien
tatgagagttcagtgcaacaagcat

SEQ ID NO: 652421 - DNA, 25 bp, Homo sapien
ctctggcatgtctaaacgtggctga

SEQ ID NO: 652422 - DNA, 25 bp, Homo sapien
cgtgctctgtcaatatcaccaagga

SEQ ID NO: 652423 - DNA, 25 bp, Homo sapien
taattcatagattgcccgtgctctg

SEQ ID NO: 652424 - DNA, 25 bp, Homo sapien
caaggattgtctctaattcagcgaa

SEQ ID NO: 652425 - DNA, 25 bp, Homo sapien
aacttgatgagacatcttgatcctt

SEQ ID NO: 652426 - DNA, 25 bp, Homo sapien
gaacttgatgagacatcttgatcct

SEQ ID NO: 652427 - DNA, 25 bp, Homo sapien
tgatgagacatcttgatcctttctt

SEQ ID NO: 652428 - DNA, 25 bp, Homo sapien
cttgatgagacatcttgatcctttc

SEQ ID NO: 652429 - DNA, 25 bp, Homo sapien
cagattcttctgtcgtatttcaaac

SEQ ID NO: 652430 - DNA, 25 bp, Homo sapien
tcttctggctaatgacagattcttc

SEQ ID NO: 652431 - DNA, 25 bp, Homo sapien
gctaatgacagattcttctgtcgta

SEQ ID NO: 652432 - DNA, 25 bp, Homo sapien
atgctcttctggctaatgacagatt

SEQ ID NO: 652433 - DNA, 25 bp, Homo sapien
cacggtagcctctgctcagaacaga

SEQ ID NO: 652434 - DNA, 25 bp, Homo sapien
ttgtatatgggcagaatgtcctacc

SEQ ID NO: 652435 - DNA, 25 bp, Homo sapien
cacaaaaatatctagcttaaaagcc

SEQ ID NO: 652436 - DNA, 25 bp, Homo sapien
tggcatggtaacctctcctgagaac

SEQ ID NO: 652437 - DNA, 25 bp, Homo sapien
gatacacctgtcttgtcctctcagg

SEQ ID NO: 652438 - DNA, 25 bp, Homo sapien
acacctgtcttgtcctctcaggatc

SEQ ID NO: 652439 - DNA, 25 bp, Homo sapien
gaattagttccaaagaggcttgata

SEQ ID NO: 652440 - DNA, 25 bp, Homo sapien
aattagttccaaagaggcttgatac

SEQ ID NO: 652441 - DNA, 25 bp, Homo sapien
gcctccaattcttcatagagtgcat

SEQ ID NO: 652442 - DNA, 25 bp, Homo sapien
ctccaattcttcatagagtgcatag

SEQ ID NO: 652443 - DNA, 25 bp, Homo sapien
cctccaattcttcatagagtgcata

SEQ ID NO: 652444 - DNA, 25 bp, Homo sapien
tccaattcttcatagagtgcatagt

SEQ ID NO: 652445 - DNA, 25 bp, Homo sapien
taaatgtagcgcttccagtgcctct

SEQ ID NO: 652446 - DNA, 25 bp, Homo sapien
tcttctcctgaatgggtgggacatt

SEQ ID NO: 652447 - DNA, 25 bp, Homo sapien
gcgtcactttctaccaagcgcaagt

SEQ ID NO: 652448 - DNA, 25 bp, Homo sapien
tagacttctctcacggcttcagctt

SEQ ID NO: 652449 - DNA, 25 bp, Homo sapien
gcctatcaccaaacttcttctcaaa

SEQ ID NO: 652450 - DNA, 25 bp, Homo sapien
tcttcttcgtactggaatctccgtt

SEQ ID NO: 652451 - DNA, 25 bp, Homo sapien
tgtaaatcactcgtaccctttcaaa

SEQ ID NO: 652452 - DNA, 25 bp, Homo sapien
ctccgtttgctcacaatgatatctt

SEQ ID NO: 652453 - DNA, 25 bp, Homo sapien
ctctcatacactttccgtgcatggg

SEQ ID NO: 652454 - DNA, 25 bp, Homo sapien
ctctctcatacactttccgtgcatg

SEQ ID NO: 652455 - DNA, 25 bp, Homo sapien
tctctcatacactttccgtgcatgg

SEQ ID NO: 652456 - DNA, 25 bp, Homo sapien
gtgcaagggaattaaggaaatccca

SEQ ID NO: 652457 - DNA, 25 bp, Homo sapien
ggaaatcccaggcaaaacagcatgg

SEQ ID NO: 652458 - DNA, 25 bp, Homo sapien
aaggaaatcccaggcaaaacagcat

SEQ ID NO: 652459 - DNA, 25 bp, Homo sapien
ttaaggaaatcccaggcaaaacagc

SEQ ID NO: 652460 - DNA, 25 bp, Homo sapien
tatttccatcagcacctgtgagaac

SEQ ID NO: 652461 - DNA, 25 bp, Homo sapien
cattgtcacctcaacagagaagagt

SEQ ID NO: 652462 - DNA, 25 bp, Homo sapien
tgtgagaacccagtcaagctactta

SEQ ID NO: 652463 - DNA, 25 bp, Homo sapien
gcctggcacgtagcaagtgctataa

SEQ ID NO: 652464 - DNA, 25 bp, Homo sapien
cataaatggtgcgggcccgatccac

SEQ ID NO: 652465 - DNA, 25 bp, Homo sapien
cgctcataaatggtgcgggcccgat

SEQ ID NO: 652466 - DNA, 25 bp, Homo sapien
atcgctcataaatggtgcgggcccg

SEQ ID NO: 652467 - DNA, 25 bp, Homo sapien
ctcataaatggtgcgggcccgatcc

SEQ ID NO: 652468 - DNA, 25 bp, Homo sapien
atccagcgctcaaacacctgccggg

SEQ ID NO: 652469 - DNA, 25 bp, Homo sapien
ttcctccatgtacgtgtacttgtac

SEQ ID NO: 652470 - DNA, 25 bp, Homo sapien
gagtgccaggcttgctcctcaggct

SEQ ID NO: 652471 - DNA, 25 bp, Homo sapien
tctttgtatctcagctcaaagttga

SEQ ID NO: 652472 - DNA, 25 bp, Homo sapien
tcggtagtctacatctaaagcacgc

SEQ ID NO: 652473 - DNA, 25 bp, Homo sapien
ggcccggtcccagatatttcgagca

SEQ ID NO: 652474 - DNA, 25 bp, Homo sapien
cagaactgattaactcgaggcagcg

SEQ ID NO: 652475 - DNA, 25 bp, Homo sapien
taaagcacgctcgtatatggatcga

SEQ ID NO: 652476 - DNA, 25 bp, Homo sapien
gttgaaaatttctacccgaggcaca

SEQ ID NO: 652477 - DNA, 25 bp, Homo sapien
tattctaccccagtactcctgaggc

SEQ ID NO: 652478 - DNA, 25 bp, Homo sapien
gctacaactgacaagatctatctct

SEQ ID NO: 652479 - DNA, 25 bp, Homo sapien
ctcaagggaaccctagggttccatg

SEQ ID NO: 652480 - DNA, 25 bp, Homo sapien
gctttcttcccattgtgcgtatttt

SEQ ID NO: 652481 - DNA, 25 bp, Homo sapien
gaatctcctttaggctttcttccca

SEQ ID NO: 652482 - DNA, 25 bp, Homo sapien
tattttatccagttactaatcacag

SEQ ID NO: 652483 - DNA, 25 bp, Homo sapien
cagttactaatcacagtcctgtttt

SEQ ID NO: 652484 - DNA, 25 bp, Homo sapien
ggtggaagaagctcaagttctcttt

SEQ ID NO: 652485 - DNA, 25 bp, Homo sapien
gaggtggaagaagctcaagttctct

SEQ ID NO: 652486 - DNA, 25 bp, Homo sapien
ggaagaagctcaagttctctttctt

SEQ ID NO: 652487 - DNA, 25 bp, Homo sapien
ggaggtggaagaagctcaagttctc

SEQ ID NO: 652488 - DNA, 25 bp, Homo sapien
tcccggccgcggtggaggccgccat

SEQ ID NO: 652489 - DNA, 25 bp, Homo sapien
ttgggaatccgctgcttcccggccg

SEQ ID NO: 652490 - DNA, 25 bp, Homo sapien
ctttgggaatccgctgcttcccggc

SEQ ID NO: 652491 - DNA, 25 bp, Homo sapien
ccactttgggaatccgctgcttccc

SEQ ID NO: 652492 - DNA, 25 bp, Homo sapien
tctgcagcagtcgacctctggacac

SEQ ID NO: 652493 - DNA, 25 bp, Homo sapien
gtctgcagcagtcgacctctggaca

SEQ ID NO: 652494 - DNA, 25 bp, Homo sapien
aatcggctctgagagctcaccgaaa

SEQ ID NO: 652495 - DNA, 25 bp, Homo sapien
cggcacggacgctagaaatcggctc

SEQ ID NO: 652496 - DNA, 25 bp, Homo sapien
gctagaaatcggctctgagagctca

SEQ ID NO: 652497 - DNA, 25 bp, Homo sapien
cacggacgctagaaatcggctctga

SEQ ID NO: 652498 - DNA, 25 bp, Homo sapien
aacaggatctcggaaccggaagcgg

SEQ ID NO: 652499 - DNA, 25 bp, Homo sapien
acaggatctcggaaccggaagcgga

SEQ ID NO: 652500 - DNA, 25 bp, Homo sapien
gaaccggaagcggaacttgcaggac

SEQ ID NO: 652501 - DNA, 25 bp, Homo sapien
aaacaggatctcggaaccggaagcg

SEQ ID NO: 652502 - DNA, 25 bp, Homo sapien
agccgtgacggaggcggcaccgttt

SEQ ID NO: 652503 - DNA, 25 bp, Homo sapien
acggaggcggcaccgtttccatggt

SEQ ID NO: 652504 - DNA, 25 bp, Homo sapien
cctctcgcttgagccgtgacggagg

SEQ ID NO: 652505 - DNA, 25 bp, Homo sapien
acctctcgcttgagccgtgacggag

SEQ ID NO: 652506 - DNA, 25 bp, Homo sapien
gatgaggtgggtaacgccgtgctga

SEQ ID NO: 652507 - DNA, 25 bp, Homo sapien
tcctccttgcggcagcgcgtggagt

SEQ ID NO: 652508 - DNA, 25 bp, Homo sapien
gtgctgactagcagcgacgcaagga

SEQ ID NO: 652509 - DNA, 25 bp, Homo sapien
gtggagtgcggcgtcctggagctgc

SEQ ID NO: 652510 - DNA, 25 bp, Homo sapien
ctgcggtgcagggcgtccagggcgc

SEQ ID NO: 652511 - DNA, 25 bp, Homo sapien
ggcgtccagggcgcatccccaggtc

SEQ ID NO: 652512 - DNA, 25 bp, Homo sapien
cgtccagggcgcatccccaggtcag

SEQ ID NO: 652513 - DNA, 25 bp, Homo sapien
tgcagggcgtccagggcgcatcccc

SEQ ID NO: 652514 - DNA, 25 bp, Homo sapien
agtggctctgtcgagccgtggcgcc

SEQ ID NO: 652515 - DNA, 25 bp, Homo sapien
gcgaggacgagtggctctgtcgagc

SEQ ID NO: 652516 - DNA, 25 bp, Homo sapien
gacgagtggctctgtcgagccgtgg

SEQ ID NO: 652517 - DNA, 25 bp, Homo sapien
ccaggcgaggacgagtggctctgtc

SEQ ID NO: 652518 - DNA, 25 bp, Homo sapien
caagggagtaagaacggagctccaa

SEQ ID NO: 652519 - DNA, 25 bp, Homo sapien
taagaacggagctccaatctggatg

SEQ ID NO: 652520 - DNA, 25 bp, Homo sapien
agggagtaagaacggagctccaatc

SEQ ID NO: 652521 - DNA, 25 bp, Homo sapien
gagtaagaacggagctccaatctgg

SEQ ID NO: 652522 - DNA, 25 bp, Homo sapien
aacgttaggttctccactgttgccg

SEQ ID NO: 652523 - DNA, 25 bp, Homo sapien
cgttaggttctccactgttgccgtc

SEQ ID NO: 652524 - DNA, 25 bp, Homo sapien
ttaggttctccactgttgccgtcat

SEQ ID NO: 652525 - DNA, 25 bp, Homo sapien
tggaacgttaggttctccactgttg

SEQ ID NO: 652526 - DNA, 25 bp, Homo sapien
gattctcttcccaaagagtgtcgga

SEQ ID NO: 652527 - DNA, 25 bp, Homo sapien
agattctcttcccaaagagtgtcgg

SEQ ID NO: 652528 - DNA, 25 bp, Homo sapien
tctcttcccaaagagtgtcggaaag

SEQ ID NO: 652529 - DNA, 25 bp, Homo sapien
agagattctcttcccaaagagtgtc

SEQ ID NO: 652530 - DNA, 25 bp, Homo sapien
gaacatcccgtgtctgacgtatgag

SEQ ID NO: 652531 - DNA, 25 bp, Homo sapien
tgaaggtctctaccatcaggtgccc

SEQ ID NO: 652532 - DNA, 25 bp, Homo sapien
gctgcacgttcgcaaagccaggtac

SEQ ID NO: 652533 - DNA, 25 bp, Homo sapien
gctttgaccagtagaccgtggccaa

SEQ ID NO: 652534 - DNA, 25 bp, Homo sapien
gacagtatggcagtcagtgcctttg

SEQ ID NO: 652535 - DNA, 25 bp, Homo sapien
gacagtagtgaattcgtgtggaaat

SEQ ID NO: 652536 - DNA, 25 bp, Homo sapien
attcgtgtggaaatggtgacagtat

SEQ ID NO: 652537 - DNA, 25 bp, Homo sapien
ttagaagataagtggacagtagtga

SEQ ID NO: 652538 - DNA, 25 bp, Homo sapien
tctggggccgtaatcatgtagtgca

SEQ ID NO: 652539 - DNA, 25 bp, Homo sapien
tctcagactcgagggaagcaggcct

SEQ ID NO: 652540 - DNA, 25 bp, Homo sapien
agagacccatcaggctgcgagggag

SEQ ID NO: 652541 - DNA, 25 bp, Homo sapien
aatgtcaggatctgcgtgtcaccca

SEQ ID NO: 652542 - DNA, 25 bp, Homo sapien
taaagagcattttccgtggttggga

SEQ ID NO: 652543 - DNA, 25 bp, Homo sapien
gaactggacaatatatatccagtga

SEQ ID NO: 652544 - DNA, 25 bp, Homo sapien
cacaccttggccgtaagaattagca

SEQ ID NO: 652545 - DNA, 25 bp, Homo sapien
tatccagtgatgatcccatcattgg

SEQ ID NO: 652546 - DNA, 25 bp, Homo sapien
ctagaaattcctgctgatgcccttg

SEQ ID NO: 652547 - DNA, 25 bp, Homo sapien
tagaaattcctgctgatgcccttgc

SEQ ID NO: 652548 - DNA, 25 bp, Homo sapien
gaaattcctgctgatgcccttgcat

SEQ ID NO: 652549 - DNA, 25 bp, Homo sapien
cactagaaattcctgctgatgccct

SEQ ID NO: 652550 - DNA, 25 bp, Homo sapien
taaacatcagagcaaagctgtaggc

SEQ ID NO: 652551 - DNA, 25 bp, Homo sapien
tccagaggccgtgctgcctcaagca

SEQ ID NO: 652552 - DNA, 25 bp, Homo sapien
tactctgaatcacttgagtcagtgc

SEQ ID NO: 652553 - DNA, 25 bp, Homo sapien
cctttggtgtctcgaaagaggcaga

SEQ ID NO: 652554 - DNA, 25 bp, Homo sapien
tctggtgtttactccaagctgaggt

SEQ ID NO: 652555 - DNA, 25 bp, Homo sapien
cttgacatctggtgtttactccaag

SEQ ID NO: 652556 - DNA, 25 bp, Homo sapien
tactccaagctgaggttttagggaa

SEQ ID NO: 652557 - DNA, 25 bp, Homo sapien
gccagcggcggctcctagtgacaga

SEQ ID NO: 652558 - DNA, 25 bp, Homo sapien
ttctatgcttgagctggtgtcagcc

SEQ ID NO: 652559 - DNA, 25 bp, Homo sapien
tacgtcagtccttctatgcttgagc

SEQ ID NO: 652560 - DNA, 25 bp, Homo sapien
ggttgttccatacgtcagtccttct

SEQ ID NO: 652561 - DNA, 25 bp, Homo sapien
tgctcttggttgttccatacgtcag

SEQ ID NO: 652562 - DNA, 25 bp, Homo sapien
ttttccacataaacatgagagctca

SEQ ID NO: 652563 - DNA, 25 bp, Homo sapien
taagcctcctaatctctgaatgtgg

SEQ ID NO: 652564 - DNA, 25 bp, Homo sapien
gaggcttcgcatatctgttgttaga

SEQ ID NO: 652565 - DNA, 25 bp, Homo sapien
tgatactggcagagtaagtctttcc

SEQ ID NO: 652566 - DNA, 25 bp, Homo sapien
ttattctgctaaccgttccttttgc

SEQ ID NO: 652567 - DNA, 25 bp, Homo sapien
gagaggctgcttgatgtaatattaa

SEQ ID NO: 652568 - DNA, 25 bp, Homo sapien
cctttcctggttcatccatagaatg

SEQ ID NO: 652569 - DNA, 25 bp, Homo sapien
ttatgtgggtccttatgtgtgagtc

SEQ ID NO: 652570 - DNA, 25 bp, Homo sapien
gagagggctgcgctgcactgatttc

SEQ ID NO: 652571 - DNA, 25 bp, Homo sapien
caaaatctttgtagggatcctgccc

SEQ ID NO: 652572 - DNA, 25 bp, Homo sapien
ggtcctcagacagtgggctcgctgt

SEQ ID NO: 652573 - DNA, 25 bp, Homo sapien
gcagtagagtctcccttgtgaggca

SEQ ID NO: 652574 - DNA, 25 bp, Homo sapien
gcacagaattgacgcatttgttctc

SEQ ID NO: 652575 - DNA, 25 bp, Homo sapien
agaattgacgcatttgttctctggg

SEQ ID NO: 652576 - DNA, 25 bp, Homo sapien
cagcacagaattgacgcatttgttc

SEQ ID NO: 652577 - DNA, 25 bp, Homo sapien
aaacagcacagaattgacgcatttg

SEQ ID NO: 652578 - DNA, 25 bp, Homo sapien
tttctgttgaaaccgcaagcacagg

SEQ ID NO: 652579 - DNA, 25 bp, Homo sapien
tgccactgagaagtccccttgttgg

SEQ ID NO: 652580 - DNA, 25 bp, Homo sapien
gcctggataggcttttctgttgaaa

SEQ ID NO: 652581 - DNA, 25 bp, Homo sapien
cccttgttggtcactccctgctcct

SEQ ID NO: 652582 - DNA, 25 bp, Homo sapien
cacttccagaagatgtaaggtagca

SEQ ID NO: 652583 - DNA, 25 bp, Homo sapien
cttccagaagatgtaaggtagcagc

SEQ ID NO: 652584 - DNA, 25 bp, Homo sapien
gtgagggccctgatagtcacttcca

SEQ ID NO: 652585 - DNA, 25 bp, Homo sapien
aagatgtaaggtagcagctagaacc

SEQ ID NO: 652586 - DNA, 25 bp, Homo sapien
taatcccacttaagttagtcgctgg

SEQ ID NO: 652587 - DNA, 25 bp, Homo sapien
cagagctttgtgtatgtgggcacac

SEQ ID NO: 652588 - DNA, 25 bp, Homo sapien
catcccagtggattgtgttcgtttc

SEQ ID NO: 652589 - DNA, 25 bp, Homo sapien
gagtagctcctttgtgtaacagagc

SEQ ID NO: 652590 - DNA, 25 bp, Homo sapien
tgtgttgttttggagacgcgtgctc

SEQ ID NO: 652591 - DNA, 25 bp, Homo sapien
gatcattttgcatgttgagattgtg

SEQ ID NO: 652592 - DNA, 25 bp, Homo sapien
tttgcatgttgagattgtgttgttt

SEQ ID NO: 652593 - DNA, 25 bp, Homo sapien
tgttgttttggagacgcgtgctcat

SEQ ID NO: 652594 - DNA, 25 bp, Homo sapien
acctcccacacgggaagcctcatgt

SEQ ID NO: 652595 - DNA, 25 bp, Homo sapien
cacctcccacacgggaagcctcatg

SEQ ID NO: 652596 - DNA, 25 bp, Homo sapien
tcgtgacagagcctcttgatggcac

SEQ ID NO: 652597 - DNA, 25 bp, Homo sapien
catctcgtgacagagcctcttgatg

SEQ ID NO: 652598 - DNA, 25 bp, Homo sapien
tatacacagagtgagcaaaagggag

SEQ ID NO: 652599 - DNA, 25 bp, Homo sapien
tgacctatctttacactgacgtgtg

SEQ ID NO: 652600 - DNA, 25 bp, Homo sapien
gaacactgggactgtttaccgctga

SEQ ID NO: 652601 - DNA, 25 bp, Homo sapien
tgtatttggagtctcagacaccctg

SEQ ID NO: 652602 - DNA, 25 bp, Homo sapien
ccttgtatggacagagctccctttg

SEQ ID NO: 652603 - DNA, 25 bp, Homo sapien
tccttgtatggacagagctcccttt

SEQ ID NO: 652604 - DNA, 25 bp, Homo sapien
catctttgcctgaaaagctcaaagt

SEQ ID NO: 652605 - DNA, 25 bp, Homo sapien
tttgcctgaaaagctcaaagtattt

SEQ ID NO: 652606 - DNA, 25 bp, Homo sapien
gcctgaaaagctcaaagtatttgca

SEQ ID NO: 652607 - DNA, 25 bp, Homo sapien
gaaaagctcaaagtatttgcagaca

SEQ ID NO: 652608 - DNA, 25 bp, Homo sapien
ttttcttctgcgcagcctcttctgg

SEQ ID NO: 652609 - DNA, 25 bp, Homo sapien
ttcctgtgccgtaagtttccatttc

SEQ ID NO: 652610 - DNA, 25 bp, Homo sapien
ctattcctgtgccgtaagtttccat

SEQ ID NO: 652611 - DNA, 25 bp, Homo sapien
gctatctttttcttctgcgcagcct

SEQ ID NO: 652612 - DNA, 25 bp, Homo sapien
tggccacacatcttgggtactttgt

SEQ ID NO: 652613 - DNA, 25 bp, Homo sapien
ggcagagctcacacatgggttaacc

SEQ ID NO: 652614 - DNA, 25 bp, Homo sapien
taacctgaccctgagctctgtgagt

SEQ ID NO: 652615 - DNA, 25 bp, Homo sapien
catgggttaacctgaccctgagctc

SEQ ID NO: 652616 - DNA, 25 bp, Homo sapien
gggccactgaccctgtgtccagtcc

SEQ ID NO: 652617 - DNA, 25 bp, Homo sapien
ccactgtttggcctggacgcaccta

SEQ ID NO: 652618 - DNA, 25 bp, Homo sapien
accaactccacctttgtaacgtcag

SEQ ID NO: 652619 - DNA, 25 bp, Homo sapien
gtttggcctggacgcacctaccaac

SEQ ID NO: 652620 - DNA, 25 bp, Homo sapien
tactgggtggctcttgatatatgca

SEQ ID NO: 652621 - DNA, 25 bp, Homo sapien
atttgaacctctcgatttgcctgag

SEQ ID NO: 652622 - DNA, 25 bp, Homo sapien
gatatatgcataccctgacggcctg

SEQ ID NO: 652623 - DNA, 25 bp, Homo sapien
tctcgatttgcctgagttcacattt

SEQ ID NO: 652624 - DNA, 25 bp, Homo sapien
tgctgccacgactgcgtactttgga

SEQ ID NO: 652625 - DNA, 25 bp, Homo sapien
cacgactgcgtactttggaaactga

SEQ ID NO: 652626 - DNA, 25 bp, Homo sapien
agctgctgccacgactgcgtacttt

SEQ ID NO: 652627 - DNA, 25 bp, Homo sapien
tgccacgactgcgtactttggaaac

SEQ ID NO: 652628 - DNA, 25 bp, Homo sapien
ggcaggtacttccaagcaagcaaga

SEQ ID NO: 652629 - DNA, 25 bp, Homo sapien
tgtacctcccagtaagagacctgag

SEQ ID NO: 652630 - DNA, 25 bp, Homo sapien
gcatccagaatggtgcagcccaggt

SEQ ID NO: 652631 - DNA, 25 bp, Homo sapien
tgcacggctaagcatgaggagagct

SEQ ID NO: 652632 - DNA, 25 bp, Homo sapien
ctgccgaacatggttgtatcagagg

SEQ ID NO: 652633 - DNA, 25 bp, Homo sapien
ccgaacatggttgtatcagaggatg

SEQ ID NO: 652634 - DNA, 25 bp, Homo sapien
cgaacatggttgtatcagaggatgg

SEQ ID NO: 652635 - DNA, 25 bp, Homo sapien
gccgaacatggttgtatcagaggat

SEQ ID NO: 652636 - DNA, 25 bp, Homo sapien
ggagagcacctgactgccgttgaat

SEQ ID NO: 652637 - DNA, 25 bp, Homo sapien
gcttaggtagtttgcccagggtcag

SEQ ID NO: 652638 - DNA, 25 bp, Homo sapien
tgtttaccgcgagacagacacatgg

SEQ ID NO: 652639 - DNA, 25 bp, Homo sapien
tctgggaaacagatctagacaggcc

SEQ ID NO: 652640 - DNA, 25 bp, Homo sapien
agaatatggacctctctctattggc

SEQ ID NO: 652641 - DNA, 25 bp, Homo sapien
acatcaactgcaaggcaaatcatga

SEQ ID NO: 652642 - DNA, 25 bp, Homo sapien
gcaggcctttatggctatctccatg

SEQ ID NO: 652643 - DNA, 25 bp, Homo sapien
gagccttgcccctcctacatgaaga

SEQ ID NO: 652644 - DNA, 25 bp, Homo sapien
gatctgcaatcagagtaatgcacga

SEQ ID NO: 652645 - DNA, 25 bp, Homo sapien
cacacagtcgcctttttacgggtgc

SEQ ID NO: 652646 - DNA, 25 bp, Homo sapien
cagtgcgagaatgacttcgggctcc

SEQ ID NO: 652647 - DNA, 25 bp, Homo sapien
aattttcggagcttccacacagtcg

SEQ ID NO: 652648 - DNA, 25 bp, Homo sapien
aggagcaacaaagattggtcttcca

SEQ ID NO: 652649 - DNA, 25 bp, Homo sapien
taaaaggagcaacaaagattggtct

SEQ ID NO: 652650 - DNA, 25 bp, Homo sapien
gcaacaaagattggtcttccatgaa

SEQ ID NO: 652651 - DNA, 25 bp, Homo sapien
ctaaaaggagcaacaaagattggtc

SEQ ID NO: 652652 - DNA, 25 bp, Homo sapien
tttctctgaggcacctactgtttga

SEQ ID NO: 652653 - DNA, 25 bp, Homo sapien
ttccagctcttacccagggattcag

SEQ ID NO: 652654 - DNA, 25 bp, Homo sapien
ctactgtttgactgtgtctctgccc

SEQ ID NO: 652655 - DNA, 25 bp, Homo sapien
tccttccagctcttacccagggatt

SEQ ID NO: 652656 - DNA, 25 bp, Homo sapien
cagaggccacgaggccaaactcaaa

SEQ ID NO: 652657 - DNA, 25 bp, Homo sapien
tgttcccaagatggtcaactttaga

SEQ ID NO: 652658 - DNA, 25 bp, Homo sapien
ctagagatgtttctgctactattcc

SEQ ID NO: 652659 - DNA, 25 bp, Homo sapien
gatgtttctgctactattccagagg

SEQ ID NO: 652660 - DNA, 25 bp, Homo sapien
gaccattctttagtaaaagcagttg

SEQ ID NO: 652661 - DNA, 25 bp, Homo sapien
tcatacaggacaaataggagtaggt

SEQ ID NO: 652662 - DNA, 25 bp, Homo sapien
gcaatgaccattctttagtaaaagc

SEQ ID NO: 652663 - DNA, 25 bp, Homo sapien
taggtttgccatcatgcaatgacca

SEQ ID NO: 652664 - DNA, 25 bp, Homo sapien
gtaggcaaacagagggtgttttgct

SEQ ID NO: 652665 - DNA, 25 bp, Homo sapien
taggctgcggtgtaggcaaacagag

SEQ ID NO: 652666 - DNA, 25 bp, Homo sapien
cagtaggctgcggtgtaggcaaaca

SEQ ID NO: 652667 - DNA, 25 bp, Homo sapien
tcagtaggctgcggtgtaggcaaac

SEQ ID NO: 652668 - DNA, 25 bp, Homo sapien
atgggaatggcatccatgtcagaac

SEQ ID NO: 652669 - DNA, 25 bp, Homo sapien
ggaatggcatccatgtcagaacctg

SEQ ID NO: 652670 - DNA, 25 bp, Homo sapien
gaatggcatccatgtcagaacctgg

SEQ ID NO: 652671 - DNA, 25 bp, Homo sapien
tgggaatggcatccatgtcagaacc

SEQ ID NO: 652672 - DNA, 25 bp, Homo sapien
tgcaggccccaaacgtcttcaacct

SEQ ID NO: 652673 - DNA, 25 bp, Homo sapien
tctgccctgggattgcactgctgca

SEQ ID NO: 652674 - DNA, 25 bp, Homo sapien
actgtgcgtgctgctcagcggtgtc

SEQ ID NO: 652675 - DNA, 25 bp, Homo sapien
caaacgtcttcaacctggcactgtg

SEQ ID NO: 652676 - DNA, 25 bp, Homo sapien
gagtttcctcagcaagctaaaaata

SEQ ID NO: 652677 - DNA, 25 bp, Homo sapien
taaaactcaaaactgcagtgaaaca

SEQ ID NO: 652678 - DNA, 25 bp, Homo sapien
ctgtagagaacagtctggagtttcc

SEQ ID NO: 652679 - DNA, 25 bp, Homo sapien
atattgaaatgaggtacaaatggcc

SEQ ID NO: 652680 - DNA, 25 bp, Homo sapien
aatttaactcttggagatagtagaa

SEQ ID NO: 652681 - DNA, 25 bp, Homo sapien
gtggcaagaagtgggtggataaagt

SEQ ID NO: 652682 - DNA, 25 bp, Homo sapien
taactcttggagatagtagaatgat

SEQ ID NO: 652683 - DNA, 25 bp, Homo sapien
tttaactcttggagatagtagaatg

SEQ ID NO: 652684 - DNA, 25 bp, Homo sapien
tgaggaaatcaacccgactgagaag

SEQ ID NO: 652685 - DNA, 25 bp, Homo sapien
gagcagttagcccatcaaatagaag

SEQ ID NO: 652686 - DNA, 25 bp, Homo sapien
cgtggccaggcatcgtttagttgta

SEQ ID NO: 652687 - DNA, 25 bp, Homo sapien
tctacaaaaccctggtggagagaag

SEQ ID NO: 652688 - DNA, 25 bp, Homo sapien
caccgcctttccaaaaatggcttat

SEQ ID NO: 652689 - DNA, 25 bp, Homo sapien
gaaaaatcaacgatgaagtgaggga

SEQ ID NO: 652690 - DNA, 25 bp, Homo sapien
tctgatgcctctaattgctctccca

SEQ ID NO: 652691 - DNA, 25 bp, Homo sapien
tacactcaaacatcacaggagggca

SEQ ID NO: 652692 - DNA, 25 bp, Homo sapien
cctcacaggtggaggacacctcttg

SEQ ID NO: 652693 - DNA, 25 bp, Homo sapien
tcagttccgtttgagaccgaggcgc

SEQ ID NO: 652694 - DNA, 25 bp, Homo sapien
ccctgagggcacttcaaggagcgtg

SEQ ID NO: 652695 - DNA, 25 bp, Homo sapien
cagtttcgctgggttttgtcagttc

SEQ ID NO: 652696 - DNA, 25 bp, Homo sapien
taatgggcgcgcagcagattgccag

SEQ ID NO: 652697 - DNA, 25 bp, Homo sapien
cgaataatgggcgcgcagcagattg

SEQ ID NO: 652698 - DNA, 25 bp, Homo sapien
ccccggccgaataatgggcgcgcag

SEQ ID NO: 652699 - DNA, 25 bp, Homo sapien
ccggccgaataatgggcgcgcagca

SEQ ID NO: 652700 - DNA, 25 bp, Homo sapien
ggcgggcactgcagcggtaacgcac

SEQ ID NO: 652701 - DNA, 25 bp, Homo sapien
cgcacggttcctgccggttgtggct

SEQ ID NO: 652702 - DNA, 25 bp, Homo sapien
ggaggcgctggtccctccgggcggc

SEQ ID NO: 652703 - DNA, 25 bp, Homo sapien
gcacccggcgcagggaggcgctggt

SEQ ID NO: 652704 - DNA, 25 bp, Homo sapien
gtgatgaggggcgctgacacctcac

SEQ ID NO: 652705 - DNA, 25 bp, Homo sapien
gtctgcagcagagtggtgatgaggg

SEQ ID NO: 652706 - DNA, 25 bp, Homo sapien
cgggagtgggggcttctgtgaagcc

SEQ ID NO: 652707 - DNA, 25 bp, Homo sapien
ttctgtgaagccagaagagaagtct

SEQ ID NO: 652708 - DNA, 25 bp, Homo sapien
tgatttccagccgtggtgagggtca

SEQ ID NO: 652709 - DNA, 25 bp, Homo sapien
aacgccgacgtctccaaacgcgata

SEQ ID NO: 652710 - DNA, 25 bp, Homo sapien
aagcttcgcgctttctacaaactcc

SEQ ID NO: 652711 - DNA, 25 bp, Homo sapien
tgttctcctagacaccccaaggagc

SEQ ID NO: 652712 - DNA, 25 bp, Homo sapien
tgactgtacccgtctgaaagcagat

SEQ ID NO: 652713 - DNA, 25 bp, Homo sapien
taaaattggccaaagctgtctcgga

SEQ ID NO: 652714 - DNA, 25 bp, Homo sapien
tgttacatatgcaagaccgaatggg

SEQ ID NO: 652715 - DNA, 25 bp, Homo sapien
tacgctagcaagactggaagccaca

SEQ ID NO: 652716 - DNA, 25 bp, Homo sapien
cgtgcgcctccccatagagaagcag

SEQ ID NO: 652717 - DNA, 25 bp, Homo sapien
agaagcagcagaccgtgaagggagg

SEQ ID NO: 652718 - DNA, 25 bp, Homo sapien
atggacgggcccatttggcggctcc

SEQ ID NO: 652719 - DNA, 25 bp, Homo sapien
gggcgtgcattgtcgcgctgatgga

SEQ ID NO: 652720 - DNA, 25 bp, Homo sapien
gagtgccatcactgcgccaagaagt

SEQ ID NO: 652721 - DNA, 25 bp, Homo sapien
cgagtgcgccaaggtcttcagctgc

SEQ ID NO: 652722 - DNA, 25 bp, Homo sapien
caaatgctcgcgcatcgtgcgtgtg

SEQ ID NO: 652723 - DNA, 25 bp, Homo sapien
cgtgcgtgtggagtaccgctgtccc

SEQ ID NO: 652724 - DNA, 25 bp, Homo sapien
ccactgtgcgttttagaagagagcc

SEQ ID NO: 652725 - DNA, 25 bp, Homo sapien
tagaaatgcggtctggtctcgcctc

SEQ ID NO: 652726 - DNA, 25 bp, Homo sapien
catttattctgcttcgagggtcccc

SEQ ID NO: 652727 - DNA, 25 bp, Homo sapien
catggcgcaacaggagtcagtctct

SEQ ID NO: 652728 - DNA, 25 bp, Homo sapien
tgtgtgactcactcggaggcctgtg

SEQ ID NO: 652729 - DNA, 25 bp, Homo sapien
tgggagtacccagatcttgcagagc

SEQ ID NO: 652730 - DNA, 25 bp, Homo sapien
tcactgggttcaatctgggagtacc

SEQ ID NO: 652731 - DNA, 25 bp, Homo sapien
gcacaagggcacctgtcggcatgtt

SEQ ID NO: 652732 - DNA, 25 bp, Homo sapien
tttgcaaacaaccagctacaggttt

SEQ ID NO: 652733 - DNA, 25 bp, Homo sapien
ctttggacacatccctcatgaggac

SEQ ID NO: 652734 - DNA, 25 bp, Homo sapien
tctgaagatgattgagtcctgcttc

SEQ ID NO: 652735 - DNA, 25 bp, Homo sapien
tttggtgtcatcagggcaacttccc

SEQ ID NO: 652736 - DNA, 25 bp, Homo sapien
attctacacctgcaagcaactgaat

SEQ ID NO: 652737 - DNA, 25 bp, Homo sapien
ttctacacctgcaagcaactgaata

SEQ ID NO: 652738 - DNA, 25 bp, Homo sapien
tattctacacctgcaagcaactgaa

SEQ ID NO: 652739 - DNA, 25 bp, Homo sapien
tgatatataaatagcaacaacgaca

SEQ ID NO: 652740 - DNA, 25 bp, Homo sapien
tctctgatatctgaggtaggaatat

SEQ ID NO: 652741 - DNA, 25 bp, Homo sapien
aacgacaacaacaatccgatcagcg

SEQ ID NO: 652742 - DNA, 25 bp, Homo sapien
caacaatccgatcagcgctgtccat

SEQ ID NO: 652743 - DNA, 25 bp, Homo sapien
gccagagagaggttaactccagcgt

SEQ ID NO: 652744 - DNA, 25 bp, Homo sapien
ccaaaaatgcacgtggaaactacat

SEQ ID NO: 652745 - DNA, 25 bp, Homo sapien
tgtgcctggtccctatgacagcagg

SEQ ID NO: 652746 - DNA, 25 bp, Homo sapien
tccatgcactggtgaagaacggtga

SEQ ID NO: 652747 - DNA, 25 bp, Homo sapien
gacacgcttcactgcaggaggcata

SEQ ID NO: 652748 - DNA, 25 bp, Homo sapien
tccagctgtagatccgtgccttgag

SEQ ID NO: 652749 - DNA, 25 bp, Homo sapien
atctcagtgagccaacgtcttccgg

SEQ ID NO: 652750 - DNA, 25 bp, Homo sapien
gagcctctcgctggaagacacgctt

SEQ ID NO: 652751 - DNA, 25 bp, Homo sapien
agatgccagggtgaactttattttc

SEQ ID NO: 652752 - DNA, 25 bp, Homo sapien
tggtgcacacacgtctgcaaggtgt

SEQ ID NO: 652753 - DNA, 25 bp, Homo sapien
tgtgtgctttctcggtgtggctgcc

SEQ ID NO: 652754 - DNA, 25 bp, Homo sapien
tcatcacagtaaatcagaattaaag

SEQ ID NO: 652755 - DNA, 25 bp, Homo sapien
gcaaggtgttcccaccacctaggaa

SEQ ID NO: 652756 - DNA, 25 bp, Homo sapien
gaatttccctcggatgcagacgctg

SEQ ID NO: 652757 - DNA, 25 bp, Homo sapien
cgaaagcctaagtacaatgagacga

SEQ ID NO: 652758 - DNA, 25 bp, Homo sapien
tgacaccgatacagcaggtccatgg

SEQ ID NO: 652759 - DNA, 25 bp, Homo sapien
caacatgtggctcttaggaaccgca

SEQ ID NO: 652760 - DNA, 25 bp, Homo sapien
tgcgatggccttcccaacaggagtg

SEQ ID NO: 652761 - DNA, 25 bp, Homo sapien
caaattctcgccaggatgagcaggc

SEQ ID NO: 652762 - DNA, 25 bp, Homo sapien
gaatggcaggctcaaaaaactctag

SEQ ID NO: 652763 - DNA, 25 bp, Homo sapien
taaagccagcaattccgcaacagga

SEQ ID NO: 652764 - DNA, 25 bp, Homo sapien
cagcgtgaggcttttggaggcacaa

SEQ ID NO: 652765 - DNA, 25 bp, Homo sapien
tgagggcactagtacagcaacgaaa

SEQ ID NO: 652766 - DNA, 25 bp, Homo sapien
gagtcccatctgagacacggtagtg

SEQ ID NO: 652767 - DNA, 25 bp, Homo sapien
taaatccctcgcttggaatcggcta

SEQ ID NO: 652768 - DNA, 25 bp, Homo sapien
cagagaactgctaagtcatggaggc

SEQ ID NO: 652769 - DNA, 25 bp, Homo sapien
ggctctacggccacacatttcaggg

SEQ ID NO: 652770 - DNA, 25 bp, Homo sapien
cgctatgccggcaaagatgtttgtt

SEQ ID NO: 652771 - DNA, 25 bp, Homo sapien
catttcagggaggatctgtggcact

SEQ ID NO: 652772 - DNA, 25 bp, Homo sapien
tgaaatgagacctttacgtgtttta

SEQ ID NO: 652773 - DNA, 25 bp, Homo sapien
attgaaatgagacctttacgtgttt

SEQ ID NO: 652774 - DNA, 25 bp, Homo sapien
tattgaaatgagacctttacgtgtt

SEQ ID NO: 652775 - DNA, 25 bp, Homo sapien
gacacacggcggtgctcccaaaggg

SEQ ID NO: 652776 - DNA, 25 bp, Homo sapien
ggctcaaatgtcacttgcccttgac

SEQ ID NO: 652777 - DNA, 25 bp, Homo sapien
tcagtaactgccaatccatggttga

SEQ ID NO: 652778 - DNA, 25 bp, Homo sapien
gtcagcttcctgatacatctctggg

SEQ ID NO: 652779 - DNA, 25 bp, Homo sapien
ctggagggcaatgtgctcggagatg

SEQ ID NO: 652780 - DNA, 25 bp, Homo sapien
tggagggcaatgtgctcggagatgg

SEQ ID NO: 652781 - DNA, 25 bp, Homo sapien
ggcgggacacgtggctgagctccac

SEQ ID NO: 652782 - DNA, 25 bp, Homo sapien
ctgggcaatccaggacaggggctat

SEQ ID NO: 652783 - DNA, 25 bp, Homo sapien
ggcagggcgggacacgtggctgagc

SEQ ID NO: 652784 - DNA, 25 bp, Homo sapien
caatccaggacaggggctatgttct

SEQ ID NO: 652785 - DNA, 25 bp, Homo sapien
accctagggatgtagctagggagca

SEQ ID NO: 652786 - DNA, 25 bp, Homo sapien
gctaactggagttgcgctgtttctc

SEQ ID NO: 652787 - DNA, 25 bp, Homo sapien
ttctctgcaccctagggatgtagct

SEQ ID NO: 652788 - DNA, 25 bp, Homo sapien
gactgcagagtctacccatacacat

SEQ ID NO: 652789 - DNA, 25 bp, Homo sapien
caaaagtggtcagaatcaagccggt

SEQ ID NO: 652790 - DNA, 25 bp, Homo sapien
caccatgtgtggttgacggcgcatc

SEQ ID NO: 652791 - DNA, 25 bp, Homo sapien
tgtgcatacgcatgtgagcccaagc

SEQ ID NO: 652792 - DNA, 25 bp, Homo sapien
tccacgagggcatccaagcaattgt

SEQ ID NO: 652793 - DNA, 25 bp, Homo sapien
gagaatctcaacatgcattggctaa

SEQ ID NO: 652794 - DNA, 25 bp, Homo sapien
tccactggccctaataaatgaaaat

SEQ ID NO: 652795 - DNA, 25 bp, Homo sapien
caagtcagaataggagaagtaaggc

SEQ ID NO: 652796 - DNA, 25 bp, Homo sapien
cacaggttagaaatctattaagcac

SEQ ID NO: 652797 - DNA, 25 bp, Homo sapien
tgcactgctgtaatgatggaccccg

SEQ ID NO: 652798 - DNA, 25 bp, Homo sapien
cggtcggcggcttgtccacatgaca

SEQ ID NO: 652799 - DNA, 25 bp, Homo sapien
agagagacacgcacactgcactgct

SEQ ID NO: 652800 - DNA, 25 bp, Homo sapien
catgtctcctgcattaatccctgac

SEQ ID NO: 652801 - DNA, 25 bp, Homo sapien
gcataatccccatttagcattagta

SEQ ID NO: 652802 - DNA, 25 bp, Homo sapien
tgattcgggcatcgcttttaaacag

SEQ ID NO: 652803 - DNA, 25 bp, Homo sapien
ttcgaatctcggcagcataatcccc

SEQ ID NO: 652804 - DNA, 25 bp, Homo sapien
cattagtagcaacggcttccactgt

SEQ ID NO: 652805 - DNA, 25 bp, Homo sapien
gctagatttgaaggttaacaggata

SEQ ID NO: 652806 - DNA, 25 bp, Homo sapien
cccagctcagcaagaaacccacact

SEQ ID NO: 652807 - DNA, 25 bp, Homo sapien
agaaaaagttcattaaccttgctag

SEQ ID NO: 652808 - DNA, 25 bp, Homo sapien
aatgaaccggagcacattactgaga

SEQ ID NO: 652809 - DNA, 25 bp, Homo sapien
tgctgctcgaatgcgtcttaagcgc

SEQ ID NO: 652810 - DNA, 25 bp, Homo sapien
taagcgcgtgagagaagaataatgt

SEQ ID NO: 652811 - DNA, 25 bp, Homo sapien
aaaggaactgagtgaacagctcgaa

SEQ ID NO: 652812 - DNA, 25 bp, Homo sapien
ctgtgaaaaacaggtgtacatctgc

SEQ ID NO: 652813 - DNA, 25 bp, Homo sapien
gacttgggctgcgaaatcctcgaat

SEQ ID NO: 652814 - DNA, 25 bp, Homo sapien
ccgttccgctgagggagtagctggg

SEQ ID NO: 652815 - DNA, 25 bp, Homo sapien
tgggctgcgaaatcctcgaatgtca

SEQ ID NO: 652816 - DNA, 25 bp, Homo sapien
gagaaaagacttgggctgcgaaatc

SEQ ID NO: 652817 - DNA, 25 bp, Homo sapien
cttcgagatacagagctcgctcttc

SEQ ID NO: 652818 - DNA, 25 bp, Homo sapien
gagatacagagctcgctcttcatag

SEQ ID NO: 652819 - DNA, 25 bp, Homo sapien
tctgaattattgcttcgagatacag

SEQ ID NO: 652820 - DNA, 25 bp, Homo sapien
ttacttcgcggtggttctgaattat

SEQ ID NO: 652821 - DNA, 25 bp, Homo sapien
tcagagcctctaaccaagacaagct

SEQ ID NO: 652822 - DNA, 25 bp, Homo sapien
gagagaatctaccaagagtgcacag

SEQ ID NO: 652823 - DNA, 25 bp, Homo sapien
caagtgcacgtgcaaagtggcatgc

SEQ ID NO: 652824 - DNA, 25 bp, Homo sapien
cttggtgatacgacagtgcagacgc

SEQ ID NO: 652825 - DNA, 25 bp, Homo sapien
taacacactgaagcaactttccagc

SEQ ID NO: 652826 - DNA, 25 bp, Homo sapien
tttccagctgtcttaataggacccc

SEQ ID NO: 652827 - DNA, 25 bp, Homo sapien
gacccctgcgtgtggcaggctttca

SEQ ID NO: 652828 - DNA, 25 bp, Homo sapien
ggtgaatcatgcacttccaataaca

SEQ ID NO: 652829 - DNA, 25 bp, Homo sapien
caacagacactggtcctgtgcaaac

SEQ ID NO: 652830 - DNA, 25 bp, Homo sapien
gaaagtagttttgagcagccacagg

SEQ ID NO: 652831 - DNA, 25 bp, Homo sapien
tgagcgtggagaatatgggtctcat

SEQ ID NO: 652832 - DNA, 25 bp, Homo sapien
caaacggccctggagcatgtcttta

SEQ ID NO: 652833 - DNA, 25 bp, Homo sapien
tttgaagagccatggagatgatcct

SEQ ID NO: 652834 - DNA, 25 bp, Homo sapien
gacatgatcccaaatgtggtggccc

SEQ ID NO: 652835 - DNA, 25 bp, Homo sapien
gcatgagacatgacccagatgagga

SEQ ID NO: 652836 - DNA, 25 bp, Homo sapien
tatcactggtctcaaggccaggagg

SEQ ID NO: 652837 - DNA, 25 bp, Homo sapien
cgtgacatgcttcaacactggagag

SEQ ID NO: 652838 - DNA, 25 bp, Homo sapien
caaacccagggcgatctgttacaca

SEQ ID NO: 652839 - DNA, 25 bp, Homo sapien
cattgggtcctcctgcaaaactcaa

SEQ ID NO: 652840 - DNA, 25 bp, Homo sapien
ttgtagccaagagcccattgggtcc

SEQ ID NO: 652841 - DNA, 25 bp, Homo sapien
acaggcgaatgctgcaacaatatgg

SEQ ID NO: 652842 - DNA, 25 bp, Homo sapien
gcaacaatatggaactaaagtccat

SEQ ID NO: 652843 - DNA, 25 bp, Homo sapien
taaagtccatgacgcagaggcagaa

SEQ ID NO: 652844 - DNA, 25 bp, Homo sapien
gacagcgcgtactctgctagatgct

SEQ ID NO: 652845 - DNA, 25 bp, Homo sapien
tctcttcacgaagggaacgagggac

SEQ ID NO: 652846 - DNA, 25 bp, Homo sapien
gagctgacaatgctgtgccatagca

SEQ ID NO: 652847 - DNA, 25 bp, Homo sapien
cactagatctatggcctttcaggga

SEQ ID NO: 652848 - DNA, 25 bp, Homo sapien
gccccggagtcccagtgtggtgaaa

SEQ ID NO: 652849 - DNA, 25 bp, Homo sapien
tgtgttgacactgtcgtctctgctg

SEQ ID NO: 652850 - DNA, 25 bp, Homo sapien
gatggctcacgaaggcttcaatgtg

SEQ ID NO: 652851 - DNA, 25 bp, Homo sapien
ccataaggttggaggccgaagagta

SEQ ID NO: 652852 - DNA, 25 bp, Homo sapien
acaaacactggatggctcacgaagg

SEQ ID NO: 652853 - DNA, 25 bp, Homo sapien
gctccgagctctgaatgctgccggt

SEQ ID NO: 652854 - DNA, 25 bp, Homo sapien
aatgctgccggtgggaccttggcaa

SEQ ID NO: 652855 - DNA, 25 bp, Homo sapien
gggctaactaactgacgggaggctc

SEQ ID NO: 652856 - DNA, 25 bp, Homo sapien
tcatccgagcctgtgcattggccat

SEQ ID NO: 652857 - DNA, 25 bp, Homo sapien
tgggaagtgggacagccgttaatct

SEQ ID NO: 652858 - DNA, 25 bp, Homo sapien
tggacctgtggctagccttgttgaa

SEQ ID NO: 652859 - DNA, 25 bp, Homo sapien
gaactgctgccaatgtttaggtgga

SEQ ID NO: 652860 - DNA, 25 bp, Homo sapien
aaacagctagaatgtcaccttgccc

SEQ ID NO: 652861 - DNA, 25 bp, Homo sapien
ttcttacttgagcatatgttcttca

SEQ ID NO: 652862 - DNA, 25 bp, Homo sapien
ggttaaacacatatgctggcagatt

SEQ ID NO: 652863 - DNA, 25 bp, Homo sapien
catcttacagtgaaagaggtaaatt

SEQ ID NO: 652864 - DNA, 25 bp, Homo sapien
tcttcatagaaacccaaactgtgac

SEQ ID NO: 652865 - DNA, 25 bp, Homo sapien
gctaagttttagtttgatggcccat

SEQ ID NO: 652866 - DNA, 25 bp, Homo sapien
gcattctctggagtgacaagtcacc

SEQ ID NO: 652867 - DNA, 25 bp, Homo sapien
gcccaaactcgcacttaggaaatgt

SEQ ID NO: 652868 - DNA, 25 bp, Homo sapien
gatggcccatttgtcatgaagtcaa

SEQ ID NO: 652869 - DNA, 25 bp, Homo sapien
tgagccacatcgacagtatctgagg

SEQ ID NO: 652870 - DNA, 25 bp, Homo sapien
tctttttctgggcacctgtagagag

SEQ ID NO: 652871 - DNA, 25 bp, Homo sapien
gatgaggtaggacagtctcttgcct

SEQ ID NO: 652872 - DNA, 25 bp, Homo sapien
tgtagccagcaatgtgccaggtccc

SEQ ID NO: 652873 - DNA, 25 bp, Homo sapien
gattatagggcaacaagtcctgcaa

SEQ ID NO: 652874 - DNA, 25 bp, Homo sapien
agagaagagctggattatagggcaa

SEQ ID NO: 652875 - DNA, 25 bp, Homo sapien
agctggattatagggcaacaagtcc

SEQ ID NO: 652876 - DNA, 25 bp, Homo sapien
tatagggcaacaagtcctgcaacat

SEQ ID NO: 652877 - DNA, 25 bp, Homo sapien
cagaagttttcctgtgagctaagct

SEQ ID NO: 652878 - DNA, 25 bp, Homo sapien
ctgtgagctaagctcaacttaaggg

SEQ ID NO: 652879 - DNA, 25 bp, Homo sapien
ggttctccgaaggtgttatctgtac

SEQ ID NO: 652880 - DNA, 25 bp, Homo sapien
gggttctccgaaggtgttatctgta

SEQ ID NO: 652881 - DNA, 25 bp, Homo sapien
gagtggcgaccatacagcctcaaga

SEQ ID NO: 652882 - DNA, 25 bp, Homo sapien
cactaaagtgaggactgcgacagtc

SEQ ID NO: 652883 - DNA, 25 bp, Homo sapien
gaaaaaatgccttagcaccctggaa

SEQ ID NO: 652884 - DNA, 25 bp, Homo sapien
gatttaccatggcacatgtggcagg

SEQ ID NO: 652885 - DNA, 25 bp, Homo sapien
tgtgatgacagttgccatcttctgg

SEQ ID NO: 652886 - DNA, 25 bp, Homo sapien
tcttggatgttaaaggcagagcatg

SEQ ID NO: 652887 - DNA, 25 bp, Homo sapien
ttctgggagaaagctatggctcttg

SEQ ID NO: 652888 - DNA, 25 bp, Homo sapien
aggcagagcatgatagtaagcagca

SEQ ID NO: 652889 - DNA, 25 bp, Homo sapien
cttgttccatgacaagcagaccctg

SEQ ID NO: 652890 - DNA, 25 bp, Homo sapien
acttcataggcaaatgaagggagaa

SEQ ID NO: 652891 - DNA, 25 bp, Homo sapien
agccccttcattggtgttggattaa

SEQ ID NO: 652892 - DNA, 25 bp, Homo sapien
aaagggacttggcatcttaagggct

SEQ ID NO: 652893 - DNA, 25 bp, Homo sapien
gtccctatggaaacgaaacctcaga

SEQ ID NO: 652894 - DNA, 25 bp, Homo sapien
tttggcatggataaacggttcagac

SEQ ID NO: 652895 - DNA, 25 bp, Homo sapien
caaatgattacggtgcaaacccgag

SEQ ID NO: 652896 - DNA, 25 bp, Homo sapien
cctctgaaaacaaaggagccgtgtg

SEQ ID NO: 652897 - DNA, 25 bp, Homo sapien
gaagcagcacgctccctatgatggt

SEQ ID NO: 652898 - DNA, 25 bp, Homo sapien
tgctgtcagtagaaggaaggcccca

SEQ ID NO: 652899 - DNA, 25 bp, Homo sapien
actgctgactggaagacgggttaac

SEQ ID NO: 652900 - DNA, 25 bp, Homo sapien
tgctgggctttcaccaaggaacagg

SEQ ID NO: 652901 - DNA, 25 bp, Homo sapien
gatgagattgtctgccagccaggaa

SEQ ID NO: 652902 - DNA, 25 bp, Homo sapien
gatatcaagtagtagaaatccccac

SEQ ID NO: 652903 - DNA, 25 bp, Homo sapien
tgtggtgctgctactatctgatatg

SEQ ID NO: 652904 - DNA, 25 bp, Homo sapien
cattcacaggcacgtgttgacctca

SEQ ID NO: 652905 - DNA, 25 bp, Homo sapien
cttgcagtaattcagttctaggtcc

SEQ ID NO: 652906 - DNA, 25 bp, Homo sapien
cagttctaggtcctcttatacccaa

SEQ ID NO: 652907 - DNA, 25 bp, Homo sapien
tacccaatcctccaggtgaagactt

SEQ ID NO: 652908 - DNA, 25 bp, Homo sapien
gaagacttgagtctgctagaaccag

SEQ ID NO: 652909 - DNA, 25 bp, Homo sapien
agtaggatgtctctttcttggccag

SEQ ID NO: 652910 - DNA, 25 bp, Homo sapien
aataaaaccacccagtaggatgtct

SEQ ID NO: 652911 - DNA, 25 bp, Homo sapien
cacccagtaggatgtctctttcttg

SEQ ID NO: 652912 - DNA, 25 bp, Homo sapien
aaaccacccagtaggatgtctcttt

SEQ ID NO: 652913 - DNA, 25 bp, Homo sapien
tcggcttgggaatggtaaacataac

SEQ ID NO: 652914 - DNA, 25 bp, Homo sapien
cgtctatcagttgaccacggtttga

SEQ ID NO: 652915 - DNA, 25 bp, Homo sapien
tttggaatctttagtcggcttggga

SEQ ID NO: 652916 - DNA, 25 bp, Homo sapien
aaaccttggctcaaatggttgtgga

SEQ ID NO: 652917 - DNA, 25 bp, Homo sapien
tgtgtcactgcttgaaaagttttca

SEQ ID NO: 652918 - DNA, 25 bp, Homo sapien
taacacacaatagcatcagtagccc

SEQ ID NO: 652919 - DNA, 25 bp, Homo sapien
ggtgacatgacaaaagtcacaatgg

SEQ ID NO: 652920 - DNA, 25 bp, Homo sapien
tcagtagccctagctggtatccaca

SEQ ID NO: 652921 - DNA, 25 bp, Homo sapien
taggcactctgaatgagcgatacgt

SEQ ID NO: 652922 - DNA, 25 bp, Homo sapien
cctggacaaagcacgagagagtaca

SEQ ID NO: 652923 - DNA, 25 bp, Homo sapien
caatggactgccacaaataagaggg

SEQ ID NO: 652924 - DNA, 25 bp, Homo sapien
catacttgactgatgcgtgcccagc

SEQ ID NO: 652925 - DNA, 25 bp, Homo sapien
gcgttgatgcacgtggcacatacaa

SEQ ID NO: 652926 - DNA, 25 bp, Homo sapien
ctcactatggctccatcaaacagag

SEQ ID NO: 652927 - DNA, 25 bp, Homo sapien
cacgtggcacatacaaggcttggca

SEQ ID NO: 652928 - DNA, 25 bp, Homo sapien
tggcacatacaaggcttggcagcag

SEQ ID NO: 652929 - DNA, 25 bp, Homo sapien
aaactgataaaagtcaaatcaaaga

SEQ ID NO: 652930 - DNA, 25 bp, Homo sapien
ctgataaaagtcaaatcaaagatat

SEQ ID NO: 652931 - DNA, 25 bp, Homo sapien
tgataaaagtcaaatcaaagatatg

SEQ ID NO: 652932 - DNA, 25 bp, Homo sapien
aactgataaaagtcaaatcaaagat

SEQ ID NO: 652933 - DNA, 25 bp, Homo sapien
caatccatattctgtgcctaaaaag

SEQ ID NO: 652934 - DNA, 25 bp, Homo sapien
tatagcagtacttacagggaccgtg

SEQ ID NO: 652935 - DNA, 25 bp, Homo sapien
gggaccgtgtagaatgaaatgctca

SEQ ID NO: 652936 - DNA, 25 bp, Homo sapien
gataattggcacaaacctctatgtt

SEQ ID NO: 652937 - DNA, 25 bp, Homo sapien
acataaatagttgggtcttggcttc

SEQ ID NO: 652938 - DNA, 25 bp, Homo sapien
cacatttaaagtgggtctcctgtag

SEQ ID NO: 652939 - DNA, 25 bp, Homo sapien
cagctttctctgattagtgtgagca

SEQ ID NO: 652940 - DNA, 25 bp, Homo sapien
tgctctagttcatgatttgggccaa

SEQ ID NO: 652941 - DNA, 25 bp, Homo sapien
cacggtttctactgacacatccaca

SEQ ID NO: 652942 - DNA, 25 bp, Homo sapien
tgaagagaagccctatttattaccc

SEQ ID NO: 652943 - DNA, 25 bp, Homo sapien
tgtgattgtcacacaggtcttggaa

SEQ ID NO: 652944 - DNA, 25 bp, Homo sapien
aggcaggtctactaatcacacattc

SEQ ID NO: 652945 - DNA, 25 bp, Homo sapien
gcagtcggacctatgagaattcaaa

SEQ ID NO: 652946 - DNA, 25 bp, Homo sapien
gatatcagcgtctacagcacagagg

SEQ ID NO: 652947 - DNA, 25 bp, Homo sapien
taagatcattcgtgttgccaggttc

SEQ ID NO: 652948 - DNA, 25 bp, Homo sapien
tactggtagaaaacacaggcgtttc

SEQ ID NO: 652949 - DNA, 25 bp, Homo sapien
tctgaaggcaaacactttgaacacc

SEQ ID NO: 652950 - DNA, 25 bp, Homo sapien
aaggcaaacactttgaacaccaata

SEQ ID NO: 652951 - DNA, 25 bp, Homo sapien
gcaaatttctgaaggcaaacacttt

SEQ ID NO: 652952 - DNA, 25 bp, Homo sapien
cttcgcaaatttctgaaggcaaaca

SEQ ID NO: 652953 - DNA, 25 bp, Homo sapien
ggcatctgcgttccctcaatagaaa

SEQ ID NO: 652954 - DNA, 25 bp, Homo sapien
gaattcaggagttgacccacaatgc

SEQ ID NO: 652955 - DNA, 25 bp, Homo sapien
ctttgcaacagccagaatgggactt

SEQ ID NO: 652956 - DNA, 25 bp, Homo sapien
aagagggttccctttatgtcaggct

SEQ ID NO: 652957 - DNA, 25 bp, Homo sapien
aacaagtcgctacataaagcatggc

SEQ ID NO: 652958 - DNA, 25 bp, Homo sapien
tatgacaaggatcgaaactgcagcc

SEQ ID NO: 652959 - DNA, 25 bp, Homo sapien
aactgcagccaatttagtacacagc

SEQ ID NO: 652960 - DNA, 25 bp, Homo sapien
aagcatggctaaaataccactaaag

SEQ ID NO: 652961 - DNA, 25 bp, Homo sapien
tgttgaaactcatcacgtgggccgt

SEQ ID NO: 652962 - DNA, 25 bp, Homo sapien
acgtgggccgtgctccagagtcccg

SEQ ID NO: 652963 - DNA, 25 bp, Homo sapien
tgatcaataccaattgacatggctg

SEQ ID NO: 652964 - DNA, 25 bp, Homo sapien
gacatggctgaattgattctgcagc

SEQ ID NO: 652965 - DNA, 25 bp, Homo sapien
ctgcaggattgaccccattagcaca

SEQ ID NO: 652966 - DNA, 25 bp, Homo sapien
ggcttggcaagtgcccgacaccagg

SEQ ID NO: 652967 - DNA, 25 bp, Homo sapien
gctggattccatacccacggttctc

SEQ ID NO: 652968 - DNA, 25 bp, Homo sapien
cacagtcagaggcttggcaagtgcc

SEQ ID NO: 652969 - DNA, 25 bp, Homo sapien
ctttatgagtcagtacaacaatgca

SEQ ID NO: 652970 - DNA, 25 bp, Homo sapien
tacaattttgtgctcatgatgaaaa

SEQ ID NO: 652971 - DNA, 25 bp, Homo sapien
cctataaagcatgcataattcagat

SEQ ID NO: 652972 - DNA, 25 bp, Homo sapien
tcaacaactggatgagagtcccctt

SEQ ID NO: 652973 - DNA, 25 bp, Homo sapien
tcgttatcgcgatgaagaacatgtg

SEQ ID NO: 652974 - DNA, 25 bp, Homo sapien
gagtgttcagaccagacgatatgga

SEQ ID NO: 652975 - DNA, 25 bp, Homo sapien
aatacccctgcggtagtctctggag

SEQ ID NO: 652976 - DNA, 25 bp, Homo sapien
gatatggacctcgtcattccccaag

SEQ ID NO: 652977 - DNA, 25 bp, Homo sapien
attgtgagaactggggctgtcctag

SEQ ID NO: 652978 - DNA, 25 bp, Homo sapien
tgagacctgcagaaagtaattgtga

SEQ ID NO: 652979 - DNA, 25 bp, Homo sapien
tctgggtcccttggtataatgcttg

SEQ ID NO: 652980 - DNA, 25 bp, Homo sapien
taatgcttgcacaaatgtctgaatg

SEQ ID NO: 652981 - DNA, 25 bp, Homo sapien
tactaaacacccctcaaacgtgctg

SEQ ID NO: 652982 - DNA, 25 bp, Homo sapien
gtatctgtgatagctccttttgatc

SEQ ID NO: 652983 - DNA, 25 bp, Homo sapien
cacccgatgttggtgctctagtatc

SEQ ID NO: 652984 - DNA, 25 bp, Homo sapien
gatccacaagtattagttgcaaaac

SEQ ID NO: 652985 - DNA, 25 bp, Homo sapien
ctcctttctcgactaattgcattac

SEQ ID NO: 652986 - DNA, 25 bp, Homo sapien
gccagctggctccagaaggagtcgt

SEQ ID NO: 652987 - DNA, 25 bp, Homo sapien
tcgccagctggctccagaaggagtc

SEQ ID NO: 652988 - DNA, 25 bp, Homo sapien
atcgccagctggctccagaaggagt

SEQ ID NO: 652989 - DNA, 25 bp, Homo sapien
cgccagctggctccagaaggagtcg

SEQ ID NO: 652990 - DNA, 25 bp, Homo sapien
tgggcccggctgctacttttactaa

SEQ ID NO: 652991 - DNA, 25 bp, Homo sapien
cagctgacagtgtgcccatcctaaa

SEQ ID NO: 652992 - DNA, 25 bp, Homo sapien
ttttactaagtaacagtcaggcctg

SEQ ID NO: 652993 - DNA, 25 bp, Homo sapien
ctgtttgattgaagaattcctgctc

SEQ ID NO: 652994 - DNA, 25 bp, Homo sapien
gagggaatcatctgagtctgacggc

SEQ ID NO: 652995 - DNA, 25 bp, Homo sapien
tctgacggcattcgagtggaaacat

SEQ ID NO: 652996 - DNA, 25 bp, Homo sapien
aaatcacttccacagttgaggtagc

SEQ ID NO: 652997 - DNA, 25 bp, Homo sapien
cattgcgctgaaggccacccatgaa

SEQ ID NO: 652998 - DNA, 25 bp, Homo sapien
ttatattttcattgcaacttttgac

SEQ ID NO: 652999 - DNA, 25 bp, Homo sapien
ttatattatattttcattgcaactt

SEQ ID NO: 653000 - DNA, 25 bp, Homo sapien
tattatattttcattgcaacttttg

SEQ ID NO: 653001 - DNA, 25 bp, Homo sapien
tatattatattttcattgcaacttt

SEQ ID NO: 653002 - DNA, 25 bp, Homo sapien
actgtctatgtctgggagagcccat

SEQ ID NO: 653003 - DNA, 25 bp, Homo sapien
gtcttctcttactacaaactgtcta

SEQ ID NO: 653004 - DNA, 25 bp, Homo sapien
catcttttcacccatcaagtcattg

SEQ ID NO: 653005 - DNA, 25 bp, Homo sapien
caagtcattgacttcttcttcaatc

SEQ ID NO: 653006 - DNA, 25 bp, Homo sapien
tttcattagagaggattgaacactt

SEQ ID NO: 653007 - DNA, 25 bp, Homo sapien
aaaacactgcgattttgtgtgtctc

SEQ ID NO: 653008 - DNA, 25 bp, Homo sapien
tagagaggattgaacacttgtcttc

SEQ ID NO: 653009 - DNA, 25 bp, Homo sapien
ttgaccttcagcaatgtaaaacact

SEQ ID NO: 653010 - DNA, 25 bp, Homo sapien
tggcatgcgcaaatgtcaccagatg

SEQ ID NO: 653011 - DNA, 25 bp, Homo sapien
taatatggtatgagcaaccacgggc

SEQ ID NO: 653012 - DNA, 25 bp, Homo sapien
gttagcgccttgatacacaacatgg

SEQ ID NO: 653013 - DNA, 25 bp, Homo sapien
aaaacaccaacggtatggcatgcgc

SEQ ID NO: 653014 - DNA, 25 bp, Homo sapien
cttggatgtctcagtaagtctattc

SEQ ID NO: 653015 - DNA, 25 bp, Homo sapien
agtggtttgatatactttcacatac

SEQ ID NO: 653016 - DNA, 25 bp, Homo sapien
tgtatctgttatccaagaataccca

SEQ ID NO: 653017 - DNA, 25 bp, Homo sapien
tctattcattcctgctgttgtatct

SEQ ID NO: 653018 - DNA, 25 bp, Homo sapien
cactggcgggagtccaaatttttca

SEQ ID NO: 653019 - DNA, 25 bp, Homo sapien
actggcgggagtccaaatttttcag

SEQ ID NO: 653020 - DNA, 25 bp, Homo sapien
cagatggctctttggtgagtatgtg

SEQ ID NO: 653021 - DNA, 25 bp, Homo sapien
cattgctctgtacttcccattggat

SEQ ID NO: 653022 - DNA, 25 bp, Homo sapien
aaaaactccactccactatcagggt

SEQ ID NO: 653023 - DNA, 25 bp, Homo sapien
tctcccacatcagacctaaggttag

SEQ ID NO: 653024 - DNA, 25 bp, Homo sapien
cagagttgtattaggtctatctccc

SEQ ID NO: 653025 - DNA, 25 bp, Homo sapien
caaatgtgtcacgatgccagctcga

SEQ ID NO: 653026 - DNA, 25 bp, Homo sapien
cattcgagcagtcaaagggatcaac

SEQ ID NO: 653027 - DNA, 25 bp, Homo sapien
tggttctcgctgacaaggctgtgca

SEQ ID NO: 653028 - DNA, 25 bp, Homo sapien
ttcttccattgggtgctaagcagcc

SEQ ID NO: 653029 - DNA, 25 bp, Homo sapien
gggtcataatccgtggatgacaagt

SEQ ID NO: 653030 - DNA, 25 bp, Homo sapien
tccgtggatgacaagtcagccaggg

SEQ ID NO: 653031 - DNA, 25 bp, Homo sapien
acagtcagcaggttacccaattctg

SEQ ID NO: 653032 - DNA, 25 bp, Homo sapien
cagccagggtcagtatgtagtgact

SEQ ID NO: 653033 - DNA, 25 bp, Homo sapien
ctgttgggtgtacgtgcttgagcca

SEQ ID NO: 653034 - DNA, 25 bp, Homo sapien
gttgggtgtacgtgcttgagccaca

SEQ ID NO: 653035 - DNA, 25 bp, Homo sapien
gggtgtacgtgcttgagccacacac

SEQ ID NO: 653036 - DNA, 25 bp, Homo sapien
tgggtgtacgtgcttgagccacaca

SEQ ID NO: 653037 - DNA, 25 bp, Homo sapien
catagcagtaattattcagtggaca

SEQ ID NO: 653038 - DNA, 25 bp, Homo sapien
ttataagcaatccagagcaaatgcc

SEQ ID NO: 653039 - DNA, 25 bp, Homo sapien
caaatgccacacctagtcatcagtg

SEQ ID NO: 653040 - DNA, 25 bp, Homo sapien
tcagtggacatgcaaatgctaaaca

SEQ ID NO: 653041 - DNA, 25 bp, Homo sapien
tctggccgaatgctgctcctctagg

SEQ ID NO: 653042 - DNA, 25 bp, Homo sapien
cagtccaagaggcagagtagcaagg

SEQ ID NO: 653043 - DNA, 25 bp, Homo sapien
tagatataatccagcaagggggctc

SEQ ID NO: 653044 - DNA, 25 bp, Homo sapien
cgggcaatgccatgcaccagtccaa

SEQ ID NO: 653045 - DNA, 25 bp, Homo sapien
gaaaagcaactgtggccacgaggat

SEQ ID NO: 653046 - DNA, 25 bp, Homo sapien
ggagtactctgcacttggtaaaaga

SEQ ID NO: 653047 - DNA, 25 bp, Homo sapien
tgtttccactgaggagtactctgca

SEQ ID NO: 653048 - DNA, 25 bp, Homo sapien
tggtaaaagaaaagcaactgtggcc

SEQ ID NO: 653049 - DNA, 25 bp, Homo sapien
gccattttccgaggcagagaggttt

SEQ ID NO: 653050 - DNA, 25 bp, Homo sapien
accagcaactgaaggacatcgcaag

SEQ ID NO: 653051 - DNA, 25 bp, Homo sapien
tgaaggacatcgcaagctacctggg

SEQ ID NO: 653052 - DNA, 25 bp, Homo sapien
tacctgggccacgattttgttggga

SEQ ID NO: 653053 - DNA, 25 bp, Homo sapien
ttagtgccccagtgacaaatgtaca

SEQ ID NO: 653054 - DNA, 25 bp, Homo sapien
ttatctatagcaggaaaggttcgtc

SEQ ID NO: 653055 - DNA, 25 bp, Homo sapien
gtgcatctcaagtcaccaacaaggg

SEQ ID NO: 653056 - DNA, 25 bp, Homo sapien
cattgattgcgaggcagcatgtcta

SEQ ID NO: 653057 - DNA, 25 bp, Homo sapien
cagggttgtagtcgttgcactcagg

SEQ ID NO: 653058 - DNA, 25 bp, Homo sapien
ctgagaggcactagctaaacccagg

SEQ ID NO: 653059 - DNA, 25 bp, Homo sapien
gagaggcactagctaaacccagggt

SEQ ID NO: 653060 - DNA, 25 bp, Homo sapien
cccagggttgtagtcgttgcactca

SEQ ID NO: 653061 - DNA, 25 bp, Homo sapien
agcattacaggctatcagcgctgac

SEQ ID NO: 653062 - DNA, 25 bp, Homo sapien
attgtggcacaaaatgtcatctcct

SEQ ID NO: 653063 - DNA, 25 bp, Homo sapien
ttggaacacttaatccccaggtctg

SEQ ID NO: 653064 - DNA, 25 bp, Homo sapien
tgctccttcccaactttgcttggaa

SEQ ID NO: 653065 - DNA, 25 bp, Homo sapien
tctttaatgcctagcatggccccct

SEQ ID NO: 653066 - DNA, 25 bp, Homo sapien
tagcatggcccccttaaggatgtgc

SEQ ID NO: 653067 - DNA, 25 bp, Homo sapien
ccccttaaggatgtgcgtggtgtgc

SEQ ID NO: 653068 - DNA, 25 bp, Homo sapien
cctgcatatattgttcaccactgta

SEQ ID NO: 653069 - DNA, 25 bp, Homo sapien
agagtcaccaggtggaaagataagg

SEQ ID NO: 653070 - DNA, 25 bp, Homo sapien
tcaccaggtggaaagataaggctgg

SEQ ID NO: 653071 - DNA, 25 bp, Homo sapien
agatgaaactctgagagagtgggag

SEQ ID NO: 653072 - DNA, 25 bp, Homo sapien
gtcaccaggtggaaagataaggctg

SEQ ID NO: 653073 - DNA, 25 bp, Homo sapien
ggtgttactgacatgtaatgaagga

SEQ ID NO: 653074 - DNA, 25 bp, Homo sapien
gaatggtggagatgaaataagccat

SEQ ID NO: 653075 - DNA, 25 bp, Homo sapien
caagggaaaattacgagagcccaca

SEQ ID NO: 653076 - DNA, 25 bp, Homo sapien
aggcccaggcaccaaggtaggaaag

SEQ ID NO: 653077 - DNA, 25 bp, Homo sapien
gatcagcagcaagtgtttttccagc

SEQ ID NO: 653078 - DNA, 25 bp, Homo sapien
gcaggggccagacgccaaatcaagg

SEQ ID NO: 653079 - DNA, 25 bp, Homo sapien
caggaggcattgagtttggtcaagc

SEQ ID NO: 653080 - DNA, 25 bp, Homo sapien
cactaggtgttgtggaggagaaata

SEQ ID NO: 653081 - DNA, 25 bp, Homo sapien
acctgagggtggcttgtacactgtg

SEQ ID NO: 653082 - DNA, 25 bp, Homo sapien
tgtgcaagctcttcacatatccaga

SEQ ID NO: 653083 - DNA, 25 bp, Homo sapien
tcctatcacattgatggcctctttc

SEQ ID NO: 653084 - DNA, 25 bp, Homo sapien
cttcagagttactcctatcacattg

SEQ ID NO: 653085 - DNA, 25 bp, Homo sapien
cagtctgtataagagctatgtgaaa

SEQ ID NO: 653086 - DNA, 25 bp, Homo sapien
gctttttctcacacaaaatagtgta

SEQ ID NO: 653087 - DNA, 25 bp, Homo sapien
taaataatcatgcaaagcatcttcc

SEQ ID NO: 653088 - DNA, 25 bp, Homo sapien
cttcctagacttttcagtctgtata

SEQ ID NO: 653089 - DNA, 25 bp, Homo sapien
tcttctgtggcattcttcagtaaaa

SEQ ID NO: 653090 - DNA, 25 bp, Homo sapien
tgactgcagtaaaggaatctcctgg

SEQ ID NO: 653091 - DNA, 25 bp, Homo sapien
tttggaaagcagaccagagagccga

SEQ ID NO: 653092 - DNA, 25 bp, Homo sapien
taatggcctcatttacttctggcac

SEQ ID NO: 653093 - DNA, 25 bp, Homo sapien
ggaatctcctggtaggtatttggaa

SEQ ID NO: 653094 - DNA, 25 bp, Homo sapien
gaaagggtcagaagcagtcgttccc

SEQ ID NO: 653095 - DNA, 25 bp, Homo sapien
tcccgggaaaaagacgttgcagaga

SEQ ID NO: 653096 - DNA, 25 bp, Homo sapien
tcagaggaactgaatgcatgcgtct

SEQ ID NO: 653097 - DNA, 25 bp, Homo sapien
ccaaagtatgttccactagggccac

SEQ ID NO: 653098 - DNA, 25 bp, Homo sapien
gggcattatatatcgcaatctaggc

SEQ ID NO: 653099 - DNA, 25 bp, Homo sapien
tgtcagaggcctcaaataaggaaga

SEQ ID NO: 653100 - DNA, 25 bp, Homo sapien
catccttgcctacacgtatcttttg

SEQ ID NO: 653101 - DNA, 25 bp, Homo sapien
catttttcatacatagcagttccct

SEQ ID NO: 653102 - DNA, 25 bp, Homo sapien
gctaccaagcccggcaggaacttaa

SEQ ID NO: 653103 - DNA, 25 bp, Homo sapien
ttgacctgatgatctgtctgccccg

SEQ ID NO: 653104 - DNA, 25 bp, Homo sapien
tgagctaccaagcccggcaggaact

SEQ ID NO: 653105 - DNA, 25 bp, Homo sapien
agctaccaagcccggcaggaactta

SEQ ID NO: 653106 - DNA, 25 bp, Homo sapien
gcgccaacatgaaataccagctaca

SEQ ID NO: 653107 - DNA, 25 bp, Homo sapien
gtgtgaaagcgccaacatgaaatac

SEQ ID NO: 653108 - DNA, 25 bp, Homo sapien
agaaaaagttagtgtgtgaaagcgc

SEQ ID NO: 653109 - DNA, 25 bp, Homo sapien
caacatgaaataccagctacaggaa

SEQ ID NO: 653110 - DNA, 25 bp, Homo sapien
tatttataccatttgaaggggcaaa

SEQ ID NO: 653111 - DNA, 25 bp, Homo sapien
acactgatttcgacaccaatgctta

SEQ ID NO: 653112 - DNA, 25 bp, Homo sapien
caagatttaggttgttggatggcaa

SEQ ID NO: 653113 - DNA, 25 bp, Homo sapien
tgttggatggcaacactgatttcga

SEQ ID NO: 653114 - DNA, 25 bp, Homo sapien
ccttgttagcgattgtgaagcctct

SEQ ID NO: 653115 - DNA, 25 bp, Homo sapien
gcactaatgagtcaacacctgttaa

SEQ ID NO: 653116 - DNA, 25 bp, Homo sapien
ggccttttgatgaaacgcctttcca

SEQ ID NO: 653117 - DNA, 25 bp, Homo sapien
taatattctaagagacaagtcctgc

SEQ ID NO: 653118 - DNA, 25 bp, Homo sapien
ttgagaagccaggaaaacccaggga

SEQ ID NO: 653119 - DNA, 25 bp, Homo sapien
gccttatgatcgtatttaagatatc

SEQ ID NO: 653120 - DNA, 25 bp, Homo sapien
gtggacagtgccttatgatcgtatt

SEQ ID NO: 653121 - DNA, 25 bp, Homo sapien
ctggcagcggccgtgatgaagtccc

SEQ ID NO: 653122 - DNA, 25 bp, Homo sapien
tgcaatgaaaggattcgtgcaaacc

SEQ ID NO: 653123 - DNA, 25 bp, Homo sapien
tgaaaggattcgtgcaaacctggct

SEQ ID NO: 653124 - DNA, 25 bp, Homo sapien
tcgtgcaaacctggctagcaaggta

SEQ ID NO: 653125 - DNA, 25 bp, Homo sapien
gattcgtgcaaacctggctagcaag

SEQ ID NO: 653126 - DNA, 25 bp, Homo sapien
gttggaaagagagggcaaaataaca

SEQ ID NO: 653127 - DNA, 25 bp, Homo sapien
gcaaaataacagatggctagcctac

SEQ ID NO: 653128 - DNA, 25 bp, Homo sapien
ccaatcacttcaacggaacctgcta

SEQ ID NO: 653129 - DNA, 25 bp, Homo sapien
tgctactatgagcaagaaggttgga

SEQ ID NO: 653130 - DNA, 25 bp, Homo sapien
acccacgtaagacagcgccctgagg

SEQ ID NO: 653131 - DNA, 25 bp, Homo sapien
ccacgtaagacagcgccctgaggag

SEQ ID NO: 653132 - DNA, 25 bp, Homo sapien
gcctgtgtgaagtcgccaaagacag

SEQ ID NO: 653133 - DNA, 25 bp, Homo sapien
gagacacagcgcctgtgtgaagtcg

SEQ ID NO: 653134 - DNA, 25 bp, Homo sapien
gaagagccgctgcatattctcaata

SEQ ID NO: 653135 - DNA, 25 bp, Homo sapien
aattatggccatatgcctgcttccg

SEQ ID NO: 653136 - DNA, 25 bp, Homo sapien
gagggaactatatgaccagtcagcc

SEQ ID NO: 653137 - DNA, 25 bp, Homo sapien
tgcttccgttgcttctccacactga

SEQ ID NO: 653138 - DNA, 25 bp, Homo sapien
aaggattcgttctggaagcatttcc

SEQ ID NO: 653139 - DNA, 25 bp, Homo sapien
tattatggctccaaaccttccaaca

SEQ ID NO: 653140 - DNA, 25 bp, Homo sapien
aaaggaaggattcgttctggaagca

SEQ ID NO: 653141 - DNA, 25 bp, Homo sapien
ctttagagcgataaatgtgtaaaat

SEQ ID NO: 653142 - DNA, 25 bp, Homo sapien
gccatgaagaagacactgaatgtcc

SEQ ID NO: 653143 - DNA, 25 bp, Homo sapien
aagaagacactgaatgtccttgaca

SEQ ID NO: 653144 - DNA, 25 bp, Homo sapien
agacactgaatgtccttgacagcag

SEQ ID NO: 653145 - DNA, 25 bp, Homo sapien
atgaagaagacactgaatgtccttg

SEQ ID NO: 653146 - DNA, 25 bp, Homo sapien
tagacaaagagctctcaagaatggc

SEQ ID NO: 653147 - DNA, 25 bp, Homo sapien
tcaggccagatccactagcaaagca

SEQ ID NO: 653148 - DNA, 25 bp, Homo sapien
tgagagaacaatcccaacggaagcc

SEQ ID NO: 653149 - DNA, 25 bp, Homo sapien
tcaacctgcttatggagaaacctca

SEQ ID NO: 653150 - DNA, 25 bp, Homo sapien
gaataagcagcacaagccaaacagg

SEQ ID NO: 653151 - DNA, 25 bp, Homo sapien
tagagcgtcagacagccttggactg

SEQ ID NO: 653152 - DNA, 25 bp, Homo sapien
ttcccaaagtcccagagtcatcaga

SEQ ID NO: 653153 - DNA, 25 bp, Homo sapien
caaggctaggtagggctcaagctct

SEQ ID NO: 653154 - DNA, 25 bp, Homo sapien
tccctcaactggcagaagtcttccc

SEQ ID NO: 653155 - DNA, 25 bp, Homo sapien
tctccctcaactggcagaagtcttc

SEQ ID NO: 653156 - DNA, 25 bp, Homo sapien
ctcaactggcagaagtcttcccaag

SEQ ID NO: 653157 - DNA, 25 bp, Homo sapien
atctccctcaactggcagaagtctt

SEQ ID NO: 653158 - DNA, 25 bp, Homo sapien
atcacaataaaggagtcgcagaata

SEQ ID NO: 653159 - DNA, 25 bp, Homo sapien
tcacaataaaggagtcgcagaatac

SEQ ID NO: 653160 - DNA, 25 bp, Homo sapien
aatcacaataaaggagtcgcagaat

SEQ ID NO: 653161 - DNA, 25 bp, Homo sapien
gatcctcgctggttaatcccaggtg

SEQ ID NO: 653162 - DNA, 25 bp, Homo sapien
cctggcgtctggtcatcatggcaca

SEQ ID NO: 653163 - DNA, 25 bp, Homo sapien
tcatggcacagatcagcctgtaggc

SEQ ID NO: 653164 - DNA, 25 bp, Homo sapien
tgagtttggcagaacgtcctggcgt

SEQ ID NO: 653165 - DNA, 25 bp, Homo sapien
tggttatccaggcttattgctagat

SEQ ID NO: 653166 - DNA, 25 bp, Homo sapien
gagaagactggttatccaggcttat

SEQ ID NO: 653167 - DNA, 25 bp, Homo sapien
tgagtggtgggatcaaaactggagg

SEQ ID NO: 653168 - DNA, 25 bp, Homo sapien
ggcttattgctagattatcccgtat

SEQ ID NO: 653169 - DNA, 25 bp, Homo sapien
cagtcatctgtgaggcactcgctgc

SEQ ID NO: 653170 - DNA, 25 bp, Homo sapien
tagcagaaaactctggcatggatct

SEQ ID NO: 653171 - DNA, 25 bp, Homo sapien
tgttattcacatctccgaggatccc

SEQ ID NO: 653172 - DNA, 25 bp, Homo sapien
taccagagttcatagagatagcaga

SEQ ID NO: 653173 - DNA, 25 bp, Homo sapien
ctatgcagaaaaacatgtctgttaa

SEQ ID NO: 653174 - DNA, 25 bp, Homo sapien
atgcagaaaaacatgtctgttaacc

SEQ ID NO: 653175 - DNA, 25 bp, Homo sapien
tatgcagaaaaacatgtctgttaac

SEQ ID NO: 653176 - DNA, 25 bp, Homo sapien
aattaatttaccacaggccacctgt

SEQ ID NO: 653177 - DNA, 25 bp, Homo sapien
ggcttcccctattactgacacagga

SEQ ID NO: 653178 - DNA, 25 bp, Homo sapien
tggccagtggcaacagagctctaac

SEQ ID NO: 653179 - DNA, 25 bp, Homo sapien
ttctagggtgaaaaagcagtggcca

SEQ ID NO: 653180 - DNA, 25 bp, Homo sapien
ttggaatctcccaactaaaccaaga

SEQ ID NO: 653181 - DNA, 25 bp, Homo sapien
tgcacatagcagacaacaggcgtcc

SEQ ID NO: 653182 - DNA, 25 bp, Homo sapien
ggaatctcccaactaaaccaagatg

SEQ ID NO: 653183 - DNA, 25 bp, Homo sapien
gctagataacatttctcaccaaacc

SEQ ID NO: 653184 - DNA, 25 bp, Homo sapien
tatgtactttatccctctgaaactg

SEQ ID NO: 653185 - DNA, 25 bp, Homo sapien
gtcagacctgacaagccacatatat

SEQ ID NO: 653186 - DNA, 25 bp, Homo sapien
tccatatggctaagtacttgtccca

SEQ ID NO: 653187 - DNA, 25 bp, Homo sapien
tgctgaggttgaattactgacactt

SEQ ID NO: 653188 - DNA, 25 bp, Homo sapien
caatattttgggcacctgacttaga

SEQ ID NO: 653189 - DNA, 25 bp, Homo sapien
cagccttcataaagtacgggctatt

SEQ ID NO: 653190 - DNA, 25 bp, Homo sapien
gaaagtttggctctgaagtcaaaca

SEQ ID NO: 653191 - DNA, 25 bp, Homo sapien
gctaaaactgcagactacaccacac

SEQ ID NO: 653192 - DNA, 25 bp, Homo sapien
tggtacagcccagagttgtgtcact

SEQ ID NO: 653193 - DNA, 25 bp, Homo sapien
ggacagctctgcctcattggtacag

SEQ ID NO: 653194 - DNA, 25 bp, Homo sapien
tcagttgtaaccaatgacgggcatc

SEQ ID NO: 653195 - DNA, 25 bp, Homo sapien
taaatttgaagcatcggtgggactc

SEQ ID NO: 653196 - DNA, 25 bp, Homo sapien
cagacacagtaggaatcattcatgt

SEQ ID NO: 653197 - DNA, 25 bp, Homo sapien
catgttctttggcagaacctgcaga

SEQ ID NO: 653198 - DNA, 25 bp, Homo sapien
gaggagctcaaaaagtgtccacgtg

SEQ ID NO: 653199 - DNA, 25 bp, Homo sapien
cagaatgttcacaattactgatacg

SEQ ID NO: 653200 - DNA, 25 bp, Homo sapien
gacttacaaaatgaggatgggtgga

SEQ ID NO: 653201 - DNA, 25 bp, Homo sapien
aataactgatccaccacaaatgcaa

SEQ ID NO: 653202 - DNA, 25 bp, Homo sapien
aaagtgtgctgggacttacaaaatg

SEQ ID NO: 653203 - DNA, 25 bp, Homo sapien
aagtggcactcttcaacgtgtcttc

SEQ ID NO: 653204 - DNA, 25 bp, Homo sapien
taaagagctctaagctagcagggtg

SEQ ID NO: 653205 - DNA, 25 bp, Homo sapien
tagacctagggtgactcattcaggg

SEQ ID NO: 653206 - DNA, 25 bp, Homo sapien
tagcagggtgaaggtagaactcctc

SEQ ID NO: 653207 - DNA, 25 bp, Homo sapien
aagttgtctcagtaaccaggtgacc

SEQ ID NO: 653208 - DNA, 25 bp, Homo sapien
tttccctacattttccttgtgtctg

SEQ ID NO: 653209 - DNA, 25 bp, Homo sapien
cttctgtctttccctacattttcct

SEQ ID NO: 653210 - DNA, 25 bp, Homo sapien
gcaaatcatctttcaaatccaattc

SEQ ID NO: 653211 - DNA, 25 bp, Homo sapien
ggctgctgcttcttcgaactaagat

SEQ ID NO: 653212 - DNA, 25 bp, Homo sapien
cacagaccaggtggtgaactccatt

SEQ ID NO: 653213 - DNA, 25 bp, Homo sapien
tctgaaacgtaggtttaacaggcaa

SEQ ID NO: 653214 - DNA, 25 bp, Homo sapien
taattcatgtcaggtagaggctacc

SEQ ID NO: 653215 - DNA, 25 bp, Homo sapien
catttgggcctataaactgtctaaa

SEQ ID NO: 653216 - DNA, 25 bp, Homo sapien
ctcttgaataggctgaggctctgaa

SEQ ID NO: 653217 - DNA, 25 bp, Homo sapien
gaggctctgaagaactcgaattctg

SEQ ID NO: 653218 - DNA, 25 bp, Homo sapien
gtcctttattctcttgaataggctg

SEQ ID NO: 653219 - DNA, 25 bp, Homo sapien
tctgaagaactcgaattctgtgtgt

SEQ ID NO: 653220 - DNA, 25 bp, Homo sapien
tgtgagatggccagatccggctgca

SEQ ID NO: 653221 - DNA, 25 bp, Homo sapien
gcattttctgactgttgacactcct

SEQ ID NO: 653222 - DNA, 25 bp, Homo sapien
tgctgtcccactgtgagatggccag

SEQ ID NO: 653223 - DNA, 25 bp, Homo sapien
ccactgtgagatggccagatccggc

SEQ ID NO: 653224 - DNA, 25 bp, Homo sapien
tgcccaactgtccaaaataaaatgc

SEQ ID NO: 653225 - DNA, 25 bp, Homo sapien
tatgcctttttaacaggtaagtgcc

SEQ ID NO: 653226 - DNA, 25 bp, Homo sapien
aatgctatagttatgtaatggctta

SEQ ID NO: 653227 - DNA, 25 bp, Homo sapien
aatttctactgcattatgccttttt

SEQ ID NO: 653228 - DNA, 25 bp, Homo sapien
tgtataatcctttaatctgagtcat

SEQ ID NO: 653229 - DNA, 25 bp, Homo sapien
tgggccaccctctgtataatccttt

SEQ ID NO: 653230 - DNA, 25 bp, Homo sapien
gggccaccctctgtataatccttta

SEQ ID NO: 653231 - DNA, 25 bp, Homo sapien
atgggccaccctctgtataatcctt

SEQ ID NO: 653232 - DNA, 25 bp, Homo sapien
ttcccaacaggctggcctaatgcag

SEQ ID NO: 653233 - DNA, 25 bp, Homo sapien
acacagcagacggacggagagcctg

SEQ ID NO: 653234 - DNA, 25 bp, Homo sapien
catctggtgggatgcaatatagcca

SEQ ID NO: 653235 - DNA, 25 bp, Homo sapien
cttccaaattagagcgtccccactg

SEQ ID NO: 653236 - DNA, 25 bp, Homo sapien
cactaactttctcgtctcttgacag

SEQ ID NO: 653237 - DNA, 25 bp, Homo sapien
ggagagccacgatgcttaagtgtgc

SEQ ID NO: 653238 - DNA, 25 bp, Homo sapien
tctctctaaagcctagttagttcca

SEQ ID NO: 653239 - DNA, 25 bp, Homo sapien
ggtgccctgagctacctactcctgt

SEQ ID NO: 653240 - DNA, 25 bp, Homo sapien
taagagagaccaggtaagagagcgc

SEQ ID NO: 653241 - DNA, 25 bp, Homo sapien
agagaccaggtaagagagcgctcac

SEQ ID NO: 653242 - DNA, 25 bp, Homo sapien
agtaagagagaccaggtaagagagc

SEQ ID NO: 653243 - DNA, 25 bp, Homo sapien
agagagaccaggtaagagagcgctc

SEQ ID NO: 653244 - DNA, 25 bp, Homo sapien
cgggacgcttttagtggcaggcaaa

SEQ ID NO: 653245 - DNA, 25 bp, Homo sapien
gacgcttttagtggcaggcaaagcc

SEQ ID NO: 653246 - DNA, 25 bp, Homo sapien
aaggaggagcgggacgcttttagtg

SEQ ID NO: 653247 - DNA, 25 bp, Homo sapien
aggagcgggacgcttttagtggcag

SEQ ID NO: 653248 - DNA, 25 bp, Homo sapien
cagttgctttttggcgaacaatatt

SEQ ID NO: 653249 - DNA, 25 bp, Homo sapien
tccgccagctgagagaaaaggacct

SEQ ID NO: 653250 - DNA, 25 bp, Homo sapien
cctaaatcgcatcggttcggtcaca

SEQ ID NO: 653251 - DNA, 25 bp, Homo sapien
tcccggtgctccagacgtggtggca

SEQ ID NO: 653252 - DNA, 25 bp, Homo sapien
gccaaaggattggacatccctgcaa

SEQ ID NO: 653253 - DNA, 25 bp, Homo sapien
tgccactattaagaagacactgtgt

SEQ ID NO: 653254 - DNA, 25 bp, Homo sapien
gatatgagacacaaattaatgccac

SEQ ID NO: 653255 - DNA, 25 bp, Homo sapien
ttcaccatctcattaagggaacaga

SEQ ID NO: 653256 - DNA, 25 bp, Homo sapien
caaggagtccataatgttggcccac

SEQ ID NO: 653257 - DNA, 25 bp, Homo sapien
ccagaggtaggtttgtcatctcaac

SEQ ID NO: 653258 - DNA, 25 bp, Homo sapien
cacagaggtttgctcggatccaagc

SEQ ID NO: 653259 - DNA, 25 bp, Homo sapien
taaacggttcttgcaagcactgctg

SEQ ID NO: 653260 - DNA, 25 bp, Homo sapien
tcaatattgttctagtgtctgcagc

SEQ ID NO: 653261 - DNA, 25 bp, Homo sapien
agacaaagccctccgcacagtgaca

SEQ ID NO: 653262 - DNA, 25 bp, Homo sapien
tggctacttcaaacctcctacagga

SEQ ID NO: 653263 - DNA, 25 bp, Homo sapien
caaccaacaagagaattcacacatc

SEQ ID NO: 653264 - DNA, 25 bp, Homo sapien
tatctacctaggtactagacagtgc

SEQ ID NO: 653265 - DNA, 25 bp, Homo sapien
tgtccagcttagacctctctactgg

SEQ ID NO: 653266 - DNA, 25 bp, Homo sapien
agtgctacttacacaaccctcaggc

SEQ ID NO: 653267 - DNA, 25 bp, Homo sapien
tctactggtttcctgatctatctac

SEQ ID NO: 653268 - DNA, 25 bp, Homo sapien
ccaggtatcagcctgctcttggtct

SEQ ID NO: 653269 - DNA, 25 bp, Homo sapien
tctggcacatctgttccccaggcag

SEQ ID NO: 653270 - DNA, 25 bp, Homo sapien
tgcttcataaactctaaggtcctca

SEQ ID NO: 653271 - DNA, 25 bp, Homo sapien
tattagcaacatcacagtaggctgc

SEQ ID NO: 653272 - DNA, 25 bp, Homo sapien
gctctgggcaaacaagtcctttatt

SEQ ID NO: 653273 - DNA, 25 bp, Homo sapien
cctaaatagtaaccctgccaagctc

SEQ ID NO: 653274 - DNA, 25 bp, Homo sapien
tttgtttatcctttggcttctgcat

SEQ ID NO: 653275 - DNA, 25 bp, Homo sapien
tatttgtttatcctttggcttctgc

SEQ ID NO: 653276 - DNA, 25 bp, Homo sapien
tgttatcctgagtagtatttgcaac

SEQ ID NO: 653277 - DNA, 25 bp, Homo sapien
gagtagtatttgcaacatctgttcc

SEQ ID NO: 653278 - DNA, 25 bp, Homo sapien
gacagcttctgttatcctgagtagt

SEQ ID NO: 653279 - DNA, 25 bp, Homo sapien
cctgagtagtatttgcaacatctgt

SEQ ID NO: 653280 - DNA, 25 bp, Homo sapien
caaaataaaagctcatattaataat

SEQ ID NO: 653281 - DNA, 25 bp, Homo sapien
tgggccacccaaaataaaagctcat

SEQ ID NO: 653282 - DNA, 25 bp, Homo sapien
aataaaagctcatattaataatcat

SEQ ID NO: 653283 - DNA, 25 bp, Homo sapien
ctgggccacccaaaataaaagctca

SEQ ID NO: 653284 - DNA, 25 bp, Homo sapien
gcacacacgctgaagcaggatggtg

SEQ ID NO: 653285 - DNA, 25 bp, Homo sapien
cgctgaagcaggatggtgactttga

SEQ ID NO: 653286 - DNA, 25 bp, Homo sapien
aagggctatcttctgggcacacacg

SEQ ID NO: 653287 - DNA, 25 bp, Homo sapien
gcttgtcgctcatcacattcagggt

SEQ ID NO: 653288 - DNA, 25 bp, Homo sapien
tcatagtatcattttgatgcctgtg

SEQ ID NO: 653289 - DNA, 25 bp, Homo sapien
tatcattttgatgcctgtggtttct

SEQ ID NO: 653290 - DNA, 25 bp, Homo sapien
gtttctgtacttgtgaactttctgc

SEQ ID NO: 653291 - DNA, 25 bp, Homo sapien
gatgcctgtggtttctgtacttgtg

SEQ ID NO: 653292 - DNA, 25 bp, Homo sapien
gaatacaggcataggcagaggaccc

SEQ ID NO: 653293 - DNA, 25 bp, Homo sapien
gataaccaaggcagaagatcaccta

SEQ ID NO: 653294 - DNA, 25 bp, Homo sapien
tcaggtaggaaaggtgccactggtc

SEQ ID NO: 653295 - DNA, 25 bp, Homo sapien
gattcaagggcctccagaatacagg

SEQ ID NO: 653296 - DNA, 25 bp, Homo sapien
tgaggagcattttaaaggcagaagt

SEQ ID NO: 653297 - DNA, 25 bp, Homo sapien
ggagcattttaaaggcagaagtgag

SEQ ID NO: 653298 - DNA, 25 bp, Homo sapien
cttgaggagcattttaaaggcagaa

SEQ ID NO: 653299 - DNA, 25 bp, Homo sapien
gcattttaaaggcagaagtgagagg

SEQ ID NO: 653300 - DNA, 25 bp, Homo sapien
gaacttcagcacatggttccaacaa

SEQ ID NO: 653301 - DNA, 25 bp, Homo sapien
taagctccattatcatgcgcctaaa

SEQ ID NO: 653302 - DNA, 25 bp, Homo sapien
tgtttgcagagttcgtcaaaaatac

SEQ ID NO: 653303 - DNA, 25 bp, Homo sapien
ctttcaagagcacaggaacttcagc

SEQ ID NO: 653304 - DNA, 25 bp, Homo sapien
ccttttagaatcacttaaatacaga

SEQ ID NO: 653305 - DNA, 25 bp, Homo sapien
tttagaatcacttaaatacagagac

SEQ ID NO: 653306 - DNA, 25 bp, Homo sapien
cttttagaatcacttaaatacagag

SEQ ID NO: 653307 - DNA, 25 bp, Homo sapien
ttttagaatcacttaaatacagaga

SEQ ID NO: 653308 - DNA, 25 bp, Homo sapien
ccccaactggaagatcgtttatgac

SEQ ID NO: 653309 - DNA, 25 bp, Homo sapien
cctggacgccggctttcacatttgt

SEQ ID NO: 653310 - DNA, 25 bp, Homo sapien
ctgcaacaaagcctggacgccggct

SEQ ID NO: 653311 - DNA, 25 bp, Homo sapien
gaaggagtatgtgcgtccccaactg

SEQ ID NO: 653312 - DNA, 25 bp, Homo sapien
catgaacacaggtttgtcctggaga

SEQ ID NO: 653313 - DNA, 25 bp, Homo sapien
tgctatcagtctcggaaaatcctaa

SEQ ID NO: 653314 - DNA, 25 bp, Homo sapien
cagctatctcacaggaaggcaacaa

SEQ ID NO: 653315 - DNA, 25 bp, Homo sapien
cttgaactacttttcttgttacagc

SEQ ID NO: 653316 - DNA, 25 bp, Homo sapien
ggataccgaggcttacagcaccaga

SEQ ID NO: 653317 - DNA, 25 bp, Homo sapien
ggttccccatactcagatgctttaa

SEQ ID NO: 653318 - DNA, 25 bp, Homo sapien
tatcaggttactaatgagttcagct

SEQ ID NO: 653319 - DNA, 25 bp, Homo sapien
aagagcctctggcaaagttgtagca

SEQ ID NO: 653320 - DNA, 25 bp, Homo sapien
tgtcccctagggagtagcatcaaac

SEQ ID NO: 653321 - DNA, 25 bp, Homo sapien
caaacccagttgcaaacctctgatg

SEQ ID NO: 653322 - DNA, 25 bp, Homo sapien
tcatattgtgagtgccacacgcctc

SEQ ID NO: 653323 - DNA, 25 bp, Homo sapien
tgctgggtattcaggaacggctttc

SEQ ID NO: 653324 - DNA, 25 bp, Homo sapien
taacctcgtgttgacaagagaatcc

SEQ ID NO: 653325 - DNA, 25 bp, Homo sapien
ggtgaaatacttcattcacgaagtt

SEQ ID NO: 653326 - DNA, 25 bp, Homo sapien
tcgtgttgacaagagaatccgctgt

SEQ ID NO: 653327 - DNA, 25 bp, Homo sapien
ttcacgaagttgacataacctcgtg

SEQ ID NO: 653328 - DNA, 25 bp, Homo sapien
tttcatacaccattcggtgctcttc

SEQ ID NO: 653329 - DNA, 25 bp, Homo sapien
caaggtgctgctgttagaatggctt

SEQ ID NO: 653330 - DNA, 25 bp, Homo sapien
cggtgctcttcttcaatgctacaga

SEQ ID NO: 653331 - DNA, 25 bp, Homo sapien
gctggagttgctgagtcttcggtcc

SEQ ID NO: 653332 - DNA, 25 bp, Homo sapien
taataaccttgaagcacaagagcca

SEQ ID NO: 653333 - DNA, 25 bp, Homo sapien
gttcttactgtaactgcacctccct

SEQ ID NO: 653334 - DNA, 25 bp, Homo sapien
cactgtcatgggatcttttttcaga

SEQ ID NO: 653335 - DNA, 25 bp, Homo sapien
gccgcatgctctagactgtttggtg

SEQ ID NO: 653336 - DNA, 25 bp, Homo sapien
cagataaaaagatgatggatggcat

SEQ ID NO: 653337 - DNA, 25 bp, Homo sapien
gataaaaagatgatggatggcatac

SEQ ID NO: 653338 - DNA, 25 bp, Homo sapien
agataaaaagatgatggatggcata

SEQ ID NO: 653339 - DNA, 25 bp, Homo sapien
gattttaggcaatacatcaactcca

SEQ ID NO: 653340 - DNA, 25 bp, Homo sapien
taaaaacaacacgagctgccatata

SEQ ID NO: 653341 - DNA, 25 bp, Homo sapien
atgttctcattgtctcgagtggtag

SEQ ID NO: 653342 - DNA, 25 bp, Homo sapien
gtagtaatgtacacaggctttggtc

SEQ ID NO: 653343 - DNA, 25 bp, Homo sapien
tcacatttcacctttgaggcatcaa

SEQ ID NO: 653344 - DNA, 25 bp, Homo sapien
aaatacatgtcccagtgcacctaaa

SEQ ID NO: 653345 - DNA, 25 bp, Homo sapien
taacactgcagtgattaaatccact

SEQ ID NO: 653346 - DNA, 25 bp, Homo sapien
tatctggaatacctgtatgaggcag

SEQ ID NO: 653347 - DNA, 25 bp, Homo sapien
tatacacggctccaacagtacttac

SEQ ID NO: 653348 - DNA, 25 bp, Homo sapien
tctgagtataggagccacggttccc

SEQ ID NO: 653349 - DNA, 25 bp, Homo sapien
gctgaggtatatcttagttggtaca

SEQ ID NO: 653350 - DNA, 25 bp, Homo sapien
tttggatatcctctatacacggctc

SEQ ID NO: 653351 - DNA, 25 bp, Homo sapien
gataatactttcgaaacaatgtaaa

SEQ ID NO: 653352 - DNA, 25 bp, Homo sapien
ggaagataatactttcgaaacaatg

SEQ ID NO: 653353 - DNA, 25 bp, Homo sapien
tgtttgttaacttagtaaatgatgg

SEQ ID NO: 653354 - DNA, 25 bp, Homo sapien
tgtagatgtttgttaacttagtaaa

SEQ ID NO: 653355 - DNA, 25 bp, Homo sapien
catatactaaactgaagtgttgtta

SEQ ID NO: 653356 - DNA, 25 bp, Homo sapien
aattaacatatactaaactgaagtg

SEQ ID NO: 653357 - DNA, 25 bp, Homo sapien
ctttggataatatgtggaaaagaac

SEQ ID NO: 653358 - DNA, 25 bp, Homo sapien
tgttgttatgttactaaaattccta

SEQ ID NO: 653359 - DNA, 25 bp, Homo sapien
tctcccctgatatggctggtaggag

SEQ ID NO: 653360 - DNA, 25 bp, Homo sapien
aaagcaggtttggtcctcagcaatc

SEQ ID NO: 653361 - DNA, 25 bp, Homo sapien
aaaaagcaggtttggtcctcagcaa

SEQ ID NO: 653362 - DNA, 25 bp, Homo sapien
taaccatatacttcaacagtatttg

SEQ ID NO: 653363 - DNA, 25 bp, Homo sapien
ctgaggagcacactccaaggcagtg

SEQ ID NO: 653364 - DNA, 25 bp, Homo sapien
tccaaggcagtgtgcataaagggcc

SEQ ID NO: 653365 - DNA, 25 bp, Homo sapien
gctgcaccattctttcccgttcaaa

SEQ ID NO: 653366 - DNA, 25 bp, Homo sapien
agatgcccacgaagcgccttctcct

SEQ ID NO: 653367 - DNA, 25 bp, Homo sapien
cagtttgtctgaagtgcttgaagcc

SEQ ID NO: 653368 - DNA, 25 bp, Homo sapien
caggcaccaggcaagcaaaaatcag

SEQ ID NO: 653369 - DNA, 25 bp, Homo sapien
gctgggattgatgagtgtctccagt

SEQ ID NO: 653370 - DNA, 25 bp, Homo sapien
aaaaatcagaacctgctcttctgca

SEQ ID NO: 653371 - DNA, 25 bp, Homo sapien
ttccagtgtgtagaagcttctttaa

SEQ ID NO: 653372 - DNA, 25 bp, Homo sapien
tttccagtgtgtagaagcttcttta

SEQ ID NO: 653373 - DNA, 25 bp, Homo sapien
tcaacctggggccttgttctttgtc

SEQ ID NO: 653374 - DNA, 25 bp, Homo sapien
ggccttgttctttgtccccatgttc

SEQ ID NO: 653375 - DNA, 25 bp, Homo sapien
cttgttctttgtccccatgttcatc

SEQ ID NO: 653376 - DNA, 25 bp, Homo sapien
tggggccttgttctttgtccccatg

SEQ ID NO: 653377 - DNA, 25 bp, Homo sapien
gactacctatagatgcctataacca

SEQ ID NO: 653378 - DNA, 25 bp, Homo sapien
gcctataaccactgttctctacaca

SEQ ID NO: 653379 - DNA, 25 bp, Homo sapien
cactgttctctacacacagaggaga

SEQ ID NO: 653380 - DNA, 25 bp, Homo sapien
taagtatttggactacctatagatg

SEQ ID NO: 653381 - DNA, 25 bp, Homo sapien
agtaacttcatctcactatgcctga

SEQ ID NO: 653382 - DNA, 25 bp, Homo sapien
cagaagctagactgctagggttcaa

SEQ ID NO: 653383 - DNA, 25 bp, Homo sapien
taaatgcacagaacagtgccgggta

SEQ ID NO: 653384 - DNA, 25 bp, Homo sapien
gacaatagtacttatcagacaactg

SEQ ID NO: 653385 - DNA, 25 bp, Homo sapien
ccatcaatacctgaataaattatgg

SEQ ID NO: 653386 - DNA, 25 bp, Homo sapien
catcaatacctgaataaattatgga

SEQ ID NO: 653387 - DNA, 25 bp, Homo sapien
caagcgagcaggaggtcaaaagaca

SEQ ID NO: 653388 - DNA, 25 bp, Homo sapien
aacgcaagctagtctacaagggcca

SEQ ID NO: 653389 - DNA, 25 bp, Homo sapien
ggacagaggtttccacagagggaat

SEQ ID NO: 653390 - DNA, 25 bp, Homo sapien
gatcagtgtctgaagccattgaggc

SEQ ID NO: 653391 - DNA, 25 bp, Homo sapien
ctatactctggtaatgccatcgaaa

SEQ ID NO: 653392 - DNA, 25 bp, Homo sapien
tggtaatgccatcgaaagaaaattc

SEQ ID NO: 653393 - DNA, 25 bp, Homo sapien
aatgccatcgaaagaaaattcgttc

SEQ ID NO: 653394 - DNA, 25 bp, Homo sapien
tactctggtaatgccatcgaaagaa

SEQ ID NO: 653395 - DNA, 25 bp, Homo sapien
gacaggcccatattactcactgtag

SEQ ID NO: 653396 - DNA, 25 bp, Homo sapien
ggcccatattactcactgtaggtaa

SEQ ID NO: 653397 - DNA, 25 bp, Homo sapien
attttcatgacaggcccatattact

SEQ ID NO: 653398 - DNA, 25 bp, Homo sapien
tattactcactgtaggtaagttcta

SEQ ID NO: 653399 - DNA, 25 bp, Homo sapien
tggaaacctggtcccagtgagttct

SEQ ID NO: 653400 - DNA, 25 bp, Homo sapien
gttgatggaaacctggtcccagtga

SEQ ID NO: 653401 - DNA, 25 bp, Homo sapien
gaaacctggtcccagtgagttctcc

SEQ ID NO: 653402 - DNA, 25 bp, Homo sapien
gatggaaacctggtcccagtgagtt

SEQ ID NO: 653403 - DNA, 25 bp, Homo sapien
taaagtaagacatagattccactac

SEQ ID NO: 653404 - DNA, 25 bp, Homo sapien
cactggtcaaattatgaatcccaaa

SEQ ID NO: 653405 - DNA, 25 bp, Homo sapien
actacatccctggattcaccactgg

SEQ ID NO: 653406 - DNA, 25 bp, Homo sapien
taactacacccagactgtgcacatg

SEQ ID NO: 653407 - DNA, 25 bp, Homo sapien
aaaaaggaagaggatggagtccagc

SEQ ID NO: 653408 - DNA, 25 bp, Homo sapien
tcctccctttgtgacttattattcc

SEQ ID NO: 653409 - DNA, 25 bp, Homo sapien
ttcaaaaaggaagaggatggagtcc

SEQ ID NO: 653410 - DNA, 25 bp, Homo sapien
cagctcctccctttgtgacttatta

SEQ ID NO: 653411 - DNA, 25 bp, Homo sapien
ttttgacaagaaactatgggatggg

SEQ ID NO: 653412 - DNA, 25 bp, Homo sapien
tcttttgacaagaaactatgggatg

SEQ ID NO: 653413 - DNA, 25 bp, Homo sapien
tttgacaagaaactatgggatggga

SEQ ID NO: 653414 - DNA, 25 bp, Homo sapien
tgacaagaaactatgggatgggaga

SEQ ID NO: 653415 - DNA, 25 bp, Homo sapien
gcactccaatcgaacacagattata

SEQ ID NO: 653416 - DNA, 25 bp, Homo sapien
tccctgcactccaatcgaacacaga

SEQ ID NO: 653417 - DNA, 25 bp, Homo sapien
tccaatcgaacacagattatactaa

SEQ ID NO: 653418 - DNA, 25 bp, Homo sapien
gacttcaaaaatctcactattttta

SEQ ID NO: 653419 - DNA, 25 bp, Homo sapien
gaatggccacaatcaaagaccacca

SEQ ID NO: 653420 - DNA, 25 bp, Homo sapien
ctatgattctttgcagtagattgca

SEQ ID NO: 653421 - DNA, 25 bp, Homo sapien
tgcagtagattgcaagaatggccac

SEQ ID NO: 653422 - DNA, 25 bp, Homo sapien
acaatcaaagaccaccacagtgcct

SEQ ID NO: 653423 - DNA, 25 bp, Homo sapien
ctcaataaccttcccgtgaccaggg

SEQ ID NO: 653424 - DNA, 25 bp, Homo sapien
atctgtttggcttccgacctgctcc

SEQ ID NO: 653425 - DNA, 25 bp, Homo sapien
tcctcaatctgcaaacaggccaatg

SEQ ID NO: 653426 - DNA, 25 bp, Homo sapien
tgaccagggtgagatacaatctgtg

SEQ ID NO: 653427 - DNA, 25 bp, Homo sapien
agttggtctcaaaaaactgcttaag

SEQ ID NO: 653428 - DNA, 25 bp, Homo sapien
ctgagaatagttggtctcaaaaaac

SEQ ID NO: 653429 - DNA, 25 bp, Homo sapien
gcttaagatcatttgcatccacatt

SEQ ID NO: 653430 - DNA, 25 bp, Homo sapien
aaactgcttaagatcatttgcatcc

SEQ ID NO: 653431 - DNA, 25 bp, Homo sapien
cttccctgtccactacccccctcat

SEQ ID NO: 653432 - DNA, 25 bp, Homo sapien
tgatctgaattggagctagcctaca

SEQ ID NO: 653433 - DNA, 25 bp, Homo sapien
ttataatcaaaatcgctcctgaggg

SEQ ID NO: 653434 - DNA, 25 bp, Homo sapien
cactagaaagggtaggtcactgcca

SEQ ID NO: 653435 - DNA, 25 bp, Homo sapien
aataaaatgactacagcctaggagc

SEQ ID NO: 653436 - DNA, 25 bp, Homo sapien
catggcccaatgtactccagctttc

SEQ ID NO: 653437 - DNA, 25 bp, Homo sapien
caggccgctgtgtgggcccattaca

SEQ ID NO: 653438 - DNA, 25 bp, Homo sapien
aaagtgtttccgtcctgtcttctca

SEQ ID NO: 653439 - DNA, 25 bp, Homo sapien
tcccactggccacaaagtgtttccg

SEQ ID NO: 653440 - DNA, 25 bp, Homo sapien
ctcagccaatgtggaaagcagtttt

SEQ ID NO: 653441 - DNA, 25 bp, Homo sapien
gagacaccgtacactacctagaggg

SEQ ID NO: 653442 - DNA, 25 bp, Homo sapien
tgtggatgacgggatccatacccca

SEQ ID NO: 653443 - DNA, 25 bp, Homo sapien
cattgccatgcgattcacaacagaa

SEQ ID NO: 653444 - DNA, 25 bp, Homo sapien
tggccaaactcaggactcatgggct

SEQ ID NO: 653445 - DNA, 25 bp, Homo sapien
caagaaggtcctggcaaagacatgg

SEQ ID NO: 653446 - DNA, 25 bp, Homo sapien
tattgtcattccctctgagagtagg

SEQ ID NO: 653447 - DNA, 25 bp, Homo sapien
gagagtaggattcaatttaaggcac

SEQ ID NO: 653448 - DNA, 25 bp, Homo sapien
acaggtaagtgtgtctatagatagc

SEQ ID NO: 653449 - DNA, 25 bp, Homo sapien
gcactaggcgatttttgtgaatttt

SEQ ID NO: 653450 - DNA, 25 bp, Homo sapien
caggaagccttgtggacacctcaca

SEQ ID NO: 653451 - DNA, 25 bp, Homo sapien
taggcgaaccagctacagatcacat

SEQ ID NO: 653452 - DNA, 25 bp, Homo sapien
ccccgtggctccttcgggagaacat

SEQ ID NO: 653453 - DNA, 25 bp, Homo sapien
gacttcttcacatccccgtggctcc

SEQ ID NO: 653454 - DNA, 25 bp, Homo sapien
agcacgtccttcttcgggtccagca

SEQ ID NO: 653455 - DNA, 25 bp, Homo sapien
gggtcagcacgtccttcttcgggtc

SEQ ID NO: 653456 - DNA, 25 bp, Homo sapien
aatcaaagcatagggtcgaggccgg

SEQ ID NO: 653457 - DNA, 25 bp, Homo sapien
tgcgccacgcgaatcaaagcatagg

SEQ ID NO: 653458 - DNA, 25 bp, Homo sapien
ggcgcctgcgccacgcgaatcaaag

SEQ ID NO: 653459 - DNA, 25 bp, Homo sapien
cacgcgaatcaaagcatagggtcga

SEQ ID NO: 653460 - DNA, 25 bp, Homo sapien
gacgcgctgcgacctcttttccagg

SEQ ID NO: 653461 - DNA, 25 bp, Homo sapien
cggcagcctagatcgcccgtggttt

SEQ ID NO: 653462 - DNA, 25 bp, Homo sapien
tcttttccagggtcgcagaagcgca

SEQ ID NO: 653463 - DNA, 25 bp, Homo sapien
cagtcctccaatcaggctggcggtc

SEQ ID NO: 653464 - DNA, 25 bp, Homo sapien
ttctagaccagaatggacagtaccc

SEQ ID NO: 653465 - DNA, 25 bp, Homo sapien
aaaatgcactgtcagctaaaagatg

SEQ ID NO: 653466 - DNA, 25 bp, Homo sapien
gacttctagaccagaatggacagta

SEQ ID NO: 653467 - DNA, 25 bp, Homo sapien
tgcactgtcagctaaaagatgaaaa

SEQ ID NO: 653468 - DNA, 25 bp, Homo sapien
caaatgcatactttgatttcagctc

SEQ ID NO: 653469 - DNA, 25 bp, Homo sapien
attcaaacccaatgtaactcctcaa

SEQ ID NO: 653470 - DNA, 25 bp, Homo sapien
ttattgaattcaaacccaatgtaac

SEQ ID NO: 653471 - DNA, 25 bp, Homo sapien
aatgcatactttgatttcagctccc

SEQ ID NO: 653472 - DNA, 25 bp, Homo sapien
cagacacccgatcaacatattgcac

SEQ ID NO: 653473 - DNA, 25 bp, Homo sapien
gacacccgatcaacatattgcacta

SEQ ID NO: 653474 - DNA, 25 bp, Homo sapien
gcagacacccgatcaacatattgca

SEQ ID NO: 653475 - DNA, 25 bp, Homo sapien
tgcagacacccgatcaacatattgc

SEQ ID NO: 653476 - DNA, 25 bp, Homo sapien
tgatgatcttggagcgtcctcgtat

SEQ ID NO: 653477 - DNA, 25 bp, Homo sapien
catgtgacccagaacttcagaggtg

SEQ ID NO: 653478 - DNA, 25 bp, Homo sapien
aagcatctcccattgtccttggagg

SEQ ID NO: 653479 - DNA, 25 bp, Homo sapien
gtcctcgtataaatgggaccaaagc

SEQ ID NO: 653480 - DNA, 25 bp, Homo sapien
ggcatgatgactgaagctctctttt

SEQ ID NO: 653481 - DNA, 25 bp, Homo sapien
tctgaagacctggttgacttggttg

SEQ ID NO: 653482 - DNA, 25 bp, Homo sapien
gcatgatgactgaagctctcttttc

SEQ ID NO: 653483 - DNA, 25 bp, Homo sapien
gtgtcaagcaggaaaccaggttcat

SEQ ID NO: 653484 - DNA, 25 bp, Homo sapien
cttgtgtcaagcaggaaaccaggtt

SEQ ID NO: 653485 - DNA, 25 bp, Homo sapien
ttgtgtcaagcaggaaaccaggttc

SEQ ID NO: 653486 - DNA, 25 bp, Homo sapien
tgtgtcaagcaggaaaccaggttca

SEQ ID NO: 653487 - DNA, 25 bp, Homo sapien
ccccagggacacactaaagaaatgg

SEQ ID NO: 653488 - DNA, 25 bp, Homo sapien
caaggttgcagggtctagcaaagtc

SEQ ID NO: 653489 - DNA, 25 bp, Homo sapien
aagtgattgattaagggagtgcccc

SEQ ID NO: 653490 - DNA, 25 bp, Homo sapien
cacactaaagaaatgggaaagcaga

SEQ ID NO: 653491 - DNA, 25 bp, Homo sapien
tttcataatcatactctcggtcttc

SEQ ID NO: 653492 - DNA, 25 bp, Homo sapien
tctgactctgtgaacatctacatac

SEQ ID NO: 653493 - DNA, 25 bp, Homo sapien
ctgactctgtgaacatctacatact

SEQ ID NO: 653494 - DNA, 25 bp, Homo sapien
ctccatttcataatcatactctcgg

SEQ ID NO: 653495 - DNA, 25 bp, Homo sapien
cctaggtggcttcagagcatatcct

SEQ ID NO: 653496 - DNA, 25 bp, Homo sapien
tcttggaagggagtcccttcctgca

SEQ ID NO: 653497 - DNA, 25 bp, Homo sapien
tgccaaggcagacagccctaggtgg

SEQ ID NO: 653498 - DNA, 25 bp, Homo sapien
ctggacatagggttgcaacaggatg

SEQ ID NO: 653499 - DNA, 25 bp, Homo sapien
caggattcctgacaagattgtgaat

SEQ ID NO: 653500 - DNA, 25 bp, Homo sapien
ttttcatgtttgaaagagccagtgg

SEQ ID NO: 653501 - DNA, 25 bp, Homo sapien
gacaagattgtgaatggcaggagtt

SEQ ID NO: 653502 - DNA, 25 bp, Homo sapien
gagagaatacagaacagtcatcagg

SEQ ID NO: 653503 - DNA, 25 bp, Homo sapien
tttgaaggggagcagtactgggatc

SEQ ID NO: 653504 - DNA, 25 bp, Homo sapien
aaggggagcagtactgggatcagag

SEQ ID NO: 653505 - DNA, 25 bp, Homo sapien
gggagcagtactgggatcagagtga

SEQ ID NO: 653506 - DNA, 25 bp, Homo sapien
agatttgaaggggagcagtactggg

SEQ ID NO: 653507 - DNA, 25 bp, Homo sapien
tggggacacacctttgacccatcca

SEQ ID NO: 653508 - DNA, 25 bp, Homo sapien
ccacccctacaagaacctgagaaat

SEQ ID NO: 653509 - DNA, 25 bp, Homo sapien
tggttccacccctgacaatggtaaa

SEQ ID NO: 653510 - DNA, 25 bp, Homo sapien
aattgactgcgggaattccaaatga

SEQ ID NO: 653511 - DNA, 25 bp, Homo sapien
catttactttatctacttcagagag

SEQ ID NO: 653512 - DNA, 25 bp, Homo sapien
tttactttatctacttcagagagag

SEQ ID NO: 653513 - DNA, 25 bp, Homo sapien
tactttatctacttcagagagaggt

SEQ ID NO: 653514 - DNA, 25 bp, Homo sapien
tttatctacttcagagagaggttcc

SEQ ID NO: 653515 - DNA, 25 bp, Homo sapien
tccaagagactgtgagaaggaagcc

SEQ ID NO: 653516 - DNA, 25 bp, Homo sapien
gagtgactccaagagactgtgagaa

SEQ ID NO: 653517 - DNA, 25 bp, Homo sapien
gggatgttgctgagtgactccaaga

SEQ ID NO: 653518 - DNA, 25 bp, Homo sapien
tgctgagtgactccaagagactgtg

SEQ ID NO: 653519 - DNA, 25 bp, Homo sapien
cagaccttgactgaatgtccctgga

SEQ ID NO: 653520 - DNA, 25 bp, Homo sapien
gacaagtccttgctcgaatccttag

SEQ ID NO: 653521 - DNA, 25 bp, Homo sapien
aaagcccacaatttgagcagttgga

SEQ ID NO: 653522 - DNA, 25 bp, Homo sapien
tgaagcataggttttgacaagtcct

SEQ ID NO: 653523 - DNA, 25 bp, Homo sapien
cgtactttactcctattgttctcca

SEQ ID NO: 653524 - DNA, 25 bp, Homo sapien
tctggggttcttcctgcgtacttta

SEQ ID NO: 653525 - DNA, 25 bp, Homo sapien
atcagcgcccaggtagcatgtgcca

SEQ ID NO: 653526 - DNA, 25 bp, Homo sapien
cgtctcaggatcagcgcccaggtag

SEQ ID NO: 653527 - DNA, 25 bp, Homo sapien
tttacgagacattctagaaggcaga

SEQ ID NO: 653528 - DNA, 25 bp, Homo sapien
ccaagaggagcagcttttacgagac

SEQ ID NO: 653529 - DNA, 25 bp, Homo sapien
tctctggtgggtaagaacccaactc

SEQ ID NO: 653530 - DNA, 25 bp, Homo sapien
cttcagtctggtctgagaggggcct

SEQ ID NO: 653531 - DNA, 25 bp, Homo sapien
aaagagccacgaggagctggaagca

SEQ ID NO: 653532 - DNA, 25 bp, Homo sapien
gcagggtcagcagtctgcatcccat

SEQ ID NO: 653533 - DNA, 25 bp, Homo sapien
agcagggtcagcagtctgcatccca

SEQ ID NO: 653534 - DNA, 25 bp, Homo sapien
tggattgggagccaaagagccacga

SEQ ID NO: 653535 - DNA, 25 bp, Homo sapien
ggaaggcaagcaaaccaagagccag

SEQ ID NO: 653536 - DNA, 25 bp, Homo sapien
gaaagtcataatcaaggcttgcaaa

SEQ ID NO: 653537 - DNA, 25 bp, Homo sapien
caacatagggcgcagaagataggag

SEQ ID NO: 653538 - DNA, 25 bp, Homo sapien
caaaatgtgcattggattgagctgt

SEQ ID NO: 653539 - DNA, 25 bp, Homo sapien
ctgaaagccacatggcgaggaggga

SEQ ID NO: 653540 - DNA, 25 bp, Homo sapien
ttgaagagcttttgaatttaaaggc

SEQ ID NO: 653541 - DNA, 25 bp, Homo sapien
tgaagagcttttgaatttaaaggcc

SEQ ID NO: 653542 - DNA, 25 bp, Homo sapien
cttgaagagcttttgaatttaaagg

SEQ ID NO: 653543 - DNA, 25 bp, Homo sapien
gggctgctcccctggagatgtcaga

SEQ ID NO: 653544 - DNA, 25 bp, Homo sapien
tcctttcccttgaactgggctgctc

SEQ ID NO: 653545 - DNA, 25 bp, Homo sapien
ctgctcccctggagatgtcagaagg

SEQ ID NO: 653546 - DNA, 25 bp, Homo sapien
tgcagtcagctcagacctttcttcc

SEQ ID NO: 653547 - DNA, 25 bp, Homo sapien
tttccctgataacccctcagagcct

SEQ ID NO: 653548 - DNA, 25 bp, Homo sapien
gctctccagactcagatctctgatg

SEQ ID NO: 653549 - DNA, 25 bp, Homo sapien
acacgtgaagcttggagtgggccca

SEQ ID NO: 653550 - DNA, 25 bp, Homo sapien
ctgataacccctcagagcctgccgg

SEQ ID NO: 653551 - DNA, 25 bp, Homo sapien
tggtgcctttggaaaattctccgat

SEQ ID NO: 653552 - DNA, 25 bp, Homo sapien
cttctgtttaatgacttggtgcctt

SEQ ID NO: 653553 - DNA, 25 bp, Homo sapien
ctccgatctttgtggaggttcacag

SEQ ID NO: 653554 - DNA, 25 bp, Homo sapien
agcttgtaccagcatgtgggctccc

SEQ ID NO: 653555 - DNA, 25 bp, Homo sapien
ccctcgggggtgacattctttgata

SEQ ID NO: 653556 - DNA, 25 bp, Homo sapien
gcagctgacagatatactcaaccac

SEQ ID NO: 653557 - DNA, 25 bp, Homo sapien
tgtggcagctgacagatatactcaa

SEQ ID NO: 653558 - DNA, 25 bp, Homo sapien
gctgacagatatactcaaccacctc

SEQ ID NO: 653559 - DNA, 25 bp, Homo sapien
tgatacaggtgtcccaatcacctgt

SEQ ID NO: 653560 - DNA, 25 bp, Homo sapien
cttttgatacaggtgtcccaatcac

SEQ ID NO: 653561 - DNA, 25 bp, Homo sapien
tcacctgtgtgccttgccatggacc

SEQ ID NO: 653562 - DNA, 25 bp, Homo sapien
cttgccatggacccgagcttgccat

SEQ ID NO: 653563 - DNA, 25 bp, Homo sapien
acatacagcccacaatgatgaaagg

SEQ ID NO: 653564 - DNA, 25 bp, Homo sapien
gctctgcagggtatactgcctcgga

SEQ ID NO: 653565 - DNA, 25 bp, Homo sapien
tctggaggacgatgaacctgttttc

SEQ ID NO: 653566 - DNA, 25 bp, Homo sapien
tgtcaatagacctaccattctggag

SEQ ID NO: 653567 - DNA, 25 bp, Homo sapien
ctgtgattgagatcacttccaggcc

SEQ ID NO: 653568 - DNA, 25 bp, Homo sapien
cctgtgtggatggtctgcaccagca

SEQ ID NO: 653569 - DNA, 25 bp, Homo sapien
gatgtgggtaacaccctttcctgca

SEQ ID NO: 653570 - DNA, 25 bp, Homo sapien
tagctgggagctaccatcttctctt

SEQ ID NO: 653571 - DNA, 25 bp, Homo sapien
aatgtcttggatcttctgggtgcct

SEQ ID NO: 653572 - DNA, 25 bp, Homo sapien
gaaggtagtgagagtgttttgacat

SEQ ID NO: 653573 - DNA, 25 bp, Homo sapien
aatcagacagttagggtggcacgtg

SEQ ID NO: 653574 - DNA, 25 bp, Homo sapien
cacttactgaaatcagacagttagg

SEQ ID NO: 653575 - DNA, 25 bp, Homo sapien
cgggagatggtcatgtcacttactg

SEQ ID NO: 653576 - DNA, 25 bp, Homo sapien
caccgtttgaaatgctaggcatggc

SEQ ID NO: 653577 - DNA, 25 bp, Homo sapien
gctttctcgtgccttctaacctggg

SEQ ID NO: 653578 - DNA, 25 bp, Homo sapien
tgagggcctgcactgatcttggtcc

SEQ ID NO: 653579 - DNA, 25 bp, Homo sapien
gtcccacacggtgcttgctttctcg

SEQ ID NO: 653580 - DNA, 25 bp, Homo sapien
tgcctttgaaggacacgtgcgtgta

SEQ ID NO: 653581 - DNA, 25 bp, Homo sapien
ccattataggcggaaggccctgaag

SEQ ID NO: 653582 - DNA, 25 bp, Homo sapien
ggccctgaagtaatatgtcaacgct

SEQ ID NO: 653583 - DNA, 25 bp, Homo sapien
tgtcaacgctcgctctaacagctgt

SEQ ID NO: 653584 - DNA, 25 bp, Homo sapien
gcattttggacccagcacggtggct

SEQ ID NO: 653585 - DNA, 25 bp, Homo sapien
gcttaagtcaggtcaaaagtggctc

SEQ ID NO: 653586 - DNA, 25 bp, Homo sapien
gaatgagccgaaacacaaaggtgga

SEQ ID NO: 653587 - DNA, 25 bp, Homo sapien
cctacactaaatctgagagcctgaa

SEQ ID NO: 653588 - DNA, 25 bp, Homo sapien
caaaaggtctacaagtctgaacgga

SEQ ID NO: 653589 - DNA, 25 bp, Homo sapien
tatccataactcacatctgggattg

SEQ ID NO: 653590 - DNA, 25 bp, Homo sapien
tgatgtttctatccccttctttcca

SEQ ID NO: 653591 - DNA, 25 bp, Homo sapien
gatggtgagcagtaagaagttgcaa

SEQ ID NO: 653592 - DNA, 25 bp, Homo sapien
cagggaatggaaccattacgtccct

SEQ ID NO: 653593 - DNA, 25 bp, Homo sapien
ggtgaatccaaagtcataacatctc

SEQ ID NO: 653594 - DNA, 25 bp, Homo sapien
tcagagcgatgaggcgccaaaaagg

SEQ ID NO: 653595 - DNA, 25 bp, Homo sapien
gggtcattgtccaccgccttcggat

SEQ ID NO: 653596 - DNA, 25 bp, Homo sapien
ggaagcctccaatgtcaaagctttc

SEQ ID NO: 653597 - DNA, 25 bp, Homo sapien
ggcagagcccctaagagtcaagaca

SEQ ID NO: 653598 - DNA, 25 bp, Homo sapien
ccctcatgggcatgctcgctgctgg

SEQ ID NO: 653599 - DNA, 25 bp, Homo sapien
ctgctctgtggtgtaggcagagccc

SEQ ID NO: 653600 - DNA, 25 bp, Homo sapien
ccctaagagtcaagacaccctcatg

SEQ ID NO: 653601 - DNA, 25 bp, Homo sapien
aatttggccatccaagtggaaaccg

SEQ ID NO: 653602 - DNA, 25 bp, Homo sapien
ttaggtactgtcaaatttggccatc

SEQ ID NO: 653603 - DNA, 25 bp, Homo sapien
atttggccatccaagtggaaaccgg

SEQ ID NO: 653604 - DNA, 25 bp, Homo sapien
tgataatgagatgctcaaagggacc

SEQ ID NO: 653605 - DNA, 25 bp, Homo sapien
gaatgcttcctgtgcatggctgtat

SEQ ID NO: 653606 - DNA, 25 bp, Homo sapien
cttcttatggttggagctgtgttga

SEQ ID NO: 653607 - DNA, 25 bp, Homo sapien
cttcctgtgcatggctgtatactta

SEQ ID NO: 653608 - DNA, 25 bp, Homo sapien
ggagaccaagcactccaccatttct

SEQ ID NO: 653609 - DNA, 25 bp, Homo sapien
tgctccagcaggtacgactttagct

SEQ ID NO: 653610 - DNA, 25 bp, Homo sapien
tctctccttcgcagagcagaagaca

SEQ ID NO: 653611 - DNA, 25 bp, Homo sapien
gggtgccctaagtcatgctgagtcc

SEQ ID NO: 653612 - DNA, 25 bp, Homo sapien
ggaggagcactccagacacctcctt

SEQ ID NO: 653613 - DNA, 25 bp, Homo sapien
ttgccgcctatttccatgagggccc

SEQ ID NO: 653614 - DNA, 25 bp, Homo sapien
aactgaaatgatttgccgcctattt

SEQ ID NO: 653615 - DNA, 25 bp, Homo sapien
gaggttcagagttttgatccttgta

SEQ ID NO: 653616 - DNA, 25 bp, Homo sapien
tggaagaggttcagagttttgatcc

SEQ ID NO: 653617 - DNA, 25 bp, Homo sapien
gttacaatctgggatgatgctgggc

SEQ ID NO: 653618 - DNA, 25 bp, Homo sapien
gatgttacaatctgggatgatgctg

SEQ ID NO: 653619 - DNA, 25 bp, Homo sapien
ttacaatctgggatgatgctgggcc

SEQ ID NO: 653620 - DNA, 25 bp, Homo sapien
ctttgatgttacaatctgggatgat

SEQ ID NO: 653621 - DNA, 25 bp, Homo sapien
ctgtgggaagacttgacagtgtcat

SEQ ID NO: 653622 - DNA, 25 bp, Homo sapien
attccccagagggtcacaaggccag

SEQ ID NO: 653623 - DNA, 25 bp, Homo sapien
tgggccaccacccaagacattcagt

SEQ ID NO: 653624 - DNA, 25 bp, Homo sapien
cgtagagaccttttgatcccgggct

SEQ ID NO: 653625 - DNA, 25 bp, Homo sapien
gagacgatactgatgtcccgcacca

SEQ ID NO: 653626 - DNA, 25 bp, Homo sapien
cgtgaactgtgattaacagacttcc

SEQ ID NO: 653627 - DNA, 25 bp, Homo sapien
gtgaactgtgattaacagacttcca

SEQ ID NO: 653628 - DNA, 25 bp, Homo sapien
tgaactgtgattaacagacttccag

SEQ ID NO: 653629 - DNA, 25 bp, Homo sapien
aatcccgcgagcagggccttcacaa

SEQ ID NO: 653630 - DNA, 25 bp, Homo sapien
ccgggcaggaggtggttgtcaacag

SEQ ID NO: 653631 - DNA, 25 bp, Homo sapien
agctgagacaatcccgcgagcaggg

SEQ ID NO: 653632 - DNA, 25 bp, Homo sapien
ggaagttgaggacaattggaatggg

SEQ ID NO: 653633 - DNA, 25 bp, Homo sapien
cgaaggcgagttgacagcagattga

SEQ ID NO: 653634 - DNA, 25 bp, Homo sapien
tctcgtgaagctccgcgaaggcgag

SEQ ID NO: 653635 - DNA, 25 bp, Homo sapien
agcagattgagaaggcccccggaaa

SEQ ID NO: 653636 - DNA, 25 bp, Homo sapien
tgacgggaacaactgtagctgggca

SEQ ID NO: 653637 - DNA, 25 bp, Homo sapien
caaaatgtgtcctcggtatccttga

SEQ ID NO: 653638 - DNA, 25 bp, Homo sapien
ggtgtctgctggaacgaccacttga

SEQ ID NO: 653639 - DNA, 25 bp, Homo sapien
gaaatagtccatcgtgctgcttcca

SEQ ID NO: 653640 - DNA, 25 bp, Homo sapien
taaaagaatggcgacaagcagctgg

SEQ ID NO: 653641 - DNA, 25 bp, Homo sapien
tgacggaggtgtcgagagaggtggt

SEQ ID NO: 653642 - DNA, 25 bp, Homo sapien
ggtagtgtgggtgacggaggtgtcg

SEQ ID NO: 653643 - DNA, 25 bp, Homo sapien
ctgagacaatgagggtagtgtgggt

SEQ ID NO: 653644 - DNA, 25 bp, Homo sapien
tgtgggtgacggaggtgtcgagaga

SEQ ID NO: 653645 - DNA, 25 bp, Homo sapien
cggcttgatggtttccatctacaag

SEQ ID NO: 653646 - DNA, 25 bp, Homo sapien
ggacatacctgaagtgctccttttc

SEQ ID NO: 653647 - DNA, 25 bp, Homo sapien
agggggacatacctgaagtgctcct

SEQ ID NO: 653648 - DNA, 25 bp, Homo sapien
ggtttccatctacaagtgcccactc

SEQ ID NO: 653649 - DNA, 25 bp, Homo sapien
ctgggcaagatccacgcgtgctaca

SEQ ID NO: 653650 - DNA, 25 bp, Homo sapien
agtactgagcagtcaccaggcttcc

SEQ ID NO: 653651 - DNA, 25 bp, Homo sapien
cgatttgaatttaagcctccagcca

SEQ ID NO: 653652 - DNA, 25 bp, Homo sapien
cgtgctacatttgcgggctccttgg

SEQ ID NO: 653653 - DNA, 25 bp, Homo sapien
ccttgcatatttgatgggcaacatc

SEQ ID NO: 653654 - DNA, 25 bp, Homo sapien
cttgcatatttgatgggcaacatct

SEQ ID NO: 653655 - DNA, 25 bp, Homo sapien
tcaggcaagatctgcaaagaggggt

SEQ ID NO: 653656 - DNA, 25 bp, Homo sapien
caggcaagatctgcaaagaggggtc

SEQ ID NO: 653657 - DNA, 25 bp, Homo sapien
agaataaagatgtgggtgagccagg

SEQ ID NO: 653658 - DNA, 25 bp, Homo sapien
tgctccagtggggccagaataaaga

SEQ ID NO: 653659 - DNA, 25 bp, Homo sapien
aagatgtgggtgagccaggttccct

SEQ ID NO: 653660 - DNA, 25 bp, Homo sapien
ataaagatgtgggtgagccaggttc

SEQ ID NO: 653661 - DNA, 25 bp, Homo sapien
aacatgtgcttgcagaatctctcct

SEQ ID NO: 653662 - DNA, 25 bp, Homo sapien
atctctcctttgacaacaataatgt

SEQ ID NO: 653663 - DNA, 25 bp, Homo sapien
ctccaaatatgccaacatgtgcttg

SEQ ID NO: 653664 - DNA, 25 bp, Homo sapien
tcgtggtttctccaaatatgccaac

SEQ ID NO: 653665 - DNA, 25 bp, Homo sapien
tcatctatgatttgcaattcctctg

SEQ ID NO: 653666 - DNA, 25 bp, Homo sapien
cctctgagtcagaaagtaaacaaga

SEQ ID NO: 653667 - DNA, 25 bp, Homo sapien
catggccgaggaagtacctgcgata

SEQ ID NO: 653668 - DNA, 25 bp, Homo sapien
ttttcttccagccaatcatctatga

SEQ ID NO: 653669 - DNA, 25 bp, Homo sapien
tgacttttgattgggccagtgggat

SEQ ID NO: 653670 - DNA, 25 bp, Homo sapien
gatatggatggagcactgacagcat

SEQ ID NO: 653671 - DNA, 25 bp, Homo sapien
tcaggaatagtttcctcaagctgca

SEQ ID NO: 653672 - DNA, 25 bp, Homo sapien
ctatagaggaaaggatttgcctggt

SEQ ID NO: 653673 - DNA, 25 bp, Homo sapien
ggaatccaccttcatgtccagagga

SEQ ID NO: 653674 - DNA, 25 bp, Homo sapien
gaaatgctaaggcataaacaggagc

SEQ ID NO: 653675 - DNA, 25 bp, Homo sapien
gagatggactggtgtgaaatgctaa

SEQ ID NO: 653676 - DNA, 25 bp, Homo sapien
caggagcagctgacttggcagtccc

SEQ ID NO: 653677 - DNA, 25 bp, Homo sapien
cagtggcctgggctttagccagttc

SEQ ID NO: 653678 - DNA, 25 bp, Homo sapien
gcagtggcctgggctttagccagtt

SEQ ID NO: 653679 - DNA, 25 bp, Homo sapien
aactcttcagcagatgttactattg

SEQ ID NO: 653680 - DNA, 25 bp, Homo sapien
actcttcagcagatgttactattgt

SEQ ID NO: 653681 - DNA, 25 bp, Homo sapien
cttccctttgttcgtgaagctcacg

SEQ ID NO: 653682 - DNA, 25 bp, Homo sapien
tacaatgaccccagacgtcagggct

SEQ ID NO: 653683 - DNA, 25 bp, Homo sapien
gactaaagaccgtggacagccacga

SEQ ID NO: 653684 - DNA, 25 bp, Homo sapien
tgaagctcacgtggaagcagagcct

SEQ ID NO: 653685 - DNA, 25 bp, Homo sapien
tcttcatgactttgcctgacagcac

SEQ ID NO: 653686 - DNA, 25 bp, Homo sapien
agcaccatgcttgattttgtcacca

SEQ ID NO: 653687 - DNA, 25 bp, Homo sapien
ccactctagtaaccttcttcatgac

SEQ ID NO: 653688 - DNA, 25 bp, Homo sapien
ctgctggagcccactctagtaacct

SEQ ID NO: 653689 - DNA, 25 bp, Homo sapien
ctgcagaggctgttgacatgtgatg

SEQ ID NO: 653690 - DNA, 25 bp, Homo sapien
ccatggacgccatcactcttggtga

SEQ ID NO: 653691 - DNA, 25 bp, Homo sapien
tctggaagtcatttattttgccctg

SEQ ID NO: 653692 - DNA, 25 bp, Homo sapien
gccatcactcttggtgaggcctggc

SEQ ID NO: 653693 - DNA, 25 bp, Homo sapien
tgtgggtgcccgtggtgaaggctgc

SEQ ID NO: 653694 - DNA, 25 bp, Homo sapien
gaaggctgcaccagtgaggacaact

SEQ ID NO: 653695 - DNA, 25 bp, Homo sapien
gcaggagccccacggtgaactctcc

SEQ ID NO: 653696 - DNA, 25 bp, Homo sapien
tgcgcgcctccctgcgatgtctgtg

SEQ ID NO: 653697 - DNA, 25 bp, Homo sapien
gttattactgtgtgaacaatgttca

SEQ ID NO: 653698 - DNA, 25 bp, Homo sapien
atgccattccagtggatcttcccca

SEQ ID NO: 653699 - DNA, 25 bp, Homo sapien
tagctttaccaatattgtacttctg

SEQ ID NO: 653700 - DNA, 25 bp, Homo sapien
tccccaccacgaagttattactgtg

SEQ ID NO: 653701 - DNA, 25 bp, Homo sapien
cccaggttgccaatagctttgaaaa

SEQ ID NO: 653702 - DNA, 25 bp, Homo sapien
ctttgaaaattatcagactgtaggc

SEQ ID NO: 653703 - DNA, 25 bp, Homo sapien
cccagcctgattagtcttagtgaag

SEQ ID NO: 653704 - DNA, 25 bp, Homo sapien
cttagtgaagttagctgagccctgg

SEQ ID NO: 653705 - DNA, 25 bp, Homo sapien
tagcaacttatctggactgtggaca

SEQ ID NO: 653706 - DNA, 25 bp, Homo sapien
tctggttccctgagatgagccgtgg

SEQ ID NO: 653707 - DNA, 25 bp, Homo sapien
tggacaatggccgtgaactgaccct

SEQ ID NO: 653708 - DNA, 25 bp, Homo sapien
gaatcttttcactgaaggtgggaca

SEQ ID NO: 653709 - DNA, 25 bp, Homo sapien
ggtcctatactaaggatatttacac

SEQ ID NO: 653710 - DNA, 25 bp, Homo sapien
catagcttccatgaccaaaaggtcc

SEQ ID NO: 653711 - DNA, 25 bp, Homo sapien
cttccatcacttctgattggactct

SEQ ID NO: 653712 - DNA, 25 bp, Homo sapien
gctgcaagacacttattaattacaa

SEQ ID NO: 653713 - DNA, 25 bp, Homo sapien
ttctggtttcttggtggccccacaa

SEQ ID NO: 653714 - DNA, 25 bp, Homo sapien
tcttggtggccccacaagggatgta

SEQ ID NO: 653715 - DNA, 25 bp, Homo sapien
tgctctgcttcatcagaacctaggc

SEQ ID NO: 653716 - DNA, 25 bp, Homo sapien
gccccacaagggatgtacacaaggc

SEQ ID NO: 653717 - DNA, 25 bp, Homo sapien
tatctgaaatggttctgtagaagtg

SEQ ID NO: 653718 - DNA, 25 bp, Homo sapien
gaattcataagagagatgatatctg

SEQ ID NO: 653719 - DNA, 25 bp, Homo sapien
ccctgtttgttgttagaggtggcaa

SEQ ID NO: 653720 - DNA, 25 bp, Homo sapien
tggggaactgatccacaagactcct

SEQ ID NO: 653721 - DNA, 25 bp, Homo sapien
gggaactgatccacaagactccttg

SEQ ID NO: 653722 - DNA, 25 bp, Homo sapien
ggggaactgatccacaagactcctt

SEQ ID NO: 653723 - DNA, 25 bp, Homo sapien
gaggcttttaaacagtgtccttcca

SEQ ID NO: 653724 - DNA, 25 bp, Homo sapien
ggtgacttacgccttttgggagcca

SEQ ID NO: 653725 - DNA, 25 bp, Homo sapien
aacactctgaatcgtgcatgccctg

SEQ ID NO: 653726 - DNA, 25 bp, Homo sapien
ccacatgctctacttgcagaggctt

SEQ ID NO: 653727 - DNA, 25 bp, Homo sapien
tgcacgaactttcctcccaacaacg

SEQ ID NO: 653728 - DNA, 25 bp, Homo sapien
tgcccctagatttagaaaagtcagc

SEQ ID NO: 653729 - DNA, 25 bp, Homo sapien
caacaacgccgtatgcccctagatt

SEQ ID NO: 653730 - DNA, 25 bp, Homo sapien
ggactctcccacagcacttatcatg

SEQ ID NO: 653731 - DNA, 25 bp, Homo sapien
ccaatgccagagcacatgtagctgc

SEQ ID NO: 653732 - DNA, 25 bp, Homo sapien
taatcgcttgtagtgatggccagtc

SEQ ID NO: 653733 - DNA, 25 bp, Homo sapien
tagagaaccttatgctagcctgatt

SEQ ID NO: 653734 - DNA, 25 bp, Homo sapien
gatttctaccagagctaagcccaag

SEQ ID NO: 653735 - DNA, 25 bp, Homo sapien
tagggcccaagatggtacccaactc

SEQ ID NO: 653736 - DNA, 25 bp, Homo sapien
gggcccaagatggtacccaactctg

SEQ ID NO: 653737 - DNA, 25 bp, Homo sapien
tacccaactctggggtgactccttc

SEQ ID NO: 653738 - DNA, 25 bp, Homo sapien
tcccgttaacaggataaggcttctg

SEQ ID NO: 653739 - DNA, 25 bp, Homo sapien
tcttgtatcatgtcttctgctcctg

SEQ ID NO: 653740 - DNA, 25 bp, Homo sapien
tctgctcctgagaaatttgagaggg

SEQ ID NO: 653741 - DNA, 25 bp, Homo sapien
taggtgtcctggtgattcgcagcca

SEQ ID NO: 653742 - DNA, 25 bp, Homo sapien
ttatttgacccccatggcataggcc

SEQ ID NO: 653743 - DNA, 25 bp, Homo sapien
tgcttcttgagagtcataggtgtcc

SEQ ID NO: 653744 - DNA, 25 bp, Homo sapien
acccatgagcttttatgcttcttga

SEQ ID NO: 653745 - DNA, 25 bp, Homo sapien
cctgattccaattcctgcccctgca

SEQ ID NO: 653746 - DNA, 25 bp, Homo sapien
ctgattccaattcctgcccctgcat

SEQ ID NO: 653747 - DNA, 25 bp, Homo sapien
gtttcaacctgagccttgaaggccc

SEQ ID NO: 653748 - DNA, 25 bp, Homo sapien
tttcccctgacttgaggctcatcca

SEQ ID NO: 653749 - DNA, 25 bp, Homo sapien
ccaaaccagccacttgctgatgctc

SEQ ID NO: 653750 - DNA, 25 bp, Homo sapien
ttctggtagaagtttcaacctgagc

SEQ ID NO: 653751 - DNA, 25 bp, Homo sapien
tctgatcaacaagttccgtggaggt

SEQ ID NO: 653752 - DNA, 25 bp, Homo sapien
tggccaaggccgctgcattgaaagc

SEQ ID NO: 653753 - DNA, 25 bp, Homo sapien
caactggtgagcctccattggccaa

SEQ ID NO: 653754 - DNA, 25 bp, Homo sapien
gaggtcagccagagcaggatctaac

SEQ ID NO: 653755 - DNA, 25 bp, Homo sapien
catctctggtgaatcgtggacatta

SEQ ID NO: 653756 - DNA, 25 bp, Homo sapien
tagtggaggctcatcagtgtgaatc

SEQ ID NO: 653757 - DNA, 25 bp, Homo sapien
cattaatgacagttgcaagagctca

SEQ ID NO: 653758 - DNA, 25 bp, Homo sapien
ctaatggctgatcaccctgttctct

SEQ ID NO: 653759 - DNA, 25 bp, Homo sapien
tctgaatggaaactgcacgcaacat

SEQ ID NO: 653760 - DNA, 25 bp, Homo sapien
ttctgaatggaaactgcacgcaaca

SEQ ID NO: 653761 - DNA, 25 bp, Homo sapien
cttctgaatggaaactgcacgcaac

SEQ ID NO: 653762 - DNA, 25 bp, Homo sapien
gaagccttcttgcacatctaatagg

SEQ ID NO: 653763 - DNA, 25 bp, Homo sapien
gctaaagttgctaagtcacccacct

SEQ ID NO: 653764 - DNA, 25 bp, Homo sapien
ttaaaacccggatgtgacccatggc

SEQ ID NO: 653765 - DNA, 25 bp, Homo sapien
tatgtattactcacaacaaccgggt

SEQ ID NO: 653766 - DNA, 25 bp, Homo sapien
aatgtctcccggactactggcctgg

SEQ ID NO: 653767 - DNA, 25 bp, Homo sapien
tgttagatactttctggtgcctagg

SEQ ID NO: 653768 - DNA, 25 bp, Homo sapien
catgtactgactggaaacctgcaca

SEQ ID NO: 653769 - DNA, 25 bp, Homo sapien
caaacatgttcacaggtgctggaat

SEQ ID NO: 653770 - DNA, 25 bp, Homo sapien
aaatcgggcccataatgtcatcagc

SEQ ID NO: 653771 - DNA, 25 bp, Homo sapien
tgagcttgtggcttaaacgccgggc

SEQ ID NO: 653772 - DNA, 25 bp, Homo sapien
caactctgttgaaatcccgggtggg

SEQ ID NO: 653773 - DNA, 25 bp, Homo sapien
tgaattgagcaaacaccagggcttt

SEQ ID NO: 653774 - DNA, 25 bp, Homo sapien
ggctcccgggcggactcaagacttc

SEQ ID NO: 653775 - DNA, 25 bp, Homo sapien
accttaatttagagcgctgccccgg

SEQ ID NO: 653776 - DNA, 25 bp, Homo sapien
acccagcgctggaggtcgaccttaa

SEQ ID NO: 653777 - DNA, 25 bp, Homo sapien
gctctggcccggaaagagagtgaca

SEQ ID NO: 653778 - DNA, 25 bp, Homo sapien
gctttaagtatacttgggcctcgca

SEQ ID NO: 653779 - DNA, 25 bp, Homo sapien
tttggatccttggaggcggatacgc

SEQ ID NO: 653780 - DNA, 25 bp, Homo sapien
gccagttgggcatcgcggtatcttc

SEQ ID NO: 653781 - DNA, 25 bp, Homo sapien
ggctctccacggactcgattggaca

SEQ ID NO: 653782 - DNA, 25 bp, Homo sapien
ggcgcctgtgctgagagcggagaag

SEQ ID NO: 653783 - DNA, 25 bp, Homo sapien
ggaagccctgactcccggcttggcg

SEQ ID NO: 653784 - DNA, 25 bp, Homo sapien
agagcggagaaggacgtcgcgaccg

SEQ ID NO: 653785 - DNA, 25 bp, Homo sapien
ctggactcggtgctgaagccccagt

SEQ ID NO: 653786 - DNA, 25 bp, Homo sapien
ctggagggcgcattggtgtgcagag

SEQ ID NO: 653787 - DNA, 25 bp, Homo sapien
tggagggcgcattggtgtgcagagt

SEQ ID NO: 653788 - DNA, 25 bp, Homo sapien
ctcaacacgaaagcgccttgtggct

SEQ ID NO: 653789 - DNA, 25 bp, Homo sapien
gccttgtggctctaagcgcttcctt

SEQ ID NO: 653790 - DNA, 25 bp, Homo sapien
ttgtggctctaagcgcttccttggg

SEQ ID NO: 653791 - DNA, 25 bp, Homo sapien
tctttccctgctcaacacgaaagcg

SEQ ID NO: 653792 - DNA, 25 bp, Homo sapien
tccaaagtcaagaggttgaaccatc

SEQ ID NO: 653793 - DNA, 25 bp, Homo sapien
accatctcaaagttggcgggtggag

SEQ ID NO: 653794 - DNA, 25 bp, Homo sapien
gaggttgaaccatctcaaagttggc

SEQ ID NO: 653795 - DNA, 25 bp, Homo sapien
gcagggaactagatggctggatgcc

SEQ ID NO: 653796 - DNA, 25 bp, Homo sapien
aaagggtaattgtctgctgatggtg

SEQ ID NO: 653797 - DNA, 25 bp, Homo sapien
tatttctcaaataacagtgtctgtg

SEQ ID NO: 653798 - DNA, 25 bp, Homo sapien
tgtctgtgaggagaagtgaatcctc

SEQ ID NO: 653799 - DNA, 25 bp, Homo sapien
aggagaagtgaatcctctgaaaggg

SEQ ID NO: 653800 - DNA, 25 bp, Homo sapien
ttggcctaaatggtgttcggcagcg

SEQ ID NO: 653801 - DNA, 25 bp, Homo sapien
gggtgaaatcaatgtgcgccaactc

SEQ ID NO: 653802 - DNA, 25 bp, Homo sapien
tgaaatcaatgtgcgccaactcgcg

SEQ ID NO: 653803 - DNA, 25 bp, Homo sapien
ccgatcttggcctaaatggtgttcg

SEQ ID NO: 653804 - DNA, 25 bp, Homo sapien
aaggtagcaccgctggcgtcctggc

SEQ ID NO: 653805 - DNA, 25 bp, Homo sapien
ggcacgtcgagcgaacaatgccacc

SEQ ID NO: 653806 - DNA, 25 bp, Homo sapien
aggaaaaggtagcaccgctggcgtc

SEQ ID NO: 653807 - DNA, 25 bp, Homo sapien
ctggcgtcctggcacgtcgagcgaa

SEQ ID NO: 653808 - DNA, 25 bp, Homo sapien
tagacttgagtgatcttgtggacgg

SEQ ID NO: 653809 - DNA, 25 bp, Homo sapien
cactgatcgactcatcttgcaggtg

SEQ ID NO: 653810 - DNA, 25 bp, Homo sapien
tgcaggtgtccgaaatcattagact

SEQ ID NO: 653811 - DNA, 25 bp, Homo sapien
cagtcacgcagcagactgacgataa

SEQ ID NO: 653812 - DNA, 25 bp, Homo sapien
tcctgggaaatataatgcgtccacc

SEQ ID NO: 653813 - DNA, 25 bp, Homo sapien
gtccaccaggcgcacactattaatg

SEQ ID NO: 653814 - DNA, 25 bp, Homo sapien
ggcgcacactattaatgctgtaatt

SEQ ID NO: 653815 - DNA, 25 bp, Homo sapien
gaaatataatgcgtccaccaggcgc

SEQ ID NO: 653816 - DNA, 25 bp, Homo sapien
agaaatggtcatggctgcatatcca

SEQ ID NO: 653817 - DNA, 25 bp, Homo sapien
gaaatggtcatggctgcatatccaa

SEQ ID NO: 653818 - DNA, 25 bp, Homo sapien
accaggcgcgccgttctggcgctct

SEQ ID NO: 653819 - DNA, 25 bp, Homo sapien
ccatctttgtctaggaggaaggttc

SEQ ID NO: 653820 - DNA, 25 bp, Homo sapien
tggagcccgaagcaccggacaccag

SEQ ID NO: 653821 - DNA, 25 bp, Homo sapien
ggaaggttcggccactgcacctgga

SEQ ID NO: 653822 - DNA, 25 bp, Homo sapien
tgtgtcccgcaagtggtttctcgag

SEQ ID NO: 653823 - DNA, 25 bp, Homo sapien
gaataagaggcgactctccctgtgt

SEQ ID NO: 653824 - DNA, 25 bp, Homo sapien
gccctcctcgggctaaaagttcagc

SEQ ID NO: 653825 - DNA, 25 bp, Homo sapien
aaagttcagcccttcgacagagcca

SEQ ID NO: 653826 - DNA, 25 bp, Homo sapien
cttgggaaggcgcagacccaccgct

SEQ ID NO: 653827 - DNA, 25 bp, Homo sapien
tcgccccgcactgtgcacgggaaga

SEQ ID NO: 653828 - DNA, 25 bp, Homo sapien
ccagtccggttagctggtcggcgtc

SEQ ID NO: 653829 - DNA, 25 bp, Homo sapien
cagcccagtccggttagctggtcgg

SEQ ID NO: 653830 - DNA, 25 bp, Homo sapien
ccaccatgaaagtcgagctgtgcag

SEQ ID NO: 653831 - DNA, 25 bp, Homo sapien
cagcggatacaagatctactccgga

SEQ ID NO: 653832 - DNA, 25 bp, Homo sapien
gtttcagcggatacaagatctactc

SEQ ID NO: 653833 - DNA, 25 bp, Homo sapien
ccgtggagccgccaccatgaaagtc

SEQ ID NO: 653834 - DNA, 25 bp, Homo sapien
attcctttccaagagtaatcttcgg

SEQ ID NO: 653835 - DNA, 25 bp, Homo sapien
tctgcacaaacgtctgcttcccaag

SEQ ID NO: 653836 - DNA, 25 bp, Homo sapien
ttagagctgtctgcacaaacgtctg

SEQ ID NO: 653837 - DNA, 25 bp, Homo sapien
gcacaaacgtctgcttcccaagcaa

SEQ ID NO: 653838 - DNA, 25 bp, Homo sapien
gctgtctgcacaaacgtctgcttcc

SEQ ID NO: 653839 - DNA, 25 bp, Homo sapien
acttttccctctcgccaacgatact

SEQ ID NO: 653840 - DNA, 25 bp, Homo sapien
caacttttccctctcgccaacgata

SEQ ID NO: 653841 - DNA, 25 bp, Homo sapien
ttttccctctcgccaacgatactgg

SEQ ID NO: 653842 - DNA, 25 bp, Homo sapien
tccctctcgccaacgatactggcac

SEQ ID NO: 653843 - DNA, 25 bp, Homo sapien
tcgagtaaggggttggtccactgtc

SEQ ID NO: 653844 - DNA, 25 bp, Homo sapien
ttcagcacggattttcgagtaaggg

SEQ ID NO: 653845 - DNA, 25 bp, Homo sapien
ctggaacaatccttagattcagcac

SEQ ID NO: 653846 - DNA, 25 bp, Homo sapien
ccttagattcagcacggattttcga

SEQ ID NO: 653847 - DNA, 25 bp, Homo sapien
tggtgttttgtgtcgcttttgagtg

SEQ ID NO: 653848 - DNA, 25 bp, Homo sapien
tacttggtgttttgtgtcgcttttg

SEQ ID NO: 653849 - DNA, 25 bp, Homo sapien
cttggtgttttgtgtcgcttttgag

SEQ ID NO: 653850 - DNA, 25 bp, Homo sapien
tgtttagcatttgagggtttgtctt

SEQ ID NO: 653851 - DNA, 25 bp, Homo sapien
ctgtcgagtcccgactactacgaga

SEQ ID NO: 653852 - DNA, 25 bp, Homo sapien
agcatgagccggaccctcgcatcgg

SEQ ID NO: 653853 - DNA, 25 bp, Homo sapien
tgggccaactccagcacgggctgcg

SEQ ID NO: 653854 - DNA, 25 bp, Homo sapien
actactacgagaggctgggccaact

SEQ ID NO: 653855 - DNA, 25 bp, Homo sapien
catccaagtatgaaaccggcccaac

SEQ ID NO: 653856 - DNA, 25 bp, Homo sapien
agtatgaaaccggcccaaccctgct

SEQ ID NO: 653857 - DNA, 25 bp, Homo sapien
ccatccaagtatgaaaccggcccaa

SEQ ID NO: 653858 - DNA, 25 bp, Homo sapien
ctcccatccaagtatgaaaccggcc

SEQ ID NO: 653859 - DNA, 25 bp, Homo sapien
tactctgtcagggatggataggtgt

SEQ ID NO: 653860 - DNA, 25 bp, Homo sapien
gaactattatgctgtgaaatatatt

SEQ ID NO: 653861 - DNA, 25 bp, Homo sapien
tagaagcaaactgatcatactctgt

SEQ ID NO: 653862 - DNA, 25 bp, Homo sapien
gaggaccagggaatttcatcacaga

SEQ ID NO: 653863 - DNA, 25 bp, Homo sapien
catttcatgtggtgttcgagggcag

SEQ ID NO: 653864 - DNA, 25 bp, Homo sapien
ttcgagggcagatgacatttggact

SEQ ID NO: 653865 - DNA, 25 bp, Homo sapien
ccccatgggtctttcaggcactatt

SEQ ID NO: 653866 - DNA, 25 bp, Homo sapien
tctgagtgaagggtactccccattt

SEQ ID NO: 653867 - DNA, 25 bp, Homo sapien
agtattctgtggcaagtgtattatg

SEQ ID NO: 653868 - DNA, 25 bp, Homo sapien
tggggacatttggctagccagctgt

SEQ ID NO: 653869 - DNA, 25 bp, Homo sapien
gagaaaatcgtattcacagatagag

SEQ ID NO: 653870 - DNA, 25 bp, Homo sapien
acaagtgagaaaatcgtattcacag

SEQ ID NO: 653871 - DNA, 25 bp, Homo sapien
gtcacgatgaatacacacatatgct

SEQ ID NO: 653872 - DNA, 25 bp, Homo sapien
tttgtgccagcagtcccacttttgg

SEQ ID NO: 653873 - DNA, 25 bp, Homo sapien
aatctggtagtaacagtcacgatga

SEQ ID NO: 653874 - DNA, 25 bp, Homo sapien
agtcccacttttggtaatctgtgcc

SEQ ID NO: 653875 - DNA, 25 bp, Homo sapien
aatgtgacttaagaacttgcttaca

SEQ ID NO: 653876 - DNA, 25 bp, Homo sapien
tgacttaagaacttgcttacataga

SEQ ID NO: 653877 - DNA, 25 bp, Homo sapien
gacttaagaacttgcttacatagaa

SEQ ID NO: 653878 - DNA, 25 bp, Homo sapien
tgtgacttaagaacttgcttacata

SEQ ID NO: 653879 - DNA, 25 bp, Homo sapien
tgaaaatttggtctaacagcttcat

SEQ ID NO: 653880 - DNA, 25 bp, Homo sapien
gctgaaaatttggtctaacagcttc

SEQ ID NO: 653881 - DNA, 25 bp, Homo sapien
gaagctgaaaatttggtctaacagc

SEQ ID NO: 653882 - DNA, 25 bp, Homo sapien
agaagctgaaaatttggtctaacag

SEQ ID NO: 653883 - DNA, 25 bp, Homo sapien
caccctgggcaacatagaccacatc

SEQ ID NO: 653884 - DNA, 25 bp, Homo sapien
accctgggcaacatagaccacatct

SEQ ID NO: 653885 - DNA, 25 bp, Homo sapien
ccaccctgggcaacatagaccacat

SEQ ID NO: 653886 - DNA, 25 bp, Homo sapien
caatgtccttcaatagcagactgtt

SEQ ID NO: 653887 - DNA, 25 bp, Homo sapien
tcagggataatcactgcagcatgat

SEQ ID NO: 653888 - DNA, 25 bp, Homo sapien
ctgtgtgcagagagacatacactca

SEQ ID NO: 653889 - DNA, 25 bp, Homo sapien
gatggtgggaaacaaaccaatgtcc

SEQ ID NO: 653890 - DNA, 25 bp, Homo sapien
tccaggtcctttctgcaagaaactt

SEQ ID NO: 653891 - DNA, 25 bp, Homo sapien
aggatcatggaggtggaacttcctt

SEQ ID NO: 653892 - DNA, 25 bp, Homo sapien
ggagaacagctagaggactaaagga

SEQ ID NO: 653893 - DNA, 25 bp, Homo sapien
gaaacttagagttgctttctctggg

SEQ ID NO: 653894 - DNA, 25 bp, Homo sapien
cagagtctgctggcgcctgccttga

SEQ ID NO: 653895 - DNA, 25 bp, Homo sapien
tcatcttgctcacagggaaccaaag

SEQ ID NO: 653896 - DNA, 25 bp, Homo sapien
tgattggtaatcagttcatgtcgcc

SEQ ID NO: 653897 - DNA, 25 bp, Homo sapien
ttcatgtcgccacttgcagatcatc

SEQ ID NO: 653898 - DNA, 25 bp, Homo sapien
atcatcttgctcacagggaaccaaa

SEQ ID NO: 653899 - DNA, 25 bp, Homo sapien
tgtattatcgagcactcagccatga

SEQ ID NO: 653900 - DNA, 25 bp, Homo sapien
tcattgaatcatggtgattgcagct

SEQ ID NO: 653901 - DNA, 25 bp, Homo sapien
tttctagagaccattccactgggaa

SEQ ID NO: 653902 - DNA, 25 bp, Homo sapien
cataagtaatcttgtaggcaagacc

SEQ ID NO: 653903 - DNA, 25 bp, Homo sapien
ggcattttatttgtaaatatatgta

SEQ ID NO: 653904 - DNA, 25 bp, Homo sapien
atgaggcattttatttgtaaatata

SEQ ID NO: 653905 - DNA, 25 bp, Homo sapien
tatttgtaaatatatgtattacatc

SEQ ID NO: 653906 - DNA, 25 bp, Homo sapien
atttgtaaatatatgtattacatcc

SEQ ID NO: 653907 - DNA, 25 bp, Homo sapien
gcacgtcaaatctggagctgatcac

SEQ ID NO: 653908 - DNA, 25 bp, Homo sapien
cacgtcaaatctggagctgatcact

SEQ ID NO: 653909 - DNA, 25 bp, Homo sapien
gtacaatgaaaccaactggcaggat

SEQ ID NO: 653910 - DNA, 25 bp, Homo sapien
aaaccaactggcaggatggaagcag

SEQ ID NO: 653911 - DNA, 25 bp, Homo sapien
tgcctgtgaggttcacaacaatttc

SEQ ID NO: 653912 - DNA, 25 bp, Homo sapien
ctgtgaggttcacaacaatttccca

SEQ ID NO: 653913 - DNA, 25 bp, Homo sapien
tgaggttcacaacaatttcccagct

SEQ ID NO: 653914 - DNA, 25 bp, Homo sapien
tgtttagcctgcctgtgaggttcac

SEQ ID NO: 653915 - DNA, 25 bp, Homo sapien
caatgatttcaaattcgccagtgta

SEQ ID NO: 653916 - DNA, 25 bp, Homo sapien
atgatttcaaattcgccagtgtaac

SEQ ID NO: 653917 - DNA, 25 bp, Homo sapien
ggtcatcaatgatttcaaattcgcc

SEQ ID NO: 653918 - DNA, 25 bp, Homo sapien
tcatcaatgatttcaaattcgccag

SEQ ID NO: 653919 - DNA, 25 bp, Homo sapien
gcttcatcatcacaatgagaaaccg

SEQ ID NO: 653920 - DNA, 25 bp, Homo sapien
tcatcatcacaatgagaaaccggac

SEQ ID NO: 653921 - DNA, 25 bp, Homo sapien
ttcatcatcacaatgagaaaccgga

SEQ ID NO: 653922 - DNA, 25 bp, Homo sapien
atgcttcatcatcacaatgagaaac

SEQ ID NO: 653923 - DNA, 25 bp, Homo sapien
cacggcctaataagcacctggcgtt

SEQ ID NO: 653924 - DNA, 25 bp, Homo sapien
atctgccaggacattcatgcgcacc

SEQ ID NO: 653925 - DNA, 25 bp, Homo sapien
tgatggtcttgagagcatctgccag

SEQ ID NO: 653926 - DNA, 25 bp, Homo sapien
agcacggcctaataagcacctggcg

SEQ ID NO: 653927 - DNA, 25 bp, Homo sapien
cttgcaagtactgatctttttagtg

SEQ ID NO: 653928 - DNA, 25 bp, Homo sapien
caagtactgatctttttagtgtctt

SEQ ID NO: 653929 - DNA, 25 bp, Homo sapien
tgcaagtactgatctttttagtgtc

SEQ ID NO: 653930 - DNA, 25 bp, Homo sapien
ccttgcaagtactgatctttttagt

SEQ ID NO: 653931 - DNA, 25 bp, Homo sapien
gctgcatcttctaagtttcggtatg

SEQ ID NO: 653932 - DNA, 25 bp, Homo sapien
ttctatctactaactttgtgcttgg

SEQ ID NO: 653933 - DNA, 25 bp, Homo sapien
gttgatttattttgtgatccattag

SEQ ID NO: 653934 - DNA, 25 bp, Homo sapien
tcttatactggtcttgctgcatctt

SEQ ID NO: 653935 - DNA, 25 bp, Homo sapien
gggttcaacagcaaaccagcccaat

SEQ ID NO: 653936 - DNA, 25 bp, Homo sapien
cagtttaatacagggcaggttgagc

SEQ ID NO: 653937 - DNA, 25 bp, Homo sapien
cctatattgatcctctaagggttca

SEQ ID NO: 653938 - DNA, 25 bp, Homo sapien
tcagatttgggatacttatattcca

SEQ ID NO: 653939 - DNA, 25 bp, Homo sapien
ggtaaagagaaggagcgttgtttgc

SEQ ID NO: 653940 - DNA, 25 bp, Homo sapien
tcacactgtttccaggtaaagagaa

SEQ ID NO: 653941 - DNA, 25 bp, Homo sapien
gtggtcgcctcgctgtgctggcctt

SEQ ID NO: 653942 - DNA, 25 bp, Homo sapien
gcattgtgctcccttcaagtggccc

SEQ ID NO: 653943 - DNA, 25 bp, Homo sapien
atggagattgaggtagccacaaaaa

SEQ ID NO: 653944 - DNA, 25 bp, Homo sapien
tggagattgaggtagccacaaaaac

SEQ ID NO: 653945 - DNA, 25 bp, Homo sapien
agattgaggtagccacaaaaacaca

SEQ ID NO: 653946 - DNA, 25 bp, Homo sapien
gagattgaggtagccacaaaaacac

SEQ ID NO: 653947 - DNA, 25 bp, Homo sapien
agggaaaccagggctccaaggagca

SEQ ID NO: 653948 - DNA, 25 bp, Homo sapien
ggagcaggatcaggacggaaggtag

SEQ ID NO: 653949 - DNA, 25 bp, Homo sapien
aggatcaggacggaaggtagggcca

SEQ ID NO: 653950 - DNA, 25 bp, Homo sapien
gatcaggacggaaggtagggccaac

SEQ ID NO: 653951 - DNA, 25 bp, Homo sapien
aaaagacagaagttgagtttcctag

SEQ ID NO: 653952 - DNA, 25 bp, Homo sapien
cagaagttgagtttcctagccagtt

SEQ ID NO: 653953 - DNA, 25 bp, Homo sapien
gacagaagttgagtttcctagccag

SEQ ID NO: 653954 - DNA, 25 bp, Homo sapien
aagacagaagttgagtttcctagcc

SEQ ID NO: 653955 - DNA, 25 bp, Homo sapien
cttaatttcagtgttcccaatagcc

SEQ ID NO: 653956 - DNA, 25 bp, Homo sapien
ttaatttcagtgttcccaatagcct

SEQ ID NO: 653957 - DNA, 25 bp, Homo sapien
gctgattgatcacccagtaccaagg

SEQ ID NO: 653958 - DNA, 25 bp, Homo sapien
tgattttggcaggaacgcacataga

SEQ ID NO: 653959 - DNA, 25 bp, Homo sapien
tacttgtcattcagcaggttcctcc

SEQ ID NO: 653960 - DNA, 25 bp, Homo sapien
gaaaccctggactggtgtaacaaca

SEQ ID NO: 653961 - DNA, 25 bp, Homo sapien
tgttgtcaccattcctaaggatggc

SEQ ID NO: 653962 - DNA, 25 bp, Homo sapien
tgcagttgctattctcaccaggctt

SEQ ID NO: 653963 - DNA, 25 bp, Homo sapien
gctcttgttgagaagactcggcaga

SEQ ID NO: 653964 - DNA, 25 bp, Homo sapien
tcaagcattactgagcactggcatg

SEQ ID NO: 653965 - DNA, 25 bp, Homo sapien
caccatggagtgtcagccagtttcc

SEQ ID NO: 653966 - DNA, 25 bp, Homo sapien
gcaccatggagtgtcagccagtttc

SEQ ID NO: 653967 - DNA, 25 bp, Homo sapien
cagcaccatggagtgtcagccagtt

SEQ ID NO: 653968 - DNA, 25 bp, Homo sapien
agcaccatggagtgtcagccagttt

SEQ ID NO: 653969 - DNA, 25 bp, Homo sapien
cccaggtgagcgatgaaggactgtt

SEQ ID NO: 653970 - DNA, 25 bp, Homo sapien
gaagatctaggttcactgggacaca

SEQ ID NO: 653971 - DNA, 25 bp, Homo sapien
caggcctaccttgggctgcagatag

SEQ ID NO: 653972 - DNA, 25 bp, Homo sapien
tcctgtcagtgggtaggcaaccttt

SEQ ID NO: 653973 - DNA, 25 bp, Homo sapien
tctctcctcaccaactccatccttg

SEQ ID NO: 653974 - DNA, 25 bp, Homo sapien
gctgccaggctaaccctctgaaaaa

SEQ ID NO: 653975 - DNA, 25 bp, Homo sapien
gtcagtctcctgactggtctctggg

SEQ ID NO: 653976 - DNA, 25 bp, Homo sapien
ctctgccacctacagcacaaagtca

SEQ ID NO: 653977 - DNA, 25 bp, Homo sapien
tctcaccgttgattacaggctctct

SEQ ID NO: 653978 - DNA, 25 bp, Homo sapien
ttcctgattgtctgatggcctgccc

SEQ ID NO: 653979 - DNA, 25 bp, Homo sapien
ttagtgaagcccctgagactccagt

SEQ ID NO: 653980 - DNA, 25 bp, Homo sapien
taaaacctgcctggctcacgttcct

SEQ ID NO: 653981 - DNA, 25 bp, Homo sapien
cattggtgggacctcttaagggcag

SEQ ID NO: 653982 - DNA, 25 bp, Homo sapien
taagggcagctgttattctggaaat

SEQ ID NO: 653983 - DNA, 25 bp, Homo sapien
gagtgatgacaagataaaggcttcc

SEQ ID NO: 653984 - DNA, 25 bp, Homo sapien
tattctggaaattgagtgatgacaa

SEQ ID NO: 653985 - DNA, 25 bp, Homo sapien
gggtctgacctacaagaactgagaa

SEQ ID NO: 653986 - DNA, 25 bp, Homo sapien
ccaacagtgtggataagggtcagga

SEQ ID NO: 653987 - DNA, 25 bp, Homo sapien
tacacttcagagtagggctaagcct

SEQ ID NO: 653988 - DNA, 25 bp, Homo sapien
tgtgatacaacgacagacctaacct

SEQ ID NO: 653989 - DNA, 25 bp, Homo sapien
caggtggaatgtggaacgagattgc

SEQ ID NO: 653990 - DNA, 25 bp, Homo sapien
tggaatgtggaacgagattgcccag

SEQ ID NO: 653991 - DNA, 25 bp, Homo sapien
ggtggaatgtggaacgagattgccc

SEQ ID NO: 653992 - DNA, 25 bp, Homo sapien
ttcaggtggaatgtggaacgagatt

SEQ ID NO: 653993 - DNA, 25 bp, Homo sapien
taaaattgccgcatacacgcaaaca

SEQ ID NO: 653994 - DNA, 25 bp, Homo sapien
ctgatggatttaaaattgccgcata

SEQ ID NO: 653995 - DNA, 25 bp, Homo sapien
gatttgaacatcattaaagtcaaca

SEQ ID NO: 653996 - DNA, 25 bp, Homo sapien
gccgcatacacgcaaacaagttttt

SEQ ID NO: 653997 - DNA, 25 bp, Homo sapien
tactcaggagtggtcagtagatgca

SEQ ID NO: 653998 - DNA, 25 bp, Homo sapien
ggtctgcttagcctacaacatagtg

SEQ ID NO: 653999 - DNA, 25 bp, Homo sapien
tataggctctgtaatcacaatggca

SEQ ID NO: 654000 - DNA, 25 bp, Homo sapien
tcagggcttactggcttgacattgc

SEQ ID NO: 654001 - DNA, 25 bp, Homo sapien
gctgaatgggctagaatttgctgat

SEQ ID NO: 654002 - DNA, 25 bp, Homo sapien
ctgctgaatgggctagaatttgctg

SEQ ID NO: 654003 - DNA, 25 bp, Homo sapien
atgactggtcagtgcattttcccag

SEQ ID NO: 654004 - DNA, 25 bp, Homo sapien
tgatgactggtcagtgcattttccc

SEQ ID NO: 654005 - DNA, 25 bp, Homo sapien
gggttctagatagagcaagattaat

SEQ ID NO: 654006 - DNA, 25 bp, Homo sapien
agagtcagcttagatgattcttggg

SEQ ID NO: 654007 - DNA, 25 bp, Homo sapien
tacatttgaatatcacaaccgtaag

SEQ ID NO: 654008 - DNA, 25 bp, Homo sapien
ttttttcataatttgccagctcatg

SEQ ID NO: 654009 - DNA, 25 bp, Homo sapien
aggtaggccatgggtccaggtcagc

SEQ ID NO: 654010 - DNA, 25 bp, Homo sapien
ggtaggccatgggtccaggtcagcc

SEQ ID NO: 654011 - DNA, 25 bp, Homo sapien
gtaggccatgggtccaggtcagcca

SEQ ID NO: 654012 - DNA, 25 bp, Homo sapien
cctctccagctacctaaggaaatcg

SEQ ID NO: 654013 - DNA, 25 bp, Homo sapien
tccagctacctaaggaaatcgccac

SEQ ID NO: 654014 - DNA, 25 bp, Homo sapien
tctccagctacctaaggaaatcgcc

SEQ ID NO: 654015 - DNA, 25 bp, Homo sapien
tcctctccagctacctaaggaaatc

SEQ ID NO: 654016 - DNA, 25 bp, Homo sapien
acttgattgaagattgggatttaga

SEQ ID NO: 654017 - DNA, 25 bp, Homo sapien
ggcaaagtgcagaccatcttagtac

SEQ ID NO: 654018 - DNA, 25 bp, Homo sapien
agtgcatcctcttcagccacaaatt

SEQ ID NO: 654019 - DNA, 25 bp, Homo sapien
ttagaataagggcagttatctttct

SEQ ID NO: 654020 - DNA, 25 bp, Homo sapien
tggcactactaatactgttgctttg

SEQ ID NO: 654021 - DNA, 25 bp, Homo sapien
cattgcagctactttgatctctaag

SEQ ID NO: 654022 - DNA, 25 bp, Homo sapien
actaatactgttgctttgtccatca

SEQ ID NO: 654023 - DNA, 25 bp, Homo sapien
gtccatcattgcagctactttgatc

SEQ ID NO: 654024 - DNA, 25 bp, Homo sapien
cacttagtcccatgaggacatccac

SEQ ID NO: 654025 - DNA, 25 bp, Homo sapien
gagaaaaatccgaaacagctgctga

SEQ ID NO: 654026 - DNA, 25 bp, Homo sapien
tagtcccatgaggacatccacagag

SEQ ID NO: 654027 - DNA, 25 bp, Homo sapien
gtttgatgatacttttccaatttcc

SEQ ID NO: 654028 - DNA, 25 bp, Homo sapien
tgagagagataatcggacactagat

SEQ ID NO: 654029 - DNA, 25 bp, Homo sapien
aagcgggcatgctcacagggactgc

SEQ ID NO: 654030 - DNA, 25 bp, Homo sapien
acagacaggaccacacgggtgccat

SEQ ID NO: 654031 - DNA, 25 bp, Homo sapien
ctcatgtgagtcctgaagcgggcat

SEQ ID NO: 654032 - DNA, 25 bp, Homo sapien
cagccctctgggatgagtctgatga

SEQ ID NO: 654033 - DNA, 25 bp, Homo sapien
aaattgaggctgctttacgccccag

SEQ ID NO: 654034 - DNA, 25 bp, Homo sapien
taaccagtccttccgtgctgtgctg

SEQ ID NO: 654035 - DNA, 25 bp, Homo sapien
tatgactaacgtgctgtgacattgg

SEQ ID NO: 654036 - DNA, 25 bp, Homo sapien
tgtatagtaattccatgctgtgcct

SEQ ID NO: 654037 - DNA, 25 bp, Homo sapien
cactgtttggcatattggcttcttc

SEQ ID NO: 654038 - DNA, 25 bp, Homo sapien
catacacacctggtgtgctcactgt

SEQ ID NO: 654039 - DNA, 25 bp, Homo sapien
gggtagagatgcatcactctgcagg

SEQ ID NO: 654040 - DNA, 25 bp, Homo sapien
tccccaaaaggatgttctgtggggc

SEQ ID NO: 654041 - DNA, 25 bp, Homo sapien
cccaaaaggatgttctgtggggctt

SEQ ID NO: 654042 - DNA, 25 bp, Homo sapien
tctccccaaaaggatgttctgtggg

SEQ ID NO: 654043 - DNA, 25 bp, Homo sapien
ccccaaaaggatgttctgtggggct

SEQ ID NO: 654044 - DNA, 25 bp, Homo sapien
gagacataatcaggcgaagaaccaa

SEQ ID NO: 654045 - DNA, 25 bp, Homo sapien
gaagaaccaatatcccaagaagatg

SEQ ID NO: 654046 - DNA, 25 bp, Homo sapien
taatcaggcgaagaaccaatatccc

SEQ ID NO: 654047 - DNA, 25 bp, Homo sapien
tgtcagatgagacataatcaggcga

SEQ ID NO: 654048 - DNA, 25 bp, Homo sapien
tcttcttggtgatttctcctgcagg

SEQ ID NO: 654049 - DNA, 25 bp, Homo sapien
tggtgatttctcctgcaggtcctgg

SEQ ID NO: 654050 - DNA, 25 bp, Homo sapien
ctcttcttggtgatttctcctgcag

SEQ ID NO: 654051 - DNA, 25 bp, Homo sapien
atttctcctgcaggtcctgggtcac

SEQ ID NO: 654052 - DNA, 25 bp, Homo sapien
tgaagcaggaacagtcccagtcccc

SEQ ID NO: 654053 - DNA, 25 bp, Homo sapien
gcaaacctgggagtggccaagacct

SEQ ID NO: 654054 - DNA, 25 bp, Homo sapien
ccatggtagaagatgcttccctttc

SEQ ID NO: 654055 - DNA, 25 bp, Homo sapien
aggaacagtcccagtccccatggta

SEQ ID NO: 654056 - DNA, 25 bp, Homo sapien
gcttcgattctaccctagattgaga

SEQ ID NO: 654057 - DNA, 25 bp, Homo sapien
gatgcttcgattctaccctagattg

SEQ ID NO: 654058 - DNA, 25 bp, Homo sapien
gattctaccctagattgagacgggt

SEQ ID NO: 654059 - DNA, 25 bp, Homo sapien
ttggatgcttcgattctaccctaga

SEQ ID NO: 654060 - DNA, 25 bp, Homo sapien
ttgtaaaggaatccctggcggcgac

SEQ ID NO: 654061 - DNA, 25 bp, Homo sapien
tcatagtcaactgcgtggaagagaa

SEQ ID NO: 654062 - DNA, 25 bp, Homo sapien
tgcacggattcggaggccagctttt

SEQ ID NO: 654063 - DNA, 25 bp, Homo sapien
tgagcaatgcatgccaggtcagctg

SEQ ID NO: 654064 - DNA, 25 bp, Homo sapien
cctttcctctaagttgatctgttta

SEQ ID NO: 654065 - DNA, 25 bp, Homo sapien
tgtttgtgaccatctagctctagct

SEQ ID NO: 654066 - DNA, 25 bp, Homo sapien
cacttgcatctcacaagtatatgga

SEQ ID NO: 654067 - DNA, 25 bp, Homo sapien
atatggatgttatatgagcttattc

SEQ ID NO: 654068 - DNA, 25 bp, Homo sapien
ggagagatccataaggtccacccag

SEQ ID NO: 654069 - DNA, 25 bp, Homo sapien
tgtgcgtgactaccacccttagaga

SEQ ID NO: 654070 - DNA, 25 bp, Homo sapien
tgttcctgaagtcatgccatgtcct

SEQ ID NO: 654071 - DNA, 25 bp, Homo sapien
ccttcagcatgattggacaccaggg

SEQ ID NO: 654072 - DNA, 25 bp, Homo sapien
tagcaagaacatggatccttaagga

SEQ ID NO: 654073 - DNA, 25 bp, Homo sapien
tagtcatgtatacagtgatagcaag

SEQ ID NO: 654074 - DNA, 25 bp, Homo sapien
ggtttagtaaagtataagacatcaa

SEQ ID NO: 654075 - DNA, 25 bp, Homo sapien
ctataggtttatgtgttggaattac

SEQ ID NO: 654076 - DNA, 25 bp, Homo sapien
tgctacctacaatatagccagggac

SEQ ID NO: 654077 - DNA, 25 bp, Homo sapien
cacttagttgcctgaaagacaaagg

SEQ ID NO: 654078 - DNA, 25 bp, Homo sapien
gattcaaattgtatctcaatgctac

SEQ ID NO: 654079 - DNA, 25 bp, Homo sapien
tcagatatggtagatatggatcgtc

SEQ ID NO: 654080 - DNA, 25 bp, Homo sapien
tatggacttgtgttcagtgaagcac

SEQ ID NO: 654081 - DNA, 25 bp, Homo sapien
cataccatgtacaacaggagagtct

SEQ ID NO: 654082 - DNA, 25 bp, Homo sapien
tataggtcttactctttcagggccc

SEQ ID NO: 654083 - DNA, 25 bp, Homo sapien
ggctaacagctgcttcccgtaagat

SEQ ID NO: 654084 - DNA, 25 bp, Homo sapien
caagaattaggtttgaactcgagct

SEQ ID NO: 654085 - DNA, 25 bp, Homo sapien
ttaggtttgaactcgagctggaacc

SEQ ID NO: 654086 - DNA, 25 bp, Homo sapien
tgaactcgagctggaacctcagcaa

SEQ ID NO: 654087 - DNA, 25 bp, Homo sapien
gtttgaactcgagctggaacctcag

SEQ ID NO: 654088 - DNA, 25 bp, Homo sapien
ttgctttaatattcaactgaagcac

SEQ ID NO: 654089 - DNA, 25 bp, Homo sapien
aactgaagcacgcttgttaaactta

SEQ ID NO: 654090 - DNA, 25 bp, Homo sapien
taatattcaactgaagcacgcttgt

SEQ ID NO: 654091 - DNA, 25 bp, Homo sapien
ctgaagcacgcttgttaaacttagt

SEQ ID NO: 654092 - DNA, 25 bp, Homo sapien
gaacttctaggaggagaaaatcacc

SEQ ID NO: 654093 - DNA, 25 bp, Homo sapien
tgctatgtgtatgatccaccttgag

SEQ ID NO: 654094 - DNA, 25 bp, Homo sapien
tcaaagcctcgtggcataatgttac

SEQ ID NO: 654095 - DNA, 25 bp, Homo sapien
ctgtagttaagaatgccgtgtgaac

SEQ ID NO: 654096 - DNA, 25 bp, Homo sapien
cagcaagaggttcacagcctgctcc

SEQ ID NO: 654097 - DNA, 25 bp, Homo sapien
tcgcagtttacacgcgcgagtcggt

SEQ ID NO: 654098 - DNA, 25 bp, Homo sapien
gagaccggttcgttttgaatcgcag

SEQ ID NO: 654099 - DNA, 25 bp, Homo sapien
tcggtttccgggctgtcgctgtccc

SEQ ID NO: 654100 - DNA, 25 bp, Homo sapien
cacgtcctgccatagagcaggttgg

SEQ ID NO: 654101 - DNA, 25 bp, Homo sapien
agcaggttggcgcccaggacgccgc

SEQ ID NO: 654102 - DNA, 25 bp, Homo sapien
cgggtgggctgggcgacagctcctc

SEQ ID NO: 654103 - DNA, 25 bp, Homo sapien
gcgggtgggctgggcgacagctcct

SEQ ID NO: 654104 - DNA, 25 bp, Homo sapien
cgcgggtgggctgggcgacagctcc

SEQ ID NO: 654105 - DNA, 25 bp, Homo sapien
gcgccgttctggcacggcttgccgt

SEQ ID NO: 654106 - DNA, 25 bp, Homo sapien
cacggcttgccgtccttgaccagca

SEQ ID NO: 654107 - DNA, 25 bp, Homo sapien
caggcaccgccacgcggcgcgggga

SEQ ID NO: 654108 - DNA, 25 bp, Homo sapien
gggggtgggcgtgctggcgccgttc

SEQ ID NO: 654109 - DNA, 25 bp, Homo sapien
atgccggtcagcgaccccatgccgg

SEQ ID NO: 654110 - DNA, 25 bp, Homo sapien
ttccttcgcggagcggctgccgccg

SEQ ID NO: 654111 - DNA, 25 bp, Homo sapien
acttggcggcgtccgcgatgccggt

SEQ ID NO: 654112 - DNA, 25 bp, Homo sapien
gtgcagcgggcccagcgacttggcg

SEQ ID NO: 654113 - DNA, 25 bp, Homo sapien
agagtcccaagggggaaggcgagtg

SEQ ID NO: 654114 - DNA, 25 bp, Homo sapien
tgccgtccgtgtaggcgggcagctc

SEQ ID NO: 654115 - DNA, 25 bp, Homo sapien
gccccgcatgccgtccgtgtaggcg

SEQ ID NO: 654116 - DNA, 25 bp, Homo sapien
gttggcgccgtaccagccggtggcc

SEQ ID NO: 654117 - DNA, 25 bp, Homo sapien
gagtagcgtgggtccgggttggcgc

SEQ ID NO: 654118 - DNA, 25 bp, Homo sapien
ccaggccgccgttgcagtagctgcc

SEQ ID NO: 654119 - DNA, 25 bp, Homo sapien
gcccaggccgccgttgcagtagctg

SEQ ID NO: 654120 - DNA, 25 bp, Homo sapien
caggccgccgttgcagtagctgccc

SEQ ID NO: 654121 - DNA, 25 bp, Homo sapien
cccaggccgccgttgcagtagctgc

SEQ ID NO: 654122 - DNA, 25 bp, Homo sapien
cggccgccgcgttgtgacccgccat

SEQ ID NO: 654123 - DNA, 25 bp, Homo sapien
cgcggccgccgcgttgtgacccgcc

SEQ ID NO: 654124 - DNA, 25 bp, Homo sapien
gcggccgccgcgttgtgacccgcca

SEQ ID NO: 654125 - DNA, 25 bp, Homo sapien
ccgcggccgccgcgttgtgacccgc

SEQ ID NO: 654126 - DNA, 25 bp, Homo sapien
tgagaaggctgcatgcccgccacgg

SEQ ID NO: 654127 - DNA, 25 bp, Homo sapien
atgtcggacacggagaagggcgtcg

SEQ ID NO: 654128 - DNA, 25 bp, Homo sapien
tccatggcgccgctgaacttcttgt

SEQ ID NO: 654129 - DNA, 25 bp, Homo sapien
aagggcgtcgtgtgctttgggctca

SEQ ID NO: 654130 - DNA, 25 bp, Homo sapien
cctgcttagccagacagattagcca

SEQ ID NO: 654131 - DNA, 25 bp, Homo sapien
tgcttagccagacagattagccaaa

SEQ ID NO: 654132 - DNA, 25 bp, Homo sapien
ttcaaccaagcacgaaggggggaca

SEQ ID NO: 654133 - DNA, 25 bp, Homo sapien
accaagcacgaaggggggacacaca

SEQ ID NO: 654134 - DNA, 25 bp, Homo sapien
tgtcgggagtagagatagagcacca

SEQ ID NO: 654135 - DNA, 25 bp, Homo sapien
agattttgtctctattggcagtggt

SEQ ID NO: 654136 - DNA, 25 bp, Homo sapien
tgaattagtcactcctgggcatagc

SEQ ID NO: 654137 - DNA, 25 bp, Homo sapien
tagagcaccaaccactaaaaactgt

SEQ ID NO: 654138 - DNA, 25 bp, Homo sapien
cattcggcggctttcttcggctttg

SEQ ID NO: 654139 - DNA, 25 bp, Homo sapien
tctctctttaggcagtagttactgc

SEQ ID NO: 654140 - DNA, 25 bp, Homo sapien
aaaccattccatcattgtcagtaat

SEQ ID NO: 654141 - DNA, 25 bp, Homo sapien
caaagctcgggtaaactgtggctat

SEQ ID NO: 654142 - DNA, 25 bp, Homo sapien
cattgtcagtaatcttattctctct

SEQ ID NO: 654143 - DNA, 25 bp, Homo sapien
tttccccacactccatgcagttggg

SEQ ID NO: 654144 - DNA, 25 bp, Homo sapien
tcaggggagaaagaatgccagctgc

SEQ ID NO: 654145 - DNA, 25 bp, Homo sapien
aacatcattttccaatcctgtgtat

SEQ ID NO: 654146 - DNA, 25 bp, Homo sapien
catcattttccaatcctgtgtattc

SEQ ID NO: 654147 - DNA, 25 bp, Homo sapien
ctgaagcccacaatggggacaggag

SEQ ID NO: 654148 - DNA, 25 bp, Homo sapien
tgtgttggggaattaatttacatga

SEQ ID NO: 654149 - DNA, 25 bp, Homo sapien
ttaatttacatgaaacattgcaggt

SEQ ID NO: 654150 - DNA, 25 bp, Homo sapien
atttacatgaaacattgcaggtcat

SEQ ID NO: 654151 - DNA, 25 bp, Homo sapien
taatttacatgaaacattgcaggtc

SEQ ID NO: 654152 - DNA, 25 bp, Homo sapien
gaatctggaggttccttgggaatag

SEQ ID NO: 654153 - DNA, 25 bp, Homo sapien
gatggaaagacttctgcaccttggc

SEQ ID NO: 654154 - DNA, 25 bp, Homo sapien
tggaaagacttctgcaccttggccc

SEQ ID NO: 654155 - DNA, 25 bp, Homo sapien
tcccatactacctttgttccgagaa

SEQ ID NO: 654156 - DNA, 25 bp, Homo sapien
taacactgggatctcttttgtggct

SEQ ID NO: 654157 - DNA, 25 bp, Homo sapien
gataacactgggatctcttttgtgg

SEQ ID NO: 654158 - DNA, 25 bp, Homo sapien
aatgataacactgggatctcttttg

SEQ ID NO: 654159 - DNA, 25 bp, Homo sapien
cattaatgataacactgggatctct

SEQ ID NO: 654160 - DNA, 25 bp, Homo sapien
gctgggacaacacttgtgaagtctt

SEQ ID NO: 654161 - DNA, 25 bp, Homo sapien
ggacaacacttgtgaagtctttttc

SEQ ID NO: 654162 - DNA, 25 bp, Homo sapien
gagctgggacaacacttgtgaagtc

SEQ ID NO: 654163 - DNA, 25 bp, Homo sapien
aaagagctgggacaacacttgtgaa

SEQ ID NO: 654164 - DNA, 25 bp, Homo sapien
cagatcaaacgagtttgggtgcatt

SEQ ID NO: 654165 - DNA, 25 bp, Homo sapien
ttcccagatcaaacgagtttgggtg

SEQ ID NO: 654166 - DNA, 25 bp, Homo sapien
gcttcccagatcaaacgagtttggg

SEQ ID NO: 654167 - DNA, 25 bp, Homo sapien
cccagatcaaacgagtttgggtgca

SEQ ID NO: 654168 - DNA, 25 bp, Homo sapien
gtccttagctggcaaaattaaagcc

SEQ ID NO: 654169 - DNA, 25 bp, Homo sapien
gaaccacagcctatgtaaaagccaa

SEQ ID NO: 654170 - DNA, 25 bp, Homo sapien
tgcttaaatctcagagcttaggaac

SEQ ID NO: 654171 - DNA, 25 bp, Homo sapien
aactcagtcttacatcaagtcagtg

SEQ ID NO: 654172 - DNA, 25 bp, Homo sapien
cacatgtgtgagcattattggtgca

SEQ ID NO: 654173 - DNA, 25 bp, Homo sapien
tccattggttcaggatttgcaggcc

SEQ ID NO: 654174 - DNA, 25 bp, Homo sapien
cattggttcaggatttgcaggcctc

SEQ ID NO: 654175 - DNA, 25 bp, Homo sapien
tatccattggttcaggatttgcagg

SEQ ID NO: 654176 - DNA, 25 bp, Homo sapien
attggttcaggatttgcaggcctcc

SEQ ID NO: 654177 - DNA, 25 bp, Homo sapien
ctgccagatgagaggttcagaattg

SEQ ID NO: 654178 - DNA, 25 bp, Homo sapien
tacttcagaattaagacttcagatt

SEQ ID NO: 654179 - DNA, 25 bp, Homo sapien
cttcagaattaagacttcagatttc

SEQ ID NO: 654180 - DNA, 25 bp, Homo sapien
tcagaattaagacttcagatttcac

SEQ ID NO: 654181 - DNA, 25 bp, Homo sapien
ttacttcagaattaagacttcagat

SEQ ID NO: 654182 - DNA, 25 bp, Homo sapien
gcctcttatattttagggtggaaga

SEQ ID NO: 654183 - DNA, 25 bp, Homo sapien
gtagacttgaccctttcacaggaag

SEQ ID NO: 654184 - DNA, 25 bp, Homo sapien
aaatcagggccatcgttattttcct

SEQ ID NO: 654185 - DNA, 25 bp, Homo sapien
tcctgttttgagcaacacttttctc

SEQ ID NO: 654186 - DNA, 25 bp, Homo sapien
cttgggtaaacaacccacatcacac

SEQ ID NO: 654187 - DNA, 25 bp, Homo sapien
cgcaggggctctgacacagagagca

SEQ ID NO: 654188 - DNA, 25 bp, Homo sapien
gacacagagagcagtcctctgcctt

SEQ ID NO: 654189 - DNA, 25 bp, Homo sapien
tgaccgcaggggctctgacacagag

SEQ ID NO: 654190 - DNA, 25 bp, Homo sapien
tctgacacagagagcagtcctctgc

SEQ ID NO: 654191 - DNA, 25 bp, Homo sapien
cctgcgatgccctgtgaattaggaa

SEQ ID NO: 654192 - DNA, 25 bp, Homo sapien
tgacttcagagcctagcctgggcct

SEQ ID NO: 654193 - DNA, 25 bp, Homo sapien
caccgcaaatatccatggacagtgg

SEQ ID NO: 654194 - DNA, 25 bp, Homo sapien
tctttgctacataagccactggcca

SEQ ID NO: 654195 - DNA, 25 bp, Homo sapien
tccctggagctcatgagaaatgcag

SEQ ID NO: 654196 - DNA, 25 bp, Homo sapien
gaatgagcacaactcacctgagtag

SEQ ID NO: 654197 - DNA, 25 bp, Homo sapien
tgtggcagctacctactgacagtgc

SEQ ID NO: 654198 - DNA, 25 bp, Homo sapien
aggccatctctagggtgacacctgg

SEQ ID NO: 654199 - DNA, 25 bp, Homo sapien
tagacgtggacattcctaatctgcc

SEQ ID NO: 654200 - DNA, 25 bp, Homo sapien
ttagtgtacaaagacccaaggcgcc

SEQ ID NO: 654201 - DNA, 25 bp, Homo sapien
gactttacattctgggagtccacag

SEQ ID NO: 654202 - DNA, 25 bp, Homo sapien
gaaacggtgatccatctgcagaagc

SEQ ID NO: 654203 - DNA, 25 bp, Homo sapien
tcacaagcacgcttcttcagagtgc

SEQ ID NO: 654204 - DNA, 25 bp, Homo sapien
ggcgctcacaagcacgcttcttcag

SEQ ID NO: 654205 - DNA, 25 bp, Homo sapien
tgggaagaacaggatcgtccacaat

SEQ ID NO: 654206 - DNA, 25 bp, Homo sapien
tggacatcctggatcgtcccgcggc

SEQ ID NO: 654207 - DNA, 25 bp, Homo sapien
tgcccctgtgcaatctgcctgttct

SEQ ID NO: 654208 - DNA, 25 bp, Homo sapien
tgtttcgttccatcctgtctctagg

SEQ ID NO: 654209 - DNA, 25 bp, Homo sapien
gaccaagagcgtatgctgagcagga

SEQ ID NO: 654210 - DNA, 25 bp, Homo sapien
tgttcttcgggatgccagtcagcag

SEQ ID NO: 654211 - DNA, 25 bp, Homo sapien
ccctgccctgtggagaagtcaccta

SEQ ID NO: 654212 - DNA, 25 bp, Homo sapien
tgtacatacaggcttccccgaggat

SEQ ID NO: 654213 - DNA, 25 bp, Homo sapien
taagatcgggtgcttaacttctctg

SEQ ID NO: 654214 - DNA, 25 bp, Homo sapien
agtcacctaactgccttctgcagag

SEQ ID NO: 654215 - DNA, 25 bp, Homo sapien
gaagccttttcttatccaaccgcgc

SEQ ID NO: 654216 - DNA, 25 bp, Homo sapien
tctcgagtcccgcaggtgtctgagc

SEQ ID NO: 654217 - DNA, 25 bp, Homo sapien
aatgcagccctggtgtagaggacac

SEQ ID NO: 654218 - DNA, 25 bp, Homo sapien
ggacacctcgcggagacatctcgag

SEQ ID NO: 654219 - DNA, 25 bp, Homo sapien
cttccaggcgacgaacggcaggagc

SEQ ID NO: 654220 - DNA, 25 bp, Homo sapien
tggcgtctggactgtgcgcctgccc

SEQ ID NO: 654221 - DNA, 25 bp, Homo sapien
tctgggtcggcgaggcgtctctccc

SEQ ID NO: 654222 - DNA, 25 bp, Homo sapien
tgagatcgcggagacagcgcgccct

SEQ ID NO: 654223 - DNA, 25 bp, Homo sapien
acccgcgcgcagagacgctcgggaa

SEQ ID NO: 654224 - DNA, 25 bp, Homo sapien
gagtccgctgatgcgcagctgcctc

SEQ ID NO: 654225 - DNA, 25 bp, Homo sapien
cggcgctgaggcctattcgcctctt

SEQ ID NO: 654226 - DNA, 25 bp, Homo sapien
cacatttccccgcttgctcggatgg

SEQ ID NO: 654227 - DNA, 25 bp, Homo sapien
gagacttctgcctgactccgggatt

SEQ ID NO: 654228 - DNA, 25 bp, Homo sapien
agcccgtggatgacaaagggaccca

SEQ ID NO: 654229 - DNA, 25 bp, Homo sapien
tatggaatccagcatggagcccgtg

SEQ ID NO: 654230 - DNA, 25 bp, Homo sapien
caatacagggtttgaaagccggaca

SEQ ID NO: 654231 - DNA, 25 bp, Homo sapien
tacttcctagcaatccacccagttc

SEQ ID NO: 654232 - DNA, 25 bp, Homo sapien
caatccacccagttccacgctcaag

SEQ ID NO: 654233 - DNA, 25 bp, Homo sapien
ttcctagcaatccacccagttccac

SEQ ID NO: 654234 - DNA, 25 bp, Homo sapien
cctctacttcctagcaatccaccca

SEQ ID NO: 654235 - DNA, 25 bp, Homo sapien
ctggttcggaccgccgaacgctgga

SEQ ID NO: 654236 - DNA, 25 bp, Homo sapien
tcggaccgccgaacgctggagggaa

SEQ ID NO: 654237 - DNA, 25 bp, Homo sapien
ccctggttcggaccgccgaacgctg

SEQ ID NO: 654238 - DNA, 25 bp, Homo sapien
gcacaccctggttcggaccgccgaa

SEQ ID NO: 654239 - DNA, 25 bp, Homo sapien
gaagacggctgacaatatcgctact

SEQ ID NO: 654240 - DNA, 25 bp, Homo sapien
gaaaagcgaaatctgccaccagttg

SEQ ID NO: 654241 - DNA, 25 bp, Homo sapien
aaaatcgaaagctttctgcgcccgg

SEQ ID NO: 654242 - DNA, 25 bp, Homo sapien
tctccacttgctttagaagacggct

SEQ ID NO: 654243 - DNA, 25 bp, Homo sapien
agaggcaaagaagcgaagctgcgca

SEQ ID NO: 654244 - DNA, 25 bp, Homo sapien
cgacattaacgctgggacggtttgg

SEQ ID NO: 654245 - DNA, 25 bp, Homo sapien
tctcgttttcaagtgacgacattaa

SEQ ID NO: 654246 - DNA, 25 bp, Homo sapien
caaagaagcgaagctgcgcaaacat

SEQ ID NO: 654247 - DNA, 25 bp, Homo sapien
tagtggagccgagagtcaactcgac

SEQ ID NO: 654248 - DNA, 25 bp, Homo sapien
taataaccaccataaggaccgaggc

SEQ ID NO: 654249 - DNA, 25 bp, Homo sapien
taaacacggcgtagagttcagccct

SEQ ID NO: 654250 - DNA, 25 bp, Homo sapien
gccactccaaggagacgcaggcaac

SEQ ID NO: 654251 - DNA, 25 bp, Homo sapien
tcctgggctttgagcgcgtgacatg

SEQ ID NO: 654252 - DNA, 25 bp, Homo sapien
catggtttgccgtccctgaccaaga

SEQ ID NO: 654253 - DNA, 25 bp, Homo sapien
tcattgtccggtgactcgtcggccg

SEQ ID NO: 654254 - DNA, 25 bp, Homo sapien
tactgggcgttgtactgcatgtgct

SEQ ID NO: 654255 - DNA, 25 bp, Homo sapien
cgggttgtcgctgctgtcgtagaag

SEQ ID NO: 654256 - DNA, 25 bp, Homo sapien
tactgaaggccctcggtgctggcca

SEQ ID NO: 654257 - DNA, 25 bp, Homo sapien
ccagccagcgcgtgtacgggttgtc

SEQ ID NO: 654258 - DNA, 25 bp, Homo sapien
agagccctcctcatcgttggtgtcc

SEQ ID NO: 654259 - DNA, 25 bp, Homo sapien
cacgcggaaatggacgcaggaagcc

SEQ ID NO: 654260 - DNA, 25 bp, Homo sapien
tcacttggtcaattcgtggcgctcc

SEQ ID NO: 654261 - DNA, 25 bp, Homo sapien
ctgtcttctttgaaagcacgcggaa

SEQ ID NO: 654262 - DNA, 25 bp, Homo sapien
cccaaaatttatgtcgcaaagttgt

SEQ ID NO: 654263 - DNA, 25 bp, Homo sapien
caccgcgtcgctcgcgagtccacac

SEQ ID NO: 654264 - DNA, 25 bp, Homo sapien
aagggccaccgcgtcgctcgcgagt

SEQ ID NO: 654265 - DNA, 25 bp, Homo sapien
gccaccgcgtcgctcgcgagtccac

SEQ ID NO: 654266 - DNA, 25 bp, Homo sapien
atacaaagggccaccgcgtcgctcg

SEQ ID NO: 654267 - DNA, 25 bp, Homo sapien
ggttcccgcgtccatttccagagcg

SEQ ID NO: 654268 - DNA, 25 bp, Homo sapien
gaccgctgggaggtccgtaattgaa

SEQ ID NO: 654269 - DNA, 25 bp, Homo sapien
tgcaattgaaaaggcgctgggagac

SEQ ID NO: 654270 - DNA, 25 bp, Homo sapien
acttctcgtccgtgtggttcccgcg

SEQ ID NO: 654271 - DNA, 25 bp, Homo sapien
cagcgtctgcctgcaccagtttcag

SEQ ID NO: 654272 - DNA, 25 bp, Homo sapien
tcagcgtctgcctgcaccagtttca

SEQ ID NO: 654273 - DNA, 25 bp, Homo sapien
gcaagatgcctcgttctgctgcatg

SEQ ID NO: 654274 - DNA, 25 bp, Homo sapien
aattctttccaggtaccgtcttgca

SEQ ID NO: 654275 - DNA, 25 bp, Homo sapien
tgcacccaagcgagttcaatgtcct

SEQ ID NO: 654276 - DNA, 25 bp, Homo sapien
tctggagacctcgtaggcactctgc

SEQ ID NO: 654277 - DNA, 25 bp, Homo sapien
ccctcaactcgatctttattatcag

SEQ ID NO: 654278 - DNA, 25 bp, Homo sapien
tgaacagctggacccctcaactcga

SEQ ID NO: 654279 - DNA, 25 bp, Homo sapien
agctggacccctcaactcgatcttt

SEQ ID NO: 654280 - DNA, 25 bp, Homo sapien
ttattatcagcattggggctccaga

SEQ ID NO: 654281 - DNA, 25 bp, Homo sapien
tccactgggcgccatctccaaatta

SEQ ID NO: 654282 - DNA, 25 bp, Homo sapien
ctcacgtcccagttccgtctgagga

SEQ ID NO: 654283 - DNA, 25 bp, Homo sapien
ctccaaattaccttcgggacttctg

SEQ ID NO: 654284 - DNA, 25 bp, Homo sapien
ctctgtttcaatccccgatcccgag

SEQ ID NO: 654285 - DNA, 25 bp, Homo sapien
agcggcgggatcacctggcctcggc

SEQ ID NO: 654286 - DNA, 25 bp, Homo sapien
aaacttttcctgactgcaggcgcga

SEQ ID NO: 654287 - DNA, 25 bp, Homo sapien
tgaccgcaccggaaagtgcgcagcg

SEQ ID NO: 654288 - DNA, 25 bp, Homo sapien
tgcccgtcctcgagtgctcgccact

SEQ ID NO: 654289 - DNA, 25 bp, Homo sapien
acgcggcttggggatcgagccgagt

SEQ ID NO: 654290 - DNA, 25 bp, Homo sapien
tgctgcgtccggactacgcggcttg

SEQ ID NO: 654291 - DNA, 25 bp, Homo sapien
ctgctgcgtccggactacgcggctt

SEQ ID NO: 654292 - DNA, 25 bp, Homo sapien
cttggggatcgagccgagtcaggac

SEQ ID NO: 654293 - DNA, 25 bp, Homo sapien
gagcgaggggctcataaccggggtc

SEQ ID NO: 654294 - DNA, 25 bp, Homo sapien
tgaacccgagctccggcgccgctcg

SEQ ID NO: 654295 - DNA, 25 bp, Homo sapien
cgcggtgaccgtgcccggagcgcgt

SEQ ID NO: 654296 - DNA, 25 bp, Homo sapien
gctcataaccggggtccgccgtgaa

SEQ ID NO: 654297 - DNA, 25 bp, Homo sapien
gcaggaggaccagacagtcagcgcc

SEQ ID NO: 654298 - DNA, 25 bp, Homo sapien
gagggcgacgccgggcttcctccat

SEQ ID NO: 654299 - DNA, 25 bp, Homo sapien
caggaggaccagacagtcagcgcct

SEQ ID NO: 654300 - DNA, 25 bp, Homo sapien
gcagcgagggcgacgccgggcttcc

SEQ ID NO: 654301 - DNA, 25 bp, Homo sapien
cctgtccaggattaaaggcagtctc

SEQ ID NO: 654302 - DNA, 25 bp, Homo sapien
tcagtgcgcttgtgccaaaatgcca

SEQ ID NO: 654303 - DNA, 25 bp, Homo sapien
gttgatacgtttcatgggacctaga

SEQ ID NO: 654304 - DNA, 25 bp, Homo sapien
tgccgggaaagggattcacccctgc

SEQ ID NO: 654305 - DNA, 25 bp, Homo sapien
tgaaattattcttgcctcgggcggt

SEQ ID NO: 654306 - DNA, 25 bp, Homo sapien
cgactccagtgtcgcatgtcacctg

SEQ ID NO: 654307 - DNA, 25 bp, Homo sapien
gcagccctggcctcggaatatggaa

SEQ ID NO: 654308 - DNA, 25 bp, Homo sapien
ggctgagggagcacctgaaattatt

SEQ ID NO: 654309 - DNA, 25 bp, Homo sapien
aacacctggggttccctgaatggca

SEQ ID NO: 654310 - DNA, 25 bp, Homo sapien
gggttccctgaatggcatcttccgt

SEQ ID NO: 654311 - DNA, 25 bp, Homo sapien
tcatcttcaaaacacctggggttcc

SEQ ID NO: 654312 - DNA, 25 bp, Homo sapien
ttcatcttcaaaacacctggggttc

SEQ ID NO: 654313 - DNA, 25 bp, Homo sapien
tctacatgtacttggtttttctcct

SEQ ID NO: 654314 - DNA, 25 bp, Homo sapien
attcattgtctgaattctcccgttt

SEQ ID NO: 654315 - DNA, 25 bp, Homo sapien
ttctacatgtacttggtttttctcc

SEQ ID NO: 654316 - DNA, 25 bp, Homo sapien
ctagaggcttgtagcattcattgtc

SEQ ID NO: 654317 - DNA, 25 bp, Homo sapien
tggtgagtttacacgctttgggtga

SEQ ID NO: 654318 - DNA, 25 bp, Homo sapien
cacgctttgggtgatcttttgggaa

SEQ ID NO: 654319 - DNA, 25 bp, Homo sapien
tgagtttacacgctttgggtgatct

SEQ ID NO: 654320 - DNA, 25 bp, Homo sapien
ctgaccctggtgagtttacacgctt

SEQ ID NO: 654321 - DNA, 25 bp, Homo sapien
gaaggtagttgctgtctactttcta

SEQ ID NO: 654322 - DNA, 25 bp, Homo sapien
tgtcctacaacaaccagtcgtatca

SEQ ID NO: 654323 - DNA, 25 bp, Homo sapien
tttctatacttcttggcacttgtcc

SEQ ID NO: 654324 - DNA, 25 bp, Homo sapien
agaggaaggtagttgctgtctactt

SEQ ID NO: 654325 - DNA, 25 bp, Homo sapien
tggttcacgtagtcaaaagccttac

SEQ ID NO: 654326 - DNA, 25 bp, Homo sapien
taaaagaggttcgacaatgtgatct

SEQ ID NO: 654327 - DNA, 25 bp, Homo sapien
gagtgaggcagctataaaaccaggt

SEQ ID NO: 654328 - DNA, 25 bp, Homo sapien
tttccttgaactggttcacgtagtc

SEQ ID NO: 654329 - DNA, 25 bp, Homo sapien
taagactcatgataactacgaaaag

SEQ ID NO: 654330 - DNA, 25 bp, Homo sapien
tacgaaaagtgaagcgaggctggaa

SEQ ID NO: 654331 - DNA, 25 bp, Homo sapien
gaagagaggccacggatgttaagca

SEQ ID NO: 654332 - DNA, 25 bp, Homo sapien
gcgtaccctcactaagactcatgat

SEQ ID NO: 654333 - DNA, 25 bp, Homo sapien
aacaatggaaacgttggtgattcca

SEQ ID NO: 654334 - DNA, 25 bp, Homo sapien
tcgcattaagttcatctggctttgt

SEQ ID NO: 654335 - DNA, 25 bp, Homo sapien
aagtttaagctgcatatagaagtgc

SEQ ID NO: 654336 - DNA, 25 bp, Homo sapien
taaaagcatcccattcgcattaagt

SEQ ID NO: 654337 - DNA, 25 bp, Homo sapien
tatgtggacgagcaacatgacctaa

SEQ ID NO: 654338 - DNA, 25 bp, Homo sapien
tgataagccgccaatctggaagctg

SEQ ID NO: 654339 - DNA, 25 bp, Homo sapien
cagggataccagaaaggacactttt

SEQ ID NO: 654340 - DNA, 25 bp, Homo sapien
catgacctaaggcaccagggatacc

SEQ ID NO: 654341 - DNA, 25 bp, Homo sapien
gggcagctcagtgggaatgcacctc

SEQ ID NO: 654342 - DNA, 25 bp, Homo sapien
aatgcacctccatccgaaagcacag

SEQ ID NO: 654343 - DNA, 25 bp, Homo sapien
taggactggctctctgtaagctccg

SEQ ID NO: 654344 - DNA, 25 bp, Homo sapien
cagtggcctgcaagaggttgaccat

SEQ ID NO: 654345 - DNA, 25 bp, Homo sapien
tgctttctctaaagcctggacagag

SEQ ID NO: 654346 - DNA, 25 bp, Homo sapien
ctttctctaaagcctggacagaggg

SEQ ID NO: 654347 - DNA, 25 bp, Homo sapien
gctttctctaaagcctggacagagg

SEQ ID NO: 654348 - DNA, 25 bp, Homo sapien
ctgctttctctaaagcctggacaga

SEQ ID NO: 654349 - DNA, 25 bp, Homo sapien
cctcaagaggcttttcagcagaaaa

SEQ ID NO: 654350 - DNA, 25 bp, Homo sapien
cattgggaagtgtctttgtagcaca

SEQ ID NO: 654351 - DNA, 25 bp, Homo sapien
tcaagagatcaacggagggaaggtc

SEQ ID NO: 654352 - DNA, 25 bp, Homo sapien
catttctggcaagcagacctggaga

SEQ ID NO: 654353 - DNA, 25 bp, Homo sapien
ccgtaaaatatgtgggacccaggtg

SEQ ID NO: 654354 - DNA, 25 bp, Homo sapien
cagaagctattttcaggaaggcaga

SEQ ID NO: 654355 - DNA, 25 bp, Homo sapien
ggaccactcactgactagcacaggt

SEQ ID NO: 654356 - DNA, 25 bp, Homo sapien
taagtggttgccctccaaatctcca

SEQ ID NO: 654357 - DNA, 25 bp, Homo sapien
tccttcccatggatgagagcagccc

SEQ ID NO: 654358 - DNA, 25 bp, Homo sapien
tgtgggagcctgaagatgagctttc

SEQ ID NO: 654359 - DNA, 25 bp, Homo sapien
tgacaatggtacagacaggctcgac

SEQ ID NO: 654360 - DNA, 25 bp, Homo sapien
aggctcggagattgagatgtgctca

SEQ ID NO: 654361 - DNA, 25 bp, Homo sapien
gattcgaatgtcagttgtcttaggg

SEQ ID NO: 654362 - DNA, 25 bp, Homo sapien
gcctccacatgaacaggattcgaat

SEQ ID NO: 654363 - DNA, 25 bp, Homo sapien
gataaagaacagtttcagctgcggc

SEQ ID NO: 654364 - DNA, 25 bp, Homo sapien
aatattatttggataacaagcctcc

SEQ ID NO: 654365 - DNA, 25 bp, Homo sapien
tgcaaatggacacacaactgttgtg

SEQ ID NO: 654366 - DNA, 25 bp, Homo sapien
ggcaattctaattctaccccagact

SEQ ID NO: 654367 - DNA, 25 bp, Homo sapien
ctgaaattgcttcgggcagcacaga

SEQ ID NO: 654368 - DNA, 25 bp, Homo sapien
gaaggtctctttagtcaataatctc

SEQ ID NO: 654369 - DNA, 25 bp, Homo sapien
ggtctggggatgcaggcttcggcca

SEQ ID NO: 654370 - DNA, 25 bp, Homo sapien
gtctggggatgcaggcttcggccag

SEQ ID NO: 654371 - DNA, 25 bp, Homo sapien
gagctgagctctgagtaactgtggc

SEQ ID NO: 654372 - DNA, 25 bp, Homo sapien
gagtaactgtggctgccggaaactg

SEQ ID NO: 654373 - DNA, 25 bp, Homo sapien
actggttcagtctcacatgtggatc

SEQ ID NO: 654374 - DNA, 25 bp, Homo sapien
ctggctttcccaacctgaaaaactg

SEQ ID NO: 654375 - DNA, 25 bp, Homo sapien
gaaagtaagcctaaggcctccagat

SEQ ID NO: 654376 - DNA, 25 bp, Homo sapien
cacagaatagttaggaagaagacac

SEQ ID NO: 654377 - DNA, 25 bp, Homo sapien
attaatactttacggcagtggcccg

SEQ ID NO: 654378 - DNA, 25 bp, Homo sapien
tatacaagtcctggagattagggca

SEQ ID NO: 654379 - DNA, 25 bp, Homo sapien
aatgtgggctcctaaggacgtgtca

SEQ ID NO: 654380 - DNA, 25 bp, Homo sapien
gagattgttctggatactcttttag

SEQ ID NO: 654381 - DNA, 25 bp, Homo sapien
ctcctaaggacgtgtcagggatcat

SEQ ID NO: 654382 - DNA, 25 bp, Homo sapien
ggctcctaaggacgtgtcagggatc

SEQ ID NO: 654383 - DNA, 25 bp, Homo sapien
tgaaaatggagatagtcagtgggaa

SEQ ID NO: 654384 - DNA, 25 bp, Homo sapien
gaagacgtgaggtggctttcttact

SEQ ID NO: 654385 - DNA, 25 bp, Homo sapien
tcagattggtggatgacagacaggc

SEQ ID NO: 654386 - DNA, 25 bp, Homo sapien
ccttgaggggatctgaactgttccc

SEQ ID NO: 654387 - DNA, 25 bp, Homo sapien
tgcggggaggcacaaagatgcaaac

SEQ ID NO: 654388 - DNA, 25 bp, Homo sapien
cagctggatgggcaaacacaggcac

SEQ ID NO: 654389 - DNA, 25 bp, Homo sapien
catgtggtccaagcccagaaaggtg

SEQ ID NO: 654390 - DNA, 25 bp, Homo sapien
cacaggcacaaacatcccatgagca

SEQ ID NO: 654391 - DNA, 25 bp, Homo sapien
ggcagccgcgtcagtgtggataata

SEQ ID NO: 654392 - DNA, 25 bp, Homo sapien
ccgcgtcagtgtggataatatgaat

SEQ ID NO: 654393 - DNA, 25 bp, Homo sapien
tgcaccaggttatggcccatcggcg

SEQ ID NO: 654394 - DNA, 25 bp, Homo sapien
ggattcctgtgcaccaggttatggc

SEQ ID NO: 654395 - DNA, 25 bp, Homo sapien
aagtttgtcttctcgataagaaaga

SEQ ID NO: 654396 - DNA, 25 bp, Homo sapien
ttgtgatcacttgactgggtactgg

SEQ ID NO: 654397 - DNA, 25 bp, Homo sapien
tctcgataagaaagagcagtgctca

SEQ ID NO: 654398 - DNA, 25 bp, Homo sapien
cagtgctcagcagattgagagaaca

SEQ ID NO: 654399 - DNA, 25 bp, Homo sapien
cttgagatgttcatggcaagcaaca

SEQ ID NO: 654400 - DNA, 25 bp, Homo sapien
ttgagatgttcatggcaagcaacat

SEQ ID NO: 654401 - DNA, 25 bp, Homo sapien
tgcaaggacaagttttttggaggag

SEQ ID NO: 654402 - DNA, 25 bp, Homo sapien
atgcaaggacaagttttttggagga

SEQ ID NO: 654403 - DNA, 25 bp, Homo sapien
tcatgtgcatgacggttgaaggctc

SEQ ID NO: 654404 - DNA, 25 bp, Homo sapien
tgtgcatgacggttgaaggctccct

SEQ ID NO: 654405 - DNA, 25 bp, Homo sapien
tcccttgtcagtcagcctggggcag

SEQ ID NO: 654406 - DNA, 25 bp, Homo sapien
gcttcatgtgcatgacggttgaagg

SEQ ID NO: 654407 - DNA, 25 bp, Homo sapien
tatgattccctctttaccaaggagg

SEQ ID NO: 654408 - DNA, 25 bp, Homo sapien
tctacaaggtggaactatgattccc

SEQ ID NO: 654409 - DNA, 25 bp, Homo sapien
taaatacatcttgccatgagcagtc

SEQ ID NO: 654410 - DNA, 25 bp, Homo sapien
caaaatagcgagtgatggcattcca

SEQ ID NO: 654411 - DNA, 25 bp, Homo sapien
tagatccccaagaagggtgcggagc

SEQ ID NO: 654412 - DNA, 25 bp, Homo sapien
tgacaggtttgctttagtgcccaga

SEQ ID NO: 654413 - DNA, 25 bp, Homo sapien
gaggtcttgaacctgtcctgaggga

SEQ ID NO: 654414 - DNA, 25 bp, Homo sapien
tatttgtcagcaaaatcgctaaggg

SEQ ID NO: 654415 - DNA, 25 bp, Homo sapien
cactgttcaggttggattctgatct

SEQ ID NO: 654416 - DNA, 25 bp, Homo sapien
cccgagggctcttcccttgtcggtg

SEQ ID NO: 654417 - DNA, 25 bp, Homo sapien
ttcccttgtcggtgtgagtgtgaac

SEQ ID NO: 654418 - DNA, 25 bp, Homo sapien
tgcacctgcactgttcaggttggat

SEQ ID NO: 654419 - DNA, 25 bp, Homo sapien
tatatgctggtatttttcggcttct

SEQ ID NO: 654420 - DNA, 25 bp, Homo sapien
agctactgggtggttcatctctata

SEQ ID NO: 654421 - DNA, 25 bp, Homo sapien
tcttcaaaaatcatgccacccttgc

SEQ ID NO: 654422 - DNA, 25 bp, Homo sapien
tctttatactctgggatcctctgct

SEQ ID NO: 654423 - DNA, 25 bp, Homo sapien
atgtaagatcttgctattattgtca

SEQ ID NO: 654424 - DNA, 25 bp, Homo sapien
aatgtaagatcttgctattattgtc

SEQ ID NO: 654425 - DNA, 25 bp, Homo sapien
tgtaagatcttgctattattgtcat

SEQ ID NO: 654426 - DNA, 25 bp, Homo sapien
ctgctggacttggtacaataggaaa

SEQ ID NO: 654427 - DNA, 25 bp, Homo sapien
ctggacttggtacaataggaaaggc

SEQ ID NO: 654428 - DNA, 25 bp, Homo sapien
tgctggacttggtacaataggaaag

SEQ ID NO: 654429 - DNA, 25 bp, Homo sapien
gctggacttggtacaataggaaagg

SEQ ID NO: 654430 - DNA, 25 bp, Homo sapien
tgccgtggggttccaccaattcatc

SEQ ID NO: 654431 - DNA, 25 bp, Homo sapien
gatctcttggcgcttcgctgggctg

SEQ ID NO: 654432 - DNA, 25 bp, Homo sapien
tcatatctccaatgtgcagttgctg

SEQ ID NO: 654433 - DNA, 25 bp, Homo sapien
tgctccactggcaacgcctgccgtg

SEQ ID NO: 654434 - DNA, 25 bp, Homo sapien
caaatttggcttcggatcatttctc

SEQ ID NO: 654435 - DNA, 25 bp, Homo sapien
ctgtgccaacagtgtagcaagagga

SEQ ID NO: 654436 - DNA, 25 bp, Homo sapien
ggtttgctctcccagcgttgtgtca

SEQ ID NO: 654437 - DNA, 25 bp, Homo sapien
ttggtttgctctcccagcgttgtgt

SEQ ID NO: 654438 - DNA, 25 bp, Homo sapien
ctgcttgtggttatcaggaataatg

SEQ ID NO: 654439 - DNA, 25 bp, Homo sapien
tctgtggtttctgaacagaatctgc

SEQ ID NO: 654440 - DNA, 25 bp, Homo sapien
cagagcattgctgcatctgagctcc

SEQ ID NO: 654441 - DNA, 25 bp, Homo sapien
tgagctccaagccactctgtggttt

SEQ ID NO: 654442 - DNA, 25 bp, Homo sapien
gtgccggagtcacagccaggagagg

SEQ ID NO: 654443 - DNA, 25 bp, Homo sapien
aagagcctgtcagcctcctagggtc

SEQ ID NO: 654444 - DNA, 25 bp, Homo sapien
tagggtcccgaaggcctgtgtcatg

SEQ ID NO: 654445 - DNA, 25 bp, Homo sapien
tggaaaagagggtgccggagtcaca

SEQ ID NO: 654446 - DNA, 25 bp, Homo sapien
ggctgtgatgttggaattcctgtga

SEQ ID NO: 654447 - DNA, 25 bp, Homo sapien
ctgtgatgttggaattcctgtgagc

SEQ ID NO: 654448 - DNA, 25 bp, Homo sapien
gaagcagtggatacagcagaggtcc

SEQ ID NO: 654449 - DNA, 25 bp, Homo sapien
tgagcatggcttgaagcagtggata

SEQ ID NO: 654450 - DNA, 25 bp, Homo sapien
cttgctgctgagattctaagagacc

SEQ ID NO: 654451 - DNA, 25 bp, Homo sapien
ctaactctgacgtggccctgctgta

SEQ ID NO: 654452 - DNA, 25 bp, Homo sapien
gggcaccacaggctaaatcatttcc

SEQ ID NO: 654453 - DNA, 25 bp, Homo sapien
gagacccgatgttaacctaactctg

SEQ ID NO: 654454 - DNA, 25 bp, Homo sapien
tggagagcgtatagctgtcactcac

SEQ ID NO: 654455 - DNA, 25 bp, Homo sapien
ctggccagctgtggattgccgtctt

SEQ ID NO: 654456 - DNA, 25 bp, Homo sapien
tctgaaactggagagcgtatagctg

SEQ ID NO: 654457 - DNA, 25 bp, Homo sapien
tgtggattgccgtcttcctcagctt

SEQ ID NO: 654458 - DNA, 25 bp, Homo sapien
tcatggaggcctaggcaaagaacca

SEQ ID NO: 654459 - DNA, 25 bp, Homo sapien
aatgggtccgcgaagccaaggacgt

SEQ ID NO: 654460 - DNA, 25 bp, Homo sapien
ctttacgaccgccttggtcagcagc

SEQ ID NO: 654461 - DNA, 25 bp, Homo sapien
aaggacgttatttctcgctcttggg

SEQ ID NO: 654462 - DNA, 25 bp, Homo sapien
cctctccccttcctcgctccctcct

SEQ ID NO: 654463 - DNA, 25 bp, Homo sapien
tagtcttcctctccccttcctcgct

SEQ ID NO: 654464 - DNA, 25 bp, Homo sapien
tctccccttcctcgctccctccttc

SEQ ID NO: 654465 - DNA, 25 bp, Homo sapien
cttcctctccccttcctcgctccct

SEQ ID NO: 654466 - DNA, 25 bp, Homo sapien
gtttctttgcagctagcagctcctc

SEQ ID NO: 654467 - DNA, 25 bp, Homo sapien
tcattccccgcggagtttcgttgtg

SEQ ID NO: 654468 - DNA, 25 bp, Homo sapien
tttgcaaaactacgggcatgtgtac

SEQ ID NO: 654469 - DNA, 25 bp, Homo sapien
agggtttgcagctccccgatctggc

SEQ ID NO: 654470 - DNA, 25 bp, Homo sapien
cataaagtgcgtttttagcccgagc

SEQ ID NO: 654471 - DNA, 25 bp, Homo sapien
tgatgcataaagtgcgtttttagcc

SEQ ID NO: 654472 - DNA, 25 bp, Homo sapien
tgcataaagtgcgtttttagcccga

SEQ ID NO: 654473 - DNA, 25 bp, Homo sapien
aaagtgcgtttttagcccgagctgc

SEQ ID NO: 654474 - DNA, 25 bp, Homo sapien
ggctcagtgctcttaaaactcttaa

SEQ ID NO: 654475 - DNA, 25 bp, Homo sapien
ctcatggctcagtgctcttaaaact

SEQ ID NO: 654476 - DNA, 25 bp, Homo sapien
acagtaaaagcgcaggtcctgagca

SEQ ID NO: 654477 - DNA, 25 bp, Homo sapien
aattaagagactcaatttgactttg

SEQ ID NO: 654478 - DNA, 25 bp, Homo sapien
cgttgttaggcccaagtctggccag

SEQ ID NO: 654479 - DNA, 25 bp, Homo sapien
tggtgggtaccagctttcgttgtta

SEQ ID NO: 654480 - DNA, 25 bp, Homo sapien
ttacttcccgcaagaaccgaaatgc

SEQ ID NO: 654481 - DNA, 25 bp, Homo sapien
tgcgcacctgtatgcccaagttgga

SEQ ID NO: 654482 - DNA, 25 bp, Homo sapien
ctctgtgcgctcagcgctgactagt

SEQ ID NO: 654483 - DNA, 25 bp, Homo sapien
agcgctgactagtagctgtccccgg

SEQ ID NO: 654484 - DNA, 25 bp, Homo sapien
tgcgctcagcgctgactagtagctg

SEQ ID NO: 654485 - DNA, 25 bp, Homo sapien
tgactagtagctgtccccgggccat

SEQ ID NO: 654486 - DNA, 25 bp, Homo sapien
ctatgcccgaccgtgcagaaggctg

SEQ ID NO: 654487 - DNA, 25 bp, Homo sapien
gattgagacgaaggctcgcggactc

SEQ ID NO: 654488 - DNA, 25 bp, Homo sapien
catcttagggccatctctcaccaag

SEQ ID NO: 654489 - DNA, 25 bp, Homo sapien
ttttgtcctggactgcgactccttg

SEQ ID NO: 654490 - DNA, 25 bp, Homo sapien
ctcccagagccagagactgtactgt

SEQ ID NO: 654491 - DNA, 25 bp, Homo sapien
ccagagccagagactgtactgtgtt

SEQ ID NO: 654492 - DNA, 25 bp, Homo sapien
tcccagagccagagactgtactgtg

SEQ ID NO: 654493 - DNA, 25 bp, Homo sapien
gagccagagactgtactgtgttcat

SEQ ID NO: 654494 - DNA, 25 bp, Homo sapien
gctagagaaacctgccttagaggca

SEQ ID NO: 654495 - DNA, 25 bp, Homo sapien
ccagggcagattcggaggcaccttt

SEQ ID NO: 654496 - DNA, 25 bp, Homo sapien
tacactcaggtaaccaggaggcacg

SEQ ID NO: 654497 - DNA, 25 bp, Homo sapien
tactctcccaagatggaagactggg

SEQ ID NO: 654498 - DNA, 25 bp, Homo sapien
gcagcctgtgattcttgttggaaca

SEQ ID NO: 654499 - DNA, 25 bp, Homo sapien
tctggctggccaaatccaaaagtgg

SEQ ID NO: 654500 - DNA, 25 bp, Homo sapien
agttgaaaccagttgaaactcctgc

SEQ ID NO: 654501 - DNA, 25 bp, Homo sapien
tataatgtaaccacctgggttgcct

SEQ ID NO: 654502 - DNA, 25 bp, Homo sapien
cacaccatcagaggcggagcacgga

SEQ ID NO: 654503 - DNA, 25 bp, Homo sapien
gcttgatgggtcttgcgttccagca

SEQ ID NO: 654504 - DNA, 25 bp, Homo sapien
gtcttgcgttccagcacattccaca

SEQ ID NO: 654505 - DNA, 25 bp, Homo sapien
cagctgcttgatgggtcttgcgttc

SEQ ID NO: 654506 - DNA, 25 bp, Homo sapien
ggattccacggatgcagctgacagc

SEQ ID NO: 654507 - DNA, 25 bp, Homo sapien
tagatttccttgtgaattgcctgca

SEQ ID NO: 654508 - DNA, 25 bp, Homo sapien
tttgagggccagtatgggattccac

SEQ ID NO: 654509 - DNA, 25 bp, Homo sapien
acgcttccacgggtgtgctgggaca

SEQ ID NO: 654510 - DNA, 25 bp, Homo sapien
gacctcgcccttgaagaagcctttg

SEQ ID NO: 654511 - DNA, 25 bp, Homo sapien
tcttcagctcctcttacaggaccag

SEQ ID NO: 654512 - DNA, 25 bp, Homo sapien
tggaggagacaaacgcacttcatga

SEQ ID NO: 654513 - DNA, 25 bp, Homo sapien
aggaccagcaccaaagcccctgaca

SEQ ID NO: 654514 - DNA, 25 bp, Homo sapien
tccctgtatacatgatgtgggctcc

SEQ ID NO: 654515 - DNA, 25 bp, Homo sapien
tcagcttgccaggatgtgcatgttc

SEQ ID NO: 654516 - DNA, 25 bp, Homo sapien
taggagatcatgttggccatggccc

SEQ ID NO: 654517 - DNA, 25 bp, Homo sapien
gccatggccctcatagtctttgcag

SEQ ID NO: 654518 - DNA, 25 bp, Homo sapien
caggccctgggtccattggatttgg

SEQ ID NO: 654519 - DNA, 25 bp, Homo sapien
tcagctgtatcctactagcagaagg

SEQ ID NO: 654520 - DNA, 25 bp, Homo sapien
gctgggtagatgatgatgtcttgca

SEQ ID NO: 654521 - DNA, 25 bp, Homo sapien
tatcctactagcagaaggaggctgc

SEQ ID NO: 654522 - DNA, 25 bp, Homo sapien
caggctcccaggtctttgaactcat

SEQ ID NO: 654523 - DNA, 25 bp, Homo sapien
ttcccaatgtctgctgccaggaggt

SEQ ID NO: 654524 - DNA, 25 bp, Homo sapien
atgcactgtgcccaatttcccaatg

SEQ ID NO: 654525 - DNA, 25 bp, Homo sapien
caggtctttgaactcatgcactgtg

SEQ ID NO: 654526 - DNA, 25 bp, Homo sapien
cagccaggccacccaaggccgggtg

SEQ ID NO: 654527 - DNA, 25 bp, Homo sapien
gccaggccacccaaggccgggtggc

SEQ ID NO: 654528 - DNA, 25 bp, Homo sapien
agccaggccacccaaggccgggtgg

SEQ ID NO: 654529 - DNA, 25 bp, Homo sapien
ggatctgagccacggccatttggga

SEQ ID NO: 654530 - DNA, 25 bp, Homo sapien
gggctgcaatctgctactggcatgt

SEQ ID NO: 654531 - DNA, 25 bp, Homo sapien
gaactgcatgcgcttgtctgcaccc

SEQ ID NO: 654532 - DNA, 25 bp, Homo sapien
tggagatgcagaggacgcagtccat

SEQ ID NO: 654533 - DNA, 25 bp, Homo sapien
agggctctcagccttagcgccattt

SEQ ID NO: 654534 - DNA, 25 bp, Homo sapien
aagtgtttggacatgtcaaaaaggg

SEQ ID NO: 654535 - DNA, 25 bp, Homo sapien
ggcaacagtgaaagtgtttggacat

SEQ ID NO: 654536 - DNA, 25 bp, Homo sapien
gaagggctctcagccttagcgccat

SEQ ID NO: 654537 - DNA, 25 bp, Homo sapien
tggacctgtgacactctggactatt

SEQ ID NO: 654538 - DNA, 25 bp, Homo sapien
tctgccctggacctgtgacactctg

SEQ ID NO: 654539 - DNA, 25 bp, Homo sapien
ttctgtgtttatttgtggccgagtg

SEQ ID NO: 654540 - DNA, 25 bp, Homo sapien
ccctggacctgtgacactctggact

SEQ ID NO: 654541 - DNA, 25 bp, Homo sapien
ttgtcccgtggaccagtgttgtcat

SEQ ID NO: 654542 - DNA, 25 bp, Homo sapien
aagaagttgaggctcctggtttgtt

SEQ ID NO: 654543 - DNA, 25 bp, Homo sapien
tttggaatcaggtatggtacaatcc

SEQ ID NO: 654544 - DNA, 25 bp, Homo sapien
tacaatccattgtcccgtggaccag

SEQ ID NO: 654545 - DNA, 25 bp, Homo sapien
gcgtgaacagccctcaaatgcgtgt

SEQ ID NO: 654546 - DNA, 25 bp, Homo sapien
gtcacactaccacacagagcatttt

SEQ ID NO: 654547 - DNA, 25 bp, Homo sapien
aaatgcgtgtttgccctgctgcacc

SEQ ID NO: 654548 - DNA, 25 bp, Homo sapien
tccgctttcctgtcgtgcctgtaga

SEQ ID NO: 654549 - DNA, 25 bp, Homo sapien
tcctttagctaaaagcaagctctgc

SEQ ID NO: 654550 - DNA, 25 bp, Homo sapien
cctttagctaaaagcaagctctgca

SEQ ID NO: 654551 - DNA, 25 bp, Homo sapien
agctatttgctgttcctatcttcca

SEQ ID NO: 654552 - DNA, 25 bp, Homo sapien
tctgcacttctaagctatttgctgt

SEQ ID NO: 654553 - DNA, 25 bp, Homo sapien
ctgtgaatacttcccgaatgaggct

SEQ ID NO: 654554 - DNA, 25 bp, Homo sapien
tgtcctgtgaatacttcccgaatga

SEQ ID NO: 654555 - DNA, 25 bp, Homo sapien
tccattctgtcctgtgaatacttcc

SEQ ID NO: 654556 - DNA, 25 bp, Homo sapien
tacttcccgaatgaggcttctcctc

SEQ ID NO: 654557 - DNA, 25 bp, Homo sapien
gaatctcagatgcatatctttcaat

SEQ ID NO: 654558 - DNA, 25 bp, Homo sapien
gggtcaggatctggcctctcaccat

SEQ ID NO: 654559 - DNA, 25 bp, Homo sapien
cagaatctcagatgcatatctttca

SEQ ID NO: 654560 - DNA, 25 bp, Homo sapien
tctcagatgcatatctttcaatttc

SEQ ID NO: 654561 - DNA, 25 bp, Homo sapien
tctgtccatccgaatcccaaaagct

SEQ ID NO: 654562 - DNA, 25 bp, Homo sapien
cttcctgctctgaccaaagaggcat

SEQ ID NO: 654563 - DNA, 25 bp, Homo sapien
cctgctctgaccaaagaggcatttg

SEQ ID NO: 654564 - DNA, 25 bp, Homo sapien
acttgagtccacagcagagcggaag

SEQ ID NO: 654565 - DNA, 25 bp, Homo sapien
cgtgccataaaagtgaggcaagaaa

SEQ ID NO: 654566 - DNA, 25 bp, Homo sapien
ggcttgggtccacgtagcagcagtt

SEQ ID NO: 654567 - DNA, 25 bp, Homo sapien
gggtctcactgggtacgtgccataa

SEQ ID NO: 654568 - DNA, 25 bp, Homo sapien
cagcagttggattgattagtggttg

SEQ ID NO: 654569 - DNA, 25 bp, Homo sapien
taatttcggtggttctagggatggc

SEQ ID NO: 654570 - DNA, 25 bp, Homo sapien
gatggcaagatccaaggtgtagcca

SEQ ID NO: 654571 - DNA, 25 bp, Homo sapien
aagtgaaagagttgccaaggtggga

SEQ ID NO: 654572 - DNA, 25 bp, Homo sapien
gcttccggtaagagtcgaagtgtga

SEQ ID NO: 654573 - DNA, 25 bp, Homo sapien
gggacgcggtgtgttgagatatggg

SEQ ID NO: 654574 - DNA, 25 bp, Homo sapien
cggaagaggggacgcggtgtgttga

SEQ ID NO: 654575 - DNA, 25 bp, Homo sapien
agaggggacgcggtgtgttgagata

SEQ ID NO: 654576 - DNA, 25 bp, Homo sapien
aggggacgcggtgtgttgagatatg

SEQ ID NO: 654577 - DNA, 25 bp, Homo sapien
gagtagaggtctttcggaaggcacc

SEQ ID NO: 654578 - DNA, 25 bp, Homo sapien
catctccagagcgtgtttctgagta

SEQ ID NO: 654579 - DNA, 25 bp, Homo sapien
tgtgggttcggctggctgcacagct

SEQ ID NO: 654580 - DNA, 25 bp, Homo sapien
cttcttgcaaagtttgtccccaggg

SEQ ID NO: 654581 - DNA, 25 bp, Homo sapien
ccgggttatcactgtgtgttggaaa

SEQ ID NO: 654582 - DNA, 25 bp, Homo sapien
aggaggctggtctccctggcaggtc

SEQ ID NO: 654583 - DNA, 25 bp, Homo sapien
ataaggctccggtttgaggcccctg

SEQ ID NO: 654584 - DNA, 25 bp, Homo sapien
ctgaggatgggttccgggttatcac

SEQ ID NO: 654585 - DNA, 25 bp, Homo sapien
caaattggagccatcatcagacagc

SEQ ID NO: 654586 - DNA, 25 bp, Homo sapien
tctgagtttgctgaggactgcccat

SEQ ID NO: 654587 - DNA, 25 bp, Homo sapien
tcctggagaaccatgcgtgcagggt

SEQ ID NO: 654588 - DNA, 25 bp, Homo sapien
tcccaagtggccaaatggaacccag

SEQ ID NO: 654589 - DNA, 25 bp, Homo sapien
tcaacatttaaaaatcgtagcttca

SEQ ID NO: 654590 - DNA, 25 bp, Homo sapien
tcctcaacatttaaaaatcgtagct

SEQ ID NO: 654591 - DNA, 25 bp, Homo sapien
tgattcctcaacatttaaaaatcgt

SEQ ID NO: 654592 - DNA, 25 bp, Homo sapien
caacatttaaaaatcgtagcttcat

SEQ ID NO: 654593 - DNA, 25 bp, Homo sapien
caaaccacttagcagaattctggtc

SEQ ID NO: 654594 - DNA, 25 bp, Homo sapien
agctgaacaaacctgatgatgctgg

SEQ ID NO: 654595 - DNA, 25 bp, Homo sapien
catgaagtccaaaccacttagcaga

SEQ ID NO: 654596 - DNA, 25 bp, Homo sapien
ctacttccgatctgaaattttggga

SEQ ID NO: 654597 - DNA, 25 bp, Homo sapien
gacaagtcgctgatattctgtgggc

SEQ ID NO: 654598 - DNA, 25 bp, Homo sapien
tattttctctcggaggtgacaagtt

SEQ ID NO: 654599 - DNA, 25 bp, Homo sapien
attttattttctctcggaggtgaca

SEQ ID NO: 654600 - DNA, 25 bp, Homo sapien
tctccgccatggtgtttgggacaag

SEQ ID NO: 654601 - DNA, 25 bp, Homo sapien
cctgaacagtcaaaatcagagactc

SEQ ID NO: 654602 - DNA, 25 bp, Homo sapien
tttccctgaacagtcaaaatcagag

SEQ ID NO: 654603 - DNA, 25 bp, Homo sapien
ctatttccctgaacagtcaaaatca

SEQ ID NO: 654604 - DNA, 25 bp, Homo sapien
tccctgaacagtcaaaatcagagac

SEQ ID NO: 654605 - DNA, 25 bp, Homo sapien
cagtagcttcaataacaaaggcaga

SEQ ID NO: 654606 - DNA, 25 bp, Homo sapien
tctcagtagcttcaataacaaaggc

SEQ ID NO: 654607 - DNA, 25 bp, Homo sapien
tcagtagcttcaataacaaaggcag

SEQ ID NO: 654608 - DNA, 25 bp, Homo sapien
tagcttcaataacaaaggcagattt

SEQ ID NO: 654609 - DNA, 25 bp, Homo sapien
gagtactgctgtttatccaaagcaa

SEQ ID NO: 654610 - DNA, 25 bp, Homo sapien
cctgctgaattggattgaagggtag

SEQ ID NO: 654611 - DNA, 25 bp, Homo sapien
ttttgctgcgtgaggtgagtactgc

SEQ ID NO: 654612 - DNA, 25 bp, Homo sapien
tgtttctgtaagtgagctgcaccat

SEQ ID NO: 654613 - DNA, 25 bp, Homo sapien
agggaagatgttcttagctataccc

SEQ ID NO: 654614 - DNA, 25 bp, Homo sapien
tgttcttagctataccctgtgtggg

SEQ ID NO: 654615 - DNA, 25 bp, Homo sapien
agatgaccaaagataggacctccca

SEQ ID NO: 654616 - DNA, 25 bp, Homo sapien
caaagataggacctcccatctggtc

SEQ ID NO: 654617 - DNA, 25 bp, Homo sapien
gggagcctttgtggcagcctcgagg

SEQ ID NO: 654618 - DNA, 25 bp, Homo sapien
ctttgtggcagcctcgaggtctagc

SEQ ID NO: 654619 - DNA, 25 bp, Homo sapien
gagcctttgtggcagcctcgaggtc

SEQ ID NO: 654620 - DNA, 25 bp, Homo sapien
gcctttgtggcagcctcgaggtcta

SEQ ID NO: 654621 - DNA, 25 bp, Homo sapien
gaccattttatagcccagatctttt

SEQ ID NO: 654622 - DNA, 25 bp, Homo sapien
ccagatcttttcctgaaagatggct

SEQ ID NO: 654623 - DNA, 25 bp, Homo sapien
gatctttacagaaacttctccagct

SEQ ID NO: 654624 - DNA, 25 bp, Homo sapien
ggagtttacttgtgtctctagacca

SEQ ID NO: 654625 - DNA, 25 bp, Homo sapien
ccctcagaaataacggcgcataact

SEQ ID NO: 654626 - DNA, 25 bp, Homo sapien
cggcgcataactacaactatctgat

SEQ ID NO: 654627 - DNA, 25 bp, Homo sapien
taacggcgcataactacaactatct

SEQ ID NO: 654628 - DNA, 25 bp, Homo sapien
aaataacggcgcataactacaacta

SEQ ID NO: 654629 - DNA, 25 bp, Homo sapien
gatgtctgtccctagatccggcaac

SEQ ID NO: 654630 - DNA, 25 bp, Homo sapien
ctacagaagagagcgtccatttttt

SEQ ID NO: 654631 - DNA, 25 bp, Homo sapien
tttggagtcccagccctccttaagc

SEQ ID NO: 654632 - DNA, 25 bp, Homo sapien
ctagatccggcaactccctggcttt

SEQ ID NO: 654633 - DNA, 25 bp, Homo sapien
gcctgtgtccagacttgggagtgca

SEQ ID NO: 654634 - DNA, 25 bp, Homo sapien
cataacaagtgcctgtgtccagact

SEQ ID NO: 654635 - DNA, 25 bp, Homo sapien
acttgggagtgcactaggttttcca

SEQ ID NO: 654636 - DNA, 25 bp, Homo sapien
tctgtcatgctggagtcataacaag

SEQ ID NO: 654637 - DNA, 25 bp, Homo sapien
cgttatttaactgtggttctgtgta

SEQ ID NO: 654638 - DNA, 25 bp, Homo sapien
ctgatcgttatttaactgtggttct

SEQ ID NO: 654639 - DNA, 25 bp, Homo sapien
ttaactgtggttctgtgtaacgcat

SEQ ID NO: 654640 - DNA, 25 bp, Homo sapien
tatttaactgtggttctgtgtaacg

SEQ ID NO: 654641 - DNA, 25 bp, Homo sapien
atattctctgctcttaagaacctta

SEQ ID NO: 654642 - DNA, 25 bp, Homo sapien
attctctgctcttaagaaccttatg

SEQ ID NO: 654643 - DNA, 25 bp, Homo sapien
tattctctgctcttaagaaccttat

SEQ ID NO: 654644 - DNA, 25 bp, Homo sapien
tctctgctcttaagaaccttatggc

SEQ ID NO: 654645 - DNA, 25 bp, Homo sapien
cgagagatccgctgctagtctgatg

SEQ ID NO: 654646 - DNA, 25 bp, Homo sapien
ctggtacaccaatcagatgtagatt

SEQ ID NO: 654647 - DNA, 25 bp, Homo sapien
tggtacaccaatcagatgtagattt

SEQ ID NO: 654648 - DNA, 25 bp, Homo sapien
ttctgccgagagatccgctgctagt

SEQ ID NO: 654649 - DNA, 25 bp, Homo sapien
tctgaggccacccattctgctgctg

SEQ ID NO: 654650 - DNA, 25 bp, Homo sapien
tgctgctggcagccacagtgatgta

SEQ ID NO: 654651 - DNA, 25 bp, Homo sapien
gctgctggcagccacagtgatgtac

SEQ ID NO: 654652 - DNA, 25 bp, Homo sapien
tcatctctgaggccacccattctgc

SEQ ID NO: 654653 - DNA, 25 bp, Homo sapien
cagacaaaggattgctctgtccttg

SEQ ID NO: 654654 - DNA, 25 bp, Homo sapien
tcatgggtgagagacgaatgacgtc

SEQ ID NO: 654655 - DNA, 25 bp, Homo sapien
gaatgacgtcagaggcccaaacctt

SEQ ID NO: 654656 - DNA, 25 bp, Homo sapien
gagcagtttttatagcaacagacaa

SEQ ID NO: 654657 - DNA, 25 bp, Homo sapien
aacatgatccagttgcaatggaaat

SEQ ID NO: 654658 - DNA, 25 bp, Homo sapien
tgctcatgtgctttttcccaagtac

SEQ ID NO: 654659 - DNA, 25 bp, Homo sapien
tgcaatggaaatccactctttgctc

SEQ ID NO: 654660 - DNA, 25 bp, Homo sapien
aatggaaatccactctttgctcatg

SEQ ID NO: 654661 - DNA, 25 bp, Homo sapien
tgacaatgtcagtggatcaactccc

SEQ ID NO: 654662 - DNA, 25 bp, Homo sapien
ttagtctaggcagaagttcatcaga

SEQ ID NO: 654663 - DNA, 25 bp, Homo sapien
ggtgccctgttcgtgtactccatgg

SEQ ID NO: 654664 - DNA, 25 bp, Homo sapien
gggagttgctttctagagccgaaaa

SEQ ID NO: 654665 - DNA, 25 bp, Homo sapien
ttagtggttggaagtcatttgaatt

SEQ ID NO: 654666 - DNA, 25 bp, Homo sapien
aattctttgttttgtgctatgactc

SEQ ID NO: 654667 - DNA, 25 bp, Homo sapien
acttcactactacctcctttagtgg

SEQ ID NO: 654668 - DNA, 25 bp, Homo sapien
tctttacttttctagcaagaattct

SEQ ID NO: 654669 - DNA, 25 bp, Homo sapien
agagtccactggaggatgacatgct

SEQ ID NO: 654670 - DNA, 25 bp, Homo sapien
cccacagggctccacttaagcgaga

SEQ ID NO: 654671 - DNA, 25 bp, Homo sapien
tggcttaatctgaagctctgtgttg

SEQ ID NO: 654672 - DNA, 25 bp, Homo sapien
cacttaagcgagagtccactggagg

SEQ ID NO: 654673 - DNA, 25 bp, Homo sapien
ggaaagcatttggagcctatgccat

SEQ ID NO: 654674 - DNA, 25 bp, Homo sapien
tttggagcctatgccatttgaaaaa

SEQ ID NO: 654675 - DNA, 25 bp, Homo sapien
ggagcctatgccatttgaaaaacaa

SEQ ID NO: 654676 - DNA, 25 bp, Homo sapien
agcatttggagcctatgccatttga

SEQ ID NO: 654677 - DNA, 25 bp, Homo sapien
acatgccaaacacccagctaatttt

SEQ ID NO: 654678 - DNA, 25 bp, Homo sapien
catgccaaacacccagctaattttt

SEQ ID NO: 654679 - DNA, 25 bp, Homo sapien
gggcttcaccgttttgtccaagctg

SEQ ID NO: 654680 - DNA, 25 bp, Homo sapien
atgccaaacacccagctaatttttt

SEQ ID NO: 654681 - DNA, 25 bp, Homo sapien
tcacactgtctcattctatccgagg

SEQ ID NO: 654682 - DNA, 25 bp, Homo sapien
caagcagtgcttggaccacaaagaa

SEQ ID NO: 654683 - DNA, 25 bp, Homo sapien
tgtgaagacttaactgttgtgaaga

SEQ ID NO: 654684 - DNA, 25 bp, Homo sapien
tgtcagatgagtagggtcatgtgat

SEQ ID NO: 654685 - DNA, 25 bp, Homo sapien
accactgggctcttcttgactcaga

SEQ ID NO: 654686 - DNA, 25 bp, Homo sapien
tccggaggacaacgaggcattgagt

SEQ ID NO: 654687 - DNA, 25 bp, Homo sapien
tctcttgactaaaccgcatgggctg

SEQ ID NO: 654688 - DNA, 25 bp, Homo sapien
ggcattgagtgccttgccccagctg

SEQ ID NO: 654689 - DNA, 25 bp, Homo sapien
cccgggatacacacccacctgctcc

SEQ ID NO: 654690 - DNA, 25 bp, Homo sapien
cttgatggcctgattatctttctct

SEQ ID NO: 654691 - DNA, 25 bp, Homo sapien
tgatggcctgattatctttctcttt

SEQ ID NO: 654692 - DNA, 25 bp, Homo sapien
ttgatggcctgattatctttctctt

SEQ ID NO: 654693 - DNA, 25 bp, Homo sapien
gatggcctgattatctttctctttt

SEQ ID NO: 654694 - DNA, 25 bp, Homo sapien
tgaccaagctggacccacaagggtt

SEQ ID NO: 654695 - DNA, 25 bp, Homo sapien
caaaagctatgaggcaagattcccc

SEQ ID NO: 654696 - DNA, 25 bp, Homo sapien
gaagacataagcctggtgacactgg

SEQ ID NO: 654697 - DNA, 25 bp, Homo sapien
tccacgctgtagcagaatgaccaag

SEQ ID NO: 654698 - DNA, 25 bp, Homo sapien
ggcgaggagccaagagaaggtttga

SEQ ID NO: 654699 - DNA, 25 bp, Homo sapien
gcgaggagccaagagaaggtttgaa

SEQ ID NO: 654700 - DNA, 25 bp, Homo sapien
agtttgtctgcagctagataaacat

SEQ ID NO: 654701 - DNA, 25 bp, Homo sapien
tttggcgtcacttaggaggtcccac

SEQ ID NO: 654702 - DNA, 25 bp, Homo sapien
ctttagtggagagatggattttggc

SEQ ID NO: 654703 - DNA, 25 bp, Homo sapien
tggattttggcgtcacttaggaggt

SEQ ID NO: 654704 - DNA, 25 bp, Homo sapien
tggagagatggattttggcgtcact

SEQ ID NO: 654705 - DNA, 25 bp, Homo sapien
gggagaaaaaggaatatctgaagac

SEQ ID NO: 654706 - DNA, 25 bp, Homo sapien
gagaaaaaggaatatctgaagacat

SEQ ID NO: 654707 - DNA, 25 bp, Homo sapien
aaaaaggaatatctgaagacatctt

SEQ ID NO: 654708 - DNA, 25 bp, Homo sapien
gaaaaaggaatatctgaagacatct

SEQ ID NO: 654709 - DNA, 25 bp, Homo sapien
ttaaattttatgacacagagatgta

SEQ ID NO: 654710 - DNA, 25 bp, Homo sapien
tttatgacacagagatgtaaactgc

SEQ ID NO: 654711 - DNA, 25 bp, Homo sapien
aattttatgacacagagatgtaaac

SEQ ID NO: 654712 - DNA, 25 bp, Homo sapien
ttttatgacacagagatgtaaactg

SEQ ID NO: 654713 - DNA, 25 bp, Homo sapien
ttccgtgagtaggtaacacacttac

SEQ ID NO: 654714 - DNA, 25 bp, Homo sapien
tggttccgtgagtaggtaacacact

SEQ ID NO: 654715 - DNA, 25 bp, Homo sapien
ttccagttggttccgtgagtaggta

SEQ ID NO: 654716 - DNA, 25 bp, Homo sapien
gttggttccgtgagtaggtaacaca

SEQ ID NO: 654717 - DNA, 25 bp, Homo sapien
aaaagctaaacgtaggcccagagag

SEQ ID NO: 654718 - DNA, 25 bp, Homo sapien
ctgtagagatcaaaagctaaacgta

SEQ ID NO: 654719 - DNA, 25 bp, Homo sapien
tagagatcaaaagctaaacgtaggc

SEQ ID NO: 654720 - DNA, 25 bp, Homo sapien
gatcaaaagctaaacgtaggcccag

SEQ ID NO: 654721 - DNA, 25 bp, Homo sapien
ccaagtgggcttgcttcaatttact

SEQ ID NO: 654722 - DNA, 25 bp, Homo sapien
caatttactgtagaggtgcaaggct

SEQ ID NO: 654723 - DNA, 25 bp, Homo sapien
gtaactcaccactaagtccgcagag

SEQ ID NO: 654724 - DNA, 25 bp, Homo sapien
ggaagagaacattagcatctccacc

SEQ ID NO: 654725 - DNA, 25 bp, Homo sapien
cagtggggtgccctgattcccactg

SEQ ID NO: 654726 - DNA, 25 bp, Homo sapien
tcagtggggtgccctgattcccact

SEQ ID NO: 654727 - DNA, 25 bp, Homo sapien
cttatcaagtttctcagtggggtgc

SEQ ID NO: 654728 - DNA, 25 bp, Homo sapien
catagaattgcgagtgtgcttttgg

SEQ ID NO: 654729 - DNA, 25 bp, Homo sapien
tagaattgcgagtgtgcttttggtc

SEQ ID NO: 654730 - DNA, 25 bp, Homo sapien
gaattgcgagtgtgcttttggtcat

SEQ ID NO: 654731 - DNA, 25 bp, Homo sapien
ttacatagaattgcgagtgtgcttt

SEQ ID NO: 654732 - DNA, 25 bp, Homo sapien
ctggatggtgctaccactcttcttg

SEQ ID NO: 654733 - DNA, 25 bp, Homo sapien
gcagagccaaggactgaaccatcat

SEQ ID NO: 654734 - DNA, 25 bp, Homo sapien
gagccaaggactgaaccatcatcac

SEQ ID NO: 654735 - DNA, 25 bp, Homo sapien
ggatggtgctaccactcttcttggt

SEQ ID NO: 654736 - DNA, 25 bp, Homo sapien
tgctgcacctccattgtccatgtgc

SEQ ID NO: 654737 - DNA, 25 bp, Homo sapien
ctgcacctccattgtccatgtgccc

SEQ ID NO: 654738 - DNA, 25 bp, Homo sapien
ggatgctgcacctccattgtccatg

SEQ ID NO: 654739 - DNA, 25 bp, Homo sapien
gatgctgcacctccattgtccatgt

SEQ ID NO: 654740 - DNA, 25 bp, Homo sapien
tcatctggagtgacactcgacagga

SEQ ID NO: 654741 - DNA, 25 bp, Homo sapien
tctggagtgacactcgacaggaggt

SEQ ID NO: 654742 - DNA, 25 bp, Homo sapien
tggagtgacactcgacaggaggtct

SEQ ID NO: 654743 - DNA, 25 bp, Homo sapien
agtgacactcgacaggaggtcttac

SEQ ID NO: 654744 - DNA, 25 bp, Homo sapien
cctctgtactcctagctctgagggc

SEQ ID NO: 654745 - DNA, 25 bp, Homo sapien
ctctgtactcctagctctgagggcc

SEQ ID NO: 654746 - DNA, 25 bp, Homo sapien
tctgtactcctagctctgagggcct

SEQ ID NO: 654747 - DNA, 25 bp, Homo sapien
ttggtgatactatttaagcaagaaa

SEQ ID NO: 654748 - DNA, 25 bp, Homo sapien
tcctttggtgatactatttaagcaa

SEQ ID NO: 654749 - DNA, 25 bp, Homo sapien
taatacattacatgtcctttggtga

SEQ ID NO: 654750 - DNA, 25 bp, Homo sapien
tgatactatttaagcaagaaattcc

SEQ ID NO: 654751 - DNA, 25 bp, Homo sapien
tgataaatttgacccatgatttcca

SEQ ID NO: 654752 - DNA, 25 bp, Homo sapien
gtttttctgcgtgttggtgggccaa

SEQ ID NO: 654753 - DNA, 25 bp, Homo sapien
ttccaaagctgtgcacgaacactaa

SEQ ID NO: 654754 - DNA, 25 bp, Homo sapien
ccataaattatagcgatgaggtgaa

SEQ ID NO: 654755 - DNA, 25 bp, Homo sapien
ggtcttccttgggacggccagacat

SEQ ID NO: 654756 - DNA, 25 bp, Homo sapien
aaatggcgtccatatgcgtccagtc

SEQ ID NO: 654757 - DNA, 25 bp, Homo sapien
cgtccatatgcgtccagtctctctg

SEQ ID NO: 654758 - DNA, 25 bp, Homo sapien
ctggttacaaatggcgtccatatgc

SEQ ID NO: 654759 - DNA, 25 bp, Homo sapien
caatgaggcaaacgataaaaagggt

SEQ ID NO: 654760 - DNA, 25 bp, Homo sapien
gcaatgaggcaaacgataaaaaggg

SEQ ID NO: 654761 - DNA, 25 bp, Homo sapien
aagactttatatccaggaaaatcat

SEQ ID NO: 654762 - DNA, 25 bp, Homo sapien
ttcaaagactttatatccaggaaaa

SEQ ID NO: 654763 - DNA, 25 bp, Homo sapien
ctgtgttccataaggtgggcttcct

SEQ ID NO: 654764 - DNA, 25 bp, Homo sapien
ccctacccaggcttgactgagccat

SEQ ID NO: 654765 - DNA, 25 bp, Homo sapien
tgtgttccataaggtgggcttcctc

SEQ ID NO: 654766 - DNA, 25 bp, Homo sapien
ctcccctacccaggcttgactgagc

SEQ ID NO: 654767 - DNA, 25 bp, Homo sapien
catccctgaattccccccattgaag

SEQ ID NO: 654768 - DNA, 25 bp, Homo sapien
attccccccattgaaggctttggat

SEQ ID NO: 654769 - DNA, 25 bp, Homo sapien
tttcaccagttatcaaatgattatc

SEQ ID NO: 654770 - DNA, 25 bp, Homo sapien
tccatcgtttgaatagaacattcag

SEQ ID NO: 654771 - DNA, 25 bp, Homo sapien
cgtttgaatagaacattcagggagg

SEQ ID NO: 654772 - DNA, 25 bp, Homo sapien
tcaccagttatcaaatgattatcca

SEQ ID NO: 654773 - DNA, 25 bp, Homo sapien
aggcaagtctttctcgagggcgaga

SEQ ID NO: 654774 - DNA, 25 bp, Homo sapien
tcgggatccccctggtttgctgaaa

SEQ ID NO: 654775 - DNA, 25 bp, Homo sapien
gcggcttctattgccttcctggagg

SEQ ID NO: 654776 - DNA, 25 bp, Homo sapien
ggtttgctgaaacctcaaaggcaag

SEQ ID NO: 654777 - DNA, 25 bp, Homo sapien
ctgggttgcctgaggtagcatttag

SEQ ID NO: 654778 - DNA, 25 bp, Homo sapien
aagcccgttctccataggagctggc

SEQ ID NO: 654779 - DNA, 25 bp, Homo sapien
gctggcctcttaggcctgttttctc

SEQ ID NO: 654780 - DNA, 25 bp, Homo sapien
tttagaggggttggcaaatgccacc

SEQ ID NO: 654781 - DNA, 25 bp, Homo sapien
gattcctactaccagtgcacctctt

SEQ ID NO: 654782 - DNA, 25 bp, Homo sapien
ctttgtgattcctactaccagtgca

SEQ ID NO: 654783 - DNA, 25 bp, Homo sapien
cctactaccagtgcacctcttgaag

SEQ ID NO: 654784 - DNA, 25 bp, Homo sapien
taccagtgcacctcttgaagtctgg

SEQ ID NO: 654785 - DNA, 25 bp, Homo sapien
gctgctgagataagggagccagcct

SEQ ID NO: 654786 - DNA, 25 bp, Homo sapien
tgaagcccagagatgaaagccaact

SEQ ID NO: 654787 - DNA, 25 bp, Homo sapien
ctgaagtatcaggaggacgtgctga

SEQ ID NO: 654788 - DNA, 25 bp, Homo sapien
gggagccagcctttgtaagtgtgaa

SEQ ID NO: 654789 - DNA, 25 bp, Homo sapien
ttatgtcttgtcttccaggtcttat

SEQ ID NO: 654790 - DNA, 25 bp, Homo sapien
cacattatgtcttgtcttccaggtc

SEQ ID NO: 654791 - DNA, 25 bp, Homo sapien
ctttgtgtccccacattatgtcttg

SEQ ID NO: 654792 - DNA, 25 bp, Homo sapien
cctttgtgtccccacattatgtctt

SEQ ID NO: 654793 - DNA, 25 bp, Homo sapien
gcaatttcgagaacagagaattcta

SEQ ID NO: 654794 - DNA, 25 bp, Homo sapien
ggcaatttcgagaacagagaattct

SEQ ID NO: 654795 - DNA, 25 bp, Homo sapien
tggcaatttcgagaacagagaattc

SEQ ID NO: 654796 - DNA, 25 bp, Homo sapien
caatttcgagaacagagaattctac

SEQ ID NO: 654797 - DNA, 25 bp, Homo sapien
tcatggcctgagctggccacaggga

SEQ ID NO: 654798 - DNA, 25 bp, Homo sapien
catggcctgagctggccacagggaa

SEQ ID NO: 654799 - DNA, 25 bp, Homo sapien
cacagggaagagcagctggccacac

SEQ ID NO: 654800 - DNA, 25 bp, Homo sapien
ggccacagggaagagcagctggcca

SEQ ID NO: 654801 - DNA, 25 bp, Homo sapien
cggctttgaaagcaccaaacatgat

SEQ ID NO: 654802 - DNA, 25 bp, Homo sapien
ttcaggtttataagcggctttgaaa

SEQ ID NO: 654803 - DNA, 25 bp, Homo sapien
tctccctgtcctgtgattcccaggg

SEQ ID NO: 654804 - DNA, 25 bp, Homo sapien
gtttataagcggctttgaaagcacc

SEQ ID NO: 654805 - DNA, 25 bp, Homo sapien
gagccacgtgttcctgttcccagga

SEQ ID NO: 654806 - DNA, 25 bp, Homo sapien
ccagttgtcaagtatgatgttagtg

SEQ ID NO: 654807 - DNA, 25 bp, Homo sapien
tagtgttgcgaatccagaagggagc

SEQ ID NO: 654808 - DNA, 25 bp, Homo sapien
ctgagtgcctaccagttgtcaagta

SEQ ID NO: 654809 - DNA, 25 bp, Homo sapien
tccgtgggcaccgaggtgcttgcca

SEQ ID NO: 654810 - DNA, 25 bp, Homo sapien
ctccgtgggcaccgaggtgcttgcc

SEQ ID NO: 654811 - DNA, 25 bp, Homo sapien
cctccgtgggcaccgaggtgcttgc

SEQ ID NO: 654812 - DNA, 25 bp, Homo sapien
tcctccgtgggcaccgaggtgcttg

SEQ ID NO: 654813 - DNA, 25 bp, Homo sapien
tggagcagaccgatgaggaggtgga

SEQ ID NO: 654814 - DNA, 25 bp, Homo sapien
ggagcagaccgatgaggaggtggag

SEQ ID NO: 654815 - DNA, 25 bp, Homo sapien
aagctcttgtccatgtaaagcaaag

SEQ ID NO: 654816 - DNA, 25 bp, Homo sapien
gggtcctatgtcctaattcagaggt

SEQ ID NO: 654817 - DNA, 25 bp, Homo sapien
cccagttttggaggtcaaagctctt

SEQ ID NO: 654818 - DNA, 25 bp, Homo sapien
aatggcttgtaaaatccctcggagg

SEQ ID NO: 654819 - DNA, 25 bp, Homo sapien
ccttagtttcttggctataatttgc

SEQ ID NO: 654820 - DNA, 25 bp, Homo sapien
aaatgttccctgttcaaggacatga

SEQ ID NO: 654821 - DNA, 25 bp, Homo sapien
tggaaatcttatgagaaatgttccc

SEQ ID NO: 654822 - DNA, 25 bp, Homo sapien
gaatgacaagatccgcatccagcac

SEQ ID NO: 654823 - DNA, 25 bp, Homo sapien
gatgggtgattgttccatcaagctc

SEQ ID NO: 654824 - DNA, 25 bp, Homo sapien
gttccatcaagctctgacgttaatg

SEQ ID NO: 654825 - DNA, 25 bp, Homo sapien
aatgatgggtgattgttccatcaag

SEQ ID NO: 654826 - DNA, 25 bp, Homo sapien
gctctgacgttaatggtttcggtta

SEQ ID NO: 654827 - DNA, 25 bp, Homo sapien
catttttatcaaacgtcactcactg

SEQ ID NO: 654828 - DNA, 25 bp, Homo sapien
gaagctgcacctccaactttatgtg

SEQ ID NO: 654829 - DNA, 25 bp, Homo sapien
ggcagatctagccttcttctgaagc

SEQ ID NO: 654830 - DNA, 25 bp, Homo sapien
acgtcactcactgttctgggtaaag

SEQ ID NO: 654831 - DNA, 25 bp, Homo sapien
tagagacggtttgtttcattataag

SEQ ID NO: 654832 - DNA, 25 bp, Homo sapien
tactggagtgctcaaatgcatacgt

SEQ ID NO: 654833 - DNA, 25 bp, Homo sapien
accttccttggatactcgagtactg

SEQ ID NO: 654834 - DNA, 25 bp, Homo sapien
cattataagatgtgactaaatatga

SEQ ID NO: 654835 - DNA, 25 bp, Homo sapien
ctgagcatcctctgaactttcctct

SEQ ID NO: 654836 - DNA, 25 bp, Homo sapien
gagcatcctctgaactttcctctgg

SEQ ID NO: 654837 - DNA, 25 bp, Homo sapien
tgagcatcctctgaactttcctctg

SEQ ID NO: 654838 - DNA, 25 bp, Homo sapien
aaggatcttatttacatctagctgg

SEQ ID NO: 654839 - DNA, 25 bp, Homo sapien
cgcaatgcatggagttagttgtaga

SEQ ID NO: 654840 - DNA, 25 bp, Homo sapien
tgtcagtcctgcatcaaggatctta

SEQ ID NO: 654841 - DNA, 25 bp, Homo sapien
gaaaaatgtcagtcctgcatcaagg

SEQ ID NO: 654842 - DNA, 25 bp, Homo sapien
taattcgcttgcatgaccattgcgc

SEQ ID NO: 654843 - DNA, 25 bp, Homo sapien
tgagtctccacaatcagaatagtgc

SEQ ID NO: 654844 - DNA, 25 bp, Homo sapien
cagaatagtgctgggcacctgacca

SEQ ID NO: 654845 - DNA, 25 bp, Homo sapien
cgaactgaatttgcctgagtctcca

SEQ ID NO: 654846 - DNA, 25 bp, Homo sapien
aacttggtctagacattgatgctcc

SEQ ID NO: 654847 - DNA, 25 bp, Homo sapien
tctccaacttggtctagacattgat

SEQ ID NO: 654848 - DNA, 25 bp, Homo sapien
cggagatgagcgctgtgtattctcc

SEQ ID NO: 654849 - DNA, 25 bp, Homo sapien
gatgagcgctgtgtattctccaact

SEQ ID NO: 654850 - DNA, 25 bp, Homo sapien
cactacaagcctctgctcagtctgg

SEQ ID NO: 654851 - DNA, 25 bp, Homo sapien
cagcccactacaagcctctgctcag

SEQ ID NO: 654852 - DNA, 25 bp, Homo sapien
caagcctctgctcagtctggactaa

SEQ ID NO: 654853 - DNA, 25 bp, Homo sapien
tacaagcctctgctcagtctggact

SEQ ID NO: 654854 - DNA, 25 bp, Homo sapien
caattggagggtcgtatctttcaga

SEQ ID NO: 654855 - DNA, 25 bp, Homo sapien
tgagtcctctcgctttaccaattgg

SEQ ID NO: 654856 - DNA, 25 bp, Homo sapien
cttcactagggcatagcaggtgctc

SEQ ID NO: 654857 - DNA, 25 bp, Homo sapien
gataggacgtagacatctggcttca

SEQ ID NO: 654858 - DNA, 25 bp, Homo sapien
gttttgaaaacaaaagagctgccat

SEQ ID NO: 654859 - DNA, 25 bp, Homo sapien
tgttttgaaaacaaaagagctgcca

SEQ ID NO: 654860 - DNA, 25 bp, Homo sapien
ctgttttgaaaacaaaagagctgcc

SEQ ID NO: 654861 - DNA, 25 bp, Homo sapien
cagcatattctgcttcccggaagcc

SEQ ID NO: 654862 - DNA, 25 bp, Homo sapien
cctggtccaggatgtgatggcagca

SEQ ID NO: 654863 - DNA, 25 bp, Homo sapien
caaggcgcctcttccggttggactt

SEQ ID NO: 654864 - DNA, 25 bp, Homo sapien
tgccggtggtccagacagaagttga

SEQ ID NO: 654865 - DNA, 25 bp, Homo sapien
cagaactcggaagcatcttcttatt

SEQ ID NO: 654866 - DNA, 25 bp, Homo sapien
gctttaaagggaccactgtggaaca

SEQ ID NO: 654867 - DNA, 25 bp, Homo sapien
ctcttatcccactgtgtctccatga

SEQ ID NO: 654868 - DNA, 25 bp, Homo sapien
cataaatccagaactcggaagcatc

SEQ ID NO: 654869 - DNA, 25 bp, Homo sapien
cagacactgctgaatatgggggagc

SEQ ID NO: 654870 - DNA, 25 bp, Homo sapien
ttgcatagccagtgaaatggctggg

SEQ ID NO: 654871 - DNA, 25 bp, Homo sapien
ccatcctatggttcagagccatgaa

SEQ ID NO: 654872 - DNA, 25 bp, Homo sapien
tctgcctctttgcatagccagtgaa

SEQ ID NO: 654873 - DNA, 25 bp, Homo sapien
tatgcagtcttaactgagccaattt

SEQ ID NO: 654874 - DNA, 25 bp, Homo sapien
aattctatgcagtcttaactgagcc

SEQ ID NO: 654875 - DNA, 25 bp, Homo sapien
ttcttcaattctatgcagtcttaac

SEQ ID NO: 654876 - DNA, 25 bp, Homo sapien
tcttaactgagccaatttgtacata

SEQ ID NO: 654877 - DNA, 25 bp, Homo sapien
tgagacacagaaagtctcagtacca

SEQ ID NO: 654878 - DNA, 25 bp, Homo sapien
gagacacagaaagtctcagtaccat

SEQ ID NO: 654879 - DNA, 25 bp, Homo sapien
cccagtgtggtaaggtgagcatgct

SEQ ID NO: 654880 - DNA, 25 bp, Homo sapien
catgagagcatgtagcccagtagat

SEQ ID NO: 654881 - DNA, 25 bp, Homo sapien
tgatcgtgtccagtgcattgtgaac

SEQ ID NO: 654882 - DNA, 25 bp, Homo sapien
atgctgcgggccaagagttgccacc

SEQ ID NO: 654883 - DNA, 25 bp, Homo sapien
cacattgagtgtgttgcttcccaga

SEQ ID NO: 654884 - DNA, 25 bp, Homo sapien
gacgaatccgactcctttctagtat

SEQ ID NO: 654885 - DNA, 25 bp, Homo sapien
tgcagctggccaccaacttttgacg

SEQ ID NO: 654886 - DNA, 25 bp, Homo sapien
tttacacattgagtgtgttgcttcc

SEQ ID NO: 654887 - DNA, 25 bp, Homo sapien
ctggatagaataacacctggatttc

SEQ ID NO: 654888 - DNA, 25 bp, Homo sapien
ggatttcttccgctttctgtgtaca

SEQ ID NO: 654889 - DNA, 25 bp, Homo sapien
ccctcagtagtagtttgtagcatct

SEQ ID NO: 654890 - DNA, 25 bp, Homo sapien
tgtagcatctgtacaatagctggca

SEQ ID NO: 654891 - DNA, 25 bp, Homo sapien
ttcgcgaacagcttccaacgcctgg

SEQ ID NO: 654892 - DNA, 25 bp, Homo sapien
tcaataatgtgacctgaacctgaac

SEQ ID NO: 654893 - DNA, 25 bp, Homo sapien
tgaaccttcgcgaacagcttccaac

SEQ ID NO: 654894 - DNA, 25 bp, Homo sapien
cctgaacctgaaccttcgcgaacag

SEQ ID NO: 654895 - DNA, 25 bp, Homo sapien
acctacatccggaggctttcatttc

SEQ ID NO: 654896 - DNA, 25 bp, Homo sapien
gaaaacacaggtctctgctgcggcg

SEQ ID NO: 654897 - DNA, 25 bp, Homo sapien
tgcggcggtctggtccagagaacct

SEQ ID NO: 654898 - DNA, 25 bp, Homo sapien
ggagaaaacacaggtctctgctgcg

SEQ ID NO: 654899 - DNA, 25 bp, Homo sapien
taagagaccacacgctgagtacctg

SEQ ID NO: 654900 - DNA, 25 bp, Homo sapien
gatacttggcacacacctgagctgc

SEQ ID NO: 654901 - DNA, 25 bp, Homo sapien
ttttgctggagcagatacttggcac

SEQ ID NO: 654902 - DNA, 25 bp, Homo sapien
aatcatgagcttccgttgagtaaca

SEQ ID NO: 654903 - DNA, 25 bp, Homo sapien
tgttgtgaatacctggatgcccaac

SEQ ID NO: 654904 - DNA, 25 bp, Homo sapien
gttgtgaatacctggatgcccaacc

SEQ ID NO: 654905 - DNA, 25 bp, Homo sapien
catcccgtcaaaaggtaactctagc

SEQ ID NO: 654906 - DNA, 25 bp, Homo sapien
cttgggaatgtttggtcagtgcacc

SEQ ID NO: 654907 - DNA, 25 bp, Homo sapien
tgaaggcagaataataccatcccgt

SEQ ID NO: 654908 - DNA, 25 bp, Homo sapien
taactctagcgaatggtcttgtctc

SEQ ID NO: 654909 - DNA, 25 bp, Homo sapien
tgggtggaatcggttggagatggcc

SEQ ID NO: 654910 - DNA, 25 bp, Homo sapien
catggttcctcaggggcctatgcaa

SEQ ID NO: 654911 - DNA, 25 bp, Homo sapien
gcttggagttcacgttcatgttgct

SEQ ID NO: 654912 - DNA, 25 bp, Homo sapien
gggcctatgcaattctttttgaaag

SEQ ID NO: 654913 - DNA, 25 bp, Homo sapien
tatccccttgtatggatggacacgc

SEQ ID NO: 654914 - DNA, 25 bp, Homo sapien
tcctccaagcagttcatataaatag

SEQ ID NO: 654915 - DNA, 25 bp, Homo sapien
ttctttgctccttttgactgctggg

SEQ ID NO: 654916 - DNA, 25 bp, Homo sapien
cagccatggtgtggtatacatcagt

SEQ ID NO: 654917 - DNA, 25 bp, Homo sapien
gatatagtccaatgagggtcacagg

SEQ ID NO: 654918 - DNA, 25 bp, Homo sapien
taactgggactctatgaacaactcg

SEQ ID NO: 654919 - DNA, 25 bp, Homo sapien
tagtgtgctgtggacgaattccgcc

SEQ ID NO: 654920 - DNA, 25 bp, Homo sapien
acacagaggtgcgttttaggccagt

SEQ ID NO: 654921 - DNA, 25 bp, Homo sapien
gcctgaagaagtcgctaaggatgct

SEQ ID NO: 654922 - DNA, 25 bp, Homo sapien
accttgcctgaagaagtcgctaagg

SEQ ID NO: 654923 - DNA, 25 bp, Homo sapien
cttgcctgaagaagtcgctaaggat

SEQ ID NO: 654924 - DNA, 25 bp, Homo sapien
tgcctgaagaagtcgctaaggatgc

SEQ ID NO: 654925 - DNA, 25 bp, Homo sapien
ggcaaatggtactcagatatgaagt

SEQ ID NO: 654926 - DNA, 25 bp, Homo sapien
tctgcggtcttcgttaaagctttgt

SEQ ID NO: 654927 - DNA, 25 bp, Homo sapien
agttcttctgcggtcttcgttaaag

SEQ ID NO: 654928 - DNA, 25 bp, Homo sapien
tatttgtaaatcgatggcaaatggt

SEQ ID NO: 654929 - DNA, 25 bp, Homo sapien
acaatgtcatttacagctgtcagcc

SEQ ID NO: 654930 - DNA, 25 bp, Homo sapien
caaatatgaaccaagtggacctccc

SEQ ID NO: 654931 - DNA, 25 bp, Homo sapien
gagagcagatagcttttctgaagcc

SEQ ID NO: 654932 - DNA, 25 bp, Homo sapien
tctgaagcccgcaagtatttctgcc

SEQ ID NO: 654933 - DNA, 25 bp, Homo sapien
aactattaagacttgtggctgaaag

SEQ ID NO: 654934 - DNA, 25 bp, Homo sapien
tattaagacttgtggctgaaaggac

SEQ ID NO: 654935 - DNA, 25 bp, Homo sapien
ctattaagacttgtggctgaaagga

SEQ ID NO: 654936 - DNA, 25 bp, Homo sapien
actattaagacttgtggctgaaagg

SEQ ID NO: 654937 - DNA, 25 bp, Homo sapien
catttacaaacatcacccaagagca

SEQ ID NO: 654938 - DNA, 25 bp, Homo sapien
caagagcacggatctgaccacatcc

SEQ ID NO: 654939 - DNA, 25 bp, Homo sapien
agacactgctaacccatccttgaag

SEQ ID NO: 654940 - DNA, 25 bp, Homo sapien
tcttgcctaattcgctttgaaagca

SEQ ID NO: 654941 - DNA, 25 bp, Homo sapien
aatctcatgtcagcttaagagccag

SEQ ID NO: 654942 - DNA, 25 bp, Homo sapien
tggtatcttccaactagcgcaatct

SEQ ID NO: 654943 - DNA, 25 bp, Homo sapien
gaaaagttcaactcctatcagggcg

SEQ ID NO: 654944 - DNA, 25 bp, Homo sapien
tcaacctgaggcactatcaagactc

SEQ ID NO: 654945 - DNA, 25 bp, Homo sapien
ccaccgacagtgatggatgcagcgg

SEQ ID NO: 654946 - DNA, 25 bp, Homo sapien
tccatcacggcgtttctcaagtagc

SEQ ID NO: 654947 - DNA, 25 bp, Homo sapien
taattgaattgcagcctgcgggcag

SEQ ID NO: 654948 - DNA, 25 bp, Homo sapien
gagtgcatcctcgaacacctaagag

SEQ ID NO: 654949 - DNA, 25 bp, Homo sapien
ggagcttaagtcctaccccagtgct

SEQ ID NO: 654950 - DNA, 25 bp, Homo sapien
tgacgtcagtggtactcaagatacg

SEQ ID NO: 654951 - DNA, 25 bp, Homo sapien
cacaagcagggagttcggagcttaa

SEQ ID NO: 654952 - DNA, 25 bp, Homo sapien
cctggagggtctgttagcctagcaa

SEQ ID NO: 654953 - DNA, 25 bp, Homo sapien
tattgaatgcgtggatggatgattt

SEQ ID NO: 654954 - DNA, 25 bp, Homo sapien
tgagaactttctcaacagtcataaa

SEQ ID NO: 654955 - DNA, 25 bp, Homo sapien
cataaagtttattgaatgcgtggat

SEQ ID NO: 654956 - DNA, 25 bp, Homo sapien
gatcacacacctggtctttctctct

SEQ ID NO: 654957 - DNA, 25 bp, Homo sapien
caagctggagattggtgatctgagt

SEQ ID NO: 654958 - DNA, 25 bp, Homo sapien
agctggagattggtgatctgagtgt

SEQ ID NO: 654959 - DNA, 25 bp, Homo sapien
aagctggagattggtgatctgagtg

SEQ ID NO: 654960 - DNA, 25 bp, Homo sapien
gaacatgacttgccacagtttattc

SEQ ID NO: 654961 - DNA, 25 bp, Homo sapien
cagataggcacatgagctcgttcgc

SEQ ID NO: 654962 - DNA, 25 bp, Homo sapien
gatgtttacacctcccagaccatgt

SEQ ID NO: 654963 - DNA, 25 bp, Homo sapien
aggtccccagcaggtttaagctctg

SEQ ID NO: 654964 - DNA, 25 bp, Homo sapien
taaatctgaggcacatgcttgatgc

SEQ ID NO: 654965 - DNA, 25 bp, Homo sapien
actgaatgtcccatggccaaatata

SEQ ID NO: 654966 - DNA, 25 bp, Homo sapien
taaatactccagaatttggaggtgt

SEQ ID NO: 654967 - DNA, 25 bp, Homo sapien
ggaggtgtcaatagtgtaactttta

SEQ ID NO: 654968 - DNA, 25 bp, Homo sapien
tgtttgttaatctccctgagcaagt

SEQ ID NO: 654969 - DNA, 25 bp, Homo sapien
ccagaccctcggctctcatctcgca

SEQ ID NO: 654970 - DNA, 25 bp, Homo sapien
cctggcgtgcgtccctctgctcgca

SEQ ID NO: 654971 - DNA, 25 bp, Homo sapien
ctcgcacggggaggaagacaacctt

SEQ ID NO: 654972 - DNA, 25 bp, Homo sapien
agaccctcggctctcatctcgcagg

SEQ ID NO: 654973 - DNA, 25 bp, Homo sapien
gcacctcctgtgaatagttgaaaat

SEQ ID NO: 654974 - DNA, 25 bp, Homo sapien
ggccaggcaccatgggaatacaaaa

SEQ ID NO: 654975 - DNA, 25 bp, Homo sapien
actagctttccccaatctgcgagaa

SEQ ID NO: 654976 - DNA, 25 bp, Homo sapien
gccggagcttttagcagagttaatc

SEQ ID NO: 654977 - DNA, 25 bp, Homo sapien
tgctatcgaatggagagacgggctc

SEQ ID NO: 654978 - DNA, 25 bp, Homo sapien
caatataaggatgctatcgaatgga

SEQ ID NO: 654979 - DNA, 25 bp, Homo sapien
tatttccggtgccttctgtttgcaa

SEQ ID NO: 654980 - DNA, 25 bp, Homo sapien
cgggctccgcaaaactcaggctgca

SEQ ID NO: 654981 - DNA, 25 bp, Homo sapien
tctctgtctcacaggaaggtatttc

SEQ ID NO: 654982 - DNA, 25 bp, Homo sapien
acactgaggcttttgaaatggagat

SEQ ID NO: 654983 - DNA, 25 bp, Homo sapien
ccttctctgtctcacaggaaggtat

SEQ ID NO: 654984 - DNA, 25 bp, Homo sapien
ttttccggtatcctctctgaaccaa

SEQ ID NO: 654985 - DNA, 25 bp, Homo sapien
ggctccttggatccacggagaacag

SEQ ID NO: 654986 - DNA, 25 bp, Homo sapien
cttggatccacggagaacagcaatg

SEQ ID NO: 654987 - DNA, 25 bp, Homo sapien
gctgagtagccatttatccaccctg

SEQ ID NO: 654988 - DNA, 25 bp, Homo sapien
tctgaaagtaacacaggctccttgg

SEQ ID NO: 654989 - DNA, 25 bp, Homo sapien
agtgttgacggccaaaagacttctc

SEQ ID NO: 654990 - DNA, 25 bp, Homo sapien
gcccctgagtgttgacggccaaaag

SEQ ID NO: 654991 - DNA, 25 bp, Homo sapien
cacttggtgatcacagcccctgagt

SEQ ID NO: 654992 - DNA, 25 bp, Homo sapien
cttccaatcctgagctaccctctcc

SEQ ID NO: 654993 - DNA, 25 bp, Homo sapien
aaaggaacctgcacccagtatcgca

SEQ ID NO: 654994 - DNA, 25 bp, Homo sapien
tatcgcagaactggcgctagttcgt

SEQ ID NO: 654995 - DNA, 25 bp, Homo sapien
tgcacccagtatcgcagaactggcg

SEQ ID NO: 654996 - DNA, 25 bp, Homo sapien
gcgctagttcgttggttgccagaga

SEQ ID NO: 654997 - DNA, 25 bp, Homo sapien
taccaatgatgatgcttcacaacct

SEQ ID NO: 654998 - DNA, 25 bp, Homo sapien
caggaagtaccaatgatgatgcttc

SEQ ID NO: 654999 - DNA, 25 bp, Homo sapien
gatgatgcttcacaaccttgctcac

SEQ ID NO: 655000 - DNA, 25 bp, Homo sapien
caatgatgatgcttcacaaccttgc

SEQ ID NO: 655001 - DNA, 25 bp, Homo sapien
tgaggtcgctctgggtaatgtgatg

SEQ ID NO: 655002 - DNA, 25 bp, Homo sapien
ttcagagtgaggtcgctctgggtaa

SEQ ID NO: 655003 - DNA, 25 bp, Homo sapien
tctcccacgtgcctctttgtcctca

SEQ ID NO: 655004 - DNA, 25 bp, Homo sapien
agctgcctctcccacgtgcctcttt

SEQ ID NO: 655005 - DNA, 25 bp, Homo sapien
ctccaccagggatcaggagtgctgt

SEQ ID NO: 655006 - DNA, 25 bp, Homo sapien
cagatgttttgccaatgccgttttc

SEQ ID NO: 655007 - DNA, 25 bp, Homo sapien
gacaagggacaacacgggttgcttg

SEQ ID NO: 655008 - DNA, 25 bp, Homo sapien
aaagtgggtggtgtgcatagggaca

SEQ ID NO: 655009 - DNA, 25 bp, Homo sapien
gaacttcatgaagccccggctgacc

SEQ ID NO: 655010 - DNA, 25 bp, Homo sapien
agttgaagacgcattgctgatggtg

SEQ ID NO: 655011 - DNA, 25 bp, Homo sapien
ttcccaccacaaagtgatcctggcg

SEQ ID NO: 655012 - DNA, 25 bp, Homo sapien
tagcactggggcgaacttcatgaag

SEQ ID NO: 655013 - DNA, 25 bp, Homo sapien
cacccaaatgcctttttatctgaat

SEQ ID NO: 655014 - DNA, 25 bp, Homo sapien
tcacccaaatgcctttttatctgaa

SEQ ID NO: 655015 - DNA, 25 bp, Homo sapien
caccagggcattgtgtagcagcgca

SEQ ID NO: 655016 - DNA, 25 bp, Homo sapien
taaacattgccagcatgcttgcgca

SEQ ID NO: 655017 - DNA, 25 bp, Homo sapien
gcggtcagagcctggataatggtca

SEQ ID NO: 655018 - DNA, 25 bp, Homo sapien
tagcagcgcattggctaatttcagc

SEQ ID NO: 655019 - DNA, 25 bp, Homo sapien
gagtaccagctggttcaacaccggg

SEQ ID NO: 655020 - DNA, 25 bp, Homo sapien
gctcgggaggagagtgctttagggc

SEQ ID NO: 655021 - DNA, 25 bp, Homo sapien
ctgccagagtaccagctggttcaac

SEQ ID NO: 655022 - DNA, 25 bp, Homo sapien
cagagtaccagctggttcaacaccg

SEQ ID NO: 655023 - DNA, 25 bp, Homo sapien
ccatctgtggctcaccacatttggg

SEQ ID NO: 655024 - DNA, 25 bp, Homo sapien
ctttcagttctcctgttggcgagcc

SEQ ID NO: 655025 - DNA, 25 bp, Homo sapien
agctttcagttctcctgttggcgag

SEQ ID NO: 655026 - DNA, 25 bp, Homo sapien
ttcagctttcagttctcctgttggc

SEQ ID NO: 655027 - DNA, 25 bp, Homo sapien
cagctttcagttctcctgttggcga

SEQ ID NO: 655028 - DNA, 25 bp, Homo sapien
atgaagaacatcgtagccacactcg

SEQ ID NO: 655029 - DNA, 25 bp, Homo sapien
tgtgtcctgcagaactggaatccag

SEQ ID NO: 655030 - DNA, 25 bp, Homo sapien
gggagccatcgcatgagttgtccat

SEQ ID NO: 655031 - DNA, 25 bp, Homo sapien
ttgagatgaagaacatcgtagccac

SEQ ID NO: 655032 - DNA, 25 bp, Homo sapien
tccccaaaacttgcagctttattaa

SEQ ID NO: 655033 - DNA, 25 bp, Homo sapien
tcccagtcgtggtttgcagctagcc

SEQ ID NO: 655034 - DNA, 25 bp, Homo sapien
tgagtgctttgaggagcaatgaagc

SEQ ID NO: 655035 - DNA, 25 bp, Homo sapien
caaaatatcagagtcgtgagtgctt

SEQ ID NO: 655036 - DNA, 25 bp, Homo sapien
tttgggtctacagtccttggtccta

SEQ ID NO: 655037 - DNA, 25 bp, Homo sapien
atttgggtctacagtccttggtcct

SEQ ID NO: 655038 - DNA, 25 bp, Homo sapien
agtccttggtcctatagctgtcagc

SEQ ID NO: 655039 - DNA, 25 bp, Homo sapien
ttcagcattaacttagaaatccaca

SEQ ID NO: 655040 - DNA, 25 bp, Homo sapien
cagcattaacttagaaatccacagt

SEQ ID NO: 655041 - DNA, 25 bp, Homo sapien
atttcagcattaacttagaaatcca

SEQ ID NO: 655042 - DNA, 25 bp, Homo sapien
taacttagaaatccacagtccaaag

SEQ ID NO: 655043 - DNA, 25 bp, Homo sapien
gaagggcaggagactatcaggacca

SEQ ID NO: 655044 - DNA, 25 bp, Homo sapien
ggcttcttgcagaccctctctggag

SEQ ID NO: 655045 - DNA, 25 bp, Homo sapien
gactatcaggaccacttgagaaggc

SEQ ID NO: 655046 - DNA, 25 bp, Homo sapien
ctctgatggcttcttgcagaccctc

SEQ ID NO: 655047 - DNA, 25 bp, Homo sapien
ttgcactgagattccaaatcaagag

SEQ ID NO: 655048 - DNA, 25 bp, Homo sapien
tgagacaaattcttaagataatcat

SEQ ID NO: 655049 - DNA, 25 bp, Homo sapien
taaaaatccatagcaactttgttga

SEQ ID NO: 655050 - DNA, 25 bp, Homo sapien
gatgttggggtttgcactgagattc

SEQ ID NO: 655051 - DNA, 25 bp, Homo sapien
aatcgacatgtatatcccagttggg

SEQ ID NO: 655052 - DNA, 25 bp, Homo sapien
tacataaatgattctgggtcctcgg

SEQ ID NO: 655053 - DNA, 25 bp, Homo sapien
cagttgggtcaaaacatagtcaagg

SEQ ID NO: 655054 - DNA, 25 bp, Homo sapien
gaatctggccttgaaatcgacctgg

SEQ ID NO: 655055 - DNA, 25 bp, Homo sapien
ttcatgatgccatcgaatatttgca

SEQ ID NO: 655056 - DNA, 25 bp, Homo sapien
tttcatgatgccatcgaatatttgc

SEQ ID NO: 655057 - DNA, 25 bp, Homo sapien
tcatgatgccatcgaatatttgcaa

SEQ ID NO: 655058 - DNA, 25 bp, Homo sapien
ctaaatggaaccctttcttcattct

SEQ ID NO: 655059 - DNA, 25 bp, Homo sapien
acgtgaggtcggctccttgcagaac

SEQ ID NO: 655060 - DNA, 25 bp, Homo sapien
gtcggatatgatttccctgcaggga

SEQ ID NO: 655061 - DNA, 25 bp, Homo sapien
tgggagacctttagcttcacggcct

SEQ ID NO: 655062 - DNA, 25 bp, Homo sapien
cacccagcaggaaaaatatacgaaa

SEQ ID NO: 655063 - DNA, 25 bp, Homo sapien
gaattaaacattgaagcctggctcc

SEQ ID NO: 655064 - DNA, 25 bp, Homo sapien
tcacagggtgtgcacggcggatatc

SEQ ID NO: 655065 - DNA, 25 bp, Homo sapien
tacagtaaaggcaccccgagattta

SEQ ID NO: 655066 - DNA, 25 bp, Homo sapien
gaagccctgtgtgcaacctacaagt

SEQ ID NO: 655067 - DNA, 25 bp, Homo sapien
tgaatctgcgtgaatctgtgtgccc

SEQ ID NO: 655068 - DNA, 25 bp, Homo sapien
taaaagtagtaaagctctctcccca

SEQ ID NO: 655069 - DNA, 25 bp, Homo sapien
ggttgggttccattccttgtatgcc

SEQ ID NO: 655070 - DNA, 25 bp, Homo sapien
gggctcttcgaggaaagtacaccca

SEQ ID NO: 655071 - DNA, 25 bp, Homo sapien
ccaacgttgtatagatagcaaagag

SEQ ID NO: 655072 - DNA, 25 bp, Homo sapien
acaaggcatgggaccatctttcacc

SEQ ID NO: 655073 - DNA, 25 bp, Homo sapien
ttcaccccaaacaatcactctgagt

SEQ ID NO: 655074 - DNA, 25 bp, Homo sapien
tttccggtcatagaaagagatttcc

SEQ ID NO: 655075 - DNA, 25 bp, Homo sapien
attgttagattcagtaacctcaggg

SEQ ID NO: 655076 - DNA, 25 bp, Homo sapien
ttagattcagtaacctcaggggagc

SEQ ID NO: 655077 - DNA, 25 bp, Homo sapien
gattcagtaacctcaggggagctta

SEQ ID NO: 655078 - DNA, 25 bp, Homo sapien
cattgttagattcagtaacctcagg

SEQ ID NO: 655079 - DNA, 25 bp, Homo sapien
gaaaatgtcttgctaagtggcctca

SEQ ID NO: 655080 - DNA, 25 bp, Homo sapien
tcagaaccatcttctcaggctggaa

SEQ ID NO: 655081 - DNA, 25 bp, Homo sapien
ttccctgaggaaagacaacacacca

SEQ ID NO: 655082 - DNA, 25 bp, Homo sapien
catcgtagggaatcagtacagcgac

SEQ ID NO: 655083 - DNA, 25 bp, Homo sapien
gaccactggtgaagtccatttctct

SEQ ID NO: 655084 - DNA, 25 bp, Homo sapien
tgaagccaaagaccactggtgaagt

SEQ ID NO: 655085 - DNA, 25 bp, Homo sapien
accactggtgaagtccatttctctc

SEQ ID NO: 655086 - DNA, 25 bp, Homo sapien
gccaaagaccactggtgaagtccat

SEQ ID NO: 655087 - DNA, 25 bp, Homo sapien
caaggcgatcctatcagtaagagta

SEQ ID NO: 655088 - DNA, 25 bp, Homo sapien
tatggtgcaaatggcaaaacaaggc

SEQ ID NO: 655089 - DNA, 25 bp, Homo sapien
catactgggtacctgcagaaggtca

SEQ ID NO: 655090 - DNA, 25 bp, Homo sapien
ggtcacatgctttgcatcaatggca

SEQ ID NO: 655091 - DNA, 25 bp, Homo sapien
tctgttttctcagcgatggttgagc

SEQ ID NO: 655092 - DNA, 25 bp, Homo sapien
aggtctgttttctcagcgatggttg

SEQ ID NO: 655093 - DNA, 25 bp, Homo sapien
tctcagcgatggttgagctggtctt

SEQ ID NO: 655094 - DNA, 25 bp, Homo sapien
ctctgcccagaggccggcgggttaa

SEQ ID NO: 655095 - DNA, 25 bp, Homo sapien
gccggagctcgccaaaccgggacag

SEQ ID NO: 655096 - DNA, 25 bp, Homo sapien
aaagggagtgctgctttatttcgga

SEQ ID NO: 655097 - DNA, 25 bp, Homo sapien
ccgggttccgcgtttggcgcatctc

SEQ ID NO: 655098 - DNA, 25 bp, Homo sapien
gaagcaggtccgactctgtgaacac

SEQ ID NO: 655099 - DNA, 25 bp, Homo sapien
tctgagcttcagaggtgacgaacta

SEQ ID NO: 655100 - DNA, 25 bp, Homo sapien
tccaggccgctgtaattccaaagac

SEQ ID NO: 655101 - DNA, 25 bp, Homo sapien
cagaatgtcgcttgtctcggtgcca

SEQ ID NO: 655102 - DNA, 25 bp, Homo sapien
tcggtgccatgggaggttacacgcc

SEQ ID NO: 655103 - DNA, 25 bp, Homo sapien
gccacggaattacagcttgtaaaat

SEQ ID NO: 655104 - DNA, 25 bp, Homo sapien
ctccagtctagcaagagggactgcc

SEQ ID NO: 655105 - DNA, 25 bp, Homo sapien
gagggactgccacggaattacagct

SEQ ID NO: 655106 - DNA, 25 bp, Homo sapien
tagcaagagggactgccacggaatt

SEQ ID NO: 655107 - DNA, 25 bp, Homo sapien
gcactgccccgaagaaaacgcgttg

SEQ ID NO: 655108 - DNA, 25 bp, Homo sapien
tttgcggacataagccagaacgggc

SEQ ID NO: 655109 - DNA, 25 bp, Homo sapien
caaaactcgcactgaattaagggtc

SEQ ID NO: 655110 - DNA, 25 bp, Homo sapien
gacttgatgcctacgactttgcgga

SEQ ID NO: 655111 - DNA, 25 bp, Homo sapien
catcaaaggcccgagggaaggccgt

SEQ ID NO: 655112 - DNA, 25 bp, Homo sapien
ccgtctaatgacaagtaattgaagg

SEQ ID NO: 655113 - DNA, 25 bp, Homo sapien
gggcgacacccgtctaatgacaagt

SEQ ID NO: 655114 - DNA, 25 bp, Homo sapien
aattgaaggattcgacgccgcgcat

SEQ ID NO: 655115 - DNA, 25 bp, Homo sapien
tgcagccagagctaaggttcactcg

SEQ ID NO: 655116 - DNA, 25 bp, Homo sapien
gctgctgcttgatgacgatccccat

SEQ ID NO: 655117 - DNA, 25 bp, Homo sapien
ggagaatgcgatgataaatggccct

SEQ ID NO: 655118 - DNA, 25 bp, Homo sapien
tgttgggtcctacaaactcgcgtcc

SEQ ID NO: 655119 - DNA, 25 bp, Homo sapien
aagagttgagactggactcgaaccc

SEQ ID NO: 655120 - DNA, 25 bp, Homo sapien
gagcgtccagctcgcggagggagga

SEQ ID NO: 655121 - DNA, 25 bp, Homo sapien
gaggcatccccgcatttatttgagc

SEQ ID NO: 655122 - DNA, 25 bp, Homo sapien
ccgactgctccgagccgaggcatcc

SEQ ID NO: 655123 - DNA, 25 bp, Homo sapien
ggctgcggagcgtccagctcgcgga

SEQ ID NO: 655124 - DNA, 25 bp, Homo sapien
caggttagggcagcgctttcagcct

SEQ ID NO: 655125 - DNA, 25 bp, Homo sapien
caatgggcgtgccatacgaaacata

SEQ ID NO: 655126 - DNA, 25 bp, Homo sapien
taaaacgaccctcgcacaatgggcg

SEQ ID NO: 655127 - DNA, 25 bp, Homo sapien
catacgaaacatagcaggttagggc

SEQ ID NO: 655128 - DNA, 25 bp, Homo sapien
gcgcgcgggagtggctcccaagtct

SEQ ID NO: 655129 - DNA, 25 bp, Homo sapien
cactgcgcgcgggagtggctcccaa

SEQ ID NO: 655130 - DNA, 25 bp, Homo sapien
cgcaagccactgcgcgcgggagtgg

SEQ ID NO: 655131 - DNA, 25 bp, Homo sapien
gcaagccactgcgcgcgggagtggc

SEQ ID NO: 655132 - DNA, 25 bp, Homo sapien
gcgctgtcggccttggttttcactg

SEQ ID NO: 655133 - DNA, 25 bp, Homo sapien
ttcactgccgttggccgtcctttta

SEQ ID NO: 655134 - DNA, 25 bp, Homo sapien
gccgtccttttaggccagcgaggtc

SEQ ID NO: 655135 - DNA, 25 bp, Homo sapien
accagactcccctttgcgctgtcgg

SEQ ID NO: 655136 - DNA, 25 bp, Homo sapien
aaatttgccgacagtggcatcttca

SEQ ID NO: 655137 - DNA, 25 bp, Homo sapien
ttgcaagagccttgagttttggagg

SEQ ID NO: 655138 - DNA, 25 bp, Homo sapien
aagaagatttgcaagagccttgagt

SEQ ID NO: 655139 - DNA, 25 bp, Homo sapien
gagatggggagcaaatttgccgaca

SEQ ID NO: 655140 - DNA, 25 bp, Homo sapien
cacagtagtggaaaccggaggcttt

SEQ ID NO: 655141 - DNA, 25 bp, Homo sapien
gacccgagacctggatttcaccgtg

SEQ ID NO: 655142 - DNA, 25 bp, Homo sapien
gggaaaacagcaacactccctgggc

SEQ ID NO: 655143 - DNA, 25 bp, Homo sapien
ctctgtttgggacggaacggctgca

SEQ ID NO: 655144 - DNA, 25 bp, Homo sapien
gggtgccagagttagccgggcctga

SEQ ID NO: 655145 - DNA, 25 bp, Homo sapien
agttagccgggcctgaagccgtcgt

SEQ ID NO: 655146 - DNA, 25 bp, Homo sapien
agccgggcctgaagccgtcgtcttc

SEQ ID NO: 655147 - DNA, 25 bp, Homo sapien
tcgatccggggtgccagagttagcc

SEQ ID NO: 655148 - DNA, 25 bp, Homo sapien
ggagttcataatgggccgggagtac

SEQ ID NO: 655149 - DNA, 25 bp, Homo sapien
gttcataatgggccgggagtacacc

SEQ ID NO: 655150 - DNA, 25 bp, Homo sapien
ttaagaggagttcataatgggccgg

SEQ ID NO: 655151 - DNA, 25 bp, Homo sapien
ttcataatgggccgggagtacaccc

SEQ ID NO: 655152 - DNA, 25 bp, Homo sapien
gcgtccaggcccgttttgttcgtga

SEQ ID NO: 655153 - DNA, 25 bp, Homo sapien
gtgaccgggcccatggccaagctgc

SEQ ID NO: 655154 - DNA, 25 bp, Homo sapien
cacctgttcgtaggccttgaggtcc

SEQ ID NO: 655155 - DNA, 25 bp, Homo sapien
gggtagtgcatcacctgttcgtagg

SEQ ID NO: 655156 - DNA, 25 bp, Homo sapien
gggaggcgctcgagtgaggcgactc

SEQ ID NO: 655157 - DNA, 25 bp, Homo sapien
tccccgagttgagcctgtgaggcct

SEQ ID NO: 655158 - DNA, 25 bp, Homo sapien
actcggtgcccgccggagtctcgga

SEQ ID NO: 655159 - DNA, 25 bp, Homo sapien
aaggcgtagtggtgttccggcttca

SEQ ID NO: 655160 - DNA, 25 bp, Homo sapien
tttgcgtgcgtgtagctgcgcctgt

SEQ ID NO: 655161 - DNA, 25 bp, Homo sapien
catgctcatgtacgtgttcatgccg

SEQ ID NO: 655162 - DNA, 25 bp, Homo sapien
caggccggcgttcatgttgctcacg

SEQ ID NO: 655163 - DNA, 25 bp, Homo sapien
tacgacgacatgttcatggagcccg

SEQ ID NO: 655164 - DNA, 25 bp, Homo sapien
gagccctttcgtccccgatggccca

SEQ ID NO: 655165 - DNA, 25 bp, Homo sapien
atggcccagtctccggactccgagt

SEQ ID NO: 655166 - DNA, 25 bp, Homo sapien
tccccgatggcccagtctccggact

SEQ ID NO: 655167 - DNA, 25 bp, Homo sapien
tttcgtccccgatggcccagtctcc

SEQ ID NO: 655168 - DNA, 25 bp, Homo sapien
ccagagtctccccaaactctcccac

SEQ ID NO: 655169 - DNA, 25 bp, Homo sapien
cccagagtctccccaaactctccca

SEQ ID NO: 655170 - DNA, 25 bp, Homo sapien
agcaagcaacctgcgggacaacgcg

SEQ ID NO: 655171 - DNA, 25 bp, Homo sapien
tccggtcgcagcaagcaacctgcgg

SEQ ID NO: 655172 - DNA, 25 bp, Homo sapien
ctctgtccggtctccctccagggac

SEQ ID NO: 655173 - DNA, 25 bp, Homo sapien
cgggctgcctccagcgaagactgtc

SEQ ID NO: 655174 - DNA, 25 bp, Homo sapien
ctgctccagtcggacggctcgtgcc

SEQ ID NO: 655175 - DNA, 25 bp, Homo sapien
tcgggctctgcatagtagctgctcc

SEQ ID NO: 655176 - DNA, 25 bp, Homo sapien
ctcgggctctgcatagtagctgctc

SEQ ID NO: 655177 - DNA, 25 bp, Homo sapien
agtcggacggctcgtgcccttccat

SEQ ID NO: 655178 - DNA, 25 bp, Homo sapien
cggaggcggtagttggaagtgggcg

SEQ ID NO: 655179 - DNA, 25 bp, Homo sapien
atttaacagccacaacaaacgacca

SEQ ID NO: 655180 - DNA, 25 bp, Homo sapien
aaagtcagccaaagcaccgtcccct

SEQ ID NO: 655181 - DNA, 25 bp, Homo sapien
agccacaacaaacgaccagcaatca

SEQ ID NO: 655182 - DNA, 25 bp, Homo sapien
ggctggtgatatagcgcggcgcgct

SEQ ID NO: 655183 - DNA, 25 bp, Homo sapien
cacctaggtgagaggtagccgcagc

SEQ ID NO: 655184 - DNA, 25 bp, Homo sapien
ccgcagtgacgtgggaggctggtga

SEQ ID NO: 655185 - DNA, 25 bp, Homo sapien
gggcagcccatttgaataatcagct

SEQ ID NO: 655186 - DNA, 25 bp, Homo sapien
gctgggcgggcgatcgggcacgcgg

SEQ ID NO: 655187 - DNA, 25 bp, Homo sapien
gcccctcagcgcctgccgtccgccc

SEQ ID NO: 655188 - DNA, 25 bp, Homo sapien
ctgcccctcagcgcctgccgtccgc

SEQ ID NO: 655189 - DNA, 25 bp, Homo sapien
tgggcgggcgatcgggcacgcggga

SEQ ID NO: 655190 - DNA, 25 bp, Homo sapien
tcagacccggaacggcctcgggaga

SEQ ID NO: 655191 - DNA, 25 bp, Homo sapien
cctgttacagttcagacccggaacg

SEQ ID NO: 655192 - DNA, 25 bp, Homo sapien
ctggcgcaagcagcccctctagcag

SEQ ID NO: 655193 - DNA, 25 bp, Homo sapien
tggccgcctcggctctccgactcct

SEQ ID NO: 655194 - DNA, 25 bp, Homo sapien
gcagacacggagcttcgcattgaag

SEQ ID NO: 655195 - DNA, 25 bp, Homo sapien
cagaagacaggcgagatggcagaca

SEQ ID NO: 655196 - DNA, 25 bp, Homo sapien
cgcattgaagcttgagtaagggtga

SEQ ID NO: 655197 - DNA, 25 bp, Homo sapien
cgagatggcagacacggagcttcgc

SEQ ID NO: 655198 - DNA, 25 bp, Homo sapien
tggaggtgtgcgcagcggagtcaga

SEQ ID NO: 655199 - DNA, 25 bp, Homo sapien
aaattcaaggtctgtatctccgcgg

SEQ ID NO: 655200 - DNA, 25 bp, Homo sapien
tccgcggaagccgtgcctatcggtc

SEQ ID NO: 655201 - DNA, 25 bp, Homo sapien
tgtacggctacgtagtgaacgtgga

SEQ ID NO: 655202 - DNA, 25 bp, Homo sapien
cgaggttctgggagctccggtaggg

SEQ ID NO: 655203 - DNA, 25 bp, Homo sapien
tctacggttagctttaggtagctgg

SEQ ID NO: 655204 - DNA, 25 bp, Homo sapien
gcctcctagagtctcggagcagccg

SEQ ID NO: 655205 - DNA, 25 bp, Homo sapien
gtagggctggatgacgcctcctaga

SEQ ID NO: 655206 - DNA, 25 bp, Homo sapien
gaacaatctgcgttcccctagcaaa

SEQ ID NO: 655207 - DNA, 25 bp, Homo sapien
gccttcatcttgctggaacaatctg

SEQ ID NO: 655208 - DNA, 25 bp, Homo sapien
catgaaaccaaccagtgcagaaggg

SEQ ID NO: 655209 - DNA, 25 bp, Homo sapien
tcctaagtgagaacccatgaaatac

SEQ ID NO: 655210 - DNA, 25 bp, Homo sapien
ggtggggtgcctttaagatggatct

SEQ ID NO: 655211 - DNA, 25 bp, Homo sapien
gtggggtgcctttaagatggatctg

SEQ ID NO: 655212 - DNA, 25 bp, Homo sapien
gggtggggtgcctttaagatggatc

SEQ ID NO: 655213 - DNA, 25 bp, Homo sapien
ggattccactcccatctgtggaggt

SEQ ID NO: 655214 - DNA, 25 bp, Homo sapien
ggattgagcagttgcggattccact

SEQ ID NO: 655215 - DNA, 25 bp, Homo sapien
catgtagaatttgatcgttgtgccg

SEQ ID NO: 655216 - DNA, 25 bp, Homo sapien
catcttttatgggacttctcagtgg

SEQ ID NO: 655217 - DNA, 25 bp, Homo sapien
ttccaagtgatgttctccaggtgac

SEQ ID NO: 655218 - DNA, 25 bp, Homo sapien
ttagtagtctctgcacttcccctcc

SEQ ID NO: 655219 - DNA, 25 bp, Homo sapien
gccatctttcttccaagtgatgttc

SEQ ID NO: 655220 - DNA, 25 bp, Homo sapien
ctctcccatctgtaaagccatcttt

SEQ ID NO: 655221 - DNA, 25 bp, Homo sapien
ccctcagttgccagagccagtctga

SEQ ID NO: 655222 - DNA, 25 bp, Homo sapien
accctcagttgccagagccagtctg

SEQ ID NO: 655223 - DNA, 25 bp, Homo sapien
taattcccaccatgtgtgagaagag

SEQ ID NO: 655224 - DNA, 25 bp, Homo sapien
ttcccaccatgtgtgagaagagtcc

SEQ ID NO: 655225 - DNA, 25 bp, Homo sapien
aattcccaccatgtgtgagaagagt

SEQ ID NO: 655226 - DNA, 25 bp, Homo sapien
ataattcccaccatgtgtgagaaga

SEQ ID NO: 655227 - DNA, 25 bp, Homo sapien
cagcagcagccagtcataaggcatc

SEQ ID NO: 655228 - DNA, 25 bp, Homo sapien
tcatctccaccattgatgtctgtgg

SEQ ID NO: 655229 - DNA, 25 bp, Homo sapien
gcagccagtcataaggcatctgggt

SEQ ID NO: 655230 - DNA, 25 bp, Homo sapien
gacgttgagtggatgccagtgctca

SEQ ID NO: 655231 - DNA, 25 bp, Homo sapien
ccaggtgcctactccaggaggagaa

SEQ ID NO: 655232 - DNA, 25 bp, Homo sapien
ggtgccaagggtgtatttcttttga

SEQ ID NO: 655233 - DNA, 25 bp, Homo sapien
tcctccagtaaaactggatccttaa

SEQ ID NO: 655234 - DNA, 25 bp, Homo sapien
ttgagggtggttattgtttcctcca

SEQ ID NO: 655235 - DNA, 25 bp, Homo sapien
tggtggctacaaattgctgctcttc

SEQ ID NO: 655236 - DNA, 25 bp, Homo sapien
gattttggtggctacaaattgctgc

SEQ ID NO: 655237 - DNA, 25 bp, Homo sapien
gaagattttggtggctacaaattgc

SEQ ID NO: 655238 - DNA, 25 bp, Homo sapien
ttttggtggctacaaattgctgctc

SEQ ID NO: 655239 - DNA, 25 bp, Homo sapien
caaacagctcctcaattcgggtgtc

SEQ ID NO: 655240 - DNA, 25 bp, Homo sapien
tctctagttgccagagcccgcttct

SEQ ID NO: 655241 - DNA, 25 bp, Homo sapien
ggtttaagacggcagtatatccctc

SEQ ID NO: 655242 - DNA, 25 bp, Homo sapien
caccctaaataactgcgactgcggc

SEQ ID NO: 655243 - DNA, 25 bp, Homo sapien
gccagtgataaaggacttgacaaac

SEQ ID NO: 655244 - DNA, 25 bp, Homo sapien
tgggcagccctgagttggccttcct

SEQ ID NO: 655245 - DNA, 25 bp, Homo sapien
tgacctcctctatggagttctgttt

SEQ ID NO: 655246 - DNA, 25 bp, Homo sapien
caaacatggtgtgctgaatcatatc

SEQ ID NO: 655247 - DNA, 25 bp, Homo sapien
tttagctcgggttgcagcaaacctc

SEQ ID NO: 655248 - DNA, 25 bp, Homo sapien
aaatctgtttgcgtccgggttggag

SEQ ID NO: 655249 - DNA, 25 bp, Homo sapien
tcgccagggttcaggcagcttaagc

SEQ ID NO: 655250 - DNA, 25 bp, Homo sapien
taagctgcccacgtagttaaaagca

SEQ ID NO: 655251 - DNA, 25 bp, Homo sapien
accactgggagctacggcagctgaa

SEQ ID NO: 655252 - DNA, 25 bp, Homo sapien
gagattttggctaatcttggcccct

SEQ ID NO: 655253 - DNA, 25 bp, Homo sapien
catctaaatgttggagtctgactgc

SEQ ID NO: 655254 - DNA, 25 bp, Homo sapien
ggtgcgaagatgatgccagttgctt

SEQ ID NO: 655255 - DNA, 25 bp, Homo sapien
gcagatgattgagtaagtggaaaga

SEQ ID NO: 655256 - DNA, 25 bp, Homo sapien
ctgcccagtattgcggaggcagatg

SEQ ID NO: 655257 - DNA, 25 bp, Homo sapien
aggcagatgattgagtaagtggaaa

SEQ ID NO: 655258 - DNA, 25 bp, Homo sapien
tattgcggaggcagatgattgagta

SEQ ID NO: 655259 - DNA, 25 bp, Homo sapien
tcaaatgaagacgagttgctcttaa

SEQ ID NO: 655260 - DNA, 25 bp, Homo sapien
caaatgaagacgagttgctcttaaa

SEQ ID NO: 655261 - DNA, 25 bp, Homo sapien
aaatgaagacgagttgctcttaaac

SEQ ID NO: 655262 - DNA, 25 bp, Homo sapien
taaacatcagttaaagacggccaat

SEQ ID NO: 655263 - DNA, 25 bp, Homo sapien
tctggtagcgctgagctcgccaagt

SEQ ID NO: 655264 - DNA, 25 bp, Homo sapien
aataagttattccacccagcacgag

SEQ ID NO: 655265 - DNA, 25 bp, Homo sapien
taatattgtggagcctattgcctct

SEQ ID NO: 655266 - DNA, 25 bp, Homo sapien
ctgccaatagacaaatcagagtgaa

SEQ ID NO: 655267 - DNA, 25 bp, Homo sapien
ccaatagacaaatcagagtgaacat

SEQ ID NO: 655268 - DNA, 25 bp, Homo sapien
tgttacgctatgcagtttaccctct

SEQ ID NO: 655269 - DNA, 25 bp, Homo sapien
gcttacaaggccttacaagatctgt

SEQ ID NO: 655270 - DNA, 25 bp, Homo sapien
tctgactgagacaatcttgccctat

SEQ ID NO: 655271 - DNA, 25 bp, Homo sapien
tcaaatgccactgatcactgaagct

SEQ ID NO: 655272 - DNA, 25 bp, Homo sapien
gaagcagcggcagactcacattctc

SEQ ID NO: 655273 - DNA, 25 bp, Homo sapien
gcagcggcagactcacattctcctt

SEQ ID NO: 655274 - DNA, 25 bp, Homo sapien
agaagcagcggcagactcacattct

SEQ ID NO: 655275 - DNA, 25 bp, Homo sapien
aagcagcggcagactcacattctcc

SEQ ID NO: 655276 - DNA, 25 bp, Homo sapien
cgatgaggtagatgaaagaattttt

SEQ ID NO: 655277 - DNA, 25 bp, Homo sapien
tggattttcttctacctcgagttgc

SEQ ID NO: 655278 - DNA, 25 bp, Homo sapien
aagaattttttgagtgggtcactgg

SEQ ID NO: 655279 - DNA, 25 bp, Homo sapien
ttcatgtgctgcctacgatgaggta

SEQ ID NO: 655280 - DNA, 25 bp, Homo sapien
ggctgtctggggtgatgacaatcac

SEQ ID NO: 655281 - DNA, 25 bp, Homo sapien
gggccagatgctgggtaatttatca

SEQ ID NO: 655282 - DNA, 25 bp, Homo sapien
tggggtgatgacaatcacaggctct

SEQ ID NO: 655283 - DNA, 25 bp, Homo sapien
tgctgggtaatttatcagccctgca

SEQ ID NO: 655284 - DNA, 25 bp, Homo sapien
cagtaatctaggcttttcctaacca

SEQ ID NO: 655285 - DNA, 25 bp, Homo sapien
ttcaaaatctgttctgtccatacct

SEQ ID NO: 655286 - DNA, 25 bp, Homo sapien
ccccacttcttcataccatttgatt

SEQ ID NO: 655287 - DNA, 25 bp, Homo sapien
ggcttttcctaaccagctacttcaa

SEQ ID NO: 655288 - DNA, 25 bp, Homo sapien
agtttcaatttctaatcatccccac

SEQ ID NO: 655289 - DNA, 25 bp, Homo sapien
tacttcccaattttgtcagctgagt

SEQ ID NO: 655290 - DNA, 25 bp, Homo sapien
ctttacttcccaattttgtcagctg

SEQ ID NO: 655291 - DNA, 25 bp, Homo sapien
cccaattttgtcagctgagtttcaa

SEQ ID NO: 655292 - DNA, 25 bp, Homo sapien
ttcatttgaactagctgactcttcc

SEQ ID NO: 655293 - DNA, 25 bp, Homo sapien
taatgcctatggtctttgaagccct

SEQ ID NO: 655294 - DNA, 25 bp, Homo sapien
tcaaagtggttctgtgctcaaggag

SEQ ID NO: 655295 - DNA, 25 bp, Homo sapien
tactaactgatccttgaagcatagc

SEQ ID NO: 655296 - DNA, 25 bp, Homo sapien
cagtttttgctggataagagaccaa

SEQ ID NO: 655297 - DNA, 25 bp, Homo sapien
ctggtttactgcatccaccagcgct

SEQ ID NO: 655298 - DNA, 25 bp, Homo sapien
atccaccagcgctgtgggcagagca

SEQ ID NO: 655299 - DNA, 25 bp, Homo sapien
gacagcggggacctggtttactgca

SEQ ID NO: 655300 - DNA, 25 bp, Homo sapien
ggtttactgcatccaccagcgctgt

SEQ ID NO: 655301 - DNA, 25 bp, Homo sapien
tgaaaatccctagagctctcccggg

SEQ ID NO: 655302 - DNA, 25 bp, Homo sapien
gccgtgtatagacgccactgagcca

SEQ ID NO: 655303 - DNA, 25 bp, Homo sapien
gctttctcagatgtggccgtgtata

SEQ ID NO: 655304 - DNA, 25 bp, Homo sapien
gctgcgtggatgacgccttgtgctt

SEQ ID NO: 655305 - DNA, 25 bp, Homo sapien
gaatttgaagtaagcaccaggccag

SEQ ID NO: 655306 - DNA, 25 bp, Homo sapien
aaaacttgtctgtcgggccaatgag

SEQ ID NO: 655307 - DNA, 25 bp, Homo sapien
tccagggagtactcacacaagggcg

SEQ ID NO: 655308 - DNA, 25 bp, Homo sapien
cattaaaggcacacggtgcaggtca

SEQ ID NO: 655309 - DNA, 25 bp, Homo sapien
tttaatgaaactcttaggccgatcc

SEQ ID NO: 655310 - DNA, 25 bp, Homo sapien
agtgacgctgtcaaggctcctttgg

SEQ ID NO: 655311 - DNA, 25 bp, Homo sapien
gacaggtttgtctgcagtgacgctg

SEQ ID NO: 655312 - DNA, 25 bp, Homo sapien
tggattcttctgactgccggcgtcg

SEQ ID NO: 655313 - DNA, 25 bp, Homo sapien
accgagccttttcttgctacactcg

SEQ ID NO: 655314 - DNA, 25 bp, Homo sapien
tcttgctacactcggctctgtgact

SEQ ID NO: 655315 - DNA, 25 bp, Homo sapien
gagccttttcttgctacactcggct

SEQ ID NO: 655316 - DNA, 25 bp, Homo sapien
ttttcttgctacactcggctctgtg

SEQ ID NO: 655317 - DNA, 25 bp, Homo sapien
cttcagaggatagcccttaggctgc

SEQ ID NO: 655318 - DNA, 25 bp, Homo sapien
cagaggatagcccttaggctgctgg

SEQ ID NO: 655319 - DNA, 25 bp, Homo sapien
ttcagaggatagcccttaggctgct

SEQ ID NO: 655320 - DNA, 25 bp, Homo sapien
gaggatagcccttaggctgctggag

SEQ ID NO: 655321 - DNA, 25 bp, Homo sapien
acgctggctagcaaggctgcccaac

SEQ ID NO: 655322 - DNA, 25 bp, Homo sapien
ctttacgtctttgtcaccaagttgg

SEQ ID NO: 655323 - DNA, 25 bp, Homo sapien
caaatgagaatctcaacaatttcca

SEQ ID NO: 655324 - DNA, 25 bp, Homo sapien
ttcctgaagacttggcacacgctgg

SEQ ID NO: 655325 - DNA, 25 bp, Homo sapien
gatatcttgagagggcatcatcact

SEQ ID NO: 655326 - DNA, 25 bp, Homo sapien
ggctccaatggtaacggctgctaat

SEQ ID NO: 655327 - DNA, 25 bp, Homo sapien
gaggaaaagtgactctgctcccacc

SEQ ID NO: 655328 - DNA, 25 bp, Homo sapien
gtctcattgagcgttcgtggctgcc

SEQ ID NO: 655329 - DNA, 25 bp, Homo sapien
tcagcccacttgtctcctgttcggg

SEQ ID NO: 655330 - DNA, 25 bp, Homo sapien
tctcagcccacttgtctcctgttcg

SEQ ID NO: 655331 - DNA, 25 bp, Homo sapien
ctctttgtctgggttttatctctcc

SEQ ID NO: 655332 - DNA, 25 bp, Homo sapien
tttgtctgggttttatctctccaca

SEQ ID NO: 655333 - DNA, 25 bp, Homo sapien
acaaggatttggaggcaagcagttt

SEQ ID NO: 655334 - DNA, 25 bp, Homo sapien
ctgagacaaggatttggaggcaagc

SEQ ID NO: 655335 - DNA, 25 bp, Homo sapien
agacaaggatttggaggcaagcagt

SEQ ID NO: 655336 - DNA, 25 bp, Homo sapien
tgagacaaggatttggaggcaagca

SEQ ID NO: 655337 - DNA, 25 bp, Homo sapien
tgataaaggaactgatgtctgtccg

SEQ ID NO: 655338 - DNA, 25 bp, Homo sapien
ttgatgagtctacacaacaggaggc

SEQ ID NO: 655339 - DNA, 25 bp, Homo sapien
tggtcctcagaagctaatgggtcac

SEQ ID NO: 655340 - DNA, 25 bp, Homo sapien
gctggccccacctagtgcaaggatt

SEQ ID NO: 655341 - DNA, 25 bp, Homo sapien
ggtcctggaccagtttatcatcgca

SEQ ID NO: 655342 - DNA, 25 bp, Homo sapien
tccgtgtgataaccagccggtcctg

SEQ ID NO: 655343 - DNA, 25 bp, Homo sapien
accagctggattggagggcacctgt

SEQ ID NO: 655344 - DNA, 25 bp, Homo sapien
ggcacctgtggcataccttgtccta

SEQ ID NO: 655345 - DNA, 25 bp, Homo sapien
atcttcagccatgaggggcagattg

SEQ ID NO: 655346 - DNA, 25 bp, Homo sapien
aaattgacaacttcccattcaagcc

SEQ ID NO: 655347 - DNA, 25 bp, Homo sapien
gtaaattgacaacttcccattcaag

SEQ ID NO: 655348 - DNA, 25 bp, Homo sapien
tcttcagccatgaggggcagattgc

SEQ ID NO: 655349 - DNA, 25 bp, Homo sapien
ccctggggagttggagacgtgggca

SEQ ID NO: 655350 - DNA, 25 bp, Homo sapien
cctggggagttggagacgtgggcat

SEQ ID NO: 655351 - DNA, 25 bp, Homo sapien
tccctgttaccctttgctcaccgtc

SEQ ID NO: 655352 - DNA, 25 bp, Homo sapien
tcttcctcaccagaatggagaactg

SEQ ID NO: 655353 - DNA, 25 bp, Homo sapien
aatggagaactggcccctggcaagc

SEQ ID NO: 655354 - DNA, 25 bp, Homo sapien
tcaccgtcttcctcaccagaatgga

SEQ ID NO: 655355 - DNA, 25 bp, Homo sapien
cagctgccggataaccccaattggg

SEQ ID NO: 655356 - DNA, 25 bp, Homo sapien
ggttatcgtggtgttcaggcttccc

SEQ ID NO: 655357 - DNA, 25 bp, Homo sapien
caagcagcgagcagtaccttgagcc

SEQ ID NO: 655358 - DNA, 25 bp, Homo sapien
cttgagcctgcagggaacatatgaa

SEQ ID NO: 655359 - DNA, 25 bp, Homo sapien
atgagcacggtgaaaatatccaaca

SEQ ID NO: 655360 - DNA, 25 bp, Homo sapien
ctgagatgagcacggtgaaaatatc

SEQ ID NO: 655361 - DNA, 25 bp, Homo sapien
agaaaagatggaggcaaaatgcaag

SEQ ID NO: 655362 - DNA, 25 bp, Homo sapien
gagatgagcacggtgaaaatatcca

SEQ ID NO: 655363 - DNA, 25 bp, Homo sapien
ctgctgagctgccatactcaggact

SEQ ID NO: 655364 - DNA, 25 bp, Homo sapien
gctgagctgccatactcaggactgg

SEQ ID NO: 655365 - DNA, 25 bp, Homo sapien
cctgctgagctgccatactcaggac

SEQ ID NO: 655366 - DNA, 25 bp, Homo sapien
ctccagcttcatttcttgctgctgt

SEQ ID NO: 655367 - DNA, 25 bp, Homo sapien
cagcttcatttcttgctgctgtggg

SEQ ID NO: 655368 - DNA, 25 bp, Homo sapien
gcttcatttcttgctgctgtgggga

SEQ ID NO: 655369 - DNA, 25 bp, Homo sapien
ccagcttcatttcttgctgctgtgg

SEQ ID NO: 655370 - DNA, 25 bp, Homo sapien
atgcatagaaggtgttggtcacatt

SEQ ID NO: 655371 - DNA, 25 bp, Homo sapien
catagaaggtgttggtcacattgag

SEQ ID NO: 655372 - DNA, 25 bp, Homo sapien
aaggtgttggtcacattgagtggaa

SEQ ID NO: 655373 - DNA, 25 bp, Homo sapien
ccagctcccagtccgtgacctgcat

SEQ ID NO: 655374 - DNA, 25 bp, Homo sapien
gtcaaggttgttaccacaaaagcag

SEQ ID NO: 655375 - DNA, 25 bp, Homo sapien
gatctccaatggtagtaacaccaga

SEQ ID NO: 655376 - DNA, 25 bp, Homo sapien
ggtatcgtacactccccaaggttca

SEQ ID NO: 655377 - DNA, 25 bp, Homo sapien
tatatgccaatgatcgtagcccaaa

SEQ ID NO: 655378 - DNA, 25 bp, Homo sapien
tgttccattgggtgtgggacttcct

SEQ ID NO: 655379 - DNA, 25 bp, Homo sapien
tcctgctgcaatccatccctgtctc

SEQ ID NO: 655380 - DNA, 25 bp, Homo sapien
ggcccattaccacatgttcctgctg

SEQ ID NO: 655381 - DNA, 25 bp, Homo sapien
gctgacatggcccattaccacatgt

SEQ ID NO: 655382 - DNA, 25 bp, Homo sapien
ccgtggagcctacagggcacctgct

SEQ ID NO: 655383 - DNA, 25 bp, Homo sapien
ggccgtggagcctacagggcacctg

SEQ ID NO: 655384 - DNA, 25 bp, Homo sapien
gccgtggagcctacagggcacctgc

SEQ ID NO: 655385 - DNA, 25 bp, Homo sapien
gaaagtgatgctagggctctggaga

SEQ ID NO: 655386 - DNA, 25 bp, Homo sapien
gtccccttgaagcagaccctgggag

SEQ ID NO: 655387 - DNA, 25 bp, Homo sapien
tcccaaatctcccagttaaactcag

SEQ ID NO: 655388 - DNA, 25 bp, Homo sapien
tctcccagttaaactcagtacactt

SEQ ID NO: 655389 - DNA, 25 bp, Homo sapien
catccactatttggtgggtggtggt

SEQ ID NO: 655390 - DNA, 25 bp, Homo sapien
cactatttggtgggtggtggtcttt

SEQ ID NO: 655391 - DNA, 25 bp, Homo sapien
tttgccatccactatttggtgggtg

SEQ ID NO: 655392 - DNA, 25 bp, Homo sapien
tgccatccactatttggtgggtggt

SEQ ID NO: 655393 - DNA, 25 bp, Homo sapien
ggcatcaccaatattgaagtcctcg

SEQ ID NO: 655394 - DNA, 25 bp, Homo sapien
ccagggcatcaccaatattgaagtc

SEQ ID NO: 655395 - DNA, 25 bp, Homo sapien
catcaccaatattgaagtcctcgcc

SEQ ID NO: 655396 - DNA, 25 bp, Homo sapien
agggcatcaccaatattgaagtcct

SEQ ID NO: 655397 - DNA, 25 bp, Homo sapien
tccagcaggcggcagtaggtggaga

SEQ ID NO: 655398 - DNA, 25 bp, Homo sapien
caggcggcagtaggtggagatctca

SEQ ID NO: 655399 - DNA, 25 bp, Homo sapien
cagcaggcggcagtaggtggagatc

SEQ ID NO: 655400 - DNA, 25 bp, Homo sapien
gcaggcggcagtaggtggagatctc

SEQ ID NO: 655401 - DNA, 25 bp, Homo sapien
gcgctgtccctctgcccgggtctgt

SEQ ID NO: 655402 - DNA, 25 bp, Homo sapien
cctactcctgggcctggcgctgtcc

SEQ ID NO: 655403 - DNA, 25 bp, Homo sapien
ctggcgctgtccctctgcccgggtc

SEQ ID NO: 655404 - DNA, 25 bp, Homo sapien
cgctgtccctctgcccgggtctgta

SEQ ID NO: 655405 - DNA, 25 bp, Homo sapien
gcagcaggatcccattgagctgctc

SEQ ID NO: 655406 - DNA, 25 bp, Homo sapien
tgcagcaggatcccattgagctgct

SEQ ID NO: 655407 - DNA, 25 bp, Homo sapien
gctctgacttcaggtgcagcaggat

SEQ ID NO: 655408 - DNA, 25 bp, Homo sapien
acttcaggtgcagcaggatcccatt

SEQ ID NO: 655409 - DNA, 25 bp, Homo sapien
atttcttatggaatccaggttgatc

SEQ ID NO: 655410 - DNA, 25 bp, Homo sapien
gctagccttcagatttcttatggaa

SEQ ID NO: 655411 - DNA, 25 bp, Homo sapien
tcttatggaatccaggttgatctcc

SEQ ID NO: 655412 - DNA, 25 bp, Homo sapien
cagatttcttatggaatccaggttg

SEQ ID NO: 655413 - DNA, 25 bp, Homo sapien
tgtctgccatgatctagttgaggtc

SEQ ID NO: 655414 - DNA, 25 bp, Homo sapien
atgatctagttgaggtcctgagatt

SEQ ID NO: 655415 - DNA, 25 bp, Homo sapien
gctcatctcagttcttctgagccag

SEQ ID NO: 655416 - DNA, 25 bp, Homo sapien
tccagctcatctcagttcttctgag

SEQ ID NO: 655417 - DNA, 25 bp, Homo sapien
agctctctacagattggagcatggc

SEQ ID NO: 655418 - DNA, 25 bp, Homo sapien
gaggtagctctctacagattggagc

SEQ ID NO: 655419 - DNA, 25 bp, Homo sapien
cccatggaggtagctctctacagat

SEQ ID NO: 655420 - DNA, 25 bp, Homo sapien
cagagcccatggaggtagctctcta

SEQ ID NO: 655421 - DNA, 25 bp, Homo sapien
tctggacaccatgccgcccccgaag

SEQ ID NO: 655422 - DNA, 25 bp, Homo sapien
agcaccttcatagacgctggccttg

SEQ ID NO: 655423 - DNA, 25 bp, Homo sapien
caccttcatagacgctggccttgct

SEQ ID NO: 655424 - DNA, 25 bp, Homo sapien
tggacaccatgccgcccccgaagct

SEQ ID NO: 655425 - DNA, 25 bp, Homo sapien
gtccgaggaggagagcgagaggaca

SEQ ID NO: 655426 - DNA, 25 bp, Homo sapien
gacaggactcaggctttgctgacca

SEQ ID NO: 655427 - DNA, 25 bp, Homo sapien
ggacaggactcaggctttgctgacc

SEQ ID NO: 655428 - DNA, 25 bp, Homo sapien
gctgtccgaggaggagagcgagagg

SEQ ID NO: 655429 - DNA, 25 bp, Homo sapien
aagcagagcttcaggaggatttctg

SEQ ID NO: 655430 - DNA, 25 bp, Homo sapien
gaaaagtcagcaggacaaaagcaag

SEQ ID NO: 655431 - DNA, 25 bp, Homo sapien
tggctagatggcgttgccaggaaaa

SEQ ID NO: 655432 - DNA, 25 bp, Homo sapien
acagagccagcggtcattttgagaa

SEQ ID NO: 655433 - DNA, 25 bp, Homo sapien
tctgaccgggatacacaagtgctgg

SEQ ID NO: 655434 - DNA, 25 bp, Homo sapien
cacccgagagccgatgtgtatgaag

SEQ ID NO: 655435 - DNA, 25 bp, Homo sapien
cactgcatgtgcgaacacccgagag

SEQ ID NO: 655436 - DNA, 25 bp, Homo sapien
tgaaggtgactaggtatccatgagc

SEQ ID NO: 655437 - DNA, 25 bp, Homo sapien
gacagagtagaggtcctgcggtcac

SEQ ID NO: 655438 - DNA, 25 bp, Homo sapien
gtcctgcggtcacgggccaaggcca

SEQ ID NO: 655439 - DNA, 25 bp, Homo sapien
ggtccactctgactgcccatctgag

SEQ ID NO: 655440 - DNA, 25 bp, Homo sapien
gtggtccactctgactgcccatctg

SEQ ID NO: 655441 - DNA, 25 bp, Homo sapien
gacttgcctgctctggatagactaa

SEQ ID NO: 655442 - DNA, 25 bp, Homo sapien
tatgacaatgggaccccgtgtgcag

SEQ ID NO: 655443 - DNA, 25 bp, Homo sapien
taaggaatctatgacagaccaggaa

SEQ ID NO: 655444 - DNA, 25 bp, Homo sapien
ggaagctctcctagggtcccgatga

SEQ ID NO: 655445 - DNA, 25 bp, Homo sapien
gcaaagacatccctagaatgtgcac

SEQ ID NO: 655446 - DNA, 25 bp, Homo sapien
gtcagggttcctcaagcctatgctg

SEQ ID NO: 655447 - DNA, 25 bp, Homo sapien
tttactgcatgtgagtgaaatcccc

SEQ ID NO: 655448 - DNA, 25 bp, Homo sapien
catcagggagtatagagagtaggaa

SEQ ID NO: 655449 - DNA, 25 bp, Homo sapien
gctccagtaatgtcttactgagaat

SEQ ID NO: 655450 - DNA, 25 bp, Homo sapien
ctagggccgggaagtgagtgcactc

SEQ ID NO: 655451 - DNA, 25 bp, Homo sapien
tccagtaatgtcttactgagaatgg

SEQ ID NO: 655452 - DNA, 25 bp, Homo sapien
gaagtgagtgcactcaaagcaggat

SEQ ID NO: 655453 - DNA, 25 bp, Homo sapien
cagaaacgccccttcatacttttga

SEQ ID NO: 655454 - DNA, 25 bp, Homo sapien
cctccaaccagaaacgccccttcat

SEQ ID NO: 655455 - DNA, 25 bp, Homo sapien
ccagaaacgccccttcatacttttg

SEQ ID NO: 655456 - DNA, 25 bp, Homo sapien
caaccagaaacgccccttcatactt

SEQ ID NO: 655457 - DNA, 25 bp, Homo sapien
caagatcagatgatattgggagcat

SEQ ID NO: 655458 - DNA, 25 bp, Homo sapien
ttgggagcattcagggtggtacagc

SEQ ID NO: 655459 - DNA, 25 bp, Homo sapien
cattcagggtggtacagccataggc

SEQ ID NO: 655460 - DNA, 25 bp, Homo sapien
tccaagatcagatgatattgggagc

SEQ ID NO: 655461 - DNA, 25 bp, Homo sapien
ttttacccatttgatgatgatagtg

SEQ ID NO: 655462 - DNA, 25 bp, Homo sapien
tttttacccatttgatgatgatagt

SEQ ID NO: 655463 - DNA, 25 bp, Homo sapien
tttacccatttgatgatgatagtga

SEQ ID NO: 655464 - DNA, 25 bp, Homo sapien
atgcctcacgtccactgaccgagag

SEQ ID NO: 655465 - DNA, 25 bp, Homo sapien
accgagagccgaaggaaacacagca

SEQ ID NO: 655466 - DNA, 25 bp, Homo sapien
ctgacacatgcctcacgtccactga

SEQ ID NO: 655467 - DNA, 25 bp, Homo sapien
cactgaccgagagccgaaggaaaca

SEQ ID NO: 655468 - DNA, 25 bp, Homo sapien
gccataaccttatttgctgtagcca

SEQ ID NO: 655469 - DNA, 25 bp, Homo sapien
tcatcgtggccacatggagtagcca

SEQ ID NO: 655470 - DNA, 25 bp, Homo sapien
gcaatgtgaatggaagtagctgaag

SEQ ID NO: 655471 - DNA, 25 bp, Homo sapien
tcaggcctcgctttcaaaaccgtca

SEQ ID NO: 655472 - DNA, 25 bp, Homo sapien
tcggactcaggttacacgggcaggt

SEQ ID NO: 655473 - DNA, 25 bp, Homo sapien
tgttggcccacgttgtctgggctcc

SEQ ID NO: 655474 - DNA, 25 bp, Homo sapien
tcagagcagggcagatcggactcag

SEQ ID NO: 655475 - DNA, 25 bp, Homo sapien
acccctgaggatatagaataagcac

SEQ ID NO: 655476 - DNA, 25 bp, Homo sapien
tatgaaccagttattagagaaaagc

SEQ ID NO: 655477 - DNA, 25 bp, Homo sapien
acatcagctttagttagcaagaatg

SEQ ID NO: 655478 - DNA, 25 bp, Homo sapien
aaagaacttaaggaatatgaaccag

SEQ ID NO: 655479 - DNA, 25 bp, Homo sapien
tcagctttagttagcaagaatgaaa

SEQ ID NO: 655480 - DNA, 25 bp, Homo sapien
taggctcattggagttacagcccgc

SEQ ID NO: 655481 - DNA, 25 bp, Homo sapien
atttcattaggctcattggagttac

SEQ ID NO: 655482 - DNA, 25 bp, Homo sapien
gctcattggagttacagcccgccat

SEQ ID NO: 655483 - DNA, 25 bp, Homo sapien
gctttctgattcatgaagcatgaga

SEQ ID NO: 655484 - DNA, 25 bp, Homo sapien
gctctaggagctttgtagtatggat

SEQ ID NO: 655485 - DNA, 25 bp, Homo sapien
agaaatgcacagtccacagttcagc

SEQ ID NO: 655486 - DNA, 25 bp, Homo sapien
taagaaacactctgattggccaaag

SEQ ID NO: 655487 - DNA, 25 bp, Homo sapien
tggatggagtgcagggtgatagtcc

SEQ ID NO: 655488 - DNA, 25 bp, Homo sapien
ttctaagtagatatttggcatagat

SEQ ID NO: 655489 - DNA, 25 bp, Homo sapien
aagaacaggatttttctaagtagat

SEQ ID NO: 655490 - DNA, 25 bp, Homo sapien
agatatttggcatagatgatggcat

SEQ ID NO: 655491 - DNA, 25 bp, Homo sapien
aagtagatatttggcatagatgatg

SEQ ID NO: 655492 - DNA, 25 bp, Homo sapien
ggtgcccgcagtgtctttcctggtt

SEQ ID NO: 655493 - DNA, 25 bp, Homo sapien
tccttgcttggaaagcttgattcca

SEQ ID NO: 655494 - DNA, 25 bp, Homo sapien
gaaagcttgattccacttgcaccat

SEQ ID NO: 655495 - DNA, 25 bp, Homo sapien
ttggtcatctcagcatttgcggtgc

SEQ ID NO: 655496 - DNA, 25 bp, Homo sapien
aataccacacatctacagccatctg

SEQ ID NO: 655497 - DNA, 25 bp, Homo sapien
gctggaggcattgtgctacctgact

SEQ ID NO: 655498 - DNA, 25 bp, Homo sapien
aaataataccacacatctacagcca

SEQ ID NO: 655499 - DNA, 25 bp, Homo sapien
taataccacacatctacagccatct

SEQ ID NO: 655500 - DNA, 25 bp, Homo sapien
gcttggtaaacacgctaagaggctc

SEQ ID NO: 655501 - DNA, 25 bp, Homo sapien
gaggtaaccatgagcaaaccacaga

SEQ ID NO: 655502 - DNA, 25 bp, Homo sapien
taagaggctctgacagtatgatgcc

SEQ ID NO: 655503 - DNA, 25 bp, Homo sapien
gcagctgcatgagggtccacataca

SEQ ID NO: 655504 - DNA, 25 bp, Homo sapien
taagtaatccccagtaatcaaaaca

SEQ ID NO: 655505 - DNA, 25 bp, Homo sapien
ctgaagcgtaatgagagtgactcac

SEQ ID NO: 655506 - DNA, 25 bp, Homo sapien
catgtgaggaactgaagcgtaatga

SEQ ID NO: 655507 - DNA, 25 bp, Homo sapien
cagtaatcaaaacaaggcaccatct

SEQ ID NO: 655508 - DNA, 25 bp, Homo sapien
aaagagcgcaggagtatcaggagtc

SEQ ID NO: 655509 - DNA, 25 bp, Homo sapien
gtttccacacggagagaacaggcca

SEQ ID NO: 655510 - DNA, 25 bp, Homo sapien
gggttcatagccacctgcattctct

SEQ ID NO: 655511 - DNA, 25 bp, Homo sapien
gcaatcctggtccttaacccagaga

SEQ ID NO: 655512 - DNA, 25 bp, Homo sapien
taatgtggggagcagattcagcagc

SEQ ID NO: 655513 - DNA, 25 bp, Homo sapien
tgtggggagcagattcagcagcaca

SEQ ID NO: 655514 - DNA, 25 bp, Homo sapien
ggggagcagattcagcagcacacac

SEQ ID NO: 655515 - DNA, 25 bp, Homo sapien
tggggagcagattcagcagcacaca

SEQ ID NO: 655516 - DNA, 25 bp, Homo sapien
agacaaatgcacttggtactgatgt

SEQ ID NO: 655517 - DNA, 25 bp, Homo sapien
taataagcaaattacatagtaagga

SEQ ID NO: 655518 - DNA, 25 bp, Homo sapien
ttttactctaaaagtcagatatatt

SEQ ID NO: 655519 - DNA, 25 bp, Homo sapien
cagcagaaaggacagttatttttgt

SEQ ID NO: 655520 - DNA, 25 bp, Homo sapien
tacttgaaaaattcaacagcagaaa

SEQ ID NO: 655521 - DNA, 25 bp, Homo sapien
cttctgccatgtacaggcaatacat

SEQ ID NO: 655522 - DNA, 25 bp, Homo sapien
tacatcaaggcaacggccactgttg

SEQ ID NO: 655523 - DNA, 25 bp, Homo sapien
ccaccagctggaactagaaacaaca

SEQ ID NO: 655524 - DNA, 25 bp, Homo sapien
caacagtagcgataaaagtttctga

SEQ ID NO: 655525 - DNA, 25 bp, Homo sapien
ctacaagcccacttcacctggggtc

SEQ ID NO: 655526 - DNA, 25 bp, Homo sapien
tacaagcccacttcacctggggtca

SEQ ID NO: 655527 - DNA, 25 bp, Homo sapien
agcccacttcacctggggtcaaaag

SEQ ID NO: 655528 - DNA, 25 bp, Homo sapien
caagcccacttcacctggggtcaaa

SEQ ID NO: 655529 - DNA, 25 bp, Homo sapien
taatttagccggctggaatccagaa

SEQ ID NO: 655530 - DNA, 25 bp, Homo sapien
agagcacttccacggcttgcaggga

SEQ ID NO: 655531 - DNA, 25 bp, Homo sapien
caggtcacccattaagttgtcgagg

SEQ ID NO: 655532 - DNA, 25 bp, Homo sapien
tccccttgggcagacaggacgttgg

SEQ ID NO: 655533 - DNA, 25 bp, Homo sapien
ctgaggacagaggacccctgacatc

SEQ ID NO: 655534 - DNA, 25 bp, Homo sapien
ccctgacatcttcgtgatggaggct

SEQ ID NO: 655535 - DNA, 25 bp, Homo sapien
catcttcgtgatggaggctcataga

SEQ ID NO: 655536 - DNA, 25 bp, Homo sapien
gaggacccctgacatcttcgtgatg

SEQ ID NO: 655537 - DNA, 25 bp, Homo sapien
cagaaatccccagcccaggagatgc

SEQ ID NO: 655538 - DNA, 25 bp, Homo sapien
gagttcacagaaatccccagcccag

SEQ ID NO: 655539 - DNA, 25 bp, Homo sapien
agttcacagaaatccccagcccagg

SEQ ID NO: 655540 - DNA, 25 bp, Homo sapien
aaatccccagcccaggagatgccac

SEQ ID NO: 655541 - DNA, 25 bp, Homo sapien
ggctgcagtgctgttgacgtccctg

SEQ ID NO: 655542 - DNA, 25 bp, Homo sapien
gaagttcccttaagtaggtgagaga

SEQ ID NO: 655543 - DNA, 25 bp, Homo sapien
ggtgagagacaaccaaccctcatct

SEQ ID NO: 655544 - DNA, 25 bp, Homo sapien
gacttgtcagtgtgcttgggatcca

SEQ ID NO: 655545 - DNA, 25 bp, Homo sapien
taaatgtcactagaggtgtcgagtg

SEQ ID NO: 655546 - DNA, 25 bp, Homo sapien
tccactccagtcttaaatgtcacta

SEQ ID NO: 655547 - DNA, 25 bp, Homo sapien
tggctcactaatgccctctagaaag

SEQ ID NO: 655548 - DNA, 25 bp, Homo sapien
catccctagacattctgatggctca

SEQ ID NO: 655549 - DNA, 25 bp, Homo sapien
ccattcttcaatcgccactattctg

SEQ ID NO: 655550 - DNA, 25 bp, Homo sapien
ttggtccattcttcaatcgccacta

SEQ ID NO: 655551 - DNA, 25 bp, Homo sapien
ggtccattcttcaatcgccactatt

SEQ ID NO: 655552 - DNA, 25 bp, Homo sapien
tcttggtccattcttcaatcgccac

SEQ ID NO: 655553 - DNA, 25 bp, Homo sapien
ccaggtgtctgcacgccatttcaca

SEQ ID NO: 655554 - DNA, 25 bp, Homo sapien
aagttattcttctcctgatccacgg

SEQ ID NO: 655555 - DNA, 25 bp, Homo sapien
tctctctttgaggtctgacagtggg

SEQ ID NO: 655556 - DNA, 25 bp, Homo sapien
tacttaccagggagatcataacatg

SEQ ID NO: 655557 - DNA, 25 bp, Homo sapien
gagcctccgggaagcatgttcagat

SEQ ID NO: 655558 - DNA, 25 bp, Homo sapien
cagagttctctcaaaggttcctttc

SEQ ID NO: 655559 - DNA, 25 bp, Homo sapien
caggtgcatgtttgagactcacatc

SEQ ID NO: 655560 - DNA, 25 bp, Homo sapien
tatctgctggagctcgatcgtgctg

SEQ ID NO: 655561 - DNA, 25 bp, Homo sapien
tcttgtgtttgtacgcttgccatcc

SEQ ID NO: 655562 - DNA, 25 bp, Homo sapien
catggactgatgatcttgattggct

SEQ ID NO: 655563 - DNA, 25 bp, Homo sapien
tagacttctccagagacctagtgac

SEQ ID NO: 655564 - DNA, 25 bp, Homo sapien
tgaggtcagctacaatcacactgtt

SEQ ID NO: 655565 - DNA, 25 bp, Homo sapien
tgtcgaatgccattccttcttgtaa

SEQ ID NO: 655566 - DNA, 25 bp, Homo sapien
aaagctcatcccatacatcaaatca

SEQ ID NO: 655567 - DNA, 25 bp, Homo sapien
gtttttgaaagtcggtctatgtcga

SEQ ID NO: 655568 - DNA, 25 bp, Homo sapien
aatcatacagatcagacttcagagt

SEQ ID NO: 655569 - DNA, 25 bp, Homo sapien
agcttgcctgcagagttaaactata

SEQ ID NO: 655570 - DNA, 25 bp, Homo sapien
catgtcttatagaaaatgagttggc

SEQ ID NO: 655571 - DNA, 25 bp, Homo sapien
tagttgaagctgtatatgcacatgt

SEQ ID NO: 655572 - DNA, 25 bp, Homo sapien
ccgactctgaatgaactacacccag

SEQ ID NO: 655573 - DNA, 25 bp, Homo sapien
cagttcttcctgataaggacaatgc

SEQ ID NO: 655574 - DNA, 25 bp, Homo sapien
cttttcagtcgttctgagtttgaga

SEQ ID NO: 655575 - DNA, 25 bp, Homo sapien
tgagctgcatgccaactgtgaggga

SEQ ID NO: 655576 - DNA, 25 bp, Homo sapien
tgctgctgtgtggtccggtcagttc

SEQ ID NO: 655577 - DNA, 25 bp, Homo sapien
agagtgctcactcatctcaggaatg

SEQ ID NO: 655578 - DNA, 25 bp, Homo sapien
caggaatggtctccatagagtgctc

SEQ ID NO: 655579 - DNA, 25 bp, Homo sapien
tcttatcataagttgccgctctgga

SEQ ID NO: 655580 - DNA, 25 bp, Homo sapien
tcagtaagcctagagtttttggagc

SEQ ID NO: 655581 - DNA, 25 bp, Homo sapien
gaaaacatagaggattctttattca

SEQ ID NO: 655582 - DNA, 25 bp, Homo sapien
tctgttgtcattgtaaagatagcag

SEQ ID NO: 655583 - DNA, 25 bp, Homo sapien
tccaccattgcctctgttgtcattg

SEQ ID NO: 655584 - DNA, 25 bp, Homo sapien
ttcaccaggttagctaggaagatgt

SEQ ID NO: 655585 - DNA, 25 bp, Homo sapien
gtggagcttgggacatcttgtgatt

SEQ ID NO: 655586 - DNA, 25 bp, Homo sapien
catcttgtgattgaatcctcctcca

SEQ ID NO: 655587 - DNA, 25 bp, Homo sapien
tgagcttccacgtgggcttttttaa

SEQ ID NO: 655588 - DNA, 25 bp, Homo sapien
atagctttgagcttccacgtgggct

SEQ ID NO: 655589 - DNA, 25 bp, Homo sapien
cagaggaacaaagtcgactgagcct

SEQ ID NO: 655590 - DNA, 25 bp, Homo sapien
gctgacttcttgctgctactctcct

SEQ ID NO: 655591 - DNA, 25 bp, Homo sapien
tgacttcttgctgctactctcctcc

SEQ ID NO: 655592 - DNA, 25 bp, Homo sapien
acttcttgctgctactctcctccat

SEQ ID NO: 655593 - DNA, 25 bp, Homo sapien
cagctgacttcttgctgctactctc

SEQ ID NO: 655594 - DNA, 25 bp, Homo sapien
actcattcacgtaagataagctgag

SEQ ID NO: 655595 - DNA, 25 bp, Homo sapien
ctcattcacgtaagataagctgagc

SEQ ID NO: 655596 - DNA, 25 bp, Homo sapien
tcactcattcacgtaagataagctg

SEQ ID NO: 655597 - DNA, 25 bp, Homo sapien
cactcattcacgtaagataagctga

SEQ ID NO: 655598 - DNA, 25 bp, Homo sapien
cagaagtgcacttgaagatgggtgt

SEQ ID NO: 655599 - DNA, 25 bp, Homo sapien
catgttcttgtatatacaactctag

SEQ ID NO: 655600 - DNA, 25 bp, Homo sapien
tacaactctagcttgttggcttctg

SEQ ID NO: 655601 - DNA, 25 bp, Homo sapien
tgtttgctccaagatagtccatgag

SEQ ID NO: 655602 - DNA, 25 bp, Homo sapien
ctgctgatgtcaatctgtgatcttc

SEQ ID NO: 655603 - DNA, 25 bp, Homo sapien
ttcctgctgatgtcaatctgtgatc

SEQ ID NO: 655604 - DNA, 25 bp, Homo sapien
cctgctgcctggcaagttttcctgc

SEQ ID NO: 655605 - DNA, 25 bp, Homo sapien
ctcctgctgcctggcaagttttcct

SEQ ID NO: 655606 - DNA, 25 bp, Homo sapien
agtctgtctgtatgagagtaaaatc

SEQ ID NO: 655607 - DNA, 25 bp, Homo sapien
gatagcagttagctcctcctcaagg

SEQ ID NO: 655608 - DNA, 25 bp, Homo sapien
agtgttgtgtgaagttgcttagtct

SEQ ID NO: 655609 - DNA, 25 bp, Homo sapien
aaaatctgatagcagttagctcctc

SEQ ID NO: 655610 - DNA, 25 bp, Homo sapien
ttgccagtgggagtgctgccatcct

SEQ ID NO: 655611 - DNA, 25 bp, Homo sapien
tccatgtgattagcagagaagtgag

SEQ ID NO: 655612 - DNA, 25 bp, Homo sapien
gcaagtcatcccctggaattatgga

SEQ ID NO: 655613 - DNA, 25 bp, Homo sapien
tgcagcaggatgtcacatgcagatt

SEQ ID NO: 655614 - DNA, 25 bp, Homo sapien
tgtgcattccagttggacgttttca

SEQ ID NO: 655615 - DNA, 25 bp, Homo sapien
cactcagcatggtgcattttaggca

SEQ ID NO: 655616 - DNA, 25 bp, Homo sapien
ggacatctgcctctcttattggtca

SEQ ID NO: 655617 - DNA, 25 bp, Homo sapien
caaatttgtaacaggagtaagccac

SEQ ID NO: 655618 - DNA, 25 bp, Homo sapien
gagaatcatcttgagcccagtggcg

SEQ ID NO: 655619 - DNA, 25 bp, Homo sapien
gatggaacttgcgatgactgacttg

SEQ ID NO: 655620 - DNA, 25 bp, Homo sapien
tctgtcacgggagggttatgcactt

SEQ ID NO: 655621 - DNA, 25 bp, Homo sapien
aaggtacgcaacattctggcaaggc

SEQ ID NO: 655622 - DNA, 25 bp, Homo sapien
gaacgtgggtcttcaaggtgctgtc

SEQ ID NO: 655623 - DNA, 25 bp, Homo sapien
tgtcttctgtcacgatcactctggg

SEQ ID NO: 655624 - DNA, 25 bp, Homo sapien
gggacccttgaatcatgccatgtaa

SEQ ID NO: 655625 - DNA, 25 bp, Homo sapien
taaaatctcctagcagggacccttg

SEQ ID NO: 655626 - DNA, 25 bp, Homo sapien
gaagaagaacttgtctgcaacaaac

SEQ ID NO: 655627 - DNA, 25 bp, Homo sapien
tgttttcccaaagcccgcacatgtt

SEQ ID NO: 655628 - DNA, 25 bp, Homo sapien
cacatgttggagattgcacctggtg

SEQ ID NO: 655629 - DNA, 25 bp, Homo sapien
tcacttgcccgattgtgttttccca

SEQ ID NO: 655630 - DNA, 25 bp, Homo sapien
ggtgggagaagctatcaggacagtg

SEQ ID NO: 655631 - DNA, 25 bp, Homo sapien
agctatcaggacagtgccctgggtg

SEQ ID NO: 655632 - DNA, 25 bp, Homo sapien
ggagaagctatcaggacagtgccct

SEQ ID NO: 655633 - DNA, 25 bp, Homo sapien
gaagctatcaggacagtgccctggg

SEQ ID NO: 655634 - DNA, 25 bp, Homo sapien
aagtcctcatgcctgctgttgtcca

SEQ ID NO: 655635 - DNA, 25 bp, Homo sapien
gtccactctcactataacttttggt

SEQ ID NO: 655636 - DNA, 25 bp, Homo sapien
gcttagccaggtgtaattccagtac

SEQ ID NO: 655637 - DNA, 25 bp, Homo sapien
ctgttgtccagggcttgtccactct

SEQ ID NO: 655638 - DNA, 25 bp, Homo sapien
tccaatgtctgggtcctctctcttc

SEQ ID NO: 655639 - DNA, 25 bp, Homo sapien
gattccaatgtctgggtcctctctc

SEQ ID NO: 655640 - DNA, 25 bp, Homo sapien
tcctggtgcttcatgtactgagtaa

SEQ ID NO: 655641 - DNA, 25 bp, Homo sapien
agtaattccgtattgtcttctggca

SEQ ID NO: 655642 - DNA, 25 bp, Homo sapien
ggagaaggctgagtaattatccgaa

SEQ ID NO: 655643 - DNA, 25 bp, Homo sapien
gagtaattatccgaattctctccca

SEQ ID NO: 655644 - DNA, 25 bp, Homo sapien
gagaaggctgagtaattatccgaat

SEQ ID NO: 655645 - DNA, 25 bp, Homo sapien
agaaggctgagtaattatccgaatt

SEQ ID NO: 655646 - DNA, 25 bp, Homo sapien
tcagtcatggttgggccacgtgtcc

SEQ ID NO: 655647 - DNA, 25 bp, Homo sapien
cagagaggaaaccaatgttgagcac

SEQ ID NO: 655648 - DNA, 25 bp, Homo sapien
agggatctgcccacgaggaagaaga

SEQ ID NO: 655649 - DNA, 25 bp, Homo sapien
gcaagagcccaacctttcctagaag

SEQ ID NO: 655650 - DNA, 25 bp, Homo sapien
tacttgcccagtttgtcagctctga

SEQ ID NO: 655651 - DNA, 25 bp, Homo sapien
aatgtactgttccatggcaagccag

SEQ ID NO: 655652 - DNA, 25 bp, Homo sapien
tgtcactcagcaggatacttgccca

SEQ ID NO: 655653 - DNA, 25 bp, Homo sapien
gaccaggagtcacagctgttgacat

SEQ ID NO: 655654 - DNA, 25 bp, Homo sapien
gcagagatcacacaggttgacccat

SEQ ID NO: 655655 - DNA, 25 bp, Homo sapien
gaagaaatcctaacgcaatgaggcc

SEQ ID NO: 655656 - DNA, 25 bp, Homo sapien
gggccccgcacaactaatgtcctgg

SEQ ID NO: 655657 - DNA, 25 bp, Homo sapien
cagtgttccttaagaaaatgcccct

SEQ ID NO: 655658 - DNA, 25 bp, Homo sapien
gcatggtttgtgagccccatttaat

SEQ ID NO: 655659 - DNA, 25 bp, Homo sapien
tttaatgacataaaatgagggcact

SEQ ID NO: 655660 - DNA, 25 bp, Homo sapien
cagagacacaagtcctcatatatga

SEQ ID NO: 655661 - DNA, 25 bp, Homo sapien
aaataatagcctctggaaaaagctt

SEQ ID NO: 655662 - DNA, 25 bp, Homo sapien
caattccacaagaccagtagagctg

SEQ ID NO: 655663 - DNA, 25 bp, Homo sapien
taccagtgacaaggaacagtgacag

SEQ ID NO: 655664 - DNA, 25 bp, Homo sapien
tgaggacctgattaaggctaggccc

SEQ ID NO: 655665 - DNA, 25 bp, Homo sapien
gcagtctggaatggttgtcctcaaa

SEQ ID NO: 655666 - DNA, 25 bp, Homo sapien
tgactcaggtgagttggcccagttc

SEQ ID NO: 655667 - DNA, 25 bp, Homo sapien
taatttctatgacagtccagcaaca

SEQ ID NO: 655668 - DNA, 25 bp, Homo sapien
tctgagcagacagctaagagcaaaa

SEQ ID NO: 655669 - DNA, 25 bp, Homo sapien
tcaggctcactgtttaaaagtaaag

SEQ ID NO: 655670 - DNA, 25 bp, Homo sapien
cctcgccagttagccatggaataga

SEQ ID NO: 655671 - DNA, 25 bp, Homo sapien
gaggtcaaggtctgcccagaaggct

SEQ ID NO: 655672 - DNA, 25 bp, Homo sapien
ccagctaaggtgctttggtagcaaa

SEQ ID NO: 655673 - DNA, 25 bp, Homo sapien
agaaggctgccgaccaataacgctc

SEQ ID NO: 655674 - DNA, 25 bp, Homo sapien
tctgcggcgtccgctcggtccgcac

SEQ ID NO: 655675 - DNA, 25 bp, Homo sapien
gagtctctgcggcgtccgctcggtc

SEQ ID NO: 655676 - DNA, 25 bp, Homo sapien
tcagagtctctgcggcgtccgctcg

SEQ ID NO: 655677 - DNA, 25 bp, Homo sapien
tctctgcggcgtccgctcggtccgc

SEQ ID NO: 655678 - DNA, 25 bp, Homo sapien
atgagcaagcccgaatgcacgagcc

SEQ ID NO: 655679 - DNA, 25 bp, Homo sapien
cacaggctcgcgatggagatgccta

SEQ ID NO: 655680 - DNA, 25 bp, Homo sapien
tccaccttgccggagtcacagtcgg

SEQ ID NO: 655681 - DNA, 25 bp, Homo sapien
gcagaggagcgccaaaagcgccacc

SEQ ID NO: 655682 - DNA, 25 bp, Homo sapien
ccgccgttttcgcactcgtcgatgt

SEQ ID NO: 655683 - DNA, 25 bp, Homo sapien
gcagaagccgccgttttcgcactcg

SEQ ID NO: 655684 - DNA, 25 bp, Homo sapien
agatgaaaccgtcgtccaggatgta

SEQ ID NO: 655685 - DNA, 25 bp, Homo sapien
tcgatgtccgtgcagatgaaaccgt

SEQ ID NO: 655686 - DNA, 25 bp, Homo sapien
tccaccaggtcgtagttagggtagc

SEQ ID NO: 655687 - DNA, 25 bp, Homo sapien
tgcaaaacatctggcacctgtgcgg

SEQ ID NO: 655688 - DNA, 25 bp, Homo sapien
cagttggctctgaagcacgggtcca

SEQ ID NO: 655689 - DNA, 25 bp, Homo sapien
tgtgtgttgacacagcgctgcggac

SEQ ID NO: 655690 - DNA, 25 bp, Homo sapien
gccgtcgccgttcagtagcaaggaa

SEQ ID NO: 655691 - DNA, 25 bp, Homo sapien
caccgaggagcgcactgtcattagg

SEQ ID NO: 655692 - DNA, 25 bp, Homo sapien
tgttgtctcccgtaacccactggaa

SEQ ID NO: 655693 - DNA, 25 bp, Homo sapien
gcggcgcggtgcacattagctgtaa

SEQ ID NO: 655694 - DNA, 25 bp, Homo sapien
cccaggcgcgccgcgtgcaggcgcc

SEQ ID NO: 655695 - DNA, 25 bp, Homo sapien
ttacccaggcgcgccgcgtgcaggc

SEQ ID NO: 655696 - DNA, 25 bp, Homo sapien
tacccaggcgcgccgcgtgcaggcg

SEQ ID NO: 655697 - DNA, 25 bp, Homo sapien
gttacccaggcgcgccgcgtgcagg

SEQ ID NO: 655698 - DNA, 25 bp, Homo sapien
tcgagtttataagtgcccggccctc

SEQ ID NO: 655699 - DNA, 25 bp, Homo sapien
agcctctgacatgcggatcggccag

SEQ ID NO: 655700 - DNA, 25 bp, Homo sapien
tgcgacagggccgtgccggagcaga

SEQ ID NO: 655701 - DNA, 25 bp, Homo sapien
gtcccagcccagacacttcttgccg

SEQ ID NO: 655702 - DNA, 25 bp, Homo sapien
tagaaacgccacttgctcggcaaag

SEQ ID NO: 655703 - DNA, 25 bp, Homo sapien
tccagagtccgaattgatacccacg

SEQ ID NO: 655704 - DNA, 25 bp, Homo sapien
tgatacccacgtgcatagaaacgcc

SEQ ID NO: 655705 - DNA, 25 bp, Homo sapien
gaggtttccatttcgtccagagtcc

SEQ ID NO: 655706 - DNA, 25 bp, Homo sapien
gaatgcggaagagtgggtctccccc

SEQ ID NO: 655707 - DNA, 25 bp, Homo sapien
gggaatgcggaagagtgggtctccc

SEQ ID NO: 655708 - DNA, 25 bp, Homo sapien
ggaatgcggaagagtgggtctcccc

SEQ ID NO: 655709 - DNA, 25 bp, Homo sapien
cgggaatgcggaagagtgggtctcc

SEQ ID NO: 655710 - DNA, 25 bp, Homo sapien
tggaagctccgttcccgggcagctc

SEQ ID NO: 655711 - DNA, 25 bp, Homo sapien
ggcggcgctgtcgagctctaaacaa

SEQ ID NO: 655712 - DNA, 25 bp, Homo sapien
ggattccgctgcgttcacctcttgc

SEQ ID NO: 655713 - DNA, 25 bp, Homo sapien
aaggtgtaggagcacagagtcctcc

SEQ ID NO: 655714 - DNA, 25 bp, Homo sapien
agatcccagcaaggcactgccaaaa

SEQ ID NO: 655715 - DNA, 25 bp, Homo sapien
gacatacggcaagagggagctttct

SEQ ID NO: 655716 - DNA, 25 bp, Homo sapien
tcagtccacgtccaaatcatcgaga

SEQ ID NO: 655717 - DNA, 25 bp, Homo sapien
gaataattccgaagccagatcccag

SEQ ID NO: 655718 - DNA, 25 bp, Homo sapien
ttaaatgagtcagtccccggggctc

SEQ ID NO: 655719 - DNA, 25 bp, Homo sapien
tggacatggccccagaacgttggag

SEQ ID NO: 655720 - DNA, 25 bp, Homo sapien
caaatatttggcttcctgtttccca

SEQ ID NO: 655721 - DNA, 25 bp, Homo sapien
tttgggaaataagtaggctctgaat

SEQ ID NO: 655722 - DNA, 25 bp, Homo sapien
cttccaccacagtttcaatgatcct

SEQ ID NO: 655723 - DNA, 25 bp, Homo sapien
accttgggtcctggctctaccaact

SEQ ID NO: 655724 - DNA, 25 bp, Homo sapien
ttggatcctgaatctacagtttcta

SEQ ID NO: 655725 - DNA, 25 bp, Homo sapien
ttgggtcctggctctaccaactctt

SEQ ID NO: 655726 - DNA, 25 bp, Homo sapien
tcctgaatctacagtttctacctgc

SEQ ID NO: 655727 - DNA, 25 bp, Homo sapien
gagtatgtcaacctcatactgtttt

SEQ ID NO: 655728 - DNA, 25 bp, Homo sapien
actgttgggctatgagtatgtcaac

SEQ ID NO: 655729 - DNA, 25 bp, Homo sapien
ctcatactgttgggctatgagtatg

SEQ ID NO: 655730 - DNA, 25 bp, Homo sapien
tgggctatgagtatgtcaacctcat

SEQ ID NO: 655731 - DNA, 25 bp, Homo sapien
gaggtgaccgctccttcatgatgtg

SEQ ID NO: 655732 - DNA, 25 bp, Homo sapien
taagcatcaaatccaggcgctgtga

SEQ ID NO: 655733 - DNA, 25 bp, Homo sapien
cagaggatttggtaaagcaaccggc

SEQ ID NO: 655734 - DNA, 25 bp, Homo sapien
gaaaacctcctaatgaagggccatg

SEQ ID NO: 655735 - DNA, 25 bp, Homo sapien
gcagcaatagtgaagacttgagtgc

SEQ ID NO: 655736 - DNA, 25 bp, Homo sapien
tggcggccacaattcagagcagcaa

SEQ ID NO: 655737 - DNA, 25 bp, Homo sapien
ccagaccagctggatatggcggcca

SEQ ID NO: 655738 - DNA, 25 bp, Homo sapien
tagtgaagacttgagtgcaggccgt

SEQ ID NO: 655739 - DNA, 25 bp, Homo sapien
caatcacagttccggaaaaatgatt

SEQ ID NO: 655740 - DNA, 25 bp, Homo sapien
tcaatcacagttccggaaaaatgat

SEQ ID NO: 655741 - DNA, 25 bp, Homo sapien
atcacagttccggaaaaatgattgc

SEQ ID NO: 655742 - DNA, 25 bp, Homo sapien
tcacagttccggaaaaatgattgca

SEQ ID NO: 655743 - DNA, 25 bp, Homo sapien
tcactttttcactgttgagctgttc

SEQ ID NO: 655744 - DNA, 25 bp, Homo sapien
cactgttgagctgttcataatttcc

SEQ ID NO: 655745 - DNA, 25 bp, Homo sapien
actgttgagctgttcataatttcct

SEQ ID NO: 655746 - DNA, 25 bp, Homo sapien
ctttttcactgttgagctgttcata

SEQ ID NO: 655747 - DNA, 25 bp, Homo sapien
gaaagattgctcagggataagacac

SEQ ID NO: 655748 - DNA, 25 bp, Homo sapien
ccatgggttttgcagccgaagtaga

SEQ ID NO: 655749 - DNA, 25 bp, Homo sapien
gatgctatggcaatgacgatgacgc

SEQ ID NO: 655750 - DNA, 25 bp, Homo sapien
cctgatcgcagggaagatggcatgt

SEQ ID NO: 655751 - DNA, 25 bp, Homo sapien
cctcagattatctgtgggaattgtc

SEQ ID NO: 655752 - DNA, 25 bp, Homo sapien
ttctaatgcattgtcgataactgtc

SEQ ID NO: 655753 - DNA, 25 bp, Homo sapien
ttgtcgataactgtcctgccctggt

SEQ ID NO: 655754 - DNA, 25 bp, Homo sapien
gcattcctcagattatctgtgggaa

SEQ ID NO: 655755 - DNA, 25 bp, Homo sapien
gcaaggattttcaaggcccagaggg

SEQ ID NO: 655756 - DNA, 25 bp, Homo sapien
aaataggagggctcgttggatccca

SEQ ID NO: 655757 - DNA, 25 bp, Homo sapien
cattcagagaacagacgatgggcct

SEQ ID NO: 655758 - DNA, 25 bp, Homo sapien
ggcccctcaggacaaggacgatttg

SEQ ID NO: 655759 - DNA, 25 bp, Homo sapien
gagtgtcacctcagagaccgatgca

SEQ ID NO: 655760 - DNA, 25 bp, Homo sapien
cgtagtcaagtgtgtggtaacctca

SEQ ID NO: 655761 - DNA, 25 bp, Homo sapien
cacctagagtctcgtggccaaggaa

SEQ ID NO: 655762 - DNA, 25 bp, Homo sapien
tagtgactctgaccatcggtgaccc

SEQ ID NO: 655763 - DNA, 25 bp, Homo sapien
gaataattaattgatttagttttca

SEQ ID NO: 655764 - DNA, 25 bp, Homo sapien
cacccgtagaaaatacctgcatgtt

SEQ ID NO: 655765 - DNA, 25 bp, Homo sapien
tgtttgctaagattccagtccagtc

SEQ ID NO: 655766 - DNA, 25 bp, Homo sapien
ttatagagtcacgaaatccccaccg

SEQ ID NO: 655767 - DNA, 25 bp, Homo sapien
tcacaccctgatccggaattggtca

SEQ ID NO: 655768 - DNA, 25 bp, Homo sapien
tcagcagtctgtcccaggtgtcgga

SEQ ID NO: 655769 - DNA, 25 bp, Homo sapien
tgcagatgggcagtatgctctaagg

SEQ ID NO: 655770 - DNA, 25 bp, Homo sapien
gggagagagccccacgtgcggccgt

SEQ ID NO: 655771 - DNA, 25 bp, Homo sapien
atgggcagtatgctctaagggggcc

SEQ ID NO: 655772 - DNA, 25 bp, Homo sapien
agagccccacgtgcggccgtgctgc

SEQ ID NO: 655773 - DNA, 25 bp, Homo sapien
gcttgcgatagaccagtagccccag

SEQ ID NO: 655774 - DNA, 25 bp, Homo sapien
gcttttgcccgtcagtgccatcgtt

SEQ ID NO: 655775 - DNA, 25 bp, Homo sapien
tctggaacccaggagtaactgtctg

SEQ ID NO: 655776 - DNA, 25 bp, Homo sapien
ccatcgttgttttgtgtggccacgg

SEQ ID NO: 655777 - DNA, 25 bp, Homo sapien
aaggacccttgtgtgttgaagcaca

SEQ ID NO: 655778 - DNA, 25 bp, Homo sapien
cgtcagatgacagcgaaggtctact

SEQ ID NO: 655779 - DNA, 25 bp, Homo sapien
ttgaagcacaagctgtcgcagaggg

SEQ ID NO: 655780 - DNA, 25 bp, Homo sapien
acacaggccccatggtgcaagagac

SEQ ID NO: 655781 - DNA, 25 bp, Homo sapien
cttcagcggcagactagggtccagg

SEQ ID NO: 655782 - DNA, 25 bp, Homo sapien
aagggtttcgagaggcacaggtcac

SEQ ID NO: 655783 - DNA, 25 bp, Homo sapien
cagttagagtaaggcgtgtcctccc

SEQ ID NO: 655784 - DNA, 25 bp, Homo sapien
gcagcggcacgtgtagtttttccca

SEQ ID NO: 655785 - DNA, 25 bp, Homo sapien
gcagcagcaggcccatggaggtggc

SEQ ID NO: 655786 - DNA, 25 bp, Homo sapien
cagcagcagcaggcccatggaggtg

SEQ ID NO: 655787 - DNA, 25 bp, Homo sapien
cagcagcaggcccatggaggtggcc

SEQ ID NO: 655788 - DNA, 25 bp, Homo sapien
gcagcaggcccatggaggtggccat

SEQ ID NO: 655789 - DNA, 25 bp, Homo sapien
gccactccggcgcagagaaggacac

SEQ ID NO: 655790 - DNA, 25 bp, Homo sapien
cactccggcgcagagaaggacacaa

SEQ ID NO: 655791 - DNA, 25 bp, Homo sapien
gagcttctatctcggctcccagctg

SEQ ID NO: 655792 - DNA, 25 bp, Homo sapien
ggcgagaagcccagcggcgacagga

SEQ ID NO: 655793 - DNA, 25 bp, Homo sapien
tcaggattcctagcaagggccggaa

SEQ ID NO: 655794 - DNA, 25 bp, Homo sapien
aggattcctagcaagggccggaaat

SEQ ID NO: 655795 - DNA, 25 bp, Homo sapien
ccccggctcaggattcctagcaagg

SEQ ID NO: 655796 - DNA, 25 bp, Homo sapien
ttcccccggctcaggattcctagca

SEQ ID NO: 655797 - DNA, 25 bp, Homo sapien
ctaggtccccgcacccttgcaaaga

SEQ ID NO: 655798 - DNA, 25 bp, Homo sapien
cccgcacccttgcaaagacccagag

SEQ ID NO: 655799 - DNA, 25 bp, Homo sapien
gatgaagcaatgctggatagacccc

SEQ ID NO: 655800 - DNA, 25 bp, Homo sapien
tgaagcaatgctggatagaccccac

SEQ ID NO: 655801 - DNA, 25 bp, Homo sapien
tcagcaccatgtggtcaattgtcca

SEQ ID NO: 655802 - DNA, 25 bp, Homo sapien
tgccatgggatcctggtatcaaggt

SEQ ID NO: 655803 - DNA, 25 bp, Homo sapien
caccatgtggtcaattgtccatgca

SEQ ID NO: 655804 - DNA, 25 bp, Homo sapien
tgttgcccgaaggtttcagcaccat

SEQ ID NO: 655805 - DNA, 25 bp, Homo sapien
ctggggctgctttcacgtcggcctc

SEQ ID NO: 655806 - DNA, 25 bp, Homo sapien
tggggctgctttcacgtcggcctcc

SEQ ID NO: 655807 - DNA, 25 bp, Homo sapien
aggacagtaacagcacaggcactgc

SEQ ID NO: 655808 - DNA, 25 bp, Homo sapien
cacaggcactgcaggggacttcagg

SEQ ID NO: 655809 - DNA, 25 bp, Homo sapien
cttcagggaggcctgaatggccctg

SEQ ID NO: 655810 - DNA, 25 bp, Homo sapien
cagatccccagcataggacagtaac

SEQ ID NO: 655811 - DNA, 25 bp, Homo sapien
cagctgcatctttcacggaggctgc

SEQ ID NO: 655812 - DNA, 25 bp, Homo sapien
ctgcgctcacggatgagcacagctg

SEQ ID NO: 655813 - DNA, 25 bp, Homo sapien
actgagtggagctgcgctcacggat

SEQ ID NO: 655814 - DNA, 25 bp, Homo sapien
catctttcacggaggctgctttcct

SEQ ID NO: 655815 - DNA, 25 bp, Homo sapien
tgaaccaaaggccagtgctcattgc

SEQ ID NO: 655816 - DNA, 25 bp, Homo sapien
gaagtcacacccgtccaaagggcca

SEQ ID NO: 655817 - DNA, 25 bp, Homo sapien
agcatccacctggatctcatgaacc

SEQ ID NO: 655818 - DNA, 25 bp, Homo sapien
agccccgcaaagctgaggtgttcag

SEQ ID NO: 655819 - DNA, 25 bp, Homo sapien
gctgaagcttttatgccctggctct

SEQ ID NO: 655820 - DNA, 25 bp, Homo sapien
ctgcccctcaccacagagggtggct

SEQ ID NO: 655821 - DNA, 25 bp, Homo sapien
tgaagcttttatgccctggctctcc

SEQ ID NO: 655822 - DNA, 25 bp, Homo sapien
gcccctcaccacagagggtggctga

SEQ ID NO: 655823 - DNA, 25 bp, Homo sapien
tagagcatcgactgctgcttcctcc

SEQ ID NO: 655824 - DNA, 25 bp, Homo sapien
tgtgggcaccgacacatgctgggca

SEQ ID NO: 655825 - DNA, 25 bp, Homo sapien
tccaagtgtgggcaccgacacatgc

SEQ ID NO: 655826 - DNA, 25 bp, Homo sapien
gcaccgacacatgctgggcaaacca

SEQ ID NO: 655827 - DNA, 25 bp, Homo sapien
gaatttataggttgggtcaggactc

SEQ ID NO: 655828 - DNA, 25 bp, Homo sapien
tttcaactttcgagttccatgaggt

SEQ ID NO: 655829 - DNA, 25 bp, Homo sapien
catgaggttgttctcttggctatga

SEQ ID NO: 655830 - DNA, 25 bp, Homo sapien
gggctatggtacttctgagaaccca

SEQ ID NO: 655831 - DNA, 25 bp, Homo sapien
ctagagccgttccatgctcttcaca

SEQ ID NO: 655832 - DNA, 25 bp, Homo sapien
tgagcccgctgcttccttgagcact

SEQ ID NO: 655833 - DNA, 25 bp, Homo sapien
agcctgcaacatccttgctcctgag

SEQ ID NO: 655834 - DNA, 25 bp, Homo sapien
tgaggtttgctagagccgttccatg

SEQ ID NO: 655835 - DNA, 25 bp, Homo sapien
gggaggaatgtagaatggggccgat

SEQ ID NO: 655836 - DNA, 25 bp, Homo sapien
cacacgtctgcaaagctgcggtctc

SEQ ID NO: 655837 - DNA, 25 bp, Homo sapien
gatgatgggacccacacgtctgcaa

SEQ ID NO: 655838 - DNA, 25 bp, Homo sapien
tagaatggggccgatgatgggaccc

SEQ ID NO: 655839 - DNA, 25 bp, Homo sapien
taagaagggtcgaggtcagtctccc

SEQ ID NO: 655840 - DNA, 25 bp, Homo sapien
caactgtcaaaggtgctaagctggg

SEQ ID NO: 655841 - DNA, 25 bp, Homo sapien
cacacagtgatcaggccaggtaacg

SEQ ID NO: 655842 - DNA, 25 bp, Homo sapien
tgatctggacacagaacgagcagcc

SEQ ID NO: 655843 - DNA, 25 bp, Homo sapien
tcttggcacagatacagtggcctgg

SEQ ID NO: 655844 - DNA, 25 bp, Homo sapien
tacttcaagctagcaacactggacg

SEQ ID NO: 655845 - DNA, 25 bp, Homo sapien
caaaagggacaccattgtgatagcc

SEQ ID NO: 655846 - DNA, 25 bp, Homo sapien
taccgggttacatgccaagggctca

SEQ ID NO: 655847 - DNA, 25 bp, Homo sapien
ccgctgccgagctgtctattcagag

SEQ ID NO: 655848 - DNA, 25 bp, Homo sapien
gctgtctattcagagtcagctcctc

SEQ ID NO: 655849 - DNA, 25 bp, Homo sapien
ggcactcagtgctccatcgcctctc

SEQ ID NO: 655850 - DNA, 25 bp, Homo sapien
tctgtgctgaggccgctgccgagct

SEQ ID NO: 655851 - DNA, 25 bp, Homo sapien
cagaaatgctcgctgcagtgcagat

SEQ ID NO: 655852 - DNA, 25 bp, Homo sapien
ttctggtccacgtgcccacggcttg

SEQ ID NO: 655853 - DNA, 25 bp, Homo sapien
acgtgcccacggcttggtgaggtct

SEQ ID NO: 655854 - DNA, 25 bp, Homo sapien
cagtgcagatgttaggacctgggtt

SEQ ID NO: 655855 - DNA, 25 bp, Homo sapien
gacttgagtgggaccgtgaagggca

SEQ ID NO: 655856 - DNA, 25 bp, Homo sapien
aggacttgagtgggaccgtgaaggg

SEQ ID NO: 655857 - DNA, 25 bp, Homo sapien
gagtgggaccgtgaagggcagaaat

SEQ ID NO: 655858 - DNA, 25 bp, Homo sapien
ttgagtgggaccgtgaagggcagaa

SEQ ID NO: 655859 - DNA, 25 bp, Homo sapien
tatttattagcatattaaattcaca

SEQ ID NO: 655860 - DNA, 25 bp, Homo sapien
attagcatattaaattcacaaacaa

SEQ ID NO: 655861 - DNA, 25 bp, Homo sapien
cctggcttggcaattaaaatattta

SEQ ID NO: 655862 - DNA, 25 bp, Homo sapien
tttattagcatattaaattcacaaa

SEQ ID NO: 655863 - DNA, 25 bp, Homo sapien
cacacatacccaggaaaggctcgtg

SEQ ID NO: 655864 - DNA, 25 bp, Homo sapien
aaatccctgaagacaacgaggctgg

SEQ ID NO: 655865 - DNA, 25 bp, Homo sapien
gcagtggttaccttacaattcagaa

SEQ ID NO: 655866 - DNA, 25 bp, Homo sapien
gaatgaactttgaacaaatccctga

SEQ ID NO: 655867 - DNA, 25 bp, Homo sapien
agcagtaatcaccagtccactgagg

SEQ ID NO: 655868 - DNA, 25 bp, Homo sapien
cagagcagtaatcaccagtccactg

SEQ ID NO: 655869 - DNA, 25 bp, Homo sapien
gcagtaatcaccagtccactgaggc

SEQ ID NO: 655870 - DNA, 25 bp, Homo sapien
agtaatcaccagtccactgaggcag

SEQ ID NO: 655871 - DNA, 25 bp, Homo sapien
ctcgcgggtcggtgaagggagtggc

SEQ ID NO: 655872 - DNA, 25 bp, Homo sapien
ctcagctcggtctttgtcccattat

SEQ ID NO: 655873 - DNA, 25 bp, Homo sapien
cctggctcgcgggtcggtgaaggga

SEQ ID NO: 655874 - DNA, 25 bp, Homo sapien
ccatcgcttactctgcctggctcgc

SEQ ID NO: 655875 - DNA, 25 bp, Homo sapien
cccactctgagtcggcctaagctga

SEQ ID NO: 655876 - DNA, 25 bp, Homo sapien
gccagcggtcctgggtatgtccctc

SEQ ID NO: 655877 - DNA, 25 bp, Homo sapien
agcggtcctgggtatgtccctctgc

SEQ ID NO: 655878 - DNA, 25 bp, Homo sapien
ctaagctgagtgtcaagcattgtgg

SEQ ID NO: 655879 - DNA, 25 bp, Homo sapien
tggtggctttgaccgcagcttggtc

SEQ ID NO: 655880 - DNA, 25 bp, Homo sapien
cacccagtcctggtggctttgaccg

SEQ ID NO: 655881 - DNA, 25 bp, Homo sapien
tttgaccgcagcttggtcttggagc

SEQ ID NO: 655882 - DNA, 25 bp, Homo sapien
cgcagcttggtcttggagctgtccc

SEQ ID NO: 655883 - DNA, 25 bp, Homo sapien
catctcacaactccagtttttccca

SEQ ID NO: 655884 - DNA, 25 bp, Homo sapien
tcacaactccagtttttcccacttc

SEQ ID NO: 655885 - DNA, 25 bp, Homo sapien
tctcacaactccagtttttcccact

SEQ ID NO: 655886 - DNA, 25 bp, Homo sapien
atctcacaactccagtttttcccac

SEQ ID NO: 655887 - DNA, 25 bp, Homo sapien
caaagccaatggattctgcacgcag

SEQ ID NO: 655888 - DNA, 25 bp, Homo sapien
ggattctgcacgcagctcccaagag

SEQ ID NO: 655889 - DNA, 25 bp, Homo sapien
cagctcggacatctgccaaggcttg

SEQ ID NO: 655890 - DNA, 25 bp, Homo sapien
cctttgagacgggacacatgatgaa

SEQ ID NO: 655891 - DNA, 25 bp, Homo sapien
gaatgaagcagtcgaatcaagggca

SEQ ID NO: 655892 - DNA, 25 bp, Homo sapien
tgaatgaagcagtcgaatcaagggc

SEQ ID NO: 655893 - DNA, 25 bp, Homo sapien
atgaatgaagcagtcgaatcaaggg

SEQ ID NO: 655894 - DNA, 25 bp, Homo sapien
aatgaagcagtcgaatcaagggcac

SEQ ID NO: 655895 - DNA, 25 bp, Homo sapien
cacgtttctcatcttttcgctgcat

SEQ ID NO: 655896 - DNA, 25 bp, Homo sapien
gtcacgtttctcatcttttcgctgc

SEQ ID NO: 655897 - DNA, 25 bp, Homo sapien
ttctcatcttttcgctgcatggact

SEQ ID NO: 655898 - DNA, 25 bp, Homo sapien
tcatcttttcgctgcatggactgtt

SEQ ID NO: 655899 - DNA, 25 bp, Homo sapien
gggctgggcagtctcagagggtcag

SEQ ID NO: 655900 - DNA, 25 bp, Homo sapien
ctcagagggtcaggatctgagcgca

SEQ ID NO: 655901 - DNA, 25 bp, Homo sapien
ctgcggggacgtggcgggtctcggg

SEQ ID NO: 655902 - DNA, 25 bp, Homo sapien
tgggcagtctcagagggtcaggatc

SEQ ID NO: 655903 - DNA, 25 bp, Homo sapien
tgcttgctaacttccagccagtgct

SEQ ID NO: 655904 - DNA, 25 bp, Homo sapien
gcctcgataataacctgcttgctaa

SEQ ID NO: 655905 - DNA, 25 bp, Homo sapien
ggtcccaggaagacggcataagcca

SEQ ID NO: 655906 - DNA, 25 bp, Homo sapien
cttctgagcgactcctatggcccag

SEQ ID NO: 655907 - DNA, 25 bp, Homo sapien
gccctgggcctttgtgcctgccgga

SEQ ID NO: 655908 - DNA, 25 bp, Homo sapien
ctgggcctttgtgcctgccggaatc

SEQ ID NO: 655909 - DNA, 25 bp, Homo sapien
agcgggatcatgccctgggcctttg

SEQ ID NO: 655910 - DNA, 25 bp, Homo sapien
ggatcatgccctgggcctttgtgcc

SEQ ID NO: 655911 - DNA, 25 bp, Homo sapien
ttgctgggggttggaactgtcacat

SEQ ID NO: 655912 - DNA, 25 bp, Homo sapien
gcatgaacaggcaggatagttaggc

SEQ ID NO: 655913 - DNA, 25 bp, Homo sapien
cacatgtcctaagccagcatgaaca

SEQ ID NO: 655914 - DNA, 25 bp, Homo sapien
aggctgactgtgattgtgctggcca

SEQ ID NO: 655915 - DNA, 25 bp, Homo sapien
gcacctgatagtctcagtctcccat

SEQ ID NO: 655916 - DNA, 25 bp, Homo sapien
agcctatagcacctgatagtctcag

SEQ ID NO: 655917 - DNA, 25 bp, Homo sapien
gatctgctgagatggggcatgttca

SEQ ID NO: 655918 - DNA, 25 bp, Homo sapien
tagtctcagtctcccatcaaggtac

SEQ ID NO: 655919 - DNA, 25 bp, Homo sapien
tgacaccaagttttgccagcaacaa

SEQ ID NO: 655920 - DNA, 25 bp, Homo sapien
ctgacaccaagttttgccagcaaca

SEQ ID NO: 655921 - DNA, 25 bp, Homo sapien
gaggactggcaggacagtaggctga

SEQ ID NO: 655922 - DNA, 25 bp, Homo sapien
tggttctttccatcaaccagatgga

SEQ ID NO: 655923 - DNA, 25 bp, Homo sapien
aagtggggtccatgaggcactgctc

SEQ ID NO: 655924 - DNA, 25 bp, Homo sapien
gctgacaggacatctaagggaagca

SEQ ID NO: 655925 - DNA, 25 bp, Homo sapien
gcaacgcttagcacagttggccaca

SEQ ID NO: 655926 - DNA, 25 bp, Homo sapien
tacatttggtctggaattttcgggc

SEQ ID NO: 655927 - DNA, 25 bp, Homo sapien
cactccggggctgacagtagctgaa

SEQ ID NO: 655928 - DNA, 25 bp, Homo sapien
caaaggaccacggaagtggcctttg

SEQ ID NO: 655929 - DNA, 25 bp, Homo sapien
gatgaagactgcatgaaggcaaggg

SEQ ID NO: 655930 - DNA, 25 bp, Homo sapien
caccaggatgaagactgcatgaagg

SEQ ID NO: 655931 - DNA, 25 bp, Homo sapien
gtactcattgtcctggccccggcat

SEQ ID NO: 655932 - DNA, 25 bp, Homo sapien
attgtcctggccccggcatggaggt

SEQ ID NO: 655933 - DNA, 25 bp, Homo sapien
gatgacatctgcaagtgggaaccaa

SEQ ID NO: 655934 - DNA, 25 bp, Homo sapien
tgtccatggatgctaagtgctgagg

SEQ ID NO: 655935 - DNA, 25 bp, Homo sapien
gacagttggcaaagacagacttcag

SEQ ID NO: 655936 - DNA, 25 bp, Homo sapien
taatatttcacaggttgcccacagt

SEQ ID NO: 655937 - DNA, 25 bp, Homo sapien
tttccaatagctcaccttccccagc

SEQ ID NO: 655938 - DNA, 25 bp, Homo sapien
cccacatggatgcaagggctgctgg

SEQ ID NO: 655939 - DNA, 25 bp, Homo sapien
tctcctctgtgacggccgtgcactt

SEQ ID NO: 655940 - DNA, 25 bp, Homo sapien
ggccgtgcacttcccacatggatgc

SEQ ID NO: 655941 - DNA, 25 bp, Homo sapien
tgtggctctcctctgtgacggccgt

SEQ ID NO: 655942 - DNA, 25 bp, Homo sapien
ctggcaaagcccacaactgtggggt

SEQ ID NO: 655943 - DNA, 25 bp, Homo sapien
ctgcggcacaccttcaggccactca

SEQ ID NO: 655944 - DNA, 25 bp, Homo sapien
aaagcccacaactgtggggtcctgg

SEQ ID NO: 655945 - DNA, 25 bp, Homo sapien
tgggcaaaggttcccctgcggcaca

SEQ ID NO: 655946 - DNA, 25 bp, Homo sapien
tcagtccaccaggtatttccaccgt

SEQ ID NO: 655947 - DNA, 25 bp, Homo sapien
tctcagtccaccaggtatttccacc

SEQ ID NO: 655948 - DNA, 25 bp, Homo sapien
ctctcagtccaccaggtatttccac

SEQ ID NO: 655949 - DNA, 25 bp, Homo sapien
agtccaccaggtatttccaccgtgg

SEQ ID NO: 655950 - DNA, 25 bp, Homo sapien
caggccaactctgctgttgtcctga

SEQ ID NO: 655951 - DNA, 25 bp, Homo sapien
gttgtcctgattttctcgagttccc

SEQ ID NO: 655952 - DNA, 25 bp, Homo sapien
ttgtcctgattttctcgagttccca

SEQ ID NO: 655953 - DNA, 25 bp, Homo sapien
gccaactctgctgttgtcctgattt

SEQ ID NO: 655954 - DNA, 25 bp, Homo sapien
tttctggtcagttgcaataaggagc

SEQ ID NO: 655955 - DNA, 25 bp, Homo sapien
cctgttttctggtcagttgcaataa

SEQ ID NO: 655956 - DNA, 25 bp, Homo sapien
ctcctgttttctggtcagttgcaat

SEQ ID NO: 655957 - DNA, 25 bp, Homo sapien
tgttttctggtcagttgcaataagg

SEQ ID NO: 655958 - DNA, 25 bp, Homo sapien
accgcgggtcgagcaacagtcactg

SEQ ID NO: 655959 - DNA, 25 bp, Homo sapien
tgtgcaccaggaaaccatagcactg

SEQ ID NO: 655960 - DNA, 25 bp, Homo sapien
tgcatctgtaacaaccgcgggtcga

SEQ ID NO: 655961 - DNA, 25 bp, Homo sapien
cactgggctccaaggaacagacttg

SEQ ID NO: 655962 - DNA, 25 bp, Homo sapien
aggcagccctgttggatacacttga

SEQ ID NO: 655963 - DNA, 25 bp, Homo sapien
aaggcagccctgttggatacacttg

SEQ ID NO: 655964 - DNA, 25 bp, Homo sapien
cccgccttccataggatgtagagcc

SEQ ID NO: 655965 - DNA, 25 bp, Homo sapien
gagcccgccttccataggatgtaga

SEQ ID NO: 655966 - DNA, 25 bp, Homo sapien
ggagcccgccttccataggatgtag

SEQ ID NO: 655967 - DNA, 25 bp, Homo sapien
agcccgccttccataggatgtagag

SEQ ID NO: 655968 - DNA, 25 bp, Homo sapien
cctgtgtggactcagcatgtttgcc

SEQ ID NO: 655969 - DNA, 25 bp, Homo sapien
tcctgtgtggactcagcatgtttgc

SEQ ID NO: 655970 - DNA, 25 bp, Homo sapien
gccagacaccacagaattaaaccca

SEQ ID NO: 655971 - DNA, 25 bp, Homo sapien
tggcagcgttggtcatgcaccttct

SEQ ID NO: 655972 - DNA, 25 bp, Homo sapien
gcagcgttggtcatgcaccttctgt

SEQ ID NO: 655973 - DNA, 25 bp, Homo sapien
cggactggcagcgttggtcatgcac

SEQ ID NO: 655974 - DNA, 25 bp, Homo sapien
gactggcagcgttggtcatgcacct

SEQ ID NO: 655975 - DNA, 25 bp, Homo sapien
caccacaccccgtagccctgcatgt

SEQ ID NO: 655976 - DNA, 25 bp, Homo sapien
cacaccccgtagccctgcatgtgga

SEQ ID NO: 655977 - DNA, 25 bp, Homo sapien
ccacaccccgtagccctgcatgtgg

SEQ ID NO: 655978 - DNA, 25 bp, Homo sapien
cacaccacaccccgtagccctgcat

SEQ ID NO: 655979 - DNA, 25 bp, Homo sapien
tatcctctagctagcatagaacaag

SEQ ID NO: 655980 - DNA, 25 bp, Homo sapien
ggaactggtctttgttgaaggcacc

SEQ ID NO: 655981 - DNA, 25 bp, Homo sapien
tgcatggaaatgctatatcctctag

SEQ ID NO: 655982 - DNA, 25 bp, Homo sapien
gatcctacccaagggctgtgcaaaa

SEQ ID NO: 655983 - DNA, 25 bp, Homo sapien
taatggtgatgtcagaatcaatagg

SEQ ID NO: 655984 - DNA, 25 bp, Homo sapien
gtggtaatggtgatgtcagaatcaa

SEQ ID NO: 655985 - DNA, 25 bp, Homo sapien
tggtgagcagtaaatagacagtaag

SEQ ID NO: 655986 - DNA, 25 bp, Homo sapien
gtaaatagacagtaaggctgctgct

SEQ ID NO: 655987 - DNA, 25 bp, Homo sapien
gggcctgtttgtcttggagccaatg

SEQ ID NO: 655988 - DNA, 25 bp, Homo sapien
gcctgtttgtcttggagccaatggg

SEQ ID NO: 655989 - DNA, 25 bp, Homo sapien
cctgtttgtcttggagccaatgggc

SEQ ID NO: 655990 - DNA, 25 bp, Homo sapien
ctgtttgtcttggagccaatgggct

SEQ ID NO: 655991 - DNA, 25 bp, Homo sapien
tcttcccagtagtccttataaagga

SEQ ID NO: 655992 - DNA, 25 bp, Homo sapien
tctcagggtgcttccgcaagtccga

SEQ ID NO: 655993 - DNA, 25 bp, Homo sapien
gagcaggagtcgctgctaagacccc

SEQ ID NO: 655994 - DNA, 25 bp, Homo sapien
ggcaaggagccctctctgccggctt

SEQ ID NO: 655995 - DNA, 25 bp, Homo sapien
tgcttccgcaagtccgagcaggagt

SEQ ID NO: 655996 - DNA, 25 bp, Homo sapien
cccaatggcatcccgcctccctgac

SEQ ID NO: 655997 - DNA, 25 bp, Homo sapien
ctccccaatggcatcccgcctccct

SEQ ID NO: 655998 - DNA, 25 bp, Homo sapien
ccccaatggcatcccgcctccctga

SEQ ID NO: 655999 - DNA, 25 bp, Homo sapien
tccccaatggcatcccgcctccctg

SEQ ID NO: 656000 - DNA, 25 bp, Homo sapien
agccgactcggagacctcagggagc

SEQ ID NO: 656001 - DNA, 25 bp, Homo sapien
ttcatagagattgcccagcctgcac

SEQ ID NO: 656002 - DNA, 25 bp, Homo sapien
cagagacagaaacagccgactcgga

SEQ ID NO: 656003 - DNA, 25 bp, Homo sapien
gctggacctttaagccacaggcctt

SEQ ID NO: 656004 - DNA, 25 bp, Homo sapien
ggacccatctgcagtcatcgccgcc

SEQ ID NO: 656005 - DNA, 25 bp, Homo sapien
atctgcagtcatcgccgccaggtgt

SEQ ID NO: 656006 - DNA, 25 bp, Homo sapien
ggaaggccccacttctcatgcctgg

SEQ ID NO: 656007 - DNA, 25 bp, Homo sapien
aaggccccacttctcatgcctggta

SEQ ID NO: 656008 - DNA, 25 bp, Homo sapien
gcagccaagagttgcgtacagcctg

SEQ ID NO: 656009 - DNA, 25 bp, Homo sapien
gccaagagttgcgtacagcctggcc

SEQ ID NO: 656010 - DNA, 25 bp, Homo sapien
ccagcagccaagagttgcgtacagc

SEQ ID NO: 656011 - DNA, 25 bp, Homo sapien
cagccaagagttgcgtacagcctgg

SEQ ID NO: 656012 - DNA, 25 bp, Homo sapien
cctgggttgcaagaccctgcaggga

SEQ ID NO: 656013 - DNA, 25 bp, Homo sapien
tgggttgcaagaccctgcagggagc

SEQ ID NO: 656014 - DNA, 25 bp, Homo sapien
ctgggttgcaagaccctgcagggag

SEQ ID NO: 656015 - DNA, 25 bp, Homo sapien
gcagccagcacagagtgtccaccat

SEQ ID NO: 656016 - DNA, 25 bp, Homo sapien
cacagactattcagcagccagcaca

SEQ ID NO: 656017 - DNA, 25 bp, Homo sapien
tccacagactattcagcagccagca

SEQ ID NO: 656018 - DNA, 25 bp, Homo sapien
gtccacagactattcagcagccagc

SEQ ID NO: 656019 - DNA, 25 bp, Homo sapien
cctgcagtctatctcctctctgacc

SEQ ID NO: 656020 - DNA, 25 bp, Homo sapien
tgctcgttccctcgtctgcttctga

SEQ ID NO: 656021 - DNA, 25 bp, Homo sapien
tcttggcgttcagatggtccctttc

SEQ ID NO: 656022 - DNA, 25 bp, Homo sapien
ccccagctgaatttctcttggcgtt

SEQ ID NO: 656023 - DNA, 25 bp, Homo sapien
atgtcaaacccacaacaagcatgtt

SEQ ID NO: 656024 - DNA, 25 bp, Homo sapien
atgatggaggctcaactgggacggg

SEQ ID NO: 656025 - DNA, 25 bp, Homo sapien
caacaagcatgttaaaaaaatggtt

SEQ ID NO: 656026 - DNA, 25 bp, Homo sapien
agatgatggaggctcaactgggacg

SEQ ID NO: 656027 - DNA, 25 bp, Homo sapien
acaatctttgcctaagtcacaggag

SEQ ID NO: 656028 - DNA, 25 bp, Homo sapien
caatctttgcctaagtcacaggagg

SEQ ID NO: 656029 - DNA, 25 bp, Homo sapien
ccacaatctttgcctaagtcacagg

SEQ ID NO: 656030 - DNA, 25 bp, Homo sapien
cacaatctttgcctaagtcacagga

SEQ ID NO: 656031 - DNA, 25 bp, Homo sapien
ggaaccgcaggaggccataggatcc

SEQ ID NO: 656032 - DNA, 25 bp, Homo sapien
ttttctgggaattaagcagtgcaac

SEQ ID NO: 656033 - DNA, 25 bp, Homo sapien
tcatttctcgacagtgccatagcaa

SEQ ID NO: 656034 - DNA, 25 bp, Homo sapien
gggaattaagcagtgcaacgcaagg

SEQ ID NO: 656035 - DNA, 25 bp, Homo sapien
tggccgctggccaccatccgaaggt

SEQ ID NO: 656036 - DNA, 25 bp, Homo sapien
caaggacctgaaagctctataccgc

SEQ ID NO: 656037 - DNA, 25 bp, Homo sapien
aagggcaaggacctgaaagctctat

SEQ ID NO: 656038 - DNA, 25 bp, Homo sapien
tgaaagctctataccgctctggccg

SEQ ID NO: 656039 - DNA, 25 bp, Homo sapien
gcacagggttcacaggaggctcagt

SEQ ID NO: 656040 - DNA, 25 bp, Homo sapien
ctgcacagggttcacaggaggctca

SEQ ID NO: 656041 - DNA, 25 bp, Homo sapien
acagggttcacaggaggctcagtgt

SEQ ID NO: 656042 - DNA, 25 bp, Homo sapien
cacagggttcacaggaggctcagtg

SEQ ID NO: 656043 - DNA, 25 bp, Homo sapien
caccaaccttcactgaggggttcgg

SEQ ID NO: 656044 - DNA, 25 bp, Homo sapien
agcccgttgcatgcaccaaccttca

SEQ ID NO: 656045 - DNA, 25 bp, Homo sapien
gtgactggctttgcccttctatgca

SEQ ID NO: 656046 - DNA, 25 bp, Homo sapien
gggccagcccgttgcatgcaccaac

SEQ ID NO: 656047 - DNA, 25 bp, Homo sapien
agatacttcacagcctgctactgag

SEQ ID NO: 656048 - DNA, 25 bp, Homo sapien
gccacttcatttacaccgggtgaac

SEQ ID NO: 656049 - DNA, 25 bp, Homo sapien
caagaccgtctactgataacacagg

SEQ ID NO: 656050 - DNA, 25 bp, Homo sapien
tcagatgttgcataggagcgtaact

SEQ ID NO: 656051 - DNA, 25 bp, Homo sapien
gagttgtctccactagtcacagagg

SEQ ID NO: 656052 - DNA, 25 bp, Homo sapien
tgagctgagtggaacctgcatcacc

SEQ ID NO: 656053 - DNA, 25 bp, Homo sapien
tatgacctagcctgggaactcctct

SEQ ID NO: 656054 - DNA, 25 bp, Homo sapien
taaacgggaggaacatagacgccac

SEQ ID NO: 656055 - DNA, 25 bp, Homo sapien
tgggcaaaccagggcctcgccctgg

SEQ ID NO: 656056 - DNA, 25 bp, Homo sapien
ggcccacacggcctggccgaacact

SEQ ID NO: 656057 - DNA, 25 bp, Homo sapien
gttcagaggggggaacaccacagac

SEQ ID NO: 656058 - DNA, 25 bp, Homo sapien
tgaatgccacaaaaggggcacagga

SEQ ID NO: 656059 - DNA, 25 bp, Homo sapien
ggtatctggtctccctggtgaccat

SEQ ID NO: 656060 - DNA, 25 bp, Homo sapien
tgtggggtatctggtctccctggtg

SEQ ID NO: 656061 - DNA, 25 bp, Homo sapien
gggtatctggtctccctggtgacca

SEQ ID NO: 656062 - DNA, 25 bp, Homo sapien
tggggtatctggtctccctggtgac

SEQ ID NO: 656063 - DNA, 25 bp, Homo sapien
tgttcccagactaaaagagccacct

SEQ ID NO: 656064 - DNA, 25 bp, Homo sapien
tcaccgtagattgactggctccaag

SEQ ID NO: 656065 - DNA, 25 bp, Homo sapien
caaacggcatcattgcaggctggac

SEQ ID NO: 656066 - DNA, 25 bp, Homo sapien
tcagatgatcctgctaaggctgaga

SEQ ID NO: 656067 - DNA, 25 bp, Homo sapien
gtagcttttcccgtccatctccgga

SEQ ID NO: 656068 - DNA, 25 bp, Homo sapien
gtcttcacagcctcttactctagtc

SEQ ID NO: 656069 - DNA, 25 bp, Homo sapien
tactctagtcctcacggtcaggttc

SEQ ID NO: 656070 - DNA, 25 bp, Homo sapien
catctccggacactcgacggtgtgg

SEQ ID NO: 656071 - DNA, 25 bp, Homo sapien
cagactccactgtgccgaggttgaa

SEQ ID NO: 656072 - DNA, 25 bp, Homo sapien
cattcagccctagctctgtagagaa

SEQ ID NO: 656073 - DNA, 25 bp, Homo sapien
aaacctcgactctcaaggatgtgag

SEQ ID NO: 656074 - DNA, 25 bp, Homo sapien
tacttgcccagtagagactctgatt

SEQ ID NO: 656075 - DNA, 25 bp, Homo sapien
tggccacgtccacaaaccctgtgtt

SEQ ID NO: 656076 - DNA, 25 bp, Homo sapien
gaaatgaattgtgctgaggagtata

SEQ ID NO: 656077 - DNA, 25 bp, Homo sapien
tgttgtggaagaacagaaggcgttc

SEQ ID NO: 656078 - DNA, 25 bp, Homo sapien
gaggagtataatcagcacgcagtgc

SEQ ID NO: 656079 - DNA, 25 bp, Homo sapien
tccaggtcccggagtagtggtgaca

SEQ ID NO: 656080 - DNA, 25 bp, Homo sapien
ccaggtcccggagtagtggtgacag

SEQ ID NO: 656081 - DNA, 25 bp, Homo sapien
ttccaggtcccggagtagtggtgac

SEQ ID NO: 656082 - DNA, 25 bp, Homo sapien
aggagatgacggggagagtggcttg

SEQ ID NO: 656083 - DNA, 25 bp, Homo sapien
cagggagaacaggggctagggtggg

SEQ ID NO: 656084 - DNA, 25 bp, Homo sapien
ggcagggagaacaggggctagggtg

SEQ ID NO: 656085 - DNA, 25 bp, Homo sapien
gggtggaggagatgacggggagagt

SEQ ID NO: 656086 - DNA, 25 bp, Homo sapien
aggtgaaatggacactgggtgaagc

SEQ ID NO: 656087 - DNA, 25 bp, Homo sapien
gggaggtgaaatggacactgggtga

SEQ ID NO: 656088 - DNA, 25 bp, Homo sapien
gccgggggaggtgaaatggacactg

SEQ ID NO: 656089 - DNA, 25 bp, Homo sapien
gaagagacattggaaggccggggga

SEQ ID NO: 656090 - DNA, 25 bp, Homo sapien
gtggtctgttgcaagcttggaaggt

SEQ ID NO: 656091 - DNA, 25 bp, Homo sapien
tgtggtctgttgcaagcttggaagg

SEQ ID NO: 656092 - DNA, 25 bp, Homo sapien
agagaccccacgaggcggtggcgtt

SEQ ID NO: 656093 - DNA, 25 bp, Homo sapien
tctgcacattaggaagagaccccac

SEQ ID NO: 656094 - DNA, 25 bp, Homo sapien
ggtggcgttctttctcgttcggagc

SEQ ID NO: 656095 - DNA, 25 bp, Homo sapien
cccacgaggcggtggcgttctttct

SEQ ID NO: 656096 - DNA, 25 bp, Homo sapien
gcccgaagcgctcttgccaggacgt

SEQ ID NO: 656097 - DNA, 25 bp, Homo sapien
agcgctcttgccaggacgtactgac

SEQ ID NO: 656098 - DNA, 25 bp, Homo sapien
gccacgcccgaagcgctcttgccag

SEQ ID NO: 656099 - DNA, 25 bp, Homo sapien
gctcccggtaagcgcggtcgccgct

SEQ ID NO: 656100 - DNA, 25 bp, Homo sapien
tgcccagccgggtggtaacgttgag

SEQ ID NO: 656101 - DNA, 25 bp, Homo sapien
tttctcactcaaccgcaggttccag

SEQ ID NO: 656102 - DNA, 25 bp, Homo sapien
agcccgagaccaagacgcaggcggt

SEQ ID NO: 656103 - DNA, 25 bp, Homo sapien
ggcgccggtttctcactcaaccgca

SEQ ID NO: 656104 - DNA, 25 bp, Homo sapien
cagcccgagaccaagacgcaggcgg

SEQ ID NO: 656105 - DNA, 25 bp, Homo sapien
tagccaagcaacataggaaatcgcg

SEQ ID NO: 656106 - DNA, 25 bp, Homo sapien
aggacagcggcggatttaagcccca

SEQ ID NO: 656107 - DNA, 25 bp, Homo sapien
tctctgggtcgtctttggagtggcc

SEQ ID NO: 656108 - DNA, 25 bp, Homo sapien
gattcggcggatacgcagctgtcac

SEQ ID NO: 656109 - DNA, 25 bp, Homo sapien
tgtttacagcggaactcccagaggg

SEQ ID NO: 656110 - DNA, 25 bp, Homo sapien
ctgtttacagcggaactcccagagg

SEQ ID NO: 656111 - DNA, 25 bp, Homo sapien
gtttacagcggaactcccagagggc

SEQ ID NO: 656112 - DNA, 25 bp, Homo sapien
ggcagtctgcactccagaatcagga

SEQ ID NO: 656113 - DNA, 25 bp, Homo sapien
catttcaggctttaggactcgtctc

SEQ ID NO: 656114 - DNA, 25 bp, Homo sapien
ccgggtcccacagtctcagtagaga

SEQ ID NO: 656115 - DNA, 25 bp, Homo sapien
tcagtagagacctcagtgagatgcc

SEQ ID NO: 656116 - DNA, 25 bp, Homo sapien
ctgtggcaaattatagaacacagag

SEQ ID NO: 656117 - DNA, 25 bp, Homo sapien
actgtggcaaattatagaacacaga

SEQ ID NO: 656118 - DNA, 25 bp, Homo sapien
gtgactgtggcaaattatagaacac

SEQ ID NO: 656119 - DNA, 25 bp, Homo sapien
gcagtagggaccaaaagtctcagca

SEQ ID NO: 656120 - DNA, 25 bp, Homo sapien
gtctatttccttgggagcatgtgag

SEQ ID NO: 656121 - DNA, 25 bp, Homo sapien
tgtgagaacatagcagtagggacca

SEQ ID NO: 656122 - DNA, 25 bp, Homo sapien
caggcaagtaactgacatgtctatt

SEQ ID NO: 656123 - DNA, 25 bp, Homo sapien
tgtgaagaaccagtaactttgtccc

SEQ ID NO: 656124 - DNA, 25 bp, Homo sapien
ttctagggccttgagtatgtgccac

SEQ ID NO: 656125 - DNA, 25 bp, Homo sapien
ctccgattatgccttaaagagttga

SEQ ID NO: 656126 - DNA, 25 bp, Homo sapien
tcacaatgaaaagacgattctgctg

SEQ ID NO: 656127 - DNA, 25 bp, Homo sapien
accttggagaattcttttgttcact

SEQ ID NO: 656128 - DNA, 25 bp, Homo sapien
tatgattcacatgtaacatttaaac

SEQ ID NO: 656129 - DNA, 25 bp, Homo sapien
tgttcactagttccttttttctcta

SEQ ID NO: 656130 - DNA, 25 bp, Homo sapien
gagaattcttttgttcactagttcc

SEQ ID NO: 656131 - DNA, 25 bp, Homo sapien
atgaacatgtagctgcactatgcca

SEQ ID NO: 656132 - DNA, 25 bp, Homo sapien
gctgcactatgccagaaattaatga

SEQ ID NO: 656133 - DNA, 25 bp, Homo sapien
gaagcgaggccaccatctgagtgga

SEQ ID NO: 656134 - DNA, 25 bp, Homo sapien
cctgagaacagagaaacgtaaccct

SEQ ID NO: 656135 - DNA, 25 bp, Homo sapien
tggaagtgcggttgagctctctgcc

SEQ ID NO: 656136 - DNA, 25 bp, Homo sapien
gactggttacagaggacctcctgga

SEQ ID NO: 656137 - DNA, 25 bp, Homo sapien
taaatgcccacactgaccagatagt

SEQ ID NO: 656138 - DNA, 25 bp, Homo sapien
tgcaagtaactgtagaccctaaagg

SEQ ID NO: 656139 - DNA, 25 bp, Homo sapien
gaccggagcctagagagtattaacg

SEQ ID NO: 656140 - DNA, 25 bp, Homo sapien
gcaaaaccattacggtgccctggaa

SEQ ID NO: 656141 - DNA, 25 bp, Homo sapien
ggtcatagctcataccacagcaggc

SEQ ID NO: 656142 - DNA, 25 bp, Homo sapien
gaaacatggcactgtcctacatcca

SEQ ID NO: 656143 - DNA, 25 bp, Homo sapien
tactttggttacagtgacgccacca

SEQ ID NO: 656144 - DNA, 25 bp, Homo sapien
taagtttgcacaccactaactgggc

SEQ ID NO: 656145 - DNA, 25 bp, Homo sapien
tgaaagctaaacataattgcccgaa

SEQ ID NO: 656146 - DNA, 25 bp, Homo sapien
tcttacctctagaagacagccagct

SEQ ID NO: 656147 - DNA, 25 bp, Homo sapien
tctaagagggagtgaaaaagtacca

SEQ ID NO: 656148 - DNA, 25 bp, Homo sapien
taaaaccagaggactcaagctgcag

SEQ ID NO: 656149 - DNA, 25 bp, Homo sapien
gatgtggatcctctacagtctgtcc

SEQ ID NO: 656150 - DNA, 25 bp, Homo sapien
tttctcaaacaacctgcagtcgacc

SEQ ID NO: 656151 - DNA, 25 bp, Homo sapien
cacattaaattctagggcccaacag

SEQ ID NO: 656152 - DNA, 25 bp, Homo sapien
tatagcctgcaagtcctcgtggcca

SEQ ID NO: 656153 - DNA, 25 bp, Homo sapien
tctgctgggttaagtctggcaacac

SEQ ID NO: 656154 - DNA, 25 bp, Homo sapien
gaagtacttctcagaaaacgctggg

SEQ ID NO: 656155 - DNA, 25 bp, Homo sapien
acaatgtgatgcctacagaccctgg

SEQ ID NO: 656156 - DNA, 25 bp, Homo sapien
ggagttagctgcatgccacaaagac

SEQ ID NO: 656157 - DNA, 25 bp, Homo sapien
agcaacatggtggtcagccactgat

SEQ ID NO: 656158 - DNA, 25 bp, Homo sapien
ggatggactttttgatgcgaagcaa

SEQ ID NO: 656159 - DNA, 25 bp, Homo sapien
tggactttttgatgcgaagcaacat

SEQ ID NO: 656160 - DNA, 25 bp, Homo sapien
ccaagcgagatattgagtcaaattc

SEQ ID NO: 656161 - DNA, 25 bp, Homo sapien
gaatatttgctcctgaactagtctc

SEQ ID NO: 656162 - DNA, 25 bp, Homo sapien
aataatgtaccatgtcccaaaagca

SEQ ID NO: 656163 - DNA, 25 bp, Homo sapien
aaatacaacttaaggtatgctggag

SEQ ID NO: 656164 - DNA, 25 bp, Homo sapien
agtgtaagtcgaatctcagcatggc

SEQ ID NO: 656165 - DNA, 25 bp, Homo sapien
gttcttcatgagcttctaggagttt

SEQ ID NO: 656166 - DNA, 25 bp, Homo sapien
tcaggtgcctatttcagaacacaac

SEQ ID NO: 656167 - DNA, 25 bp, Homo sapien
agagccaagttagggatctagcttc

SEQ ID NO: 656168 - DNA, 25 bp, Homo sapien
agggcccctcagttagcagacttta

SEQ ID NO: 656169 - DNA, 25 bp, Homo sapien
aacagttctgtaagatgaagtccca

SEQ ID NO: 656170 - DNA, 25 bp, Homo sapien
aataatttacattctcttgaatcag

SEQ ID NO: 656171 - DNA, 25 bp, Homo sapien
tacattctcttgaatcagtaaatgc

SEQ ID NO: 656172 - DNA, 25 bp, Homo sapien
tttcctcatatttctcaagagcaag

SEQ ID NO: 656173 - DNA, 25 bp, Homo sapien
tcttgaatcagtaaatgctggaaac

SEQ ID NO: 656174 - DNA, 25 bp, Homo sapien
tggtggctaccagtgaacatataca

SEQ ID NO: 656175 - DNA, 25 bp, Homo sapien
aaatggtggctaccagtgaacatat

SEQ ID NO: 656176 - DNA, 25 bp, Homo sapien
tggctaccagtgaacatatacatat

SEQ ID NO: 656177 - DNA, 25 bp, Homo sapien
aaaaaatggtggctaccagtgaaca

SEQ ID NO: 656178 - DNA, 25 bp, Homo sapien
gcctatagcactaaatattcccagg

SEQ ID NO: 656179 - DNA, 25 bp, Homo sapien
atagcactaaatattcccaggcagt

SEQ ID NO: 656180 - DNA, 25 bp, Homo sapien
ttcaagtaccaggctctacactgct

SEQ ID NO: 656181 - DNA, 25 bp, Homo sapien
aagtaccaggctctacactgcttag

SEQ ID NO: 656182 - DNA, 25 bp, Homo sapien
ccgtttattcttggtactaacatca

SEQ ID NO: 656183 - DNA, 25 bp, Homo sapien
ttgacagctgttaaaagattacaac

SEQ ID NO: 656184 - DNA, 25 bp, Homo sapien
tttgacagctgttaaaagattacaa

SEQ ID NO: 656185 - DNA, 25 bp, Homo sapien
tattcttggtactaacatcaaaatg

SEQ ID NO: 656186 - DNA, 25 bp, Homo sapien
gaagtaatcctttgcactgtatttc

SEQ ID NO: 656187 - DNA, 25 bp, Homo sapien
ctcgtctactatgaagtggcagagg

SEQ ID NO: 656188 - DNA, 25 bp, Homo sapien
gattatccattgtgtttgccccaac

SEQ ID NO: 656189 - DNA, 25 bp, Homo sapien
ttcaactcgtctactatgaagtggc

SEQ ID NO: 656190 - DNA, 25 bp, Homo sapien
cagagacctggtggaaagctgacac

SEQ ID NO: 656191 - DNA, 25 bp, Homo sapien
cttgaaagactgtaagaagcacccc

SEQ ID NO: 656192 - DNA, 25 bp, Homo sapien
ggcagtaatgaggtaacatccccac

SEQ ID NO: 656193 - DNA, 25 bp, Homo sapien
taaaaagtgggtgggctcaacagca

SEQ ID NO: 656194 - DNA, 25 bp, Homo sapien
gattgcgccattaaactggcacgcc

SEQ ID NO: 656195 - DNA, 25 bp, Homo sapien
gagacaagattgcgccattaaactg

SEQ ID NO: 656196 - DNA, 25 bp, Homo sapien
ccattaaactggcacgcctgggcga

SEQ ID NO: 656197 - DNA, 25 bp, Homo sapien
gcgccattaaactggcacgcctggg

SEQ ID NO: 656198 - DNA, 25 bp, Homo sapien
ggcaatactctctgtgatgactgat

SEQ ID NO: 656199 - DNA, 25 bp, Homo sapien
ttctcaatgcctgtcttagagccag

SEQ ID NO: 656200 - DNA, 25 bp, Homo sapien
tatgtgtcaccttgagtgggctaca

SEQ ID NO: 656201 - DNA, 25 bp, Homo sapien
ggaacctgtattcatcgactgtcag

SEQ ID NO: 656202 - DNA, 25 bp, Homo sapien
ctggtactgctcaagctgggcagca

SEQ ID NO: 656203 - DNA, 25 bp, Homo sapien
tctggtactgctcaagctgggcagc

SEQ ID NO: 656204 - DNA, 25 bp, Homo sapien
tggtactgctcaagctgggcagcat

SEQ ID NO: 656205 - DNA, 25 bp, Homo sapien
cttcagcagacacttgtttgctgag

SEQ ID NO: 656206 - DNA, 25 bp, Homo sapien
gcagattgttcataatgtgcaatag

SEQ ID NO: 656207 - DNA, 25 bp, Homo sapien
aataatcagcagattgttcataatg

SEQ ID NO: 656208 - DNA, 25 bp, Homo sapien
aatcagcagattgttcataatgtgc

SEQ ID NO: 656209 - DNA, 25 bp, Homo sapien
tcagcagattgttcataatgtgcaa

SEQ ID NO: 656210 - DNA, 25 bp, Homo sapien
caaacttttcacaactcggcctact

SEQ ID NO: 656211 - DNA, 25 bp, Homo sapien
gcttggctgcaattgtaaaccttcc

SEQ ID NO: 656212 - DNA, 25 bp, Homo sapien
tctcaatgtctacaagttcagtctc

SEQ ID NO: 656213 - DNA, 25 bp, Homo sapien
cagtctcatagatctctgcaatagt

SEQ ID NO: 656214 - DNA, 25 bp, Homo sapien
gcaatagtaatgtggtgcttggctg

SEQ ID NO: 656215 - DNA, 25 bp, Homo sapien
gaaagatagaactctaagccatctc

SEQ ID NO: 656216 - DNA, 25 bp, Homo sapien
gaaacagtcacacaccgattttacc

SEQ ID NO: 656217 - DNA, 25 bp, Homo sapien
tctgaatgccagtttgggaacataa

SEQ ID NO: 656218 - DNA, 25 bp, Homo sapien
cccacagccactcaagcaatgcaat

SEQ ID NO: 656219 - DNA, 25 bp, Homo sapien
catgtctgtgtaaatgtcgatggct

SEQ ID NO: 656220 - DNA, 25 bp, Homo sapien
aaatgtcgatggctgcatttaagca

SEQ ID NO: 656221 - DNA, 25 bp, Homo sapien
gctgcatttaagcagttgatagcct

SEQ ID NO: 656222 - DNA, 25 bp, Homo sapien
tgtctgtgtaaatgtcgatggctgc

SEQ ID NO: 656223 - DNA, 25 bp, Homo sapien
cgtaggcatttaagaaaaacaatga

SEQ ID NO: 656224 - DNA, 25 bp, Homo sapien
gcgtaggcatttaagaaaaacaatg

SEQ ID NO: 656225 - DNA, 25 bp, Homo sapien
agcgtaggcatttaagaaaaacaat

SEQ ID NO: 656226 - DNA, 25 bp, Homo sapien
ccatagaggttgtcaccaacactga

SEQ ID NO: 656227 - DNA, 25 bp, Homo sapien
gaactgtagctggagtaacattggc

SEQ ID NO: 656228 - DNA, 25 bp, Homo sapien
taaagtgaggactccatccaggcaa

SEQ ID NO: 656229 - DNA, 25 bp, Homo sapien
tggaacatggcaccacatcacaaga

SEQ ID NO: 656230 - DNA, 25 bp, Homo sapien
agatgtactttccttttgcgtttat

SEQ ID NO: 656231 - DNA, 25 bp, Homo sapien
tccttttgcgtttattagacacatt

SEQ ID NO: 656232 - DNA, 25 bp, Homo sapien
aataatcccgctcaaatccgttgtt

SEQ ID NO: 656233 - DNA, 25 bp, Homo sapien
tcaataatcccgctcaaatccgttg

SEQ ID NO: 656234 - DNA, 25 bp, Homo sapien
caaaatttccgctgtgcacgcgtgt

SEQ ID NO: 656235 - DNA, 25 bp, Homo sapien
taacgttgagggaagtactgactgg

SEQ ID NO: 656236 - DNA, 25 bp, Homo sapien
ttttaccaggacttgaaagcacacc

SEQ ID NO: 656237 - DNA, 25 bp, Homo sapien
tggttagttacacacagagatagca

SEQ ID NO: 656238 - DNA, 25 bp, Homo sapien
agtcatgtttgctctgaagctgcat

SEQ ID NO: 656239 - DNA, 25 bp, Homo sapien
gatctgcctttttgtaagcatttcc

SEQ ID NO: 656240 - DNA, 25 bp, Homo sapien
gagtcatgtttgctctgaagctgca

SEQ ID NO: 656241 - DNA, 25 bp, Homo sapien
agctggtagcagagtcatgtttgct

SEQ ID NO: 656242 - DNA, 25 bp, Homo sapien
cttggctgcctgacaaaatgcgttt

SEQ ID NO: 656243 - DNA, 25 bp, Homo sapien
ttggctgcctgacaaaatgcgtttc

SEQ ID NO: 656244 - DNA, 25 bp, Homo sapien
ccaattctgctaaagcttcagctgc

SEQ ID NO: 656245 - DNA, 25 bp, Homo sapien
catccaattctgctaaagcttcagc

SEQ ID NO: 656246 - DNA, 25 bp, Homo sapien
tccaattctgctaaagcttcagctg

SEQ ID NO: 656247 - DNA, 25 bp, Homo sapien
ttcagctgcatctcttgttccaact

SEQ ID NO: 656248 - DNA, 25 bp, Homo sapien
tgtaaccaccagcatgacatgggta

SEQ ID NO: 656249 - DNA, 25 bp, Homo sapien
acatagcaagaaggcgccatcgtgg

SEQ ID NO: 656250 - DNA, 25 bp, Homo sapien
gacagtacaaactctggagcccacc

SEQ ID NO: 656251 - DNA, 25 bp, Homo sapien
gataaagtcatgagagcaccaccct

SEQ ID NO: 656252 - DNA, 25 bp, Homo sapien
gaacatatctggctaagtgggagct

SEQ ID NO: 656253 - DNA, 25 bp, Homo sapien
aagtgcttagaagggcctgactcac

SEQ ID NO: 656254 - DNA, 25 bp, Homo sapien
catgaagtggcaactcaggaacata

SEQ ID NO: 656255 - DNA, 25 bp, Homo sapien
cacggtggccactttcattattaca

SEQ ID NO: 656256 - DNA, 25 bp, Homo sapien
gaagcagggacccagcaacattctg

SEQ ID NO: 656257 - DNA, 25 bp, Homo sapien
gatagtctttgagggccactacaga

SEQ ID NO: 656258 - DNA, 25 bp, Homo sapien
tatgacaatgtcaggaggctagagc

SEQ ID NO: 656259 - DNA, 25 bp, Homo sapien
ttcactggaacgctaggcacgtggg

SEQ ID NO: 656260 - DNA, 25 bp, Homo sapien
tatttgcagctctggtatacatttc

SEQ ID NO: 656261 - DNA, 25 bp, Homo sapien
aacatatttgcagctctggtataca

SEQ ID NO: 656262 - DNA, 25 bp, Homo sapien
tctggtatacatttcacaagcctct

SEQ ID NO: 656263 - DNA, 25 bp, Homo sapien
gcagctctggtatacatttcacaag

SEQ ID NO: 656264 - DNA, 25 bp, Homo sapien
actgctgtggttgcatagccctgtg

SEQ ID NO: 656265 - DNA, 25 bp, Homo sapien
tgttctaaaactgctgtggttgcat

SEQ ID NO: 656266 - DNA, 25 bp, Homo sapien
cctgtgaataggctaaaaacctctg

SEQ ID NO: 656267 - DNA, 25 bp, Homo sapien
cctttggggactatgttacacagtg

SEQ ID NO: 656268 - DNA, 25 bp, Homo sapien
tcatgtccctttccctccacttcaa

SEQ ID NO: 656269 - DNA, 25 bp, Homo sapien
cttcatgtccctttccctccacttc

SEQ ID NO: 656270 - DNA, 25 bp, Homo sapien
atgtccctttccctccacttcaaat

SEQ ID NO: 656271 - DNA, 25 bp, Homo sapien
ttcatgtccctttccctccacttca

SEQ ID NO: 656272 - DNA, 25 bp, Homo sapien
cattgacattgccaaatttgtagct

SEQ ID NO: 656273 - DNA, 25 bp, Homo sapien
ttgtagctcttgtgtaaactcagac

SEQ ID NO: 656274 - DNA, 25 bp, Homo sapien
gctcttgtgtaaactcagactaaac

SEQ ID NO: 656275 - DNA, 25 bp, Homo sapien
caagataacccaatggggcctttca

SEQ ID NO: 656276 - DNA, 25 bp, Homo sapien
ggtaagaactaagatgcattaactt

SEQ ID NO: 656277 - DNA, 25 bp, Homo sapien
ctgttgtacccaggtaagaactaag

SEQ ID NO: 656278 - DNA, 25 bp, Homo sapien
ttgtacccaggtaagaactaagatg

SEQ ID NO: 656279 - DNA, 25 bp, Homo sapien
cccaggtaagaactaagatgcatta

SEQ ID NO: 656280 - DNA, 25 bp, Homo sapien
cagcccagaattcttccgggctgtc

SEQ ID NO: 656281 - DNA, 25 bp, Homo sapien
ggctgtcagtgcgggctctgctttt

SEQ ID NO: 656282 - DNA, 25 bp, Homo sapien
ctgtcagtgcgggctctgctttttg

SEQ ID NO: 656283 - DNA, 25 bp, Homo sapien
ccgggctgtcagtgcgggctctgct

SEQ ID NO: 656284 - DNA, 25 bp, Homo sapien
ccgccatcagctgtactgcctcacg

SEQ ID NO: 656285 - DNA, 25 bp, Homo sapien
gaggccttgactcgcttctcggcct

SEQ ID NO: 656286 - DNA, 25 bp, Homo sapien
ctcacgctccttccccgcgttgtcc

SEQ ID NO: 656287 - DNA, 25 bp, Homo sapien
ggaggccttgactcgcttctcggcc

SEQ ID NO: 656288 - DNA, 25 bp, Homo sapien
ccgcggccgccacagccccctcagc

SEQ ID NO: 656289 - DNA, 25 bp, Homo sapien
cccgccgcggccgccacagccccct

SEQ ID NO: 656290 - DNA, 25 bp, Homo sapien
gcggccgccacagccccctcagccg

SEQ ID NO: 656291 - DNA, 25 bp, Homo sapien
gtcgcccgccgcggccgccacagcc

SEQ ID NO: 656292 - DNA, 25 bp, Homo sapien
gtgcgcccaggcgccttaaccctcc

SEQ ID NO: 656293 - DNA, 25 bp, Homo sapien
gctgtgcgcccaggcgccttaaccc

SEQ ID NO: 656294 - DNA, 25 bp, Homo sapien
tcgctgtgcgcccaggcgccttaac

SEQ ID NO: 656295 - DNA, 25 bp, Homo sapien
ctgtgcgcccaggcgccttaaccct

SEQ ID NO: 656296 - DNA, 25 bp, Homo sapien
tgggacgcattcaaagcagtgtgta

SEQ ID NO: 656297 - DNA, 25 bp, Homo sapien
tctgggacgcattcaaagcagtgtg

SEQ ID NO: 656298 - DNA, 25 bp, Homo sapien
ggacgcattcaaagcagtgtgtaga

SEQ ID NO: 656299 - DNA, 25 bp, Homo sapien
ctctgggacgcattcaaagcagtgt

SEQ ID NO: 656300 - DNA, 25 bp, Homo sapien
ctattgtaccacttgaccattcagc

SEQ ID NO: 656301 - DNA, 25 bp, Homo sapien
ccaccagctggtcataatggcaact

SEQ ID NO: 656302 - DNA, 25 bp, Homo sapien
agctggtcataatggcaacttgagg

SEQ ID NO: 656303 - DNA, 25 bp, Homo sapien
ttgtaccacttgaccattcagcctc

SEQ ID NO: 656304 - DNA, 25 bp, Homo sapien
gattattgcccattgcaggattctc

SEQ ID NO: 656305 - DNA, 25 bp, Homo sapien
tcacatgcagtggccgcagttgtac

SEQ ID NO: 656306 - DNA, 25 bp, Homo sapien
gcagtggccgcagttgtacactcca

SEQ ID NO: 656307 - DNA, 25 bp, Homo sapien
atgcagtggccgcagttgtacactc

SEQ ID NO: 656308 - DNA, 25 bp, Homo sapien
actgttcaaaccagggtacagcaaa

SEQ ID NO: 656309 - DNA, 25 bp, Homo sapien
gtactgttcaaaccagggtacagca

SEQ ID NO: 656310 - DNA, 25 bp, Homo sapien
ttcaaaccagggtacagcaaacact

SEQ ID NO: 656311 - DNA, 25 bp, Homo sapien
caaaccagggtacagcaaacactga

SEQ ID NO: 656312 - DNA, 25 bp, Homo sapien
tcctcctccccctggatgaacatgg

SEQ ID NO: 656313 - DNA, 25 bp, Homo sapien
ctcctcctccccctggatgaacatg

SEQ ID NO: 656314 - DNA, 25 bp, Homo sapien
ttcaggtgatactccaggtggtcag

SEQ ID NO: 656315 - DNA, 25 bp, Homo sapien
tgcatttccacattcaggtgatact

SEQ ID NO: 656316 - DNA, 25 bp, Homo sapien
gggacacagttcgtggtctctggct

SEQ ID NO: 656317 - DNA, 25 bp, Homo sapien
tggcaggtggtccactgcatttcca

SEQ ID NO: 656318 - DNA, 25 bp, Homo sapien
tgttatactggtcggtgatccactg

SEQ ID NO: 656319 - DNA, 25 bp, Homo sapien
gaagatcctgaagtggtacttgtca

SEQ ID NO: 656320 - DNA, 25 bp, Homo sapien
tccttgttatactggtcggtgatcc

SEQ ID NO: 656321 - DNA, 25 bp, Homo sapien
ctgcctctggactttaaggactcgg

SEQ ID NO: 656322 - DNA, 25 bp, Homo sapien
caacaggagctgtagggcctgccag

SEQ ID NO: 656323 - DNA, 25 bp, Homo sapien
ttctactgccatcacttcatggacg

SEQ ID NO: 656324 - DNA, 25 bp, Homo sapien
gggagggccatcagagtcaatagaa

SEQ ID NO: 656325 - DNA, 25 bp, Homo sapien
cttcatggacgcttagaaaggtttt

SEQ ID NO: 656326 - DNA, 25 bp, Homo sapien
ctgtactcctcagggacaagtcgaa

SEQ ID NO: 656327 - DNA, 25 bp, Homo sapien
agtcgaatcacactgaccctacctg

SEQ ID NO: 656328 - DNA, 25 bp, Homo sapien
tcctcagggacaagtcgaatcacac

SEQ ID NO: 656329 - DNA, 25 bp, Homo sapien
gacaagtcgaatcacactgacccta

SEQ ID NO: 656330 - DNA, 25 bp, Homo sapien
ttgtaaataccattgtacttgcacc

SEQ ID NO: 656331 - DNA, 25 bp, Homo sapien
tgtaaataccattgtacttgcacca

SEQ ID NO: 656332 - DNA, 25 bp, Homo sapien
tactgttggcccaagccaagggagt

SEQ ID NO: 656333 - DNA, 25 bp, Homo sapien
aacccattgatctttgcagcctagg

SEQ ID NO: 656334 - DNA, 25 bp, Homo sapien
gcaatgctttgccacctgcctgaca

SEQ ID NO: 656335 - DNA, 25 bp, Homo sapien
tgagagcttaacaggtgcgtgcccc

SEQ ID NO: 656336 - DNA, 25 bp, Homo sapien
gtactttgggctgatctgtatttta

SEQ ID NO: 656337 - DNA, 25 bp, Homo sapien
gaattggacctcaggtctgatgtac

SEQ ID NO: 656338 - DNA, 25 bp, Homo sapien
gagttcttgggagctcccctactgt

SEQ ID NO: 656339 - DNA, 25 bp, Homo sapien
tatcagggccgactttctgtttgga

SEQ ID NO: 656340 - DNA, 25 bp, Homo sapien
taaatgcagagcaggatgaagttct

SEQ ID NO: 656341 - DNA, 25 bp, Homo sapien
gagcaggatgaagttctgctcctcc

SEQ ID NO: 656342 - DNA, 25 bp, Homo sapien
gaacctggcttgagcagacaggtgt

SEQ ID NO: 656343 - DNA, 25 bp, Homo sapien
ctgctcctccatggaacctggcttg

SEQ ID NO: 656344 - DNA, 25 bp, Homo sapien
tcaggaatgcttacctgggacatgc

SEQ ID NO: 656345 - DNA, 25 bp, Homo sapien
tccacagaggtagcttaggctggca

SEQ ID NO: 656346 - DNA, 25 bp, Homo sapien
tacctggcgtgtctggtggcaactc

SEQ ID NO: 656347 - DNA, 25 bp, Homo sapien
tagagaactgtgtcccaagtgagca

SEQ ID NO: 656348 - DNA, 25 bp, Homo sapien
tgcttctagggccatggcattgcat

SEQ ID NO: 656349 - DNA, 25 bp, Homo sapien
ttctagggccatggcattgcataac

SEQ ID NO: 656350 - DNA, 25 bp, Homo sapien
ggcattgcataacggggctctgaaa

SEQ ID NO: 656351 - DNA, 25 bp, Homo sapien
tagggccatggcattgcataacggg

SEQ ID NO: 656352 - DNA, 25 bp, Homo sapien
acaaaggtgagggacttctgcgaac

SEQ ID NO: 656353 - DNA, 25 bp, Homo sapien
gaacaaaggtgagggacttctgcga

SEQ ID NO: 656354 - DNA, 25 bp, Homo sapien
tcagcaggtgtggaacaaaggtgag

SEQ ID NO: 656355 - DNA, 25 bp, Homo sapien
aaagtcagcaggtgtggaacaaagg

SEQ ID NO: 656356 - DNA, 25 bp, Homo sapien
aacgtggcgaagaacttggatctga

SEQ ID NO: 656357 - DNA, 25 bp, Homo sapien
cagcagccaggaacgtggcgaagaa

SEQ ID NO: 656358 - DNA, 25 bp, Homo sapien
ggccgggacagtcggctcgagggcc

SEQ ID NO: 656359 - DNA, 25 bp, Homo sapien
gcaataccacccgtgggccgggaca

SEQ ID NO: 656360 - DNA, 25 bp, Homo sapien
tcctagagatggaaggtgcttgtca

SEQ ID NO: 656361 - DNA, 25 bp, Homo sapien
gacgtttgggcaagagtcctagaga

SEQ ID NO: 656362 - DNA, 25 bp, Homo sapien
actggtttacggacagatgcaggca

SEQ ID NO: 656363 - DNA, 25 bp, Homo sapien
agctccccactaatggtagggttgg

SEQ ID NO: 656364 - DNA, 25 bp, Homo sapien
gggtgcaggacctggtaatattctt

SEQ ID NO: 656365 - DNA, 25 bp, Homo sapien
cagcatggggtctctgtaggctaca

SEQ ID NO: 656366 - DNA, 25 bp, Homo sapien
tccctgggtaggactgtctgtgcag

SEQ ID NO: 656367 - DNA, 25 bp, Homo sapien
cttgcaatgttgcattccctgggta

SEQ ID NO: 656368 - DNA, 25 bp, Homo sapien
cttgctccatgaaggacggctgtgc

SEQ ID NO: 656369 - DNA, 25 bp, Homo sapien
catgaaggacggctgtgctccaaaa

SEQ ID NO: 656370 - DNA, 25 bp, Homo sapien
tccccttgctccatgaaggacggct

SEQ ID NO: 656371 - DNA, 25 bp, Homo sapien
ctccatgaaggacggctgtgctcca

SEQ ID NO: 656372 - DNA, 25 bp, Homo sapien
ctgagcatgaactcctaacacatgg

SEQ ID NO: 656373 - DNA, 25 bp, Homo sapien
gagcatgaactcctaacacatggaa

SEQ ID NO: 656374 - DNA, 25 bp, Homo sapien
taacacatggaaagtaagaacacac

SEQ ID NO: 656375 - DNA, 25 bp, Homo sapien
gcatgaactcctaacacatggaaag

SEQ ID NO: 656376 - DNA, 25 bp, Homo sapien
gctgctcaggcactgaagggccatg

SEQ ID NO: 656377 - DNA, 25 bp, Homo sapien
tgttccagaggtcaaaccgtgtcct

SEQ ID NO: 656378 - DNA, 25 bp, Homo sapien
gagcacgtcttgttccagaggtcaa

SEQ ID NO: 656379 - DNA, 25 bp, Homo sapien
aggaatgcccgcctgagcacgtctt

SEQ ID NO: 656380 - DNA, 25 bp, Homo sapien
gcctgagcacgtcttgttccagagg

SEQ ID NO: 656381 - DNA, 25 bp, Homo sapien
tccgcaccacaccccatgcggcatc

SEQ ID NO: 656382 - DNA, 25 bp, Homo sapien
gtgtccgcaccacaccccatgcggc

SEQ ID NO: 656383 - DNA, 25 bp, Homo sapien
tgtgtccgcaccacaccccatgcgg

SEQ ID NO: 656384 - DNA, 25 bp, Homo sapien
gtccgcaccacaccccatgcggcat

SEQ ID NO: 656385 - DNA, 25 bp, Homo sapien
cttgaaaagggcagttgtcaatgtc

SEQ ID NO: 656386 - DNA, 25 bp, Homo sapien
aaagggcagttgtcaatgtcatctt

SEQ ID NO: 656387 - DNA, 25 bp, Homo sapien
agggcagttgtcaatgtcatcttca

SEQ ID NO: 656388 - DNA, 25 bp, Homo sapien
gaaaagggcagttgtcaatgtcatc

SEQ ID NO: 656389 - DNA, 25 bp, Homo sapien
ctgctccttccaggaagccaggaca

SEQ ID NO: 656390 - DNA, 25 bp, Homo sapien
gctccttccaggaagccaggacagg

SEQ ID NO: 656391 - DNA, 25 bp, Homo sapien
tccttccaggaagccaggacaggca

SEQ ID NO: 656392 - DNA, 25 bp, Homo sapien
ccttccaggaagccaggacaggcac

SEQ ID NO: 656393 - DNA, 25 bp, Homo sapien
ttggaaacgccaagcataggtaacc

SEQ ID NO: 656394 - DNA, 25 bp, Homo sapien
caagcataggtaaccaggaactgga

SEQ ID NO: 656395 - DNA, 25 bp, Homo sapien
ccttgctctgcttgttgaatgtgta

SEQ ID NO: 656396 - DNA, 25 bp, Homo sapien
cagcttgtaggcataccagtccttg

SEQ ID NO: 656397 - DNA, 25 bp, Homo sapien
acagagccctgctcggcggcagact

SEQ ID NO: 656398 - DNA, 25 bp, Homo sapien
tgaagagaagcagcagtggcgcaca

SEQ ID NO: 656399 - DNA, 25 bp, Homo sapien
ggacagagccctgctcggcggcaga

SEQ ID NO: 656400 - DNA, 25 bp, Homo sapien
cagcagtggcgcacaggacagagcc

SEQ ID NO: 656401 - DNA, 25 bp, Homo sapien
aataggataacaaacaagtccaaag

SEQ ID NO: 656402 - DNA, 25 bp, Homo sapien
gcagcacatggacaagcctgtgagt

SEQ ID NO: 656403 - DNA, 25 bp, Homo sapien
catgattaggctcaagatgtgtgga

SEQ ID NO: 656404 - DNA, 25 bp, Homo sapien
tgaagagtcctcaggagagtagtgc

SEQ ID NO: 656405 - DNA, 25 bp, Homo sapien
tcagtggaatccctccaagcaggtc

SEQ ID NO: 656406 - DNA, 25 bp, Homo sapien
ggctgaactgagtcatccagggcct

SEQ ID NO: 656407 - DNA, 25 bp, Homo sapien
tgaactgagtcatccagggcctggt

SEQ ID NO: 656408 - DNA, 25 bp, Homo sapien
caagcaggtcttgttcaggaggctg

SEQ ID NO: 656409 - DNA, 25 bp, Homo sapien
gtctctttgtcagttgcacctgtgc

SEQ ID NO: 656410 - DNA, 25 bp, Homo sapien
tctttgtcagttgcacctgtgccca

SEQ ID NO: 656411 - DNA, 25 bp, Homo sapien
taagtctctttgtcagttgcacctg

SEQ ID NO: 656412 - DNA, 25 bp, Homo sapien
ctaagtctctttgtcagttgcacct

SEQ ID NO: 656413 - DNA, 25 bp, Homo sapien
gctgtatccaggagggaagctggtg

SEQ ID NO: 656414 - DNA, 25 bp, Homo sapien
cccatgtggcatccacagctgtatc

SEQ ID NO: 656415 - DNA, 25 bp, Homo sapien
ccatgtggcatccacagctgtatcc

SEQ ID NO: 656416 - DNA, 25 bp, Homo sapien
tatccaggagggaagctggtgtcct

SEQ ID NO: 656417 - DNA, 25 bp, Homo sapien
gaaatggcagttgtcaatgtcgtct

SEQ ID NO: 656418 - DNA, 25 bp, Homo sapien
gttgaatgtgtggacagcaaactcc

SEQ ID NO: 656419 - DNA, 25 bp, Homo sapien
caggaattcaagatgtgccccagtc

SEQ ID NO: 656420 - DNA, 25 bp, Homo sapien
ccccagtctgtaggcatagtagtcc

SEQ ID NO: 656421 - DNA, 25 bp, Homo sapien
catcacagtccctttgctcgtggaa

SEQ ID NO: 656422 - DNA, 25 bp, Homo sapien
caggacagacctcccttccacggca

SEQ ID NO: 656423 - DNA, 25 bp, Homo sapien
agacctcccttccacggcaggccca

SEQ ID NO: 656424 - DNA, 25 bp, Homo sapien
agcgcccaggacagacctcccttcc

SEQ ID NO: 656425 - DNA, 25 bp, Homo sapien
acctcccttccacggcaggcccagc

SEQ ID NO: 656426 - DNA, 25 bp, Homo sapien
tcctggattaaagggaggcagctct

SEQ ID NO: 656427 - DNA, 25 bp, Homo sapien
gatgtggagtcactcatctgccatc

SEQ ID NO: 656428 - DNA, 25 bp, Homo sapien
acagccctgtgggacaaacttgtct

SEQ ID NO: 656429 - DNA, 25 bp, Homo sapien
gcccttaatcttatctgctcagaca

SEQ ID NO: 656430 - DNA, 25 bp, Homo sapien
gagaggatctccgttgttcagaaaa

SEQ ID NO: 656431 - DNA, 25 bp, Homo sapien
gctgctccttcagaacccacaggtt

SEQ ID NO: 656432 - DNA, 25 bp, Homo sapien
ggtgtccttggatgattctgtgcct

SEQ ID NO: 656433 - DNA, 25 bp, Homo sapien
gcctcccacagcgaactgagataag

SEQ ID NO: 656434 - DNA, 25 bp, Homo sapien
gaagacaacattgataactgccctt

SEQ ID NO: 656435 - DNA, 25 bp, Homo sapien
agcacagagctgaacgatgtaagac

SEQ ID NO: 656436 - DNA, 25 bp, Homo sapien
cgatgtaagacagggcaacatcttc

SEQ ID NO: 656437 - DNA, 25 bp, Homo sapien
gagaactaggtgtgggaaatttgaa

SEQ ID NO: 656438 - DNA, 25 bp, Homo sapien
ctctgtggacactggcagttctcca

SEQ ID NO: 656439 - DNA, 25 bp, Homo sapien
cagttctccaaaggtggctctgctg

SEQ ID NO: 656440 - DNA, 25 bp, Homo sapien
tccgtgtaattggagctcctccagc

SEQ ID NO: 656441 - DNA, 25 bp, Homo sapien
ggctagtggctttctccgtgtaatt

SEQ ID NO: 656442 - DNA, 25 bp, Homo sapien
tgcccagattggctagtggctttct

SEQ ID NO: 656443 - DNA, 25 bp, Homo sapien
ctgcgacgtgcccagattggctagt

SEQ ID NO: 656444 - DNA, 25 bp, Homo sapien
agacttatcttggttgtgccacctg

SEQ ID NO: 656445 - DNA, 25 bp, Homo sapien
ggccacatgggtcatcatcagccac

SEQ ID NO: 656446 - DNA, 25 bp, Homo sapien
gtcatcatcagccacgagcatggag

SEQ ID NO: 656447 - DNA, 25 bp, Homo sapien
cagacttatcttggttgtgccacct

SEQ ID NO: 656448 - DNA, 25 bp, Homo sapien
tccttagccagggtcacttgtgcca

SEQ ID NO: 656449 - DNA, 25 bp, Homo sapien
tcaaaatatgtcttccagggcatgg

SEQ ID NO: 656450 - DNA, 25 bp, Homo sapien
gaggccaatcctgaactacaacgtg

SEQ ID NO: 656451 - DNA, 25 bp, Homo sapien
caccacttttgggtctagggcaggg

SEQ ID NO: 656452 - DNA, 25 bp, Homo sapien
cctgtcttacgttgttcagctccag

SEQ ID NO: 656453 - DNA, 25 bp, Homo sapien
caaatttcctacatacggtttggcg

SEQ ID NO: 656454 - DNA, 25 bp, Homo sapien
aaagctgatgccctgtcttacgttg

SEQ ID NO: 656455 - DNA, 25 bp, Homo sapien
cgcagttgcagattcatggagaaca

SEQ ID NO: 656456 - DNA, 25 bp, Homo sapien
gcaacagcctgtaggcatgctcctc

SEQ ID NO: 656457 - DNA, 25 bp, Homo sapien
cactgtggcgaggaacataggatcc

SEQ ID NO: 656458 - DNA, 25 bp, Homo sapien
ctccatgaactcaggacgcgcaaca

SEQ ID NO: 656459 - DNA, 25 bp, Homo sapien
cgttgaaagtgttcaaggcaaactc

SEQ ID NO: 656460 - DNA, 25 bp, Homo sapien
atgcaggctccagcagcccttgcct

SEQ ID NO: 656461 - DNA, 25 bp, Homo sapien
gatgcaggctccagcagcccttgcc

SEQ ID NO: 656462 - DNA, 25 bp, Homo sapien
tctcccatccaacgcagcccattgt

SEQ ID NO: 656463 - DNA, 25 bp, Homo sapien
gccttcgctcctcagtgggcgtttc

SEQ ID NO: 656464 - DNA, 25 bp, Homo sapien
gtgctcccgacggaagcctctccca

SEQ ID NO: 656465 - DNA, 25 bp, Homo sapien
ccatccaacgcagcccattgttttc

SEQ ID NO: 656466 - DNA, 25 bp, Homo sapien
ttttccagcattgacgatggagcag

SEQ ID NO: 656467 - DNA, 25 bp, Homo sapien
ttccagcattgacgatggagcagtt

SEQ ID NO: 656468 - DNA, 25 bp, Homo sapien
ggcttttccagcattgacgatggag

SEQ ID NO: 656469 - DNA, 25 bp, Homo sapien
ccagcattgacgatggagcagttca

SEQ ID NO: 656470 - DNA, 25 bp, Homo sapien
gaaatcatcgaagctccactggtgg

SEQ ID NO: 656471 - DNA, 25 bp, Homo sapien
ggtggtttctcaggtgatgcggaca

SEQ ID NO: 656472 - DNA, 25 bp, Homo sapien
gggccaggtcttctgaccaacttca

SEQ ID NO: 656473 - DNA, 25 bp, Homo sapien
caggaatgaggaccacagtcttagc

SEQ ID NO: 656474 - DNA, 25 bp, Homo sapien
gcacattggcttgtaactggagtaa

SEQ ID NO: 656475 - DNA, 25 bp, Homo sapien
gactgaaagagaagcggtagtaaac

SEQ ID NO: 656476 - DNA, 25 bp, Homo sapien
aatgtcaggacttcaacttgcaagg

SEQ ID NO: 656477 - DNA, 25 bp, Homo sapien
gcttgactggaacatatggctggaa

SEQ ID NO: 656478 - DNA, 25 bp, Homo sapien
tgtgcaaatggacgtataatctgat

SEQ ID NO: 656479 - DNA, 25 bp, Homo sapien
tgtagcacgggtcatgtcattctct

SEQ ID NO: 656480 - DNA, 25 bp, Homo sapien
ttttcatgatccctccaaggaaact

SEQ ID NO: 656481 - DNA, 25 bp, Homo sapien
gacttgtttcagcatggcttgctgg

SEQ ID NO: 656482 - DNA, 25 bp, Homo sapien
ccaccagctatgtataaagattcca

SEQ ID NO: 656483 - DNA, 25 bp, Homo sapien
cctaatagctaatggtgttatgcac

SEQ ID NO: 656484 - DNA, 25 bp, Homo sapien
tctttgaccacaaccatgtagtggc

SEQ ID NO: 656485 - DNA, 25 bp, Homo sapien
gggttaccagtcttattgagttgta

SEQ ID NO: 656486 - DNA, 25 bp, Homo sapien
agggccagcctctatttttcagtca

SEQ ID NO: 656487 - DNA, 25 bp, Homo sapien
atttaattagtgagttgttctggcc

SEQ ID NO: 656488 - DNA, 25 bp, Homo sapien
aaaggatgtccagattgattgctga

SEQ ID NO: 656489 - DNA, 25 bp, Homo sapien
tgaccacagcttaacgatgagcccg

SEQ ID NO: 656490 - DNA, 25 bp, Homo sapien
tggtccttgaggcattacttctgaa

SEQ ID NO: 656491 - DNA, 25 bp, Homo sapien
gactgtgggtctgagaaccgactga

SEQ ID NO: 656492 - DNA, 25 bp, Homo sapien
ttgaggcattacttctgaaacagtc

SEQ ID NO: 656493 - DNA, 25 bp, Homo sapien
tctgagaaccgactgatgagttatt

SEQ ID NO: 656494 - DNA, 25 bp, Homo sapien
cttgtgagtcagacgctggccgctg

SEQ ID NO: 656495 - DNA, 25 bp, Homo sapien
caactggcctggtggttggttcaca

SEQ ID NO: 656496 - DNA, 25 bp, Homo sapien
ccgttaagcctatgtgggtcctggg

SEQ ID NO: 656497 - DNA, 25 bp, Homo sapien
aagtgctccaagctgtggtccaaag

SEQ ID NO: 656498 - DNA, 25 bp, Homo sapien
ttccgactgggatcatgggattgcc

SEQ ID NO: 656499 - DNA, 25 bp, Homo sapien
tgggattgccatgtgcagccaggct

SEQ ID NO: 656500 - DNA, 25 bp, Homo sapien
gacgccatgtacagccaagcttgag

SEQ ID NO: 656501 - DNA, 25 bp, Homo sapien
caagggctacacgtttgcagagata

SEQ ID NO: 656502 - DNA, 25 bp, Homo sapien
gagccaggccctgtaatgaatctat

SEQ ID NO: 656503 - DNA, 25 bp, Homo sapien
aaaggcactgggctatatggtcagc

SEQ ID NO: 656504 - DNA, 25 bp, Homo sapien
caaagatccttcaccgaggtagaaa

SEQ ID NO: 656505 - DNA, 25 bp, Homo sapien
tgtccgtttccactgggtgcctgga

SEQ ID NO: 656506 - DNA, 25 bp, Homo sapien
gcactggctgtaagggctgcacccc

SEQ ID NO: 656507 - DNA, 25 bp, Homo sapien
cactggctgtaagggctgcacccct

SEQ ID NO: 656508 - DNA, 25 bp, Homo sapien
agcactggctgtaagggctgcaccc

SEQ ID NO: 656509 - DNA, 25 bp, Homo sapien
cacgtaggggcctaagtctcttgga

SEQ ID NO: 656510 - DNA, 25 bp, Homo sapien
gaagcacgcattgatcactatttag

SEQ ID NO: 656511 - DNA, 25 bp, Homo sapien
acttcatccctaccatgaagctgga

SEQ ID NO: 656512 - DNA, 25 bp, Homo sapien
gaagctggactaacaacttgtttta

SEQ ID NO: 656513 - DNA, 25 bp, Homo sapien
gtggctcaatgccttgtttcccagc

SEQ ID NO: 656514 - DNA, 25 bp, Homo sapien
cagcagcttgcctgatggccttgct

SEQ ID NO: 656515 - DNA, 25 bp, Homo sapien
cataaaggaactgcggaaaccctgc

SEQ ID NO: 656516 - DNA, 25 bp, Homo sapien
tgagactcaggactcctatagcagc

SEQ ID NO: 656517 - DNA, 25 bp, Homo sapien
tgtgcacatccccagacagccaaga

SEQ ID NO: 656518 - DNA, 25 bp, Homo sapien
ctgtgtgcacatccccagacagcca

SEQ ID NO: 656519 - DNA, 25 bp, Homo sapien
gtgcacatccccagacagccaagaa

SEQ ID NO: 656520 - DNA, 25 bp, Homo sapien
tgtgtgcacatccccagacagccaa

SEQ ID NO: 656521 - DNA, 25 bp, Homo sapien
tgggggtgtatgcaccgcacaccgg

SEQ ID NO: 656522 - DNA, 25 bp, Homo sapien
gtgtatgcaccgcacaccggggcta

SEQ ID NO: 656523 - DNA, 25 bp, Homo sapien
ggtgggggtgtatgcaccgcacacc

SEQ ID NO: 656524 - DNA, 25 bp, Homo sapien
tatgcaccgcacaccggggctatga

SEQ ID NO: 656525 - DNA, 25 bp, Homo sapien
gccccttgctgagcaacaaaggccg

SEQ ID NO: 656526 - DNA, 25 bp, Homo sapien
acatggggagaccttccccaaggca

SEQ ID NO: 656527 - DNA, 25 bp, Homo sapien
gtgtgcataagaggtgataggcaca

SEQ ID NO: 656528 - DNA, 25 bp, Homo sapien
caggcacatggggagaccttcccca

SEQ ID NO: 656529 - DNA, 25 bp, Homo sapien
ctaggcgtcctgacaggtggatttc

SEQ ID NO: 656530 - DNA, 25 bp, Homo sapien
tcctgacaggtggatttcgacaagg

SEQ ID NO: 656531 - DNA, 25 bp, Homo sapien
gatttcgacaaggtcattgtgccct

SEQ ID NO: 656532 - DNA, 25 bp, Homo sapien
gacaggtggatttcgacaaggtcat

SEQ ID NO: 656533 - DNA, 25 bp, Homo sapien
ccaaggcacagcgtagatctggaaa

SEQ ID NO: 656534 - DNA, 25 bp, Homo sapien
agcgtagatctggaaagagcagaat

SEQ ID NO: 656535 - DNA, 25 bp, Homo sapien
caaggcacagcgtagatctggaaag

SEQ ID NO: 656536 - DNA, 25 bp, Homo sapien
gttgggctgggtcttggtacacgtg

SEQ ID NO: 656537 - DNA, 25 bp, Homo sapien
gtacacgtggttcggcccagctcca

SEQ ID NO: 656538 - DNA, 25 bp, Homo sapien
gatgtggctggtcatggaaggggca

SEQ ID NO: 656539 - DNA, 25 bp, Homo sapien
tgggtcttggtacacgtggttcggc

SEQ ID NO: 656540 - DNA, 25 bp, Homo sapien
cacaagtcctgtagaagcacaagca

SEQ ID NO: 656541 - DNA, 25 bp, Homo sapien
ttcactcccagtgagagagaggtgc

SEQ ID NO: 656542 - DNA, 25 bp, Homo sapien
ggtgctagaccttgccctgtggaac

SEQ ID NO: 656543 - DNA, 25 bp, Homo sapien
agtgccgccccaaaacatgacttgt

SEQ ID NO: 656544 - DNA, 25 bp, Homo sapien
gaaagatctacagggatgccctgtg

SEQ ID NO: 656545 - DNA, 25 bp, Homo sapien
tatacacacacccatattcacattc

SEQ ID NO: 656546 - DNA, 25 bp, Homo sapien
taagtctgaaattacgggagaataa

SEQ ID NO: 656547 - DNA, 25 bp, Homo sapien
catattcacattcggaaagtgagct

SEQ ID NO: 656548 - DNA, 25 bp, Homo sapien
tgacgtgtccgtgcggttccaggcc

SEQ ID NO: 656549 - DNA, 25 bp, Homo sapien
aacagggtccgggtgagaagcccag

SEQ ID NO: 656550 - DNA, 25 bp, Homo sapien
cagactcagggcattcccggacacg

SEQ ID NO: 656551 - DNA, 25 bp, Homo sapien
gggtgacagcgaagaccgggaacag

SEQ ID NO: 656552 - DNA, 25 bp, Homo sapien
actcgccgacggcaaagtccagtgc

SEQ ID NO: 656553 - DNA, 25 bp, Homo sapien
cagcgcgcggctgtggtacatgtcg

SEQ ID NO: 656554 - DNA, 25 bp, Homo sapien
ggctttgttgtactcgccgacggca

SEQ ID NO: 656555 - DNA, 25 bp, Homo sapien
tacatgtcgttgctggctttgttgt

SEQ ID NO: 656556 - DNA, 25 bp, Homo sapien
actaggcgcggcggcttgccgggac

SEQ ID NO: 656557 - DNA, 25 bp, Homo sapien
taggcgcggcggcttgccgggactg

SEQ ID NO: 656558 - DNA, 25 bp, Homo sapien
cactaggcgcggcggcttgccggga

SEQ ID NO: 656559 - DNA, 25 bp, Homo sapien
aggcgcggcggcttgccgggactgg

SEQ ID NO: 656560 - DNA, 25 bp, Homo sapien
caggagcagcggggcgcgcaggggc

SEQ ID NO: 656561 - DNA, 25 bp, Homo sapien
agcaggagcagcggggcgcgcaggg

SEQ ID NO: 656562 - DNA, 25 bp, Homo sapien
cagcaggagcagcggggcgcgcagg

SEQ ID NO: 656563 - DNA, 25 bp, Homo sapien
gagcagcggggcgcgcaggggcccg

SEQ ID NO: 656564 - DNA, 25 bp, Homo sapien
aggcgagaggctggagctagataga

SEQ ID NO: 656565 - DNA, 25 bp, Homo sapien
caggcgagaggctggagctagatag

SEQ ID NO: 656566 - DNA, 25 bp, Homo sapien
gaggccggcgactgcggttttatcc

SEQ ID NO: 656567 - DNA, 25 bp, Homo sapien
ataccgaggcgaggccgtgagcccc

SEQ ID NO: 656568 - DNA, 25 bp, Homo sapien
ctgcgataccgaggcgaggccgtga

SEQ ID NO: 656569 - DNA, 25 bp, Homo sapien
gtgagccccgcgaggccggcgactg

SEQ ID NO: 656570 - DNA, 25 bp, Homo sapien
cccctccatgccgccactcttcagg

SEQ ID NO: 656571 - DNA, 25 bp, Homo sapien
ttatggcgaggtggcagctttgcca

SEQ ID NO: 656572 - DNA, 25 bp, Homo sapien
ccagaaacaccagaaaactctgggc

SEQ ID NO: 656573 - DNA, 25 bp, Homo sapien
tgccagaaacaccagaaaactctgg

SEQ ID NO: 656574 - DNA, 25 bp, Homo sapien
aaactctgggcctttgcagggcacc

SEQ ID NO: 656575 - DNA, 25 bp, Homo sapien
ggggattctgaagcaaatttcttaa

SEQ ID NO: 656576 - DNA, 25 bp, Homo sapien
aacattcttcattaacaggcctggg

SEQ ID NO: 656577 - DNA, 25 bp, Homo sapien
ttctcaaaatttagtccaacattct

SEQ ID NO: 656578 - DNA, 25 bp, Homo sapien
agcaaatttcttaagcagtctgaat

SEQ ID NO: 656579 - DNA, 25 bp, Homo sapien
cagaagagggtagaataaaggagtt

SEQ ID NO: 656580 - DNA, 25 bp, Homo sapien
acagaagagggtagaataaaggagt

SEQ ID NO: 656581 - DNA, 25 bp, Homo sapien
cttatgagaacagaagagggtagaa

SEQ ID NO: 656582 - DNA, 25 bp, Homo sapien
atgagaacagaagagggtagaataa

SEQ ID NO: 656583 - DNA, 25 bp, Homo sapien
cagggcagaaatctcaggctggcac

SEQ ID NO: 656584 - DNA, 25 bp, Homo sapien
ccattgccacttcacttggatggag

SEQ ID NO: 656585 - DNA, 25 bp, Homo sapien
tcagcccacactctcgtacttaaaa

SEQ ID NO: 656586 - DNA, 25 bp, Homo sapien
cactctcgtacttaaaactcagggc

SEQ ID NO: 656587 - DNA, 25 bp, Homo sapien
gaacatggggcttggtccaggactc

SEQ ID NO: 656588 - DNA, 25 bp, Homo sapien
tgctgtgctgcagaaaccggaacat

SEQ ID NO: 656589 - DNA, 25 bp, Homo sapien
ggtccaggactcagcccggaattgg

SEQ ID NO: 656590 - DNA, 25 bp, Homo sapien
tggaatatgttagaaaaggccttgc

SEQ ID NO: 656591 - DNA, 25 bp, Homo sapien
caggtgacaacgaaatgccctaacc

SEQ ID NO: 656592 - DNA, 25 bp, Homo sapien
tcgccaggtgacaacgaaatgccct

SEQ ID NO: 656593 - DNA, 25 bp, Homo sapien
tcaccgtcgccaggtgacaacgaaa

SEQ ID NO: 656594 - DNA, 25 bp, Homo sapien
aaaccaggcttcaccgtcgccaggt

SEQ ID NO: 656595 - DNA, 25 bp, Homo sapien
ctgcagcttgctcaccagggaggtg

SEQ ID NO: 656596 - DNA, 25 bp, Homo sapien
agcttgctcaccagggaggtgtgag

SEQ ID NO: 656597 - DNA, 25 bp, Homo sapien
ccatggcgctaggtggcagggctgc

SEQ ID NO: 656598 - DNA, 25 bp, Homo sapien
gaccttggtcctgctgcagcggcat

SEQ ID NO: 656599 - DNA, 25 bp, Homo sapien
gcatttgttatcactgtcgtagttc

SEQ ID NO: 656600 - DNA, 25 bp, Homo sapien
cactgtcgtagttcagcagcaccat

SEQ ID NO: 656601 - DNA, 25 bp, Homo sapien
cccccggaagccctcatcgctcttc

SEQ ID NO: 656602 - DNA, 25 bp, Homo sapien
ctgcagcatttgttatcactgtcgt

SEQ ID NO: 656603 - DNA, 25 bp, Homo sapien
aaggcaccctcttctggtgagaatc

SEQ ID NO: 656604 - DNA, 25 bp, Homo sapien
caaggcaccctcttctggtgagaat

SEQ ID NO: 656605 - DNA, 25 bp, Homo sapien
cagtgggctcaacctactccaaggc

SEQ ID NO: 656606 - DNA, 25 bp, Homo sapien
gtgggctcaacctactccaaggcac

SEQ ID NO: 656607 - DNA, 25 bp, Homo sapien
ttgggctatttgtacaggtaaatgg

SEQ ID NO: 656608 - DNA, 25 bp, Homo sapien
tatttgtacaggtaaatggttacag

SEQ ID NO: 656609 - DNA, 25 bp, Homo sapien
gctatttgtacaggtaaatggttac

SEQ ID NO: 656610 - DNA, 25 bp, Homo sapien
caaatggaaagtgggctgattgatg

SEQ ID NO: 656611 - DNA, 25 bp, Homo sapien
gaaggggtgcaatatttccaaaaca

SEQ ID NO: 656612 - DNA, 25 bp, Homo sapien
agatcctcagcttggtgcagaagac

SEQ ID NO: 656613 - DNA, 25 bp, Homo sapien
ttccaaaacatgacccttaggagac

SEQ ID NO: 656614 - DNA, 25 bp, Homo sapien
tcagcttggtgcagaagacaaagac

SEQ ID NO: 656615 - DNA, 25 bp, Homo sapien
aagcttcgctgtcccctgctcccca

SEQ ID NO: 656616 - DNA, 25 bp, Homo sapien
tcaagcttcgctgtcccctgctccc

SEQ ID NO: 656617 - DNA, 25 bp, Homo sapien
agcttcgctgtcccctgctccccac

SEQ ID NO: 656618 - DNA, 25 bp, Homo sapien
cttcaagcttcgctgtcccctgctc

SEQ ID NO: 656619 - DNA, 25 bp, Homo sapien
gaactacacgtcaatcgctgtctat

SEQ ID NO: 656620 - DNA, 25 bp, Homo sapien
taaagtctcctgtggaaagaactac

SEQ ID NO: 656621 - DNA, 25 bp, Homo sapien
ggcatttttcccaatcagttacaca

SEQ ID NO: 656622 - DNA, 25 bp, Homo sapien
tctgaccaggacctcagaccaaagc

SEQ ID NO: 656623 - DNA, 25 bp, Homo sapien
gccctgctgagcaacaaaggactcc

SEQ ID NO: 656624 - DNA, 25 bp, Homo sapien
caacaaaggactcctgcagccttct

SEQ ID NO: 656625 - DNA, 25 bp, Homo sapien
cagagcgccctgctgagcaacaaag

SEQ ID NO: 656626 - DNA, 25 bp, Homo sapien
gctgagcaacaaaggactcctgcag

SEQ ID NO: 656627 - DNA, 25 bp, Homo sapien
gggaacttcgtagatctcgaaagag

SEQ ID NO: 656628 - DNA, 25 bp, Homo sapien
tagatctcgaaagagcacaactgtt

SEQ ID NO: 656629 - DNA, 25 bp, Homo sapien
ggcttcttgacacctggaattcacc

SEQ ID NO: 656630 - DNA, 25 bp, Homo sapien
gcttcttgacacctggaattcacca

SEQ ID NO: 656631 - DNA, 25 bp, Homo sapien
tctacgtcgaagaagtaattcaccc

SEQ ID NO: 656632 - DNA, 25 bp, Homo sapien
ggcccacctctacgtcgaagaagta

SEQ ID NO: 656633 - DNA, 25 bp, Homo sapien
ggtacatatggtgcggcccacctct

SEQ ID NO: 656634 - DNA, 25 bp, Homo sapien
tgggctgggacttggtacatatggt

SEQ ID NO: 656635 - DNA, 25 bp, Homo sapien
gagaaacgggactggtctggattcc

SEQ ID NO: 656636 - DNA, 25 bp, Homo sapien
tggcaccagggagtgcacctcctgt

SEQ ID NO: 656637 - DNA, 25 bp, Homo sapien
aggcttccaggtctgatggtctgca

SEQ ID NO: 656638 - DNA, 25 bp, Homo sapien
ggaactgctgagatccctcgagtat

SEQ ID NO: 656639 - DNA, 25 bp, Homo sapien
atctcatcctgagcagcatcaagcc

SEQ ID NO: 656640 - DNA, 25 bp, Homo sapien
gatctcatcctgagcagcatcaagc

SEQ ID NO: 656641 - DNA, 25 bp, Homo sapien
ccacggtcatggtacagacacagca

SEQ ID NO: 656642 - DNA, 25 bp, Homo sapien
acggtcatggtacagacacagcagc

SEQ ID NO: 656643 - DNA, 25 bp, Homo sapien
cggtcatggtacagacacagcagct

SEQ ID NO: 656644 - DNA, 25 bp, Homo sapien
cacggtcatggtacagacacagcag

SEQ ID NO: 656645 - DNA, 25 bp, Homo sapien
ctgcagtgcatggaccgggagcatg

SEQ ID NO: 656646 - DNA, 25 bp, Homo sapien
ctgctccctggctcgcagcacctgc

SEQ ID NO: 656647 - DNA, 25 bp, Homo sapien
tgctccctggctcgcagcacctgca

SEQ ID NO: 656648 - DNA, 25 bp, Homo sapien
tccctggctcgcagcacctgcagcg

SEQ ID NO: 656649 - DNA, 25 bp, Homo sapien
cctggctcgcagcacctgcagcggg

SEQ ID NO: 656650 - DNA, 25 bp, Homo sapien
tgcatcatagatgccacctgggatt

SEQ ID NO: 656651 - DNA, 25 bp, Homo sapien
catcaggagtagcagggtacacaga

SEQ ID NO: 656652 - DNA, 25 bp, Homo sapien
gccagggtagccatcaggagtagca

SEQ ID NO: 656653 - DNA, 25 bp, Homo sapien
tattctcctccttggagctcgaggc

SEQ ID NO: 656654 - DNA, 25 bp, Homo sapien
tcctcagaggcagagcacaaagctg

SEQ ID NO: 656655 - DNA, 25 bp, Homo sapien
ggtctcctcagaggcagagcacaaa

SEQ ID NO: 656656 - DNA, 25 bp, Homo sapien
tctcctcagaggcagagcacaaagc

SEQ ID NO: 656657 - DNA, 25 bp, Homo sapien
ctcagaggcagagcacaaagctgga

SEQ ID NO: 656658 - DNA, 25 bp, Homo sapien
tcttctccatcattcattgggctct

SEQ ID NO: 656659 - DNA, 25 bp, Homo sapien
cagagtaggtgcagggtccttagca

SEQ ID NO: 656660 - DNA, 25 bp, Homo sapien
gctcataagtgaaaggcagacacca

SEQ ID NO: 656661 - DNA, 25 bp, Homo sapien
gctcttgttgttgggaacatggctc

SEQ ID NO: 656662 - DNA, 25 bp, Homo sapien
cagcatccctatccacttcttccct

SEQ ID NO: 656663 - DNA, 25 bp, Homo sapien
tcagcatccctatccacttcttccc

SEQ ID NO: 656664 - DNA, 25 bp, Homo sapien
cctcagcatccctatccacttcttc

SEQ ID NO: 656665 - DNA, 25 bp, Homo sapien
agcatccctatccacttcttccctc

SEQ ID NO: 656666 - DNA, 25 bp, Homo sapien
tgacacgtggatttcaccaaggaca

SEQ ID NO: 656667 - DNA, 25 bp, Homo sapien
ctgacacgtggatttcaccaaggac

SEQ ID NO: 656668 - DNA, 25 bp, Homo sapien
gacacgtggatttcaccaaggacat

SEQ ID NO: 656669 - DNA, 25 bp, Homo sapien
acacaaaccctgtctatgaatccct

SEQ ID NO: 656670 - DNA, 25 bp, Homo sapien
gaatccctctctggtccatgtagcc

SEQ ID NO: 656671 - DNA, 25 bp, Homo sapien
atgcccactccaccatagatctttg

SEQ ID NO: 656672 - DNA, 25 bp, Homo sapien
accctgtctatgaatccctctctgg

SEQ ID NO: 656673 - DNA, 25 bp, Homo sapien
ctacgggtcccctgatggctcactc

SEQ ID NO: 656674 - DNA, 25 bp, Homo sapien
cagctcttgtgttcccccggaagcc

SEQ ID NO: 656675 - DNA, 25 bp, Homo sapien
gctcactccattcaacagctcttgt

SEQ ID NO: 656676 - DNA, 25 bp, Homo sapien
gggtcccctgatggctcactccatt

SEQ ID NO: 656677 - DNA, 25 bp, Homo sapien
ggtgtgcagggttttattgctcaga

SEQ ID NO: 656678 - DNA, 25 bp, Homo sapien
gggtgtgcagggttttattgctcag

SEQ ID NO: 656679 - DNA, 25 bp, Homo sapien
ctcagcttggtccagaagatgaagg

SEQ ID NO: 656680 - DNA, 25 bp, Homo sapien
gaaggtccacatgctcaccttaaag

SEQ ID NO: 656681 - DNA, 25 bp, Homo sapien
gtggcttccggacagggcccagacc

SEQ ID NO: 656682 - DNA, 25 bp, Homo sapien
cttggtccagaagatgaaggtccac

SEQ ID NO: 656683 - DNA, 25 bp, Homo sapien
tgtgtaccatgtaccagggctatta

SEQ ID NO: 656684 - DNA, 25 bp, Homo sapien
gtggctggtgcgaatggcctggcac

SEQ ID NO: 656685 - DNA, 25 bp, Homo sapien
gggtggtggctggtgcgaatggcct

SEQ ID NO: 656686 - DNA, 25 bp, Homo sapien
gtgtgtaccatgtaccagggctatt

SEQ ID NO: 656687 - DNA, 25 bp, Homo sapien
tcgtagatctcgaaagagcacaact

SEQ ID NO: 656688 - DNA, 25 bp, Homo sapien
tagatctcgaaagagcacaactgtt

SEQ ID NO: 656689 - DNA, 25 bp, Homo sapien
acttcgtagatctcgaaagagcaca

SEQ ID NO: 656690 - DNA, 25 bp, Homo sapien
gggaacttcgtagatctcgaaagag

SEQ ID NO: 656691 - DNA, 25 bp, Homo sapien
gagggccaatcagtgtgggttacag

SEQ ID NO: 656692 - DNA, 25 bp, Homo sapien
ggaagatgcccaggcatgagatgtc

SEQ ID NO: 656693 - DNA, 25 bp, Homo sapien
agagagggccaatcagtgtgggtta

SEQ ID NO: 656694 - DNA, 25 bp, Homo sapien
agagggccaatcagtgtgggttaca

SEQ ID NO: 656695 - DNA, 25 bp, Homo sapien
ggcccacctctacgtcgaagaagta

SEQ ID NO: 656696 - DNA, 25 bp, Homo sapien
ggtacatatggtgcggcccacctct

SEQ ID NO: 656697 - DNA, 25 bp, Homo sapien
tctacgtcgaagaagtaattcaccc

SEQ ID NO: 656698 - DNA, 25 bp, Homo sapien
tgggctgggacttggtacatatggt

SEQ ID NO: 656699 - DNA, 25 bp, Homo sapien
ggaactgctgagatccctcgagtgt

SEQ ID NO: 656700 - DNA, 25 bp, Homo sapien
cactccaagttactgtcatgcttga

SEQ ID NO: 656701 - DNA, 25 bp, Homo sapien
ggaccacggcaccagggagtgtatc

SEQ ID NO: 656702 - DNA, 25 bp, Homo sapien
tgtatctcgtatgcagggagagagc

SEQ ID NO: 656703 - DNA, 25 bp, Homo sapien
atctcatcctgagcagcatcaagcc

SEQ ID NO: 656704 - DNA, 25 bp, Homo sapien
gatctcatcctgagcagcatcaagc

SEQ ID NO: 656705 - DNA, 25 bp, Homo sapien
catgaagggcatcagcggagagcca

SEQ ID NO: 656706 - DNA, 25 bp, Homo sapien
gccggggagcgtgcttaggcatgaa

SEQ ID NO: 656707 - DNA, 25 bp, Homo sapien
cagtcatggtacagacacagtggct

SEQ ID NO: 656708 - DNA, 25 bp, Homo sapien
aagctgagtttgtgcacggccgggg

SEQ ID NO: 656709 - DNA, 25 bp, Homo sapien
gcattagatcatgaatgtatcagtg

SEQ ID NO: 656710 - DNA, 25 bp, Homo sapien
tagatcatgaatgtatcagtgttga

SEQ ID NO: 656711 - DNA, 25 bp, Homo sapien
ctgagcattagatcatgaatgtatc

SEQ ID NO: 656712 - DNA, 25 bp, Homo sapien
gctgggaatgctcttgggggttggg

SEQ ID NO: 656713 - DNA, 25 bp, Homo sapien
agcagggtactcagatactgggcca

SEQ ID NO: 656714 - DNA, 25 bp, Homo sapien
gttgcctggctcttagtacccgcag

SEQ ID NO: 656715 - DNA, 25 bp, Homo sapien
tgcgttatagatgccacccgggatt

SEQ ID NO: 656716 - DNA, 25 bp, Homo sapien
ccgcagcggacgtctgtagtagtca

SEQ ID NO: 656717 - DNA, 25 bp, Homo sapien
tcctcagaggcagagcacaaagctg

SEQ ID NO: 656718 - DNA, 25 bp, Homo sapien
ctcagaggcagagcacaaagctgga

SEQ ID NO: 656719 - DNA, 25 bp, Homo sapien
ggtctcctcagaggcagagcacaaa

SEQ ID NO: 656720 - DNA, 25 bp, Homo sapien
tctcctcagaggcagagcacaaagc

SEQ ID NO: 656721 - DNA, 25 bp, Homo sapien
gggtgagagcccgaggcagggagcc

SEQ ID NO: 656722 - DNA, 25 bp, Homo sapien
agggtgagagcccgaggcagggagc

SEQ ID NO: 656723 - DNA, 25 bp, Homo sapien
caggagaggagggtgagagcccgag

SEQ ID NO: 656724 - DNA, 25 bp, Homo sapien
gagaggagggtgagagcccgaggca

SEQ ID NO: 656725 - DNA, 25 bp, Homo sapien
cctccccgagccatgcctctcttcc

SEQ ID NO: 656726 - DNA, 25 bp, Homo sapien
acagaggtgacactggtcctttgac

SEQ ID NO: 656727 - DNA, 25 bp, Homo sapien
tcccaagcttgagtcacccaggtct

SEQ ID NO: 656728 - DNA, 25 bp, Homo sapien
agtgctcccaagcttgagtcaccca

SEQ ID NO: 656729 - DNA, 25 bp, Homo sapien
aactgatactcatggggaagcctgc

SEQ ID NO: 656730 - DNA, 25 bp, Homo sapien
ctctgttaggacatgtggatgcttc

SEQ ID NO: 656731 - DNA, 25 bp, Homo sapien
tgcttctaaactatgggcccatgtt

SEQ ID NO: 656732 - DNA, 25 bp, Homo sapien
ttttccacatcattaggaaactgat

SEQ ID NO: 656733 - DNA, 25 bp, Homo sapien
cctgggcaatgcggaggaccagcat

SEQ ID NO: 656734 - DNA, 25 bp, Homo sapien
gacctgggcaatgcggaggaccagc

SEQ ID NO: 656735 - DNA, 25 bp, Homo sapien
acctgggcaatgcggaggaccagca

SEQ ID NO: 656736 - DNA, 25 bp, Homo sapien
aggacctgggcaatgcggaggacca

SEQ ID NO: 656737 - DNA, 25 bp, Homo sapien
aaagctccagttcaccaggtggcat

SEQ ID NO: 656738 - DNA, 25 bp, Homo sapien
ccagcctgcagggttcttgccccag

SEQ ID NO: 656739 - DNA, 25 bp, Homo sapien
agcagcctgtgcaaggtctccggag

SEQ ID NO: 656740 - DNA, 25 bp, Homo sapien
aggtggcattgcccccatttccagc

SEQ ID NO: 656741 - DNA, 25 bp, Homo sapien
gggtcatcaggtgtgttccacccca

SEQ ID NO: 656742 - DNA, 25 bp, Homo sapien
ggagggtcatcaggtgtgttccacc

SEQ ID NO: 656743 - DNA, 25 bp, Homo sapien
cagagggagggtcatcaggtgtgtt

SEQ ID NO: 656744 - DNA, 25 bp, Homo sapien
atcaggtgtgttccaccccagcagg

SEQ ID NO: 656745 - DNA, 25 bp, Homo sapien
tctggctcgcagcacccacagcggg

SEQ ID NO: 656746 - DNA, 25 bp, Homo sapien
cacagcgggcgtctgtagtactgat

SEQ ID NO: 656747 - DNA, 25 bp, Homo sapien
cccacagcgggcgtctgtagtactg

SEQ ID NO: 656748 - DNA, 25 bp, Homo sapien
ctgctctctggctcgcagcacccac

SEQ ID NO: 656749 - DNA, 25 bp, Homo sapien
acgctgtacccactcatcattgagg

SEQ ID NO: 656750 - DNA, 25 bp, Homo sapien
aagtgaagggcacgctgtacccact

SEQ ID NO: 656751 - DNA, 25 bp, Homo sapien
gaagtgaagggcacgctgtacccac

SEQ ID NO: 656752 - DNA, 25 bp, Homo sapien
cgctgtacccactcatcattgaggt

SEQ ID NO: 656753 - DNA, 25 bp, Homo sapien
cccgattgtccttcctcctcctcgg

SEQ ID NO: 656754 - DNA, 25 bp, Homo sapien
tcctcctcggggctccaggacaggg

SEQ ID NO: 656755 - DNA, 25 bp, Homo sapien
ttcctcctcctcggggctccaggac

SEQ ID NO: 656756 - DNA, 25 bp, Homo sapien
ctcctcctcggggctccaggacagg

SEQ ID NO: 656757 - DNA, 25 bp, Homo sapien
gcagcagagtgcacaggggccgggc

SEQ ID NO: 656758 - DNA, 25 bp, Homo sapien
gcagagtgcacaggggccgggccat

SEQ ID NO: 656759 - DNA, 25 bp, Homo sapien
ggagcagcagagtgcacaggggccg

SEQ ID NO: 656760 - DNA, 25 bp, Homo sapien
gagcagcagagtgcacaggggccgg

SEQ ID NO: 656761 - DNA, 25 bp, Homo sapien
cggttgctgatacgtgttagccttt

SEQ ID NO: 656762 - DNA, 25 bp, Homo sapien
gttgctgatacgtgttagcctttcc

SEQ ID NO: 656763 - DNA, 25 bp, Homo sapien
tcacggttgctgatacgtgttagcc

SEQ ID NO: 656764 - DNA, 25 bp, Homo sapien
cacggttgctgatacgtgttagcct

SEQ ID NO: 656765 - DNA, 25 bp, Homo sapien
gggtcccctgatggctcactccatt

SEQ ID NO: 656766 - DNA, 25 bp, Homo sapien
ctacgggtcccctgatggctcactc

SEQ ID NO: 656767 - DNA, 25 bp, Homo sapien
cgggtcccctgatggctcactccat

SEQ ID NO: 656768 - DNA, 25 bp, Homo sapien
ggtgtgcagggttttattgctcaga

SEQ ID NO: 656769 - DNA, 25 bp, Homo sapien
gggtgtgcagggttttattgctcag

SEQ ID NO: 656770 - DNA, 25 bp, Homo sapien
aagcctccctgcccccagctcccct

SEQ ID NO: 656771 - DNA, 25 bp, Homo sapien
tcaagcctccctgcccccagctccc

SEQ ID NO: 656772 - DNA, 25 bp, Homo sapien
cttcaagcctccctgcccccagctc

SEQ ID NO: 656773 - DNA, 25 bp, Homo sapien
agcctccctgcccccagctcccctc

SEQ ID NO: 656774 - DNA, 25 bp, Homo sapien
cagtgtgactccctggcacagatcc

SEQ ID NO: 656775 - DNA, 25 bp, Homo sapien
ggcagagtcccctgctgagcaacaa

SEQ ID NO: 656776 - DNA, 25 bp, Homo sapien
gtgtgtgtaccatgtaccagggcta

SEQ ID NO: 656777 - DNA, 25 bp, Homo sapien
taccagggctatgagaagcaaaagg

SEQ ID NO: 656778 - DNA, 25 bp, Homo sapien
cttcttgacacctggaattcaccag

SEQ ID NO: 656779 - DNA, 25 bp, Homo sapien
gaacttcgtagatctggaaagagca

SEQ ID NO: 656780 - DNA, 25 bp, Homo sapien
gggaacttcgtagatctggaaagag

SEQ ID NO: 656781 - DNA, 25 bp, Homo sapien
ggcttcttgacacctggaattcacc

SEQ ID NO: 656782 - DNA, 25 bp, Homo sapien
ggacttggtacatatggttcggccc

SEQ ID NO: 656783 - DNA, 25 bp, Homo sapien
agaagtaattcaccccgcccacgat

SEQ ID NO: 656784 - DNA, 25 bp, Homo sapien
ctgggacttggtacatatggttcgg

SEQ ID NO: 656785 - DNA, 25 bp, Homo sapien
gggacttggtacatatggttcggcc

SEQ ID NO: 656786 - DNA, 25 bp, Homo sapien
aagtgaagggcacgctgtacccgct

SEQ ID NO: 656787 - DNA, 25 bp, Homo sapien
ggcgtctgtagtactcatcttcagt

SEQ ID NO: 656788 - DNA, 25 bp, Homo sapien
tagatgccaccctcgattatcctgt

SEQ ID NO: 656789 - DNA, 25 bp, Homo sapien
gtagcacccgcagcaggcgtctgta

SEQ ID NO: 656790 - DNA, 25 bp, Homo sapien
gagctgcaggagaggaggttgagag

SEQ ID NO: 656791 - DNA, 25 bp, Homo sapien
ggtctcctcggaggcagagcacaga

SEQ ID NO: 656792 - DNA, 25 bp, Homo sapien
caggagaggaggttgagagcctgag

SEQ ID NO: 656793 - DNA, 25 bp, Homo sapien
ctgcaggagaggaggttgagagcct

SEQ ID NO: 656794 - DNA, 25 bp, Homo sapien
atcccaaggaacttcacagatctgg

SEQ ID NO: 656795 - DNA, 25 bp, Homo sapien
tggtgatggaaggaacagttgtcca

SEQ ID NO: 656796 - DNA, 25 bp, Homo sapien
ggtgatggaaggaacagttgtccaa

SEQ ID NO: 656797 - DNA, 25 bp, Homo sapien
ctcctgaagttttcgctggtgatgg

SEQ ID NO: 656798 - DNA, 25 bp, Homo sapien
ctgaagttttcgctggtgatggaag

SEQ ID NO: 656799 - DNA, 25 bp, Homo sapien
atgactgagtcacgggagttgcctg

SEQ ID NO: 656800 - DNA, 25 bp, Homo sapien
cgtgaaagagcaggatgcacggaca

SEQ ID NO: 656801 - DNA, 25 bp, Homo sapien
ctactcacgtgaaagagcaggatgc

SEQ ID NO: 656802 - DNA, 25 bp, Homo sapien
gatgcacggacagtgctctccatca

SEQ ID NO: 656803 - DNA, 25 bp, Homo sapien
tatagtagaatagtttataatcact

SEQ ID NO: 656804 - DNA, 25 bp, Homo sapien
gaatagtttataatcacttggatat

SEQ ID NO: 656805 - DNA, 25 bp, Homo sapien
tagtagaatagtttataatcacttg

SEQ ID NO: 656806 - DNA, 25 bp, Homo sapien
gtagaatagtttataatcacttgga

SEQ ID NO: 656807 - DNA, 25 bp, Homo sapien
ggtcagtgtgacaggccttgcacag

SEQ ID NO: 656808 - DNA, 25 bp, Homo sapien
agtgtgacaggccttgcacagaccc

SEQ ID NO: 656809 - DNA, 25 bp, Homo sapien
tggtgcaggcgcatgaggagacctc

SEQ ID NO: 656810 - DNA, 25 bp, Homo sapien
tgcaggcgcatgaggagacctcccc

SEQ ID NO: 656811 - DNA, 25 bp, Homo sapien
ccggcacttgtagttcagaatggaa

SEQ ID NO: 656812 - DNA, 25 bp, Homo sapien
agaatggaaattttatcctcccagg

SEQ ID NO: 656813 - DNA, 25 bp, Homo sapien
cccagggaacttcattgatctggaa

SEQ ID NO: 656814 - DNA, 25 bp, Homo sapien
tgatctggaaagagcagaactcttc

SEQ ID NO: 656815 - DNA, 25 bp, Homo sapien
gacttggtgcatgtggttcgaccga

SEQ ID NO: 656816 - DNA, 25 bp, Homo sapien
ggttcgaccgaacttcacattgaag

SEQ ID NO: 656817 - DNA, 25 bp, Homo sapien
ttggctggtcattgaagggacagtt

SEQ ID NO: 656818 - DNA, 25 bp, Homo sapien
ttgaagtagtagttcaccccaccca

SEQ ID NO: 656819 - DNA, 25 bp, Homo sapien
gctgtagtactcatccttattaatg

SEQ ID NO: 656820 - DNA, 25 bp, Homo sapien
acactgcacactcttgtcattgagg

SEQ ID NO: 656821 - DNA, 25 bp, Homo sapien
atggcaaagtccagggcacactgca

SEQ ID NO: 656822 - DNA, 25 bp, Homo sapien
ggctgtagtactcatccttattaat

SEQ ID NO: 656823 - DNA, 25 bp, Homo sapien
cggccacggccaccatcaaggcagt

SEQ ID NO: 656824 - DNA, 25 bp, Homo sapien
ctagattgggccgaggcactcccgg

SEQ ID NO: 656825 - DNA, 25 bp, Homo sapien
ccacggccaccatcaaggcagtcag

SEQ ID NO: 656826 - DNA, 25 bp, Homo sapien
ggccgaggcactcccggccacggcc

SEQ ID NO: 656827 - DNA, 25 bp, Homo sapien
gagctggatctcccagagagcaaag

SEQ ID NO: 656828 - DNA, 25 bp, Homo sapien
gctggatctcccagagagcaaagca

SEQ ID NO: 656829 - DNA, 25 bp, Homo sapien
ctactgggacacagagcaaggagct

SEQ ID NO: 656830 - DNA, 25 bp, Homo sapien
gcaaggagctggatctcccagagag

SEQ ID NO: 656831 - DNA, 25 bp, Homo sapien
catagcccggcctctagggtaactg

SEQ ID NO: 656832 - DNA, 25 bp, Homo sapien
tatcccctgccacatgaagcattgg

SEQ ID NO: 656833 - DNA, 25 bp, Homo sapien
cagtgagaaccaatcaagggatgtg

SEQ ID NO: 656834 - DNA, 25 bp, Homo sapien
gacacagaactgtccaggctcacat

SEQ ID NO: 656835 - DNA, 25 bp, Homo sapien
agtgaaaggtggactccatagccca

SEQ ID NO: 656836 - DNA, 25 bp, Homo sapien
atggctcataagtgaaaggtggact

SEQ ID NO: 656837 - DNA, 25 bp, Homo sapien
gatggtgttcacagagttgctgcag

SEQ ID NO: 656838 - DNA, 25 bp, Homo sapien
tcatttaccaaaggtcgtgggatgg

SEQ ID NO: 656839 - DNA, 25 bp, Homo sapien
cctccaccgaaaggttgaggcccag

SEQ ID NO: 656840 - DNA, 25 bp, Homo sapien
gttgaggcccagacttacatctccc

SEQ ID NO: 656841 - DNA, 25 bp, Homo sapien
aaggttgaggcccagacttacatct

SEQ ID NO: 656842 - DNA, 25 bp, Homo sapien
caccgaaaggttgaggcccagactt

SEQ ID NO: 656843 - DNA, 25 bp, Homo sapien
cagaggcactggccgtgagggctgc

SEQ ID NO: 656844 - DNA, 25 bp, Homo sapien
ccccagaggcactggccgtgagggc

SEQ ID NO: 656845 - DNA, 25 bp, Homo sapien
gtaggcatggaagatatttgagagc

SEQ ID NO: 656846 - DNA, 25 bp, Homo sapien
taggcatggaagatatttgagagcc

SEQ ID NO: 656847 - DNA, 25 bp, Homo sapien
gggaacttcgtagatctggaaagag

SEQ ID NO: 656848 - DNA, 25 bp, Homo sapien
gaacttcgtagatctggaaagagca

SEQ ID NO: 656849 - DNA, 25 bp, Homo sapien
ggaacttcgtagatctggaaagagc

SEQ ID NO: 656850 - DNA, 25 bp, Homo sapien
tatcaaagaagtagctcacccagcc

SEQ ID NO: 656851 - DNA, 25 bp, Homo sapien
ggctgagacttagtgcatgtggtta

SEQ ID NO: 656852 - DNA, 25 bp, Homo sapien
gcatgtggttaggtctatcttcata

SEQ ID NO: 656853 - DNA, 25 bp, Homo sapien
gaagagacagttgtccaagtctggc

SEQ ID NO: 656854 - DNA, 25 bp, Homo sapien
tctgatgctatgtcagctggcaaaa

SEQ ID NO: 656855 - DNA, 25 bp, Homo sapien
tcatctggttgaggtctgatgctat

SEQ ID NO: 656856 - DNA, 25 bp, Homo sapien
cactatgctgggtgactgctgtcct

SEQ ID NO: 656857 - DNA, 25 bp, Homo sapien
ctatgctgggtgactgctgtcctca

SEQ ID NO: 656858 - DNA, 25 bp, Homo sapien
ctgcggggtgactgtagtgttcatc

SEQ ID NO: 656859 - DNA, 25 bp, Homo sapien
cacagatgtcactttgaatgatctt

SEQ ID NO: 656860 - DNA, 25 bp, Homo sapien
cacctgcggggtgactgtagtgttc

SEQ ID NO: 656861 - DNA, 25 bp, Homo sapien
tcacagatgtcactttgaatgatct

SEQ ID NO: 656862 - DNA, 25 bp, Homo sapien
ggcagccagcaagggcagtggagtg

SEQ ID NO: 656863 - DNA, 25 bp, Homo sapien
aggctagggccacaaacagggcagc

SEQ ID NO: 656864 - DNA, 25 bp, Homo sapien
gctagggccacaaacagggcagcca

SEQ ID NO: 656865 - DNA, 25 bp, Homo sapien
ctaggctagggccacaaacagggca

SEQ ID NO: 656866 - DNA, 25 bp, Homo sapien
ctgtcaccaacttctcccagcacca

SEQ ID NO: 656867 - DNA, 25 bp, Homo sapien
tgtcaccaacttctcccagcaccat

SEQ ID NO: 656868 - DNA, 25 bp, Homo sapien
ctggagaagtccagctgcacaggag

SEQ ID NO: 656869 - DNA, 25 bp, Homo sapien
ggagaagtccagctgcacaggaggg

SEQ ID NO: 656870 - DNA, 25 bp, Homo sapien
agaagtccagctgcacaggaggggg

SEQ ID NO: 656871 - DNA, 25 bp, Homo sapien
agtccagctgcacaggagggggcat

SEQ ID NO: 656872 - DNA, 25 bp, Homo sapien
tgctcacaatcctgagtgcacctgg

SEQ ID NO: 656873 - DNA, 25 bp, Homo sapien
cccaccgcagcaaatcagattgtga

SEQ ID NO: 656874 - DNA, 25 bp, Homo sapien
tgagtacttggcatctaaacctgtc

SEQ ID NO: 656875 - DNA, 25 bp, Homo sapien
cccatggcttccgagtgtccttaaa

SEQ ID NO: 656876 - DNA, 25 bp, Homo sapien
gatgaggaaggcttggtaaattacc

SEQ ID NO: 656877 - DNA, 25 bp, Homo sapien
cgttgattcatctgatgaggaaggc

SEQ ID NO: 656878 - DNA, 25 bp, Homo sapien
tcatctgatgaggaaggcttggtaa

SEQ ID NO: 656879 - DNA, 25 bp, Homo sapien
ctaatgctcgttgattcatctgatg

SEQ ID NO: 656880 - DNA, 25 bp, Homo sapien
cacagaggtggcactttgtccttcc

SEQ ID NO: 656881 - DNA, 25 bp, Homo sapien
tactttgtaggatgcccttgacatg

SEQ ID NO: 656882 - DNA, 25 bp, Homo sapien
catgagaagacgcatgaccatggct

SEQ ID NO: 656883 - DNA, 25 bp, Homo sapien
tacatggtccattgactgatgcatc

SEQ ID NO: 656884 - DNA, 25 bp, Homo sapien
ttaattggacctttcagctgttgag

SEQ ID NO: 656885 - DNA, 25 bp, Homo sapien
acttcattccctggatccaggtatc

SEQ ID NO: 656886 - DNA, 25 bp, Homo sapien
ctttcagctgttgagagcactgcaa

SEQ ID NO: 656887 - DNA, 25 bp, Homo sapien
cattccctggatccaggtatctgga

SEQ ID NO: 656888 - DNA, 25 bp, Homo sapien
tggagacttatgcaaaagttgagca

SEQ ID NO: 656889 - DNA, 25 bp, Homo sapien
taccaccaagtggagacttatgcaa

SEQ ID NO: 656890 - DNA, 25 bp, Homo sapien
gcaaaagttgagcaagtccactgag

SEQ ID NO: 656891 - DNA, 25 bp, Homo sapien
tcagcaagctgctaccaccaagtgg

SEQ ID NO: 656892 - DNA, 25 bp, Homo sapien
tcagccctgtgggaggagacagaaa

SEQ ID NO: 656893 - DNA, 25 bp, Homo sapien
cagccctgtgggaggagacagaaag

SEQ ID NO: 656894 - DNA, 25 bp, Homo sapien
agccctgtgggaggagacagaaagc

SEQ ID NO: 656895 - DNA, 25 bp, Homo sapien
gccctgtgggaggagacagaaagcc

SEQ ID NO: 656896 - DNA, 25 bp, Homo sapien
tgggcaaaggcctgggggtcaaatg

SEQ ID NO: 656897 - DNA, 25 bp, Homo sapien
gcaacagcggcgtgggcaaaggcct

SEQ ID NO: 656898 - DNA, 25 bp, Homo sapien
gccccagaaggaccaggccaaccat

SEQ ID NO: 656899 - DNA, 25 bp, Homo sapien
tacaatatttgagcagaccttggag

SEQ ID NO: 656900 - DNA, 25 bp, Homo sapien
ggctctgcagtcctggaccgtggct

SEQ ID NO: 656901 - DNA, 25 bp, Homo sapien
tgaacagcgggctgccagatggaca

SEQ ID NO: 656902 - DNA, 25 bp, Homo sapien
acagacacgaagatggatcgacaga

SEQ ID NO: 656903 - DNA, 25 bp, Homo sapien
ggccagatagctagacaaagaggac

SEQ ID NO: 656904 - DNA, 25 bp, Homo sapien
gatggtcagatagacaatgggacag

SEQ ID NO: 656905 - DNA, 25 bp, Homo sapien
gtgggctggacttcttcccacgtgg

SEQ ID NO: 656906 - DNA, 25 bp, Homo sapien
tgcaggtgatgtgggctggacttct

SEQ ID NO: 656907 - DNA, 25 bp, Homo sapien
aggtgatgtgggctggacttcttcc

SEQ ID NO: 656908 - DNA, 25 bp, Homo sapien
gtggcccccatagtcctccgcactt

SEQ ID NO: 656909 - DNA, 25 bp, Homo sapien
ggtgctgggctgtgatcaccgcctc

SEQ ID NO: 656910 - DNA, 25 bp, Homo sapien
cccagtgcccctggtgatatccagg

SEQ ID NO: 656911 - DNA, 25 bp, Homo sapien
ggccccagtgcccctggtgatatcc

SEQ ID NO: 656912 - DNA, 25 bp, Homo sapien
gtgctgggctgtgatcaccgcctcc

SEQ ID NO: 656913 - DNA, 25 bp, Homo sapien
cgtcctggtgagtattttgttcctg

SEQ ID NO: 656914 - DNA, 25 bp, Homo sapien
tcctcgtcctggtgagtattttgtt

SEQ ID NO: 656915 - DNA, 25 bp, Homo sapien
tcgtcctggtgagtattttgttcct

SEQ ID NO: 656916 - DNA, 25 bp, Homo sapien
ctcgtcctggtgagtattttgttcc

SEQ ID NO: 656917 - DNA, 25 bp, Homo sapien
gccatgcggacgatggcttgcacca

SEQ ID NO: 656918 - DNA, 25 bp, Homo sapien
ttgcaccacagcaatgaaggtggac

SEQ ID NO: 656919 - DNA, 25 bp, Homo sapien
acagcaatgaaggtggacgtgatct

SEQ ID NO: 656920 - DNA, 25 bp, Homo sapien
accagccatgcggacgatggcttgc

SEQ ID NO: 656921 - DNA, 25 bp, Homo sapien
gtcatagccgaaccagaggttgtag

SEQ ID NO: 656922 - DNA, 25 bp, Homo sapien
gcatgggagtgtgatcagcatggct

SEQ ID NO: 656923 - DNA, 25 bp, Homo sapien
gggcatgggagtgtgatcagcatgg

SEQ ID NO: 656924 - DNA, 25 bp, Homo sapien
ctggggcatgggagtgtgatcagca

SEQ ID NO: 656925 - DNA, 25 bp, Homo sapien
catgggagtgtgatcagcatggctt

SEQ ID NO: 656926 - DNA, 25 bp, Homo sapien
tgggcacggccagggagaaaaggtg

SEQ ID NO: 656927 - DNA, 25 bp, Homo sapien
gtgcagggtgggcacggccagggag

SEQ ID NO: 656928 - DNA, 25 bp, Homo sapien
acggccagggagaaaaggtgtgaca

SEQ ID NO: 656929 - DNA, 25 bp, Homo sapien
ccagggagaaaaggtgtgacacata

SEQ ID NO: 656930 - DNA, 25 bp, Homo sapien
gccatggtgatctgcgtgcccccgg

SEQ ID NO: 656931 - DNA, 25 bp, Homo sapien
gcagtggccatggtgatctgcgtgc

SEQ ID NO: 656932 - DNA, 25 bp, Homo sapien
atgatcgtcgggcacatggacgaga

SEQ ID NO: 656933 - DNA, 25 bp, Homo sapien
cagtgcagtggccatggtgatctgc

SEQ ID NO: 656934 - DNA, 25 bp, Homo sapien
gtcatccatttcattattgagcagg

SEQ ID NO: 656935 - DNA, 25 bp, Homo sapien
aagtcatccatttcattattgagca

SEQ ID NO: 656936 - DNA, 25 bp, Homo sapien
catttcattattgagcaggatcccg

SEQ ID NO: 656937 - DNA, 25 bp, Homo sapien
ctggtagagctgaagtcatccattt

SEQ ID NO: 656938 - DNA, 25 bp, Homo sapien
ctggggagcgcaccttggagccaaa

SEQ ID NO: 656939 - DNA, 25 bp, Homo sapien
tggggagcgcaccttggagccaaag

SEQ ID NO: 656940 - DNA, 25 bp, Homo sapien
gactggggagcgcaccttggagcca

SEQ ID NO: 656941 - DNA, 25 bp, Homo sapien
ctgactggggagcgcaccttggagc

SEQ ID NO: 656942 - DNA, 25 bp, Homo sapien
tcctctgcgaccacagacaggtgag

SEQ ID NO: 656943 - DNA, 25 bp, Homo sapien
ccccgtcatccggcatgtagaactc

SEQ ID NO: 656944 - DNA, 25 bp, Homo sapien
agtgcccccgtcatccggcatgtag

SEQ ID NO: 656945 - DNA, 25 bp, Homo sapien
cgtcatccggcatgtagaactcggg

SEQ ID NO: 656946 - DNA, 25 bp, Homo sapien
cctctggcacccacaaccttccgtg

SEQ ID NO: 656947 - DNA, 25 bp, Homo sapien
ctggcacccacaaccttccgtggct

SEQ ID NO: 656948 - DNA, 25 bp, Homo sapien
ctctggcacccacaaccttccgtgg

SEQ ID NO: 656949 - DNA, 25 bp, Homo sapien
ggcacccacaaccttccgtggctcc

SEQ ID NO: 656950 - DNA, 25 bp, Homo sapien
gtctctgtcgcattccagcaactct

SEQ ID NO: 656951 - DNA, 25 bp, Homo sapien
ccctgtctctgtcgcattccagcaa

SEQ ID NO: 656952 - DNA, 25 bp, Homo sapien
actccctgtctctgtcgcattccag

SEQ ID NO: 656953 - DNA, 25 bp, Homo sapien
ctgtctctgtcgcattccagcaact

SEQ ID NO: 656954 - DNA, 25 bp, Homo sapien
agttggcggctggacgaggacgcag

SEQ ID NO: 656955 - DNA, 25 bp, Homo sapien
tattaatccgttaagctcactctgt

SEQ ID NO: 656956 - DNA, 25 bp, Homo sapien
tcactctgtcaccggcgccattaag

SEQ ID NO: 656957 - DNA, 25 bp, Homo sapien
accggcgccattaagtgctcacgcg

SEQ ID NO: 656958 - DNA, 25 bp, Homo sapien
cccagttcactttgcttgtgggatc

SEQ ID NO: 656959 - DNA, 25 bp, Homo sapien
gcctctaggcccagtatacacaagt

SEQ ID NO: 656960 - DNA, 25 bp, Homo sapien
gaatgactcctccatatccgaggcc

SEQ ID NO: 656961 - DNA, 25 bp, Homo sapien
tcaggaatgactcctccatatccga

SEQ ID NO: 656962 - DNA, 25 bp, Homo sapien
tatccgaggcctctaggcccagtat

SEQ ID NO: 656963 - DNA, 25 bp, Homo sapien
gtaagacgtagctgtagacccaaag

SEQ ID NO: 656964 - DNA, 25 bp, Homo sapien
agtctggaagccacgccttgtggga

SEQ ID NO: 656965 - DNA, 25 bp, Homo sapien
gtcacactggcatctaggccttcgc

SEQ ID NO: 656966 - DNA, 25 bp, Homo sapien
gctaagacaccagccacttaccaag

SEQ ID NO: 656967 - DNA, 25 bp, Homo sapien
gccacaaaggtagcaagattggttt

SEQ ID NO: 656968 - DNA, 25 bp, Homo sapien
tagaactagtagcttgattttgtca

SEQ ID NO: 656969 - DNA, 25 bp, Homo sapien
ttcaggtaagccctggaccaagcca

SEQ ID NO: 656970 - DNA, 25 bp, Homo sapien
caatgatgatttgatcctgttgaat

SEQ ID NO: 656971 - DNA, 25 bp, Homo sapien
agatgagccacacacatcggctgga

SEQ ID NO: 656972 - DNA, 25 bp, Homo sapien
gatgaaatgaaacttgcccttcttg

SEQ ID NO: 656973 - DNA, 25 bp, Homo sapien
gcccttcttgtcctacatgtctgta

SEQ ID NO: 656974 - DNA, 25 bp, Homo sapien
cacacatcggctggatgaaatgaaa

SEQ ID NO: 656975 - DNA, 25 bp, Homo sapien
acatgatctaggggcttagagggcc

SEQ ID NO: 656976 - DNA, 25 bp, Homo sapien
agggacatgatctaggggcttagag

SEQ ID NO: 656977 - DNA, 25 bp, Homo sapien
ggacatgatctaggggcttagaggg

SEQ ID NO: 656978 - DNA, 25 bp, Homo sapien
gggacatgatctaggggcttagagg

SEQ ID NO: 656979 - DNA, 25 bp, Homo sapien
tcagacctcctggccatcctctgga

SEQ ID NO: 656980 - DNA, 25 bp, Homo sapien
agacctcctggccatcctctggagg

SEQ ID NO: 656981 - DNA, 25 bp, Homo sapien
acctcctggccatcctctggagggg

SEQ ID NO: 656982 - DNA, 25 bp, Homo sapien
tcctggccatcctctggagggggcc

SEQ ID NO: 656983 - DNA, 25 bp, Homo sapien
ttttcatagaccctatttgttgctt

SEQ ID NO: 656984 - DNA, 25 bp, Homo sapien
tagatattgcagttaaagttaagca

SEQ ID NO: 656985 - DNA, 25 bp, Homo sapien
tgcagttaaagttaagcagttggtt

SEQ ID NO: 656986 - DNA, 25 bp, Homo sapien
ccctatttgttgcttagatattgca

SEQ ID NO: 656987 - DNA, 25 bp, Homo sapien
gctgaacctggcatttgtggagaca

SEQ ID NO: 656988 - DNA, 25 bp, Homo sapien
gagaggcatgtcagtttcagagtcc

SEQ ID NO: 656989 - DNA, 25 bp, Homo sapien
atggcagtcgctatcaccagggcat

SEQ ID NO: 656990 - DNA, 25 bp, Homo sapien
aggctttctccatggcagtcgctat

SEQ ID NO: 656991 - DNA, 25 bp, Homo sapien
aaagtacttgattccagagatgcag

SEQ ID NO: 656992 - DNA, 25 bp, Homo sapien
tggaggccaaactatgtgatgccct

SEQ ID NO: 656993 - DNA, 25 bp, Homo sapien
ggacaaagtcatcccacacaaagta

SEQ ID NO: 656994 - DNA, 25 bp, Homo sapien
tgcagaatatctcatgatacatgga

SEQ ID NO: 656995 - DNA, 25 bp, Homo sapien
cgcatgctgtttccttccctccttc

SEQ ID NO: 656996 - DNA, 25 bp, Homo sapien
ctcccgcatgctgtttccttccctc

SEQ ID NO: 656997 - DNA, 25 bp, Homo sapien
cccgcatgctgtttccttccctcct

SEQ ID NO: 656998 - DNA, 25 bp, Homo sapien
catgctgtttccttccctccttcat

SEQ ID NO: 656999 - DNA, 25 bp, Homo sapien
gacacggcgtctagcagcttgaatt

SEQ ID NO: 657000 - DNA, 25 bp, Homo sapien
taccctgtgcctggttagtggtgag

SEQ ID NO: 657001 - DNA, 25 bp, Homo sapien
ctttgagcttcgacacggcgtctag

SEQ ID NO: 657002 - DNA, 25 bp, Homo sapien
tgtttccttaccctgtgcctggtta

SEQ ID NO: 657003 - DNA, 25 bp, Homo sapien
agagcaggtgcaggacacctggggt

SEQ ID NO: 657004 - DNA, 25 bp, Homo sapien
ctaagagcaggtgcaggacacctgg

SEQ ID NO: 657005 - DNA, 25 bp, Homo sapien
ggtgcaggacacctggggtgtccat

SEQ ID NO: 657006 - DNA, 25 bp, Homo sapien
caggtgcaggacacctggggtgtcc

SEQ ID NO: 657007 - DNA, 25 bp, Homo sapien
tccactcatctccattggcgaggtc

SEQ ID NO: 657008 - DNA, 25 bp, Homo sapien
tggtgctccttgtacaactcagaga

SEQ ID NO: 657009 - DNA, 25 bp, Homo sapien
tgttgcttatgcacacattttggtg

SEQ ID NO: 657010 - DNA, 25 bp, Homo sapien
gaagggcatccctaatttgccgaac

SEQ ID NO: 657011 - DNA, 25 bp, Homo sapien
tgagatgaggaggaatgtcatttaa

SEQ ID NO: 657012 - DNA, 25 bp, Homo sapien
tttaaataataacagaagcactgtg

SEQ ID NO: 657013 - DNA, 25 bp, Homo sapien
accagggagccaggtagagtcagac

SEQ ID NO: 657014 - DNA, 25 bp, Homo sapien
cagaagcactgtgatgacccagagt

SEQ ID NO: 657015 - DNA, 25 bp, Homo sapien
ccactccatgcataaccctctttcc

SEQ ID NO: 657016 - DNA, 25 bp, Homo sapien
tctttccaggggtctgtaggccacg

SEQ ID NO: 657017 - DNA, 25 bp, Homo sapien
gtgcccactccatgcataaccctct

SEQ ID NO: 657018 - DNA, 25 bp, Homo sapien
ttccaggggtctgtaggccacgctg

SEQ ID NO: 657019 - DNA, 25 bp, Homo sapien
tattggacatatagctcttggcatc

SEQ ID NO: 657020 - DNA, 25 bp, Homo sapien
tcctatcacccctcttgggtggact

SEQ ID NO: 657021 - DNA, 25 bp, Homo sapien
taggaggagcttcctatcacccctc

SEQ ID NO: 657022 - DNA, 25 bp, Homo sapien
ttgggtggactattggacatatagc

SEQ ID NO: 657023 - DNA, 25 bp, Homo sapien
ggagggtttataccaacaagcagag

SEQ ID NO: 657024 - DNA, 25 bp, Homo sapien
aaagagcttgattagatctcaaggg

SEQ ID NO: 657025 - DNA, 25 bp, Homo sapien
caaactaacataggaggtcttttct

SEQ ID NO: 657026 - DNA, 25 bp, Homo sapien
aagcaggccaagaacttaggtatca

SEQ ID NO: 657027 - DNA, 25 bp, Homo sapien
caagtttgtttcacgatgcacagca

SEQ ID NO: 657028 - DNA, 25 bp, Homo sapien
aatacgctaagtcacccagttgcag

SEQ ID NO: 657029 - DNA, 25 bp, Homo sapien
caaggagaacccatgtaacaggacc

SEQ ID NO: 657030 - DNA, 25 bp, Homo sapien
agaggactgagagaacaaaccccgg

SEQ ID NO: 657031 - DNA, 25 bp, Homo sapien
catcggaagtggttgataagtggct

SEQ ID NO: 657032 - DNA, 25 bp, Homo sapien
gcagctattactggctgttctacat

SEQ ID NO: 657033 - DNA, 25 bp, Homo sapien
cagtgcccggaagagcatcggaagt

SEQ ID NO: 657034 - DNA, 25 bp, Homo sapien
tatggatgcagctattactggctgt

SEQ ID NO: 657035 - DNA, 25 bp, Homo sapien
ccatgaatggagtcgttgaaggagc

SEQ ID NO: 657036 - DNA, 25 bp, Homo sapien
catgaatggagtcgttgaaggagcc

SEQ ID NO: 657037 - DNA, 25 bp, Homo sapien
cccaggctgcccgtatcctctatgg

SEQ ID NO: 657038 - DNA, 25 bp, Homo sapien
aggctgcccgtatcctctatggcca

SEQ ID NO: 657039 - DNA, 25 bp, Homo sapien
atccgtgatgctttctgcccctgga

SEQ ID NO: 657040 - DNA, 25 bp, Homo sapien
cactcactataggactgtgcaagtc

SEQ ID NO: 657041 - DNA, 25 bp, Homo sapien
ttccttcaacaccaatcttatcact

SEQ ID NO: 657042 - DNA, 25 bp, Homo sapien
gcttttgacaacaaacatgctcaag

SEQ ID NO: 657043 - DNA, 25 bp, Homo sapien
caaatatcagtggatttaaagcagc

SEQ ID NO: 657044 - DNA, 25 bp, Homo sapien
gaggaactagcctggcagggcaaaa

SEQ ID NO: 657045 - DNA, 25 bp, Homo sapien
aaaacttgctgagattgaccgcaca

SEQ ID NO: 657046 - DNA, 25 bp, Homo sapien
tcttcaaaagacgatggctcaaata

SEQ ID NO: 657047 - DNA, 25 bp, Homo sapien
tgagagaacccagctgactcaggga

SEQ ID NO: 657048 - DNA, 25 bp, Homo sapien
tctagggcacagctctgaaaaggag

SEQ ID NO: 657049 - DNA, 25 bp, Homo sapien
tcaaagcaggtacgaggtagggaca

SEQ ID NO: 657050 - DNA, 25 bp, Homo sapien
catctccagtgcagatccatggcct

SEQ ID NO: 657051 - DNA, 25 bp, Homo sapien
cacaggatgcgcctctgttctcaag

SEQ ID NO: 657052 - DNA, 25 bp, Homo sapien
ggagcacatgcgctgcgtacccaga

SEQ ID NO: 657053 - DNA, 25 bp, Homo sapien
catgcccctcggctacagagtgtca

SEQ ID NO: 657054 - DNA, 25 bp, Homo sapien
ctcggctacagagtgtcaacccaca

SEQ ID NO: 657055 - DNA, 25 bp, Homo sapien
ctggtctggtgtgatattgtctgat

SEQ ID NO: 657056 - DNA, 25 bp, Homo sapien
gcagtgcactatccactatcgtcat

SEQ ID NO: 657057 - DNA, 25 bp, Homo sapien
ttgtctgattaagggattcactagc

SEQ ID NO: 657058 - DNA, 25 bp, Homo sapien
gatgccagcagtgcactatccacta

SEQ ID NO: 657059 - DNA, 25 bp, Homo sapien
gcctgtgaaggttcccatttaactg

SEQ ID NO: 657060 - DNA, 25 bp, Homo sapien
agcacacttgcaggtggagcctgtg

SEQ ID NO: 657061 - DNA, 25 bp, Homo sapien
ctctttggcagcacacttgcaggtg

SEQ ID NO: 657062 - DNA, 25 bp, Homo sapien
gtgaaggttcccatttaactgcttg

SEQ ID NO: 657063 - DNA, 25 bp, Homo sapien
cagactcaggccgtcatggacttca

SEQ ID NO: 657064 - DNA, 25 bp, Homo sapien
tctgggacctcaagcaagtcacttc

SEQ ID NO: 657065 - DNA, 25 bp, Homo sapien
aatcgttggaactgagggtcttgac

SEQ ID NO: 657066 - DNA, 25 bp, Homo sapien
tgctgaatgaggtcgaatcgttgga

SEQ ID NO: 657067 - DNA, 25 bp, Homo sapien
agaacaggcctcctcagagagtgtg

SEQ ID NO: 657068 - DNA, 25 bp, Homo sapien
cagaacaggcctcctcagagagtgt

SEQ ID NO: 657069 - DNA, 25 bp, Homo sapien
gaacaggcctcctcagagagtgtgc

SEQ ID NO: 657070 - DNA, 25 bp, Homo sapien
caacccgctgcatttgcctctctgt

SEQ ID NO: 657071 - DNA, 25 bp, Homo sapien
aggaagctggaatggaccgacccct

SEQ ID NO: 657072 - DNA, 25 bp, Homo sapien
ggaatggaccgacccctctctgctg

SEQ ID NO: 657073 - DNA, 25 bp, Homo sapien
agtgtccacaggaagctggaatgga

SEQ ID NO: 657074 - DNA, 25 bp, Homo sapien
tctgctcagacatattttcagtgtc

SEQ ID NO: 657075 - DNA, 25 bp, Homo sapien
ctctgctcagacatattttcagtgt

SEQ ID NO: 657076 - DNA, 25 bp, Homo sapien
tgctcaattatccagctcttagctc

SEQ ID NO: 657077 - DNA, 25 bp, Homo sapien
atccagctcttagctctgctcagac

SEQ ID NO: 657078 - DNA, 25 bp, Homo sapien
tcagctataagctgtgggcagccac

SEQ ID NO: 657079 - DNA, 25 bp, Homo sapien
tgggcctgcgtccggaagaaggtct

SEQ ID NO: 657080 - DNA, 25 bp, Homo sapien
agaaggtctgagtgacatccagcat

SEQ ID NO: 657081 - DNA, 25 bp, Homo sapien
gtctgagtgacatccagcatccagg

SEQ ID NO: 657082 - DNA, 25 bp, Homo sapien
cgtccggaagaaggtctgagtgaca

SEQ ID NO: 657083 - DNA, 25 bp, Homo sapien
cccagaattccccagggagatggaa

SEQ ID NO: 657084 - DNA, 25 bp, Homo sapien
atggaagcaggtggacattggctct

SEQ ID NO: 657085 - DNA, 25 bp, Homo sapien
gaagcaggtggacattggctctaac

SEQ ID NO: 657086 - DNA, 25 bp, Homo sapien
ctgaaaaatgcccagaattccccag

SEQ ID NO: 657087 - DNA, 25 bp, Homo sapien
cagaatggactagagcgtgatgtgc

SEQ ID NO: 657088 - DNA, 25 bp, Homo sapien
cgtgatgtgcattgaaactgcgatc

SEQ ID NO: 657089 - DNA, 25 bp, Homo sapien
taactcatatagaaacctctagtgg

SEQ ID NO: 657090 - DNA, 25 bp, Homo sapien
gaaacctctagtggagggacaagga

SEQ ID NO: 657091 - DNA, 25 bp, Homo sapien
ggccaggtaaagcacctgggctgca

SEQ ID NO: 657092 - DNA, 25 bp, Homo sapien
agccagggccaggtaaagcacctgg

SEQ ID NO: 657093 - DNA, 25 bp, Homo sapien
ccagggccaggtaaagcacctgggc

SEQ ID NO: 657094 - DNA, 25 bp, Homo sapien
agggccaggtaaagcacctgggctg

SEQ ID NO: 657095 - DNA, 25 bp, Homo sapien
ggtgatcttgtccagcattgggttt

SEQ ID NO: 657096 - DNA, 25 bp, Homo sapien
tctgcaagactgtttgtttcttggc

SEQ ID NO: 657097 - DNA, 25 bp, Homo sapien
tccttctgcaagactgtttgtttct

SEQ ID NO: 657098 - DNA, 25 bp, Homo sapien
gtccagcattgggtttttccttctg

SEQ ID NO: 657099 - DNA, 25 bp, Homo sapien
tatgtatacggccatctgtttaact

SEQ ID NO: 657100 - DNA, 25 bp, Homo sapien
ttcccgtcctctgccttatggactg

SEQ ID NO: 657101 - DNA, 25 bp, Homo sapien
tgtctttatgtatacggccatctgt

SEQ ID NO: 657102 - DNA, 25 bp, Homo sapien
tgaaactgtctttatgtatacggcc

SEQ ID NO: 657103 - DNA, 25 bp, Homo sapien
acatggaagttgaagtctggaattc

SEQ ID NO: 657104 - DNA, 25 bp, Homo sapien
gctgtcttttcgatagtattggtgg

SEQ ID NO: 657105 - DNA, 25 bp, Homo sapien
ctgaataatagggaaaatagaggga

SEQ ID NO: 657106 - DNA, 25 bp, Homo sapien
ctggtctgtgcaatgaataacagtg

SEQ ID NO: 657107 - DNA, 25 bp, Homo sapien
tgaggtgagagtagggctctggcat

SEQ ID NO: 657108 - DNA, 25 bp, Homo sapien
ccatgtgtccttgaggtgagagtag

SEQ ID NO: 657109 - DNA, 25 bp, Homo sapien
cctagcaccagccatgtgtccttga

SEQ ID NO: 657110 - DNA, 25 bp, Homo sapien
accagccatgtgtccttgaggtgag

SEQ ID NO: 657111 - DNA, 25 bp, Homo sapien
gtgcccacaatggtgtaaaccacag

SEQ ID NO: 657112 - DNA, 25 bp, Homo sapien
cccacaatggtgtaaaccacagcag

SEQ ID NO: 657113 - DNA, 25 bp, Homo sapien
tgtgcccacaatggtgtaaaccaca

SEQ ID NO: 657114 - DNA, 25 bp, Homo sapien
tgcccacaatggtgtaaaccacagc

SEQ ID NO: 657115 - DNA, 25 bp, Homo sapien
ttagctgaggccctgagttccactt

SEQ ID NO: 657116 - DNA, 25 bp, Homo sapien
tagctgaggccctgagttccacttc

SEQ ID NO: 657117 - DNA, 25 bp, Homo sapien
ccactttctggccaataggatgcaa

SEQ ID NO: 657118 - DNA, 25 bp, Homo sapien
ttgatatgtttccacatgttctggc

SEQ ID NO: 657119 - DNA, 25 bp, Homo sapien
gagaatatatgtcagccggttggag

SEQ ID NO: 657120 - DNA, 25 bp, Homo sapien
ggatgcaaagacttgatatgtttcc

SEQ ID NO: 657121 - DNA, 25 bp, Homo sapien
tgtccaccttcccatgagaatttgg

SEQ ID NO: 657122 - DNA, 25 bp, Homo sapien
gggtccatcgttagaggataagatt

SEQ ID NO: 657123 - DNA, 25 bp, Homo sapien
gaatttgggacatggagccggtcat

SEQ ID NO: 657124 - DNA, 25 bp, Homo sapien
tcgttagaggataagattgtccacc

SEQ ID NO: 657125 - DNA, 25 bp, Homo sapien
gaaacaagtctgtagcaagtcaatt

SEQ ID NO: 657126 - DNA, 25 bp, Homo sapien
tcaggtctagaaacaagtctgtagc

SEQ ID NO: 657127 - DNA, 25 bp, Homo sapien
ttatatttctaaggtgtgttgcggg

SEQ ID NO: 657128 - DNA, 25 bp, Homo sapien
gaactgcaggtgagttcaggtctag

SEQ ID NO: 657129 - DNA, 25 bp, Homo sapien
tgcataaagtcagggtcccaagagc

SEQ ID NO: 657130 - DNA, 25 bp, Homo sapien
gcttgaggtgttttacttagctccc

SEQ ID NO: 657131 - DNA, 25 bp, Homo sapien
tcagcacagttcagctttttctgta

SEQ ID NO: 657132 - DNA, 25 bp, Homo sapien
tgagcgtaggaacccagtgaggcaa

SEQ ID NO: 657133 - DNA, 25 bp, Homo sapien
gaggcaatgagtgggctggatttct

SEQ ID NO: 657134 - DNA, 25 bp, Homo sapien
tctggagcctttgttgacttaggat

SEQ ID NO: 657135 - DNA, 25 bp, Homo sapien
tgatgtctccatggaagtgagcgta

SEQ ID NO: 657136 - DNA, 25 bp, Homo sapien
cttgttcgaggcacagttctgagaa

SEQ ID NO: 657137 - DNA, 25 bp, Homo sapien
taacagcccagctaggtaggtccta

SEQ ID NO: 657138 - DNA, 25 bp, Homo sapien
agttctgagaactttacaagtgttt

SEQ ID NO: 657139 - DNA, 25 bp, Homo sapien
caagtgtttcctcgtttagccttca

SEQ ID NO: 657140 - DNA, 25 bp, Homo sapien
catgtttcattctcaccctgcagag

SEQ ID NO: 657141 - DNA, 25 bp, Homo sapien
ctgcagagcttccactctcctgagg

SEQ ID NO: 657142 - DNA, 25 bp, Homo sapien
tgaccacccatgtttcattctcacc

SEQ ID NO: 657143 - DNA, 25 bp, Homo sapien
cctgaggaaggtcactgtgtgtcac

SEQ ID NO: 657144 - DNA, 25 bp, Homo sapien
atcccattgcgccacaagttttcct

SEQ ID NO: 657145 - DNA, 25 bp, Homo sapien
gacatcccattgcgccacaagtttt

SEQ ID NO: 657146 - DNA, 25 bp, Homo sapien
aggcccagcacctggctatctgtgt

SEQ ID NO: 657147 - DNA, 25 bp, Homo sapien
cacctggctatctgtgtccctggac

SEQ ID NO: 657148 - DNA, 25 bp, Homo sapien
tcggtctccaggtatgcgcagccct

SEQ ID NO: 657149 - DNA, 25 bp, Homo sapien
tatcttggtgatatgctgactgttt

SEQ ID NO: 657150 - DNA, 25 bp, Homo sapien
gcgcagccctcactgcataaacatt

SEQ ID NO: 657151 - DNA, 25 bp, Homo sapien
tgagagctccctacttctttggttt

SEQ ID NO: 657152 - DNA, 25 bp, Homo sapien
acttggaaagttccgatggacacgc

SEQ ID NO: 657153 - DNA, 25 bp, Homo sapien
gatggacacgctgcacaaggcttgt

SEQ ID NO: 657154 - DNA, 25 bp, Homo sapien
agttccgatggacacgctgcacaag

SEQ ID NO: 657155 - DNA, 25 bp, Homo sapien
gaaagttccgatggacacgctgcac

SEQ ID NO: 657156 - DNA, 25 bp, Homo sapien
cacttcgacgattgttggaagcagc

SEQ ID NO: 657157 - DNA, 25 bp, Homo sapien
gctctgggctgcaaaggttatagca

SEQ ID NO: 657158 - DNA, 25 bp, Homo sapien
ttcgacgattgttggaagcagctct

SEQ ID NO: 657159 - DNA, 25 bp, Homo sapien
tcctccacttcgacgattgttggaa

SEQ ID NO: 657160 - DNA, 25 bp, Homo sapien
taggatccagagaagacgagggctt

SEQ ID NO: 657161 - DNA, 25 bp, Homo sapien
gacgagggctttcccagactcattg

SEQ ID NO: 657162 - DNA, 25 bp, Homo sapien
cagagaagacgagggctttcccaga

SEQ ID NO: 657163 - DNA, 25 bp, Homo sapien
gctttcccagactcattgaatttca

SEQ ID NO: 657164 - DNA, 25 bp, Homo sapien
tgtcctgctccgatgggaggatgct

SEQ ID NO: 657165 - DNA, 25 bp, Homo sapien
acgggatttgcagctttactcctgt

SEQ ID NO: 657166 - DNA, 25 bp, Homo sapien
caaacaggacgttgtgaagggactg

SEQ ID NO: 657167 - DNA, 25 bp, Homo sapien
gatggagaggcgtctttgcgaccat

SEQ ID NO: 657168 - DNA, 25 bp, Homo sapien
cccttttagcagcataaggctgaag

SEQ ID NO: 657169 - DNA, 25 bp, Homo sapien
ttagcagcataaggctgaagaccaa

SEQ ID NO: 657170 - DNA, 25 bp, Homo sapien
ccttttagcagcataaggctgaaga

SEQ ID NO: 657171 - DNA, 25 bp, Homo sapien
ttttagcagcataaggctgaagacc

SEQ ID NO: 657172 - DNA, 25 bp, Homo sapien
agtcattaagtttgacttctttcac

SEQ ID NO: 657173 - DNA, 25 bp, Homo sapien
tcaaggtgcatccatatggagcata

SEQ ID NO: 657174 - DNA, 25 bp, Homo sapien
atgaccattttcagtcaacccccag

SEQ ID NO: 657175 - DNA, 25 bp, Homo sapien
ctaccatatgtagtcattaagtttg

SEQ ID NO: 657176 - DNA, 25 bp, Homo sapien
tagagctgtcagtgccttagagaag

SEQ ID NO: 657177 - DNA, 25 bp, Homo sapien
aagtctgtgtttgtcgtgggagtca

SEQ ID NO: 657178 - DNA, 25 bp, Homo sapien
caacggtaatgagcagcggagacta

SEQ ID NO: 657179 - DNA, 25 bp, Homo sapien
cagggtcagcgtgtttgccacttct

SEQ ID NO: 657180 - DNA, 25 bp, Homo sapien
caggagggaagcgggtccagttgat

SEQ ID NO: 657181 - DNA, 25 bp, Homo sapien
tttcacgttccctttgactctgcag

SEQ ID NO: 657182 - DNA, 25 bp, Homo sapien
ccttttcacgttccctttgactctg

SEQ ID NO: 657183 - DNA, 25 bp, Homo sapien
acgttccctttgactctgcaggagg

SEQ ID NO: 657184 - DNA, 25 bp, Homo sapien
caccaacaaacactcgccaagccaa

SEQ ID NO: 657185 - DNA, 25 bp, Homo sapien
tgtccagtagcagacaccaacaaac

SEQ ID NO: 657186 - DNA, 25 bp, Homo sapien
gtatctgtccagtagcagacaccaa

SEQ ID NO: 657187 - DNA, 25 bp, Homo sapien
acagctgctctgtatctgtccagta

SEQ ID NO: 657188 - DNA, 25 bp, Homo sapien
gtgtttccttcctccagtttcacat

SEQ ID NO: 657189 - DNA, 25 bp, Homo sapien
tgtttccttcctccagtttcacatg

SEQ ID NO: 657190 - DNA, 25 bp, Homo sapien
tttgtgtttccttcctccagtttca

SEQ ID NO: 657191 - DNA, 25 bp, Homo sapien
tgtgtttccttcctccagtttcaca

SEQ ID NO: 657192 - DNA, 25 bp, Homo sapien
gttctgtaacatcctctgagagata

SEQ ID NO: 657193 - DNA, 25 bp, Homo sapien
tgcctaatatgtgacagctcctcac

SEQ ID NO: 657194 - DNA, 25 bp, Homo sapien
tggcaatttctactgtgccccattg

SEQ ID NO: 657195 - DNA, 25 bp, Homo sapien
aaagttctgtaacatcctctgagag

SEQ ID NO: 657196 - DNA, 25 bp, Homo sapien
aaatgaacagtgcccgtttctgagt

SEQ ID NO: 657197 - DNA, 25 bp, Homo sapien
ttgagaagttctgctagatgggaga

SEQ ID NO: 657198 - DNA, 25 bp, Homo sapien
aatgaacagtgcccgtttctgagtg

SEQ ID NO: 657199 - DNA, 25 bp, Homo sapien
tgagaagttctgctagatgggagaa

SEQ ID NO: 657200 - DNA, 25 bp, Homo sapien
tggtcaggacttgaacattcgccgg

SEQ ID NO: 657201 - DNA, 25 bp, Homo sapien
ggcctctgcctagtgttgaaacggg

SEQ ID NO: 657202 - DNA, 25 bp, Homo sapien
ggagccatcccttcctctagtcggg

SEQ ID NO: 657203 - DNA, 25 bp, Homo sapien
cattcgccggatccataaattgggt

SEQ ID NO: 657204 - DNA, 25 bp, Homo sapien
ttgggcgcacttgccgggtcacctt

SEQ ID NO: 657205 - DNA, 25 bp, Homo sapien
caccttgtcccggaggtaagtccag

SEQ ID NO: 657206 - DNA, 25 bp, Homo sapien
tcgctcgctcgggagagtcgcgggc

SEQ ID NO: 657207 - DNA, 25 bp, Homo sapien
tgtcccggaggtaagtccagacctc

SEQ ID NO: 657208 - DNA, 25 bp, Homo sapien
tggcgggtgtcctagtcctggctcc

SEQ ID NO: 657209 - DNA, 25 bp, Homo sapien
ggaaggggtcgatgctggcctgggc

SEQ ID NO: 657210 - DNA, 25 bp, Homo sapien
taagtccgggtggtcgccgcgacga

SEQ ID NO: 657211 - DNA, 25 bp, Homo sapien
tcgccgcgacgagacttgggagaca

SEQ ID NO: 657212 - DNA, 25 bp, Homo sapien
tcggagtgacccgaaggagaccagc

SEQ ID NO: 657213 - DNA, 25 bp, Homo sapien
tgagaccgagaactgagagcgtagc

SEQ ID NO: 657214 - DNA, 25 bp, Homo sapien
gaaacagactaattctccgagcgga

SEQ ID NO: 657215 - DNA, 25 bp, Homo sapien
gacctgccttcaaaagctgtctggc

SEQ ID NO: 657216 - DNA, 25 bp, Homo sapien
tgtgtgtgctgcgtagacctgcgcc

SEQ ID NO: 657217 - DNA, 25 bp, Homo sapien
tacagcccagcgtgtttggtctgag

SEQ ID NO: 657218 - DNA, 25 bp, Homo sapien
tttcgttgcacgcagaggcttgggc

SEQ ID NO: 657219 - DNA, 25 bp, Homo sapien
gtgtttagtgcagcagacaccggcc

SEQ ID NO: 657220 - DNA, 25 bp, Homo sapien
tggcagcagccgaagtgaaaaggag

SEQ ID NO: 657221 - DNA, 25 bp, Homo sapien
ctggcagcagccgaagtgaaaagga

SEQ ID NO: 657222 - DNA, 25 bp, Homo sapien
cccgaagggtcagattaaagctggc

SEQ ID NO: 657223 - DNA, 25 bp, Homo sapien
aagaccaccagcttcaaccattggt

SEQ ID NO: 657224 - DNA, 25 bp, Homo sapien
aaccattggtgccttattgcttcgg

SEQ ID NO: 657225 - DNA, 25 bp, Homo sapien
tctgtctcagggaccagagtggcag

SEQ ID NO: 657226 - DNA, 25 bp, Homo sapien
gcagctgtccaaacatgtcggtgag

SEQ ID NO: 657227 - DNA, 25 bp, Homo sapien
gacccattctgaggtggtacagcca

SEQ ID NO: 657228 - DNA, 25 bp, Homo sapien
tagtgtgccgatctactccagctga

SEQ ID NO: 657229 - DNA, 25 bp, Homo sapien
gccacagctcccgtcaagaagagga

SEQ ID NO: 657230 - DNA, 25 bp, Homo sapien
ccttatgaatgaagcgagcacgcca

SEQ ID NO: 657231 - DNA, 25 bp, Homo sapien
tcagcaggattgtcacgaagcaggg

SEQ ID NO: 657232 - DNA, 25 bp, Homo sapien
ccaacattttagagcccagcggcag

SEQ ID NO: 657233 - DNA, 25 bp, Homo sapien
cagttatgccttgcctatgagccca

SEQ ID NO: 657234 - DNA, 25 bp, Homo sapien
gacactagcttgacagcactttgga

SEQ ID NO: 657235 - DNA, 25 bp, Homo sapien
ggtccgtcacgttcctgatgccagg

SEQ ID NO: 657236 - DNA, 25 bp, Homo sapien
gtaacaccagcaaaggacactagct

SEQ ID NO: 657237 - DNA, 25 bp, Homo sapien
aggtgcagacccaacactgacactg

SEQ ID NO: 657238 - DNA, 25 bp, Homo sapien
tctgtcatgcaatggcagcgagtct

SEQ ID NO: 657239 - DNA, 25 bp, Homo sapien
tgatccacctttccctgagatgctg

SEQ ID NO: 657240 - DNA, 25 bp, Homo sapien
ccagttccccgagctgacggattct

SEQ ID NO: 657241 - DNA, 25 bp, Homo sapien
cagcgagtctgggaatgtagcctgt

SEQ ID NO: 657242 - DNA, 25 bp, Homo sapien
gaacaaacatgccagagaacatccc

SEQ ID NO: 657243 - DNA, 25 bp, Homo sapien
gagttctaaagttgacggtactcac

SEQ ID NO: 657244 - DNA, 25 bp, Homo sapien
tctcttcatgcacaaaacgagagta

SEQ ID NO: 657245 - DNA, 25 bp, Homo sapien
caaggatcaagtcctagggctagga

SEQ ID NO: 657246 - DNA, 25 bp, Homo sapien
ggtgaggtgggccaacgccctggcc

SEQ ID NO: 657247 - DNA, 25 bp, Homo sapien
tgggccaacgccctggccaaatgct

SEQ ID NO: 657248 - DNA, 25 bp, Homo sapien
gaggtgggccaacgccctggccaaa

SEQ ID NO: 657249 - DNA, 25 bp, Homo sapien
ggccaacgccctggccaaatgctgg

SEQ ID NO: 657250 - DNA, 25 bp, Homo sapien
agtgcactcagatcctcgtcgcagg

SEQ ID NO: 657251 - DNA, 25 bp, Homo sapien
ttctgggaggtcttgggcatcatcc

SEQ ID NO: 657252 - DNA, 25 bp, Homo sapien
tttctccccatcactaagtgaatcc

SEQ ID NO: 657253 - DNA, 25 bp, Homo sapien
tgcccctacccagtgctttctggaa

SEQ ID NO: 657254 - DNA, 25 bp, Homo sapien
tgcatggttttgatgaaaggtcctc

SEQ ID NO: 657255 - DNA, 25 bp, Homo sapien
aaggcgctgacccattgcctgtcca

SEQ ID NO: 657256 - DNA, 25 bp, Homo sapien
ttttctcgcaacttcgaaggcgctg

SEQ ID NO: 657257 - DNA, 25 bp, Homo sapien
ctcttggccatctgcgggctccaaa

SEQ ID NO: 657258 - DNA, 25 bp, Homo sapien
tacagaagttgtgataacacctcgc

SEQ ID NO: 657259 - DNA, 25 bp, Homo sapien
tgttgacaatagtctgatgccttgg

SEQ ID NO: 657260 - DNA, 25 bp, Homo sapien
ttgtgataacacctcgcaggcttgt

SEQ ID NO: 657261 - DNA, 25 bp, Homo sapien
acacctcgcaggcttgttgacaata

SEQ ID NO: 657262 - DNA, 25 bp, Homo sapien
ggcttgccgtcagcgggtcttcaca

SEQ ID NO: 657263 - DNA, 25 bp, Homo sapien
tgtctcgcccactggttacacgttg

SEQ ID NO: 657264 - DNA, 25 bp, Homo sapien
ggtcttcacaggagattgtgccctg

SEQ ID NO: 657265 - DNA, 25 bp, Homo sapien
tccttcaaggcagctttgtctcgcc

SEQ ID NO: 657266 - DNA, 25 bp, Homo sapien
gatgttttctgctggcttgtgtgta

SEQ ID NO: 657267 - DNA, 25 bp, Homo sapien
atgggaaccattgccagttctgaag

SEQ ID NO: 657268 - DNA, 25 bp, Homo sapien
tctgctggcttgtgtgtagacacct

SEQ ID NO: 657269 - DNA, 25 bp, Homo sapien
caccatagttgtttgccgatgtttt

SEQ ID NO: 657270 - DNA, 25 bp, Homo sapien
acaccaccagggcttattgtgcttc

SEQ ID NO: 657271 - DNA, 25 bp, Homo sapien
ccaccagggcttattgtgcttctcc

SEQ ID NO: 657272 - DNA, 25 bp, Homo sapien
gaggaccaccgcatctgtcagttgt

SEQ ID NO: 657273 - DNA, 25 bp, Homo sapien
ttgagcagtagaggaccaccgcatc

SEQ ID NO: 657274 - DNA, 25 bp, Homo sapien
tgctgcgagaccaccttcatcgagg

SEQ ID NO: 657275 - DNA, 25 bp, Homo sapien
aacaccctgcagcagtcagtggagt

SEQ ID NO: 657276 - DNA, 25 bp, Homo sapien
cctctattcagagggcgtgctgcgc

SEQ ID NO: 657277 - DNA, 25 bp, Homo sapien
cagaaacttgatggccgagagcaga

SEQ ID NO: 657278 - DNA, 25 bp, Homo sapien
cagacctgaagtacatgacggtcac

SEQ ID NO: 657279 - DNA, 25 bp, Homo sapien
ctcagacctgaagtacatgacggtc

SEQ ID NO: 657280 - DNA, 25 bp, Homo sapien
acctgaagtacatgacggtcaccac

SEQ ID NO: 657281 - DNA, 25 bp, Homo sapien
gacctgaagtacatgacggtcacca

SEQ ID NO: 657282 - DNA, 25 bp, Homo sapien
gcacttggccatcgaatcctcgaag

SEQ ID NO: 657283 - DNA, 25 bp, Homo sapien
gccatcgaatcctcgaagcgcttgg

SEQ ID NO: 657284 - DNA, 25 bp, Homo sapien
tgccacgccctccaagtgcacttgg

SEQ ID NO: 657285 - DNA, 25 bp, Homo sapien
cctccaagtgcacttggccatcgaa

SEQ ID NO: 657286 - DNA, 25 bp, Homo sapien
aaaatccaaaggtgagcccagcttt

SEQ ID NO: 657287 - DNA, 25 bp, Homo sapien
taatatgttacaggccatgaggctg

SEQ ID NO: 657288 - DNA, 25 bp, Homo sapien
gtattaatcatgctacacaacaggg

SEQ ID NO: 657289 - DNA, 25 bp, Homo sapien
gggtgcatcacaagctctcatatgt

SEQ ID NO: 657290 - DNA, 25 bp, Homo sapien
cagatgaagaacaagctcatcgatc

SEQ ID NO: 657291 - DNA, 25 bp, Homo sapien
agatgaagaacaagctcatcgatct

SEQ ID NO: 657292 - DNA, 25 bp, Homo sapien
tacagatgaagaacaagctcatcga

SEQ ID NO: 657293 - DNA, 25 bp, Homo sapien
ttacagatgaagaacaagctcatcg

SEQ ID NO: 657294 - DNA, 25 bp, Homo sapien
cttggtacaaatggtacacgtggct

SEQ ID NO: 657295 - DNA, 25 bp, Homo sapien
acttggtacaaatggtacacgtggc

SEQ ID NO: 657296 - DNA, 25 bp, Homo sapien
tcattcacaagttgaggaaagagga

SEQ ID NO: 657297 - DNA, 25 bp, Homo sapien
atgtgttctcattcacaagttgagg

SEQ ID NO: 657298 - DNA, 25 bp, Homo sapien
aaagtgtgctgaatgattcttgcct

SEQ ID NO: 657299 - DNA, 25 bp, Homo sapien
gctgaatgattcttgcctgggctca

SEQ ID NO: 657300 - DNA, 25 bp, Homo sapien
acattgtcctgatcacctccgtgga

SEQ ID NO: 657301 - DNA, 25 bp, Homo sapien
tatggcgcacattgtcctgatcacc

SEQ ID NO: 657302 - DNA, 25 bp, Homo sapien
gccagcggccaaaccaatgagaggt

SEQ ID NO: 657303 - DNA, 25 bp, Homo sapien
caaaccaatgagaggtatggcgcac

SEQ ID NO: 657304 - DNA, 25 bp, Homo sapien
agggctggtgactttggccactgcc

SEQ ID NO: 657305 - DNA, 25 bp, Homo sapien
cagatttaaggctctcaaactgcag

SEQ ID NO: 657306 - DNA, 25 bp, Homo sapien
tgtgccacatcttcggcagctggct

SEQ ID NO: 657307 - DNA, 25 bp, Homo sapien
gatgcagatttaaggctctcaaact

SEQ ID NO: 657308 - DNA, 25 bp, Homo sapien
ccactctggagtaaggtggttctca

SEQ ID NO: 657309 - DNA, 25 bp, Homo sapien
cccactctggagtaaggtggttctc

SEQ ID NO: 657310 - DNA, 25 bp, Homo sapien
tcccactctggagtaaggtggttct

SEQ ID NO: 657311 - DNA, 25 bp, Homo sapien
cactctggagtaaggtggttctcat

SEQ ID NO: 657312 - DNA, 25 bp, Homo sapien
ctttgacctgaatcacgtagtgatc

SEQ ID NO: 657313 - DNA, 25 bp, Homo sapien
cacccatctgtttggcagcggtgat

SEQ ID NO: 657314 - DNA, 25 bp, Homo sapien
gaagaccaaggtatgcatctgttca

SEQ ID NO: 657315 - DNA, 25 bp, Homo sapien
tttggcccaccctgtcattgaagac

SEQ ID NO: 657316 - DNA, 25 bp, Homo sapien
cggaagcatgtttatgcatgtagct

SEQ ID NO: 657317 - DNA, 25 bp, Homo sapien
cctgtgtccacgcaacgattccgga

SEQ ID NO: 657318 - DNA, 25 bp, Homo sapien
ccaaaagggatattgtaagtggtca

SEQ ID NO: 657319 - DNA, 25 bp, Homo sapien
acgattccggatcacccgccgtggg

SEQ ID NO: 657320 - DNA, 25 bp, Homo sapien
catgtaagtgttctttgcttggtgc

SEQ ID NO: 657321 - DNA, 25 bp, Homo sapien
tttgccttgtcaagaagggctgggt

SEQ ID NO: 657322 - DNA, 25 bp, Homo sapien
gtatttgcccagatgcatgtaagtg

SEQ ID NO: 657323 - DNA, 25 bp, Homo sapien
tgcccaggaagacggagatggatcc

SEQ ID NO: 657324 - DNA, 25 bp, Homo sapien
cagtgaaaggcctgccctctgcact

SEQ ID NO: 657325 - DNA, 25 bp, Homo sapien
cctctggcagtgaaaggcctgccct

SEQ ID NO: 657326 - DNA, 25 bp, Homo sapien
gcagtgaaaggcctgccctctgcac

SEQ ID NO: 657327 - DNA, 25 bp, Homo sapien
tgcctcccctctggcagtgaaaggc

SEQ ID NO: 657328 - DNA, 25 bp, Homo sapien
cacaggagctgatttgcggggagca

SEQ ID NO: 657329 - DNA, 25 bp, Homo sapien
tccccaccgaacctccgtgctcctg

SEQ ID NO: 657330 - DNA, 25 bp, Homo sapien
ccccaccgaacctccgtgctcctgg

SEQ ID NO: 657331 - DNA, 25 bp, Homo sapien
cagccgtccccaccgaacctccgtg

SEQ ID NO: 657332 - DNA, 25 bp, Homo sapien
cccgcaaggctgtctctggatggat

SEQ ID NO: 657333 - DNA, 25 bp, Homo sapien
cgccttccctgcaagacgagaatgg

SEQ ID NO: 657334 - DNA, 25 bp, Homo sapien
aaaggaaagctccaaagatcccagc

SEQ ID NO: 657335 - DNA, 25 bp, Homo sapien
tatggaatacggtgcaataggcaga

SEQ ID NO: 657336 - DNA, 25 bp, Homo sapien
tccagcgttgcaggtgcgttggcct

SEQ ID NO: 657337 - DNA, 25 bp, Homo sapien
ccaggtccagcgttgcaggtgcgtt

SEQ ID NO: 657338 - DNA, 25 bp, Homo sapien
gactgagctactgctgtggtccccg

SEQ ID NO: 657339 - DNA, 25 bp, Homo sapien
accactgaccgcttactctcgaaga

SEQ ID NO: 657340 - DNA, 25 bp, Homo sapien
gctgtgatgggagtgatcagcagac

SEQ ID NO: 657341 - DNA, 25 bp, Homo sapien
cagcagaccgggttggaaaacactg

SEQ ID NO: 657342 - DNA, 25 bp, Homo sapien
gggtgggtccccacgggctgtgatg

SEQ ID NO: 657343 - DNA, 25 bp, Homo sapien
ggtgggtccccacgggctgtgatgg

SEQ ID NO: 657344 - DNA, 25 bp, Homo sapien
ccacagatgccagagagtcagaacc

SEQ ID NO: 657345 - DNA, 25 bp, Homo sapien
ggtgtggggggcaccctgagcaccc

SEQ ID NO: 657346 - DNA, 25 bp, Homo sapien
tgtggggggcaccctgagcacccac

SEQ ID NO: 657347 - DNA, 25 bp, Homo sapien
tggggggcaccctgagcacccaccc

SEQ ID NO: 657348 - DNA, 25 bp, Homo sapien
gggcaccctgagcacccacccccga

SEQ ID NO: 657349 - DNA, 25 bp, Homo sapien
cggaggatggacgtgcagggatgag

SEQ ID NO: 657350 - DNA, 25 bp, Homo sapien
aggatggacgtgcagggatgagggc

SEQ ID NO: 657351 - DNA, 25 bp, Homo sapien
tcagatgtgggtgcggaggatggac

SEQ ID NO: 657352 - DNA, 25 bp, Homo sapien
tgggtgcggaggatggacgtgcagg

SEQ ID NO: 657353 - DNA, 25 bp, Homo sapien
catttcctgaagacgttgcgggacc

SEQ ID NO: 657354 - DNA, 25 bp, Homo sapien
tccatttcctgaagacgttgcggga

SEQ ID NO: 657355 - DNA, 25 bp, Homo sapien
tttcctgaagacgttgcgggacctc

SEQ ID NO: 657356 - DNA, 25 bp, Homo sapien
ttcctgaagacgttgcgggacctcc

SEQ ID NO: 657357 - DNA, 25 bp, Homo sapien
gttgctggctcctttccgagttacc

SEQ ID NO: 657358 - DNA, 25 bp, Homo sapien
cctacatcagccttgcttgttagct

SEQ ID NO: 657359 - DNA, 25 bp, Homo sapien
tcagctttcagatgcatgtcctaca

SEQ ID NO: 657360 - DNA, 25 bp, Homo sapien
ttgttgctggctcctttccgagtta

SEQ ID NO: 657361 - DNA, 25 bp, Homo sapien
ccctggcctgcttcaacacaatgtg

SEQ ID NO: 657362 - DNA, 25 bp, Homo sapien
tccctggcctgcttcaacacaatgt

SEQ ID NO: 657363 - DNA, 25 bp, Homo sapien
cctggcctgcttcaacacaatgtgc

SEQ ID NO: 657364 - DNA, 25 bp, Homo sapien
gaggctagaataattccccggcact

SEQ ID NO: 657365 - DNA, 25 bp, Homo sapien
gcactgggcatagcgctcttggaga

SEQ ID NO: 657366 - DNA, 25 bp, Homo sapien
attccccggcactgggcatagcgct

SEQ ID NO: 657367 - DNA, 25 bp, Homo sapien
catagcgctcttggagaagaaaatg

SEQ ID NO: 657368 - DNA, 25 bp, Homo sapien
cagagggtggtagttaggcaggttg

SEQ ID NO: 657369 - DNA, 25 bp, Homo sapien
cacacagggtggtagttattcgagg

SEQ ID NO: 657370 - DNA, 25 bp, Homo sapien
tggcagtcacacagggtggtagtta

SEQ ID NO: 657371 - DNA, 25 bp, Homo sapien
tttcggagtggtagttattcagagg

SEQ ID NO: 657372 - DNA, 25 bp, Homo sapien
aggagcccatgaggccccttcgagg

SEQ ID NO: 657373 - DNA, 25 bp, Homo sapien
gtggttgctgtcaggatgtggctgc

SEQ ID NO: 657374 - DNA, 25 bp, Homo sapien
ggctcaatcgatgggaaagtacccc

SEQ ID NO: 657375 - DNA, 25 bp, Homo sapien
cccagcacggatggcccaaaagtgg

SEQ ID NO: 657376 - DNA, 25 bp, Homo sapien
tctctcgttttttctcggctgagaa

SEQ ID NO: 657377 - DNA, 25 bp, Homo sapien
ctcggctgagaacccaacaagggct

SEQ ID NO: 657378 - DNA, 25 bp, Homo sapien
tagggcagggcgttgaagccatttc

SEQ ID NO: 657379 - DNA, 25 bp, Homo sapien
atctctggctcatggatgcttttct

SEQ ID NO: 657380 - DNA, 25 bp, Homo sapien
gttcggagaccctgtggacattgtg

SEQ ID NO: 657381 - DNA, 25 bp, Homo sapien
tgatgaggctccaaaactggcccca

SEQ ID NO: 657382 - DNA, 25 bp, Homo sapien
tgtggacattgtgatgaggctccaa

SEQ ID NO: 657383 - DNA, 25 bp, Homo sapien
tgatccttcccagttcggagaccct

SEQ ID NO: 657384 - DNA, 25 bp, Homo sapien
gctgctctgaggagtgtagggcctg

SEQ ID NO: 657385 - DNA, 25 bp, Homo sapien
cacacggagacatctgccagtgggc

SEQ ID NO: 657386 - DNA, 25 bp, Homo sapien
acatctgccagtgggcgtcttgctg

SEQ ID NO: 657387 - DNA, 25 bp, Homo sapien
ctgaggagtgtagggcctgggcctt

SEQ ID NO: 657388 - DNA, 25 bp, Homo sapien
gaaggaggcgttctggtcatcacaa

SEQ ID NO: 657389 - DNA, 25 bp, Homo sapien
aggaggcgttctggtcatcacaaca

SEQ ID NO: 657390 - DNA, 25 bp, Homo sapien
ggcgttctggtcatcacaacagaat

SEQ ID NO: 657391 - DNA, 25 bp, Homo sapien
tgagaaggaggcgttctggtcatca

SEQ ID NO: 657392 - DNA, 25 bp, Homo sapien
ttcaatctgggtcagagggcaggct

SEQ ID NO: 657393 - DNA, 25 bp, Homo sapien
tgcatgtgctcagccttctgcggca

SEQ ID NO: 657394 - DNA, 25 bp, Homo sapien
gcagtaggcatatgtggaactctct

SEQ ID NO: 657395 - DNA, 25 bp, Homo sapien
ggacccctgagtacaagcagtgctt

SEQ ID NO: 657396 - DNA, 25 bp, Homo sapien
gagtgggtagacacccaacattcgt

SEQ ID NO: 657397 - DNA, 25 bp, Homo sapien
caacattcgtatgcacagccacgta

SEQ ID NO: 657398 - DNA, 25 bp, Homo sapien
cagccacgtaatgtggtcatcagca

SEQ ID NO: 657399 - DNA, 25 bp, Homo sapien
aggaccaggagtgggtagacaccca

SEQ ID NO: 657400 - DNA, 25 bp, Homo sapien
ccgccacatgctgagccgcccctgc

SEQ ID NO: 657401 - DNA, 25 bp, Homo sapien
tgagccgcccccgccacatgctgag

SEQ ID NO: 657402 - DNA, 25 bp, Homo sapien
gccacatgctgagccgcccctgccc

SEQ ID NO: 657403 - DNA, 25 bp, Homo sapien
ccccgccacatgctgagccgcccct

SEQ ID NO: 657404 - DNA, 25 bp, Homo sapien
acaggccctcgggactctgaggcaa

SEQ ID NO: 657405 - DNA, 25 bp, Homo sapien
accagggcgattggggaggtcttca

SEQ ID NO: 657406 - DNA, 25 bp, Homo sapien
tctgaggcaagctggcattggaaag

SEQ ID NO: 657407 - DNA, 25 bp, Homo sapien
ggaaagccactgaaccagggcgatt

SEQ ID NO: 657408 - DNA, 25 bp, Homo sapien
atggttggcaggcccgggcgtctct

SEQ ID NO: 657409 - DNA, 25 bp, Homo sapien
cctctttgccccatcggcaacccca

SEQ ID NO: 657410 - DNA, 25 bp, Homo sapien
gttggcaggcccgggcgtctctctc

SEQ ID NO: 657411 - DNA, 25 bp, Homo sapien
tcatggttggcaggcccgggcgtct

SEQ ID NO: 657412 - DNA, 25 bp, Homo sapien
aggctgatggcccatcgcaaggtgt

SEQ ID NO: 657413 - DNA, 25 bp, Homo sapien
tttaaaaagtcactcaggcctgaga

SEQ ID NO: 657414 - DNA, 25 bp, Homo sapien
ttaaaaagtcactcaggcctgagag

SEQ ID NO: 657415 - DNA, 25 bp, Homo sapien
gatggcccatcgcaaggtgtctgtg

SEQ ID NO: 657416 - DNA, 25 bp, Homo sapien
cgtggagagtgttcctagaagcagc

SEQ ID NO: 657417 - DNA, 25 bp, Homo sapien
agcgtggagagtgttcctagaagca

SEQ ID NO: 657418 - DNA, 25 bp, Homo sapien
cagcgtggagagtgttcctagaagc

SEQ ID NO: 657419 - DNA, 25 bp, Homo sapien
gtggagagtgttcctagaagcagcc

SEQ ID NO: 657420 - DNA, 25 bp, Homo sapien
gatggcgcttggtatcctgtcctga

SEQ ID NO: 657421 - DNA, 25 bp, Homo sapien
ggtggctccttgtagacctgatggc

SEQ ID NO: 657422 - DNA, 25 bp, Homo sapien
gcttgtggacctgatggtgctcaca

SEQ ID NO: 657423 - DNA, 25 bp, Homo sapien
cccctgttcctgagaactccaaggc

SEQ ID NO: 657424 - DNA, 25 bp, Homo sapien
gccacaagacccggagttgaggcca

SEQ ID NO: 657425 - DNA, 25 bp, Homo sapien
tttgaatctttgatactccacagag

SEQ ID NO: 657426 - DNA, 25 bp, Homo sapien
acaagacccggagttgaggccacat

SEQ ID NO: 657427 - DNA, 25 bp, Homo sapien
cacaagacccggagttgaggccaca

SEQ ID NO: 657428 - DNA, 25 bp, Homo sapien
tgcacagtcccggggaggttgtgct

SEQ ID NO: 657429 - DNA, 25 bp, Homo sapien
cagtcccggggaggttgtgctccag

SEQ ID NO: 657430 - DNA, 25 bp, Homo sapien
ctgcacagtcccggggaggttgtgc

SEQ ID NO: 657431 - DNA, 25 bp, Homo sapien
cacagtcccggggaggttgtgctcc

SEQ ID NO: 657432 - DNA, 25 bp, Homo sapien
tgaggacgcccagatgaagacggca

SEQ ID NO: 657433 - DNA, 25 bp, Homo sapien
gaggctcccagattgtcctccaggg

SEQ ID NO: 657434 - DNA, 25 bp, Homo sapien
ttctcggaatcagcagagcacctcg

SEQ ID NO: 657435 - DNA, 25 bp, Homo sapien
ggcttgaagccaggttttcctctcc

SEQ ID NO: 657436 - DNA, 25 bp, Homo sapien
tgtaatttgacgtagtgttttactg

SEQ ID NO: 657437 - DNA, 25 bp, Homo sapien
tccagccgtcccagtgcaggcacaa

SEQ ID NO: 657438 - DNA, 25 bp, Homo sapien
ggtgttactgagcagactcctccag

SEQ ID NO: 657439 - DNA, 25 bp, Homo sapien
gcaggtggggtgttactgagcagac

SEQ ID NO: 657440 - DNA, 25 bp, Homo sapien
tcctccagccgtcccagtgcaggca

SEQ ID NO: 657441 - DNA, 25 bp, Homo sapien
accgtcctcccgcatctccatgaga

SEQ ID NO: 657442 - DNA, 25 bp, Homo sapien
ccgtcctcccgcatctccatgagaa

SEQ ID NO: 657443 - DNA, 25 bp, Homo sapien
ccaccgtcctcccgcatctccatga

SEQ ID NO: 657444 - DNA, 25 bp, Homo sapien
cgtcctcccgcatctccatgagaag

SEQ ID NO: 657445 - DNA, 25 bp, Homo sapien
gagatgatgaggcttcctgcggggc

SEQ ID NO: 657446 - DNA, 25 bp, Homo sapien
agaggccaacgtggctccctttcca

SEQ ID NO: 657447 - DNA, 25 bp, Homo sapien
ggctgtaggccgtaggccacccctc

SEQ ID NO: 657448 - DNA, 25 bp, Homo sapien
tctgaaccgccttgcagagatgatg

SEQ ID NO: 657449 - DNA, 25 bp, Homo sapien
gactccaggggtcacgacagcaaag

SEQ ID NO: 657450 - DNA, 25 bp, Homo sapien
ggtcacgacagcaaagatccagttc

SEQ ID NO: 657451 - DNA, 25 bp, Homo sapien
tatatttcatggccgttggggggca

SEQ ID NO: 657452 - DNA, 25 bp, Homo sapien
gcattgcgtggtgtccacatggact

SEQ ID NO: 657453 - DNA, 25 bp, Homo sapien
gctgtgggctgtgtgatcatgtggg

SEQ ID NO: 657454 - DNA, 25 bp, Homo sapien
gctgtgtgatcatgtgggggctgcg

SEQ ID NO: 657455 - DNA, 25 bp, Homo sapien
tgggggctgcgggctgtgagatcac

SEQ ID NO: 657456 - DNA, 25 bp, Homo sapien
gtgggctgtgtgatcatgtgggggc

SEQ ID NO: 657457 - DNA, 25 bp, Homo sapien
gagtacactgatacacctgggttga

SEQ ID NO: 657458 - DNA, 25 bp, Homo sapien
tgagggagtacactgatacacctgg

SEQ ID NO: 657459 - DNA, 25 bp, Homo sapien
ggtcactaaggttgagggagtacac

SEQ ID NO: 657460 - DNA, 25 bp, Homo sapien
tacacctgggttgacatggctgtca

SEQ ID NO: 657461 - DNA, 25 bp, Homo sapien
agagctgtttgggacttgggaacca

SEQ ID NO: 657462 - DNA, 25 bp, Homo sapien
cctggacatcagaggccacaaagtc

SEQ ID NO: 657463 - DNA, 25 bp, Homo sapien
agtctgtgcagttgccccggttggt

SEQ ID NO: 657464 - DNA, 25 bp, Homo sapien
ttggaataagtgcacacgctcagct

SEQ ID NO: 657465 - DNA, 25 bp, Homo sapien
ctgtgggttgtgaatgattgcaggg

SEQ ID NO: 657466 - DNA, 25 bp, Homo sapien
caggggggctgcggatcaataaatg

SEQ ID NO: 657467 - DNA, 25 bp, Homo sapien
gtgaatgattgcaggggggctgcgg

SEQ ID NO: 657468 - DNA, 25 bp, Homo sapien
gttgtgaatgattgcaggggggctg

SEQ ID NO: 657469 - DNA, 25 bp, Homo sapien
gacagcatgaggcatagagtttaga

SEQ ID NO: 657470 - DNA, 25 bp, Homo sapien
gaggcatagagtttagatgttcagc

SEQ ID NO: 657471 - DNA, 25 bp, Homo sapien
agtcctccagaggtaacatgataag

SEQ ID NO: 657472 - DNA, 25 bp, Homo sapien
acatgataaggaccgagaacaaacc

SEQ ID NO: 657473 - DNA, 25 bp, Homo sapien
catgctggcatcttttttagataaa

SEQ ID NO: 657474 - DNA, 25 bp, Homo sapien
ccaaaaggttgtgccgccctgagca

SEQ ID NO: 657475 - DNA, 25 bp, Homo sapien
accatgctggcatcttttttagata

SEQ ID NO: 657476 - DNA, 25 bp, Homo sapien
aaaaggttgtgccgccctgagcagc

SEQ ID NO: 657477 - DNA, 25 bp, Homo sapien
ttgacccgaggtggatcccgttagc

SEQ ID NO: 657478 - DNA, 25 bp, Homo sapien
cccgaggtggatcccgttagcagcc

SEQ ID NO: 657479 - DNA, 25 bp, Homo sapien
ctctgcggggcgatcccctctgctt

SEQ ID NO: 657480 - DNA, 25 bp, Homo sapien
cttcttgacccgaggtggatcccgt

SEQ ID NO: 657481 - DNA, 25 bp, Homo sapien
tctgcggttctctgggtcgcgctca

SEQ ID NO: 657482 - DNA, 25 bp, Homo sapien
ctgcggttctctgggtcgcgctcag

SEQ ID NO: 657483 - DNA, 25 bp, Homo sapien
gcggttctctgggtcgcgctcagca

SEQ ID NO: 657484 - DNA, 25 bp, Homo sapien
ctctgcggttctctgggtcgcgctc

SEQ ID NO: 657485 - DNA, 25 bp, Homo sapien
gccctggttgcccttctcagggaga

SEQ ID NO: 657486 - DNA, 25 bp, Homo sapien
ttcatagccctggttgcccttctca

SEQ ID NO: 657487 - DNA, 25 bp, Homo sapien
tgtacccacagcttgggtgggacag

SEQ ID NO: 657488 - DNA, 25 bp, Homo sapien
gtagtggtcgagagatgatgtaccc

SEQ ID NO: 657489 - DNA, 25 bp, Homo sapien
tggtgtcctggcttccggcctgtga

SEQ ID NO: 657490 - DNA, 25 bp, Homo sapien
ggcatacttgttccagacaaggctt

SEQ ID NO: 657491 - DNA, 25 bp, Homo sapien
ggttatcagagccatacttcttgtt

SEQ ID NO: 657492 - DNA, 25 bp, Homo sapien
gcttccggcctgtgaagggttatca

SEQ ID NO: 657493 - DNA, 25 bp, Homo sapien
cagagagaacctgaacactgattgc

SEQ ID NO: 657494 - DNA, 25 bp, Homo sapien
gatgttcccgaaagctaggtgccga

SEQ ID NO: 657495 - DNA, 25 bp, Homo sapien
cactgattgcaagtagagcctccaa

SEQ ID NO: 657496 - DNA, 25 bp, Homo sapien
gagcctccaaaatccttatctttgt

SEQ ID NO: 657497 - DNA, 25 bp, Homo sapien
tgttgtctcgaatccatccccgttc

SEQ ID NO: 657498 - DNA, 25 bp, Homo sapien
caccagcgtagatgcctgagtgttg

SEQ ID NO: 657499 - DNA, 25 bp, Homo sapien
acagccaccagcgtagatgcctgag

SEQ ID NO: 657500 - DNA, 25 bp, Homo sapien
gatgcctgagtgttgtctcgaatcc

SEQ ID NO: 657501 - DNA, 25 bp, Homo sapien
tagacactccctgtaagaaatgctg

SEQ ID NO: 657502 - DNA, 25 bp, Homo sapien
actttaggacgttgcatgtaatccc

SEQ ID NO: 657503 - DNA, 25 bp, Homo sapien
aaactgtcctataaaagtgagggag

SEQ ID NO: 657504 - DNA, 25 bp, Homo sapien
cactagacagtaatttgaaggcaca

SEQ ID NO: 657505 - DNA, 25 bp, Homo sapien
tgctggagtttatgacctgggtttg

SEQ ID NO: 657506 - DNA, 25 bp, Homo sapien
tgtcacagggaattcaaggcaggct

SEQ ID NO: 657507 - DNA, 25 bp, Homo sapien
tgaaagacctcagtcttgtgcctca

SEQ ID NO: 657508 - DNA, 25 bp, Homo sapien
ccagttatagctacagaaaacagac

SEQ ID NO: 657509 - DNA, 25 bp, Homo sapien
agacgtgagccacctaaagtcttct

SEQ ID NO: 657510 - DNA, 25 bp, Homo sapien
agtcccagggcatgccagcgcagga

SEQ ID NO: 657511 - DNA, 25 bp, Homo sapien
agtcttcttaagcaaaggctgcagc

SEQ ID NO: 657512 - DNA, 25 bp, Homo sapien
cactaattagtgtgaaggacagtcc

SEQ ID NO: 657513 - DNA, 25 bp, Homo sapien
catgaccagtgtgtagacatacttg

SEQ ID NO: 657514 - DNA, 25 bp, Homo sapien
aaaatcatgaccagtgtgtagacat

SEQ ID NO: 657515 - DNA, 25 bp, Homo sapien
cagtgtgtagacatacttgtgaaaa

SEQ ID NO: 657516 - DNA, 25 bp, Homo sapien
gtagacatacttgtgaaaatataca

SEQ ID NO: 657517 - DNA, 25 bp, Homo sapien
acacgtgcactgttcacatcttggg

SEQ ID NO: 657518 - DNA, 25 bp, Homo sapien
gacattaacacgtgcactgttcaca

SEQ ID NO: 657519 - DNA, 25 bp, Homo sapien
taacacgtgcactgttcacatcttg

SEQ ID NO: 657520 - DNA, 25 bp, Homo sapien
aagatgacattaacacgtgcactgt

SEQ ID NO: 657521 - DNA, 25 bp, Homo sapien
ctctcagggactaacaggtgcatgt

SEQ ID NO: 657522 - DNA, 25 bp, Homo sapien
catgtcttggctaacacggctctca

SEQ ID NO: 657523 - DNA, 25 bp, Homo sapien
cagtaggtcccgaattgcagaatca

SEQ ID NO: 657524 - DNA, 25 bp, Homo sapien
cacaacgaagaaaggtatgaccgca

SEQ ID NO: 657525 - DNA, 25 bp, Homo sapien
gctgagtctgcagaggaagggggac

SEQ ID NO: 657526 - DNA, 25 bp, Homo sapien
ctaaacagcctggaggctgagtctg

SEQ ID NO: 657527 - DNA, 25 bp, Homo sapien
gaggctgagtctgcagaggaagggg

SEQ ID NO: 657528 - DNA, 25 bp, Homo sapien
taaacagcctggaggctgagtctgc

SEQ ID NO: 657529 - DNA, 25 bp, Homo sapien
agttctaggacgaggctgtaccgcg

SEQ ID NO: 657530 - DNA, 25 bp, Homo sapien
ggatcatgcaggcttctccggaagg

SEQ ID NO: 657531 - DNA, 25 bp, Homo sapien
tgttcgtgcacctcgctgatgtagg

SEQ ID NO: 657532 - DNA, 25 bp, Homo sapien
gcaccgctgtcgctgagttctagga

SEQ ID NO: 657533 - DNA, 25 bp, Homo sapien
cagggaaagttcaccagctggccaa

SEQ ID NO: 657534 - DNA, 25 bp, Homo sapien
aacactgtgcgcagatcaaccgtgc

SEQ ID NO: 657535 - DNA, 25 bp, Homo sapien
tgaagatcaggccaaagaggctccc

SEQ ID NO: 657536 - DNA, 25 bp, Homo sapien
tatcacatccgacgtggtcacagca

SEQ ID NO: 657537 - DNA, 25 bp, Homo sapien
tcaaagcggggcgtgcagatcctga

SEQ ID NO: 657538 - DNA, 25 bp, Homo sapien
actgctttcctcaaagcggggcgtg

SEQ ID NO: 657539 - DNA, 25 bp, Homo sapien
gatttgagagcagctcacattcaaa

SEQ ID NO: 657540 - DNA, 25 bp, Homo sapien
atttcaaataggcaaggtgcaaatg

SEQ ID NO: 657541 - DNA, 25 bp, Homo sapien
tcacagcccttgaggcgaaaggcag

SEQ ID NO: 657542 - DNA, 25 bp, Homo sapien
caagtgtccaacgaataatgtctcc

SEQ ID NO: 657543 - DNA, 25 bp, Homo sapien
catgcaagtgaggaggtgtacaccc

SEQ ID NO: 657544 - DNA, 25 bp, Homo sapien
tggcagaccatggtgacccagacaa

SEQ ID NO: 657545 - DNA, 25 bp, Homo sapien
tagggcggatggtcgacatgcccac

SEQ ID NO: 657546 - DNA, 25 bp, Homo sapien
aatccagggtctctcagataagaaa

SEQ ID NO: 657547 - DNA, 25 bp, Homo sapien
atccagggtctctcagataagaaat

SEQ ID NO: 657548 - DNA, 25 bp, Homo sapien
ccagggttagggcggatggtcgaca

SEQ ID NO: 657549 - DNA, 25 bp, Homo sapien
cgcccttcatcaggccagaaacgta

SEQ ID NO: 657550 - DNA, 25 bp, Homo sapien
cttcatcaggccagaaacgtagact

SEQ ID NO: 657551 - DNA, 25 bp, Homo sapien
ctgggccggatgttgtctggaaatc

SEQ ID NO: 657552 - DNA, 25 bp, Homo sapien
atccaggcatgttctccacaaacag

SEQ ID NO: 657553 - DNA, 25 bp, Homo sapien
tccctggtcacagtatcatactcca

SEQ ID NO: 657554 - DNA, 25 bp, Homo sapien
caggagacagctggactccattcgg

SEQ ID NO: 657555 - DNA, 25 bp, Homo sapien
gcaggagacagctggactccattcg

SEQ ID NO: 657556 - DNA, 25 bp, Homo sapien
acttttacttccctggtcacagtat

SEQ ID NO: 657557 - DNA, 25 bp, Homo sapien
gactccgcctcaccccggagcaaca

SEQ ID NO: 657558 - DNA, 25 bp, Homo sapien
tgaagaaggtgactccgcctcaccc

SEQ ID NO: 657559 - DNA, 25 bp, Homo sapien
cctgaagaaggtgactccgcctcac

SEQ ID NO: 657560 - DNA, 25 bp, Homo sapien
cagagggttatgggggagaatccct

SEQ ID NO: 657561 - DNA, 25 bp, Homo sapien
gcccgtcatctgtgccctccatcac

SEQ ID NO: 657562 - DNA, 25 bp, Homo sapien
cgcccgtcatctgtgccctccatca

SEQ ID NO: 657563 - DNA, 25 bp, Homo sapien
gaagcaggtagtctcgtctttgcca

SEQ ID NO: 657564 - DNA, 25 bp, Homo sapien
ctttgccatttgctgctagaatcgg

SEQ ID NO: 657565 - DNA, 25 bp, Homo sapien
tcaatgggtgtctcggaggacagca

SEQ ID NO: 657566 - DNA, 25 bp, Homo sapien
tgtaagatcattcacaaaggacatg

SEQ ID NO: 657567 - DNA, 25 bp, Homo sapien
gacacacagcacgtattacagcctg

SEQ ID NO: 657568 - DNA, 25 bp, Homo sapien
aacaaatagacaagacgcagagaga

SEQ ID NO: 657569 - DNA, 25 bp, Homo sapien
tgcagggcctatgttcgggccccca

SEQ ID NO: 657570 - DNA, 25 bp, Homo sapien
tcaaggggactcatgagcaatcagg

SEQ ID NO: 657571 - DNA, 25 bp, Homo sapien
tccagggatttacttcaaatagtcc

SEQ ID NO: 657572 - DNA, 25 bp, Homo sapien
attgggccctgcacggatacccagg

SEQ ID NO: 657573 - DNA, 25 bp, Homo sapien
aaatagtcccttgtatgcatcggcc

SEQ ID NO: 657574 - DNA, 25 bp, Homo sapien
cacaaagagagtcccattgggccct

SEQ ID NO: 657575 - DNA, 25 bp, Homo sapien
tcaagttttacgacccggccatctg

SEQ ID NO: 657576 - DNA, 25 bp, Homo sapien
aaccaaaccgggcaatggtctctat

SEQ ID NO: 657577 - DNA, 25 bp, Homo sapien
tctgctgtcccagtaaacatcacat

SEQ ID NO: 657578 - DNA, 25 bp, Homo sapien
cgggcaatggtctctatttcaccat

SEQ ID NO: 657579 - DNA, 25 bp, Homo sapien
cctggtgacaaagtacaatgagaag

SEQ ID NO: 657580 - DNA, 25 bp, Homo sapien
ctgggacctggtgacaaagtacaat

SEQ ID NO: 657581 - DNA, 25 bp, Homo sapien
agaaaaagctgggacctggtgacaa

SEQ ID NO: 657582 - DNA, 25 bp, Homo sapien
acccaccagagaggaccccactgtg

SEQ ID NO: 657583 - DNA, 25 bp, Homo sapien
atttggatgcagaacaccaagcaag

SEQ ID NO: 657584 - DNA, 25 bp, Homo sapien
gcctgtcgcagcttcgtatttggat

SEQ ID NO: 657585 - DNA, 25 bp, Homo sapien
ccccaatatgtgctatggactccgg

SEQ ID NO: 657586 - DNA, 25 bp, Homo sapien
tggactccggtccaacaagttgatt

SEQ ID NO: 657587 - DNA, 25 bp, Homo sapien
gcaaaataatgcaattccagagatc

SEQ ID NO: 657588 - DNA, 25 bp, Homo sapien
cagcttcgctcggcctcggtcactt

SEQ ID NO: 657589 - DNA, 25 bp, Homo sapien
ttcgctcggcctccatcacctctac

SEQ ID NO: 657590 - DNA, 25 bp, Homo sapien
acctctacacgccaggcagcgcagg

SEQ ID NO: 657591 - DNA, 25 bp, Homo sapien
ccacgatgacaagcagagctgccag

SEQ ID NO: 657592 - DNA, 25 bp, Homo sapien
aagaggccatgccacgatgacaagc

SEQ ID NO: 657593 - DNA, 25 bp, Homo sapien
ttagccaactggactatctaagaag

SEQ ID NO: 657594 - DNA, 25 bp, Homo sapien
ggactatctaagaaggcccaggtca

SEQ ID NO: 657595 - DNA, 25 bp, Homo sapien
ttccctttggctagaatgagccatc

SEQ ID NO: 657596 - DNA, 25 bp, Homo sapien
tttggctagaatgagccatcctgct

SEQ ID NO: 657597 - DNA, 25 bp, Homo sapien
cacaccaggaattacagagctgaca

SEQ ID NO: 657598 - DNA, 25 bp, Homo sapien
agcggactagagtccccagtccttc

SEQ ID NO: 657599 - DNA, 25 bp, Homo sapien
tcacccattctcaatcttacatgag

SEQ ID NO: 657600 - DNA, 25 bp, Homo sapien
cactggcacaccaggaattacagag

SEQ ID NO: 657601 - DNA, 25 bp, Homo sapien
caagcaggggaacggtgagagaaac

SEQ ID NO: 657602 - DNA, 25 bp, Homo sapien
gaacggtgagagaaacagccagcat

SEQ ID NO: 657603 - DNA, 25 bp, Homo sapien
aggctgtggatctataggagattcc

SEQ ID NO: 657604 - DNA, 25 bp, Homo sapien
agaggctgtggatctataggagatt

SEQ ID NO: 657605 - DNA, 25 bp, Homo sapien
tcggaaaactctgccgctaaaggag

SEQ ID NO: 657606 - DNA, 25 bp, Homo sapien
catcgtctgtgacgacctgcggccg

SEQ ID NO: 657607 - DNA, 25 bp, Homo sapien
ggcgctgtcgcagcccgtccgcctc

SEQ ID NO: 657608 - DNA, 25 bp, Homo sapien
ggccatcatcgtctgtgacgacctg

SEQ ID NO: 657609 - DNA, 25 bp, Homo sapien
ggcctggccatcatcgtctgtgacg

SEQ ID NO: 657610 - DNA, 25 bp, Homo sapien
cgttgctcggcgctctgaggctaat

SEQ ID NO: 657611 - DNA, 25 bp, Homo sapien
gaggctaattctgaccgcccggaag

SEQ ID NO: 657612 - DNA, 25 bp, Homo sapien
gctcggaacccgctcagagatagca

SEQ ID NO: 657613 - DNA, 25 bp, Homo sapien
tacgcggaaatgacgttgcgcccag

SEQ ID NO: 657614 - DNA, 25 bp, Homo sapien
ccaattaatattgaaggctgcaact

SEQ ID NO: 657615 - DNA, 25 bp, Homo sapien
ggctgcaacttataatctagggtaa

SEQ ID NO: 657616 - DNA, 25 bp, Homo sapien
gaatgaatttcttatcagcagacct

SEQ ID NO: 657617 - DNA, 25 bp, Homo sapien
gagtttataacttcaagctaatggg

SEQ ID NO: 657618 - DNA, 25 bp, Homo sapien
gccatttcacaaacgcacaactgta

SEQ ID NO: 657619 - DNA, 25 bp, Homo sapien
agatcattcagatgcccgggaccat

SEQ ID NO: 657620 - DNA, 25 bp, Homo sapien
gcaacatggaaagctaagccatttc

SEQ ID NO: 657621 - DNA, 25 bp, Homo sapien
gcctgtaacaaaagaccaccactca

SEQ ID NO: 657622 - DNA, 25 bp, Homo sapien
aagaggccagcacaaccacgaccga

SEQ ID NO: 657623 - DNA, 25 bp, Homo sapien
cagcacaaccacgaccgagtgggta

SEQ ID NO: 657624 - DNA, 25 bp, Homo sapien
gaccgagtgggtactcagtggccca

SEQ ID NO: 657625 - DNA, 25 bp, Homo sapien
gtgggtactcagtggcccagacacc

SEQ ID NO: 657626 - DNA, 25 bp, Homo sapien
ctcccctaagggacccggctcactg

SEQ ID NO: 657627 - DNA, 25 bp, Homo sapien
atgcctagcagggaggtaagcaccc

SEQ ID NO: 657628 - DNA, 25 bp, Homo sapien
tcatcattggacctcagtggttctc

SEQ ID NO: 657629 - DNA, 25 bp, Homo sapien
aaagagagactggatccagacctcc

SEQ ID NO: 657630 - DNA, 25 bp, Homo sapien
cacccactggcgtcgtgatttccat

SEQ ID NO: 657631 - DNA, 25 bp, Homo sapien
tagcttcagaactaaggcggccaca

SEQ ID NO: 657632 - DNA, 25 bp, Homo sapien
tctgtgttatctgagcaggcgcgct

SEQ ID NO: 657633 - DNA, 25 bp, Homo sapien
caccaggaaaagatgccggaggctt

SEQ ID NO: 657634 - DNA, 25 bp, Homo sapien
ttctgggacgtaggaagacgccaac

SEQ ID NO: 657635 - DNA, 25 bp, Homo sapien
cactcaggatctctgcgatgatgct

SEQ ID NO: 657636 - DNA, 25 bp, Homo sapien
ctccaaggtggtagtgtctcccagc

SEQ ID NO: 657637 - DNA, 25 bp, Homo sapien
tcctgggcctcactagtgatgatct

SEQ ID NO: 657638 - DNA, 25 bp, Homo sapien
tgcacttctggtagacactcaggat

SEQ ID NO: 657639 - DNA, 25 bp, Homo sapien
gcctctgtgctagcgtggactgcat

SEQ ID NO: 657640 - DNA, 25 bp, Homo sapien
cattaagatcagaagggctctgctc

SEQ ID NO: 657641 - DNA, 25 bp, Homo sapien
ttagagcgtggatggtgcccagcct

SEQ ID NO: 657642 - DNA, 25 bp, Homo sapien
tactgtctggacctaagctgaaatc

SEQ ID NO: 657643 - DNA, 25 bp, Homo sapien
catatttggcgatcttggtggccac

SEQ ID NO: 657644 - DNA, 25 bp, Homo sapien
tcacccgcactatctttcaccacaa

SEQ ID NO: 657645 - DNA, 25 bp, Homo sapien
cacagcatatttggcgatcttggtg

SEQ ID NO: 657646 - DNA, 25 bp, Homo sapien
acatctgagtcacccgcactatctt

SEQ ID NO: 657647 - DNA, 25 bp, Homo sapien
ggcttttgaatcctatgttagtgac

SEQ ID NO: 657648 - DNA, 25 bp, Homo sapien
taaatactagacaaggagccaactc

SEQ ID NO: 657649 - DNA, 25 bp, Homo sapien
gactgccagaaatccgaagggcttt

SEQ ID NO: 657650 - DNA, 25 bp, Homo sapien
aactcccgaggcagggtgctatgca

SEQ ID NO: 657651 - DNA, 25 bp, Homo sapien
cccgtgaggatacatgaggctggac

SEQ ID NO: 657652 - DNA, 25 bp, Homo sapien
taagttaccctagtcacacctgaga

SEQ ID NO: 657653 - DNA, 25 bp, Homo sapien
gactcgaaacaaagcgtggccttgg

SEQ ID NO: 657654 - DNA, 25 bp, Homo sapien
agattcgtccaaagagtcccagcgc

SEQ ID NO: 657655 - DNA, 25 bp, Homo sapien
tgacagcactttctggtactgcagg

SEQ ID NO: 657656 - DNA, 25 bp, Homo sapien
cctttgatgtcgtgggggtagccaa

SEQ ID NO: 657657 - DNA, 25 bp, Homo sapien
cttctcctttgatgtcgtgggggta

SEQ ID NO: 657658 - DNA, 25 bp, Homo sapien
tgggggtagccaatgacagcacttt

SEQ ID NO: 657659 - DNA, 25 bp, Homo sapien
atggcgtcctcaatctctgcggtcc

SEQ ID NO: 657660 - DNA, 25 bp, Homo sapien
gtcctcaatctctgcggtccccagc

SEQ ID NO: 657661 - DNA, 25 bp, Homo sapien
caatctctgcggtccccagccggtg

SEQ ID NO: 657662 - DNA, 25 bp, Homo sapien
gatggcgtcctcaatctctgcggtc

SEQ ID NO: 657663 - DNA, 25 bp, Homo sapien
gatctggtaatagccgccctcagtt

SEQ ID NO: 657664 - DNA, 25 bp, Homo sapien
tcagttcggtaagccccgtctccag

SEQ ID NO: 657665 - DNA, 25 bp, Homo sapien
taatagccgccctcagttcggtaag

SEQ ID NO: 657666 - DNA, 25 bp, Homo sapien
catccatccgccctgtgatctggta

SEQ ID NO: 657667 - DNA, 25 bp, Homo sapien
taggccttgaagtaggcgtccacaa

SEQ ID NO: 657668 - DNA, 25 bp, Homo sapien
cagggccccggagacgttgctgccc

SEQ ID NO: 657669 - DNA, 25 bp, Homo sapien
gctggtggtcgccatagatggtcct

SEQ ID NO: 657670 - DNA, 25 bp, Homo sapien
gaagtaggcgtccacaaatcgctgg

SEQ ID NO: 657671 - DNA, 25 bp, Homo sapien
gtggccactacccagtgcatgatac

SEQ ID NO: 657672 - DNA, 25 bp, Homo sapien
agtgaacgctgcaaggtcagcagcc

SEQ ID NO: 657673 - DNA, 25 bp, Homo sapien
agtgcatgataccagctgcagtgaa

SEQ ID NO: 657674 - DNA, 25 bp, Homo sapien
ctgcagtgaacgctgcaaggtcagc

SEQ ID NO: 657675 - DNA, 25 bp, Homo sapien
aaagaagggcctcatcgccatggca

SEQ ID NO: 657676 - DNA, 25 bp, Homo sapien
gggccgtggtgcgatgcagatgcca

SEQ ID NO: 657677 - DNA, 25 bp, Homo sapien
cccttcttccgagggccgtggtgcg

SEQ ID NO: 657678 - DNA, 25 bp, Homo sapien
tggcagggaggatttccgccccttc

SEQ ID NO: 657679 - DNA, 25 bp, Homo sapien
ggcctcacagttgatgggctctccc

SEQ ID NO: 657680 - DNA, 25 bp, Homo sapien
ctgtctgccaccaggtgtccaccag

SEQ ID NO: 657681 - DNA, 25 bp, Homo sapien
tcccaggcctcacagttgatgggct

SEQ ID NO: 657682 - DNA, 25 bp, Homo sapien
ccaggcctcacagttgatgggctct

SEQ ID NO: 657683 - DNA, 25 bp, Homo sapien
taaatgtcatgagggctgatcccag

SEQ ID NO: 657684 - DNA, 25 bp, Homo sapien
tatgcaacaggaataggaatgtgcc

SEQ ID NO: 657685 - DNA, 25 bp, Homo sapien
tctgggctgtggaattgcaccgaca

SEQ ID NO: 657686 - DNA, 25 bp, Homo sapien
gtataccgagaacagaacagcgagg

SEQ ID NO: 657687 - DNA, 25 bp, Homo sapien
tgtaggtaggtctcatccccatctc

SEQ ID NO: 657688 - DNA, 25 bp, Homo sapien
tttgggaacaagtggtgagctctgc

SEQ ID NO: 657689 - DNA, 25 bp, Homo sapien
taaggctcacatctgaccctctgtg

SEQ ID NO: 657690 - DNA, 25 bp, Homo sapien
tcatggtcacccagtagtagtggaa

SEQ ID NO: 657691 - DNA, 25 bp, Homo sapien
gtatttcagcaacagccggacagcc

SEQ ID NO: 657692 - DNA, 25 bp, Homo sapien
ccgttggggcgccatagaactgatt

SEQ ID NO: 657693 - DNA, 25 bp, Homo sapien
tccgcagggaggagcgatcatactt

SEQ ID NO: 657694 - DNA, 25 bp, Homo sapien
tcttcacccaggcatcaccgtattt

SEQ ID NO: 657695 - DNA, 25 bp, Homo sapien
ctctctactgtctcccagtaccgac

SEQ ID NO: 657696 - DNA, 25 bp, Homo sapien
ggtgctctcaaaaaggacgctggtg

SEQ ID NO: 657697 - DNA, 25 bp, Homo sapien
cacctggctggtggtcaaacacaag

SEQ ID NO: 657698 - DNA, 25 bp, Homo sapien
agaggcccatacaccacgtagctgt

SEQ ID NO: 657699 - DNA, 25 bp, Homo sapien
tgtgtcctgtaatccaaccgatgtc

SEQ ID NO: 657700 - DNA, 25 bp, Homo sapien
cagcaactgagtggagcctgatccc

SEQ ID NO: 657701 - DNA, 25 bp, Homo sapien
caacaatattttaggccggacacgg

SEQ ID NO: 657702 - DNA, 25 bp, Homo sapien
cttcgaggagcatgagaggacagac

SEQ ID NO: 657703 - DNA, 25 bp, Homo sapien
gggcacactgcagagtccgtctagt

SEQ ID NO: 657704 - DNA, 25 bp, Homo sapien
gatgcccttgggcattccggtgctc

SEQ ID NO: 657705 - DNA, 25 bp, Homo sapien
tgcctgggtatggacgatgcccttg

SEQ ID NO: 657706 - DNA, 25 bp, Homo sapien
tgctccctgaggtgtacagcatgaa

SEQ ID NO: 657707 - DNA, 25 bp, Homo sapien
tcagggcggcatagagcaggtagcc

SEQ ID NO: 657708 - DNA, 25 bp, Homo sapien
gtggaccttgttgtctgtcctgtga

SEQ ID NO: 657709 - DNA, 25 bp, Homo sapien
cccggagtccttggttgaaggtgat

SEQ ID NO: 657710 - DNA, 25 bp, Homo sapien
acagcctcatccactattttcttca

SEQ ID NO: 657711 - DNA, 25 bp, Homo sapien
gggacgtccagatcccccatgtgga

SEQ ID NO: 657712 - DNA, 25 bp, Homo sapien
ctttgtgtgccatgaagaagcacca

SEQ ID NO: 657713 - DNA, 25 bp, Homo sapien
ttgtgtgccatgaagaagcaccagg

SEQ ID NO: 657714 - DNA, 25 bp, Homo sapien
gccatgaagaagcaccaggcctttg

SEQ ID NO: 657715 - DNA, 25 bp, Homo sapien
gaagaagcaccaggcctttgtccag

SEQ ID NO: 657716 - DNA, 25 bp, Homo sapien
gaaaacatacgaacagggaggccga

SEQ ID NO: 657717 - DNA, 25 bp, Homo sapien
gagactcacgcttcctggttttaaa

SEQ ID NO: 657718 - DNA, 25 bp, Homo sapien
tgggaccactggatagccataggac

SEQ ID NO: 657719 - DNA, 25 bp, Homo sapien
tttcaacaagagtaccaagtccatt

SEQ ID NO: 657720 - DNA, 25 bp, Homo sapien
cttgcgaagccagctcagggactcc

SEQ ID NO: 657721 - DNA, 25 bp, Homo sapien
ccttgcgaagccagctcagggactc

SEQ ID NO: 657722 - DNA, 25 bp, Homo sapien
tgcgaagccagctcagggactccct

SEQ ID NO: 657723 - DNA, 25 bp, Homo sapien
ttgcgaagccagctcagggactccc

SEQ ID NO: 657724 - DNA, 25 bp, Homo sapien
gactccatgcctcttcagcgtgttg

SEQ ID NO: 657725 - DNA, 25 bp, Homo sapien
ggacacgggcatgtagatggcaaca

SEQ ID NO: 657726 - DNA, 25 bp, Homo sapien
ggcggcacgtggtctccagtagttc

SEQ ID NO: 657727 - DNA, 25 bp, Homo sapien
tgtgtggacagctccgatcctggca

SEQ ID NO: 657728 - DNA, 25 bp, Homo sapien
tttagtcgagaaacaacaggtccca

SEQ ID NO: 657729 - DNA, 25 bp, Homo sapien
cattgctagggtgacaaggctatcc

SEQ ID NO: 657730 - DNA, 25 bp, Homo sapien
tcaactccgggaaaactgggagcag

SEQ ID NO: 657731 - DNA, 25 bp, Homo sapien
cccgcagggagacatagcttagctt

SEQ ID NO: 657732 - DNA, 25 bp, Homo sapien
tgaacatgaatggtcccctgggcca

SEQ ID NO: 657733 - DNA, 25 bp, Homo sapien
cacgggaggccaaacaatgactgat

SEQ ID NO: 657734 - DNA, 25 bp, Homo sapien
tgaaggtgacctgtaaacagtggcc

SEQ ID NO: 657735 - DNA, 25 bp, Homo sapien
actctgtggaaagcgctgaacctgc

SEQ ID NO: 657736 - DNA, 25 bp, Homo sapien
gctttttcagtccaccccgtgtgac

SEQ ID NO: 657737 - DNA, 25 bp, Homo sapien
aacctgttaatttgtccgggcgcag

SEQ ID NO: 657738 - DNA, 25 bp, Homo sapien
ctgttaatttgtccgggcgcagtgg

SEQ ID NO: 657739 - DNA, 25 bp, Homo sapien
agctttttcagtccaccccgtgtga

SEQ ID NO: 657740 - DNA, 25 bp, Homo sapien
ggcatggagggtctgcataagctca

SEQ ID NO: 657741 - DNA, 25 bp, Homo sapien
gcatggagggtctgcataagctcac

SEQ ID NO: 657742 - DNA, 25 bp, Homo sapien
ggctgagagcacgcccacagactct

SEQ ID NO: 657743 - DNA, 25 bp, Homo sapien
tcccgggcataaggccacgggctga

SEQ ID NO: 657744 - DNA, 25 bp, Homo sapien
cgtactcccgggcataaggccacgg

SEQ ID NO: 657745 - DNA, 25 bp, Homo sapien
acagatggcaccgtactcccgggca

SEQ ID NO: 657746 - DNA, 25 bp, Homo sapien
ttcaaaggcactaccccagggatgc

SEQ ID NO: 657747 - DNA, 25 bp, Homo sapien
tgttcaaaggcactaccccagggat

SEQ ID NO: 657748 - DNA, 25 bp, Homo sapien
tcaaaggcactaccccagggatgct

SEQ ID NO: 657749 - DNA, 25 bp, Homo sapien
cctgttcaaaggcactaccccaggg

SEQ ID NO: 657750 - DNA, 25 bp, Homo sapien
tactgggaatccacatgagatgggc

SEQ ID NO: 657751 - DNA, 25 bp, Homo sapien
tgtggtcgccccagagaattctcag

SEQ ID NO: 657752 - DNA, 25 bp, Homo sapien
caagaaggtacaggtgggatcctcc

SEQ ID NO: 657753 - DNA, 25 bp, Homo sapien
tacatcagggtgaagaccagagcct

SEQ ID NO: 657754 - DNA, 25 bp, Homo sapien
agtaataagtactttgccagggcca

SEQ ID NO: 657755 - DNA, 25 bp, Homo sapien
tccaggtgtccagttagctccttag

SEQ ID NO: 657756 - DNA, 25 bp, Homo sapien
gaaccgctacttagcacacactcag

SEQ ID NO: 657757 - DNA, 25 bp, Homo sapien
cttttactgaagaactactccaggg

SEQ ID NO: 657758 - DNA, 25 bp, Homo sapien
ctatgggccacacggcatctgcaac

SEQ ID NO: 657759 - DNA, 25 bp, Homo sapien
gggacttccgaacatgctggtccaa

SEQ ID NO: 657760 - DNA, 25 bp, Homo sapien
aggctcatcgcgctcccagatcaaa

SEQ ID NO: 657761 - DNA, 25 bp, Homo sapien
tcccagatcaaagcaacgctctcgg

SEQ ID NO: 657762 - DNA, 25 bp, Homo sapien
ggtgatcctcacttccgttccaggc

SEQ ID NO: 657763 - DNA, 25 bp, Homo sapien
agagggtttgcggatgttacacttg

SEQ ID NO: 657764 - DNA, 25 bp, Homo sapien
agggtttgcggatgttacacttggt

SEQ ID NO: 657765 - DNA, 25 bp, Homo sapien
aaagagggtttgcggatgttacact

SEQ ID NO: 657766 - DNA, 25 bp, Homo sapien
gggtttgcggatgttacacttggtg

SEQ ID NO: 657767 - DNA, 25 bp, Homo sapien
caggctttgagatattacgtcagtc

SEQ ID NO: 657768 - DNA, 25 bp, Homo sapien
aggacttggattcctcgggaggatc

SEQ ID NO: 657769 - DNA, 25 bp, Homo sapien
tatttaaagtaagtcgtgcccctga

SEQ ID NO: 657770 - DNA, 25 bp, Homo sapien
cgcctggcccacaatggactttctt

SEQ ID NO: 657771 - DNA, 25 bp, Homo sapien
gctcaatgcttggttacaaagagga

SEQ ID NO: 657772 - DNA, 25 bp, Homo sapien
cttgcttaagagtacacacactgaa

SEQ ID NO: 657773 - DNA, 25 bp, Homo sapien
atttcccagtgctcaatgcttggtt

SEQ ID NO: 657774 - DNA, 25 bp, Homo sapien
ttgcttaagagtacacacactgaaa

SEQ ID NO: 657775 - DNA, 25 bp, Homo sapien
gccacagggcaaaaagagctgcaga

SEQ ID NO: 657776 - DNA, 25 bp, Homo sapien
gcatttacaacttcctgacatcttg

SEQ ID NO: 657777 - DNA, 25 bp, Homo sapien
tcttgagttgatatgccacagggca

SEQ ID NO: 657778 - DNA, 25 bp, Homo sapien
tcctgacatcttgagttgatatgcc

SEQ ID NO: 657779 - DNA, 25 bp, Homo sapien
cataacctcaactggctattggagt

SEQ ID NO: 657780 - DNA, 25 bp, Homo sapien
gatcagatgcaagcccatgtggtcc

SEQ ID NO: 657781 - DNA, 25 bp, Homo sapien
ctgccgaaggccaagcacaaggtca

SEQ ID NO: 657782 - DNA, 25 bp, Homo sapien
caggatactgtggagctttgaaagc

SEQ ID NO: 657783 - DNA, 25 bp, Homo sapien
gaagaccatgcgttgagaaccactg

SEQ ID NO: 657784 - DNA, 25 bp, Homo sapien
agaattcagttacatacggcccttg

SEQ ID NO: 657785 - DNA, 25 bp, Homo sapien
catctgaagggctcgttataaacac

SEQ ID NO: 657786 - DNA, 25 bp, Homo sapien
catctgccctggtttgaggcgtaca

SEQ ID NO: 657787 - DNA, 25 bp, Homo sapien
ggccaactgtgaatgttccccatga

SEQ ID NO: 657788 - DNA, 25 bp, Homo sapien
tgatcctgaccgagcgaggttcaga

SEQ ID NO: 657789 - DNA, 25 bp, Homo sapien
tctctatggtttgcagacaccggca

SEQ ID NO: 657790 - DNA, 25 bp, Homo sapien
atattgctgacccatgaacaggagg

SEQ ID NO: 657791 - DNA, 25 bp, Homo sapien
cagcaagctggttatgaccaccctt

SEQ ID NO: 657792 - DNA, 25 bp, Homo sapien
cagccccaaatcttagcagagcagc

SEQ ID NO: 657793 - DNA, 25 bp, Homo sapien
aaatcgctactgcttatgggtcacc

SEQ ID NO: 657794 - DNA, 25 bp, Homo sapien
gtgaccctgccataaagacccgcag

SEQ ID NO: 657795 - DNA, 25 bp, Homo sapien
ggtgcagttctctgaggccgagaac

SEQ ID NO: 657796 - DNA, 25 bp, Homo sapien
tctctgaggccgagaacgagaacgg

SEQ ID NO: 657797 - DNA, 25 bp, Homo sapien
tcagaccccgcgggtccaaagcagg

SEQ ID NO: 657798 - DNA, 25 bp, Homo sapien
ccaggtcgctggggtgcagttctct

SEQ ID NO: 657799 - DNA, 25 bp, Homo sapien
ggctcttgctcagcggcgctatgca

SEQ ID NO: 657800 - DNA, 25 bp, Homo sapien
gcagcgaagaaataactggttccag

SEQ ID NO: 657801 - DNA, 25 bp, Homo sapien
agtgacaaccgccaccgctttgttt

SEQ ID NO: 657802 - DNA, 25 bp, Homo sapien
ctgtttgtttacgtgggcagggctt

SEQ ID NO: 657803 - DNA, 25 bp, Homo sapien
acacgagagtgtcccgcgccagagg

SEQ ID NO: 657804 - DNA, 25 bp, Homo sapien
gggtgtcccacacgagagtgtcccg

SEQ ID NO: 657805 - DNA, 25 bp, Homo sapien
caggaaccagccgatcttgccagtg

SEQ ID NO: 657806 - DNA, 25 bp, Homo sapien
tcgcagtcccagacggtgtggtagg

SEQ ID NO: 657807 - DNA, 25 bp, Homo sapien
tgcgcggcgcgctcaccccgcacgg

SEQ ID NO: 657808 - DNA, 25 bp, Homo sapien
ctcagcgcgggatacgagcctggct

SEQ ID NO: 657809 - DNA, 25 bp, Homo sapien
ctgtgcactcagcgcgggatacgag

SEQ ID NO: 657810 - DNA, 25 bp, Homo sapien
ctgcaactgcgggagcgctgcccga

SEQ ID NO: 657811 - DNA, 25 bp, Homo sapien
gctgcgcaagcctgagtccgtgttc

SEQ ID NO: 657812 - DNA, 25 bp, Homo sapien
gggtcccaagacaataggtcggtca

SEQ ID NO: 657813 - DNA, 25 bp, Homo sapien
ggtcggtcagttccgcatctcagag

SEQ ID NO: 657814 - DNA, 25 bp, Homo sapien
tttcatgcctttgtgcgcccctgag

SEQ ID NO: 657815 - DNA, 25 bp, Homo sapien
ggaacttcagacacgcaggtgcaga

SEQ ID NO: 657816 - DNA, 25 bp, Homo sapien
gacacgtgtgcagaaagtggcaacg

SEQ ID NO: 657817 - DNA, 25 bp, Homo sapien
gaacaggctcttcatacgacacgtg

SEQ ID NO: 657818 - DNA, 25 bp, Homo sapien
tcctctggtaattggcgaagcgtcc

SEQ ID NO: 657819 - DNA, 25 bp, Homo sapien
atgaggtatgtggagtctgcgcata

SEQ ID NO: 657820 - DNA, 25 bp, Homo sapien
tccccatgaactccgggtgaggatg

SEQ ID NO: 657821 - DNA, 25 bp, Homo sapien
gagtctgcgcatacatctgcttcag

SEQ ID NO: 657822 - DNA, 25 bp, Homo sapien
tatttctcgatgtccccatgaactc

SEQ ID NO: 657823 - DNA, 25 bp, Homo sapien
caccatagcctcatgcactgtggca

SEQ ID NO: 657824 - DNA, 25 bp, Homo sapien
tagcctcatgcactgtggcactgtg

SEQ ID NO: 657825 - DNA, 25 bp, Homo sapien
cctcatgcactgtggcactgtgcac

SEQ ID NO: 657826 - DNA, 25 bp, Homo sapien
gcaacacaccatagcctcatgcact

SEQ ID NO: 657827 - DNA, 25 bp, Homo sapien
gcagaagtgcagtgcgcccctgacc

SEQ ID NO: 657828 - DNA, 25 bp, Homo sapien
tgcagaagtgcagtgcgcccctgac

SEQ ID NO: 657829 - DNA, 25 bp, Homo sapien
ctgcagaagtgcagtgcgcccctga

SEQ ID NO: 657830 - DNA, 25 bp, Homo sapien
tgagtggtcttggagccaggtgcac

SEQ ID NO: 657831 - DNA, 25 bp, Homo sapien
gagtcatcacgcagatattgctcgg

SEQ ID NO: 657832 - DNA, 25 bp, Homo sapien
caatcacctggtttcttgatccctc

SEQ ID NO: 657833 - DNA, 25 bp, Homo sapien
tattgctcggttgcttgttttgcag

SEQ ID NO: 657834 - DNA, 25 bp, Homo sapien
cctgggaagtggcttgagagggcag

SEQ ID NO: 657835 - DNA, 25 bp, Homo sapien
caagcaggcattgacgttttggtag

SEQ ID NO: 657836 - DNA, 25 bp, Homo sapien
tttggtagatttccggtccagtggc

SEQ ID NO: 657837 - DNA, 25 bp, Homo sapien
ccagtggcgtctgacaatggcagcc

SEQ ID NO: 657838 - DNA, 25 bp, Homo sapien
cagaagtgaggtacggaaacggttg

SEQ ID NO: 657839 - DNA, 25 bp, Homo sapien
aaacggttggactggttacagcttg

SEQ ID NO: 657840 - DNA, 25 bp, Homo sapien
cagtgattggtatgagagtaggtta

SEQ ID NO: 657841 - DNA, 25 bp, Homo sapien
tggccaaagaagactcatgaacaga

SEQ ID NO: 657842 - DNA, 25 bp, Homo sapien
ccacagctggtgacttagagggtca

SEQ ID NO: 657843 - DNA, 25 bp, Homo sapien
tctgcaatgacaggaaggatgggta

SEQ ID NO: 657844 - DNA, 25 bp, Homo sapien
ttcaaagcccgggttgagatcaggg

SEQ ID NO: 657845 - DNA, 25 bp, Homo sapien
gtcaaagaggagacgaccacagctg

SEQ ID NO: 657846 - DNA, 25 bp, Homo sapien
gagcacccaggcaggcacaggtcag

SEQ ID NO: 657847 - DNA, 25 bp, Homo sapien
acccaggcaggcacaggtcagccat

SEQ ID NO: 657848 - DNA, 25 bp, Homo sapien
agcacccaggcaggcacaggtcagc

SEQ ID NO: 657849 - DNA, 25 bp, Homo sapien
atgggtgccaagctgagcacccagg

SEQ ID NO: 657850 - DNA, 25 bp, Homo sapien
gccgaaggggatgcccatgtgtcat

SEQ ID NO: 657851 - DNA, 25 bp, Homo sapien
ctagccgaaggggatgcccatgtgt

SEQ ID NO: 657852 - DNA, 25 bp, Homo sapien
aaggggatgcccatgtgtcattcat

SEQ ID NO: 657853 - DNA, 25 bp, Homo sapien
gaaggggatgcccatgtgtcattca

SEQ ID NO: 657854 - DNA, 25 bp, Homo sapien
taggacctagctgtcatgactgcag

SEQ ID NO: 657855 - DNA, 25 bp, Homo sapien
gcagttccgagtgatagacaaagcc

SEQ ID NO: 657856 - DNA, 25 bp, Homo sapien
gaaaatcggcatgcttcctgaggca

SEQ ID NO: 657857 - DNA, 25 bp, Homo sapien
ctttagcagcattacagggttcagc

SEQ ID NO: 657858 - DNA, 25 bp, Homo sapien
gacaatcggcttagcaggttcactt

SEQ ID NO: 657859 - DNA, 25 bp, Homo sapien
tttcccgatccttggctctgagttt

SEQ ID NO: 657860 - DNA, 25 bp, Homo sapien
ggtgttttcccgatccttggctctg

SEQ ID NO: 657861 - DNA, 25 bp, Homo sapien
tctgagtttctcatccatttgacaa

SEQ ID NO: 657862 - DNA, 25 bp, Homo sapien
ggaccacgtgtaaaatcctgctggc

SEQ ID NO: 657863 - DNA, 25 bp, Homo sapien
caattttgaacactggaaacaattc

SEQ ID NO: 657864 - DNA, 25 bp, Homo sapien
ctgtcagtctgtagccagattccaa

SEQ ID NO: 657865 - DNA, 25 bp, Homo sapien
tccaatctgacgtgctgggggattt

SEQ ID NO: 657866 - DNA, 25 bp, Homo sapien
tgtatgtaagttgcacagcttactg

SEQ ID NO: 657867 - DNA, 25 bp, Homo sapien
tcagcatcattccacattaataaat

SEQ ID NO: 657868 - DNA, 25 bp, Homo sapien
ctaagtgtgatgtatgtaagttgca

SEQ ID NO: 657869 - DNA, 25 bp, Homo sapien
ggctgcccgtattgtctaagtgtga

SEQ ID NO: 657870 - DNA, 25 bp, Homo sapien
aagagggatggaagcaacaaccgag

SEQ ID NO: 657871 - DNA, 25 bp, Homo sapien
cagaagaacttctagagttcatgcc

SEQ ID NO: 657872 - DNA, 25 bp, Homo sapien
cattatgggtgcagtctcaggcctc

SEQ ID NO: 657873 - DNA, 25 bp, Homo sapien
caacaaccgaggagtaaacatgagg

SEQ ID NO: 657874 - DNA, 25 bp, Homo sapien
ctagcctgacagatcactgggccag

SEQ ID NO: 657875 - DNA, 25 bp, Homo sapien
gggccagttcccagagaaagccctc

SEQ ID NO: 657876 - DNA, 25 bp, Homo sapien
tgacagatcactgggccagttccca

SEQ ID NO: 657877 - DNA, 25 bp, Homo sapien
gcctgacagatcactgggccagttc

SEQ ID NO: 657878 - DNA, 25 bp, Homo sapien
gctgccccagaggagttgacaaggc

SEQ ID NO: 657879 - DNA, 25 bp, Homo sapien
aaggcaacacatggtaagagctgca

SEQ ID NO: 657880 - DNA, 25 bp, Homo sapien
cctctgaactccaaagagtgtatca

SEQ ID NO: 657881 - DNA, 25 bp, Homo sapien
tcaggaagcaccatattttcccatc

SEQ ID NO: 657882 - DNA, 25 bp, Homo sapien
taaataaatggcaaaggaaacgcag

SEQ ID NO: 657883 - DNA, 25 bp, Homo sapien
gcctggtctgacctaaaaacactgt

SEQ ID NO: 657884 - DNA, 25 bp, Homo sapien
ggatcctccctgctcaagctacaaa

SEQ ID NO: 657885 - DNA, 25 bp, Homo sapien
tttcagcctttgacagtgggacctg

SEQ ID NO: 657886 - DNA, 25 bp, Homo sapien
agccccagggtgcactttcttggtc

SEQ ID NO: 657887 - DNA, 25 bp, Homo sapien
agagctggagaggtcaatagccaca

SEQ ID NO: 657888 - DNA, 25 bp, Homo sapien
ggagaggtcaatagccacatcttcc

SEQ ID NO: 657889 - DNA, 25 bp, Homo sapien
gcccctccagtgccgtggagttgga

SEQ ID NO: 657890 - DNA, 25 bp, Homo sapien
ttcctggcttccttatcatccccat

SEQ ID NO: 657891 - DNA, 25 bp, Homo sapien
catccccatggattttttatgcatc

SEQ ID NO: 657892 - DNA, 25 bp, Homo sapien
cctggcttccttatcatccccatgg

SEQ ID NO: 657893 - DNA, 25 bp, Homo sapien
atcatccccatggattttttatgca

SEQ ID NO: 657894 - DNA, 25 bp, Homo sapien
gcggagactctttgagcaccaaaaa

SEQ ID NO: 657895 - DNA, 25 bp, Homo sapien
cagcagcggagactctttgagcacc

SEQ ID NO: 657896 - DNA, 25 bp, Homo sapien
tcagcagcggagactctttgagcac

SEQ ID NO: 657897 - DNA, 25 bp, Homo sapien
gcagcggagactctttgagcaccaa

SEQ ID NO: 657898 - DNA, 25 bp, Homo sapien
gcggagttgagcacggagtctggca

SEQ ID NO: 657899 - DNA, 25 bp, Homo sapien
atggccccgtacagcccgtactcgg

SEQ ID NO: 657900 - DNA, 25 bp, Homo sapien
cgccatttggccctgcggttttgaa

SEQ ID NO: 657901 - DNA, 25 bp, Homo sapien
gtactcggccatcacgctgctgccg

SEQ ID NO: 657902 - DNA, 25 bp, Homo sapien
ttatagtttctagttgcagcacaca

SEQ ID NO: 657903 - DNA, 25 bp, Homo sapien
catgagggtcataggggcaagctct

SEQ ID NO: 657904 - DNA, 25 bp, Homo sapien
taagggaccctcagtttctatgcaa

SEQ ID NO: 657905 - DNA, 25 bp, Homo sapien
ggcaagctcttgtggtgccttcagc

SEQ ID NO: 657906 - DNA, 25 bp, Homo sapien
ctatagagaagggactgctgattgg

SEQ ID NO: 657907 - DNA, 25 bp, Homo sapien
tagagaagggactgctgattggctc

SEQ ID NO: 657908 - DNA, 25 bp, Homo sapien
tatagagaagggactgctgattggc

SEQ ID NO: 657909 - DNA, 25 bp, Homo sapien
agagaagggactgctgattggctca

SEQ ID NO: 657910 - DNA, 25 bp, Homo sapien
ctgtggtatctttggagcggagaaa

SEQ ID NO: 657911 - DNA, 25 bp, Homo sapien
tctgtggtatctttggagcggagaa

SEQ ID NO: 657912 - DNA, 25 bp, Homo sapien
ggcatacacatcagggtagtgggcc

SEQ ID NO: 657913 - DNA, 25 bp, Homo sapien
agccagcatttctcgggcatacaca

SEQ ID NO: 657914 - DNA, 25 bp, Homo sapien
gggagctcagttttcacagccagca

SEQ ID NO: 657915 - DNA, 25 bp, Homo sapien
catcagggtagtgggcctcgctgaa

SEQ ID NO: 657916 - DNA, 25 bp, Homo sapien
caaggtgggggatgcctttaggtca

SEQ ID NO: 657917 - DNA, 25 bp, Homo sapien
attcctgtcttcagactggctgtcc

SEQ ID NO: 657918 - DNA, 25 bp, Homo sapien
cattcctgtcttcagactggctgtc

SEQ ID NO: 657919 - DNA, 25 bp, Homo sapien
ggatgcctttaggtcattcctgtct

SEQ ID NO: 657920 - DNA, 25 bp, Homo sapien
agaccccagggtctcatcaaaaggt

SEQ ID NO: 657921 - DNA, 25 bp, Homo sapien
gaaccaggtggtggcggtctcacat

SEQ ID NO: 657922 - DNA, 25 bp, Homo sapien
tcgctgagggaacaggaccccggat

SEQ ID NO: 657923 - DNA, 25 bp, Homo sapien
gaggcagggatttaggatgcagcaa

SEQ ID NO: 657924 - DNA, 25 bp, Homo sapien
ctgggcggcaggaacggcacgtccg

SEQ ID NO: 657925 - DNA, 25 bp, Homo sapien
acgtggagacgctgtcgctgcgctt

SEQ ID NO: 657926 - DNA, 25 bp, Homo sapien
ggcggcggacggctgggagccagcg

SEQ ID NO: 657927 - DNA, 25 bp, Homo sapien
acggcacgtccgctaggagcaggca

SEQ ID NO: 657928 - DNA, 25 bp, Homo sapien
acgcgccaggctggagccgtcaagc

SEQ ID NO: 657929 - DNA, 25 bp, Homo sapien
cggaaagcgagtcccggccggtcat

SEQ ID NO: 657930 - DNA, 25 bp, Homo sapien
gaggccgagtcccagcggtagggcc

SEQ ID NO: 657931 - DNA, 25 bp, Homo sapien
aggcaccagcgccctgctgctagtg

SEQ ID NO: 657932 - DNA, 25 bp, Homo sapien
tctggatcccgtttgcggagggccc

SEQ ID NO: 657933 - DNA, 25 bp, Homo sapien
gagggcccagcttagaggaagcttt

SEQ ID NO: 657934 - DNA, 25 bp, Homo sapien
ctttataggattgggctgccggtcg

SEQ ID NO: 657935 - DNA, 25 bp, Homo sapien
cttagcaagcaaggcgcgagcctct

SEQ ID NO: 657936 - DNA, 25 bp, Homo sapien
tgggacaggtcttggggtctccctc

SEQ ID NO: 657937 - DNA, 25 bp, Homo sapien
ctgggacaggtcttggggtctccct

SEQ ID NO: 657938 - DNA, 25 bp, Homo sapien
ttccaactgctgtagacggatggca

SEQ ID NO: 657939 - DNA, 25 bp, Homo sapien
cattatgggcttgaggcagatttcc

SEQ ID NO: 657940 - DNA, 25 bp, Homo sapien
gctagaagcagcgaaatctccacgg

SEQ ID NO: 657941 - DNA, 25 bp, Homo sapien
gatctggcgaggtctgactcttaca

SEQ ID NO: 657942 - DNA, 25 bp, Homo sapien
cctcctatgtgttgtgatgaaactg

SEQ ID NO: 657943 - DNA, 25 bp, Homo sapien
tcctatgtgttgtgatgaaactgtc

SEQ ID NO: 657944 - DNA, 25 bp, Homo sapien
tacctcctatgtgttgtgatgaaac

SEQ ID NO: 657945 - DNA, 25 bp, Homo sapien
ctacctcctatgtgttgtgatgaaa

SEQ ID NO: 657946 - DNA, 25 bp, Homo sapien
aatggctgctgcttgctcggtaacc

SEQ ID NO: 657947 - DNA, 25 bp, Homo sapien
cacaggcaatgtgggactcagcaag

SEQ ID NO: 657948 - DNA, 25 bp, Homo sapien
tcagctggaaactaaggagccccat

SEQ ID NO: 657949 - DNA, 25 bp, Homo sapien
gagaggacccatctccgatgttctg

SEQ ID NO: 657950 - DNA, 25 bp, Homo sapien
tcatcccggtgggtgagaccagagc

SEQ ID NO: 657951 - DNA, 25 bp, Homo sapien
cctcatcccggtgggtgagaccaga

SEQ ID NO: 657952 - DNA, 25 bp, Homo sapien
gcctcatcccggtgggtgagaccag

SEQ ID NO: 657953 - DNA, 25 bp, Homo sapien
catcccggtgggtgagaccagagct

SEQ ID NO: 657954 - DNA, 25 bp, Homo sapien
cagcttctcccactccccaactgag

SEQ ID NO: 657955 - DNA, 25 bp, Homo sapien
tgtgttctctctgtgacactcagct

SEQ ID NO: 657956 - DNA, 25 bp, Homo sapien
tgaggctgtgttctctctgtgacac

SEQ ID NO: 657957 - DNA, 25 bp, Homo sapien
cctgaggctgtgttctctctgtgac

SEQ ID NO: 657958 - DNA, 25 bp, Homo sapien
gacacagctgtgaagacgatcccat

SEQ ID NO: 657959 - DNA, 25 bp, Homo sapien
caaatgtgaaggaccaagcggagca

SEQ ID NO: 657960 - DNA, 25 bp, Homo sapien
gatgcacccgtcagtcctaacatgg

SEQ ID NO: 657961 - DNA, 25 bp, Homo sapien
gattacgctcaggagtgaccagcca

SEQ ID NO: 657962 - DNA, 25 bp, Homo sapien
taaagtcctgattactggagcaaag

SEQ ID NO: 657963 - DNA, 25 bp, Homo sapien
tctgatcatcattaaagaagtcaat

SEQ ID NO: 657964 - DNA, 25 bp, Homo sapien
ataaagtcctgattactggagcaaa

SEQ ID NO: 657965 - DNA, 25 bp, Homo sapien
gccaataaattgaccatgtgatgta

SEQ ID NO: 657966 - DNA, 25 bp, Homo sapien
tttcccatttattccccgatgacat

SEQ ID NO: 657967 - DNA, 25 bp, Homo sapien
gatgacataatcctcatgccaataa

SEQ ID NO: 657968 - DNA, 25 bp, Homo sapien
gccgtgtgttaatgtcagggaataa

SEQ ID NO: 657969 - DNA, 25 bp, Homo sapien
tgaggatttaaagggattctaggaa

SEQ ID NO: 657970 - DNA, 25 bp, Homo sapien
gacacgggttttgaatctccttgaa

SEQ ID NO: 657971 - DNA, 25 bp, Homo sapien
atggcagcagtgacacgggttttga

SEQ ID NO: 657972 - DNA, 25 bp, Homo sapien
tgttactgcagccaccctagcatgg

SEQ ID NO: 657973 - DNA, 25 bp, Homo sapien
caaaccactaaaaacgatgcggctg

SEQ ID NO: 657974 - DNA, 25 bp, Homo sapien
ctgttcctggaaaaccgcgtgcggg

SEQ ID NO: 657975 - DNA, 25 bp, Homo sapien
tgacctcagtgagtgtgtccccatg

SEQ ID NO: 657976 - DNA, 25 bp, Homo sapien
ttcagaacatcatgcgggtgcgccg

SEQ ID NO: 657977 - DNA, 25 bp, Homo sapien
ctgttgctgttgtcatcattagcca

SEQ ID NO: 657978 - DNA, 25 bp, Homo sapien
tgtgcgatgagccgagcccaggcct

SEQ ID NO: 657979 - DNA, 25 bp, Homo sapien
ctgtgcgatgagccgagcccaggcc

SEQ ID NO: 657980 - DNA, 25 bp, Homo sapien
gttgctgttgtcatcattagccacc

SEQ ID NO: 657981 - DNA, 25 bp, Homo sapien
gcatatatgtcaacaccagttcatt

SEQ ID NO: 657982 - DNA, 25 bp, Homo sapien
tgcatatatgtcaacaccagttcat

SEQ ID NO: 657983 - DNA, 25 bp, Homo sapien
atttcattgtttctccgcatacccc

SEQ ID NO: 657984 - DNA, 25 bp, Homo sapien
gcataccccaactcattaagtcgtt

SEQ ID NO: 657985 - DNA, 25 bp, Homo sapien
cagaaacttcattttatgtcatcca

SEQ ID NO: 657986 - DNA, 25 bp, Homo sapien
ttcagaaacttcattttatgtcatc

SEQ ID NO: 657987 - DNA, 25 bp, Homo sapien
ctgaacttcttcagaaacttcattt

SEQ ID NO: 657988 - DNA, 25 bp, Homo sapien
tcttcagaaacttcattttatgtca

SEQ ID NO: 657989 - DNA, 25 bp, Homo sapien
aacgttatcattgtatccagggctg

SEQ ID NO: 657990 - DNA, 25 bp, Homo sapien
gtaacgttatcattgtatccagggc

SEQ ID NO: 657991 - DNA, 25 bp, Homo sapien
acgttatcattgtatccagggctga

SEQ ID NO: 657992 - DNA, 25 bp, Homo sapien
tagagacttcaatcatcagttctgc

SEQ ID NO: 657993 - DNA, 25 bp, Homo sapien
gatgtcagcttactccaggtaatgt

SEQ ID NO: 657994 - DNA, 25 bp, Homo sapien
cagggtctcgatgatatctccagtt

SEQ ID NO: 657995 - DNA, 25 bp, Homo sapien
agggtctcgatgatatctccagttt

SEQ ID NO: 657996 - DNA, 25 bp, Homo sapien
agcagtggatgtcagcttactccag

SEQ ID NO: 657997 - DNA, 25 bp, Homo sapien
ttggagtaagatggcagagcaagtc

SEQ ID NO: 657998 - DNA, 25 bp, Homo sapien
agtaagatggcagagcaagtcacta

SEQ ID NO: 657999 - DNA, 25 bp, Homo sapien
aagatggcagagcaagtcactacca

SEQ ID NO: 658000 - DNA, 25 bp, Homo sapien
cttggagtaagatggcagagcaagt

SEQ ID NO: 658001 - DNA, 25 bp, Homo sapien
caggagatgtattcacggtgtctgg

SEQ ID NO: 658002 - DNA, 25 bp, Homo sapien
gagatgtattcacggtgtctggtgc

SEQ ID NO: 658003 - DNA, 25 bp, Homo sapien
cacaggagatgtattcacggtgtct

SEQ ID NO: 658004 - DNA, 25 bp, Homo sapien
atgtattcacggtgtctggtgcctt

SEQ ID NO: 658005 - DNA, 25 bp, Homo sapien
tgtgtagtcaccaaaaacacaagta

SEQ ID NO: 658006 - DNA, 25 bp, Homo sapien
aatggcaatacccaggcctttggca

SEQ ID NO: 658007 - DNA, 25 bp, Homo sapien
ttaatggcaatacccaggcctttgg

SEQ ID NO: 658008 - DNA, 25 bp, Homo sapien
cattctagtaattccttaatggcaa

SEQ ID NO: 658009 - DNA, 25 bp, Homo sapien
tggcttccattctagtaattcctta

SEQ ID NO: 658010 - DNA, 25 bp, Homo sapien
gatggcaggtgcaaaagcataagca

SEQ ID NO: 658011 - DNA, 25 bp, Homo sapien
ttatgagaacactcagagggccggg

SEQ ID NO: 658012 - DNA, 25 bp, Homo sapien
agttgaccccaatatgcagcctgtt

SEQ ID NO: 658013 - DNA, 25 bp, Homo sapien
cagagccatccttcaggtcagaatg

SEQ ID NO: 658014 - DNA, 25 bp, Homo sapien
gcttttgttggccagttgcaaaaga

SEQ ID NO: 658015 - DNA, 25 bp, Homo sapien
ttggccagttgcaaaagacccttct

SEQ ID NO: 658016 - DNA, 25 bp, Homo sapien
aagctggagccatatccttctcggc

SEQ ID NO: 658017 - DNA, 25 bp, Homo sapien
gaagctggagccatatccttctcgg

SEQ ID NO: 658018 - DNA, 25 bp, Homo sapien
ttgaaacttgtgcatgcaacacata

SEQ ID NO: 658019 - DNA, 25 bp, Homo sapien
attgaaacttgtgcatgcaacacat

SEQ ID NO: 658020 - DNA, 25 bp, Homo sapien
tattgaaacttgtgcatgcaacaca

SEQ ID NO: 658021 - DNA, 25 bp, Homo sapien
gcaagactccataggcgtgggatcc

SEQ ID NO: 658022 - DNA, 25 bp, Homo sapien
ataggcgtgggatccaccgagccat

SEQ ID NO: 658023 - DNA, 25 bp, Homo sapien
actccataggcgtgggatccaccga

SEQ ID NO: 658024 - DNA, 25 bp, Homo sapien
gcgtgggatccaccgagccatgtgc

SEQ ID NO: 658025 - DNA, 25 bp, Homo sapien
agactggagctattcttatctggcc

SEQ ID NO: 658026 - DNA, 25 bp, Homo sapien
actggagctattcttatctggccat

SEQ ID NO: 658027 - DNA, 25 bp, Homo sapien
gactggagctattcttatctggcca

SEQ ID NO: 658028 - DNA, 25 bp, Homo sapien
cacccttcctgagcgtgaggtgctg

SEQ ID NO: 658029 - DNA, 25 bp, Homo sapien
tgaaggggctttatcagtcttcaga

SEQ ID NO: 658030 - DNA, 25 bp, Homo sapien
cccttcctgagcgtgaggtgctggg

SEQ ID NO: 658031 - DNA, 25 bp, Homo sapien
acccttcctgagcgtgaggtgctgg

SEQ ID NO: 658032 - DNA, 25 bp, Homo sapien
caagatgacatctgttggatcatcc

SEQ ID NO: 658033 - DNA, 25 bp, Homo sapien
tcactacagtgcaagatgacatctg

SEQ ID NO: 658034 - DNA, 25 bp, Homo sapien
catgtggtcccaacaagactatcac

SEQ ID NO: 658035 - DNA, 25 bp, Homo sapien
tgttttacagctgcacttcatgtgg

SEQ ID NO: 658036 - DNA, 25 bp, Homo sapien
cagtggcagtgtccaaccaggtgct

SEQ ID NO: 658037 - DNA, 25 bp, Homo sapien
cgcatcccatacagctagcacttat

SEQ ID NO: 658038 - DNA, 25 bp, Homo sapien
cttggtgcttcaggaacctgggctt

SEQ ID NO: 658039 - DNA, 25 bp, Homo sapien
ttgtgggcgaccttccaacaggcac

SEQ ID NO: 658040 - DNA, 25 bp, Homo sapien
ggagttgcaaccttggtgatttcta

SEQ ID NO: 658041 - DNA, 25 bp, Homo sapien
aggagttgcaaccttggtgatttct

SEQ ID NO: 658042 - DNA, 25 bp, Homo sapien
gtcaggagttgcaaccttggtgatt

SEQ ID NO: 658043 - DNA, 25 bp, Homo sapien
cagtcaggagttgcaaccttggtga

SEQ ID NO: 658044 - DNA, 25 bp, Homo sapien
gaggagggcagatttcatgaacctg

SEQ ID NO: 658045 - DNA, 25 bp, Homo sapien
cctgcctgctatgatgtggctgcat

SEQ ID NO: 658046 - DNA, 25 bp, Homo sapien
ggaggagggcagatttcatgaacct

SEQ ID NO: 658047 - DNA, 25 bp, Homo sapien
tttcatgaacctgcctgctatgatg

SEQ ID NO: 658048 - DNA, 25 bp, Homo sapien
aataaaatgtagacgtggagggatg

SEQ ID NO: 658049 - DNA, 25 bp, Homo sapien
ggatgggggaaattgcacaggccgg

SEQ ID NO: 658050 - DNA, 25 bp, Homo sapien
aaataaaatgtagacgtggagggat

SEQ ID NO: 658051 - DNA, 25 bp, Homo sapien
ggaaattgcacaggccggtccaggc

SEQ ID NO: 658052 - DNA, 25 bp, Homo sapien
caagggaaccccttgaatctggcga

SEQ ID NO: 658053 - DNA, 25 bp, Homo sapien
gagggcccgccatgagacgctcggg

SEQ ID NO: 658054 - DNA, 25 bp, Homo sapien
gacgctcggggaaccagactgccga

SEQ ID NO: 658055 - DNA, 25 bp, Homo sapien
cgcgccgtaaggaaactggccaagg

SEQ ID NO: 658056 - DNA, 25 bp, Homo sapien
tacgcagctgagcacccatactccg

SEQ ID NO: 658057 - DNA, 25 bp, Homo sapien
aggccatcgcgcctacgcagctgag

SEQ ID NO: 658058 - DNA, 25 bp, Homo sapien
gaaaagaaggccatcgcgcctacgc

SEQ ID NO: 658059 - DNA, 25 bp, Homo sapien
gcctacgcagctgagcacccatact

SEQ ID NO: 658060 - DNA, 25 bp, Homo sapien
tctccgtgggtgtggcggagcgcgc

SEQ ID NO: 658061 - DNA, 25 bp, Homo sapien
gagcgcgcggtgcatggtaagcggc

SEQ ID NO: 658062 - DNA, 25 bp, Homo sapien
tgctccccggaaaagggcactcgtc

SEQ ID NO: 658063 - DNA, 25 bp, Homo sapien
cagcctgtgacgccacgtgcatggg

SEQ ID NO: 658064 - DNA, 25 bp, Homo sapien
tcccgaggagctcataggtggtcag

SEQ ID NO: 658065 - DNA, 25 bp, Homo sapien
tctgggaaacaggtaggatcaggcc

SEQ ID NO: 658066 - DNA, 25 bp, Homo sapien
ggttctgcccgagctgacctgtgag

SEQ ID NO: 658067 - DNA, 25 bp, Homo sapien
aagcttcgcgtagcagtttctggga

SEQ ID NO: 658068 - DNA, 25 bp, Homo sapien
gaaggacctggcaagcactgtacaa

SEQ ID NO: 658069 - DNA, 25 bp, Homo sapien
gaaacctcgcgcaggagttccttgg

SEQ ID NO: 658070 - DNA, 25 bp, Homo sapien
catcccacgtcacacaggatacggg

SEQ ID NO: 658071 - DNA, 25 bp, Homo sapien
tgggcggccggtagtcatttttgaa

SEQ ID NO: 658072 - DNA, 25 bp, Homo sapien
tgtgtcaggagatctggaagcgcct

SEQ ID NO: 658073 - DNA, 25 bp, Homo sapien
gccctttgtgtcaggagatctggaa

SEQ ID NO: 658074 - DNA, 25 bp, Homo sapien
aggagatctggaagcgcctcccctc

SEQ ID NO: 658075 - DNA, 25 bp, Homo sapien
tgtcaggagatctggaagcgcctcc

SEQ ID NO: 658076 - DNA, 25 bp, Homo sapien
agggtggcctcagcaggagccacac

SEQ ID NO: 658077 - DNA, 25 bp, Homo sapien
ctcagcaggagccacacctctctgt

SEQ ID NO: 658078 - DNA, 25 bp, Homo sapien
ctgctggagggtggcctcagcagga

SEQ ID NO: 658079 - DNA, 25 bp, Homo sapien
gcctcagcaggagccacacctctct

SEQ ID NO: 658080 - DNA, 25 bp, Homo sapien
acattgaatccccacagtcacgagg

SEQ ID NO: 658081 - DNA, 25 bp, Homo sapien
tgtaaagcccgcatgtggcacgtgc

SEQ ID NO: 658082 - DNA, 25 bp, Homo sapien
ggtcgctgcgggcttgctcctttga

SEQ ID NO: 658083 - DNA, 25 bp, Homo sapien
cagcctgttctgagcacattgaatc

SEQ ID NO: 658084 - DNA, 25 bp, Homo sapien
agatgaaactggcccccttgagggg

SEQ ID NO: 658085 - DNA, 25 bp, Homo sapien
ctgtcacacgtagctgcgggcagag

SEQ ID NO: 658086 - DNA, 25 bp, Homo sapien
cactgtcacacgtagctgcgggcag

SEQ ID NO: 658087 - DNA, 25 bp, Homo sapien
agagccggtgccacttccagcccgg

SEQ ID NO: 658088 - DNA, 25 bp, Homo sapien
gtcacacgtagctgcgggcagagcc

SEQ ID NO: 658089 - DNA, 25 bp, Homo sapien
taaaaagtgtggctagtcatgattg

SEQ ID NO: 658090 - DNA, 25 bp, Homo sapien
ggattggtctgtgttagtgtctgtc

SEQ ID NO: 658091 - DNA, 25 bp, Homo sapien
gaatttagacaaggaatagctgaag

SEQ ID NO: 658092 - DNA, 25 bp, Homo sapien
cttgttctgatgaacaaagagtcag

SEQ ID NO: 658093 - DNA, 25 bp, Homo sapien
ccttggacagatgcaacccacgtgt

SEQ ID NO: 658094 - DNA, 25 bp, Homo sapien
gggaccccagaattgcctagtgcca

SEQ ID NO: 658095 - DNA, 25 bp, Homo sapien
tgagatcgcccgtgaggattggcac

SEQ ID NO: 658096 - DNA, 25 bp, Homo sapien
aagtggctcctcgttgtagttatca

SEQ ID NO: 658097 - DNA, 25 bp, Homo sapien
taagtgacgatttcatcccgggcct

SEQ ID NO: 658098 - DNA, 25 bp, Homo sapien
taaactgtgtcctagaagcctgtac

SEQ ID NO: 658099 - DNA, 25 bp, Homo sapien
cagacatgcatatcggtggctcagc

SEQ ID NO: 658100 - DNA, 25 bp, Homo sapien
tgaacttaacctgtcctctggagag

SEQ ID NO: 658101 - DNA, 25 bp, Homo sapien
aaataatccacatgcgaagaggcat

SEQ ID NO: 658102 - DNA, 25 bp, Homo sapien
atccacatgcgaagaggcatatttt

SEQ ID NO: 658103 - DNA, 25 bp, Homo sapien
ggtggtgtatcccaatgcccctcag

SEQ ID NO: 658104 - DNA, 25 bp, Homo sapien
tgtccaagtggatgcccacctcagg

SEQ ID NO: 658105 - DNA, 25 bp, Homo sapien
gataattaatactgggactcattta

SEQ ID NO: 658106 - DNA, 25 bp, Homo sapien
tcagcaatattagcggccagaggag

SEQ ID NO: 658107 - DNA, 25 bp, Homo sapien
acttcagcaatattagcggccagag

SEQ ID NO: 658108 - DNA, 25 bp, Homo sapien
aatggctgagataattaatactggg

SEQ ID NO: 658109 - DNA, 25 bp, Homo sapien
gattaaactttaccacaccacagca

SEQ ID NO: 658110 - DNA, 25 bp, Homo sapien
cagcgcctccattctttgccaggtg

SEQ ID NO: 658111 - DNA, 25 bp, Homo sapien
taagctttccttgaactcaattccc

SEQ ID NO: 658112 - DNA, 25 bp, Homo sapien
atgatcaataagtgtcagcgcctcc

SEQ ID NO: 658113 - DNA, 25 bp, Homo sapien
ccatgcttggcaaatcagcacgtca

SEQ ID NO: 658114 - DNA, 25 bp, Homo sapien
cgtcaaaacatctggctaacatgga

SEQ ID NO: 658115 - DNA, 25 bp, Homo sapien
gaagatttgtcaagctttgccatgc

SEQ ID NO: 658116 - DNA, 25 bp, Homo sapien
ggtacatagcgaaagagtagaagtt

SEQ ID NO: 658117 - DNA, 25 bp, Homo sapien
gaagaccaatcttgccagcatggag

SEQ ID NO: 658118 - DNA, 25 bp, Homo sapien
cacaagagccagtgattggcagaca

SEQ ID NO: 658119 - DNA, 25 bp, Homo sapien
acctcccggcctttgtgacatgtga

SEQ ID NO: 658120 - DNA, 25 bp, Homo sapien
taaattggcctcagggtaaattggc

SEQ ID NO: 658121 - DNA, 25 bp, Homo sapien
tatttgctaggtttaatagataatg

SEQ ID NO: 658122 - DNA, 25 bp, Homo sapien
gaatatttgctaggtttaatagata

SEQ ID NO: 658123 - DNA, 25 bp, Homo sapien
aatatttgctaggtttaatagataa

SEQ ID NO: 658124 - DNA, 25 bp, Homo sapien
tgaatatttgctaggtttaatagat

SEQ ID NO: 658125 - DNA, 25 bp, Homo sapien
cgtttgagacacacatggtaggaca

SEQ ID NO: 658126 - DNA, 25 bp, Homo sapien
tggcttcccggctccgagatggtgc

SEQ ID NO: 658127 - DNA, 25 bp, Homo sapien
tattcccaatgagtaagcctcgatg

SEQ ID NO: 658128 - DNA, 25 bp, Homo sapien
gatacaaagctcctcccgggaatag

SEQ ID NO: 658129 - DNA, 25 bp, Homo sapien
tgctgctcttcgatgaccgtgtcac

SEQ ID NO: 658130 - DNA, 25 bp, Homo sapien
gcaaaagttgaatccggcgagggct

SEQ ID NO: 658131 - DNA, 25 bp, Homo sapien
cagggcagttcttcaccgttggcaa

SEQ ID NO: 658132 - DNA, 25 bp, Homo sapien
ctttgtaaggtttgcagctcagggc

SEQ ID NO: 658133 - DNA, 25 bp, Homo sapien
ccacatgctgggatctgggctggaa

SEQ ID NO: 658134 - DNA, 25 bp, Homo sapien
ctctgaccacatgctgggatctggg

SEQ ID NO: 658135 - DNA, 25 bp, Homo sapien
tgaccacatgctgggatctgggctg

SEQ ID NO: 658136 - DNA, 25 bp, Homo sapien
catgctgggatctgggctggaacct

SEQ ID NO: 658137 - DNA, 25 bp, Homo sapien
taactgccctgcgtgtggaagacac

SEQ ID NO: 658138 - DNA, 25 bp, Homo sapien
tcctgtgtaggcaaatcccagttag

SEQ ID NO: 658139 - DNA, 25 bp, Homo sapien
cccagttagacttaagacggcaaat

SEQ ID NO: 658140 - DNA, 25 bp, Homo sapien
aggcctctcccatgtgcagctctaa

SEQ ID NO: 658141 - DNA, 25 bp, Homo sapien
cactttgccagccactggtggtccc

SEQ ID NO: 658142 - DNA, 25 bp, Homo sapien
gcttttctgagtaccatgtttccag

SEQ ID NO: 658143 - DNA, 25 bp, Homo sapien
ttttctgagtaccatgtttccagga

SEQ ID NO: 658144 - DNA, 25 bp, Homo sapien
cttttctgagtaccatgtttccagg

SEQ ID NO: 658145 - DNA, 25 bp, Homo sapien
agtacaaagggtcgtggccagccct

SEQ ID NO: 658146 - DNA, 25 bp, Homo sapien
gatcctctaggcatcgccttcacag

SEQ ID NO: 658147 - DNA, 25 bp, Homo sapien
aagcctgggaatgagtgttactgca

SEQ ID NO: 658148 - DNA, 25 bp, Homo sapien
cacctggtatatgggtcatggaccc

SEQ ID NO: 658149 - DNA, 25 bp, Homo sapien
cggaggaacccatttgtgctctgct

SEQ ID NO: 658150 - DNA, 25 bp, Homo sapien
gtcccggaggaacccatttgtgctc

SEQ ID NO: 658151 - DNA, 25 bp, Homo sapien
gaggaacccatttgtgctctgcttg

SEQ ID NO: 658152 - DNA, 25 bp, Homo sapien
ggaacccatttgtgctctgcttgga

SEQ ID NO: 658153 - DNA, 25 bp, Homo sapien
catactcccctagttggccactggg

SEQ ID NO: 658154 - DNA, 25 bp, Homo sapien
caccaggaggatctgcgcacggtgc

SEQ ID NO: 658155 - DNA, 25 bp, Homo sapien
gccgagaaatctagcaccttgcatg

SEQ ID NO: 658156 - DNA, 25 bp, Homo sapien
tgtggtcgtgccctgacagcatctt

SEQ ID NO: 658157 - DNA, 25 bp, Homo sapien
tcagatggccatgcaaggagatccc

SEQ ID NO: 658158 - DNA, 25 bp, Homo sapien
aagacattctaggatgccacgtggg

SEQ ID NO: 658159 - DNA, 25 bp, Homo sapien
ccagcccaggtagagtgggtcacct

SEQ ID NO: 658160 - DNA, 25 bp, Homo sapien
tcacctctgcttcgtggtcaggagc

SEQ ID NO: 658161 - DNA, 25 bp, Homo sapien
aaataaagctcagtctaaggccagg

SEQ ID NO: 658162 - DNA, 25 bp, Homo sapien
gtgcagatcccgggcacttccactg

SEQ ID NO: 658163 - DNA, 25 bp, Homo sapien
ggaagtgcagatcccgggcacttcc

SEQ ID NO: 658164 - DNA, 25 bp, Homo sapien
cagatcccgggcacttccactgtgg

SEQ ID NO: 658165 - DNA, 25 bp, Homo sapien
aggaagtgcagatcccgggcacttc

SEQ ID NO: 658166 - DNA, 25 bp, Homo sapien
agtgcagcatcaagcaggcagtgat

SEQ ID NO: 658167 - DNA, 25 bp, Homo sapien
gggcggcaaggagagccacatgcct

SEQ ID NO: 658168 - DNA, 25 bp, Homo sapien
tgcctgctgccattaagtctcccaa

SEQ ID NO: 658169 - DNA, 25 bp, Homo sapien
ccacgttctctgtgggtggtgccaa

SEQ ID NO: 658170 - DNA, 25 bp, Homo sapien
ccatgctcaggcctccgggcactgc

SEQ ID NO: 658171 - DNA, 25 bp, Homo sapien
cacagccatgctcaggcctccgggc

SEQ ID NO: 658172 - DNA, 25 bp, Homo sapien
agccatgctcaggcctccgggcact

SEQ ID NO: 658173 - DNA, 25 bp, Homo sapien
atgctcaggcctccgggcactgcag

SEQ ID NO: 658174 - DNA, 25 bp, Homo sapien
gggcttcaggataccgggctgctga

SEQ ID NO: 658175 - DNA, 25 bp, Homo sapien
tggaggaaaacgggaggagggcaga

SEQ ID NO: 658176 - DNA, 25 bp, Homo sapien
gaggagggcagaggtcttcatgctt

SEQ ID NO: 658177 - DNA, 25 bp, Homo sapien
ttcatgcttccttcccacggccagg

SEQ ID NO: 658178 - DNA, 25 bp, Homo sapien
gggcagaggtcttcatgcttccttc

SEQ ID NO: 658179 - DNA, 25 bp, Homo sapien
agtgctggtgctcaggctccgactt

SEQ ID NO: 658180 - DNA, 25 bp, Homo sapien
tcagtgctggtgctcaggctccgac

SEQ ID NO: 658181 - DNA, 25 bp, Homo sapien
tcaggctccgacttccccaggaatt

SEQ ID NO: 658182 - DNA, 25 bp, Homo sapien
tgctggtgctcaggctccgacttcc

SEQ ID NO: 658183 - DNA, 25 bp, Homo sapien
tggtgccaagtcaaagcccaacaca

SEQ ID NO: 658184 - DNA, 25 bp, Homo sapien
ccaggtacctgtgctaaagggacac

SEQ ID NO: 658185 - DNA, 25 bp, Homo sapien
gagccccatgaggatgcgctgtagc

SEQ ID NO: 658186 - DNA, 25 bp, Homo sapien
gcaaagcaaacccatactctgagcc

SEQ ID NO: 658187 - DNA, 25 bp, Homo sapien
acagcactgggaggcaattcaggcc

SEQ ID NO: 658188 - DNA, 25 bp, Homo sapien
cctctgacaggcaggtaggcgagtc

SEQ ID NO: 658189 - DNA, 25 bp, Homo sapien
ttggagctgactggcacaacacaac

SEQ ID NO: 658190 - DNA, 25 bp, Homo sapien
cagtgcttagggtcgaagtaccaca

SEQ ID NO: 658191 - DNA, 25 bp, Homo sapien
tctgccaaggaaatggaaggctccc

SEQ ID NO: 658192 - DNA, 25 bp, Homo sapien
tgctgcacgttaggtgtgagccagt

SEQ ID NO: 658193 - DNA, 25 bp, Homo sapien
cccgtgtgggtctgtacatccttta

SEQ ID NO: 658194 - DNA, 25 bp, Homo sapien
gatcatgtgaacagtcctggagcag

SEQ ID NO: 658195 - DNA, 25 bp, Homo sapien
tgaaagggcacaaactgaactttga

SEQ ID NO: 658196 - DNA, 25 bp, Homo sapien
gtaaatgtatttgtgcctgtagcca

SEQ ID NO: 658197 - DNA, 25 bp, Homo sapien
aaatctcggaagcttcgagctggtg

SEQ ID NO: 658198 - DNA, 25 bp, Homo sapien
cagctcagggctcttgtaaatgtat

SEQ ID NO: 658199 - DNA, 25 bp, Homo sapien
agtgtgcaagatgccagctacacca

SEQ ID NO: 658200 - DNA, 25 bp, Homo sapien
tgtccttccgaagcagcctggaggt

SEQ ID NO: 658201 - DNA, 25 bp, Homo sapien
gcctcctgagcctgacgtggctggt

SEQ ID NO: 658202 - DNA, 25 bp, Homo sapien
tcttggagacagcatcagtgggccc

SEQ ID NO: 658203 - DNA, 25 bp, Homo sapien
tcagcgtgcaggatgagcaggggac

SEQ ID NO: 658204 - DNA, 25 bp, Homo sapien
caccgggtcgtcctcagcgtgcagg

SEQ ID NO: 658205 - DNA, 25 bp, Homo sapien
accaccgggtcgtcctcagcgtgca

SEQ ID NO: 658206 - DNA, 25 bp, Homo sapien
gggcaccaccgggtcgtcctcagcg

SEQ ID NO: 658207 - DNA, 25 bp, Homo sapien
acaagcagggtttgttgcttaaaat

SEQ ID NO: 658208 - DNA, 25 bp, Homo sapien
tgtgaaccacggtccctagcaggct

SEQ ID NO: 658209 - DNA, 25 bp, Homo sapien
aaagacctgtttgctagagaatgac

SEQ ID NO: 658210 - DNA, 25 bp, Homo sapien
gattactgtgactaaagaggctcat

SEQ ID NO: 658211 - DNA, 25 bp, Homo sapien
tacactgaattccatcctatttgat

SEQ ID NO: 658212 - DNA, 25 bp, Homo sapien
aatttaattccactacttgtaatag

SEQ ID NO: 658213 - DNA, 25 bp, Homo sapien
caaacccagggaagtatcgatatat

SEQ ID NO: 658214 - DNA, 25 bp, Homo sapien
cactacttgtaataggatcaaggaa

SEQ ID NO: 658215 - DNA, 25 bp, Homo sapien
gtcaaacccagggaagtatcgatat

SEQ ID NO: 658216 - DNA, 25 bp, Homo sapien
caagggtgcagacagtttaagttca

SEQ ID NO: 658217 - DNA, 25 bp, Homo sapien
gatatccaggcacaggtcaagggtg

SEQ ID NO: 658218 - DNA, 25 bp, Homo sapien
tcagaaatctataaggcgttgccca

SEQ ID NO: 658219 - DNA, 25 bp, Homo sapien
ttcagaagcgttggttaagatatcc

SEQ ID NO: 658220 - DNA, 25 bp, Homo sapien
tgctgctaggaacagaagaatcacc

SEQ ID NO: 658221 - DNA, 25 bp, Homo sapien
ctggctttgctgctaggaacagaag

SEQ ID NO: 658222 - DNA, 25 bp, Homo sapien
aggaacagaagaatcacccgccagg

SEQ ID NO: 658223 - DNA, 25 bp, Homo sapien
gccgtgtcctggctttgctgctagg

SEQ ID NO: 658224 - DNA, 25 bp, Homo sapien
aagtggggtctatggacagtttcct

SEQ ID NO: 658225 - DNA, 25 bp, Homo sapien
agtggggtctatggacagtttcctc

SEQ ID NO: 658226 - DNA, 25 bp, Homo sapien
tccccaagataaaactggaaggcca

SEQ ID NO: 658227 - DNA, 25 bp, Homo sapien
cccaagcactgtctcatacacagag

SEQ ID NO: 658228 - DNA, 25 bp, Homo sapien
ccccaagataaaactggaaggccag

SEQ ID NO: 658229 - DNA, 25 bp, Homo sapien
aagcactgtctcatacacagagagg

SEQ ID NO: 658230 - DNA, 25 bp, Homo sapien
ggctcttagcttcttcgcggatatt

SEQ ID NO: 658231 - DNA, 25 bp, Homo sapien
gcttcttcgcggatattagtgaatg

SEQ ID NO: 658232 - DNA, 25 bp, Homo sapien
aaaatggatggctcttagcttcttc

SEQ ID NO: 658233 - DNA, 25 bp, Homo sapien
agtgaatggagattccaatataagg

SEQ ID NO: 658234 - DNA, 25 bp, Homo sapien
gataaacaaacagggaactgagagg

SEQ ID NO: 658235 - DNA, 25 bp, Homo sapien
aaacaaacagggaactgagaggtag

SEQ ID NO: 658236 - DNA, 25 bp, Homo sapien
caaacagggaactgagaggtaggca

SEQ ID NO: 658237 - DNA, 25 bp, Homo sapien
ctagataaacaaacagggaactgag

SEQ ID NO: 658238 - DNA, 25 bp, Homo sapien
ggcgccgcaccagatttgtcgccac

SEQ ID NO: 658239 - DNA, 25 bp, Homo sapien
gcgccgcaccagatttgtcgccacg

SEQ ID NO: 658240 - DNA, 25 bp, Homo sapien
aggcgccgcaccagatttgtcgcca

SEQ ID NO: 658241 - DNA, 25 bp, Homo sapien
agatggcgttcccactgagtcaccc

SEQ ID NO: 658242 - DNA, 25 bp, Homo sapien
gagagtggccccagatgtacacggg

SEQ ID NO: 658243 - DNA, 25 bp, Homo sapien
ggtcatgccccgctcagatggcgtt

SEQ ID NO: 658244 - DNA, 25 bp, Homo sapien
tttgatccagtcaaaaacgtggagt

SEQ ID NO: 658245 - DNA, 25 bp, Homo sapien
agtggagtccggaggctcccagaac

SEQ ID NO: 658246 - DNA, 25 bp, Homo sapien
ggttcaaggcaaccatgacccagga

SEQ ID NO: 658247 - DNA, 25 bp, Homo sapien
tccccttagggtctaattagcatct

SEQ ID NO: 658248 - DNA, 25 bp, Homo sapien
ctcaacgccgaaggcttggtcaggg

SEQ ID NO: 658249 - DNA, 25 bp, Homo sapien
ctcttcgagtgaggcctgcccatgg

SEQ ID NO: 658250 - DNA, 25 bp, Homo sapien
cagtggaattgtgctcagatgctct

SEQ ID NO: 658251 - DNA, 25 bp, Homo sapien
aacagcgggtgtggtgtcgcattcc

SEQ ID NO: 658252 - DNA, 25 bp, Homo sapien
atgggataccgccagcaagcagtgg

SEQ ID NO: 658253 - DNA, 25 bp, Homo sapien
acatggtaaccaagggaactcagca

SEQ ID NO: 658254 - DNA, 25 bp, Homo sapien
catggtaaccaagggaactcagcac

SEQ ID NO: 658255 - DNA, 25 bp, Homo sapien
cagctccactcgtgctgcagggcag

SEQ ID NO: 658256 - DNA, 25 bp, Homo sapien
gcagctccactcgtgctgcagggca

SEQ ID NO: 658257 - DNA, 25 bp, Homo sapien
ggccgcagctccactcgtgctgcag

SEQ ID NO: 658258 - DNA, 25 bp, Homo sapien
tgtccggccgcagctccactcgtgc

SEQ ID NO: 658259 - DNA, 25 bp, Homo sapien
cattttatacacaagtaacgtaaca

SEQ ID NO: 658260 - DNA, 25 bp, Homo sapien
tccagtgctgcttatgtagtctgcc

SEQ ID NO: 658261 - DNA, 25 bp, Homo sapien
tatctgcacttggtctacaaagccc

SEQ ID NO: 658262 - DNA, 25 bp, Homo sapien
cagtgtgatgggcagtcacagcaga

SEQ ID NO: 658263 - DNA, 25 bp, Homo sapien
tgtaaagctccacgcggtggtcgcc

SEQ ID NO: 658264 - DNA, 25 bp, Homo sapien
taaagctccacgcggtggtcgcctc

SEQ ID NO: 658265 - DNA, 25 bp, Homo sapien
cttgtaaagctccacgcggtggtcg

SEQ ID NO: 658266 - DNA, 25 bp, Homo sapien
aagctccacgcggtggtcgcctcct

SEQ ID NO: 658267 - DNA, 25 bp, Homo sapien
tctgcagcttgtcccagacaaagaa

SEQ ID NO: 658268 - DNA, 25 bp, Homo sapien
catgattctgtagctagacacgcca

SEQ ID NO: 658269 - DNA, 25 bp, Homo sapien
ctgacacagaaaccgcttcacgggc

SEQ ID NO: 658270 - DNA, 25 bp, Homo sapien
gatgctgcaagagctgtttgtagcc

SEQ ID NO: 658271 - DNA, 25 bp, Homo sapien
gccacttcaggcagcatgacagata

SEQ ID NO: 658272 - DNA, 25 bp, Homo sapien
cctcattgcagtgggtcagtacacc

SEQ ID NO: 658273 - DNA, 25 bp, Homo sapien
ctgtgggaaccctgcttcatgtaaa

SEQ ID NO: 658274 - DNA, 25 bp, Homo sapien
aacaagctgccagtgagctgaagcc

SEQ ID NO: 658275 - DNA, 25 bp, Homo sapien
tgcaggtacagaatgatagggtggc

SEQ ID NO: 658276 - DNA, 25 bp, Homo sapien
tggtacctgcgttcccatgcaggta

SEQ ID NO: 658277 - DNA, 25 bp, Homo sapien
aagccaaggcatcctcataccacat

SEQ ID NO: 658278 - DNA, 25 bp, Homo sapien
catctggtctttgccttgggcgttc

SEQ ID NO: 658279 - DNA, 25 bp, Homo sapien
tgtgattcttcccttatattctctt

SEQ ID NO: 658280 - DNA, 25 bp, Homo sapien
gccaccgcgcctggatggaagatat

SEQ ID NO: 658281 - DNA, 25 bp, Homo sapien
gaagatatattcaaaccagtgtttg

SEQ ID NO: 658282 - DNA, 25 bp, Homo sapien
ttcaaaccagtgtttgtgattcttc

SEQ ID NO: 658283 - DNA, 25 bp, Homo sapien
gttacacgtgtgattcaaaccttga

SEQ ID NO: 658284 - DNA, 25 bp, Homo sapien
ccttgatcctgtggttttttcaaat

SEQ ID NO: 658285 - DNA, 25 bp, Homo sapien
caggtagtagttacacgtgtgattc

SEQ ID NO: 658286 - DNA, 25 bp, Homo sapien
caatggtcacgtcttcctctggctg

SEQ ID NO: 658287 - DNA, 25 bp, Homo sapien
catgcaaatgaaacacgacctccac

SEQ ID NO: 658288 - DNA, 25 bp, Homo sapien
tgcgggtgcggtagccccactttgt

SEQ ID NO: 658289 - DNA, 25 bp, Homo sapien
aaatgaaacacgacctccacatgtg

SEQ ID NO: 658290 - DNA, 25 bp, Homo sapien
gaggaacctccaggacctgcgggca

SEQ ID NO: 658291 - DNA, 25 bp, Homo sapien
agtcagggaggtaatgagcctggcc

SEQ ID NO: 658292 - DNA, 25 bp, Homo sapien
aagtcagggaggtaatgagcctggc

SEQ ID NO: 658293 - DNA, 25 bp, Homo sapien
gtcagggaggtaatgagcctggccc

SEQ ID NO: 658294 - DNA, 25 bp, Homo sapien
ggaagtcagggaggtaatgagcctg

SEQ ID NO: 658295 - DNA, 25 bp, Homo sapien
ttaagccactcagtttgcaggtttg

SEQ ID NO: 658296 - DNA, 25 bp, Homo sapien
gcctccacaaccatgagaggataca

SEQ ID NO: 658297 - DNA, 25 bp, Homo sapien
gtttgcaggtttgtttgagcggccc

SEQ ID NO: 658298 - DNA, 25 bp, Homo sapien
cggccctaagaaataaatgcagcca

SEQ ID NO: 658299 - DNA, 25 bp, Homo sapien
cctcggcgacgcagacaggcacaga

SEQ ID NO: 658300 - DNA, 25 bp, Homo sapien
tcctcggcgacgcagacaggcacag

SEQ ID NO: 658301 - DNA, 25 bp, Homo sapien
ctcggcgacgcagacaggcacagac

SEQ ID NO: 658302 - DNA, 25 bp, Homo sapien
ctcctcggcgacgcagacaggcaca

SEQ ID NO: 658303 - DNA, 25 bp, Homo sapien
tgtaaaccttggacgcacattacaa

SEQ ID NO: 658304 - DNA, 25 bp, Homo sapien
ccttggacgcacattacaactggaa

SEQ ID NO: 658305 - DNA, 25 bp, Homo sapien
gacagagaaccacacttggaagggc

SEQ ID NO: 658306 - DNA, 25 bp, Homo sapien
gaagggcctcatgtgctgataaaac

SEQ ID NO: 658307 - DNA, 25 bp, Homo sapien
agacagatacgctggtcccccaggg

SEQ ID NO: 658308 - DNA, 25 bp, Homo sapien
ctcagctgaagacagatacgctggt

SEQ ID NO: 658309 - DNA, 25 bp, Homo sapien
agctgaagacagatacgctggtccc

SEQ ID NO: 658310 - DNA, 25 bp, Homo sapien
gctgaagacagatacgctggtcccc

SEQ ID NO: 658311 - DNA, 25 bp, Homo sapien
ctggggagcaacactagcacagaaa

SEQ ID NO: 658312 - DNA, 25 bp, Homo sapien
gggagcaacactagcacagaaagtc

SEQ ID NO: 658313 - DNA, 25 bp, Homo sapien
gagcaacactagcacagaaagtcct

SEQ ID NO: 658314 - DNA, 25 bp, Homo sapien
agcaacactagcacagaaagtcctc

SEQ ID NO: 658315 - DNA, 25 bp, Homo sapien
ggaatggcaatgtacaaccccaaaa

SEQ ID NO: 658316 - DNA, 25 bp, Homo sapien
agtatcttcctcaggcgcaaccaca

SEQ ID NO: 658317 - DNA, 25 bp, Homo sapien
aaagtatcttcctcaggcgcaacca

SEQ ID NO: 658318 - DNA, 25 bp, Homo sapien
cctcaggcgcaaccacacgcccttt

SEQ ID NO: 658319 - DNA, 25 bp, Homo sapien
agcagagaaagcagaccccaccatg

SEQ ID NO: 658320 - DNA, 25 bp, Homo sapien
tgcagaagaatacagcagagaaagc

SEQ ID NO: 658321 - DNA, 25 bp, Homo sapien
gcagagaaagcagaccccaccatgc

SEQ ID NO: 658322 - DNA, 25 bp, Homo sapien
ccttgcagaagaatacagcagagaa

SEQ ID NO: 658323 - DNA, 25 bp, Homo sapien
aagagcggcctcctcaggcctcccg

SEQ ID NO: 658324 - DNA, 25 bp, Homo sapien
cgtatcaggaaagagcggcctcctc

SEQ ID NO: 658325 - DNA, 25 bp, Homo sapien
gaaagagcggcctcctcaggcctcc

SEQ ID NO: 658326 - DNA, 25 bp, Homo sapien
ctcgtatcaggaaagagcggcctcc

SEQ ID NO: 658327 - DNA, 25 bp, Homo sapien
cattggactgacacagtaagtcagg

SEQ ID NO: 658328 - DNA, 25 bp, Homo sapien
cagggacaaggccattggactgaca

SEQ ID NO: 658329 - DNA, 25 bp, Homo sapien
caaggccattggactgacacagtaa

SEQ ID NO: 658330 - DNA, 25 bp, Homo sapien
cacagtaagtcaggaatacaagagt

SEQ ID NO: 658331 - DNA, 25 bp, Homo sapien
tgaatgtagcactagatcatatttg

SEQ ID NO: 658332 - DNA, 25 bp, Homo sapien
ccaaaaaccagaatctggcctgaag

SEQ ID NO: 658333 - DNA, 25 bp, Homo sapien
gaatgtagcactagatcatatttgg

SEQ ID NO: 658334 - DNA, 25 bp, Homo sapien
aatgtagcactagatcatatttggc

SEQ ID NO: 658335 - DNA, 25 bp, Homo sapien
ttcacaggtgtagcggcagaagacg

SEQ ID NO: 658336 - DNA, 25 bp, Homo sapien
tgtggtgccagttcacaggtgtagc

SEQ ID NO: 658337 - DNA, 25 bp, Homo sapien
gcagaagacggacacagggtgcaca

SEQ ID NO: 658338 - DNA, 25 bp, Homo sapien
aagacggacacagggtgcacactgt

SEQ ID NO: 658339 - DNA, 25 bp, Homo sapien
gcaggaaacaggcaggcaggaaggt

SEQ ID NO: 658340 - DNA, 25 bp, Homo sapien
tggaggcaggaaacaggcaggcagg

SEQ ID NO: 658341 - DNA, 25 bp, Homo sapien
ctggaggcaggaaacaggcaggcag

SEQ ID NO: 658342 - DNA, 25 bp, Homo sapien
aggcaggaaacaggcaggcaggaag

SEQ ID NO: 658343 - DNA, 25 bp, Homo sapien
cagctctggtgacagaatacgttct

SEQ ID NO: 658344 - DNA, 25 bp, Homo sapien
tgtttgctattcatgcctcatagtc

SEQ ID NO: 658345 - DNA, 25 bp, Homo sapien
acattctggtttttcagcatcgatt

SEQ ID NO: 658346 - DNA, 25 bp, Homo sapien
ttcagcatcgattgccactgtttgc

SEQ ID NO: 658347 - DNA, 25 bp, Homo sapien
gatgcagtttctgcgcttggtggtg

SEQ ID NO: 658348 - DNA, 25 bp, Homo sapien
tgttgatgaagcctgtttctattga

SEQ ID NO: 658349 - DNA, 25 bp, Homo sapien
tttctgcgcttggtggtgatgaaga

SEQ ID NO: 658350 - DNA, 25 bp, Homo sapien
tgtgttgatgaagcctgtttctatt

SEQ ID NO: 658351 - DNA, 25 bp, Homo sapien
gtaaagccttcccatcaaacagcat

SEQ ID NO: 658352 - DNA, 25 bp, Homo sapien
cctgagtgtactatgtaaagccttc

SEQ ID NO: 658353 - DNA, 25 bp, Homo sapien
ttcccatcaaacagcatctgtaaaa

SEQ ID NO: 658354 - DNA, 25 bp, Homo sapien
ctgagtgtactatgtaaagccttcc

SEQ ID NO: 658355 - DNA, 25 bp, Homo sapien
cctgcaatcccacgctaagcggctg

SEQ ID NO: 658356 - DNA, 25 bp, Homo sapien
tgcaatcccacgctaagcggctgct

SEQ ID NO: 658357 - DNA, 25 bp, Homo sapien
cgcccctgcaatcccacgctaagcg

SEQ ID NO: 658358 - DNA, 25 bp, Homo sapien
aatcccacgctaagcggctgctgaa

SEQ ID NO: 658359 - DNA, 25 bp, Homo sapien
ctggtccacactgaagcttgccgtc

SEQ ID NO: 658360 - DNA, 25 bp, Homo sapien
gcttgccgtctgcaaccacagaatc

SEQ ID NO: 658361 - DNA, 25 bp, Homo sapien
acactgaagcttgccgtctgcaacc

SEQ ID NO: 658362 - DNA, 25 bp, Homo sapien
cagtccctggtccacactgaagctt

SEQ ID NO: 658363 - DNA, 25 bp, Homo sapien
tattacaggtacacgcacccacgcc

SEQ ID NO: 658364 - DNA, 25 bp, Homo sapien
gtattacaggtacacgcacccacgc

SEQ ID NO: 658365 - DNA, 25 bp, Homo sapien
caacgtgagtaaggcctcatgtggc

SEQ ID NO: 658366 - DNA, 25 bp, Homo sapien
tacatttcccagctcaacatggagg

SEQ ID NO: 658367 - DNA, 25 bp, Homo sapien
gtaactctgggcaaacactctcaca

SEQ ID NO: 658368 - DNA, 25 bp, Homo sapien
tgtactgtcccttccctacggagtg

SEQ ID NO: 658369 - DNA, 25 bp, Homo sapien
ggctcatggcacttctgtaggtcat

SEQ ID NO: 658370 - DNA, 25 bp, Homo sapien
aggctcatggcacttctgtaggtca

SEQ ID NO: 658371 - DNA, 25 bp, Homo sapien
actagtaccttgacgactctagtgc

SEQ ID NO: 658372 - DNA, 25 bp, Homo sapien
tgggtgtacaaataaatggctctta

SEQ ID NO: 658373 - DNA, 25 bp, Homo sapien
atactgttgtgtaatcaccactacc

SEQ ID NO: 658374 - DNA, 25 bp, Homo sapien
gactctagtgcctcacgtaagtgga

SEQ ID NO: 658375 - DNA, 25 bp, Homo sapien
actgcaatccagctaggcacggaag

SEQ ID NO: 658376 - DNA, 25 bp, Homo sapien
ttaacactgcaatccagctaggcac

SEQ ID NO: 658377 - DNA, 25 bp, Homo sapien
aacactgcaatccagctaggcacgg

SEQ ID NO: 658378 - DNA, 25 bp, Homo sapien
cactgcaatccagctaggcacggaa

SEQ ID NO: 658379 - DNA, 25 bp, Homo sapien
ttgccattcctggaaccacagcgct

SEQ ID NO: 658380 - DNA, 25 bp, Homo sapien
tcttgccttctttcgccttgccaca

SEQ ID NO: 658381 - DNA, 25 bp, Homo sapien
ttcttgccttctttcgccttgccac

SEQ ID NO: 658382 - DNA, 25 bp, Homo sapien
attcctggaaccacagcgctccatg

SEQ ID NO: 658383 - DNA, 25 bp, Homo sapien
tttctccccgtaaatggacttgcca

SEQ ID NO: 658384 - DNA, 25 bp, Homo sapien
ttctccccgtaaatggacttgccac

SEQ ID NO: 658385 - DNA, 25 bp, Homo sapien
cagtgccattatgggtgtgaagtca

SEQ ID NO: 658386 - DNA, 25 bp, Homo sapien
agtgccattatgggtgtgaagtcac

SEQ ID NO: 658387 - DNA, 25 bp, Homo sapien
gcccaagggcttgccttcgtcagca

SEQ ID NO: 658388 - DNA, 25 bp, Homo sapien
gccttcgtcagcaatgttgaagaac

SEQ ID NO: 658389 - DNA, 25 bp, Homo sapien
caagggcttgccttcgtcagcaatg

SEQ ID NO: 658390 - DNA, 25 bp, Homo sapien
ggcttgccttcgtcagcaatgttga

SEQ ID NO: 658391 - DNA, 25 bp, Homo sapien
atagtacagggctcccagcggcggt

SEQ ID NO: 658392 - DNA, 25 bp, Homo sapien
tagtacagggctcccagcggcggtg

SEQ ID NO: 658393 - DNA, 25 bp, Homo sapien
tgatagtacagggctcccagcggcg

SEQ ID NO: 658394 - DNA, 25 bp, Homo sapien
gtacagggctcccagcggcggtggc

SEQ ID NO: 658395 - DNA, 25 bp, Homo sapien
gctgcaacttaccagaagctatttc

SEQ ID NO: 658396 - DNA, 25 bp, Homo sapien
aattgttctgcctctactgttctac

SEQ ID NO: 658397 - DNA, 25 bp, Homo sapien
cgagagtgatcagctaattaggaag

SEQ ID NO: 658398 - DNA, 25 bp, Homo sapien
tcccatcatgagcaagctgcaactt

SEQ ID NO: 658399 - DNA, 25 bp, Homo sapien
acactggactggtggtcacggttcc

SEQ ID NO: 658400 - DNA, 25 bp, Homo sapien
gatggtagccctgcactggatttca

SEQ ID NO: 658401 - DNA, 25 bp, Homo sapien
caagccgctctatcaggatggtagc

SEQ ID NO: 658402 - DNA, 25 bp, Homo sapien
ggcccccaaggagtgtctatgtccc

SEQ ID NO: 658403 - DNA, 25 bp, Homo sapien
taatagcatttcagccaacagtgga

SEQ ID NO: 658404 - DNA, 25 bp, Homo sapien
cacctggtcaagaattttggacgga

SEQ ID NO: 658405 - DNA, 25 bp, Homo sapien
gaccacttatacaatggttgtccca

SEQ ID NO: 658406 - DNA, 25 bp, Homo sapien
cacctgcgcttaagtgcagtctcca

SEQ ID NO: 658407 - DNA, 25 bp, Homo sapien
tcagctagggtactgtagggctcac

SEQ ID NO: 658408 - DNA, 25 bp, Homo sapien
cctggaatttcccactactgaagca

SEQ ID NO: 658409 - DNA, 25 bp, Homo sapien
catggcgtggaagctctctcaagga

SEQ ID NO: 658410 - DNA, 25 bp, Homo sapien
tgtcctttgttgcttggtgcccagt

SEQ ID NO: 658411 - DNA, 25 bp, Homo sapien
tcaactccttcattaatgtaaccat

SEQ ID NO: 658412 - DNA, 25 bp, Homo sapien
atcaaaattgttgaggaaaagtgtt

SEQ ID NO: 658413 - DNA, 25 bp, Homo sapien
tcattaatgtaaccatcaaaattgt

SEQ ID NO: 658414 - DNA, 25 bp, Homo sapien
atcaactccttcattaatgtaacca

SEQ ID NO: 658415 - DNA, 25 bp, Homo sapien
ttctccagccatccctgtattttct

SEQ ID NO: 658416 - DNA, 25 bp, Homo sapien
ccagccatccctgtattttctcttt

SEQ ID NO: 658417 - DNA, 25 bp, Homo sapien
ctctttgccaaaggcatcatcaaag

SEQ ID NO: 658418 - DNA, 25 bp, Homo sapien
ttttctctttgccaaaggcatcatc

SEQ ID NO: 658419 - DNA, 25 bp, Homo sapien
cccctgaggtatgcgtgtattccct

SEQ ID NO: 658420 - DNA, 25 bp, Homo sapien
ctgaggtatgcgtgtattccctcac

SEQ ID NO: 658421 - DNA, 25 bp, Homo sapien
caagaacaaaccctaagtttcagca

SEQ ID NO: 658422 - DNA, 25 bp, Homo sapien
cagcacccctgaggtatgcgtgtat

SEQ ID NO: 658423 - DNA, 25 bp, Homo sapien
agccgtgtccacgttcacctttaca

SEQ ID NO: 658424 - DNA, 25 bp, Homo sapien
acagccgtgtccacgttcaccttta

SEQ ID NO: 658425 - DNA, 25 bp, Homo sapien
tgacagccgtgtccacgttcacctt

SEQ ID NO: 658426 - DNA, 25 bp, Homo sapien
gccgtgtccacgttcacctttacaa

SEQ ID NO: 658427 - DNA, 25 bp, Homo sapien
agttcatgtgaacctttcgcccacc

SEQ ID NO: 658428 - DNA, 25 bp, Homo sapien
aatctgtgtaccagcaagccctggg

SEQ ID NO: 658429 - DNA, 25 bp, Homo sapien
ggagcactcaactatgcagaacatg

SEQ ID NO: 658430 - DNA, 25 bp, Homo sapien
caatgaagacacttagcaatctgtg

SEQ ID NO: 658431 - DNA, 25 bp, Homo sapien
ctagctcagaactcgctcccatctt

SEQ ID NO: 658432 - DNA, 25 bp, Homo sapien
agctcagaactcgctcccatcttcc

SEQ ID NO: 658433 - DNA, 25 bp, Homo sapien
tagctcagaactcgctcccatcttc

SEQ ID NO: 658434 - DNA, 25 bp, Homo sapien
ctaagaaggcctcagtgaggaggag

SEQ ID NO: 658435 - DNA, 25 bp, Homo sapien
gtgaggaggaggtgatggtggcgca

SEQ ID NO: 658436 - DNA, 25 bp, Homo sapien
tgaggaggaggtgatggtggcgcag

SEQ ID NO: 658437 - DNA, 25 bp, Homo sapien
ggaggaggtgatggtggcgcagagc

SEQ ID NO: 658438 - DNA, 25 bp, Homo sapien
ggcccaaggcgccagtaaggctccg

SEQ ID NO: 658439 - DNA, 25 bp, Homo sapien
tcagggtctggcgccggcccctctg

SEQ ID NO: 658440 - DNA, 25 bp, Homo sapien
ggaggtccgagtgggccccagcgct

SEQ ID NO: 658441 - DNA, 25 bp, Homo sapien
aggcgccagtaaggctccgcgcacg

SEQ ID NO: 658442 - DNA, 25 bp, Homo sapien
agggcagggcgctcccgccgcggtg

SEQ ID NO: 658443 - DNA, 25 bp, Homo sapien
cagggcagggcgctcccgccgcggt

SEQ ID NO: 658444 - DNA, 25 bp, Homo sapien
cggcagggcagggcgctcccgccgc

SEQ ID NO: 658445 - DNA, 25 bp, Homo sapien
tcagcggcagggcagggcgctcccg

SEQ ID NO: 658446 - DNA, 25 bp, Homo sapien
gacgcacctgcgcaaagtgagggac

SEQ ID NO: 658447 - DNA, 25 bp, Homo sapien
cctgcgggacgcacctgcgcaaagt

SEQ ID NO: 658448 - DNA, 25 bp, Homo sapien
ggatcgggcggacggccactctggg

SEQ ID NO: 658449 - DNA, 25 bp, Homo sapien
acctgcgcaaagtgagggaccggcc

SEQ ID NO: 658450 - DNA, 25 bp, Homo sapien
agcgctcatgctccaaggcgacggg

SEQ ID NO: 658451 - DNA, 25 bp, Homo sapien
tgcttcaggcggcagtcggcgtcca

SEQ ID NO: 658452 - DNA, 25 bp, Homo sapien
aggcgacgggctcggtccgcttcct

SEQ ID NO: 658453 - DNA, 25 bp, Homo sapien
ccgtcaggcgtaggttctgcttcag

SEQ ID NO: 658454 - DNA, 25 bp, Homo sapien
gggccagccgccgacggcgcccgct

SEQ ID NO: 658455 - DNA, 25 bp, Homo sapien
ggccagccgccgacggcgcccgctg

SEQ ID NO: 658456 - DNA, 25 bp, Homo sapien
gccagccgccgacggcgcccgctgg

SEQ ID NO: 658457 - DNA, 25 bp, Homo sapien
gcgccggctacgaaccagcggcggg

SEQ ID NO: 658458 - DNA, 25 bp, Homo sapien
ccgctgcgccggctacgaaccagcg

SEQ ID NO: 658459 - DNA, 25 bp, Homo sapien
ggagcccggaacccgccgctcctca

SEQ ID NO: 658460 - DNA, 25 bp, Homo sapien
ctagttccaaggagcgcgcgcccag

SEQ ID NO: 658461 - DNA, 25 bp, Homo sapien
tggatgtcccttttcgggcgccgta

SEQ ID NO: 658462 - DNA, 25 bp, Homo sapien
tttgttcggcgccaaagcgcggagc

SEQ ID NO: 658463 - DNA, 25 bp, Homo sapien
cccctcttggaatgcggctgagcgg

SEQ ID NO: 658464 - DNA, 25 bp, Homo sapien
ccgtaggcgcgttcctattggctag

SEQ ID NO: 658465 - DNA, 25 bp, Homo sapien
gccatttgtatatgccacagcattt

SEQ ID NO: 658466 - DNA, 25 bp, Homo sapien
gttgattttggaattgtgccatttg

SEQ ID NO: 658467 - DNA, 25 bp, Homo sapien
ccatcaggaattacatcttttgagc

SEQ ID NO: 658468 - DNA, 25 bp, Homo sapien
tagaagtcatgcttgcattttccat

SEQ ID NO: 658469 - DNA, 25 bp, Homo sapien
gaagcacatgggcttgagtctgcca

SEQ ID NO: 658470 - DNA, 25 bp, Homo sapien
tctgcttgagcaattgcatcgtggc

SEQ ID NO: 658471 - DNA, 25 bp, Homo sapien
gatccctgccttgttaactctgagc

SEQ ID NO: 658472 - DNA, 25 bp, Homo sapien
tatccctgacagcttataggagcct

SEQ ID NO: 658473 - DNA, 25 bp, Homo sapien
taggtgtttatgtttgtaactataa

SEQ ID NO: 658474 - DNA, 25 bp, Homo sapien
tgtaggtgtttatgtttgtaactat

SEQ ID NO: 658475 - DNA, 25 bp, Homo sapien
gtaggtgtttatgtttgtaactata

SEQ ID NO: 658476 - DNA, 25 bp, Homo sapien
ctgcccctgggccaactttgtattt

SEQ ID NO: 658477 - DNA, 25 bp, Homo sapien
ggcgtgatccactgcccctgggcca

SEQ ID NO: 658478 - DNA, 25 bp, Homo sapien
ccgcctaccttggtgtcctaaagtg

SEQ ID NO: 658479 - DNA, 25 bp, Homo sapien
cgcctaccttggtgtcctaaagtgc

SEQ ID NO: 658480 - DNA, 25 bp, Homo sapien
tgaagaaccagtcaacttcatgttg

SEQ ID NO: 658481 - DNA, 25 bp, Homo sapien
tgccgaatcttccaaagaaccgacc

SEQ ID NO: 658482 - DNA, 25 bp, Homo sapien
tatctttccacggtgctgtgacatt

SEQ ID NO: 658483 - DNA, 25 bp, Homo sapien
tatcatcagtaaactttgaagaacc

SEQ ID NO: 658484 - DNA, 25 bp, Homo sapien
taaaaacgccggcttctgcaacatg

SEQ ID NO: 658485 - DNA, 25 bp, Homo sapien
tcatgacccacggaatctaaggcag

SEQ ID NO: 658486 - DNA, 25 bp, Homo sapien
tactcaggaccgctaataaaaacgc

SEQ ID NO: 658487 - DNA, 25 bp, Homo sapien
tctggaatgtgtgtacgcaccctcc

SEQ ID NO: 658488 - DNA, 25 bp, Homo sapien
gggctgcgggggcaatcctactgac

SEQ ID NO: 658489 - DNA, 25 bp, Homo sapien
tcctcggtggcctgaagtgctctca

SEQ ID NO: 658490 - DNA, 25 bp, Homo sapien
gcagcaggtcggacttcgtgttctt

SEQ ID NO: 658491 - DNA, 25 bp, Homo sapien
caagaggcggctttgtttctcggcg

SEQ ID NO: 658492 - DNA, 25 bp, Homo sapien
tgagagcgcgaactttttcttccaa

SEQ ID NO: 658493 - DNA, 25 bp, Homo sapien
tggctttcagctgtttctcatgttc

SEQ ID NO: 658494 - DNA, 25 bp, Homo sapien
tcttccacccgctcttctgtggctt

SEQ ID NO: 658495 - DNA, 25 bp, Homo sapien
ttatccactttctcttggaggagca

SEQ ID NO: 658496 - DNA, 25 bp, Homo sapien
ttcagaatcatctccgcctcttcca

SEQ ID NO: 658497 - DNA, 25 bp, Homo sapien
aaattagtggcctagtgaggtggtt

SEQ ID NO: 658498 - DNA, 25 bp, Homo sapien
aagaatcagctcaaggctatttatt

SEQ ID NO: 658499 - DNA, 25 bp, Homo sapien
tggcctagtgaggtggtttacacct

SEQ ID NO: 658500 - DNA, 25 bp, Homo sapien
gaatcagctcaaggctatttatttt

SEQ ID NO: 658501 - DNA, 25 bp, Homo sapien
tgcagctcggccacacggtcctggg

SEQ ID NO: 658502 - DNA, 25 bp, Homo sapien
agcaggcgatgcagctcggccacac

SEQ ID NO: 658503 - DNA, 25 bp, Homo sapien
cgctgtgcatccaggcgcctcctgg

SEQ ID NO: 658504 - DNA, 25 bp, Homo sapien
ggcgatgcagctcggccacacggtc

SEQ ID NO: 658505 - DNA, 25 bp, Homo sapien
gcctcagcctcaggtgagctccctg

SEQ ID NO: 658506 - DNA, 25 bp, Homo sapien
tcagcctcaggtgagctccctgcac

SEQ ID NO: 658507 - DNA, 25 bp, Homo sapien
tgcctcagcctcaggtgagctccct

SEQ ID NO: 658508 - DNA, 25 bp, Homo sapien
ctcagcctcaggtgagctccctgca

SEQ ID NO: 658509 - DNA, 25 bp, Homo sapien
gccagcgcttccacacagtgctaga

SEQ ID NO: 658510 - DNA, 25 bp, Homo sapien
tcccgagtatgcagcagcacctgaa

SEQ ID NO: 658511 - DNA, 25 bp, Homo sapien
gacaacacggactgctgaagggaag

SEQ ID NO: 658512 - DNA, 25 bp, Homo sapien
tttggaattcggacagccaggctgc

SEQ ID NO: 658513 - DNA, 25 bp, Homo sapien
tacagaggccagtgtcatgcatgcc

SEQ ID NO: 658514 - DNA, 25 bp, Homo sapien
ttggttctgacgacacagtccccag

SEQ ID NO: 658515 - DNA, 25 bp, Homo sapien
catgcatgcccatgagtgcccatgt

SEQ ID NO: 658516 - DNA, 25 bp, Homo sapien
cagcagatgtggcacccggaggcgt

SEQ ID NO: 658517 - DNA, 25 bp, Homo sapien
gatgttcctgattcaggcattcaag

SEQ ID NO: 658518 - DNA, 25 bp, Homo sapien
tctgggtcagctctgaccatggcag

SEQ ID NO: 658519 - DNA, 25 bp, Homo sapien
gtctgggtcagctctgaccatggca

SEQ ID NO: 658520 - DNA, 25 bp, Homo sapien
caagttcaactctaagtttttggat

SEQ ID NO: 658521 - DNA, 25 bp, Homo sapien
ggataattgatccttgtagttctga

SEQ ID NO: 658522 - DNA, 25 bp, Homo sapien
gatgctcctcgttttgggcctggtg

SEQ ID NO: 658523 - DNA, 25 bp, Homo sapien
gaagcctcctgtcccagttgaagaa

SEQ ID NO: 658524 - DNA, 25 bp, Homo sapien
cctgacattgagctgggataattga

SEQ ID NO: 658525 - DNA, 25 bp, Homo sapien
atacatttgcccatcattggctata

SEQ ID NO: 658526 - DNA, 25 bp, Homo sapien
tatacatttgcccatcattggctat

SEQ ID NO: 658527 - DNA, 25 bp, Homo sapien
tatatacatttgcccatcattggct

SEQ ID NO: 658528 - DNA, 25 bp, Homo sapien
atatatacatttgcccatcattggc

SEQ ID NO: 658529 - DNA, 25 bp, Homo sapien
gactagaacatcaccagggaaacca

SEQ ID NO: 658530 - DNA, 25 bp, Homo sapien
ttgcaagactagaacatcaccaggg

SEQ ID NO: 658531 - DNA, 25 bp, Homo sapien
aataatttcagacttgaacagttgc

SEQ ID NO: 658532 - DNA, 25 bp, Homo sapien
cttgaacagttgcaagactagaaca

SEQ ID NO: 658533 - DNA, 25 bp, Homo sapien
cattttgtcaacgagcctggcagca

SEQ ID NO: 658534 - DNA, 25 bp, Homo sapien
gctgctgtgcagctactgcttcagg

SEQ ID NO: 658535 - DNA, 25 bp, Homo sapien
gggacagcagctctcacgcggctgc

SEQ ID NO: 658536 - DNA, 25 bp, Homo sapien
caggcgcacacatgatgtcttccct

SEQ ID NO: 658537 - DNA, 25 bp, Homo sapien
tgtctgttgagcacctccatctcag

SEQ ID NO: 658538 - DNA, 25 bp, Homo sapien
tccatctcagagcaggccttttcct

SEQ ID NO: 658539 - DNA, 25 bp, Homo sapien
tgagcacctccatctcagagcaggc

SEQ ID NO: 658540 - DNA, 25 bp, Homo sapien
ctccatctcagagcaggccttttcc

SEQ ID NO: 658541 - DNA, 25 bp, Homo sapien
cttgccgaacccttcccagatcgtt

SEQ ID NO: 658542 - DNA, 25 bp, Homo sapien
ctgtgcatcgtgagtactttctgca

SEQ ID NO: 658543 - DNA, 25 bp, Homo sapien
cccagatcgtttttcaacaaagtgt

SEQ ID NO: 658544 - DNA, 25 bp, Homo sapien
tgcagcttcaagctcttgccgaacc

SEQ ID NO: 658545 - DNA, 25 bp, Homo sapien
tgaaaaatctttggaagcgagggcc

SEQ ID NO: 658546 - DNA, 25 bp, Homo sapien
gccacatagcaccattagcaacagg

SEQ ID NO: 658547 - DNA, 25 bp, Homo sapien
gagcaccagatgaccgtggcattcc

SEQ ID NO: 658548 - DNA, 25 bp, Homo sapien
gggtcagtgggttagttctgcattt

SEQ ID NO: 658549 - DNA, 25 bp, Homo sapien
gttttaagaatgagtagaaggcaaa

SEQ ID NO: 658550 - DNA, 25 bp, Homo sapien
ttttaagaatgagtagaaggcaaac

SEQ ID NO: 658551 - DNA, 25 bp, Homo sapien
tgtttctccagagcccggacgacgt

SEQ ID NO: 658552 - DNA, 25 bp, Homo sapien
tacatgtttctccagagcccggacg

SEQ ID NO: 658553 - DNA, 25 bp, Homo sapien
caaatctacatgtttctccagagcc

SEQ ID NO: 658554 - DNA, 25 bp, Homo sapien
ctgtcgttctctctcaaatctacat

SEQ ID NO: 658555 - DNA, 25 bp, Homo sapien
ttcgtgctcgctcttcctgaatggc

SEQ ID NO: 658556 - DNA, 25 bp, Homo sapien
gctgggtttgcgaggcgtctctctc

SEQ ID NO: 658557 - DNA, 25 bp, Homo sapien
actgtgcttgtgacacccaggctcc

SEQ ID NO: 658558 - DNA, 25 bp, Homo sapien
tctggctcctttgggacaatatccc

SEQ ID NO: 658559 - DNA, 25 bp, Homo sapien
gatacgcacatctgggcgcgcttct

SEQ ID NO: 658560 - DNA, 25 bp, Homo sapien
gagggccaacgatacgcacatctgg

SEQ ID NO: 658561 - DNA, 25 bp, Homo sapien
tcctcgagggccaacgatacgcaca

SEQ ID NO: 658562 - DNA, 25 bp, Homo sapien
gcttctcgctcgcacagggctgcag

SEQ ID NO: 658563 - DNA, 25 bp, Homo sapien
cggctcctccagctccaaggtcagg

SEQ ID NO: 658564 - DNA, 25 bp, Homo sapien
ggctcctccagctccaaggtcaggt

SEQ ID NO: 658565 - DNA, 25 bp, Homo sapien
ctcctccagctccaaggtcaggtct

SEQ ID NO: 658566 - DNA, 25 bp, Homo sapien
ggcggctcctccagctccaaggtca

SEQ ID NO: 658567 - DNA, 25 bp, Homo sapien
ggctcccagccccgacagctctcca

SEQ ID NO: 658568 - DNA, 25 bp, Homo sapien
tcccagccccgacagctctccactc

SEQ ID NO: 658569 - DNA, 25 bp, Homo sapien
ccagccccgacagctctccactcag

SEQ ID NO: 658570 - DNA, 25 bp, Homo sapien
agccccgacagctctccactcagct

SEQ ID NO: 658571 - DNA, 25 bp, Homo sapien
caagcattggcagatcgggagccct

SEQ ID NO: 658572 - DNA, 25 bp, Homo sapien
gttcacatggaagatggccgccacc

SEQ ID NO: 658573 - DNA, 25 bp, Homo sapien
tgggccctacttcagagtccagacg

SEQ ID NO: 658574 - DNA, 25 bp, Homo sapien
ttctacacgatagcgctggagaccc

SEQ ID NO: 658575 - DNA, 25 bp, Homo sapien
gcatccggccggaaagatgactttc

SEQ ID NO: 658576 - DNA, 25 bp, Homo sapien
gaacactgggctgtttctacacagt

SEQ ID NO: 658577 - DNA, 25 bp, Homo sapien
caagaacagacgtggtcacttcaca

SEQ ID NO: 658578 - DNA, 25 bp, Homo sapien
cagcagcctgtctgcgatgaccagg

SEQ ID NO: 658579 - DNA, 25 bp, Homo sapien
gctgcaggtggctgtgatgccgcag

SEQ ID NO: 658580 - DNA, 25 bp, Homo sapien
aggtggctgtgatgccgcagggcca

SEQ ID NO: 658581 - DNA, 25 bp, Homo sapien
gcaggtggctgtgatgccgcagggc

SEQ ID NO: 658582 - DNA, 25 bp, Homo sapien
ctgatctgctgcaggtggctgtgat

SEQ ID NO: 658583 - DNA, 25 bp, Homo sapien
gagacttctcgtggagctcctccag

SEQ ID NO: 658584 - DNA, 25 bp, Homo sapien
tgcaggccccagatgacctcctgag

SEQ ID NO: 658585 - DNA, 25 bp, Homo sapien
gtgccgcaatttccctttcgtagta

SEQ ID NO: 658586 - DNA, 25 bp, Homo sapien
caaagttccttttcagtgccgcaat

SEQ ID NO: 658587 - DNA, 25 bp, Homo sapien
gaggtcttggtaatgctcctttacc

SEQ ID NO: 658588 - DNA, 25 bp, Homo sapien
tcctgaggtcttggtaatgctcctt

SEQ ID NO: 658589 - DNA, 25 bp, Homo sapien
taatgctcctttacctgctccatca

SEQ ID NO: 658590 - DNA, 25 bp, Homo sapien
agctgggtcctgaggtcttggtaat

SEQ ID NO: 658591 - DNA, 25 bp, Homo sapien
gcagaattacccaggaatgaaatgc

SEQ ID NO: 658592 - DNA, 25 bp, Homo sapien
agcagaattacccaggaatgaaatg

SEQ ID NO: 658593 - DNA, 25 bp, Homo sapien
ggagcagaattacccaggaatgaaa

SEQ ID NO: 658594 - DNA, 25 bp, Homo sapien
ctggagcagaattacccaggaatga

SEQ ID NO: 658595 - DNA, 25 bp, Homo sapien
agcaggccttgggtcagccccctcc

SEQ ID NO: 658596 - DNA, 25 bp, Homo sapien
ctgggccttgttgtcaacagcaggc

SEQ ID NO: 658597 - DNA, 25 bp, Homo sapien
gggccttgttgtcaacagcaggcct

SEQ ID NO: 658598 - DNA, 25 bp, Homo sapien
ctctgggccttgttgtcaacagcag

SEQ ID NO: 658599 - DNA, 25 bp, Homo sapien
gcagctcatcgttgcggtcctgcag

SEQ ID NO: 658600 - DNA, 25 bp, Homo sapien
ctcagcttgcagctcatcgttgcgg

SEQ ID NO: 658601 - DNA, 25 bp, Homo sapien
ggctgtgccggttcttgggcagccg

SEQ ID NO: 658602 - DNA, 25 bp, Homo sapien
tgcgcccatccgggctccatgaggg

SEQ ID NO: 658603 - DNA, 25 bp, Homo sapien
tgatgccacgggacttccaggaaca

SEQ ID NO: 658604 - DNA, 25 bp, Homo sapien
gctgccgccaccatgctgtgatgaa

SEQ ID NO: 658605 - DNA, 25 bp, Homo sapien
gacttgtgactgcttcgacctagga

SEQ ID NO: 658606 - DNA, 25 bp, Homo sapien
ttcaggaagcagacataaaccaggc

SEQ ID NO: 658607 - DNA, 25 bp, Homo sapien
tcagagtgaatcgagaatagaccct

SEQ ID NO: 658608 - DNA, 25 bp, Homo sapien
tcagggtcactttacatgggaggga

SEQ ID NO: 658609 - DNA, 25 bp, Homo sapien
aatgagacgtgcagggaacaacggc

SEQ ID NO: 658610 - DNA, 25 bp, Homo sapien
ttgcaaagcaacgtgcggcagggac

SEQ ID NO: 658611 - DNA, 25 bp, Homo sapien
gaaccatgtggtgaacgaccttaga

SEQ ID NO: 658612 - DNA, 25 bp, Homo sapien
aaccctctgtatgccaggatgtaag

SEQ ID NO: 658613 - DNA, 25 bp, Homo sapien
tatctgttcacctggcaatgctgcc

SEQ ID NO: 658614 - DNA, 25 bp, Homo sapien
cctaaccaggagctgcctatgaaag

SEQ ID NO: 658615 - DNA, 25 bp, Homo sapien
catggtcaagcatggccgcaagcag

SEQ ID NO: 658616 - DNA, 25 bp, Homo sapien
gaacaacagaagacaacaatgccct

SEQ ID NO: 658617 - DNA, 25 bp, Homo sapien
gacactcctgcgttactgtggacca

SEQ ID NO: 658618 - DNA, 25 bp, Homo sapien
ccctaagtctaggagtgtggcaagg

SEQ ID NO: 658619 - DNA, 25 bp, Homo sapien
tgagctcgtattccttcaggactgc

SEQ ID NO: 658620 - DNA, 25 bp, Homo sapien
ccggcacttgagctcgtattccttc

SEQ ID NO: 658621 - DNA, 25 bp, Homo sapien
cacttgagctcgtattccttcagga

SEQ ID NO: 658622 - DNA, 25 bp, Homo sapien
ttcaggactgctgcgaaccgctcct

SEQ ID NO: 658623 - DNA, 25 bp, Homo sapien
gctgcatctccaggtatagccgcca

SEQ ID NO: 658624 - DNA, 25 bp, Homo sapien
tgcatctccaggtatagccgccatc

SEQ ID NO: 658625 - DNA, 25 bp, Homo sapien
accaggcgctgcatctccaggtata

SEQ ID NO: 658626 - DNA, 25 bp, Homo sapien
ggcgctgcatctccaggtatagccg

SEQ ID NO: 658627 - DNA, 25 bp, Homo sapien
caggccctcccctctggaggcagac

SEQ ID NO: 658628 - DNA, 25 bp, Homo sapien
cagcaggccctcccctctggaggca

SEQ ID NO: 658629 - DNA, 25 bp, Homo sapien
tgcccagcaggccctcccctctgga

SEQ ID NO: 658630 - DNA, 25 bp, Homo sapien
cccagcaggccctcccctctggagg

SEQ ID NO: 658631 - DNA, 25 bp, Homo sapien
cagcctctccgaatccgaaagcttt

SEQ ID NO: 658632 - DNA, 25 bp, Homo sapien
gcctctccgaatccgaaagcttttc

SEQ ID NO: 658633 - DNA, 25 bp, Homo sapien
agcctctccgaatccgaaagctttt

SEQ ID NO: 658634 - DNA, 25 bp, Homo sapien
gagacacaggccagtggctcatcag

SEQ ID NO: 658635 - DNA, 25 bp, Homo sapien
ctaggagacacaggccagtggctca

SEQ ID NO: 658636 - DNA, 25 bp, Homo sapien
ggagacacaggccagtggctcatca

SEQ ID NO: 658637 - DNA, 25 bp, Homo sapien
acacaggccagtggctcatcaggct

SEQ ID NO: 658638 - DNA, 25 bp, Homo sapien
gaggcacctggtgctgtgcaggcgg

SEQ ID NO: 658639 - DNA, 25 bp, Homo sapien
tgtggctaccccatcgtcttcactt

SEQ ID NO: 658640 - DNA, 25 bp, Homo sapien
accctcccaggacagacgccagagc

SEQ ID NO: 658641 - DNA, 25 bp, Homo sapien
agagcccacccagactgtggctacc

SEQ ID NO: 658642 - DNA, 25 bp, Homo sapien
acgtcccactccagcgcggccctct

SEQ ID NO: 658643 - DNA, 25 bp, Homo sapien
ttcccggtacccctgctccagatgc

SEQ ID NO: 658644 - DNA, 25 bp, Homo sapien
cacctcagaccgcaggaggctcagc

SEQ ID NO: 658645 - DNA, 25 bp, Homo sapien
tcccagaacagctctcgctccgcct

SEQ ID NO: 658646 - DNA, 25 bp, Homo sapien
cctgtcctcagcacgtgcagggccg

SEQ ID NO: 658647 - DNA, 25 bp, Homo sapien
ctcctccctcttagaaacgcccctg

SEQ ID NO: 658648 - DNA, 25 bp, Homo sapien
acatgtcacacatcacacgtcagac

SEQ ID NO: 658649 - DNA, 25 bp, Homo sapien
tgctgggaggcaaatctgagggtgg

SEQ ID NO: 658650 - DNA, 25 bp, Homo sapien
ccctcacagcgaggagcacagctcc

SEQ ID NO: 658651 - DNA, 25 bp, Homo sapien
tcacatggcaaatgccaccagctgc

SEQ ID NO: 658652 - DNA, 25 bp, Homo sapien
gaggtgaccccagacaaggggatct

SEQ ID NO: 658653 - DNA, 25 bp, Homo sapien
caaggggatctggtgggtcacatgg

SEQ ID NO: 658654 - DNA, 25 bp, Homo sapien
tctacccagactgaagaccagcgag

SEQ ID NO: 658655 - DNA, 25 bp, Homo sapien
gaattctcaaaccacgtctacccag

SEQ ID NO: 658656 - DNA, 25 bp, Homo sapien
gtgacgcccataaccaagtccgaga

SEQ ID NO: 658657 - DNA, 25 bp, Homo sapien
cagagcccgggcttttaatcttggc

SEQ ID NO: 658658 - DNA, 25 bp, Homo sapien
tcacaaggagcactcttgtctaggg

SEQ ID NO: 658659 - DNA, 25 bp, Homo sapien
ccagctttgaacacaagtgtctcac

SEQ ID NO: 658660 - DNA, 25 bp, Homo sapien
aagtgtctcacaaggagcactcttg

SEQ ID NO: 658661 - DNA, 25 bp, Homo sapien
ggctgtgctcgggagaacgaagtcg

SEQ ID NO: 658662 - DNA, 25 bp, Homo sapien
gaggtcagaacccagcccctcaggt

SEQ ID NO: 658663 - DNA, 25 bp, Homo sapien
gcccctcaggtcctgagaggcagca

SEQ ID NO: 658664 - DNA, 25 bp, Homo sapien
aggtcctgagaggcagcaccaagat

SEQ ID NO: 658665 - DNA, 25 bp, Homo sapien
tggaggtcagaacccagcccctcag

SEQ ID NO: 658666 - DNA, 25 bp, Homo sapien
gaggcacatgtagatctggacctgc

SEQ ID NO: 658667 - DNA, 25 bp, Homo sapien
ggcacatgtagatctggacctgctg

SEQ ID NO: 658668 - DNA, 25 bp, Homo sapien
ctgctgtgtacagccgtccccagcc

SEQ ID NO: 658669 - DNA, 25 bp, Homo sapien
tgctgtgtacagccgtccccagcca

SEQ ID NO: 658670 - DNA, 25 bp, Homo sapien
caggaccatggcagcgagtgctgtg

SEQ ID NO: 658671 - DNA, 25 bp, Homo sapien
acgtggctccatcgcgcatagctct

SEQ ID NO: 658672 - DNA, 25 bp, Homo sapien
tctttgctagccacgctcagctgag

SEQ ID NO: 658673 - DNA, 25 bp, Homo sapien
ctggagggtgccacaccacgtggct

SEQ ID NO: 658674 - DNA, 25 bp, Homo sapien
ctgtgttgtgcaatgcagagggtgg

SEQ ID NO: 658675 - DNA, 25 bp, Homo sapien
tgtgcaatgcagagggtgggccgac

SEQ ID NO: 658676 - DNA, 25 bp, Homo sapien
ttgtgcaatgcagagggtgggccga

SEQ ID NO: 658677 - DNA, 25 bp, Homo sapien
tgttgtgcaatgcagagggtgggcc

SEQ ID NO: 658678 - DNA, 25 bp, Homo sapien
ttgccagtccttgcaacatagccac

SEQ ID NO: 658679 - DNA, 25 bp, Homo sapien
gaaaccattgccagtccttgcaaca

SEQ ID NO: 658680 - DNA, 25 bp, Homo sapien
accattgccagtccttgcaacatag

SEQ ID NO: 658681 - DNA, 25 bp, Homo sapien
catagccacctgcctcttgcatcac

SEQ ID NO: 658682 - DNA, 25 bp, Homo sapien
tcctcggcccatggggacgtagcca

SEQ ID NO: 658683 - DNA, 25 bp, Homo sapien
aaggcttggcttatgtgagaagagc

SEQ ID NO: 658684 - DNA, 25 bp, Homo sapien
ttggcttatgtgagaagagcccagc

SEQ ID NO: 658685 - DNA, 25 bp, Homo sapien
acctcctcggcccatggggacgtag

SEQ ID NO: 658686 - DNA, 25 bp, Homo sapien
gccttgccttgtcacgctcccttgc

SEQ ID NO: 658687 - DNA, 25 bp, Homo sapien
ggagtggcagtcgtccatctctttc

SEQ ID NO: 658688 - DNA, 25 bp, Homo sapien
tgccttgtcacgctcccttgccagc

SEQ ID NO: 658689 - DNA, 25 bp, Homo sapien
cttgccttgtcacgctcccttgcca

SEQ ID NO: 658690 - DNA, 25 bp, Homo sapien
tgtccactgtcatgagctcgttgtc

SEQ ID NO: 658691 - DNA, 25 bp, Homo sapien
ctcagctcctggtggtagcaggcca

SEQ ID NO: 658692 - DNA, 25 bp, Homo sapien
aaggttcaccttctcgtccacgctg

SEQ ID NO: 658693 - DNA, 25 bp, Homo sapien
gctcgttgtcaagggcccaggtcag

SEQ ID NO: 658694 - DNA, 25 bp, Homo sapien
tctgcctcaggggtgcgtaggccca

SEQ ID NO: 658695 - DNA, 25 bp, Homo sapien
tccatcccacgcaactctggtgggc

SEQ ID NO: 658696 - DNA, 25 bp, Homo sapien
gggtgcgtaggcccaggctagacag

SEQ ID NO: 658697 - DNA, 25 bp, Homo sapien
tctctgcgtcttgaggggtgctcct

SEQ ID NO: 658698 - DNA, 25 bp, Homo sapien
agtaggggctgactttccacactgc

SEQ ID NO: 658699 - DNA, 25 bp, Homo sapien
ggtgccaggacgtgcctggcccaga

SEQ ID NO: 658700 - DNA, 25 bp, Homo sapien
gctacaaacgccctgctcaggccgg

SEQ ID NO: 658701 - DNA, 25 bp, Homo sapien
tgtcgtgtttgctttttccgccttg

SEQ ID NO: 658702 - DNA, 25 bp, Homo sapien
tgggtcccctggcttgggacgctcc

SEQ ID NO: 658703 - DNA, 25 bp, Homo sapien
aggtcccctgtccagcttaggcatc

SEQ ID NO: 658704 - DNA, 25 bp, Homo sapien
tggcttgggacgctccatccatcct

SEQ ID NO: 658705 - DNA, 25 bp, Homo sapien
ggtcccctgtccagcttaggcatca

SEQ ID NO: 658706 - DNA, 25 bp, Homo sapien
caagatctccctgccattctgaatc

SEQ ID NO: 658707 - DNA, 25 bp, Homo sapien
tgcaagatctccctgccattctgaa

SEQ ID NO: 658708 - DNA, 25 bp, Homo sapien
ctgcaagatctccctgccattctga

SEQ ID NO: 658709 - DNA, 25 bp, Homo sapien
gcaagatctccctgccattctgaat

SEQ ID NO: 658710 - DNA, 25 bp, Homo sapien
gaaaagcgaagccagaaccatcgtc

SEQ ID NO: 658711 - DNA, 25 bp, Homo sapien
ctgatcaggaaaagcgaagccagaa

SEQ ID NO: 658712 - DNA, 25 bp, Homo sapien
gaagccagaaccatcgtcaatgctg

SEQ ID NO: 658713 - DNA, 25 bp, Homo sapien
gaaccatcgtcaatgctggagaaga

SEQ ID NO: 658714 - DNA, 25 bp, Homo sapien
tggtaatgagaccaagccttgctcg

SEQ ID NO: 658715 - DNA, 25 bp, Homo sapien
agtagcgcgggctcatgactgaaga

SEQ ID NO: 658716 - DNA, 25 bp, Homo sapien
taacccgagtggaagactctagaag

SEQ ID NO: 658717 - DNA, 25 bp, Homo sapien
gaattcctcaagactcactttgccg

SEQ ID NO: 658718 - DNA, 25 bp, Homo sapien
ctgctcgctcaggtgtccgctgctg

SEQ ID NO: 658719 - DNA, 25 bp, Homo sapien
tcctgctcgctcaggtgtccgctgc

SEQ ID NO: 658720 - DNA, 25 bp, Homo sapien
tgctcgctcaggtgtccgctgctgc

SEQ ID NO: 658721 - DNA, 25 bp, Homo sapien
tcgctcaggtgtccgctgctgccca

SEQ ID NO: 658722 - DNA, 25 bp, Homo sapien
gttgtttgcacttcactctgtttac

SEQ ID NO: 658723 - DNA, 25 bp, Homo sapien
aggggagctgcaaagcaccaaaggt

SEQ ID NO: 658724 - DNA, 25 bp, Homo sapien
tggaattaggtggttggtacatggg

SEQ ID NO: 658725 - DNA, 25 bp, Homo sapien
ggtacatgggttttcatgccacagt

SEQ ID NO: 658726 - DNA, 25 bp, Homo sapien
aggcactggtgtctttaggactcat

SEQ ID NO: 658727 - DNA, 25 bp, Homo sapien
ggtgtctttaggactcatcagcggg

SEQ ID NO: 658728 - DNA, 25 bp, Homo sapien
gctcaggtggtggatggccactttt

SEQ ID NO: 658729 - DNA, 25 bp, Homo sapien
gtctttaggactcatcagcgggctc

SEQ ID NO: 658730 - DNA, 25 bp, Homo sapien
tgtcttcagccgcttatcttcttga

SEQ ID NO: 658731 - DNA, 25 bp, Homo sapien
cagcagaaagtgtccatggtgagtt

SEQ ID NO: 658732 - DNA, 25 bp, Homo sapien
catggtgagttatatgtccagccag

SEQ ID NO: 658733 - DNA, 25 bp, Homo sapien
ccgcttatcttcttgatgtgtttga

SEQ ID NO: 658734 - DNA, 25 bp, Homo sapien
tatggtgagctatgtgtccagccag

SEQ ID NO: 658735 - DNA, 25 bp, Homo sapien
tactgataaccctgctggtaacggg

SEQ ID NO: 658736 - DNA, 25 bp, Homo sapien
tctggatccttcaggtagatgagcc

SEQ ID NO: 658737 - DNA, 25 bp, Homo sapien
caaaggaagccagactgtgtgctca

SEQ ID NO: 658738 - DNA, 25 bp, Homo sapien
ggatccagtgcagcctgatgacttc

SEQ ID NO: 658739 - DNA, 25 bp, Homo sapien
cagtgggatccagtgcagcctgatg

SEQ ID NO: 658740 - DNA, 25 bp, Homo sapien
atccagtgcagcctgatgacttcct

SEQ ID NO: 658741 - DNA, 25 bp, Homo sapien
tgggatccagtgcagcctgatgact

SEQ ID NO: 658742 - DNA, 25 bp, Homo sapien
cacattgtttgcataggtgttggtc

SEQ ID NO: 658743 - DNA, 25 bp, Homo sapien
tttcacattgtttgcataggtgttg

SEQ ID NO: 658744 - DNA, 25 bp, Homo sapien
tcttcactcttgcaggcatcatgta

SEQ ID NO: 658745 - DNA, 25 bp, Homo sapien
tcatgtaagtcagcagtaacttcca

SEQ ID NO: 658746 - DNA, 25 bp, Homo sapien
gtgctctcggcctcttcatctgact

SEQ ID NO: 658747 - DNA, 25 bp, Homo sapien
tctttagtgctctcggcctcttcat

SEQ ID NO: 658748 - DNA, 25 bp, Homo sapien
ttctgagcttctttagtgctctcgg

SEQ ID NO: 658749 - DNA, 25 bp, Homo sapien
tgagcttctttagtgctctcggcct

SEQ ID NO: 658750 - DNA, 25 bp, Homo sapien
gtgaagccccacgagactctggcag

SEQ ID NO: 658751 - DNA, 25 bp, Homo sapien
tccttgggtgatccctgcatcccag

SEQ ID NO: 658752 - DNA, 25 bp, Homo sapien
gacatatttcttaacgtgaagcccc

SEQ ID NO: 658753 - DNA, 25 bp, Homo sapien
tcttaacgtgaagccccacgagact

SEQ ID NO: 658754 - DNA, 25 bp, Homo sapien
cagaggtgacttttcaggctggcct

SEQ ID NO: 658755 - DNA, 25 bp, Homo sapien
tgtggcagcgtcacatagctcaggc

SEQ ID NO: 658756 - DNA, 25 bp, Homo sapien
tccggcacgcgtctggcttctgtgg

SEQ ID NO: 658757 - DNA, 25 bp, Homo sapien
gctccgacggccataccacttagaa

SEQ ID NO: 658758 - DNA, 25 bp, Homo sapien
gggcgaacaccagcatttgaagaca

SEQ ID NO: 658759 - DNA, 25 bp, Homo sapien
tgtcttcatctgaggggcgaacacc

SEQ ID NO: 658760 - DNA, 25 bp, Homo sapien
gaggggcgaacaccagcatttgaag

SEQ ID NO: 658761 - DNA, 25 bp, Homo sapien
catctgaggggcgaacaccagcatt

SEQ ID NO: 658762 - DNA, 25 bp, Homo sapien
tccaggtgaagcttaaggcagagct

SEQ ID NO: 658763 - DNA, 25 bp, Homo sapien
gacttccctgagctgcgagacatag

SEQ ID NO: 658764 - DNA, 25 bp, Homo sapien
tcgtttccgagaagcgtctgcagga

SEQ ID NO: 658765 - DNA, 25 bp, Homo sapien
gtcgcagctgctgtagacttccctg

SEQ ID NO: 658766 - DNA, 25 bp, Homo sapien
gaaaacatcaggacactttcccacc

SEQ ID NO: 658767 - DNA, 25 bp, Homo sapien
agaaaacatcaggacactttcccac

SEQ ID NO: 658768 - DNA, 25 bp, Homo sapien
aagaaaacatcaggacactttccca

SEQ ID NO: 658769 - DNA, 25 bp, Homo sapien
aaacatcaggacactttcccacctc

SEQ ID NO: 658770 - DNA, 25 bp, Homo sapien
tacatggtccaagcagacgcaggag

SEQ ID NO: 658771 - DNA, 25 bp, Homo sapien
gcaccgagctacatggtccaagcag

SEQ ID NO: 658772 - DNA, 25 bp, Homo sapien
accagggacccttgcagggccaagc

SEQ ID NO: 658773 - DNA, 25 bp, Homo sapien
actgccggtgagcaccgagctacat

SEQ ID NO: 658774 - DNA, 25 bp, Homo sapien
aatctacttactggtcactttacat

SEQ ID NO: 658775 - DNA, 25 bp, Homo sapien
tatttaatagaatgggcagtgtaga

SEQ ID NO: 658776 - DNA, 25 bp, Homo sapien
aagcttctgcaactttctggaggaa

SEQ ID NO: 658777 - DNA, 25 bp, Homo sapien
tagttacagacaaagatatgagttc

SEQ ID NO: 658778 - DNA, 25 bp, Homo sapien
gtggtcttggacacattacttcacc

SEQ ID NO: 658779 - DNA, 25 bp, Homo sapien
tctggttttaatgtgggttctgcca

SEQ ID NO: 658780 - DNA, 25 bp, Homo sapien
ggtacctatcaacgccagactctgc

SEQ ID NO: 658781 - DNA, 25 bp, Homo sapien
cgtgatctgaacaacctgattagga

SEQ ID NO: 658782 - DNA, 25 bp, Homo sapien
ctgcccacaatttgacgcgtggaat

SEQ ID NO: 658783 - DNA, 25 bp, Homo sapien
cactgcccacaatttgacgcgtgga

SEQ ID NO: 658784 - DNA, 25 bp, Homo sapien
tcactgcccacaatttgacgcgtgg

SEQ ID NO: 658785 - DNA, 25 bp, Homo sapien
actgcccacaatttgacgcgtggaa

SEQ ID NO: 658786 - DNA, 25 bp, Homo sapien
ggtcaatcatactggctccgcataa

SEQ ID NO: 658787 - DNA, 25 bp, Homo sapien
tgagtttttaaggttgagcaggtcc

SEQ ID NO: 658788 - DNA, 25 bp, Homo sapien
taagacagagtcgtgccctaactgc

SEQ ID NO: 658789 - DNA, 25 bp, Homo sapien
aatccaagctttcgtgggtaagtgc

SEQ ID NO: 658790 - DNA, 25 bp, Homo sapien
tacaccagcgtttatattactgagg

SEQ ID NO: 658791 - DNA, 25 bp, Homo sapien
taggttcctgacatacagctcccaa

SEQ ID NO: 658792 - DNA, 25 bp, Homo sapien
gacaccagtcatatagaaccagggc

SEQ ID NO: 658793 - DNA, 25 bp, Homo sapien
cctcatgtgatactgtggtgtggca

SEQ ID NO: 658794 - DNA, 25 bp, Homo sapien
ccaaggctggccccagcacccatgg

SEQ ID NO: 658795 - DNA, 25 bp, Homo sapien
ggccccagcacccatggccacacct

SEQ ID NO: 658796 - DNA, 25 bp, Homo sapien
cccatggccacacctcccacatcca

SEQ ID NO: 658797 - DNA, 25 bp, Homo sapien
cacccatggccacacctcccacatc

SEQ ID NO: 658798 - DNA, 25 bp, Homo sapien
ctgggagcgtctgtgataatgcttc

SEQ ID NO: 658799 - DNA, 25 bp, Homo sapien
agcagccagcggcccatgtctcaga

SEQ ID NO: 658800 - DNA, 25 bp, Homo sapien
tgtgataatgcttcccaagggagcg

SEQ ID NO: 658801 - DNA, 25 bp, Homo sapien
cttcccaagggagcgccacagtgct

SEQ ID NO: 658802 - DNA, 25 bp, Homo sapien
ccagggtcaaggagtgggcctgtgt

SEQ ID NO: 658803 - DNA, 25 bp, Homo sapien
cactcctcgaaggagcctgctggga

SEQ ID NO: 658804 - DNA, 25 bp, Homo sapien
ctgggaggttgtgataagagaactc

SEQ ID NO: 658805 - DNA, 25 bp, Homo sapien
aggggcaaggtgtctggcacgccag

SEQ ID NO: 658806 - DNA, 25 bp, Homo sapien
gcagcctgagtacacagtgacaggg

SEQ ID NO: 658807 - DNA, 25 bp, Homo sapien
cagcagcagcctgagtacacagtga

SEQ ID NO: 658808 - DNA, 25 bp, Homo sapien
agcagcagcctgagtacacagtgac

SEQ ID NO: 658809 - DNA, 25 bp, Homo sapien
gaattccctgcaagcatccagtgta

SEQ ID NO: 658810 - DNA, 25 bp, Homo sapien
agcatccagtgtaaaaatcacccag

SEQ ID NO: 658811 - DNA, 25 bp, Homo sapien
tccctgcaagcatccagtgtaaaaa

SEQ ID NO: 658812 - DNA, 25 bp, Homo sapien
gaatgaattccctgcaagcatccag

SEQ ID NO: 658813 - DNA, 25 bp, Homo sapien
gaatccttgagtgtagatgtgggca

SEQ ID NO: 658814 - DNA, 25 bp, Homo sapien
aaatgtgacccagtgctaagatggc

SEQ ID NO: 658815 - DNA, 25 bp, Homo sapien
gacacatggctatcagaacacacga

SEQ ID NO: 658816 - DNA, 25 bp, Homo sapien
gacaaatgatgacgaaaaactgctg

SEQ ID NO: 658817 - DNA, 25 bp, Homo sapien
gagcagtgacaacgttgcctgaagc

SEQ ID NO: 658818 - DNA, 25 bp, Homo sapien
agtgacaacgttgcctgaagcaggg

SEQ ID NO: 658819 - DNA, 25 bp, Homo sapien
cctgaagcagggagctaactggccg

SEQ ID NO: 658820 - DNA, 25 bp, Homo sapien
tggagagcagtgacaacgttgcctg

SEQ ID NO: 658821 - DNA, 25 bp, Homo sapien
agctcggggcttactactgtcctag

SEQ ID NO: 658822 - DNA, 25 bp, Homo sapien
aggtcctctttgtgaatagagctcc

SEQ ID NO: 658823 - DNA, 25 bp, Homo sapien
ggccagcagaagctcggggcttact

SEQ ID NO: 658824 - DNA, 25 bp, Homo sapien
tcctagtcccaggaacagactcatt

SEQ ID NO: 658825 - DNA, 25 bp, Homo sapien
tcaaccgtcccaagcgccacgaacg

SEQ ID NO: 658826 - DNA, 25 bp, Homo sapien
atcctgggcctcgaccagacgccgg

SEQ ID NO: 658827 - DNA, 25 bp, Homo sapien
aagcgccacgaacgcgggtcccgct

SEQ ID NO: 658828 - DNA, 25 bp, Homo sapien
gacgccggcggcgtcaggagaaacg

SEQ ID NO: 658829 - DNA, 25 bp, Homo sapien
gggccaggagcgcggcaccaccccc

SEQ ID NO: 658830 - DNA, 25 bp, Homo sapien
gccaggagcgcggcaccacccccgt

SEQ ID NO: 658831 - DNA, 25 bp, Homo sapien
cggggccaggagcgcggcaccaccc

SEQ ID NO: 658832 - DNA, 25 bp, Homo sapien
caggagcgcggcaccacccccgtac

SEQ ID NO: 658833 - DNA, 25 bp, Homo sapien
gcggctctggccagtttggagcctg

SEQ ID NO: 658834 - DNA, 25 bp, Homo sapien
ctcgctggtccctgtcggagccctg

SEQ ID NO: 658835 - DNA, 25 bp, Homo sapien
cggttcgcagctctcggggtagcat

SEQ ID NO: 658836 - DNA, 25 bp, Homo sapien
ggtccctgtcggagccctgcgcgct

SEQ ID NO: 658837 - DNA, 25 bp, Homo sapien
ctgcgcgctgcggagcttggcggtt

SEQ ID NO: 658838 - DNA, 25 bp, Homo sapien
aatcaatacgggttgagcatcccta

SEQ ID NO: 658839 - DNA, 25 bp, Homo sapien
taggtcgtcacgtttccaccgcata

SEQ ID NO: 658840 - DNA, 25 bp, Homo sapien
tggaaacaagcccggaggccggcca

SEQ ID NO: 658841 - DNA, 25 bp, Homo sapien
caccactgaggaaaccgcgacttaa

SEQ ID NO: 658842 - DNA, 25 bp, Homo sapien
cctgtctttttgtaggggtctatag

SEQ ID NO: 658843 - DNA, 25 bp, Homo sapien
tcatccccctttctatagtttggaa

SEQ ID NO: 658844 - DNA, 25 bp, Homo sapien
tctcatccccctttctatagtttgg

SEQ ID NO: 658845 - DNA, 25 bp, Homo sapien
taggggtctatagtcatgtttgata

SEQ ID NO: 658846 - DNA, 25 bp, Homo sapien
gtcagatacactctccctaaggaag

SEQ ID NO: 658847 - DNA, 25 bp, Homo sapien
cagatacactctccctaaggaagcc

SEQ ID NO: 658848 - DNA, 25 bp, Homo sapien
tcagatacactctccctaaggaagc

SEQ ID NO: 658849 - DNA, 25 bp, Homo sapien
tggtgtcctggtctgttaagtacta

SEQ ID NO: 658850 - DNA, 25 bp, Homo sapien
gccacagtcaagaatgatgagattt

SEQ ID NO: 658851 - DNA, 25 bp, Homo sapien
catccgttgaataaggagtcctgct

SEQ ID NO: 658852 - DNA, 25 bp, Homo sapien
tactatgacactaaggttccaccgg

SEQ ID NO: 658853 - DNA, 25 bp, Homo sapien
tatttcaagaatattgcagtggaga

SEQ ID NO: 658854 - DNA, 25 bp, Homo sapien
atttcaagaatattgcagtggagaa

SEQ ID NO: 658855 - DNA, 25 bp, Homo sapien
catgggcaggggcaagcatagcatt

SEQ ID NO: 658856 - DNA, 25 bp, Homo sapien
atagcatttggcagaccaggaggga

SEQ ID NO: 658857 - DNA, 25 bp, Homo sapien
agggccggcagcgctgatccaccat

SEQ ID NO: 658858 - DNA, 25 bp, Homo sapien
gccacagtatctaatgctgcctggg

SEQ ID NO: 658859 - DNA, 25 bp, Homo sapien
tctaggcccacctctgtaagcagtg

SEQ ID NO: 658860 - DNA, 25 bp, Homo sapien
agacctgctttcctacaatactgag

SEQ ID NO: 658861 - DNA, 25 bp, Homo sapien
ggtattccaggtgcagtgtccattc

SEQ ID NO: 658862 - DNA, 25 bp, Homo sapien
tgtgagaaggccactacagggaaac

SEQ ID NO: 658863 - DNA, 25 bp, Homo sapien
gcaacagcactttggtacagtcaag

SEQ ID NO: 658864 - DNA, 25 bp, Homo sapien
aattctccggttccaagacgatgcc

SEQ ID NO: 658865 - DNA, 25 bp, Homo sapien
gagatttgctaccatgatacaggag

SEQ ID NO: 658866 - DNA, 25 bp, Homo sapien
gactaaaaggaagctaccggctcac

SEQ ID NO: 658867 - DNA, 25 bp, Homo sapien
taagcatggctttgacgtcttctgc

SEQ ID NO: 658868 - DNA, 25 bp, Homo sapien
gcggacctcctttcgaagttcagta

SEQ ID NO: 658869 - DNA, 25 bp, Homo sapien
aaatatggacggtgctggtttctcc

SEQ ID NO: 658870 - DNA, 25 bp, Homo sapien
tcgttaatagaagtaggcggacctc

SEQ ID NO: 658871 - DNA, 25 bp, Homo sapien
caccgtttctggtgggaattggcct

SEQ ID NO: 658872 - DNA, 25 bp, Homo sapien
gaggctctcccaactgctctagaac

SEQ ID NO: 658873 - DNA, 25 bp, Homo sapien
cattctggtcatgaagatatgaaaa

SEQ ID NO: 658874 - DNA, 25 bp, Homo sapien
gccaacttcttcatatatagctagt

SEQ ID NO: 658875 - DNA, 25 bp, Homo sapien
aacacgggaaggtctgaaagcgcct

SEQ ID NO: 658876 - DNA, 25 bp, Homo sapien
tatagggcaaacatgaatatgcggc

SEQ ID NO: 658877 - DNA, 25 bp, Homo sapien
taaagcagggcttaagtccaggctc

SEQ ID NO: 658878 - DNA, 25 bp, Homo sapien
tgagtggacactgcaaccatgggct

SEQ ID NO: 658879 - DNA, 25 bp, Homo sapien
cgccccggccgtgtcgatgagagtg

SEQ ID NO: 658880 - DNA, 25 bp, Homo sapien
ccgtgtcgatgagagtgttgtccaa

SEQ ID NO: 658881 - DNA, 25 bp, Homo sapien
caagtcaaagaaaaccgcccgcacg

SEQ ID NO: 658882 - DNA, 25 bp, Homo sapien
agtcaaagaaaaccgcccgcacgcg

SEQ ID NO: 658883 - DNA, 25 bp, Homo sapien
gctggcgcgaaccgtagccttgcca

SEQ ID NO: 658884 - DNA, 25 bp, Homo sapien
gcgaaccgtagccttgccaccgccg

SEQ ID NO: 658885 - DNA, 25 bp, Homo sapien
ggccgctggcgcgaaccgtagcctt

SEQ ID NO: 658886 - DNA, 25 bp, Homo sapien
ggcgcgaaccgtagccttgccaccg

SEQ ID NO: 658887 - DNA, 25 bp, Homo sapien
cgttggtccgaagcgtggtgttctt

SEQ ID NO: 658888 - DNA, 25 bp, Homo sapien
cggatgcggcgacttctcagtggct

SEQ ID NO: 658889 - DNA, 25 bp, Homo sapien
tgcgccgccgagaaaagtgagatcc

SEQ ID NO: 658890 - DNA, 25 bp, Homo sapien
cccagggtatggtctctcaagagcc

SEQ ID NO: 658891 - DNA, 25 bp, Homo sapien
tccccgagagaggttgtccgcgctg

SEQ ID NO: 658892 - DNA, 25 bp, Homo sapien
ccgagagaggttgtccgcgctgcca

SEQ ID NO: 658893 - DNA, 25 bp, Homo sapien
ggttgtccgcgctgccaggcgctgg

SEQ ID NO: 658894 - DNA, 25 bp, Homo sapien
acctccccgagagaggttgtccgcg

SEQ ID NO: 658895 - DNA, 25 bp, Homo sapien
tacgcgcaggtcactgtaggtgatc

SEQ ID NO: 658896 - DNA, 25 bp, Homo sapien
cgcgcaggtcactgtaggtgatctg

SEQ ID NO: 658897 - DNA, 25 bp, Homo sapien
gaaggtggagcctgcgccttcccgc

SEQ ID NO: 658898 - DNA, 25 bp, Homo sapien
ctgtacgcgcaggtcactgtaggtg

SEQ ID NO: 658899 - DNA, 25 bp, Homo sapien
tactgtaatttggatatgtggtcat

SEQ ID NO: 658900 - DNA, 25 bp, Homo sapien
ttactgtaatttggatatgtggtca

SEQ ID NO: 658901 - DNA, 25 bp, Homo sapien
ctttactgtaatttggatatgtggt

SEQ ID NO: 658902 - DNA, 25 bp, Homo sapien
tttactgtaatttggatatgtggtc

SEQ ID NO: 658903 - DNA, 25 bp, Homo sapien
aaagaccaaccttgttggcaaggct

SEQ ID NO: 658904 - DNA, 25 bp, Homo sapien
aagaccaaccttgttggcaaggctg

SEQ ID NO: 658905 - DNA, 25 bp, Homo sapien
cctgggcatagctcattactgatca

SEQ ID NO: 658906 - DNA, 25 bp, Homo sapien
gcatggacacctaattgacatacca

SEQ ID NO: 658907 - DNA, 25 bp, Homo sapien
cttgagtaacttgtacaataggcat

SEQ ID NO: 658908 - DNA, 25 bp, Homo sapien
tgggcaacttgatgatcacctgctc

SEQ ID NO: 658909 - DNA, 25 bp, Homo sapien
cctttgtgctcaggtcagtttctga

SEQ ID NO: 658910 - DNA, 25 bp, Homo sapien
tccttcgttcaaaatgccaagttca

SEQ ID NO: 658911 - DNA, 25 bp, Homo sapien
accagcccaatcttgggctgacggc

SEQ ID NO: 658912 - DNA, 25 bp, Homo sapien
ctcagacaccagcccaatcttgggc

SEQ ID NO: 658913 - DNA, 25 bp, Homo sapien
cctctttggtaacttgctctggtgt

SEQ ID NO: 658914 - DNA, 25 bp, Homo sapien
gacaagtaattgcaatcgttttttg

SEQ ID NO: 658915 - DNA, 25 bp, Homo sapien
agtaattgcaatcgttttttgtagg

SEQ ID NO: 658916 - DNA, 25 bp, Homo sapien
ctagatatactgatcaacagcagtt

SEQ ID NO: 658917 - DNA, 25 bp, Homo sapien
agatatactgatcaacagcagtttg

SEQ ID NO: 658918 - DNA, 25 bp, Homo sapien
tagatatactgatcaacagcagttt

SEQ ID NO: 658919 - DNA, 25 bp, Homo sapien
gagaaggtctcagagtatctggtgc

SEQ ID NO: 658920 - DNA, 25 bp, Homo sapien
attcaccaggtactgtgagaaggtc

SEQ ID NO: 658921 - DNA, 25 bp, Homo sapien
aagcctggccccggagctccaatgt

SEQ ID NO: 658922 - DNA, 25 bp, Homo sapien
aagcctcgaaagatggctccaattc

SEQ ID NO: 658923 - DNA, 25 bp, Homo sapien
ccaagagaacataccacctagtgga

SEQ ID NO: 658924 - DNA, 25 bp, Homo sapien
caagagaacataccacctagtggag

SEQ ID NO: 658925 - DNA, 25 bp, Homo sapien
gccaagagaacataccacctagtgg

SEQ ID NO: 658926 - DNA, 25 bp, Homo sapien
aagagaacataccacctagtggagc

SEQ ID NO: 658927 - DNA, 25 bp, Homo sapien
tttaccctttagaatgttccatgtg

SEQ ID NO: 658928 - DNA, 25 bp, Homo sapien
cagtggagtgaagttctcaatagtt

SEQ ID NO: 658929 - DNA, 25 bp, Homo sapien
cagtgagctgtaggactgcattcct

SEQ ID NO: 658930 - DNA, 25 bp, Homo sapien
tctgtttagacgatcaaatgctgac

SEQ ID NO: 658931 - DNA, 25 bp, Homo sapien
tacaaaaggataggcatattgcatg

SEQ ID NO: 658932 - DNA, 25 bp, Homo sapien
gacaagggttgtgtgcagctatgta

SEQ ID NO: 658933 - DNA, 25 bp, Homo sapien
ctggtgaacccacaatgtgcagtga

SEQ ID NO: 658934 - DNA, 25 bp, Homo sapien
gaagggcaagcatcacaaataccat

SEQ ID NO: 658935 - DNA, 25 bp, Homo sapien
gcagttacttagtctatttgagctg

SEQ ID NO: 658936 - DNA, 25 bp, Homo sapien
gtctatttgagctgttataataaaa

SEQ ID NO: 658937 - DNA, 25 bp, Homo sapien
gatatgactgtgagagaatgatgag

SEQ ID NO: 658938 - DNA, 25 bp, Homo sapien
cagagattttatttccagatatgac

SEQ ID NO: 658939 - DNA, 25 bp, Homo sapien
gagcagtccttagaaagcacagcct

SEQ ID NO: 658940 - DNA, 25 bp, Homo sapien
tatgtgctcagtaggaaagagacca

SEQ ID NO: 658941 - DNA, 25 bp, Homo sapien
cctagattgtttgcagtccaaggag

SEQ ID NO: 658942 - DNA, 25 bp, Homo sapien
agcattgtgtcctcacagagcagaa

SEQ ID NO: 658943 - DNA, 25 bp, Homo sapien
caaaaacgcttctcacgtaagtgtc

SEQ ID NO: 658944 - DNA, 25 bp, Homo sapien
gcttctcacgtaagtgtctctttaa

SEQ ID NO: 658945 - DNA, 25 bp, Homo sapien
acactccctgtacaaaaacgcttct

SEQ ID NO: 658946 - DNA, 25 bp, Homo sapien
tccctgtacaaaaacgcttctcacg

SEQ ID NO: 658947 - DNA, 25 bp, Homo sapien
gctaaactttcgtccacactcttgg

SEQ ID NO: 658948 - DNA, 25 bp, Homo sapien
tattgctaaactttcgtccacactc

SEQ ID NO: 658949 - DNA, 25 bp, Homo sapien
tgtagtatgacttattgctaaactt

SEQ ID NO: 658950 - DNA, 25 bp, Homo sapien
aaactttcgtccacactcttggcat

SEQ ID NO: 658951 - DNA, 25 bp, Homo sapien
tatagcctcgcttacactcctggca

SEQ ID NO: 658952 - DNA, 25 bp, Homo sapien
ggtatagcctcgcttacactcctgg

SEQ ID NO: 658953 - DNA, 25 bp, Homo sapien
ttctcctttgagtgtatccgccagt

SEQ ID NO: 658954 - DNA, 25 bp, Homo sapien
tcctttgagtgtatccgccagtggt

SEQ ID NO: 658955 - DNA, 25 bp, Homo sapien
gcaatccttgcaattaaatggcctt

SEQ ID NO: 658956 - DNA, 25 bp, Homo sapien
ggtgtgtgaggagatttcccttcca

SEQ ID NO: 658957 - DNA, 25 bp, Homo sapien
ggctgcttgccagaatgtgcaagct

SEQ ID NO: 658958 - DNA, 25 bp, Homo sapien
tgattttaggatgaagcctcgcccg

SEQ ID NO: 658959 - DNA, 25 bp, Homo sapien
gacttattagtatagcctcgcccac

SEQ ID NO: 658960 - DNA, 25 bp, Homo sapien
gcttacactgcctgcacgcaaaggg

SEQ ID NO: 658961 - DNA, 25 bp, Homo sapien
ttctggtgcaagagcaatgctgact

SEQ ID NO: 658962 - DNA, 25 bp, Homo sapien
gaggagacttcctttcacgctaaaa

SEQ ID NO: 658963 - DNA, 25 bp, Homo sapien
ccccttgctctagccgcctgatgag

SEQ ID NO: 658964 - DNA, 25 bp, Homo sapien
ccttgctctagccgcctgatgagtt

SEQ ID NO: 658965 - DNA, 25 bp, Homo sapien
ggggcctggccggcgtcttctctct

SEQ ID NO: 658966 - DNA, 25 bp, Homo sapien
aggggcctggccggcgtcttctctc

SEQ ID NO: 658967 - DNA, 25 bp, Homo sapien
ttgtaggctccacgggccatttgct

SEQ ID NO: 658968 - DNA, 25 bp, Homo sapien
gaggtgactcctggttgtaggctcc

SEQ ID NO: 658969 - DNA, 25 bp, Homo sapien
ctggttgtaggctccacgggccatt

SEQ ID NO: 658970 - DNA, 25 bp, Homo sapien
tgactcctggttgtaggctccacgg

SEQ ID NO: 658971 - DNA, 25 bp, Homo sapien
taggctcgagggaagccacgcttac

SEQ ID NO: 658972 - DNA, 25 bp, Homo sapien
ttaggctcgagggaagccacgctta

SEQ ID NO: 658973 - DNA, 25 bp, Homo sapien
agttctccagtgtcacctccctgta

SEQ ID NO: 658974 - DNA, 25 bp, Homo sapien
tctccagtgtcacctccctgtacag

SEQ ID NO: 658975 - DNA, 25 bp, Homo sapien
tagttctccagtgtcacctccctgt

SEQ ID NO: 658976 - DNA, 25 bp, Homo sapien
ccagtgtcacctccctgtacagggc

SEQ ID NO: 658977 - DNA, 25 bp, Homo sapien
gggtgaaatccacagtgacatcccc

SEQ ID NO: 658978 - DNA, 25 bp, Homo sapien
agtgacatccccaaatgccaagaaa

SEQ ID NO: 658979 - DNA, 25 bp, Homo sapien
aatccacagtgacatccccaaatgc

SEQ ID NO: 658980 - DNA, 25 bp, Homo sapien
gaaatccacagtgacatccccaaat

SEQ ID NO: 658981 - DNA, 25 bp, Homo sapien
gtaacacaaaacccaggcatgctca

SEQ ID NO: 658982 - DNA, 25 bp, Homo sapien
taacacaaaacccaggcatgctcac

SEQ ID NO: 658983 - DNA, 25 bp, Homo sapien
ctgtaacacaaaacccaggcatgct

SEQ ID NO: 658984 - DNA, 25 bp, Homo sapien
tgtaacacaaaacccaggcatgctc

SEQ ID NO: 658985 - DNA, 25 bp, Homo sapien
gggacagtgttgcactcacgcagtt

SEQ ID NO: 658986 - DNA, 25 bp, Homo sapien
aggttctgccatctgtacacagatc

SEQ ID NO: 658987 - DNA, 25 bp, Homo sapien
cactacttgatgagtgacacccaca

SEQ ID NO: 658988 - DNA, 25 bp, Homo sapien
gcactcacgcagttggaggattcca

SEQ ID NO: 658989 - DNA, 25 bp, Homo sapien
gtctcctggctccctgaggtcccat

SEQ ID NO: 658990 - DNA, 25 bp, Homo sapien
tgtctcctggctccctgaggtccca

SEQ ID NO: 658991 - DNA, 25 bp, Homo sapien
ctgtctcctggctccctgaggtccc

SEQ ID NO: 658992 - DNA, 25 bp, Homo sapien
cctgctctccacggagaagggaagc

SEQ ID NO: 658993 - DNA, 25 bp, Homo sapien
tgctctccacggagaagggaagctt

SEQ ID NO: 658994 - DNA, 25 bp, Homo sapien
ctgctctccacggagaagggaagct

SEQ ID NO: 658995 - DNA, 25 bp, Homo sapien
agaagtcagagggtggctgggtgca

SEQ ID NO: 658996 - DNA, 25 bp, Homo sapien
agagaagtcagagggtggctgggtg

SEQ ID NO: 658997 - DNA, 25 bp, Homo sapien
ctgtgggaggagagaagtcagaggg

SEQ ID NO: 658998 - DNA, 25 bp, Homo sapien
ggaggagagaagtcagagggtggct

SEQ ID NO: 658999 - DNA, 25 bp, Homo sapien
gatctggccaaaaggtctagggagc

SEQ ID NO: 659000 - DNA, 25 bp, Homo sapien
gagctgggtgacgtttgttgcttac

SEQ ID NO: 659001 - DNA, 25 bp, Homo sapien
tcatctgggagtgaagtgtgcccca

SEQ ID NO: 659002 - DNA, 25 bp, Homo sapien
gggagggcgcacctgcacaattccc

SEQ ID NO: 659003 - DNA, 25 bp, Homo sapien
gatgaggaacacctgcagatgaggt

SEQ ID NO: 659004 - DNA, 25 bp, Homo sapien
tgcactggacagaatacacaagagc

SEQ ID NO: 659005 - DNA, 25 bp, Homo sapien
ccacaggtgcagacaaacttgagaa

SEQ ID NO: 659006 - DNA, 25 bp, Homo sapien
catttaaggttagggctcagagttc

SEQ ID NO: 659007 - DNA, 25 bp, Homo sapien
cactagccagtaactttgagacaga

SEQ ID NO: 659008 - DNA, 25 bp, Homo sapien
taaatatgatgattgcagccaggct

SEQ ID NO: 659009 - DNA, 25 bp, Homo sapien
gctaggttacagaaatacaagtgct

SEQ ID NO: 659010 - DNA, 25 bp, Homo sapien
tctcttgtcacaggtggattaccac

SEQ ID NO: 659011 - DNA, 25 bp, Homo sapien
tacatgtaagggcacatgagaactc

SEQ ID NO: 659012 - DNA, 25 bp, Homo sapien
tctccacaggttgcttactctatgt

SEQ ID NO: 659013 - DNA, 25 bp, Homo sapien
aagcagtgcttcttacggtatgcaa

SEQ ID NO: 659014 - DNA, 25 bp, Homo sapien
tactctatgttcactctatcctcgg

SEQ ID NO: 659015 - DNA, 25 bp, Homo sapien
gcaattaggtaagtggtgtgatcat

SEQ ID NO: 659016 - DNA, 25 bp, Homo sapien
tatagttgggaccagaactagggcc

SEQ ID NO: 659017 - DNA, 25 bp, Homo sapien
tggtcttaagacaaattccgtgtag

SEQ ID NO: 659018 - DNA, 25 bp, Homo sapien
tactggagatacagtccacgtcgct

SEQ ID NO: 659019 - DNA, 25 bp, Homo sapien
cctgtaggaacagaaactgagagcc

SEQ ID NO: 659020 - DNA, 25 bp, Homo sapien
tcctcagagaagtagctgcagtaaa

SEQ ID NO: 659021 - DNA, 25 bp, Homo sapien
gccatctgtgggagttaatatcctg

SEQ ID NO: 659022 - DNA, 25 bp, Homo sapien
caagatgctctagcctgaaaacaga

SEQ ID NO: 659023 - DNA, 25 bp, Homo sapien
aatacataagaagtccccacctggg

SEQ ID NO: 659024 - DNA, 25 bp, Homo sapien
tttaatatatgccagggacggttcc

SEQ ID NO: 659025 - DNA, 25 bp, Homo sapien
tggaaattcccagtcccagggtaga

SEQ ID NO: 659026 - DNA, 25 bp, Homo sapien
gaccatctcgggcactttcacagga

SEQ ID NO: 659027 - DNA, 25 bp, Homo sapien
acggagactgagtggcggcccagac

SEQ ID NO: 659028 - DNA, 25 bp, Homo sapien
tgttcaccgcccgagccgccactac

SEQ ID NO: 659029 - DNA, 25 bp, Homo sapien
tgggttgctcggcgcccctgtgaaa

SEQ ID NO: 659030 - DNA, 25 bp, Homo sapien
gccactacacgcaaccgggaacgga

SEQ ID NO: 659031 - DNA, 25 bp, Homo sapien
tgaggtcaccgatggtggaccacgc

SEQ ID NO: 659032 - DNA, 25 bp, Homo sapien
gaaccgaggcggtgaggtcaccgat

SEQ ID NO: 659033 - DNA, 25 bp, Homo sapien
caccgatggtggaccacgcatctca

SEQ ID NO: 659034 - DNA, 25 bp, Homo sapien
gagggcgaaccgaggcggtgaggtc

SEQ ID NO: 659035 - DNA, 25 bp, Homo sapien
cgccgcccgggactacactacccag

SEQ ID NO: 659036 - DNA, 25 bp, Homo sapien
agaatcctcagcgcggccgggacta

SEQ ID NO: 659037 - DNA, 25 bp, Homo sapien
tctggaacgctctgcgccgcccggg

SEQ ID NO: 659038 - DNA, 25 bp, Homo sapien
gacgcccagggatctggaacgctct

SEQ ID NO: 659039 - DNA, 25 bp, Homo sapien
gcggcccggaggctatgcgaccctg

SEQ ID NO: 659040 - DNA, 25 bp, Homo sapien
ggctatgcgaccctgcgcgtcgcat

SEQ ID NO: 659041 - DNA, 25 bp, Homo sapien
ccggaggctatgcgaccctgcgcgt

SEQ ID NO: 659042 - DNA, 25 bp, Homo sapien
gaggctatgcgaccctgcgcgtcgc

SEQ ID NO: 659043 - DNA, 25 bp, Homo sapien
aaagggttacccagatcatcctgcc

SEQ ID NO: 659044 - DNA, 25 bp, Homo sapien
cctgttatggacgtataacccagtc

SEQ ID NO: 659045 - DNA, 25 bp, Homo sapien
caagatcctcgccagagaaaagggt

SEQ ID NO: 659046 - DNA, 25 bp, Homo sapien
gtactgggtggaccttatcatctca

SEQ ID NO: 659047 - DNA, 25 bp, Homo sapien
tgatggctttgttgcattccctcct

SEQ ID NO: 659048 - DNA, 25 bp, Homo sapien
gataggccataactcatggatacca

SEQ ID NO: 659049 - DNA, 25 bp, Homo sapien
aattatgcacgttgaagctctgccc

SEQ ID NO: 659050 - DNA, 25 bp, Homo sapien
tctagttgtacagctagagccatcc

SEQ ID NO: 659051 - DNA, 25 bp, Homo sapien
gtaatggaatgtggtgatggcagct

SEQ ID NO: 659052 - DNA, 25 bp, Homo sapien
caaggtagtcactaacacagacatg

SEQ ID NO: 659053 - DNA, 25 bp, Homo sapien
ttttcttgtagccagatgaccctgg

SEQ ID NO: 659054 - DNA, 25 bp, Homo sapien
acagacatggatgtcctcaaactca

SEQ ID NO: 659055 - DNA, 25 bp, Homo sapien
tgagtggcagaattagcagggctct

SEQ ID NO: 659056 - DNA, 25 bp, Homo sapien
gcaggatgatgagtggcagaattag

SEQ ID NO: 659057 - DNA, 25 bp, Homo sapien
aggatgatgagtggcagaattagca

SEQ ID NO: 659058 - DNA, 25 bp, Homo sapien
tgatgagtggcagaattagcagggc

SEQ ID NO: 659059 - DNA, 25 bp, Homo sapien
cctccaagttggtcaccctggagag

SEQ ID NO: 659060 - DNA, 25 bp, Homo sapien
ggacctccaagttggtcaccctgga

SEQ ID NO: 659061 - DNA, 25 bp, Homo sapien
tccaagttggtcaccctggagagga

SEQ ID NO: 659062 - DNA, 25 bp, Homo sapien
gaccctcacagtaggggacctccaa

SEQ ID NO: 659063 - DNA, 25 bp, Homo sapien
ggagctcattacaagcaggcctgga

SEQ ID NO: 659064 - DNA, 25 bp, Homo sapien
agctcattacaagcaggcctggatg

SEQ ID NO: 659065 - DNA, 25 bp, Homo sapien
gggagtagaggagctcattacaagc

SEQ ID NO: 659066 - DNA, 25 bp, Homo sapien
tagaggagctcattacaagcaggcc

SEQ ID NO: 659067 - DNA, 25 bp, Homo sapien
tgtatggcatgggcccattctggca

SEQ ID NO: 659068 - DNA, 25 bp, Homo sapien
taagccttgatttgcagtgatccaa

SEQ ID NO: 659069 - DNA, 25 bp, Homo sapien
gatgtttatgctgtatggcatgggc

SEQ ID NO: 659070 - DNA, 25 bp, Homo sapien
catctcttcctgtgagcctgtctgg

SEQ ID NO: 659071 - DNA, 25 bp, Homo sapien
tcccctccagaacagtatgtggttc

SEQ ID NO: 659072 - DNA, 25 bp, Homo sapien
cctccagaacagtatgtggttccaa

SEQ ID NO: 659073 - DNA, 25 bp, Homo sapien
gaggtcccctccagaacagtatgtg

SEQ ID NO: 659074 - DNA, 25 bp, Homo sapien
ccagaacagtatgtggttccaaact

SEQ ID NO: 659075 - DNA, 25 bp, Homo sapien
gggccgcaactgtaggcgtttctgt

SEQ ID NO: 659076 - DNA, 25 bp, Homo sapien
tggattttcctcaatggtggttggg

SEQ ID NO: 659077 - DNA, 25 bp, Homo sapien
agatggattttcctcaatggtggtt

SEQ ID NO: 659078 - DNA, 25 bp, Homo sapien
ggccgcaactgtaggcgtttctgtt

SEQ ID NO: 659079 - DNA, 25 bp, Homo sapien
tgctgcaatcagagccgagaatccc

SEQ ID NO: 659080 - DNA, 25 bp, Homo sapien
tcaaagcatttgacagcctggcaga

SEQ ID NO: 659081 - DNA, 25 bp, Homo sapien
gaacacagacatcaagattcccctg

SEQ ID NO: 659082 - DNA, 25 bp, Homo sapien
gaggagagctaagtgaatccacctg

SEQ ID NO: 659083 - DNA, 25 bp, Homo sapien
tggacacctgggtctccggtggtca

SEQ ID NO: 659084 - DNA, 25 bp, Homo sapien
gtggacacctgggtctccggtggtc

SEQ ID NO: 659085 - DNA, 25 bp, Homo sapien
ggacacctgggtctccggtggtcat

SEQ ID NO: 659086 - DNA, 25 bp, Homo sapien
gctacaagttgacacctagggccca

SEQ ID NO: 659087 - DNA, 25 bp, Homo sapien
tatccttcaggtgtgcatcggtccc

SEQ ID NO: 659088 - DNA, 25 bp, Homo sapien
cttagctagagactggatatccacc

SEQ ID NO: 659089 - DNA, 25 bp, Homo sapien
tacaccaggccccaagtagacagtg

SEQ ID NO: 659090 - DNA, 25 bp, Homo sapien
taagactaggagtcttgttccagcc

SEQ ID NO: 659091 - DNA, 25 bp, Homo sapien
acatagcactgacatgacctgtgtg

SEQ ID NO: 659092 - DNA, 25 bp, Homo sapien
gagactgaacctagaaagaattgct

SEQ ID NO: 659093 - DNA, 25 bp, Homo sapien
tgttccagcctagatcccacactgt

SEQ ID NO: 659094 - DNA, 25 bp, Homo sapien
gacatgttaaatgcggcctcctgtg

SEQ ID NO: 659095 - DNA, 25 bp, Homo sapien
taatcataataatcacactgaagtg

SEQ ID NO: 659096 - DNA, 25 bp, Homo sapien
cactctcgctgggttcttggcggag

SEQ ID NO: 659097 - DNA, 25 bp, Homo sapien
tgcaccctggagtcacgccatggga

SEQ ID NO: 659098 - DNA, 25 bp, Homo sapien
agtccccgcggataggctggacgca

SEQ ID NO: 659099 - DNA, 25 bp, Homo sapien
gactgggtcgtaggccttgtgcact

SEQ ID NO: 659100 - DNA, 25 bp, Homo sapien
tcctgaagttagctgacaatgggct

SEQ ID NO: 659101 - DNA, 25 bp, Homo sapien
tggacgcagggcaggagcctttgca

SEQ ID NO: 659102 - DNA, 25 bp, Homo sapien
ctggagatgcgggatgcccgggctc

SEQ ID NO: 659103 - DNA, 25 bp, Homo sapien
gctgctggagatgcgggatgcccgg

SEQ ID NO: 659104 - DNA, 25 bp, Homo sapien
tgctgctggagatgcgggatgcccg

SEQ ID NO: 659105 - DNA, 25 bp, Homo sapien
gagatgcgggatgcccgggctcggg

SEQ ID NO: 659106 - DNA, 25 bp, Homo sapien
atgctgcccgctggtcagccctggt

SEQ ID NO: 659107 - DNA, 25 bp, Homo sapien
tttccgctcccccagaagattgccc

SEQ ID NO: 659108 - DNA, 25 bp, Homo sapien
ccccagaagattgccctgggcaggg

SEQ ID NO: 659109 - DNA, 25 bp, Homo sapien
aggcatcactcacagccgcttgcga

SEQ ID NO: 659110 - DNA, 25 bp, Homo sapien
acggctatggaggatgtagcggata

SEQ ID NO: 659111 - DNA, 25 bp, Homo sapien
cggctatggaggatgtagcggatac

SEQ ID NO: 659112 - DNA, 25 bp, Homo sapien
tgaggcgcagagacccctccgggat

SEQ ID NO: 659113 - DNA, 25 bp, Homo sapien
ctgaggcgcagagacccctccggga

SEQ ID NO: 659114 - DNA, 25 bp, Homo sapien
actgaggcgcagagacccctccggg

SEQ ID NO: 659115 - DNA, 25 bp, Homo sapien
aggaacccctccatccagcatttcc

SEQ ID NO: 659116 - DNA, 25 bp, Homo sapien
caggaacccctccatccagcatttc

SEQ ID NO: 659117 - DNA, 25 bp, Homo sapien
gaacccctccatccagcatttcctt

SEQ ID NO: 659118 - DNA, 25 bp, Homo sapien
ggaacccctccatccagcatttcct

SEQ ID NO: 659119 - DNA, 25 bp, Homo sapien
tgtgcccactgcctcgaagagttat

SEQ ID NO: 659120 - DNA, 25 bp, Homo sapien
cacatacccgatctgcctggaaggg

SEQ ID NO: 659121 - DNA, 25 bp, Homo sapien
catgctatgcaatgggcggatgacc

SEQ ID NO: 659122 - DNA, 25 bp, Homo sapien
cataagaaaaaatctctggtggcca

SEQ ID NO: 659123 - DNA, 25 bp, Homo sapien
atggttttgcagtgggggtatcgat

SEQ ID NO: 659124 - DNA, 25 bp, Homo sapien
agtgggggtatcgatgggatccatc

SEQ ID NO: 659125 - DNA, 25 bp, Homo sapien
tgggggtatcgatgggatccatctg

SEQ ID NO: 659126 - DNA, 25 bp, Homo sapien
ggtatcgatgggatccatctgtcaa

SEQ ID NO: 659127 - DNA, 25 bp, Homo sapien
cacacctgcagttcgcaagttaggc

SEQ ID NO: 659128 - DNA, 25 bp, Homo sapien
gttcgcaagttaggcttcctgctgc

SEQ ID NO: 659129 - DNA, 25 bp, Homo sapien
ggagcacacctgcagttcgcaagtt

SEQ ID NO: 659130 - DNA, 25 bp, Homo sapien
tgcagttcgcaagttaggcttcctg

SEQ ID NO: 659131 - DNA, 25 bp, Homo sapien
ggattctatcacctggcatcttccc

SEQ ID NO: 659132 - DNA, 25 bp, Homo sapien
tgggcttgtattgggagcttggggg

SEQ ID NO: 659133 - DNA, 25 bp, Homo sapien
ttgtgacctgcgaggttggtgtact

SEQ ID NO: 659134 - DNA, 25 bp, Homo sapien
tccttgtgacctgcgaggttggtgt

SEQ ID NO: 659135 - DNA, 25 bp, Homo sapien
catccttgtgacctgcgaggttggt

SEQ ID NO: 659136 - DNA, 25 bp, Homo sapien
tgacctgcgaggttggtgtactgtc

SEQ ID NO: 659137 - DNA, 25 bp, Homo sapien
gacatttcacccaaaattccagatt

SEQ ID NO: 659138 - DNA, 25 bp, Homo sapien
tggaaacagacatttcacccaaaat

SEQ ID NO: 659139 - DNA, 25 bp, Homo sapien
attttccatttgagagcattttcac

SEQ ID NO: 659140 - DNA, 25 bp, Homo sapien
agcattttcaccttctggaaacaga

SEQ ID NO: 659141 - DNA, 25 bp, Homo sapien
taattctttgtatatttgaagagac

SEQ ID NO: 659142 - DNA, 25 bp, Homo sapien
ttctttgtatatttgaagagacggg

SEQ ID NO: 659143 - DNA, 25 bp, Homo sapien
aattctttgtatatttgaagagacg

SEQ ID NO: 659144 - DNA, 25 bp, Homo sapien
gctaattctttgtatatttgaagag

SEQ ID NO: 659145 - DNA, 25 bp, Homo sapien
aaacctgtgttaccctgtggctaga

SEQ ID NO: 659146 - DNA, 25 bp, Homo sapien
ggtatcactgccaaggacctttaca

SEQ ID NO: 659147 - DNA, 25 bp, Homo sapien
taaatttgtaacagtcagatgggct

SEQ ID NO: 659148 - DNA, 25 bp, Homo sapien
tgattaatcacgtatgtaaaggacg

SEQ ID NO: 659149 - DNA, 25 bp, Homo sapien
tcctcctggacgaccctccgtgaat

SEQ ID NO: 659150 - DNA, 25 bp, Homo sapien
ctgactaatccctctagtaccaggt

SEQ ID NO: 659151 - DNA, 25 bp, Homo sapien
cgtgaatcccggcctccagagacta

SEQ ID NO: 659152 - DNA, 25 bp, Homo sapien
ccctctagtaccaggtactcgggag

SEQ ID NO: 659153 - DNA, 25 bp, Homo sapien
aggctctggagacgatcctgttaat

SEQ ID NO: 659154 - DNA, 25 bp, Homo sapien
gacgatcctgttaatgccttggcca

SEQ ID NO: 659155 - DNA, 25 bp, Homo sapien
gatcctgttaatgccttggccagga

SEQ ID NO: 659156 - DNA, 25 bp, Homo sapien
tggagacgatcctgttaatgccttg

SEQ ID NO: 659157 - DNA, 25 bp, Homo sapien
tggctggtttgcagtcgtcttgatc

SEQ ID NO: 659158 - DNA, 25 bp, Homo sapien
cttggctggtttgcagtcgtcttga

SEQ ID NO: 659159 - DNA, 25 bp, Homo sapien
ccttggctggtttgcagtcgtcttg

SEQ ID NO: 659160 - DNA, 25 bp, Homo sapien
tgaaggtctgtgggcacacgcctgt

SEQ ID NO: 659161 - DNA, 25 bp, Homo sapien
tgcctaaggtttcgccatcctggtc

SEQ ID NO: 659162 - DNA, 25 bp, Homo sapien
gactctgcctaaggtttcgccatcc

SEQ ID NO: 659163 - DNA, 25 bp, Homo sapien
tctgcctaaggtttcgccatcctgg

SEQ ID NO: 659164 - DNA, 25 bp, Homo sapien
ccggactctgcctaaggtttcgcca

SEQ ID NO: 659165 - DNA, 25 bp, Homo sapien
ttgtcctcggttgctgtgttttcat

SEQ ID NO: 659166 - DNA, 25 bp, Homo sapien
gacacccaagctctgccgcggaagg

SEQ ID NO: 659167 - DNA, 25 bp, Homo sapien
taggtctgccctttgcaactcctgg

SEQ ID NO: 659168 - DNA, 25 bp, Homo sapien
agcccggacacccaagctctgccgc

SEQ ID NO: 659169 - DNA, 25 bp, Homo sapien
tctaggtctgccctttgcaactcct

SEQ ID NO: 659170 - DNA, 25 bp, Homo sapien
tagaaaatacactaggctgggtaat

SEQ ID NO: 659171 - DNA, 25 bp, Homo sapien
acactaggctgggtaatttctgaag

SEQ ID NO: 659172 - DNA, 25 bp, Homo sapien
ctaggctgggtaatttctgaagaac

SEQ ID NO: 659173 - DNA, 25 bp, Homo sapien
aatacactaggctgggtaatttctg

SEQ ID NO: 659174 - DNA, 25 bp, Homo sapien
tgtaaggatcctaaactcattcgtg

SEQ ID NO: 659175 - DNA, 25 bp, Homo sapien
gacacattcagagcataacacccta

SEQ ID NO: 659176 - DNA, 25 bp, Homo sapien
tccttggctcatagcataccttggc

SEQ ID NO: 659177 - DNA, 25 bp, Homo sapien
gactgaatcactaccttaaagccct

SEQ ID NO: 659178 - DNA, 25 bp, Homo sapien
tataagataatccaaattgctttcc

SEQ ID NO: 659179 - DNA, 25 bp, Homo sapien
aattactttgccataacatatgaga

SEQ ID NO: 659180 - DNA, 25 bp, Homo sapien
gagaatgctcaaacttataagataa

SEQ ID NO: 659181 - DNA, 25 bp, Homo sapien
catatgagaatgctcaaacttataa

SEQ ID NO: 659182 - DNA, 25 bp, Homo sapien
gttggccagcctgctctcaaactcc

SEQ ID NO: 659183 - DNA, 25 bp, Homo sapien
gccagcctgctctcaaactcctgac

SEQ ID NO: 659184 - DNA, 25 bp, Homo sapien
tggccagcctgctctcaaactcctg

SEQ ID NO: 659185 - DNA, 25 bp, Homo sapien
caggtgtctgccactgatgcccagc

SEQ ID NO: 659186 - DNA, 25 bp, Homo sapien
gttcttcaatgagagctacaaacca

SEQ ID NO: 659187 - DNA, 25 bp, Homo sapien
tgcccaatggtctaaaatgagcctc

SEQ ID NO: 659188 - DNA, 25 bp, Homo sapien
aagggcaaattgtggtccggagaca

SEQ ID NO: 659189 - DNA, 25 bp, Homo sapien
tatcactgagggtacaggtcttcag

SEQ ID NO: 659190 - DNA, 25 bp, Homo sapien
gtagagcaggtcacaaagggcaaat

SEQ ID NO: 659191 - DNA, 25 bp, Homo sapien
cctgggagctaggatagagtcaaac

SEQ ID NO: 659192 - DNA, 25 bp, Homo sapien
aaacctttctttggagtatgccagg

SEQ ID NO: 659193 - DNA, 25 bp, Homo sapien
tcacccagcgatatgtggcaaaaag

SEQ ID NO: 659194 - DNA, 25 bp, Homo sapien
ggcctactaagtttcctcgactgca

SEQ ID NO: 659195 - DNA, 25 bp, Homo sapien
atcctgggccaccacaaatctactt

SEQ ID NO: 659196 - DNA, 25 bp, Homo sapien
gggggtacttactgattgatttgga

SEQ ID NO: 659197 - DNA, 25 bp, Homo sapien
actcccctaatcctgggccaccaca

SEQ ID NO: 659198 - DNA, 25 bp, Homo sapien
agtggggggtacttactgattgatt

SEQ ID NO: 659199 - DNA, 25 bp, Homo sapien
gttcaatactaagatacagacagac

SEQ ID NO: 659200 - DNA, 25 bp, Homo sapien
gggcagctccatcgcaattgttcaa

SEQ ID NO: 659201 - DNA, 25 bp, Homo sapien
gaaaaacagtgtaagaaggccaaca

SEQ ID NO: 659202 - DNA, 25 bp, Homo sapien
gataaccacatagaagaggactttg

SEQ ID NO: 659203 - DNA, 25 bp, Homo sapien
ctgtcctccagaattgctagttaga

SEQ ID NO: 659204 - DNA, 25 bp, Homo sapien
gaaacgttcacattgtcctaggttc

SEQ ID NO: 659205 - DNA, 25 bp, Homo sapien
tgcaaacactgactttactgaccag

SEQ ID NO: 659206 - DNA, 25 bp, Homo sapien
gccacaggcactgaagcccactata

SEQ ID NO: 659207 - DNA, 25 bp, Homo sapien
agcaccctcggccggcctattttat

SEQ ID NO: 659208 - DNA, 25 bp, Homo sapien
ttgtgtctccgcctcacaaatagct

SEQ ID NO: 659209 - DNA, 25 bp, Homo sapien
agtttcaatcctcttgcccaagctg

SEQ ID NO: 659210 - DNA, 25 bp, Homo sapien
tgtgatggagtttcaatcctcttgc

SEQ ID NO: 659211 - DNA, 25 bp, Homo sapien
gatgacaagactggctgtgcacaag

SEQ ID NO: 659212 - DNA, 25 bp, Homo sapien
cacaaggttgggtctcggtgctcac

SEQ ID NO: 659213 - DNA, 25 bp, Homo sapien
gaaagcgcaggaaacggcactaaag

SEQ ID NO: 659214 - DNA, 25 bp, Homo sapien
ggaggtcatccccaagcgtttctta

SEQ ID NO: 659215 - DNA, 25 bp, Homo sapien
accatcctcctggtacgtcccttga

SEQ ID NO: 659216 - DNA, 25 bp, Homo sapien
cctggtacgtcccttgaaaccatgc

SEQ ID NO: 659217 - DNA, 25 bp, Homo sapien
cacatcaggctttgggatagagaga

SEQ ID NO: 659218 - DNA, 25 bp, Homo sapien
cgtcccttgaaaccatgcaggactc

SEQ ID NO: 659219 - DNA, 25 bp, Homo sapien
aaggtgtaaaggtctgaagcatgga

SEQ ID NO: 659220 - DNA, 25 bp, Homo sapien
gaagtaagacatactcctgctgttc

SEQ ID NO: 659221 - DNA, 25 bp, Homo sapien
cccagacaagtgaaagctacagcca

SEQ ID NO: 659222 - DNA, 25 bp, Homo sapien
caaagttagtcccttagtactcacg

SEQ ID NO: 659223 - DNA, 25 bp, Homo sapien
gaccaggctgctatagttctccatc

SEQ ID NO: 659224 - DNA, 25 bp, Homo sapien
tcattacatctctctataagtcctt

SEQ ID NO: 659225 - DNA, 25 bp, Homo sapien
ctgagagaagtcgatagacagatcc

SEQ ID NO: 659226 - DNA, 25 bp, Homo sapien
tctctctataagtccttctgagcag

SEQ ID NO: 659227 - DNA, 25 bp, Homo sapien
aatgtagtgtgcagaccggctaggc

SEQ ID NO: 659228 - DNA, 25 bp, Homo sapien
gcagaccggctaggctgagagtggg

SEQ ID NO: 659229 - DNA, 25 bp, Homo sapien
agagaatgtagtgtgcagaccggct

SEQ ID NO: 659230 - DNA, 25 bp, Homo sapien
atggagagaatgtagtgtgcagacc

SEQ ID NO: 659231 - DNA, 25 bp, Homo sapien
attcctgttgtggctgacaaacctc

SEQ ID NO: 659232 - DNA, 25 bp, Homo sapien
gacaaaagttacaagggcatctgcc

SEQ ID NO: 659233 - DNA, 25 bp, Homo sapien
cagtgaaaggctactctaaagaccc

SEQ ID NO: 659234 - DNA, 25 bp, Homo sapien
aaacaggtcagagccattggagcca

SEQ ID NO: 659235 - DNA, 25 bp, Homo sapien
tcatttagacatgtcaggaccgtgg

SEQ ID NO: 659236 - DNA, 25 bp, Homo sapien
tgtccagaaaacaaagtggccgccg

SEQ ID NO: 659237 - DNA, 25 bp, Homo sapien
gattcatagaggctcggctcacagt

SEQ ID NO: 659238 - DNA, 25 bp, Homo sapien
tggagatagcacgacttcgcttggc

SEQ ID NO: 659239 - DNA, 25 bp, Homo sapien
aattttggcccaagaccaatcaggg

SEQ ID NO: 659240 - DNA, 25 bp, Homo sapien
ggattcaggcggtctgtctcacaga

SEQ ID NO: 659241 - DNA, 25 bp, Homo sapien
tttgggctgcgagaaacatcctccc

SEQ ID NO: 659242 - DNA, 25 bp, Homo sapien
cagagaggtgaaccagtcttcccca

SEQ ID NO: 659243 - DNA, 25 bp, Homo sapien
tgccaggccttgtgcgaagtacttt

SEQ ID NO: 659244 - DNA, 25 bp, Homo sapien
tatcactttggtgtgactgcccgcc

SEQ ID NO: 659245 - DNA, 25 bp, Homo sapien
ttggcagcccacgaaggtatcacgg

SEQ ID NO: 659246 - DNA, 25 bp, Homo sapien
caaagcctgggaaaacgccttcaga

SEQ ID NO: 659247 - DNA, 25 bp, Homo sapien
tgtatagaactcacaaggacccagg

SEQ ID NO: 659248 - DNA, 25 bp, Homo sapien
ggattctatcacctggcatcttccc

SEQ ID NO: 659249 - DNA, 25 bp, Homo sapien
cacacctgcagttcgcaagttaggc

SEQ ID NO: 659250 - DNA, 25 bp, Homo sapien
gttcgcaagttaggcttcctgctgc

SEQ ID NO: 659251 - DNA, 25 bp, Homo sapien
ggagcacacctgcagttcgcaagtt

SEQ ID NO: 659252 - DNA, 25 bp, Homo sapien
tagtgccttctaagggccccagtgt

SEQ ID NO: 659253 - DNA, 25 bp, Homo sapien
tcatgaatgtcccaggtggaggtgc

SEQ ID NO: 659254 - DNA, 25 bp, Homo sapien
gagagcttggacatagcactgccct

SEQ ID NO: 659255 - DNA, 25 bp, Homo sapien
cactctcctgtctggtcagaggaac

SEQ ID NO: 659256 - DNA, 25 bp, Homo sapien
cccagcgactgaggcctacaaaatg

SEQ ID NO: 659257 - DNA, 25 bp, Homo sapien
taatgcgtacattgcctcaggcaca

SEQ ID NO: 659258 - DNA, 25 bp, Homo sapien
tcatctacacagtagggagcaactc

SEQ ID NO: 659259 - DNA, 25 bp, Homo sapien
catccccagtgcttgcaggaggagc

SEQ ID NO: 659260 - DNA, 25 bp, Homo sapien
taaaggtcagagtcctcaagtctgt

SEQ ID NO: 659261 - DNA, 25 bp, Homo sapien
tggcctttccttgcactagtgctga

SEQ ID NO: 659262 - DNA, 25 bp, Homo sapien
tagtgctgagggagaaacagccttg

SEQ ID NO: 659263 - DNA, 25 bp, Homo sapien
gactcttcatggtctggtcccacct

SEQ ID NO: 659264 - DNA, 25 bp, Homo sapien
gacatttcacccaaaattccagatt

SEQ ID NO: 659265 - DNA, 25 bp, Homo sapien
gcttctggaaacagacatttcaccc

SEQ ID NO: 659266 - DNA, 25 bp, Homo sapien
ccatttgagagcattttcagcttct

SEQ ID NO: 659267 - DNA, 25 bp, Homo sapien
attttccatttgagagcattttcag

SEQ ID NO: 659268 - DNA, 25 bp, Homo sapien
cctcaatgtagcttattatcaaagt

SEQ ID NO: 659269 - DNA, 25 bp, Homo sapien
aatgattttctgttattcgttttgg

SEQ ID NO: 659270 - DNA, 25 bp, Homo sapien
taagatgaaatctgtggccggaaga

SEQ ID NO: 659271 - DNA, 25 bp, Homo sapien
gcatttcaatacttaggttaagatg

SEQ ID NO: 659272 - DNA, 25 bp, Homo sapien
acgactacaacccactagtgagaga

SEQ ID NO: 659273 - DNA, 25 bp, Homo sapien
tccacgactacaacccactagtgag

SEQ ID NO: 659274 - DNA, 25 bp, Homo sapien
cgactacaacccactagtgagagag

SEQ ID NO: 659275 - DNA, 25 bp, Homo sapien
ccacgactacaacccactagtgaga

SEQ ID NO: 659276 - DNA, 25 bp, Homo sapien
ttccttctccgtcccagtgtatagc

SEQ ID NO: 659277 - DNA, 25 bp, Homo sapien
catgcttgccccatcttgtagccag

SEQ ID NO: 659278 - DNA, 25 bp, Homo sapien
tatagctgtgggtagctttctcaat

SEQ ID NO: 659279 - DNA, 25 bp, Homo sapien
tatcacgggcatccgggaaaatgtg

SEQ ID NO: 659280 - DNA, 25 bp, Homo sapien
ttcttgtcagccctttgcgagtcct

SEQ ID NO: 659281 - DNA, 25 bp, Homo sapien
cggagcctcagagctccgacacaca

SEQ ID NO: 659282 - DNA, 25 bp, Homo sapien
tgtcagccctttgcgagtcctggca

SEQ ID NO: 659283 - DNA, 25 bp, Homo sapien
cgcctgggatttcctcattcttgtc

SEQ ID NO: 659284 - DNA, 25 bp, Homo sapien
tccgcctgggatttcctcattctgg

SEQ ID NO: 659285 - DNA, 25 bp, Homo sapien
gggatttcctcattctggtcggccc

SEQ ID NO: 659286 - DNA, 25 bp, Homo sapien
cggactccgcctgggatttcctcat

SEQ ID NO: 659287 - DNA, 25 bp, Homo sapien
cctgggatttcctcattctggtcgg

SEQ ID NO: 659288 - DNA, 25 bp, Homo sapien
catcctggtcggccctttgggactc

SEQ ID NO: 659289 - DNA, 25 bp, Homo sapien
tggcatccggagacgatcccgtcga

SEQ ID NO: 659290 - DNA, 25 bp, Homo sapien
gacacccaagcactgccaaggaggg

SEQ ID NO: 659291 - DNA, 25 bp, Homo sapien
cgatcccgtcgaccccgtgaagagg

SEQ ID NO: 659292 - DNA, 25 bp, Homo sapien
aatagtgaagaataaaagagactac

SEQ ID NO: 659293 - DNA, 25 bp, Homo sapien
taatagtgaagaataaaagagacta

SEQ ID NO: 659294 - DNA, 25 bp, Homo sapien
ttaatagtgaagaataaaagagact

SEQ ID NO: 659295 - DNA, 25 bp, Homo sapien
agaaattactgaagaagaggctgtc

SEQ ID NO: 659296 - DNA, 25 bp, Homo sapien
caggagtaccaagaagtgagaaatt

SEQ ID NO: 659297 - DNA, 25 bp, Homo sapien
aatatctttcaggacaggagtacca

SEQ ID NO: 659298 - DNA, 25 bp, Homo sapien
aattactgaagaagaggctgtcatc

SEQ ID NO: 659299 - DNA, 25 bp, Homo sapien
ggctgactattcgtagctgttgctg

SEQ ID NO: 659300 - DNA, 25 bp, Homo sapien
aatttgagttcattggatttgtgct

SEQ ID NO: 659301 - DNA, 25 bp, Homo sapien
ccacacaggctgactattcgtagct

SEQ ID NO: 659302 - DNA, 25 bp, Homo sapien
cattggatttgtgcttctccccaca

SEQ ID NO: 659303 - DNA, 25 bp, Homo sapien
tgatttcatgctgtaggtctcaatt

SEQ ID NO: 659304 - DNA, 25 bp, Homo sapien
tcactaaatgcctcagtggactagg

SEQ ID NO: 659305 - DNA, 25 bp, Homo sapien
tacagataggttgctttgagttttt

SEQ ID NO: 659306 - DNA, 25 bp, Homo sapien
gaattgttgccttgtagattgtaca

SEQ ID NO: 659307 - DNA, 25 bp, Homo sapien
ctccctttgcaaaaacgccacattt

SEQ ID NO: 659308 - DNA, 25 bp, Homo sapien
acctccctttgcaaaaacgccacat

SEQ ID NO: 659309 - DNA, 25 bp, Homo sapien
cctccctttgcaaaaacgccacatt

SEQ ID NO: 659310 - DNA, 25 bp, Homo sapien
tcacctccctttgcaaaaacgccac

SEQ ID NO: 659311 - DNA, 25 bp, Homo sapien
ggaggacgactctcatgggaatcca

SEQ ID NO: 659312 - DNA, 25 bp, Homo sapien
cagttgtgatacttttggaatcata

SEQ ID NO: 659313 - DNA, 25 bp, Homo sapien
ttcatggaggacgactctcatggga

SEQ ID NO: 659314 - DNA, 25 bp, Homo sapien
gactctcatgggaatccattgcatg

SEQ ID NO: 659315 - DNA, 25 bp, Homo sapien
tgggtcctgtggctggctgtcaatc

SEQ ID NO: 659316 - DNA, 25 bp, Homo sapien
ttctgtgtctctgcctgggtcctgt

SEQ ID NO: 659317 - DNA, 25 bp, Homo sapien
tgtgtctctgcctgggtcctgtggc

SEQ ID NO: 659318 - DNA, 25 bp, Homo sapien
tcctgtggctggctgtcaatcgttt

SEQ ID NO: 659319 - DNA, 25 bp, Homo sapien
cttcgaccgcgtgaggagatgcgtt

SEQ ID NO: 659320 - DNA, 25 bp, Homo sapien
ctgtgtgaaggcttcgaccgcgtga

SEQ ID NO: 659321 - DNA, 25 bp, Homo sapien
gcggcctcatttttaggatcaagat

SEQ ID NO: 659322 - DNA, 25 bp, Homo sapien
tcatttttaggatcaagatgaccac

SEQ ID NO: 659323 - DNA, 25 bp, Homo sapien
gaaatccaggaagagttcgacacag

SEQ ID NO: 659324 - DNA, 25 bp, Homo sapien
tcgacacagcgacggagaaggaagc

SEQ ID NO: 659325 - DNA, 25 bp, Homo sapien
gccggcaacgggatgcggcaatcat

SEQ ID NO: 659326 - DNA, 25 bp, Homo sapien
gaagagttcgacacagcgacggaga

SEQ ID NO: 659327 - DNA, 25 bp, Homo sapien
tttcccagttgctcgtgatggtggc

SEQ ID NO: 659328 - DNA, 25 bp, Homo sapien
ttcccagttgctcgtgatggtggca

SEQ ID NO: 659329 - DNA, 25 bp, Homo sapien
tcccagttgctcgtgatggtggcat

SEQ ID NO: 659330 - DNA, 25 bp, Homo sapien
ccggtggttccagtttgagtttgtg

SEQ ID NO: 659331 - DNA, 25 bp, Homo sapien
tggttccagtttgagtttgtgaagg

SEQ ID NO: 659332 - DNA, 25 bp, Homo sapien
gtcttgtggccggttgtcagtcgtt

SEQ ID NO: 659333 - DNA, 25 bp, Homo sapien
ctccctgggtcttgtggccggttgt

SEQ ID NO: 659334 - DNA, 25 bp, Homo sapien
cagttttgtgagtccttctaatcaa

SEQ ID NO: 659335 - DNA, 25 bp, Homo sapien
catgttatgtaagaaacctatgtgc

SEQ ID NO: 659336 - DNA, 25 bp, Homo sapien
aatcccacactaagaaagagctttc

SEQ ID NO: 659337 - DNA, 25 bp, Homo sapien
aactgtgagtataacagcttgactc

SEQ ID NO: 659338 - DNA, 25 bp, Homo sapien
tatattacctgatggcttcgtgttc

SEQ ID NO: 659339 - DNA, 25 bp, Homo sapien
caacttgatatattacctgatggct

SEQ ID NO: 659340 - DNA, 25 bp, Homo sapien
tgatatattacctgatggcttcgtg

SEQ ID NO: 659341 - DNA, 25 bp, Homo sapien
tatcaacttgatatattacctgatg

SEQ ID NO: 659342 - DNA, 25 bp, Homo sapien
caggtaataccaaagagtagctgat

SEQ ID NO: 659343 - DNA, 25 bp, Homo sapien
tgagagtaaggcctgacaataggac

SEQ ID NO: 659344 - DNA, 25 bp, Homo sapien
tcaaagatgcattaatgagatgtca

SEQ ID NO: 659345 - DNA, 25 bp, Homo sapien
cacaatcactcctattgagcaataa

SEQ ID NO: 659346 - DNA, 25 bp, Homo sapien
tgtcctttgtgtgaccagcgggctt

SEQ ID NO: 659347 - DNA, 25 bp, Homo sapien
ttgtcctttgtgtgaccagcgggct

SEQ ID NO: 659348 - DNA, 25 bp, Homo sapien
tgattggaactttgtgtgtcccctt

SEQ ID NO: 659349 - DNA, 25 bp, Homo sapien
taagtggatatagggaggcatgtgt

SEQ ID NO: 659350 - DNA, 25 bp, Homo sapien
cagggtcagggcatactgcagcctt

SEQ ID NO: 659351 - DNA, 25 bp, Homo sapien
tatctggagtataggcatatggcac

SEQ ID NO: 659352 - DNA, 25 bp, Homo sapien
cctccaaaagtgcagtggcagggtc

SEQ ID NO: 659353 - DNA, 25 bp, Homo sapien
ggcctccaaaagtgcagtggcaggg

SEQ ID NO: 659354 - DNA, 25 bp, Homo sapien
tatcaggcactggagaacctcccac

SEQ ID NO: 659355 - DNA, 25 bp, Homo sapien
gcactggagaacctcccacctggtc

SEQ ID NO: 659356 - DNA, 25 bp, Homo sapien
agtgccgtttcctgcgctttcttgc

SEQ ID NO: 659357 - DNA, 25 bp, Homo sapien
ttgtatcaggcactggagaacctcc

SEQ ID NO: 659358 - DNA, 25 bp, Homo sapien
actggccctttactccagtgcctgg

SEQ ID NO: 659359 - DNA, 25 bp, Homo sapien
ctggccctttactccagtgcctgga

SEQ ID NO: 659360 - DNA, 25 bp, Homo sapien
tcatcatgctatgtgttaaaacaag

SEQ ID NO: 659361 - DNA, 25 bp, Homo sapien
tctatttcctttagactagtgacca

SEQ ID NO: 659362 - DNA, 25 bp, Homo sapien
tgttatctacgtgtgttcatcatgc

SEQ ID NO: 659363 - DNA, 25 bp, Homo sapien
tagtgaccatgagtttgactgacaa

SEQ ID NO: 659364 - DNA, 25 bp, Homo sapien
gaggaccaaagacttacatgtcaga

SEQ ID NO: 659365 - DNA, 25 bp, Homo sapien
gacatggcagatcagtaaggaaaga

SEQ ID NO: 659366 - DNA, 25 bp, Homo sapien
tcttcgatacgtgatgtaggtgaca

SEQ ID NO: 659367 - DNA, 25 bp, Homo sapien
gaatagagagctcccaagcaaatct

SEQ ID NO: 659368 - DNA, 25 bp, Homo sapien
gtgtgtctatgtgtgtgtctcccat

SEQ ID NO: 659369 - DNA, 25 bp, Homo sapien
gtctatgtgtgtgtctcccattctc

SEQ ID NO: 659370 - DNA, 25 bp, Homo sapien
gtgtctatgtgtgtgtctcccattc

SEQ ID NO: 659371 - DNA, 25 bp, Homo sapien
tctatgtgtgtgtctcccattctct

SEQ ID NO: 659372 - DNA, 25 bp, Homo sapien
ttgtcaatctttttcgccgccgcgg

SEQ ID NO: 659373 - DNA, 25 bp, Homo sapien
cagggcggcctgtctttggtgaccc

SEQ ID NO: 659374 - DNA, 25 bp, Homo sapien
gccacaaagcggtttctcgcagggc

SEQ ID NO: 659375 - DNA, 25 bp, Homo sapien
gatccgctttgggtatgtgaaggcc

SEQ ID NO: 659376 - DNA, 25 bp, Homo sapien
gtcacggagcaaatgaaatctcatt

SEQ ID NO: 659377 - DNA, 25 bp, Homo sapien
aagagccccacaggggctctttgtc

SEQ ID NO: 659378 - DNA, 25 bp, Homo sapien
tgcagctgaagacaagagccccaca

SEQ ID NO: 659379 - DNA, 25 bp, Homo sapien
caagagccccacaggggctctttgt

SEQ ID NO: 659380 - DNA, 25 bp, Homo sapien
agctgaagacaagagccccacaggg

SEQ ID NO: 659381 - DNA, 25 bp, Homo sapien
tgctggtatcttttcacggctcttt

SEQ ID NO: 659382 - DNA, 25 bp, Homo sapien
ggtatcttttcacggctcttttctg

SEQ ID NO: 659383 - DNA, 25 bp, Homo sapien
ctggtatcttttcacggctcttttc

SEQ ID NO: 659384 - DNA, 25 bp, Homo sapien
ctgcaggagagcagcggacccacgt

SEQ ID NO: 659385 - DNA, 25 bp, Homo sapien
cggagaggtcattgtctacctgcag

SEQ ID NO: 659386 - DNA, 25 bp, Homo sapien
gacctgaaagaaggtggttctcatt

SEQ ID NO: 659387 - DNA, 25 bp, Homo sapien
gagcgacctgaaagaaggtggttct

SEQ ID NO: 659388 - DNA, 25 bp, Homo sapien
gaggtcattgtctacctgcaggagc

SEQ ID NO: 659389 - DNA, 25 bp, Homo sapien
agacctgaggactctgagctttatc

SEQ ID NO: 659390 - DNA, 25 bp, Homo sapien
caaacacagacctgaggactctgag

SEQ ID NO: 659391 - DNA, 25 bp, Homo sapien
gactctcaaacacagacctgaggac

SEQ ID NO: 659392 - DNA, 25 bp, Homo sapien
aaccctggtggaggatttggctgga

SEQ ID NO: 659393 - DNA, 25 bp, Homo sapien
cactcgctttccagatagggcccat

SEQ ID NO: 659394 - DNA, 25 bp, Homo sapien
aaggtccctgtagttgtggttcaca

SEQ ID NO: 659395 - DNA, 25 bp, Homo sapien
tggtggtgggcactcgctttccaga

SEQ ID NO: 659396 - DNA, 25 bp, Homo sapien
gtccctgtagttgtggttcacagga

SEQ ID NO: 659397 - DNA, 25 bp, Homo sapien
tccagcagcccatagtccaagtctt

SEQ ID NO: 659398 - DNA, 25 bp, Homo sapien
cagcccatagtccaagtctttttct

SEQ ID NO: 659399 - DNA, 25 bp, Homo sapien
ttctccacacctgtatccaaagctt

SEQ ID NO: 659400 - DNA, 25 bp, Homo sapien
gggagggggtccttgaggccatcca

SEQ ID NO: 659401 - DNA, 25 bp, Homo sapien
ggctctatacttcctggaaactgcc

SEQ ID NO: 659402 - DNA, 25 bp, Homo sapien
ctggctctatacttcctggaaactg

SEQ ID NO: 659403 - DNA, 25 bp, Homo sapien
cagctggctctatacttcctggaaa

SEQ ID NO: 659404 - DNA, 25 bp, Homo sapien
agctggctctatacttcctggaaac

SEQ ID NO: 659405 - DNA, 25 bp, Homo sapien
ggtgtggcagaagagtgtccacaaa

SEQ ID NO: 659406 - DNA, 25 bp, Homo sapien
tgtccacaaacttcggaaggtatcc

SEQ ID NO: 659407 - DNA, 25 bp, Homo sapien
gcctcagtcggcatcgcagctgatg

SEQ ID NO: 659408 - DNA, 25 bp, Homo sapien
gcagctgatggtgaaacttttggtg

SEQ ID NO: 659409 - DNA, 25 bp, Homo sapien
gtgaagtggcggccagtgcacaagg

SEQ ID NO: 659410 - DNA, 25 bp, Homo sapien
gtggcggccagtgcacaaggcccat

SEQ ID NO: 659411 - DNA, 25 bp, Homo sapien
aagtggcggccagtgcacaaggccc

SEQ ID NO: 659412 - DNA, 25 bp, Homo sapien
ctggtgaagtggcggccagtgcaca

SEQ ID NO: 659413 - DNA, 25 bp, Homo sapien
cagggcgcagcaggcatcgggcagt

SEQ ID NO: 659414 - DNA, 25 bp, Homo sapien
cgcggagctcgcagggcgcagcagg

SEQ ID NO: 659415 - DNA, 25 bp, Homo sapien
cgccgcggagctcgcagggcgcagc

SEQ ID NO: 659416 - DNA, 25 bp, Homo sapien
gggcgcagcaggcatcgggcagtga

SEQ ID NO: 659417 - DNA, 25 bp, Homo sapien
cccatggcatggctccggggcacag

SEQ ID NO: 659418 - DNA, 25 bp, Homo sapien
tcgctcccatggcatggctccgggg

SEQ ID NO: 659419 - DNA, 25 bp, Homo sapien
cctcgctcccatggcatggctccgg

SEQ ID NO: 659420 - DNA, 25 bp, Homo sapien
gctcccatggcatggctccggggca

SEQ ID NO: 659421 - DNA, 25 bp, Homo sapien
ccactgggacatgatacccactggg

SEQ ID NO: 659422 - DNA, 25 bp, Homo sapien
cactgggacatgatacccactggga

SEQ ID NO: 659423 - DNA, 25 bp, Homo sapien
tccactgggacatgatacccactgg

SEQ ID NO: 659424 - DNA, 25 bp, Homo sapien
atgttcccctggggaccgatgcaca

SEQ ID NO: 659425 - DNA, 25 bp, Homo sapien
tatgttcccctggggaccgatgcac

SEQ ID NO: 659426 - DNA, 25 bp, Homo sapien
ttatgttcccctggggaccgatgca

SEQ ID NO: 659427 - DNA, 25 bp, Homo sapien
tgttcccctggggaccgatgcacac

SEQ ID NO: 659428 - DNA, 25 bp, Homo sapien
ctgaaggataggtattcatctgggg

SEQ ID NO: 659429 - DNA, 25 bp, Homo sapien
tgaaggataggtattcatctggggc

SEQ ID NO: 659430 - DNA, 25 bp, Homo sapien
cagtagtatgggtgtcaaccttggg

SEQ ID NO: 659431 - DNA, 25 bp, Homo sapien
gttcagctggcgtccactgtctact

SEQ ID NO: 659432 - DNA, 25 bp, Homo sapien
agctggcgtccactgtctacttggg

SEQ ID NO: 659433 - DNA, 25 bp, Homo sapien
aaccttggggctagtgttcagctgg

SEQ ID NO: 659434 - DNA, 25 bp, Homo sapien
caaatggacaacatagccccaggtt

SEQ ID NO: 659435 - DNA, 25 bp, Homo sapien
aaatggacaacatagccccaggttc

SEQ ID NO: 659436 - DNA, 25 bp, Homo sapien
ccaaatggacaacatagccccaggt

SEQ ID NO: 659437 - DNA, 25 bp, Homo sapien
tcgggagcctcatatgcaccttgaa

SEQ ID NO: 659438 - DNA, 25 bp, Homo sapien
taaacctggagaatgatgtgcaggt

SEQ ID NO: 659439 - DNA, 25 bp, Homo sapien
ccacagggcctaggtataaacctgg

SEQ ID NO: 659440 - DNA, 25 bp, Homo sapien
gggaccagtgtttatcgggagcctc

SEQ ID NO: 659441 - DNA, 25 bp, Homo sapien
gagcccgatatccacctcagagctg

SEQ ID NO: 659442 - DNA, 25 bp, Homo sapien
cacctggagcccgatatccacctca

SEQ ID NO: 659443 - DNA, 25 bp, Homo sapien
agcccgatatccacctcagagctgg

SEQ ID NO: 659444 - DNA, 25 bp, Homo sapien
ctggagcccgatatccacctcagag

SEQ ID NO: 659445 - DNA, 25 bp, Homo sapien
gcacctgggacctgagtttccacct

SEQ ID NO: 659446 - DNA, 25 bp, Homo sapien
cctgagtttccacctagggcctgat

SEQ ID NO: 659447 - DNA, 25 bp, Homo sapien
gaacctgggtatcaccatggggcct

SEQ ID NO: 659448 - DNA, 25 bp, Homo sapien
tctgatgtctacctgaagcctaggt

SEQ ID NO: 659449 - DNA, 25 bp, Homo sapien
cctgtcccatttgccccagccctgt

SEQ ID NO: 659450 - DNA, 25 bp, Homo sapien
cccagccctgtggagctcgctgagc

SEQ ID NO: 659451 - DNA, 25 bp, Homo sapien
ccctgtggagctcgctgagctggca

SEQ ID NO: 659452 - DNA, 25 bp, Homo sapien
tccctgtcccatttgccccagccct

SEQ ID NO: 659453 - DNA, 25 bp, Homo sapien
agtggacttggtctcccttactaga

SEQ ID NO: 659454 - DNA, 25 bp, Homo sapien
gacttggtctcccttactagatgtt

SEQ ID NO: 659455 - DNA, 25 bp, Homo sapien
cttggtctcccttactagatgtttc

SEQ ID NO: 659456 - DNA, 25 bp, Homo sapien
tggacttggtctcccttactagatg

SEQ ID NO: 659457 - DNA, 25 bp, Homo sapien
aattacaagtcaaaacagaaacagc

SEQ ID NO: 659458 - DNA, 25 bp, Homo sapien
tctaggtctccctgtcactctagtg

SEQ ID NO: 659459 - DNA, 25 bp, Homo sapien
gaaacagcttccatgtccttacaca

SEQ ID NO: 659460 - DNA, 25 bp, Homo sapien
tctagtgcacaccaagactgttctc

SEQ ID NO: 659461 - DNA, 25 bp, Homo sapien
tctattaagtcatacatctgatgag

SEQ ID NO: 659462 - DNA, 25 bp, Homo sapien
catacatctgatgaggaactaatgt

SEQ ID NO: 659463 - DNA, 25 bp, Homo sapien
agtcaatgggtcttagatacaacac

SEQ ID NO: 659464 - DNA, 25 bp, Homo sapien
gatacaacaccaaatgcaagagtga

SEQ ID NO: 659465 - DNA, 25 bp, Homo sapien
catatgctagtccatagagacagag

SEQ ID NO: 659466 - DNA, 25 bp, Homo sapien
ggagtaactgctagtaagtatggag

SEQ ID NO: 659467 - DNA, 25 bp, Homo sapien
taaaagcacttaaagcgcctgcagt

SEQ ID NO: 659468 - DNA, 25 bp, Homo sapien
tgataaacatgttctagagttagag

SEQ ID NO: 659469 - DNA, 25 bp, Homo sapien
gtagggagaaaaacatacattctta

SEQ ID NO: 659470 - DNA, 25 bp, Homo sapien
aatatggaaaactcaaaaatatctt

SEQ ID NO: 659471 - DNA, 25 bp, Homo sapien
gagaaaaacatacattcttagaata

SEQ ID NO: 659472 - DNA, 25 bp, Homo sapien
aggaatgattccttttatgtaaagt

SEQ ID NO: 659473 - DNA, 25 bp, Homo sapien
ggtgaagcattttgatcatctccac

SEQ ID NO: 659474 - DNA, 25 bp, Homo sapien
gattacaggcatgaaataaataaat

SEQ ID NO: 659475 - DNA, 25 bp, Homo sapien
ggattacaggcatgaaataaataaa

SEQ ID NO: 659476 - DNA, 25 bp, Homo sapien
cctagaaattctagagaattgataa

SEQ ID NO: 659477 - DNA, 25 bp, Homo sapien
acaagttcaactcctcaaattggca

SEQ ID NO: 659478 - DNA, 25 bp, Homo sapien
ttctagagaattgataagttttcca

SEQ ID NO: 659479 - DNA, 25 bp, Homo sapien
aattggcataaagccacagtaggaa

SEQ ID NO: 659480 - DNA, 25 bp, Homo sapien
tgggtgctgggaaacgtatacttta

SEQ ID NO: 659481 - DNA, 25 bp, Homo sapien
tgaatgctccttggttgggagggta

SEQ ID NO: 659482 - DNA, 25 bp, Homo sapien
cgtatactttacagagtgaggagga

SEQ ID NO: 659483 - DNA, 25 bp, Homo sapien
agtgaggaggataatgactttgttc

SEQ ID NO: 659484 - DNA, 25 bp, Homo sapien
agatcaatgccaataaacaatcatg

SEQ ID NO: 659485 - DNA, 25 bp, Homo sapien
tgtgagatcaatgccaataaacaat

SEQ ID NO: 659486 - DNA, 25 bp, Homo sapien
cagactgtgagatcaatgccaataa

SEQ ID NO: 659487 - DNA, 25 bp, Homo sapien
gactgtgagatcaatgccaataaac

SEQ ID NO: 659488 - DNA, 25 bp, Homo sapien
gtgaatctttgccttaacaacatta

SEQ ID NO: 659489 - DNA, 25 bp, Homo sapien
tgaatctttgccttaacaacattat

SEQ ID NO: 659490 - DNA, 25 bp, Homo sapien
cattatacacatgattccctcccat

SEQ ID NO: 659491 - DNA, 25 bp, Homo sapien
tatacacatgattccctcccattct

SEQ ID NO: 659492 - DNA, 25 bp, Homo sapien
cataccactccagtcgagctgcggt

SEQ ID NO: 659493 - DNA, 25 bp, Homo sapien
tcataccactccagtcgagctgcgg

SEQ ID NO: 659494 - DNA, 25 bp, Homo sapien
cctcataccactccagtcgagctgc

SEQ ID NO: 659495 - DNA, 25 bp, Homo sapien
ctcataccactccagtcgagctgcg

SEQ ID NO: 659496 - DNA, 25 bp, Homo sapien
tttaacaagctccccgcttatggag

SEQ ID NO: 659497 - DNA, 25 bp, Homo sapien
cagaggggagatcgtagctagtccc

SEQ ID NO: 659498 - DNA, 25 bp, Homo sapien
atccaaatcaccagaggggagatcg

SEQ ID NO: 659499 - DNA, 25 bp, Homo sapien
taacaagctccccgcttatggagct

SEQ ID NO: 659500 - DNA, 25 bp, Homo sapien
taactgggacagcaagtacagatcc

SEQ ID NO: 659501 - DNA, 25 bp, Homo sapien
gacagcaagtacagatcctggttcg

SEQ ID NO: 659502 - DNA, 25 bp, Homo sapien
ttataactgggacagcaagtacaga

SEQ ID NO: 659503 - DNA, 25 bp, Homo sapien
acagatcctggttcgtaggaggtgc

SEQ ID NO: 659504 - DNA, 25 bp, Homo sapien
gaaattgtctctctcctcagtagtc

SEQ ID NO: 659505 - DNA, 25 bp, Homo sapien
tgaacgtaggtggatcagcttgtac

SEQ ID NO: 659506 - DNA, 25 bp, Homo sapien
tggactctctcaggttgaacgtagg

SEQ ID NO: 659507 - DNA, 25 bp, Homo sapien
gcatagagttgcaaaagcatcgaca

SEQ ID NO: 659508 - DNA, 25 bp, Homo sapien
tgtcgaccagtgtaccaagtaacct

SEQ ID NO: 659509 - DNA, 25 bp, Homo sapien
tatctcgggtaccagcacagttgga

SEQ ID NO: 659510 - DNA, 25 bp, Homo sapien
caacatttcaaggttttgtcgacca

SEQ ID NO: 659511 - DNA, 25 bp, Homo sapien
gaaaatgtggagacgctatctcggg

SEQ ID NO: 659512 - DNA, 25 bp, Homo sapien
agtagtctgataaggagaaggcaga

SEQ ID NO: 659513 - DNA, 25 bp, Homo sapien
catgttgagtagtctgataaggaga

SEQ ID NO: 659514 - DNA, 25 bp, Homo sapien
caattattatacatagaggtcttca

SEQ ID NO: 659515 - DNA, 25 bp, Homo sapien
gccttcatgttgagtagtctgataa

SEQ ID NO: 659516 - DNA, 25 bp, Homo sapien
attctttgttgagaagcgcaggtta

SEQ ID NO: 659517 - DNA, 25 bp, Homo sapien
ttctttgttgagaagcgcaggttat

SEQ ID NO: 659518 - DNA, 25 bp, Homo sapien
ctttgttgagaagcgcaggttatgt

SEQ ID NO: 659519 - DNA, 25 bp, Homo sapien
tctttgttgagaagcgcaggttatg

SEQ ID NO: 659520 - DNA, 25 bp, Homo sapien
aactggacccttagactgtacacaa

SEQ ID NO: 659521 - DNA, 25 bp, Homo sapien
caacagtgagagtctggttatctac

SEQ ID NO: 659522 - DNA, 25 bp, Homo sapien
caaggtggattaaaggcctacgtgt

SEQ ID NO: 659523 - DNA, 25 bp, Homo sapien
caactccttgatatgggccttgaca

SEQ ID NO: 659524 - DNA, 25 bp, Homo sapien
atggtgaaattctaaagcctagtat

SEQ ID NO: 659525 - DNA, 25 bp, Homo sapien
catatggtgaaattctaaagcctag

SEQ ID NO: 659526 - DNA, 25 bp, Homo sapien
tatggtgaaattctaaagcctagta

SEQ ID NO: 659527 - DNA, 25 bp, Homo sapien
tggtgaaattctaaagcctagtatt

SEQ ID NO: 659528 - DNA, 25 bp, Homo sapien
tctgtttctgcactaaagcataagc

SEQ ID NO: 659529 - DNA, 25 bp, Homo sapien
ccttcattagcacatatccaattta

SEQ ID NO: 659530 - DNA, 25 bp, Homo sapien
gaacttcattcttgactccaaagct

SEQ ID NO: 659531 - DNA, 25 bp, Homo sapien
aagcataagctccacaaaagcaagt

SEQ ID NO: 659532 - DNA, 25 bp, Homo sapien
caaccgacgtaaagccggtgagccg

SEQ ID NO: 659533 - DNA, 25 bp, Homo sapien
ccagggccacatcgctcgtgattct

SEQ ID NO: 659534 - DNA, 25 bp, Homo sapien
ggtcactcgccggacggaacgctgc

SEQ ID NO: 659535 - DNA, 25 bp, Homo sapien
ggacggaacgctgcgcgcagccatc

SEQ ID NO: 659536 - DNA, 25 bp, Homo sapien
gagtcgctactgcagcgctaccata

SEQ ID NO: 659537 - DNA, 25 bp, Homo sapien
aagctgaggagggttcctctgcaag

SEQ ID NO: 659538 - DNA, 25 bp, Homo sapien
gcgctaccataacggagagagagac

SEQ ID NO: 659539 - DNA, 25 bp, Homo sapien
gggttcctctgcaagcgagtcgcta

SEQ ID NO: 659540 - DNA, 25 bp, Homo sapien
ctcgtggggcccgaggggcccgcag

SEQ ID NO: 659541 - DNA, 25 bp, Homo sapien
agaaggctttctcaccgaggatggg

SEQ ID NO: 659542 - DNA, 25 bp, Homo sapien
ttctcaccgaggatgggtcacactc

SEQ ID NO: 659543 - DNA, 25 bp, Homo sapien
ctcttggatcgctagagaaggcttt

SEQ ID NO: 659544 - DNA, 25 bp, Homo sapien
ggcagaacggtagcccctcggcggc

SEQ ID NO: 659545 - DNA, 25 bp, Homo sapien
tcggaggcagaacggtagcccctcg

SEQ ID NO: 659546 - DNA, 25 bp, Homo sapien
ggaggcagaacggtagcccctcggc

SEQ ID NO: 659547 - DNA, 25 bp, Homo sapien
gtcggaggcagaacggtagcccctc

SEQ ID NO: 659548 - DNA, 25 bp, Homo sapien
accgctcggcctcgggaacctgagg

SEQ ID NO: 659549 - DNA, 25 bp, Homo sapien
ggagcgctccaggagcaccgcaaag

SEQ ID NO: 659550 - DNA, 25 bp, Homo sapien
agggggagccaacgctcgcgcaaac

SEQ ID NO: 659551 - DNA, 25 bp, Homo sapien
aacctgagggacaacccggagcgct

SEQ ID NO: 659552 - DNA, 25 bp, Homo sapien
ggacagcgaggtcaggccgggttcc

SEQ ID NO: 659553 - DNA, 25 bp, Homo sapien
attcgccacgaatgtccgcccctcg

SEQ ID NO: 659554 - DNA, 25 bp, Homo sapien
gagaagaagggtcccattcgccacg

SEQ ID NO: 659555 - DNA, 25 bp, Homo sapien
aagtcgacaaccacaggaggcgaga

SEQ ID NO: 659556 - DNA, 25 bp, Homo sapien
tcttgtaagactgtggctttgtttc

SEQ ID NO: 659557 - DNA, 25 bp, Homo sapien
ttgtaagactgtggctttgtttcat

SEQ ID NO: 659558 - DNA, 25 bp, Homo sapien
tgatgtgacataagactgtgttttg

SEQ ID NO: 659559 - DNA, 25 bp, Homo sapien
atgtgacataagactgtgttttgag

SEQ ID NO: 659560 - DNA, 25 bp, Homo sapien
agtcctaatgaattcattctgcagc

SEQ ID NO: 659561 - DNA, 25 bp, Homo sapien
tcggtttctttgagaccgaagcttc

SEQ ID NO: 659562 - DNA, 25 bp, Homo sapien
cagacagaggcccactaaagacacg

SEQ ID NO: 659563 - DNA, 25 bp, Homo sapien
agacagaggcccactaaagacacgc

SEQ ID NO: 659564 - DNA, 25 bp, Homo sapien
ttgagaccgaagcttctcacattgt

SEQ ID NO: 659565 - DNA, 25 bp, Homo sapien
ttagtcagactggagcctcgacacc

SEQ ID NO: 659566 - DNA, 25 bp, Homo sapien
tcaccgtcacgggagaatgggctcg

SEQ ID NO: 659567 - DNA, 25 bp, Homo sapien
tttgctcttcgaactccggctgtgg

SEQ ID NO: 659568 - DNA, 25 bp, Homo sapien
tttgtcaaggctcagggaatcgtcc

SEQ ID NO: 659569 - DNA, 25 bp, Homo sapien
atgtcggcctgcctttggtgagcct

SEQ ID NO: 659570 - DNA, 25 bp, Homo sapien
ggtcgtgaggccggttgtcaatcat

SEQ ID NO: 659571 - DNA, 25 bp, Homo sapien
gggtcgtgaggccggttgtcaatca

SEQ ID NO: 659572 - DNA, 25 bp, Homo sapien
tcggcctgcctttggtgagcctttt

SEQ ID NO: 659573 - DNA, 25 bp, Homo sapien
tgccatgagagccaattggaagatc

SEQ ID NO: 659574 - DNA, 25 bp, Homo sapien
tagttgcccatccatttgcacaatg

SEQ ID NO: 659575 - DNA, 25 bp, Homo sapien
taacagaagtgtagggtgccatgag

SEQ ID NO: 659576 - DNA, 25 bp, Homo sapien
catttgcacaatggaatagcatgtg

SEQ ID NO: 659577 - DNA, 25 bp, Homo sapien
atgtaaaaaccgtcaggaatccctg

SEQ ID NO: 659578 - DNA, 25 bp, Homo sapien
gcaactgagaaacgaatgtaaaaac

SEQ ID NO: 659579 - DNA, 25 bp, Homo sapien
tcataacaaggattcagatctagag

SEQ ID NO: 659580 - DNA, 25 bp, Homo sapien
tctagagttctcatagagtgaagaa

SEQ ID NO: 659581 - DNA, 25 bp, Homo sapien
cagtggatccagcaaccaccaacag

SEQ ID NO: 659582 - DNA, 25 bp, Homo sapien
cttgcctgctccagtggatccagca

SEQ ID NO: 659583 - DNA, 25 bp, Homo sapien
gctccagtggatccagcaaccacca

SEQ ID NO: 659584 - DNA, 25 bp, Homo sapien
gtggatccagcaaccaccaacagct

SEQ ID NO: 659585 - DNA, 25 bp, Homo sapien
agaaattactgaagaagaggctgtc

SEQ ID NO: 659586 - DNA, 25 bp, Homo sapien
caggagtaccaagaagtgagaaatt

SEQ ID NO: 659587 - DNA, 25 bp, Homo sapien
aatatctttcaggacaggagtacca

SEQ ID NO: 659588 - DNA, 25 bp, Homo sapien
aattactgaagaagaggctgtcatc

SEQ ID NO: 659589 - DNA, 25 bp, Homo sapien
cactatctaaaattcttatcttgac

SEQ ID NO: 659590 - DNA, 25 bp, Homo sapien
gacctcgatcacaaagttgattatt

SEQ ID NO: 659591 - DNA, 25 bp, Homo sapien
ttcacttgtcaagttcttacactat

SEQ ID NO: 659592 - DNA, 25 bp, Homo sapien
ctcctgacctcgatcacaaagttga

SEQ ID NO: 659593 - DNA, 25 bp, Homo sapien
ctctgccaattggatctctttctct

SEQ ID NO: 659594 - DNA, 25 bp, Homo sapien
ttaaacagctgttcttggagagtgg

SEQ ID NO: 659595 - DNA, 25 bp, Homo sapien
agaaaggtgtatctgtattattttc

SEQ ID NO: 659596 - DNA, 25 bp, Homo sapien
actctctgccaattggatctctttc

SEQ ID NO: 659597 - DNA, 25 bp, Homo sapien
ggtattaaatttgaattcactggat

SEQ ID NO: 659598 - DNA, 25 bp, Homo sapien
ggctgactattcgtagctgttgctg

SEQ ID NO: 659599 - DNA, 25 bp, Homo sapien
ccacacaggctgactattcgtagct

SEQ ID NO: 659600 - DNA, 25 bp, Homo sapien
actggatttgtgcttctccccacac

SEQ ID NO: 659601 - DNA, 25 bp, Homo sapien
tctcgtagtgctagttccaggaaga

SEQ ID NO: 659602 - DNA, 25 bp, Homo sapien
gagggatacactctcgtagtgctag

SEQ ID NO: 659603 - DNA, 25 bp, Homo sapien
tacactctcgtagtgctagttccag

SEQ ID NO: 659604 - DNA, 25 bp, Homo sapien
gtagtgctagttccaggaagatgcc

SEQ ID NO: 659605 - DNA, 25 bp, Homo sapien
aatggctctattcatttatgttggg

SEQ ID NO: 659606 - DNA, 25 bp, Homo sapien
tcatctaatgctggcctcctaggtt

SEQ ID NO: 659607 - DNA, 25 bp, Homo sapien
tgaatatggtagtgcagttatctct

SEQ ID NO: 659608 - DNA, 25 bp, Homo sapien
gctattatggatactgctgcagtga

SEQ ID NO: 659609 - DNA, 25 bp, Homo sapien
cttccggtggcctgtctctgtggtt

SEQ ID NO: 659610 - DNA, 25 bp, Homo sapien
ccatcttccggtggcctgtctctgt

SEQ ID NO: 659611 - DNA, 25 bp, Homo sapien
ctgtggttctgcttgggctgaagtt

SEQ ID NO: 659612 - DNA, 25 bp, Homo sapien
tctctgtggttctgcttgggctgaa

SEQ ID NO: 659613 - DNA, 25 bp, Homo sapien
tggctgacaactgccaggttcaaaa

SEQ ID NO: 659614 - DNA, 25 bp, Homo sapien
gacaactgccaggttcaaaatcacc

SEQ ID NO: 659615 - DNA, 25 bp, Homo sapien
agaatggctgacaactgccaggttc

SEQ ID NO: 659616 - DNA, 25 bp, Homo sapien
caactgccaggttcaaaatcacctc

SEQ ID NO: 659617 - DNA, 25 bp, Homo sapien
aggtcatcagggaggcactcctcca

SEQ ID NO: 659618 - DNA, 25 bp, Homo sapien
agggaaaagttggattgcaaaatgg

SEQ ID NO: 659619 - DNA, 25 bp, Homo sapien
tgggatgactcaatcgtgcagggaa

SEQ ID NO: 659620 - DNA, 25 bp, Homo sapien
tccgttcattgcacagtcaacagca

SEQ ID NO: 659621 - DNA, 25 bp, Homo sapien
gagccacattggagtgagatggact

SEQ ID NO: 659622 - DNA, 25 bp, Homo sapien
ataaatttcgattatatccaccatc

SEQ ID NO: 659623 - DNA, 25 bp, Homo sapien
catccccaggagaccgaattcatgc

SEQ ID NO: 659624 - DNA, 25 bp, Homo sapien
ccccaggagaccgaattcatgcaca

SEQ ID NO: 659625 - DNA, 25 bp, Homo sapien
gagaccgaattcatgcacacagcct

SEQ ID NO: 659626 - DNA, 25 bp, Homo sapien
tattcccatccccaggagaccgaat

SEQ ID NO: 659627 - DNA, 25 bp, Homo sapien
gactcacaggtgtacaaatcacctc

SEQ ID NO: 659628 - DNA, 25 bp, Homo sapien
ctcctcataaaaaggagccactctt

SEQ ID NO: 659629 - DNA, 25 bp, Homo sapien
gttgggggggatggttgagactcac

SEQ ID NO: 659630 - DNA, 25 bp, Homo sapien
ttttctgtgcttcctgagtccacgg

SEQ ID NO: 659631 - DNA, 25 bp, Homo sapien
ggtttatctctgtcagacgaatgaa

SEQ ID NO: 659632 - DNA, 25 bp, Homo sapien
gaaatgttccttcccagattctaca

SEQ ID NO: 659633 - DNA, 25 bp, Homo sapien
tctctgtcagacgaatgaacacatc

SEQ ID NO: 659634 - DNA, 25 bp, Homo sapien
tgtcagacgaatgaacacatcacaa

SEQ ID NO: 659635 - DNA, 25 bp, Homo sapien
gacagcttctttatagtgtttatta

SEQ ID NO: 659636 - DNA, 25 bp, Homo sapien
cttctttatagtgtttattaggatt

SEQ ID NO: 659637 - DNA, 25 bp, Homo sapien
cagagacagcttctttatagtgttt

SEQ ID NO: 659638 - DNA, 25 bp, Homo sapien
gagacagcttctttatagtgtttat

SEQ ID NO: 659639 - DNA, 25 bp, Homo sapien
atatctcctcatcaattgtacaaaa

SEQ ID NO: 659640 - DNA, 25 bp, Homo sapien
tgcagctgacactaggccttgagac

SEQ ID NO: 659641 - DNA, 25 bp, Homo sapien
taccagtcccataaagcgcggtcgg

SEQ ID NO: 659642 - DNA, 25 bp, Homo sapien
caccatctgctgtgggatacaccag

SEQ ID NO: 659643 - DNA, 25 bp, Homo sapien
tccatcggtggaagtcggctcaagg

SEQ ID NO: 659644 - DNA, 25 bp, Homo sapien
tcgcaaagcgccaaacaggatgagg

SEQ ID NO: 659645 - DNA, 25 bp, Homo sapien
gaccgtgttggttgggttgactctc

SEQ ID NO: 659646 - DNA, 25 bp, Homo sapien
gcgaggcgcgagtggcttttcccat

SEQ ID NO: 659647 - DNA, 25 bp, Homo sapien
tttcccatcacagtggttccacggt

SEQ ID NO: 659648 - DNA, 25 bp, Homo sapien
ccgtgatctctaagacaggtcggcc

SEQ ID NO: 659649 - DNA, 25 bp, Homo sapien
ggtcgttctcgtcgagagtagaatc

SEQ ID NO: 659650 - DNA, 25 bp, Homo sapien
cgagagtagaatcccgcagtctcag

SEQ ID NO: 659651 - DNA, 25 bp, Homo sapien
tgatctctaagacaggtcggcctgc

SEQ ID NO: 659652 - DNA, 25 bp, Homo sapien
cttgccaccgtcacaggcataaggg

SEQ ID NO: 659653 - DNA, 25 bp, Homo sapien
tcctcttgctgactgtatcgtggtg

SEQ ID NO: 659654 - DNA, 25 bp, Homo sapien
caccgtcacaggcataaggggtggg

SEQ ID NO: 659655 - DNA, 25 bp, Homo sapien
gttcctaaagggtggcttgtgcagg

SEQ ID NO: 659656 - DNA, 25 bp, Homo sapien
tcaaacatcttctctgacgtgggtc

SEQ ID NO: 659657 - DNA, 25 bp, Homo sapien
cttctctgacgtgggtccgctgatc

SEQ ID NO: 659658 - DNA, 25 bp, Homo sapien
atcttctctgacgtgggtccgctga

SEQ ID NO: 659659 - DNA, 25 bp, Homo sapien
tctctgacgtgggtccgctgatctc

SEQ ID NO: 659660 - DNA, 25 bp, Homo sapien
ttgtcctcatctgcagtgtgttcct

SEQ ID NO: 659661 - DNA, 25 bp, Homo sapien
gctcttgtcctcatctgcagtgtgt

SEQ ID NO: 659662 - DNA, 25 bp, Homo sapien
catctgcagtgtgttcctcttgatg

SEQ ID NO: 659663 - DNA, 25 bp, Homo sapien
tggggctcttgtcctcatctgcagt

SEQ ID NO: 659664 - DNA, 25 bp, Homo sapien
gggacgagacagcaattgctccaag

SEQ ID NO: 659665 - DNA, 25 bp, Homo sapien
gagacagcaattgctccaagaccga

SEQ ID NO: 659666 - DNA, 25 bp, Homo sapien
ctcaggatggggacgagacagcaat

SEQ ID NO: 659667 - DNA, 25 bp, Homo sapien
acagcaattgctccaagaccgacgc

SEQ ID NO: 659668 - DNA, 25 bp, Homo sapien
tacagtgtttccagttggccctctg

SEQ ID NO: 659669 - DNA, 25 bp, Homo sapien
gtacacaactctcctagctggtttc

SEQ ID NO: 659670 - DNA, 25 bp, Homo sapien
ctccgtaagtacacaactctcctag

SEQ ID NO: 659671 - DNA, 25 bp, Homo sapien
tttcctagagggcagatacagtgtt

SEQ ID NO: 659672 - DNA, 25 bp, Homo sapien
tgtcaatagagccacagtgtctcca

SEQ ID NO: 659673 - DNA, 25 bp, Homo sapien
tcaatagagccacagtgtctccaaa

SEQ ID NO: 659674 - DNA, 25 bp, Homo sapien
gtcaatagagccacagtgtctccaa

SEQ ID NO: 659675 - DNA, 25 bp, Homo sapien
ggcttcggaggcctagcggagtcgc

SEQ ID NO: 659676 - DNA, 25 bp, Homo sapien
cttcggaggcctagcggagtcgcca

SEQ ID NO: 659677 - DNA, 25 bp, Homo sapien
ttcggaggcctagcggagtcgccag

SEQ ID NO: 659678 - DNA, 25 bp, Homo sapien
tcggaggcctagcggagtcgccagc

SEQ ID NO: 659679 - DNA, 25 bp, Homo sapien
ctggagaaaatgaggtagaagttgc

SEQ ID NO: 659680 - DNA, 25 bp, Homo sapien
aggtagaagttgcaggatccgggac

SEQ ID NO: 659681 - DNA, 25 bp, Homo sapien
gtagaagttgcaggatccgggaccg

SEQ ID NO: 659682 - DNA, 25 bp, Homo sapien
agaagttgcaggatccgggaccgcg

SEQ ID NO: 659683 - DNA, 25 bp, Homo sapien
tctctgagctcctgccggatcaagg

SEQ ID NO: 659684 - DNA, 25 bp, Homo sapien
ttcccagcggccataagtgtttttc

SEQ ID NO: 659685 - DNA, 25 bp, Homo sapien
ctgccggatcaaggctgtggtcatc

SEQ ID NO: 659686 - DNA, 25 bp, Homo sapien
ccagcggccataagtgtttttctgc

SEQ ID NO: 659687 - DNA, 25 bp, Homo sapien
ccattaaggagcgtgtatgcgcgtg

SEQ ID NO: 659688 - DNA, 25 bp, Homo sapien
cacagcaatccgaagaggcaggcat

SEQ ID NO: 659689 - DNA, 25 bp, Homo sapien
cacgcaccgagcttgcaaggaaagg

SEQ ID NO: 659690 - DNA, 25 bp, Homo sapien
aaatcttgagggttctacagagcgc

SEQ ID NO: 659691 - DNA, 25 bp, Homo sapien
gttccaatgactcagaccctattgg

SEQ ID NO: 659692 - DNA, 25 bp, Homo sapien
caatgactcagaccctattggagcc

SEQ ID NO: 659693 - DNA, 25 bp, Homo sapien
ggttccaatgactcagaccctattg

SEQ ID NO: 659694 - DNA, 25 bp, Homo sapien
tccaatgactcagaccctattggag

SEQ ID NO: 659695 - DNA, 25 bp, Homo sapien
tcacatttgactgagggtcctatgt

SEQ ID NO: 659696 - DNA, 25 bp, Homo sapien
tttgactgagggtcctatgtttgac

SEQ ID NO: 659697 - DNA, 25 bp, Homo sapien
tgtttgacctgacaactctactctt

SEQ ID NO: 659698 - DNA, 25 bp, Homo sapien
gagggtcctatgtttgacctgacaa

SEQ ID NO: 659699 - DNA, 25 bp, Homo sapien
gactgtgttcctccctgggaaataa

SEQ ID NO: 659700 - DNA, 25 bp, Homo sapien
ggaaataattccagtaggcttgtgc

SEQ ID NO: 659701 - DNA, 25 bp, Homo sapien
taggcttgtgcttatctgcaagtct

SEQ ID NO: 659702 - DNA, 25 bp, Homo sapien
cctttctgactgtgttcctccctgg

SEQ ID NO: 659703 - DNA, 25 bp, Homo sapien
ctcttgaaggcagtccttgaactct

SEQ ID NO: 659704 - DNA, 25 bp, Homo sapien
gctctccagtggacccatttatctc

SEQ ID NO: 659705 - DNA, 25 bp, Homo sapien
tagcccttggcttctgtaacaggca

SEQ ID NO: 659706 - DNA, 25 bp, Homo sapien
cctctgttagcccttggcttctgta

SEQ ID NO: 659707 - DNA, 25 bp, Homo sapien
ctaggtgggatggttgcctcattac

SEQ ID NO: 659708 - DNA, 25 bp, Homo sapien
ggatttcaaagtgctttgtaggctc

SEQ ID NO: 659709 - DNA, 25 bp, Homo sapien
ctcagagtatttgtgcaatacagcc

SEQ ID NO: 659710 - DNA, 25 bp, Homo sapien
caagtaatgttgcacctcagagtat

SEQ ID NO: 659711 - DNA, 25 bp, Homo sapien
cacttcccacaaacttcggatttca

SEQ ID NO: 659712 - DNA, 25 bp, Homo sapien
actgaaacaattctcttcatccttt

SEQ ID NO: 659713 - DNA, 25 bp, Homo sapien
ccagcactgaaacaattctcttcat

SEQ ID NO: 659714 - DNA, 25 bp, Homo sapien
gcactgaaacaattctcttcatcct

SEQ ID NO: 659715 - DNA, 25 bp, Homo sapien
cagcactgaaacaattctcttcatc

SEQ ID NO: 659716 - DNA, 25 bp, Homo sapien
ctggaaccacagacagggagactga

SEQ ID NO: 659717 - DNA, 25 bp, Homo sapien
gggagactgagggtaggagatgcag

SEQ ID NO: 659718 - DNA, 25 bp, Homo sapien
ggagatgcagctcccaacagctgta

SEQ ID NO: 659719 - DNA, 25 bp, Homo sapien
agactgagggtaggagatgcagctc

SEQ ID NO: 659720 - DNA, 25 bp, Homo sapien
ctcctctgacacgaggtccctccca

SEQ ID NO: 659721 - DNA, 25 bp, Homo sapien
tctgacacgaggtccctcccactcc

SEQ ID NO: 659722 - DNA, 25 bp, Homo sapien
tcctctgacacgaggtccctcccac

SEQ ID NO: 659723 - DNA, 25 bp, Homo sapien
aaagacccctcctctgacacgaggt

SEQ ID NO: 659724 - DNA, 25 bp, Homo sapien
cactgttctggatgttccaactgcc

SEQ ID NO: 659725 - DNA, 25 bp, Homo sapien
agtccacgatgggcactgctcactg

SEQ ID NO: 659726 - DNA, 25 bp, Homo sapien
ctgttctggatgttccaactgccgg

SEQ ID NO: 659727 - DNA, 25 bp, Homo sapien
tccatgccctatgcatgtgtagccc

SEQ ID NO: 659728 - DNA, 25 bp, Homo sapien
gataaggcactaccttcggaacacc

SEQ ID NO: 659729 - DNA, 25 bp, Homo sapien
cctggggccctcatactgcagactg

SEQ ID NO: 659730 - DNA, 25 bp, Homo sapien
ctcctggggccctcatactgcagac

SEQ ID NO: 659731 - DNA, 25 bp, Homo sapien
cacagcctcgtttcctctagatcag

SEQ ID NO: 659732 - DNA, 25 bp, Homo sapien
catactgcagactgggatcatcatc

SEQ ID NO: 659733 - DNA, 25 bp, Homo sapien
ctggaatactccacttggtaaccag

SEQ ID NO: 659734 - DNA, 25 bp, Homo sapien
ggaatactccacttggtaaccagca

SEQ ID NO: 659735 - DNA, 25 bp, Homo sapien
tggaatactccacttggtaaccagc

SEQ ID NO: 659736 - DNA, 25 bp, Homo sapien
gaatactccacttggtaaccagcat

SEQ ID NO: 659737 - DNA, 25 bp, Homo sapien
catcatcctcgcatcccctttcaca

SEQ ID NO: 659738 - DNA, 25 bp, Homo sapien
acatcatcctcgcatcccctttcac

SEQ ID NO: 659739 - DNA, 25 bp, Homo sapien
ccacatcatcctcgcatcccctttc

SEQ ID NO: 659740 - DNA, 25 bp, Homo sapien
ttccacatcatcctcgcatcccctt

SEQ ID NO: 659741 - DNA, 25 bp, Homo sapien
gtccagcacccatacaggagttata

SEQ ID NO: 659742 - DNA, 25 bp, Homo sapien
agcacccatacaggagttatactca

SEQ ID NO: 659743 - DNA, 25 bp, Homo sapien
gtgtccagcacccatacaggagtta

SEQ ID NO: 659744 - DNA, 25 bp, Homo sapien
agtcttccccaacactgtgtccagc

SEQ ID NO: 659745 - DNA, 25 bp, Homo sapien
gccttgcttccaagttgctcccgca

SEQ ID NO: 659746 - DNA, 25 bp, Homo sapien
ttccaagttgctcccgcaacccaga

SEQ ID NO: 659747 - DNA, 25 bp, Homo sapien
cttgcttccaagttgctcccgcaac

SEQ ID NO: 659748 - DNA, 25 bp, Homo sapien
tgctcccgcaacccagaggttggca

SEQ ID NO: 659749 - DNA, 25 bp, Homo sapien
gtatcccctggtactccacacccat

SEQ ID NO: 659750 - DNA, 25 bp, Homo sapien
atcctctgatgtcctcacactccat

SEQ ID NO: 659751 - DNA, 25 bp, Homo sapien
cagaggtttaatgtgctgttaccaa

SEQ ID NO: 659752 - DNA, 25 bp, Homo sapien
atcccatcgaagctgatcccactgg

SEQ ID NO: 659753 - DNA, 25 bp, Homo sapien
agaggtcagtctgtgcgcatcccat

SEQ ID NO: 659754 - DNA, 25 bp, Homo sapien
tgtgctgttaccaagaactcccagg

SEQ ID NO: 659755 - DNA, 25 bp, Homo sapien
aaatgaggataagatactaggaggg

SEQ ID NO: 659756 - DNA, 25 bp, Homo sapien
ctctcttggccgcagtcttctcatc

SEQ ID NO: 659757 - DNA, 25 bp, Homo sapien
ctcttggccgcagtcttctcatctg

SEQ ID NO: 659758 - DNA, 25 bp, Homo sapien
gtaaaatgaggataagatactagga

SEQ ID NO: 659759 - DNA, 25 bp, Homo sapien
ttcctgcgctgcctcttaactttgc

SEQ ID NO: 659760 - DNA, 25 bp, Homo sapien
aaagaaaaccctcaggagagcgttg

SEQ ID NO: 659761 - DNA, 25 bp, Homo sapien
cacagggtaggtccccagcagtggc

SEQ ID NO: 659762 - DNA, 25 bp, Homo sapien
tctgtagtctaaccatgagccttcc

SEQ ID NO: 659763 - DNA, 25 bp, Homo sapien
gctttgatagcacccactcaaatgt

SEQ ID NO: 659764 - DNA, 25 bp, Homo sapien
gctgtgctttgatagcacccactca

SEQ ID NO: 659765 - DNA, 25 bp, Homo sapien
cactcaaatgtgcagtgacctcatc

SEQ ID NO: 659766 - DNA, 25 bp, Homo sapien
aaggggagtagcaagtgacttcctt

SEQ ID NO: 659767 - DNA, 25 bp, Homo sapien
gtctgtggtattctcggctgtagcc

SEQ ID NO: 659768 - DNA, 25 bp, Homo sapien
cgtctgtggtattctcggctgtagc

SEQ ID NO: 659769 - DNA, 25 bp, Homo sapien
atccatggcaaaccgtctgtggtat

SEQ ID NO: 659770 - DNA, 25 bp, Homo sapien
gatccatggcaaaccgtctgtggta

SEQ ID NO: 659771 - DNA, 25 bp, Homo sapien
gccttgaagcgggaataaccactag

SEQ ID NO: 659772 - DNA, 25 bp, Homo sapien
gaagcgggaataaccactagacaga

SEQ ID NO: 659773 - DNA, 25 bp, Homo sapien
gctgtgagggagtactctggcactt

SEQ ID NO: 659774 - DNA, 25 bp, Homo sapien
tgtgagggagtactctggcactttc

SEQ ID NO: 659775 - DNA, 25 bp, Homo sapien
tcagttgcctggtcaaacctgtctc

SEQ ID NO: 659776 - DNA, 25 bp, Homo sapien
cagttgcctggtcaaacctgtctca

SEQ ID NO: 659777 - DNA, 25 bp, Homo sapien
agttgcctggtcaaacctgtctcag

SEQ ID NO: 659778 - DNA, 25 bp, Homo sapien
gaggacatgctctcctcacatttcc

SEQ ID NO: 659779 - DNA, 25 bp, Homo sapien
aatgggcagtcttaatccagggctc

SEQ ID NO: 659780 - DNA, 25 bp, Homo sapien
gaagagattttagtggacaatgggc

SEQ ID NO: 659781 - DNA, 25 bp, Homo sapien
tctacacctggcaacaagacagctg

SEQ ID NO: 659782 - DNA, 25 bp, Homo sapien
cctgaaagcggaggggtggcagttt

SEQ ID NO: 659783 - DNA, 25 bp, Homo sapien
cagttttgcttctgcccagttgggt

SEQ ID NO: 659784 - DNA, 25 bp, Homo sapien
gggctgggccaaatgtgcccagaat

SEQ ID NO: 659785 - DNA, 25 bp, Homo sapien
aatgtgcccagaatgtcaatgtgac

SEQ ID NO: 659786 - DNA, 25 bp, Homo sapien
gctgtggtttgcaggtgctagtaaa

SEQ ID NO: 659787 - DNA, 25 bp, Homo sapien
aattttctccaaatccgagataggt

SEQ ID NO: 659788 - DNA, 25 bp, Homo sapien
cgatttaaattcactaatgggacag

SEQ ID NO: 659789 - DNA, 25 bp, Homo sapien
cgagataggttacacaaaagaatac

SEQ ID NO: 659790 - DNA, 25 bp, Homo sapien
gagtgatacgggaaataaggaatag

SEQ ID NO: 659791 - DNA, 25 bp, Homo sapien
cgcggccaacaggagtgggcaaagg

SEQ ID NO: 659792 - DNA, 25 bp, Homo sapien
ccaacaggagtgggcaaaggacgct

SEQ ID NO: 659793 - DNA, 25 bp, Homo sapien
ctgccagtgcctgagtgatacggga

SEQ ID NO: 659794 - DNA, 25 bp, Homo sapien
ttactgaaagttacaaattgcttcc

SEQ ID NO: 659795 - DNA, 25 bp, Homo sapien
cctccggtacccaggcctagagagt

SEQ ID NO: 659796 - DNA, 25 bp, Homo sapien
tccattattactcatcctgggcggc

SEQ ID NO: 659797 - DNA, 25 bp, Homo sapien
gtacccaggcctagagagttactga

SEQ ID NO: 659798 - DNA, 25 bp, Homo sapien
cagagaagagccgtgcaggggtaca

SEQ ID NO: 659799 - DNA, 25 bp, Homo sapien
aagagccgtgcaggggtacaaccat

SEQ ID NO: 659800 - DNA, 25 bp, Homo sapien
gccgtgcaggggtacaaccatcttc

SEQ ID NO: 659801 - DNA, 25 bp, Homo sapien
agaagagccgtgcaggggtacaacc

SEQ ID NO: 659802 - DNA, 25 bp, Homo sapien
agactggccgatatgcaaaaatttg

SEQ ID NO: 659803 - DNA, 25 bp, Homo sapien
tgaaaatgacggacaaccggccagg

SEQ ID NO: 659804 - DNA, 25 bp, Homo sapien
gtgaaaatgacggacaaccggccag

SEQ ID NO: 659805 - DNA, 25 bp, Homo sapien
cccagctacctgacgtgggatgtca

SEQ ID NO: 659806 - DNA, 25 bp, Homo sapien
tacctgacgtgggatgtcacaagaa

SEQ ID NO: 659807 - DNA, 25 bp, Homo sapien
gacgtgggatgtcacaagaaattaa

SEQ ID NO: 659808 - DNA, 25 bp, Homo sapien
tggagtttcccagctacctgacgtg

SEQ ID NO: 659809 - DNA, 25 bp, Homo sapien
ctctggctagaaatttatcaataca

SEQ ID NO: 659810 - DNA, 25 bp, Homo sapien
gagtaaatagggctctggctagaaa

SEQ ID NO: 659811 - DNA, 25 bp, Homo sapien
ctctgttgttcaagacacgagtaaa

SEQ ID NO: 659812 - DNA, 25 bp, Homo sapien
agacacgagtaaatagggctctggc

SEQ ID NO: 659813 - DNA, 25 bp, Homo sapien
aaggccatgtaggaatatgtcccat

SEQ ID NO: 659814 - DNA, 25 bp, Homo sapien
gggagaaggccatgtaggaatatgt

SEQ ID NO: 659815 - DNA, 25 bp, Homo sapien
gaaggccatgtaggaatatgtccca

SEQ ID NO: 659816 - DNA, 25 bp, Homo sapien
gagaaggccatgtaggaatatgtcc

SEQ ID NO: 659817 - DNA, 25 bp, Homo sapien
gacgaagtgatgaagacgccaggca

SEQ ID NO: 659818 - DNA, 25 bp, Homo sapien
tcccagtgtagctacttaagtttaa

SEQ ID NO: 659819 - DNA, 25 bp, Homo sapien
tgtgagtcccagtgtagctacttaa

SEQ ID NO: 659820 - DNA, 25 bp, Homo sapien
gatgaaacagggaaagacgaagtga

SEQ ID NO: 659821 - DNA, 25 bp, Homo sapien
cttctggtcaccaatgtgctgcagg

SEQ ID NO: 659822 - DNA, 25 bp, Homo sapien
ctttgggcgtcttctggtcaccaat

SEQ ID NO: 659823 - DNA, 25 bp, Homo sapien
gggcgtcttctggtcaccaatgtgc

SEQ ID NO: 659824 - DNA, 25 bp, Homo sapien
tgggcgtcttctggtcaccaatgtg

SEQ ID NO: 659825 - DNA, 25 bp, Homo sapien
ttgtgagagctccaacgccgtggag

SEQ ID NO: 659826 - DNA, 25 bp, Homo sapien
gctccggaataaaattgagctcaag

SEQ ID NO: 659827 - DNA, 25 bp, Homo sapien
agctcaagttgtgagagctccaacg

SEQ ID NO: 659828 - DNA, 25 bp, Homo sapien
gctttggcacatgcgaccggtcatc

SEQ ID NO: 659829 - DNA, 25 bp, Homo sapien
caggaaaggcaaccaaatgccacca

SEQ ID NO: 659830 - DNA, 25 bp, Homo sapien
cccaggaaaggcaaccaaatgccac

SEQ ID NO: 659831 - DNA, 25 bp, Homo sapien
ctccccaggaaaggcaaccaaatgc

SEQ ID NO: 659832 - DNA, 25 bp, Homo sapien
ccccaggaaaggcaaccaaatgcca

SEQ ID NO: 659833 - DNA, 25 bp, Homo sapien
tctattatcacagttttattgcttt

SEQ ID NO: 659834 - DNA, 25 bp, Homo sapien
aatttctattatcacagttttattg

SEQ ID NO: 659835 - DNA, 25 bp, Homo sapien
attatcacagttttattgcttttca

SEQ ID NO: 659836 - DNA, 25 bp, Homo sapien
tttaatttctattatcacagtttta

SEQ ID NO: 659837 - DNA, 25 bp, Homo sapien
gacaacacgaatgagcatagacgac

SEQ ID NO: 659838 - DNA, 25 bp, Homo sapien
gacgtaattggctcctggtcccatg

SEQ ID NO: 659839 - DNA, 25 bp, Homo sapien
gagtcaagatactgaggcactggaa

SEQ ID NO: 659840 - DNA, 25 bp, Homo sapien
caggaagcttgggaactcgttcact

SEQ ID NO: 659841 - DNA, 25 bp, Homo sapien
ctttaggttgccaaatctaacaaga

SEQ ID NO: 659842 - DNA, 25 bp, Homo sapien
actttaggttgccaaatctaacaag

SEQ ID NO: 659843 - DNA, 25 bp, Homo sapien
gtgctatttgcaaccttagttgcta

SEQ ID NO: 659844 - DNA, 25 bp, Homo sapien
tatttgcaaccttagttgctatcat

SEQ ID NO: 659845 - DNA, 25 bp, Homo sapien
atgtgctatttgcaaccttagttgc

SEQ ID NO: 659846 - DNA, 25 bp, Homo sapien
gctatttgcaaccttagttgctatc

SEQ ID NO: 659847 - DNA, 25 bp, Homo sapien
tgtatttcagtcaacaaacgaaatt

SEQ ID NO: 659848 - DNA, 25 bp, Homo sapien
ttgtatttcagtcaacaaacgaaat

SEQ ID NO: 659849 - DNA, 25 bp, Homo sapien
gtaagttttcgccaaactctatgca

SEQ ID NO: 659850 - DNA, 25 bp, Homo sapien
tgttgtacggctttgttcttgacct

SEQ ID NO: 659851 - DNA, 25 bp, Homo sapien
gttttcgccaaactctatgcatata

SEQ ID NO: 659852 - DNA, 25 bp, Homo sapien
tccctttactgcagacatgttgtac

SEQ ID NO: 659853 - DNA, 25 bp, Homo sapien
ttgccttctctatcctggttcccat

SEQ ID NO: 659854 - DNA, 25 bp, Homo sapien
tggcctgctcgcggctcctcacacc

SEQ ID NO: 659855 - DNA, 25 bp, Homo sapien
ctgctcgcggctcctcacaccagca

SEQ ID NO: 659856 - DNA, 25 bp, Homo sapien
gcctgctcgcggctcctcacaccag

SEQ ID NO: 659857 - DNA, 25 bp, Homo sapien
gtggcccgcgcttcaagatgcgccg

SEQ ID NO: 659858 - DNA, 25 bp, Homo sapien
gcccgcgcttcaagatgcgccgccg

SEQ ID NO: 659859 - DNA, 25 bp, Homo sapien
agtggcccgcgcttcaagatgcgcc

SEQ ID NO: 659860 - DNA, 25 bp, Homo sapien
gcgcttcaagatgcgccgccgcagg

SEQ ID NO: 659861 - DNA, 25 bp, Homo sapien
ggttctggacagacgtaggctgtca

SEQ ID NO: 659862 - DNA, 25 bp, Homo sapien
cgggcattcaccgtttgggtgaaga

SEQ ID NO: 659863 - DNA, 25 bp, Homo sapien
aggcgggttctggacagacgtaggc

SEQ ID NO: 659864 - DNA, 25 bp, Homo sapien
ggaagtggaaatctcgggcattcac

SEQ ID NO: 659865 - DNA, 25 bp, Homo sapien
caggatagacgggcgggtgacccgt

SEQ ID NO: 659866 - DNA, 25 bp, Homo sapien
gatagacgggcgggtgacccgtggc

SEQ ID NO: 659867 - DNA, 25 bp, Homo sapien
ctggaaacaggatagacgggcgggt

SEQ ID NO: 659868 - DNA, 25 bp, Homo sapien
gaaacaggatagacgggcgggtgac

SEQ ID NO: 659869 - DNA, 25 bp, Homo sapien
tctgatcttgtagttcattataata

SEQ ID NO: 659870 - DNA, 25 bp, Homo sapien
gatcttgtagttcattataataact

SEQ ID NO: 659871 - DNA, 25 bp, Homo sapien
tagtctgatcttgtagttcattata

SEQ ID NO: 659872 - DNA, 25 bp, Homo sapien
agtctgatcttgtagttcattataa

SEQ ID NO: 659873 - DNA, 25 bp, Homo sapien
tctgctatgtcccaaatttgtgtga

SEQ ID NO: 659874 - DNA, 25 bp, Homo sapien
agacagtgactcttactctaggaga

SEQ ID NO: 659875 - DNA, 25 bp, Homo sapien
agtgccagccactctgcagaggcct

SEQ ID NO: 659876 - DNA, 25 bp, Homo sapien
agctgtcatgtgtacacacttagga

SEQ ID NO: 659877 - DNA, 25 bp, Homo sapien
taatgtggtgtttcaaatagactca

SEQ ID NO: 659878 - DNA, 25 bp, Homo sapien
gataacatgtacatgtggtccaaca

SEQ ID NO: 659879 - DNA, 25 bp, Homo sapien
tacaatgtggtagagaaatcagtgc

SEQ ID NO: 659880 - DNA, 25 bp, Homo sapien
tcagtgcatctaggagctaccttgc

SEQ ID NO: 659881 - DNA, 25 bp, Homo sapien
catagcagaactgctggctccttag

SEQ ID NO: 659882 - DNA, 25 bp, Homo sapien
acccatcttctttgcattaggagaa

SEQ ID NO: 659883 - DNA, 25 bp, Homo sapien
tagtgctgcagtacataacattgaa

SEQ ID NO: 659884 - DNA, 25 bp, Homo sapien
caatttgtagatgtgcgggtggacc

SEQ ID NO: 659885 - DNA, 25 bp, Homo sapien
agccagcatgccctaatagaagtgg

SEQ ID NO: 659886 - DNA, 25 bp, Homo sapien
atctctctattcattcatagaatgg

SEQ ID NO: 659887 - DNA, 25 bp, Homo sapien
gccagcatgccctaatagaagtggg

SEQ ID NO: 659888 - DNA, 25 bp, Homo sapien
aaagaaatttcagagcttccaagac

SEQ ID NO: 659889 - DNA, 25 bp, Homo sapien
tcatgagtttgggaaaagactgtca

SEQ ID NO: 659890 - DNA, 25 bp, Homo sapien
gagacgcttctggacaggtagctat

SEQ ID NO: 659891 - DNA, 25 bp, Homo sapien
tacctagagaggacatcatgagttt

SEQ ID NO: 659892 - DNA, 25 bp, Homo sapien
gaaccaaattgaaagccgacagata

SEQ ID NO: 659893 - DNA, 25 bp, Homo sapien
tagcagttgaatatatatggcatgt

SEQ ID NO: 659894 - DNA, 25 bp, Homo sapien
aattgaacacacagttttaaagctt

SEQ ID NO: 659895 - DNA, 25 bp, Homo sapien
gtgttgtggtaatacaataaccaca

SEQ ID NO: 659896 - DNA, 25 bp, Homo sapien
catggaaatgaaacttacagtacac

SEQ ID NO: 659897 - DNA, 25 bp, Homo sapien
tcatggatgtacttccttggctaac

SEQ ID NO: 659898 - DNA, 25 bp, Homo sapien
gtttaatcaggattcttcatggatg

SEQ ID NO: 659899 - DNA, 25 bp, Homo sapien
gctagtagctagtttaaccaggatt

SEQ ID NO: 659900 - DNA, 25 bp, Homo sapien
cagtgtgttcctcgactccatatca

SEQ ID NO: 659901 - DNA, 25 bp, Homo sapien
tccagcgagcagaactgattacaga

SEQ ID NO: 659902 - DNA, 25 bp, Homo sapien
cattctgcatgtaggcccagtgtgt

SEQ ID NO: 659903 - DNA, 25 bp, Homo sapien
gattacagatcttgacaacagaagg

SEQ ID NO: 659904 - DNA, 25 bp, Homo sapien
taagctttattctacgtttgtataa

SEQ ID NO: 659905 - DNA, 25 bp, Homo sapien
tatttaacagacaacgaatctttca

SEQ ID NO: 659906 - DNA, 25 bp, Homo sapien
taatattattgaccatcataagagc

SEQ ID NO: 659907 - DNA, 25 bp, Homo sapien
cagctcaactttggaagcacagatc

SEQ ID NO: 659908 - DNA, 25 bp, Homo sapien
tctggatcatgaagctgccacggtg

SEQ ID NO: 659909 - DNA, 25 bp, Homo sapien
taactggaaggtacccaggatggag

SEQ ID NO: 659910 - DNA, 25 bp, Homo sapien
cctggtgtccatccggaaggctatg

SEQ ID NO: 659911 - DNA, 25 bp, Homo sapien
gctggctcagtgagaagcgacaccg

SEQ ID NO: 659912 - DNA, 25 bp, Homo sapien
caagatcaccatcaggtgccgcttc

SEQ ID NO: 659913 - DNA, 25 bp, Homo sapien
taagtccgctatactaactagaagg

SEQ ID NO: 659914 - DNA, 25 bp, Homo sapien
gaacatggagagtgccaagatcacc

SEQ ID NO: 659915 - DNA, 25 bp, Homo sapien
ggcgcccgctgtacctcttggagat

SEQ ID NO: 659916 - DNA, 25 bp, Homo sapien
aaggtcctttgagtctgattccggg

SEQ ID NO: 659917 - DNA, 25 bp, Homo sapien
gtcctttgagtctgattccgggaag

SEQ ID NO: 659918 - DNA, 25 bp, Homo sapien
tcatctccaaggtcctttgagtctg

SEQ ID NO: 659919 - DNA, 25 bp, Homo sapien
tccaaggtcctttgagtctgattcc

SEQ ID NO: 659920 - DNA, 25 bp, Homo sapien
ggtattttcgcccatgatgccatac

SEQ ID NO: 659921 - DNA, 25 bp, Homo sapien
agtcaatcgcgtcttctgccacctg

SEQ ID NO: 659922 - DNA, 25 bp, Homo sapien
ctcgggtattttcgcccatgatgcc

SEQ ID NO: 659923 - DNA, 25 bp, Homo sapien
ttctcctcgggtattttcgcccatg

SEQ ID NO: 659924 - DNA, 25 bp, Homo sapien
gagagttccactaagtaggtgttgt

SEQ ID NO: 659925 - DNA, 25 bp, Homo sapien
ctgatcttctctcagatcgtcagca

SEQ ID NO: 659926 - DNA, 25 bp, Homo sapien
atggcagcactgatcttctctcaga

SEQ ID NO: 659927 - DNA, 25 bp, Homo sapien
gcagcactgatcttctctcagatcg

SEQ ID NO: 659928 - DNA, 25 bp, Homo sapien
gcactgatcttctctcagatcgtca

SEQ ID NO: 659929 - DNA, 25 bp, Homo sapien
actctgccatttcaggctgcagtac

SEQ ID NO: 659930 - DNA, 25 bp, Homo sapien
cagactctgccatttcaggctgcag

SEQ ID NO: 659931 - DNA, 25 bp, Homo sapien
gactctgccatttcaggctgcagta

SEQ ID NO: 659932 - DNA, 25 bp, Homo sapien
agactctgccatttcaggctgcagt

SEQ ID NO: 659933 - DNA, 25 bp, Homo sapien
agcagcttgctggtctggatgtcga

SEQ ID NO: 659934 - DNA, 25 bp, Homo sapien
cagcttgctggtctggatgtcgatg

SEQ ID NO: 659935 - DNA, 25 bp, Homo sapien
cgagcagcttgctggtctggatgtc

SEQ ID NO: 659936 - DNA, 25 bp, Homo sapien
ttgctggtctggatgtcgatgggca

SEQ ID NO: 659937 - DNA, 25 bp, Homo sapien
ctgacaagttggagttagagtcgta

SEQ ID NO: 659938 - DNA, 25 bp, Homo sapien
caaatgtgagagtagcttgaactgt

SEQ ID NO: 659939 - DNA, 25 bp, Homo sapien
gaggagacgttggtgatattcaaat

SEQ ID NO: 659940 - DNA, 25 bp, Homo sapien
gagttagagtcgtaatcctccttca

SEQ ID NO: 659941 - DNA, 25 bp, Homo sapien
ggtaaagctcacatggattccaagg

SEQ ID NO: 659942 - DNA, 25 bp, Homo sapien
tcttgccattgtgggatctgaacag

SEQ ID NO: 659943 - DNA, 25 bp, Homo sapien
tctgaacaggccacctgggaaagac

SEQ ID NO: 659944 - DNA, 25 bp, Homo sapien
tctgcaggcgtttctgcacatgcct

SEQ ID NO: 659945 - DNA, 25 bp, Homo sapien
ccagagagggatttcaactgctcca

SEQ ID NO: 659946 - DNA, 25 bp, Homo sapien
tgaagttggagaacgggaagagaaa

SEQ ID NO: 659947 - DNA, 25 bp, Homo sapien
catttgggtactggagtgtgtataa

SEQ ID NO: 659948 - DNA, 25 bp, Homo sapien
gaagagggaaatgcctccacggcag

SEQ ID NO: 659949 - DNA, 25 bp, Homo sapien
tttgagccaggatcataaggatggc

SEQ ID NO: 659950 - DNA, 25 bp, Homo sapien
gagccaggatcataaggatggcaat

SEQ ID NO: 659951 - DNA, 25 bp, Homo sapien
cttttgagccaggatcataaggatg

SEQ ID NO: 659952 - DNA, 25 bp, Homo sapien
caatggtcattaaacagggcttcat

SEQ ID NO: 659953 - DNA, 25 bp, Homo sapien
cagttcttatccacattgactttct

SEQ ID NO: 659954 - DNA, 25 bp, Homo sapien
caacagttcttatccacattgactt

SEQ ID NO: 659955 - DNA, 25 bp, Homo sapien
acagttcttatccacattgactttc

SEQ ID NO: 659956 - DNA, 25 bp, Homo sapien
tcaacagttcttatccacattgact

SEQ ID NO: 659957 - DNA, 25 bp, Homo sapien
ttgttgaacctgatatcaatcctca

SEQ ID NO: 659958 - DNA, 25 bp, Homo sapien
gttgaacctgatatcaatcctcaca

SEQ ID NO: 659959 - DNA, 25 bp, Homo sapien
aacctgatatcaatcctcacatttg

SEQ ID NO: 659960 - DNA, 25 bp, Homo sapien
tctttattccttaagcccaaacagc

SEQ ID NO: 659961 - DNA, 25 bp, Homo sapien
tgaatgtcgatggtgtacttccagg

SEQ ID NO: 659962 - DNA, 25 bp, Homo sapien
gtgaatgtcgatggtgtacttccag

SEQ ID NO: 659963 - DNA, 25 bp, Homo sapien
caaagattctgttgcatcaaggctc

SEQ ID NO: 659964 - DNA, 25 bp, Homo sapien
tatctcctagaaaaatgccactgtc

SEQ ID NO: 659965 - DNA, 25 bp, Homo sapien
aaactggactctaagctactggaac

SEQ ID NO: 659966 - DNA, 25 bp, Homo sapien
tcaatgtgcacatcatgagtgtcca

SEQ ID NO: 659967 - DNA, 25 bp, Homo sapien
gaaatctcatacagtggtttaagag

SEQ ID NO: 659968 - DNA, 25 bp, Homo sapien
tggttcacccatatgattgatcacc

SEQ ID NO: 659969 - DNA, 25 bp, Homo sapien
tatgattgatcaccatgtatttctg

SEQ ID NO: 659970 - DNA, 25 bp, Homo sapien
ggccgaaatctcatacagtggttta

SEQ ID NO: 659971 - DNA, 25 bp, Homo sapien
cctgtccttttcaagtggtgtagca

SEQ ID NO: 659972 - DNA, 25 bp, Homo sapien
tacacaaatcaggtaatgatcccag

SEQ ID NO: 659973 - DNA, 25 bp, Homo sapien
tccaacaaccccttctagcagatga

SEQ ID NO: 659974 - DNA, 25 bp, Homo sapien
gaaatctggttccttgttcagaaga

SEQ ID NO: 659975 - DNA, 25 bp, Homo sapien
tctttgcgtgcacttctgagggaag

SEQ ID NO: 659976 - DNA, 25 bp, Homo sapien
tttgcgtgcacttctgagggaagac

SEQ ID NO: 659977 - DNA, 25 bp, Homo sapien
tactctttgcgtgcacttctgaggg

SEQ ID NO: 659978 - DNA, 25 bp, Homo sapien
agaatactctttgcgtgcacttctg

SEQ ID NO: 659979 - DNA, 25 bp, Homo sapien
tcattcactgatgttcacaaaggcc

SEQ ID NO: 659980 - DNA, 25 bp, Homo sapien
gcatctggcattgcgcttgtgcaaa

SEQ ID NO: 659981 - DNA, 25 bp, Homo sapien
tattgtcaatcgtgcttggtcagcc

SEQ ID NO: 659982 - DNA, 25 bp, Homo sapien
tatactactttggtcacccataggg

SEQ ID NO: 659983 - DNA, 25 bp, Homo sapien
cccagagagcttgagaatggtaatc

SEQ ID NO: 659984 - DNA, 25 bp, Homo sapien
ccagagagcttgagaatggtaatca

SEQ ID NO: 659985 - DNA, 25 bp, Homo sapien
cagagagcttgagaatggtaatcac

SEQ ID NO: 659986 - DNA, 25 bp, Homo sapien
tttgccagaaatgcttatcctcatg

SEQ ID NO: 659987 - DNA, 25 bp, Homo sapien
cataagaccagtcggtattttcctc

SEQ ID NO: 659988 - DNA, 25 bp, Homo sapien
tgcttctcataagaccagtcggtat

SEQ ID NO: 659989 - DNA, 25 bp, Homo sapien
tgcttatcctcatgtaggactggag

SEQ ID NO: 659990 - DNA, 25 bp, Homo sapien
gggctgttcgttctttttgcaagag

SEQ ID NO: 659991 - DNA, 25 bp, Homo sapien
ggtagggctgttcgttctttttgca

SEQ ID NO: 659992 - DNA, 25 bp, Homo sapien
caatagaggtagggctgttcgttct

SEQ ID NO: 659993 - DNA, 25 bp, Homo sapien
ctgcaatagaggtagggctgttcgt

SEQ ID NO: 659994 - DNA, 25 bp, Homo sapien
ccatgcatcgaaggatgtggcgttt

SEQ ID NO: 659995 - DNA, 25 bp, Homo sapien
acccatgcatcgaaggatgtggcgt

SEQ ID NO: 659996 - DNA, 25 bp, Homo sapien
cccatgcatcgaaggatgtggcgtt

SEQ ID NO: 659997 - DNA, 25 bp, Homo sapien
atgcatcgaaggatgtggcgtttgc

SEQ ID NO: 659998 - DNA, 25 bp, Homo sapien
aggcagcatcccactgtcctcacca

SEQ ID NO: 659999 - DNA, 25 bp, Homo sapien
ctggcagtatccaggcagcatccca

SEQ ID NO: 660000 - DNA, 25 bp, Homo sapien
caggcagcatcccactgtcctcacc

SEQ ID NO: 660001 - DNA, 25 bp, Homo sapien
cagcatcccactgtcctcaccagag

SEQ ID NO: 660002 - DNA, 25 bp, Homo sapien
caaaataatggaggttgagtgggcc

SEQ ID NO: 660003 - DNA, 25 bp, Homo sapien
taatttgtcggaaggcattaaaaga

SEQ ID NO: 660004 - DNA, 25 bp, Homo sapien
tctagtctttatatgcatttcccta

SEQ ID NO: 660005 - DNA, 25 bp, Homo sapien
gctgctctaataagtatgtagtagt

SEQ ID NO: 660006 - DNA, 25 bp, Homo sapien
atgtcatttcatccttactgcaatc

SEQ ID NO: 660007 - DNA, 25 bp, Homo sapien
attatgtcatttcatccttactgca

SEQ ID NO: 660008 - DNA, 25 bp, Homo sapien
tttgcattattatgtcatttcatcc

SEQ ID NO: 660009 - DNA, 25 bp, Homo sapien
ctttgcattattatgtcatttcatc

SEQ ID NO: 660010 - DNA, 25 bp, Homo sapien
tgtggaccctaagcaacctgaaaca

SEQ ID NO: 660011 - DNA, 25 bp, Homo sapien
ccctaagcaacctgaaacaaagtca

SEQ ID NO: 660012 - DNA, 25 bp, Homo sapien
taatgaaatgtggaccctaagcaac

SEQ ID NO: 660013 - DNA, 25 bp, Homo sapien
tgtgagttttaatgaaatgtggacc

SEQ ID NO: 660014 - DNA, 25 bp, Homo sapien
cacagcaccgtttacgatttcggca

SEQ ID NO: 660015 - DNA, 25 bp, Homo sapien
gatttcggcagcgtatgatgctgtc

SEQ ID NO: 660016 - DNA, 25 bp, Homo sapien
taaataacgactaggaacacagcac

SEQ ID NO: 660017 - DNA, 25 bp, Homo sapien
gacatctgaggagtggtccagccaa

SEQ ID NO: 660018 - DNA, 25 bp, Homo sapien
tgagacaatggttccaactgagagc

SEQ ID NO: 660019 - DNA, 25 bp, Homo sapien
taattaatgtcccacctagcagagc

SEQ ID NO: 660020 - DNA, 25 bp, Homo sapien
cagatgttagtatccctcaagcgga

SEQ ID NO: 660021 - DNA, 25 bp, Homo sapien
tgagtgagtaatgccagacccagtc

SEQ ID NO: 660022 - DNA, 25 bp, Homo sapien
tagtctcccgaagtcctcaacaagt

SEQ ID NO: 660023 - DNA, 25 bp, Homo sapien
gagatattaacttgagatgatcctg

SEQ ID NO: 660024 - DNA, 25 bp, Homo sapien
atcctgggcaaacctcccgaagctg

SEQ ID NO: 660025 - DNA, 25 bp, Homo sapien
agacgggaagcccatgaccaggaac

SEQ ID NO: 660026 - DNA, 25 bp, Homo sapien
gatatcactggttcttctatggcca

SEQ ID NO: 660027 - DNA, 25 bp, Homo sapien
tgatatcactggttcttctatggcc

SEQ ID NO: 660028 - DNA, 25 bp, Homo sapien
ctgatatcactggttcttctatggc

SEQ ID NO: 660029 - DNA, 25 bp, Homo sapien
atatcactggttcttctatggccag

SEQ ID NO: 660030 - DNA, 25 bp, Homo sapien
aaatagggttccctgcagcacggca

SEQ ID NO: 660031 - DNA, 25 bp, Homo sapien
ggaaggaaatagggttccctgcagc

SEQ ID NO: 660032 - DNA, 25 bp, Homo sapien
ggaaatagggttccctgcagcacgg

SEQ ID NO: 660033 - DNA, 25 bp, Homo sapien
gaaggaaatagggttccctgcagca

SEQ ID NO: 660034 - DNA, 25 bp, Homo sapien
tggttttacaggtacatacttggga

SEQ ID NO: 660035 - DNA, 25 bp, Homo sapien
gattccaggcttgtatttgtgtctg

SEQ ID NO: 660036 - DNA, 25 bp, Homo sapien
gatccacacagcacttagcctcagt

SEQ ID NO: 660037 - DNA, 25 bp, Homo sapien
cagactgcagaagttgattccaggc

SEQ ID NO: 660038 - DNA, 25 bp, Homo sapien
aggtcatcacgttcagcttttccag

SEQ ID NO: 660039 - DNA, 25 bp, Homo sapien
gtcatcacgttcagcttttccagag

SEQ ID NO: 660040 - DNA, 25 bp, Homo sapien
ggtcatcacgttcagcttttccaga

SEQ ID NO: 660041 - DNA, 25 bp, Homo sapien
tcaggtcatcacgttcagcttttcc

SEQ ID NO: 660042 - DNA, 25 bp, Homo sapien
gccaggagcagagtaacagtcaaaa

SEQ ID NO: 660043 - DNA, 25 bp, Homo sapien
caggagcagagtaacagtcaaaagc

SEQ ID NO: 660044 - DNA, 25 bp, Homo sapien
taacagtcaaaagcagaagaaggag

SEQ ID NO: 660045 - DNA, 25 bp, Homo sapien
ggagcagagtaacagtcaaaagcag

SEQ ID NO: 660046 - DNA, 25 bp, Homo sapien
gacattaggattggcagtagctcag

SEQ ID NO: 660047 - DNA, 25 bp, Homo sapien
tatacgatgtaactctgttcgggca

SEQ ID NO: 660048 - DNA, 25 bp, Homo sapien
cagagtcgaggctcaaggacagctc

SEQ ID NO: 660049 - DNA, 25 bp, Homo sapien
cacagtcaacgctcaatacaaggga

SEQ ID NO: 660050 - DNA, 25 bp, Homo sapien
ttcttcaggcattcgtcacggcagg

SEQ ID NO: 660051 - DNA, 25 bp, Homo sapien
tactgacatcagacttaaggcaagt

SEQ ID NO: 660052 - DNA, 25 bp, Homo sapien
cagcacagtttaccactcacgcaga

SEQ ID NO: 660053 - DNA, 25 bp, Homo sapien
cacggcaggagccacgaaaattcca

SEQ ID NO: 660054 - DNA, 25 bp, Homo sapien
ttaagcaatgacatgtccactatcc

SEQ ID NO: 660055 - DNA, 25 bp, Homo sapien
taagcaatgacatgtccactatccc

SEQ ID NO: 660056 - DNA, 25 bp, Homo sapien
tttctttcccagagagagtttagga

SEQ ID NO: 660057 - DNA, 25 bp, Homo sapien
ctttcccagagagagtttaggaatt

SEQ ID NO: 660058 - DNA, 25 bp, Homo sapien
tcccagagagagtttaggaattttc

SEQ ID NO: 660059 - DNA, 25 bp, Homo sapien
cagagagagtttaggaattttctca

SEQ ID NO: 660060 - DNA, 25 bp, Homo sapien
aattccaaggctcagcttttagaat

SEQ ID NO: 660061 - DNA, 25 bp, Homo sapien
caaacagaattccaaggctcagctt

SEQ ID NO: 660062 - DNA, 25 bp, Homo sapien
ttcaaacagaattccaaggctcagc

SEQ ID NO: 660063 - DNA, 25 bp, Homo sapien
tgtaggtgatttcaaacagaattcc

SEQ ID NO: 660064 - DNA, 25 bp, Homo sapien
atcattggcttgtagtggcgtaact

SEQ ID NO: 660065 - DNA, 25 bp, Homo sapien
tgtagtggcgtaactccaatctctg

SEQ ID NO: 660066 - DNA, 25 bp, Homo sapien
tgcttctctcctagtccatggtgat

SEQ ID NO: 660067 - DNA, 25 bp, Homo sapien
ccatggtgattgctaaatgatcatt

SEQ ID NO: 660068 - DNA, 25 bp, Homo sapien
tgggccctggaccttgttggctgtc

SEQ ID NO: 660069 - DNA, 25 bp, Homo sapien
ttccggagccggtgtttgtggcgcc

SEQ ID NO: 660070 - DNA, 25 bp, Homo sapien
agtatattaagtcttgggccctgga

SEQ ID NO: 660071 - DNA, 25 bp, Homo sapien
gtttgtggcgcctcctgctggtcac

SEQ ID NO: 660072 - DNA, 25 bp, Homo sapien
cagtaagtttggcaggccccttgac

SEQ ID NO: 660073 - DNA, 25 bp, Homo sapien
gaggtttcaatgcataggagagaca

SEQ ID NO: 660074 - DNA, 25 bp, Homo sapien
cacaggtgcatgtaagtttcttgcc

SEQ ID NO: 660075 - DNA, 25 bp, Homo sapien
cttgacccttccagcaccgtttgaa

SEQ ID NO: 660076 - DNA, 25 bp, Homo sapien
tcccagatgggatggctgccgggaa

SEQ ID NO: 660077 - DNA, 25 bp, Homo sapien
acgggatggcggcggggcagagacg

SEQ ID NO: 660078 - DNA, 25 bp, Homo sapien
cggggtcgcagcctggcagaggcgc

SEQ ID NO: 660079 - DNA, 25 bp, Homo sapien
gacggggtcgcagcctggcagaggc

SEQ ID NO: 660080 - DNA, 25 bp, Homo sapien
ccagaaccaggagagccacaaggaa

SEQ ID NO: 660081 - DNA, 25 bp, Homo sapien
ctgatggcacatgacccagaaccag

SEQ ID NO: 660082 - DNA, 25 bp, Homo sapien
gacccagaaccaggagagccacaag

SEQ ID NO: 660083 - DNA, 25 bp, Homo sapien
gagccacaaggaacagaagcagctg

SEQ ID NO: 660084 - DNA, 25 bp, Homo sapien
gaccgcagtgggtgaaggagccgga

SEQ ID NO: 660085 - DNA, 25 bp, Homo sapien
gtccacccggagaaactgtctgcaa

SEQ ID NO: 660086 - DNA, 25 bp, Homo sapien
tggaatgaagtggtgagcgagcagc

SEQ ID NO: 660087 - DNA, 25 bp, Homo sapien
tctctttcagccaattttcctgagg

SEQ ID NO: 660088 - DNA, 25 bp, Homo sapien
catcaaccactcctggaatggagat

SEQ ID NO: 660089 - DNA, 25 bp, Homo sapien
acactgccaggcagtgtaaaacaag

SEQ ID NO: 660090 - DNA, 25 bp, Homo sapien
ggtgtcagtttatctggaccccaca

SEQ ID NO: 660091 - DNA, 25 bp, Homo sapien
gaagtgagaaccaatcatttggctc

SEQ ID NO: 660092 - DNA, 25 bp, Homo sapien
aacaaggtattagaatgcaggtccc

SEQ ID NO: 660093 - DNA, 25 bp, Homo sapien
atcatgccgcggctgggaacgctgt

SEQ ID NO: 660094 - DNA, 25 bp, Homo sapien
gggtatgataccttccccaatagga

SEQ ID NO: 660095 - DNA, 25 bp, Homo sapien
gcgactcgggcactgattgttctga

SEQ ID NO: 660096 - DNA, 25 bp, Homo sapien
acatggacccttcctaggcgggaca

SEQ ID NO: 660097 - DNA, 25 bp, Homo sapien
ggctcagagtgagttaatgaccctc

SEQ ID NO: 660098 - DNA, 25 bp, Homo sapien
tctggttgaaccatttcagatatgg

SEQ ID NO: 660099 - DNA, 25 bp, Homo sapien
gccaaggttacttcaggactcccac

SEQ ID NO: 660100 - DNA, 25 bp, Homo sapien
ttagctaggagtggtaacacacatc

SEQ ID NO: 660101 - DNA, 25 bp, Homo sapien
gacggtggcattcttggagcattct

SEQ ID NO: 660102 - DNA, 25 bp, Homo sapien
gcattctgcacattgggtttctacg

SEQ ID NO: 660103 - DNA, 25 bp, Homo sapien
tactttttcttgcacagacggtggc

SEQ ID NO: 660104 - DNA, 25 bp, Homo sapien
agagcatgcttgttcttctgcacag

SEQ ID NO: 660105 - DNA, 25 bp, Homo sapien
gtcaaatcctaaggatccagcggca

SEQ ID NO: 660106 - DNA, 25 bp, Homo sapien
aatcctaaggatccagcggcagtga

SEQ ID NO: 660107 - DNA, 25 bp, Homo sapien
tgacagaatccaaagagggaacaga

SEQ ID NO: 660108 - DNA, 25 bp, Homo sapien
gatccagcggcagtgacagaatcca

SEQ ID NO: 660109 - DNA, 25 bp, Homo sapien
tcaccaccttcctcgaaatacttgg

SEQ ID NO: 660110 - DNA, 25 bp, Homo sapien
ctcaccaccttcctcgaaatacttg

SEQ ID NO: 660111 - DNA, 25 bp, Homo sapien
tctcaccaccttcctcgaaatactt

SEQ ID NO: 660112 - DNA, 25 bp, Homo sapien
caccaccttcctcgaaatacttggg

SEQ ID NO: 660113 - DNA, 25 bp, Homo sapien
tgagtcaccccaaacacgggcaaga

SEQ ID NO: 660114 - DNA, 25 bp, Homo sapien
tgttcttgcacaagcagggaagctg

SEQ ID NO: 660115 - DNA, 25 bp, Homo sapien
tccggttcctacgatcgtgtctggg

SEQ ID NO: 660116 - DNA, 25 bp, Homo sapien
caagagtcggccattcaggaggtca

SEQ ID NO: 660117 - DNA, 25 bp, Homo sapien
gggccggcgcctggctccagcaagt

SEQ ID NO: 660118 - DNA, 25 bp, Homo sapien
gccagatgggctgcccgcccgccag

SEQ ID NO: 660119 - DNA, 25 bp, Homo sapien
ctgggttctccaggcgggcaggggg

SEQ ID NO: 660120 - DNA, 25 bp, Homo sapien
tggctccagcaagtctgggccgcct

SEQ ID NO: 660121 - DNA, 25 bp, Homo sapien
ggcaggaaaatctcttgaacgcggg

SEQ ID NO: 660122 - DNA, 25 bp, Homo sapien
gaaaatctcttgaacgcgggaggca

SEQ ID NO: 660123 - DNA, 25 bp, Homo sapien
tgaggcaggaaaatctcttgaacgc

SEQ ID NO: 660124 - DNA, 25 bp, Homo sapien
ggaaaatctcttgaacgcgggaggc

SEQ ID NO: 660125 - DNA, 25 bp, Homo sapien
ctagtggtgccgggcggcggccacg

SEQ ID NO: 660126 - DNA, 25 bp, Homo sapien
gccagccgcaccttcccccggccag

SEQ ID NO: 660127 - DNA, 25 bp, Homo sapien
gccgggcggcggccacgccagccgc

SEQ ID NO: 660128 - DNA, 25 bp, Homo sapien
ggcggccacgccagccgcaccttcc

SEQ ID NO: 660129 - DNA, 25 bp, Homo sapien
cctggttcccacgggccgagtgcgg

SEQ ID NO: 660130 - DNA, 25 bp, Homo sapien
ttcccacgggccgagtgcgggaagc

SEQ ID NO: 660131 - DNA, 25 bp, Homo sapien
cacgggccgagtgcgggaagccggg

SEQ ID NO: 660132 - DNA, 25 bp, Homo sapien
tggttcccacgggccgagtgcggga

SEQ ID NO: 660133 - DNA, 25 bp, Homo sapien
aaatattcgttgagcacttcccaca

SEQ ID NO: 660134 - DNA, 25 bp, Homo sapien
caacaaatattcgttgagcacttcc

SEQ ID NO: 660135 - DNA, 25 bp, Homo sapien
tattcgttgagcacttcccacatgc

SEQ ID NO: 660136 - DNA, 25 bp, Homo sapien
ttcgttgagcacttcccacatgcca

SEQ ID NO: 660137 - DNA, 25 bp, Homo sapien
catcgactacatcagggaccttcag

SEQ ID NO: 660138 - DNA, 25 bp, Homo sapien
aatcatgaaagtcgccagtggcagc

SEQ ID NO: 660139 - DNA, 25 bp, Homo sapien
tgctgctctacgacatgaacggctg

SEQ ID NO: 660140 - DNA, 25 bp, Homo sapien
tcagttggagctgaactcggaatcc

SEQ ID NO: 660141 - DNA, 25 bp, Homo sapien
tcgcatcttgtgtcgctgaagcgcc

SEQ ID NO: 660142 - DNA, 25 bp, Homo sapien
gcatgcgttcctgcggacgatcgca

SEQ ID NO: 660143 - DNA, 25 bp, Homo sapien
aatggtcacgtttggtgcttctcag

SEQ ID NO: 660144 - DNA, 25 bp, Homo sapien
tctgagggagaacaagaccgatcgg

SEQ ID NO: 660145 - DNA, 25 bp, Homo sapien
tgatcatgacataagttgctggttt

SEQ ID NO: 660146 - DNA, 25 bp, Homo sapien
ttatcttaaacttctatagacccag

SEQ ID NO: 660147 - DNA, 25 bp, Homo sapien
gctggtttttctgcgtgatttgtca

SEQ ID NO: 660148 - DNA, 25 bp, Homo sapien
taaaaattgcacaagtgaaccaggc

SEQ ID NO: 660149 - DNA, 25 bp, Homo sapien
aactagtctcaaatatgtacagcag

SEQ ID NO: 660150 - DNA, 25 bp, Homo sapien
cacacagactatttcaaagagctgg

SEQ ID NO: 660151 - DNA, 25 bp, Homo sapien
tacagacacgcttaacaaaaatagt

SEQ ID NO: 660152 - DNA, 25 bp, Homo sapien
agtttattactgaactgcactttca

SEQ ID NO: 660153 - DNA, 25 bp, Homo sapien
catgtagtggttctcctggtggcaa

SEQ ID NO: 660154 - DNA, 25 bp, Homo sapien
tctagaaaactagctgcaagggacc

SEQ ID NO: 660155 - DNA, 25 bp, Homo sapien
tgaatccctagtcaaaagtggcccc

SEQ ID NO: 660156 - DNA, 25 bp, Homo sapien
taagggttgcaccaatcaggtaggg

SEQ ID NO: 660157 - DNA, 25 bp, Homo sapien
ggtagagtggatggtcagtgtctgg

SEQ ID NO: 660158 - DNA, 25 bp, Homo sapien
catttccgactgaagagtgagccca

SEQ ID NO: 660159 - DNA, 25 bp, Homo sapien
tgcattgttcccatagagttccaca

SEQ ID NO: 660160 - DNA, 25 bp, Homo sapien
tcatgcccgtcaggaaccagcggtt

SEQ ID NO: 660161 - DNA, 25 bp, Homo sapien
ttgaagcgttcctggccctttcggc

SEQ ID NO: 660162 - DNA, 25 bp, Homo sapien
tccccatttacaggccaagaagctg

SEQ ID NO: 660163 - DNA, 25 bp, Homo sapien
tgcaatgcaggctgtctctccccat

SEQ ID NO: 660164 - DNA, 25 bp, Homo sapien
tggtggagccagaatctaaaactgg

SEQ ID NO: 660165 - DNA, 25 bp, Homo sapien
ccaacaattctgcaatgcaggctgt

SEQ ID NO: 660166 - DNA, 25 bp, Homo sapien
tgctccctcaagacaggcatgccat

SEQ ID NO: 660167 - DNA, 25 bp, Homo sapien
ggtacctagcaaaatgccatgtgca

SEQ ID NO: 660168 - DNA, 25 bp, Homo sapien
ttgctcacttgtgacccctgccgtg

SEQ ID NO: 660169 - DNA, 25 bp, Homo sapien
cgtggcccacttccagtcttgacaa

SEQ ID NO: 660170 - DNA, 25 bp, Homo sapien
ccctcggcctatactagatgtgtct

SEQ ID NO: 660171 - DNA, 25 bp, Homo sapien
tcggcctatactagatgtgtcttga

SEQ ID NO: 660172 - DNA, 25 bp, Homo sapien
tatactagatgtgtcttgatgaggg

SEQ ID NO: 660173 - DNA, 25 bp, Homo sapien
actgccctcggcctatactagatgt

SEQ ID NO: 660174 - DNA, 25 bp, Homo sapien
tttgttgctcccaagtacacccagg

SEQ ID NO: 660175 - DNA, 25 bp, Homo sapien
ttcctgaagtagacggctggcagcc

SEQ ID NO: 660176 - DNA, 25 bp, Homo sapien
cccaggtggagtcacaaaataggct

SEQ ID NO: 660177 - DNA, 25 bp, Homo sapien
tcctagctagcctctgcgggtcttg

SEQ ID NO: 660178 - DNA, 25 bp, Homo sapien
tagaagtcaggtgaaaaggttggca

SEQ ID NO: 660179 - DNA, 25 bp, Homo sapien
gaccctgtagaagtcaggtgaaaag

SEQ ID NO: 660180 - DNA, 25 bp, Homo sapien
tgtgaccctgtagaagtcaggtgaa

SEQ ID NO: 660181 - DNA, 25 bp, Homo sapien
ctgtagaagtcaggtgaaaaggttg

SEQ ID NO: 660182 - DNA, 25 bp, Homo sapien
ccaagtagtgtgactttgagcaggt

SEQ ID NO: 660183 - DNA, 25 bp, Homo sapien
cagcccttacttgttaacagtaata

SEQ ID NO: 660184 - DNA, 25 bp, Homo sapien
acctctctggtccatggtgtccttg

SEQ ID NO: 660185 - DNA, 25 bp, Homo sapien
tcccacttcttccaagtagtgtgac

SEQ ID NO: 660186 - DNA, 25 bp, Homo sapien
tgacagctgaccattaccaaacatt

SEQ ID NO: 660187 - DNA, 25 bp, Homo sapien
gacagctgaccattaccaaacattt

SEQ ID NO: 660188 - DNA, 25 bp, Homo sapien
gctgggcactgagctataaagcagt

SEQ ID NO: 660189 - DNA, 25 bp, Homo sapien
taaagcagtctatgcacactaggcc

SEQ ID NO: 660190 - DNA, 25 bp, Homo sapien
tgcacactaggccatatttcccaat

SEQ ID NO: 660191 - DNA, 25 bp, Homo sapien
ttcccaattacatgtacaatcatca

SEQ ID NO: 660192 - DNA, 25 bp, Homo sapien
tatagctgatggatatgtggcccac

SEQ ID NO: 660193 - DNA, 25 bp, Homo sapien
gtttctaaaggacaatcatgggcca

SEQ ID NO: 660194 - DNA, 25 bp, Homo sapien
tgggatgcctacaccagcaatctgg

SEQ ID NO: 660195 - DNA, 25 bp, Homo sapien
tcctaacgttgatgcagtactctgc

SEQ ID NO: 660196 - DNA, 25 bp, Homo sapien
tggctcagcttgtgtctcggagcct

SEQ ID NO: 660197 - DNA, 25 bp, Homo sapien
aaaggtcttagaattgtgcatggca

SEQ ID NO: 660198 - DNA, 25 bp, Homo sapien
tctctatggcttacaagggcctgca

SEQ ID NO: 660199 - DNA, 25 bp, Homo sapien
tcttactagtagaccatggctcagc

SEQ ID NO: 660200 - DNA, 25 bp, Homo sapien
gccacctttatctgatcagaaatgt

SEQ ID NO: 660201 - DNA, 25 bp, Homo sapien
gtccagacaagtcccaagtattttc

SEQ ID NO: 660202 - DNA, 25 bp, Homo sapien
tccaactagtccagacaagtcccaa

SEQ ID NO: 660203 - DNA, 25 bp, Homo sapien
ttggaattccacagcagaaggcaac

SEQ ID NO: 660204 - DNA, 25 bp, Homo sapien
agtgaggtccacagagaccagagag

SEQ ID NO: 660205 - DNA, 25 bp, Homo sapien
taagtgaggtccacagagaccagag

SEQ ID NO: 660206 - DNA, 25 bp, Homo sapien
ctgtaagtgaggtccacagagacca

SEQ ID NO: 660207 - DNA, 25 bp, Homo sapien
tgtaagtgaggtccacagagaccag

SEQ ID NO: 660208 - DNA, 25 bp, Homo sapien
taccagggatttccgttggtgttca

SEQ ID NO: 660209 - DNA, 25 bp, Homo sapien
ggatttccgttggtgttcaccacat

SEQ ID NO: 660210 - DNA, 25 bp, Homo sapien
gggatttccgttggtgttcaccaca

SEQ ID NO: 660211 - DNA, 25 bp, Homo sapien
cagggatttccgttggtgttcacca

SEQ ID NO: 660212 - DNA, 25 bp, Homo sapien
tgagccaagattgccactccactcc

SEQ ID NO: 660213 - DNA, 25 bp, Homo sapien
agccaagattgccactccactcctc

SEQ ID NO: 660214 - DNA, 25 bp, Homo sapien
gccaagattgccactccactcctcc

SEQ ID NO: 660215 - DNA, 25 bp, Homo sapien
ccaagattgccactccactcctcca

SEQ ID NO: 660216 - DNA, 25 bp, Homo sapien
tggtacccactgctgtgggcccagg

SEQ ID NO: 660217 - DNA, 25 bp, Homo sapien
agattctcctgtaaactggtaccca

SEQ ID NO: 660218 - DNA, 25 bp, Homo sapien
tctccacttgggtggaagggtgtta

SEQ ID NO: 660219 - DNA, 25 bp, Homo sapien
aagaaatgtgctgaaccaaactctc

SEQ ID NO: 660220 - DNA, 25 bp, Homo sapien
tcaaagtcaaacagtaagcagggcc

SEQ ID NO: 660221 - DNA, 25 bp, Homo sapien
gacagtaggcttacattgaaggaaa

SEQ ID NO: 660222 - DNA, 25 bp, Homo sapien
tgggaagggctcatctatctaatgc

SEQ ID NO: 660223 - DNA, 25 bp, Homo sapien
tataatcccaggaagatagaggcgg

SEQ ID NO: 660224 - DNA, 25 bp, Homo sapien
tcccagtcatatgcccatgcactgt

SEQ ID NO: 660225 - DNA, 25 bp, Homo sapien
tgctggcgtaccaaggtctcccagt

SEQ ID NO: 660226 - DNA, 25 bp, Homo sapien
ggtctcccagtcatatgcccatgca

SEQ ID NO: 660227 - DNA, 25 bp, Homo sapien
actgtccttgccactgctggcgtac

SEQ ID NO: 660228 - DNA, 25 bp, Homo sapien
gactgtcatttcttggttcaaaacc

SEQ ID NO: 660229 - DNA, 25 bp, Homo sapien
ttaaaaatgtatgtcggactgtcat

SEQ ID NO: 660230 - DNA, 25 bp, Homo sapien
cgtgcccagcctggtgatcctttaa

SEQ ID NO: 660231 - DNA, 25 bp, Homo sapien
tgcccagcctggtgatcctttaaaa

SEQ ID NO: 660232 - DNA, 25 bp, Homo sapien
gctaagtccgaacatgcctctggca

SEQ ID NO: 660233 - DNA, 25 bp, Homo sapien
taaaagcagcaagtaccattccagt

SEQ ID NO: 660234 - DNA, 25 bp, Homo sapien
aggattcaccacgtaaagctgcagg

SEQ ID NO: 660235 - DNA, 25 bp, Homo sapien
tgggatggccaaaagctaaactgac

SEQ ID NO: 660236 - DNA, 25 bp, Homo sapien
accgcgcccagcctgaacttggttt

SEQ ID NO: 660237 - DNA, 25 bp, Homo sapien
gtcttgaactcccgacctgatgatc

SEQ ID NO: 660238 - DNA, 25 bp, Homo sapien
gcgcccagcctgaacttggttttta

SEQ ID NO: 660239 - DNA, 25 bp, Homo sapien
ggtttccaccaccttagccaggctg

SEQ ID NO: 660240 - DNA, 25 bp, Homo sapien
ggccaaacctctactgtgtacaagg

SEQ ID NO: 660241 - DNA, 25 bp, Homo sapien
gagagtagatccaatagcaatgaca

SEQ ID NO: 660242 - DNA, 25 bp, Homo sapien
tgtttcaagaaaagcgctgtaggcc

SEQ ID NO: 660243 - DNA, 25 bp, Homo sapien
aattactatatgctgggctccttgg

SEQ ID NO: 660244 - DNA, 25 bp, Homo sapien
tttcatcaggtgactccaggcaggc

SEQ ID NO: 660245 - DNA, 25 bp, Homo sapien
cactgtcatctattggcagggcctg

SEQ ID NO: 660246 - DNA, 25 bp, Homo sapien
gatggacaagacagccgaacaggtt

SEQ ID NO: 660247 - DNA, 25 bp, Homo sapien
ccaccactaagtagagatacctggg

SEQ ID NO: 660248 - DNA, 25 bp, Homo sapien
tcggtgcagcttggaacaggataat

SEQ ID NO: 660249 - DNA, 25 bp, Homo sapien
ccaggataattacccgatgccacca

SEQ ID NO: 660250 - DNA, 25 bp, Homo sapien
taattacccgatgccaccacagtag

SEQ ID NO: 660251 - DNA, 25 bp, Homo sapien
caccacagtagccagtcggtgcagc

SEQ ID NO: 660252 - DNA, 25 bp, Homo sapien
tgggcagctggcaattctctggtag

SEQ ID NO: 660253 - DNA, 25 bp, Homo sapien
agagttgctgtgtctaagacctctt

SEQ ID NO: 660254 - DNA, 25 bp, Homo sapien
ctgggcagctggcaattctctggta

SEQ ID NO: 660255 - DNA, 25 bp, Homo sapien
gacctctttcatatgcaccactggg

SEQ ID NO: 660256 - DNA, 25 bp, Homo sapien
tggtaaagtgaagtgcctgccacac

SEQ ID NO: 660257 - DNA, 25 bp, Homo sapien
tagtcagctagctcaagagaaccca

SEQ ID NO: 660258 - DNA, 25 bp, Homo sapien
caggaggtctcttgctcagtggtaa

SEQ ID NO: 660259 - DNA, 25 bp, Homo sapien
tttacaagagctggcacagacgagt

SEQ ID NO: 660260 - DNA, 25 bp, Homo sapien
cccagcctatagacagttgcattct

SEQ ID NO: 660261 - DNA, 25 bp, Homo sapien
agctccttcaatggatgacttattt

SEQ ID NO: 660262 - DNA, 25 bp, Homo sapien
gaggggatagaacatctctcataaa

SEQ ID NO: 660263 - DNA, 25 bp, Homo sapien
tgaggggatagaacatctctcataa

SEQ ID NO: 660264 - DNA, 25 bp, Homo sapien
ctgaggggatagaacatctctcata

SEQ ID NO: 660265 - DNA, 25 bp, Homo sapien
aggggatagaacatctctcataaaa

SEQ ID NO: 660266 - DNA, 25 bp, Homo sapien
taagcctcaagaaagtaacccagcc

SEQ ID NO: 660267 - DNA, 25 bp, Homo sapien
tctgagaggagagtgccatacacgc

SEQ ID NO: 660268 - DNA, 25 bp, Homo sapien
aaacagtgcttgaagaggcccctgg

SEQ ID NO: 660269 - DNA, 25 bp, Homo sapien
tatggccatgccctagtctgagagg

SEQ ID NO: 660270 - DNA, 25 bp, Homo sapien
caggataggactgagaccccttggg

SEQ ID NO: 660271 - DNA, 25 bp, Homo sapien
caaggagttaacctcttgtggtgaa

SEQ ID NO: 660272 - DNA, 25 bp, Homo sapien
gcacagggtcatttgtatttccaag

SEQ ID NO: 660273 - DNA, 25 bp, Homo sapien
tttgggacttaatgaacacataggc

SEQ ID NO: 660274 - DNA, 25 bp, Homo sapien
cagaggccaaagaaaagggacacac

SEQ ID NO: 660275 - DNA, 25 bp, Homo sapien
aagctgcgatccgactcaccaatac

SEQ ID NO: 660276 - DNA, 25 bp, Homo sapien
ttgtctacgctttccacgcacagtg

SEQ ID NO: 660277 - DNA, 25 bp, Homo sapien
ggtaagtggccatccaagctgcgat

SEQ ID NO: 660278 - DNA, 25 bp, Homo sapien
tggatccaaggctctaggtggtcat

SEQ ID NO: 660279 - DNA, 25 bp, Homo sapien
aggtcactgaatgcccgccggtacc

SEQ ID NO: 660280 - DNA, 25 bp, Homo sapien
tgttcaaagctctgatatgctgtcc

SEQ ID NO: 660281 - DNA, 25 bp, Homo sapien
tccctcagcgcttgctttactgctg

SEQ ID NO: 660282 - DNA, 25 bp, Homo sapien
cgccggtaccgcagttcaaactcgt

SEQ ID NO: 660283 - DNA, 25 bp, Homo sapien
tggctccattcaccgcggggctgtc

SEQ ID NO: 660284 - DNA, 25 bp, Homo sapien
gtgccaggatgggttgccattgatg

SEQ ID NO: 660285 - DNA, 25 bp, Homo sapien
cattgatggcactgggggtctccat

SEQ ID NO: 660286 - DNA, 25 bp, Homo sapien
catctccgattcagtcccttctggg

SEQ ID NO: 660287 - DNA, 25 bp, Homo sapien
agaaagtcaaccaccagctcccggt

SEQ ID NO: 660288 - DNA, 25 bp, Homo sapien
aaagtcaaccaccagctcccggttg

SEQ ID NO: 660289 - DNA, 25 bp, Homo sapien
ttgtaggagagaaagtcaaccacca

SEQ ID NO: 660290 - DNA, 25 bp, Homo sapien
ggagagaaagtcaaccaccagctcc

SEQ ID NO: 660291 - DNA, 25 bp, Homo sapien
gggctcaaccagtccattgtccaaa

SEQ ID NO: 660292 - DNA, 25 bp, Homo sapien
gtctctggttagtgattctcttcta

SEQ ID NO: 660293 - DNA, 25 bp, Homo sapien
tcttctaagatccaaagccaagata

SEQ ID NO: 660294 - DNA, 25 bp, Homo sapien
tcactcactgagtctcgtctctggt

SEQ ID NO: 660295 - DNA, 25 bp, Homo sapien
aataattaatatgcatgccatttac

SEQ ID NO: 660296 - DNA, 25 bp, Homo sapien
aatatgcatgccatttaccctaaaa

SEQ ID NO: 660297 - DNA, 25 bp, Homo sapien
attaatatgcatgccatttacccta

SEQ ID NO: 660298 - DNA, 25 bp, Homo sapien
taattaatatgcatgccatttaccc

SEQ ID NO: 660299 - DNA, 25 bp, Homo sapien
cagaactggtttctttgtgggtctt

SEQ ID NO: 660300 - DNA, 25 bp, Homo sapien
taagtcaaatcgaaagcaccagtgg

SEQ ID NO: 660301 - DNA, 25 bp, Homo sapien
agtggactctgaatctcccaccagc

SEQ ID NO: 660302 - DNA, 25 bp, Homo sapien
ctcggaaagtcactccctgggcagt

SEQ ID NO: 660303 - DNA, 25 bp, Homo sapien
gggtctaggttccaagatacttcac

SEQ ID NO: 660304 - DNA, 25 bp, Homo sapien
tttctatttaagcaccagcccaggg

SEQ ID NO: 660305 - DNA, 25 bp, Homo sapien
gcccagaaggcgacacaggaattgc

SEQ ID NO: 660306 - DNA, 25 bp, Homo sapien
caggaattgcgaagctcaggaacca

SEQ ID NO: 660307 - DNA, 25 bp, Homo sapien
caatctgactttgggaaggccaccc

SEQ ID NO: 660308 - DNA, 25 bp, Homo sapien
gccggcctacctggctgccggccta

SEQ ID NO: 660309 - DNA, 25 bp, Homo sapien
gcttccagacgcaagagctcttcgc

SEQ ID NO: 660310 - DNA, 25 bp, Homo sapien
ccggtagcttccagacgcaagagct

SEQ ID NO: 660311 - DNA, 25 bp, Homo sapien
gcaagagctcttcgcggccgagttc

SEQ ID NO: 660312 - DNA, 25 bp, Homo sapien
tctcccgaacaagccggcctcagtt

SEQ ID NO: 660313 - DNA, 25 bp, Homo sapien
ccctgaagagacaggggaacttgca

SEQ ID NO: 660314 - DNA, 25 bp, Homo sapien
ctggctgactgctcgcgccgtctct

SEQ ID NO: 660315 - DNA, 25 bp, Homo sapien
tgcaagctcagtcacttccggtgcc

SEQ ID NO: 660316 - DNA, 25 bp, Homo sapien
aaatgtgtatccatgcgagcagcac

SEQ ID NO: 660317 - DNA, 25 bp, Homo sapien
gcagcacatcaaatagcaccagagg

SEQ ID NO: 660318 - DNA, 25 bp, Homo sapien
caaatgatctttgactggaatctaa

SEQ ID NO: 660319 - DNA, 25 bp, Homo sapien
tgtcctggaaataaattgggatggc

SEQ ID NO: 660320 - DNA, 25 bp, Homo sapien
ccatcacataaagagtgtacactgt

SEQ ID NO: 660321 - DNA, 25 bp, Homo sapien
aagcattacttttggcctggcatgg

SEQ ID NO: 660322 - DNA, 25 bp, Homo sapien
gctaatagtagagatagtgccacta

SEQ ID NO: 660323 - DNA, 25 bp, Homo sapien
agtgccactaaaggctacgttatag

SEQ ID NO: 660324 - DNA, 25 bp, Homo sapien
gaattggtcaacattctgaatcctg

SEQ ID NO: 660325 - DNA, 25 bp, Homo sapien
gacaacatataaagtttcctggata

SEQ ID NO: 660326 - DNA, 25 bp, Homo sapien
tgtggatccaggtaggaattggtca

SEQ ID NO: 660327 - DNA, 25 bp, Homo sapien
gcctcgtagcctgctgggatgctca

SEQ ID NO: 660328 - DNA, 25 bp, Homo sapien
tgaaacgcttcaacaatgcctttgg

SEQ ID NO: 660329 - DNA, 25 bp, Homo sapien
tcggtggttcttatgtttgagctcc

SEQ ID NO: 660330 - DNA, 25 bp, Homo sapien
gcttggcagctctactaatatgaca

SEQ ID NO: 660331 - DNA, 25 bp, Homo sapien
tggccaaaaggcacgtaagctgcca

SEQ ID NO: 660332 - DNA, 25 bp, Homo sapien
ggctgatatgatgtcaacattacta

SEQ ID NO: 660333 - DNA, 25 bp, Homo sapien
gaaagtgaatagaagcccttcccaa

SEQ ID NO: 660334 - DNA, 25 bp, Homo sapien
ttttggctgatatgatgtcaacatt

SEQ ID NO: 660335 - DNA, 25 bp, Homo sapien
ttcccaaaagcatagttaatgacat

SEQ ID NO: 660336 - DNA, 25 bp, Homo sapien
tacttgatcctatagggaggtgtcc

SEQ ID NO: 660337 - DNA, 25 bp, Homo sapien
gctgtgggcaattttcagatgacct

SEQ ID NO: 660338 - DNA, 25 bp, Homo sapien
cattagatcgctatttttggctttg

SEQ ID NO: 660339 - DNA, 25 bp, Homo sapien
cagatgaccttgttcgtctgacgtc

SEQ ID NO: 660340 - DNA, 25 bp, Homo sapien
cctttgaaggggtgcccatgaccca

SEQ ID NO: 660341 - DNA, 25 bp, Homo sapien
agcccccaagcgaggcatcagagct

SEQ ID NO: 660342 - DNA, 25 bp, Homo sapien
aagaagcccccaagcgaggcatcag

SEQ ID NO: 660343 - DNA, 25 bp, Homo sapien
tgtgttctcaccttctagttctgag

SEQ ID NO: 660344 - DNA, 25 bp, Homo sapien
agctatagagggctcatgcgctgag

SEQ ID NO: 660345 - DNA, 25 bp, Homo sapien
caatctgtagaagggctcaaatgcc

SEQ ID NO: 660346 - DNA, 25 bp, Homo sapien
tgatgattagacaagcagcccgtgg

SEQ ID NO: 660347 - DNA, 25 bp, Homo sapien
agcagtgaccaaggaagctgggcat

SEQ ID NO: 660348 - DNA, 25 bp, Homo sapien
taccagaagtgtgggaacaagagat

SEQ ID NO: 660349 - DNA, 25 bp, Homo sapien
tgggaacaagagattaggcacctct

SEQ ID NO: 660350 - DNA, 25 bp, Homo sapien
agagattaggcacctctggacctgt

SEQ ID NO: 660351 - DNA, 25 bp, Homo sapien
acctctggacctgtgaagatgtggg

SEQ ID NO: 660352 - DNA, 25 bp, Homo sapien
gattcctggattgcatactctccca

SEQ ID NO: 660353 - DNA, 25 bp, Homo sapien
tgccctccaagggagagggtctcct

SEQ ID NO: 660354 - DNA, 25 bp, Homo sapien
gtcacacagttaggacgtggcgcct

SEQ ID NO: 660355 - DNA, 25 bp, Homo sapien
gcaggagtgcctaactctgggccat

SEQ ID NO: 660356 - DNA, 25 bp, Homo sapien
tgatccagataggaggactgaggct

SEQ ID NO: 660357 - DNA, 25 bp, Homo sapien
tcacttctgaatggtacctaggaca

SEQ ID NO: 660358 - DNA, 25 bp, Homo sapien
cttcctcgcgaagggatagtcagag

SEQ ID NO: 660359 - DNA, 25 bp, Homo sapien
taaagggtgcctttctagccctggc

SEQ ID NO: 660360 - DNA, 25 bp, Homo sapien
agggctgggtccttcgagagttctt

SEQ ID NO: 660361 - DNA, 25 bp, Homo sapien
tgagagccacagagtaaatcccaag

SEQ ID NO: 660362 - DNA, 25 bp, Homo sapien
tggctgagcaccgcttcaatcctgg

SEQ ID NO: 660363 - DNA, 25 bp, Homo sapien
catggctttattggccctgagagcc

SEQ ID NO: 660364 - DNA, 25 bp, Homo sapien
ccaagaggtgctcaaggcctgggtc

SEQ ID NO: 660365 - DNA, 25 bp, Homo sapien
caggcttgggcgtggaaatctcttt

SEQ ID NO: 660366 - DNA, 25 bp, Homo sapien
cagggttccttgtggtcagttggca

SEQ ID NO: 660367 - DNA, 25 bp, Homo sapien
cattcctggcgtccggtataggcag

SEQ ID NO: 660368 - DNA, 25 bp, Homo sapien
gcgtaggaagctgccgtgctcaaac

SEQ ID NO: 660369 - DNA, 25 bp, Homo sapien
tagaaggcgaatcggcccatgatgt

SEQ ID NO: 660370 - DNA, 25 bp, Homo sapien
aacatgtcgtggcagtcagggtcca

SEQ ID NO: 660371 - DNA, 25 bp, Homo sapien
tgatgtagcggtagatgccactgag

SEQ ID NO: 660372 - DNA, 25 bp, Homo sapien
gctgggacctgctgggtcaggctca

SEQ ID NO: 660373 - DNA, 25 bp, Homo sapien
tccagggctggcgtccggaatagcc

SEQ ID NO: 660374 - DNA, 25 bp, Homo sapien
agcttccagggctggcgtccggaat

SEQ ID NO: 660375 - DNA, 25 bp, Homo sapien
agggctggcgtccggaatagcctgc

SEQ ID NO: 660376 - DNA, 25 bp, Homo sapien
ttagcatccaaagcccagggttcgg

SEQ ID NO: 660377 - DNA, 25 bp, Homo sapien
ggctctgaggaaagcgctattgaca

SEQ ID NO: 660378 - DNA, 25 bp, Homo sapien
tctcagattgcctacaacgtacagc

SEQ ID NO: 660379 - DNA, 25 bp, Homo sapien
catggcagggtaaccaactttctgg

SEQ ID NO: 660380 - DNA, 25 bp, Homo sapien
gttcagtttcctgccgaagccccat

SEQ ID NO: 660381 - DNA, 25 bp, Homo sapien
caagttcagtttcctgccgaagccc

SEQ ID NO: 660382 - DNA, 25 bp, Homo sapien
gtttcctgccgaagccccatgccca

SEQ ID NO: 660383 - DNA, 25 bp, Homo sapien
cagtttcctgccgaagccccatgcc

SEQ ID NO: 660384 - DNA, 25 bp, Homo sapien
gggcggtgtggcctactctcgagtt

SEQ ID NO: 660385 - DNA, 25 bp, Homo sapien
gcggtgtggcctactctcgagttcc

SEQ ID NO: 660386 - DNA, 25 bp, Homo sapien
ggggggcggtgtggcctactctcga

SEQ ID NO: 660387 - DNA, 25 bp, Homo sapien
gggggcggtgtggcctactctcgag

SEQ ID NO: 660388 - DNA, 25 bp, Homo sapien
gccccgtgacagaggagtggaaggc

SEQ ID NO: 660389 - DNA, 25 bp, Homo sapien
ctgccgtccggcagacctgggtgat

SEQ ID NO: 660390 - DNA, 25 bp, Homo sapien
gatgtgccgggggaggccccaagtc

SEQ ID NO: 660391 - DNA, 25 bp, Homo sapien
gggaggccccaagtctatgggctta

SEQ ID NO: 660392 - DNA, 25 bp, Homo sapien
ccccaagtctatgggcttagtgtgg

SEQ ID NO: 660393 - DNA, 25 bp, Homo sapien
aagcggctcgcttaggatggaggca

SEQ ID NO: 660394 - DNA, 25 bp, Homo sapien
cattgaaggtgagtgatgccatcgg

SEQ ID NO: 660395 - DNA, 25 bp, Homo sapien
acttagagtgcaggacgagctccca

SEQ ID NO: 660396 - DNA, 25 bp, Homo sapien
tctgggcgctcggttgaggcactta

SEQ ID NO: 660397 - DNA, 25 bp, Homo sapien
cagatctggtactttgggtccggtg

SEQ ID NO: 660398 - DNA, 25 bp, Homo sapien
tggtactttgggtccggtgaccatc

SEQ ID NO: 660399 - DNA, 25 bp, Homo sapien
agacagatctggtactttgggtccg

SEQ ID NO: 660400 - DNA, 25 bp, Homo sapien
gatctggtactttgggtccggtgac

SEQ ID NO: 660401 - DNA, 25 bp, Homo sapien
tgcaacacgtgggcgctgggcaatg

SEQ ID NO: 660402 - DNA, 25 bp, Homo sapien
cttcgcgcaccagcgctgcggagag

SEQ ID NO: 660403 - DNA, 25 bp, Homo sapien
gctgtgcgcccggtggcttcgcgca

SEQ ID NO: 660404 - DNA, 25 bp, Homo sapien
tgcaacgtgaggtggcggccccagc

SEQ ID NO: 660405 - DNA, 25 bp, Homo sapien
gactcagacgacagcgctgggctgt

SEQ ID NO: 660406 - DNA, 25 bp, Homo sapien
tcttaccctccccttcaaactctgc

SEQ ID NO: 660407 - DNA, 25 bp, Homo sapien
tacctcggaaattttgggtgctctc

SEQ ID NO: 660408 - DNA, 25 bp, Homo sapien
tctccctatcagtgatgataagaat

SEQ ID NO: 660409 - DNA, 25 bp, Homo sapien
aaactctgccggacccagaggtcgt

SEQ ID NO: 660410 - DNA, 25 bp, Homo sapien
ttgctgaagtcatcggagggcattg

SEQ ID NO: 660411 - DNA, 25 bp, Homo sapien
ccagaggtttttgaggtcctatgtc

SEQ ID NO: 660412 - DNA, 25 bp, Homo sapien
caggttgctgaagtcatcggagggc

SEQ ID NO: 660413 - DNA, 25 bp, Homo sapien
tgggcaccagaggtttttgaggtcc

SEQ ID NO: 660414 - DNA, 25 bp, Homo sapien
atgggtggtagtaaggaaccctgct

SEQ ID NO: 660415 - DNA, 25 bp, Homo sapien
gccagcctgtggggccactccttgt

SEQ ID NO: 660416 - DNA, 25 bp, Homo sapien
agcctgtggggccactccttgtcct

SEQ ID NO: 660417 - DNA, 25 bp, Homo sapien
gatgggtggtagtaaggaaccctgc

SEQ ID NO: 660418 - DNA, 25 bp, Homo sapien
tgttggtgccctccaaatgcttgcc

SEQ ID NO: 660419 - DNA, 25 bp, Homo sapien
ttgcagcccagaaggtggcgctctt

SEQ ID NO: 660420 - DNA, 25 bp, Homo sapien
tggcgctcttgttgaaggcagagtg

SEQ ID NO: 660421 - DNA, 25 bp, Homo sapien
tggaatcgtttcttccaggtggagg

SEQ ID NO: 660422 - DNA, 25 bp, Homo sapien
tgctggggcaacttgtgtccagagc

SEQ ID NO: 660423 - DNA, 25 bp, Homo sapien
agtgctggggcaacttgtgtccaga

SEQ ID NO: 660424 - DNA, 25 bp, Homo sapien
tgcccagtgctgagcgtctccagtc

SEQ ID NO: 660425 - DNA, 25 bp, Homo sapien
tcagtgctggggcaacttgtgtcca

SEQ ID NO: 660426 - DNA, 25 bp, Homo sapien
tgaagagtgctgagtcctgttgcac

SEQ ID NO: 660427 - DNA, 25 bp, Homo sapien
cctgaagagtgctgagtcctgttgc

SEQ ID NO: 660428 - DNA, 25 bp, Homo sapien
ctgaagagtgctgagtcctgttgca

SEQ ID NO: 660429 - DNA, 25 bp, Homo sapien
tccaggggatgcgaaagagggtctt

SEQ ID NO: 660430 - DNA, 25 bp, Homo sapien
gggtcttgcccgcatcctcccagca

SEQ ID NO: 660431 - DNA, 25 bp, Homo sapien
agcataaccccacgtagcacccact

SEQ ID NO: 660432 - DNA, 25 bp, Homo sapien
gcttggctacatgcttccaggggat

SEQ ID NO: 660433 - DNA, 25 bp, Homo sapien
tccttctggccatcagggatgcagg

SEQ ID NO: 660434 - DNA, 25 bp, Homo sapien
tagcagcctagcctggagggcattg

SEQ ID NO: 660435 - DNA, 25 bp, Homo sapien
tgtgagacacaagacccacgcaagt

SEQ ID NO: 660436 - DNA, 25 bp, Homo sapien
ggactacgggccacctggatgatgc

SEQ ID NO: 660437 - DNA, 25 bp, Homo sapien
taaattgtcaaaggagatgtgggat

SEQ ID NO: 660438 - DNA, 25 bp, Homo sapien
ctccactccttgctgtattcatgga

SEQ ID NO: 660439 - DNA, 25 bp, Homo sapien
aaagatcaagttgctcagattgctc

SEQ ID NO: 660440 - DNA, 25 bp, Homo sapien
gtctctgaccccctaaaagtgaatg

SEQ ID NO: 660441 - DNA, 25 bp, Homo sapien
tctagctcccatattccagtagcca

SEQ ID NO: 660442 - DNA, 25 bp, Homo sapien
cacctggctcttgaagcatcttgaa

SEQ ID NO: 660443 - DNA, 25 bp, Homo sapien
attgatctggaatatcagatcagtc

SEQ ID NO: 660444 - DNA, 25 bp, Homo sapien
gaagcattgttcctgatgtgtacct

SEQ ID NO: 660445 - DNA, 25 bp, Homo sapien
cccgaagggagccagtcggaagtgg

SEQ ID NO: 660446 - DNA, 25 bp, Homo sapien
ccggacacagagacgcacaggttgg

SEQ ID NO: 660447 - DNA, 25 bp, Homo sapien
aggccggcccggacacagagacgca

SEQ ID NO: 660448 - DNA, 25 bp, Homo sapien
acgctgactgcagacgcggacgagc

SEQ ID NO: 660449 - DNA, 25 bp, Homo sapien
ccgcccttgcgggacagacaccggg

SEQ ID NO: 660450 - DNA, 25 bp, Homo sapien
cggcagcggccggtgggcttcccgg

SEQ ID NO: 660451 - DNA, 25 bp, Homo sapien
aagtctgcttgacgcgcgccagcag

SEQ ID NO: 660452 - DNA, 25 bp, Homo sapien
ggcaagagaaagtctgcttgacgcg

SEQ ID NO: 660453 - DNA, 25 bp, Homo sapien
tcctcgtcgcggaaggggctctcgc

SEQ ID NO: 660454 - DNA, 25 bp, Homo sapien
agcagcgcgcgcaactcctcctcgt

SEQ ID NO: 660455 - DNA, 25 bp, Homo sapien
cgaggtcgcggagccctgccggcag

SEQ ID NO: 660456 - DNA, 25 bp, Homo sapien
tgccggcagcgcttgcacagcggca

SEQ ID NO: 660457 - DNA, 25 bp, Homo sapien
ttggcgatgggcctggtggccttga

SEQ ID NO: 660458 - DNA, 25 bp, Homo sapien
ccaaactcttcaagctgctgcctaa

SEQ ID NO: 660459 - DNA, 25 bp, Homo sapien
agccaaactcttcaagctgctgcct

SEQ ID NO: 660460 - DNA, 25 bp, Homo sapien
tgatggcttcaagcacgtcccgcca

SEQ ID NO: 660461 - DNA, 25 bp, Homo sapien
cacatacgctgtcacaatcgtggtg

SEQ ID NO: 660462 - DNA, 25 bp, Homo sapien
gggccttcagtgagaagttaaggaa

SEQ ID NO: 660463 - DNA, 25 bp, Homo sapien
gacatcaactgagcgaggggcacct

SEQ ID NO: 660464 - DNA, 25 bp, Homo sapien
gagccagcttgagcctggataggat

SEQ ID NO: 660465 - DNA, 25 bp, Homo sapien
atgaggcttgggaaaccggcctcct

SEQ ID NO: 660466 - DNA, 25 bp, Homo sapien
tgccctgcaccatcacctccaaggc

SEQ ID NO: 660467 - DNA, 25 bp, Homo sapien
ctgccctgcaccatcacctccaagg

SEQ ID NO: 660468 - DNA, 25 bp, Homo sapien
gaaacagctacttggctatggccac

SEQ ID NO: 660469 - DNA, 25 bp, Homo sapien
ggccctcaggcactgtgacaggctg

SEQ ID NO: 660470 - DNA, 25 bp, Homo sapien
tggagaagatccctcacaggtccaa

SEQ ID NO: 660471 - DNA, 25 bp, Homo sapien
cacagctcataaggaatagagtccc

SEQ ID NO: 660472 - DNA, 25 bp, Homo sapien
ggatgaagttgatacattctttgaa

SEQ ID NO: 660473 - DNA, 25 bp, Homo sapien
gatgaagttgatacattctttgaag

SEQ ID NO: 660474 - DNA, 25 bp, Homo sapien
gcacaaggcagttccccccattaag

SEQ ID NO: 660475 - DNA, 25 bp, Homo sapien
tccccccattaaggcggcagcagtg

SEQ ID NO: 660476 - DNA, 25 bp, Homo sapien
tacaggatagcaagggacatagagc

SEQ ID NO: 660477 - DNA, 25 bp, Homo sapien
gagaaagcaatagggtagggagcac

SEQ ID NO: 660478 - DNA, 25 bp, Homo sapien
catgcagtgaatatgggccagtact

SEQ ID NO: 660479 - DNA, 25 bp, Homo sapien
agacctctcaggagttgttccgccc

SEQ ID NO: 660480 - DNA, 25 bp, Homo sapien
ttgggtttattgtggcctttcagag

SEQ ID NO: 660481 - DNA, 25 bp, Homo sapien
tcatgttgggtttattgtggccttt

SEQ ID NO: 660482 - DNA, 25 bp, Homo sapien
tttcatgttgggtttattgtggcct

SEQ ID NO: 660483 - DNA, 25 bp, Homo sapien
ttcatgttgggtttattgtggcctt

SEQ ID NO: 660484 - DNA, 25 bp, Homo sapien
gggagcaagattcccaaggggcagc

SEQ ID NO: 660485 - DNA, 25 bp, Homo sapien
ctgggcacaatgatgggcagcagca

SEQ ID NO: 660486 - DNA, 25 bp, Homo sapien
agcaggctgggagcaagattcccaa

SEQ ID NO: 660487 - DNA, 25 bp, Homo sapien
ggctgggagcaagattcccaagggg

SEQ ID NO: 660488 - DNA, 25 bp, Homo sapien
ccgggatgcgaaggtaggtgatatc

SEQ ID NO: 660489 - DNA, 25 bp, Homo sapien
atgggtacctcaggggtatcagcga

SEQ ID NO: 660490 - DNA, 25 bp, Homo sapien
cctcaggggtatcagcgaccgggat

SEQ ID NO: 660491 - DNA, 25 bp, Homo sapien
cagcgaccgggatgcgaaggtaggt

SEQ ID NO: 660492 - DNA, 25 bp, Homo sapien
tgtgtgatcttatttcggcccagct

SEQ ID NO: 660493 - DNA, 25 bp, Homo sapien
ttcggcccagctgatccaggtcttt

SEQ ID NO: 660494 - DNA, 25 bp, Homo sapien
cttatttcggcccagctgatccagg

SEQ ID NO: 660495 - DNA, 25 bp, Homo sapien
tgtgatcttatttcggcccagctga

SEQ ID NO: 660496 - DNA, 25 bp, Homo sapien
ggatgcttgagccaatctggctggc

SEQ ID NO: 660497 - DNA, 25 bp, Homo sapien
caggatgcttgagccaatctggctg

SEQ ID NO: 660498 - DNA, 25 bp, Homo sapien
gatgcttgagccaatctggctggcg

SEQ ID NO: 660499 - DNA, 25 bp, Homo sapien
aggatgcttgagccaatctggctgg

SEQ ID NO: 660500 - DNA, 25 bp, Homo sapien
caatgaagtttccgaggtagagtcc

SEQ ID NO: 660501 - DNA, 25 bp, Homo sapien
tgaagtttccgaggtagagtccagg

SEQ ID NO: 660502 - DNA, 25 bp, Homo sapien
aatgaagtttccgaggtagagtcca

SEQ ID NO: 660503 - DNA, 25 bp, Homo sapien
gaagtttccgaggtagagtccagga

SEQ ID NO: 660504 - DNA, 25 bp, Homo sapien
ctctgtcccatgaagggtatggacc

SEQ ID NO: 660505 - DNA, 25 bp, Homo sapien
tcccttttgtgggccctgagtcctc

SEQ ID NO: 660506 - DNA, 25 bp, Homo sapien
aaggacaggcaagggtcagtggggc

SEQ ID NO: 660507 - DNA, 25 bp, Homo sapien
ccttttgtgggccctgagtcctctg

SEQ ID NO: 660508 - DNA, 25 bp, Homo sapien
cagaaaggcaatgacaggcagaggc

SEQ ID NO: 660509 - DNA, 25 bp, Homo sapien
agccgaggagtcagcgacaagggag

SEQ ID NO: 660510 - DNA, 25 bp, Homo sapien
caagggaggccagcttgggtatgag

SEQ ID NO: 660511 - DNA, 25 bp, Homo sapien
ggtagacttgcagggtgcagggatg

SEQ ID NO: 660512 - DNA, 25 bp, Homo sapien
agaccggcgagaacagaaggtcaga

SEQ ID NO: 660513 - DNA, 25 bp, Homo sapien
tctcgagtcacagggacacggagat

SEQ ID NO: 660514 - DNA, 25 bp, Homo sapien
agccacagcaagacagcgagagaca

SEQ ID NO: 660515 - DNA, 25 bp, Homo sapien
ggagacccgacagccgcggtctcga

SEQ ID NO: 660516 - DNA, 25 bp, Homo sapien
ccgggaagcgatccggtcacagctg

SEQ ID NO: 660517 - DNA, 25 bp, Homo sapien
gcccgggaagcgatccggtcacagc

SEQ ID NO: 660518 - DNA, 25 bp, Homo sapien
aagcgatccggtcacagctgccctg

SEQ ID NO: 660519 - DNA, 25 bp, Homo sapien
ggaagcgatccggtcacagctgccc

SEQ ID NO: 660520 - DNA, 25 bp, Homo sapien
ggaaatggtggtggagccgccgctg

SEQ ID NO: 660521 - DNA, 25 bp, Homo sapien
gggaaatggtggtggagccgccgct

SEQ ID NO: 660522 - DNA, 25 bp, Homo sapien
gacaaagccccagtgtgccgggccc

SEQ ID NO: 660523 - DNA, 25 bp, Homo sapien
gcagtttgttggggccgcgtggggc

SEQ ID NO: 660524 - DNA, 25 bp, Homo sapien
cccgcgggacaacggcagtttgttg

SEQ ID NO: 660525 - DNA, 25 bp, Homo sapien
cacggcccgcgggacaacggcagtt

SEQ ID NO: 660526 - DNA, 25 bp, Homo sapien
ggatattgtgtaggcaactagcagc

SEQ ID NO: 660527 - DNA, 25 bp, Homo sapien
tattgagcagaggtgctagtaccag

SEQ ID NO: 660528 - DNA, 25 bp, Homo sapien
caaatagtacaacaaagcaggtgtc

SEQ ID NO: 660529 - DNA, 25 bp, Homo sapien
gaggcaggtactctagtcctagcag

SEQ ID NO: 660530 - DNA, 25 bp, Homo sapien
taagacagcattgcattaggcgcgg

SEQ ID NO: 660531 - DNA, 25 bp, Homo sapien
tgagggcatctgactcacacgtgtg

SEQ ID NO: 660532 - DNA, 25 bp, Homo sapien
tctcactagggcagacagccgaaga

SEQ ID NO: 660533 - DNA, 25 bp, Homo sapien
gactcttacaggacacagtgggact

SEQ ID NO: 660534 - DNA, 25 bp, Homo sapien
gggctagtttctagttaatgaggct

SEQ ID NO: 660535 - DNA, 25 bp, Homo sapien
taatgaggctttgctgttttcacag

SEQ ID NO: 660536 - DNA, 25 bp, Homo sapien
aaatcaagccctctcccggggctag

SEQ ID NO: 660537 - DNA, 25 bp, Homo sapien
ctcagtaaatgttagtggtcctcct

SEQ ID NO: 660538 - DNA, 25 bp, Homo sapien
gaaatcagccttagcaggtgccacc

SEQ ID NO: 660539 - DNA, 25 bp, Homo sapien
tgtagcaccatgaacgtcctgggag

SEQ ID NO: 660540 - DNA, 25 bp, Homo sapien
tacacatcattcctgcgagggccaa

SEQ ID NO: 660541 - DNA, 25 bp, Homo sapien
gaattgggccccttggatacctcca

SEQ ID NO: 660542 - DNA, 25 bp, Homo sapien
taagaactggccatgacagcctgtg

SEQ ID NO: 660543 - DNA, 25 bp, Homo sapien
caaaagggtatagggtgacatctcc

SEQ ID NO: 660544 - DNA, 25 bp, Homo sapien
tatgtaactatgagccagagccaag

SEQ ID NO: 660545 - DNA, 25 bp, Homo sapien
tattctaaatggagtggcgtgccct

SEQ ID NO: 660546 - DNA, 25 bp, Homo sapien
cacgtgtcatatggtaagaggcgca

SEQ ID NO: 660547 - DNA, 25 bp, Homo sapien
tgacttcacggcagttcatactggg

SEQ ID NO: 660548 - DNA, 25 bp, Homo sapien
ggtggctaccaaggcccgtcaatag

SEQ ID NO: 660549 - DNA, 25 bp, Homo sapien
tgcaaggccctcctgagtaaagagt

SEQ ID NO: 660550 - DNA, 25 bp, Homo sapien
gatgaccttgagagctttaagctca

SEQ ID NO: 660551 - DNA, 25 bp, Homo sapien
tttaagctcatcctggttgaggggg

SEQ ID NO: 660552 - DNA, 25 bp, Homo sapien
tcatcctttcaagatgaccttgaga

SEQ ID NO: 660553 - DNA, 25 bp, Homo sapien
tcaagatgaccttgagagctttaag

SEQ ID NO: 660554 - DNA, 25 bp, Homo sapien
gaaaggggctgacgctgcactaatg

SEQ ID NO: 660555 - DNA, 25 bp, Homo sapien
gagaagatgatccatcagcacgtcg

SEQ ID NO: 660556 - DNA, 25 bp, Homo sapien
atgatccatcagcacgtcgggcctc

SEQ ID NO: 660557 - DNA, 25 bp, Homo sapien
tgcactaatgctgccaaactcagcc

SEQ ID NO: 660558 - DNA, 25 bp, Homo sapien
tctccagtccctgctaagccaatac

SEQ ID NO: 660559 - DNA, 25 bp, Homo sapien
gctgatgattccctccccttcttat

SEQ ID NO: 660560 - DNA, 25 bp, Homo sapien
atgctgatgattccctccccttctt

SEQ ID NO: 660561 - DNA, 25 bp, Homo sapien
cccttcaaagtccatgctgatgatt

SEQ ID NO: 660562 - DNA, 25 bp, Homo sapien
gcggttgaccttcactttaagttgc

SEQ ID NO: 660563 - DNA, 25 bp, Homo sapien
tatttctttatccagatgatcttga

SEQ ID NO: 660564 - DNA, 25 bp, Homo sapien
ctcaaaaaggcggttgaccttcact

SEQ ID NO: 660565 - DNA, 25 bp, Homo sapien
tcactttaagttgcttccgcagttt

SEQ ID NO: 660566 - DNA, 25 bp, Homo sapien
gaacccctctaggtacagtgacaag

SEQ ID NO: 660567 - DNA, 25 bp, Homo sapien
ggagaaaccctgaatggccaagcct

SEQ ID NO: 660568 - DNA, 25 bp, Homo sapien
tgtttagcctatgttgatccccaag

SEQ ID NO: 660569 - DNA, 25 bp, Homo sapien
tgagtaaccccaatgtccatgagct

SEQ ID NO: 660570 - DNA, 25 bp, Homo sapien
tcttgataaacatgttcccgaagca

SEQ ID NO: 660571 - DNA, 25 bp, Homo sapien
acatgttcccgaagcaaaccatcac

SEQ ID NO: 660572 - DNA, 25 bp, Homo sapien
gataaacatgttcccgaagcaaacc

SEQ ID NO: 660573 - DNA, 25 bp, Homo sapien
gcatcttgataaacatgttcccgaa

SEQ ID NO: 660574 - DNA, 25 bp, Homo sapien
tccccatttgcttccactgccacag

SEQ ID NO: 660575 - DNA, 25 bp, Homo sapien
tacgcattttacgttgttttcctca

SEQ ID NO: 660576 - DNA, 25 bp, Homo sapien
cttggcctcatctaaagtgtcccat

SEQ ID NO: 660577 - DNA, 25 bp, Homo sapien
accccaagtccaattccatctctgg

SEQ ID NO: 660578 - DNA, 25 bp, Homo sapien
tctgattccttttagtgtccaggtc

SEQ ID NO: 660579 - DNA, 25 bp, Homo sapien
gccctcaggccctctcgattctgat

SEQ ID NO: 660580 - DNA, 25 bp, Homo sapien
gattccttttagtgtccaggtccac

SEQ ID NO: 660581 - DNA, 25 bp, Homo sapien
caggccctctcgattctgattcctt

SEQ ID NO: 660582 - DNA, 25 bp, Homo sapien
ccagcgccgcggaggggcctctcac

SEQ ID NO: 660583 - DNA, 25 bp, Homo sapien
tgcgaccccgcgcgctttcccacgg

SEQ ID NO: 660584 - DNA, 25 bp, Homo sapien
gcgcgctttcccacggcgccggccg

SEQ ID NO: 660585 - DNA, 25 bp, Homo sapien
gaccccgcgcgctttcccacggcgc

SEQ ID NO: 660586 - DNA, 25 bp, Homo sapien
cgcagcactcgctctgcctcgggtg

SEQ ID NO: 660587 - DNA, 25 bp, Homo sapien
cacttctacaaggtaccgcagcact

SEQ ID NO: 660588 - DNA, 25 bp, Homo sapien
tcctcggcgagctcctccacttcta

SEQ ID NO: 660589 - DNA, 25 bp, Homo sapien
acaaggtaccgcagcactcgctctg

SEQ ID NO: 660590 - DNA, 25 bp, Homo sapien
gcttgcggctctcgcgcgaccccgg

SEQ ID NO: 660591 - DNA, 25 bp, Homo sapien
ccgcttgcggctctcgcgcgacccc

SEQ ID NO: 660592 - DNA, 25 bp, Homo sapien
tgcggctctcgcgcgaccccgggat

SEQ ID NO: 660593 - DNA, 25 bp, Homo sapien
cgcccaccaactccgcttgcggctc

SEQ ID NO: 660594 - DNA, 25 bp, Homo sapien
gcgccgctctctaggtgcttccggc

SEQ ID NO: 660595 - DNA, 25 bp, Homo sapien
gccgctctctaggtgcttccggcgc

SEQ ID NO: 660596 - DNA, 25 bp, Homo sapien
ccgctctctaggtgcttccggcgcg

SEQ ID NO: 660597 - DNA, 25 bp, Homo sapien
cgctctctaggtgcttccggcgcgc

SEQ ID NO: 660598 - DNA, 25 bp, Homo sapien
cgcagttaaaagaacggtggtgcgc

SEQ ID NO: 660599 - DNA, 25 bp, Homo sapien
cagttaaaagaacggtggtgcgcag

SEQ ID NO: 660600 - DNA, 25 bp, Homo sapien
ttaaaagaacggtggtgcgcaggct

SEQ ID NO: 660601 - DNA, 25 bp, Homo sapien
ctgcgcagttaaaagaacggtggtg

SEQ ID NO: 660602 - DNA, 25 bp, Homo sapien
ggagggagattcattaaggattcct

SEQ ID NO: 660603 - DNA, 25 bp, Homo sapien
ttcattaaggattcctcactgaggg

SEQ ID NO: 660604 - DNA, 25 bp, Homo sapien
tgaatttgtcgccaaacccaggatg

SEQ ID NO: 660605 - DNA, 25 bp, Homo sapien
aaagggggatgtttgccaaagcaga

SEQ ID NO: 660606 - DNA, 25 bp, Homo sapien
gagcttccgctggttcgtctacgac

SEQ ID NO: 660607 - DNA, 25 bp, Homo sapien
gtggcgaagggctacctgacgtccc

SEQ ID NO: 660608 - DNA, 25 bp, Homo sapien
tgttcttctccgacggtgccacgga

SEQ ID NO: 660609 - DNA, 25 bp, Homo sapien
tgccctcgctggtcgtgcagttact

SEQ ID NO: 660610 - DNA, 25 bp, Homo sapien
agatcatctacaacatggtcgtggg

SEQ ID NO: 660611 - DNA, 25 bp, Homo sapien
tggcatcttcatcgtggcccactgg

SEQ ID NO: 660612 - DNA, 25 bp, Homo sapien
cactggtgcgtcatgaccttctggg

SEQ ID NO: 660613 - DNA, 25 bp, Homo sapien
tgctggttcaacgtcaaggagggcc

SEQ ID NO: 660614 - DNA, 25 bp, Homo sapien
ttcagggcgggtccgtacagtacag

SEQ ID NO: 660615 - DNA, 25 bp, Homo sapien
gaccctgctgtctcggtgtgtccaa

SEQ ID NO: 660616 - DNA, 25 bp, Homo sapien
tggcctttccctgtacacaagtgac

SEQ ID NO: 660617 - DNA, 25 bp, Homo sapien
gacggttcttgtatctcacgcgaga

SEQ ID NO: 660618 - DNA, 25 bp, Homo sapien
gggaattagggaacactctcctgag

SEQ ID NO: 660619 - DNA, 25 bp, Homo sapien
tgggaatggcacaagcaaaagcctg

SEQ ID NO: 660620 - DNA, 25 bp, Homo sapien
tgaagcatgttacagcggcacgtcc

SEQ ID NO: 660621 - DNA, 25 bp, Homo sapien
caggattacatggtcacggtgagct

SEQ ID NO: 660622 - DNA, 25 bp, Homo sapien
gacatcggctacttcgagggcttcc

SEQ ID NO: 660623 - DNA, 25 bp, Homo sapien
gacgccgcagaagacaactacctgt

SEQ ID NO: 660624 - DNA, 25 bp, Homo sapien
ttcatcccggaccaggacatcggct

SEQ ID NO: 660625 - DNA, 25 bp, Homo sapien
tgacatcacgcacgacatcgaggcg

SEQ ID NO: 660626 - DNA, 25 bp, Homo sapien
ggctgcccgcgagacgaggagcggg

SEQ ID NO: 660627 - DNA, 25 bp, Homo sapien
aaagtcagtttcccggcactggcac

SEQ ID NO: 660628 - DNA, 25 bp, Homo sapien
cgctcaagctgcgaggatccgggct

SEQ ID NO: 660629 - DNA, 25 bp, Homo sapien
gggtcgacagcgagtggagggtgcc

SEQ ID NO: 660630 - DNA, 25 bp, Homo sapien
ctgttgcggactgctggattcccgg

SEQ ID NO: 660631 - DNA, 25 bp, Homo sapien
gtgcagtgactttatccaccacttc

SEQ ID NO: 660632 - DNA, 25 bp, Homo sapien
gggcggcactgttgcggactgctgg

SEQ ID NO: 660633 - DNA, 25 bp, Homo sapien
gcagtgactttatccaccacttctc

SEQ ID NO: 660634 - DNA, 25 bp, Homo sapien
tgtcacactcccctttgtgtgagag

SEQ ID NO: 660635 - DNA, 25 bp, Homo sapien
tgtgagaggagtactgtagcccaga

SEQ ID NO: 660636 - DNA, 25 bp, Homo sapien
tcccctttgtgtgagaggagtactg

SEQ ID NO: 660637 - DNA, 25 bp, Homo sapien
ttgtgtgagaggagtactgtagccc

SEQ ID NO: 660638 - DNA, 25 bp, Homo sapien
tgtcagtagctcctaaacatttcca

SEQ ID NO: 660639 - DNA, 25 bp, Homo sapien
gcttaacctttctagcagagcaatc

SEQ ID NO: 660640 - DNA, 25 bp, Homo sapien
tgttgtacaaacactacctgtcagt

SEQ ID NO: 660641 - DNA, 25 bp, Homo sapien
gaagcatgaaccttttgagggaaca

SEQ ID NO: 660642 - DNA, 25 bp, Homo sapien
ccaaaacctggtatcagggaggtct

SEQ ID NO: 660643 - DNA, 25 bp, Homo sapien
caaaacctggtatcagggaggtctt

SEQ ID NO: 660644 - DNA, 25 bp, Homo sapien
tctaccaaaacctggtatcagggag

SEQ ID NO: 660645 - DNA, 25 bp, Homo sapien
tctcttctaccaaaacctggtatca

SEQ ID NO: 660646 - DNA, 25 bp, Homo sapien
ctgacaaatcacagttgaagaaatt

SEQ ID NO: 660647 - DNA, 25 bp, Homo sapien
tctgctgacaaatcacagttgaaga

SEQ ID NO: 660648 - DNA, 25 bp, Homo sapien
gattctgctgacaaatcacagttga

SEQ ID NO: 660649 - DNA, 25 bp, Homo sapien
tactatagattctgctgacaaatca

SEQ ID NO: 660650 - DNA, 25 bp, Homo sapien
tttgcatggcccctcctatgtttac

SEQ ID NO: 660651 - DNA, 25 bp, Homo sapien
tagagtaaccctttttgagtcttgc

SEQ ID NO: 660652 - DNA, 25 bp, Homo sapien
gaacttactaacatacacgtaggca

SEQ ID NO: 660653 - DNA, 25 bp, Homo sapien
tatgtttaccactccctagtagctt

SEQ ID NO: 660654 - DNA, 25 bp, Homo sapien
aagctctctacaggtcatattttgt

SEQ ID NO: 660655 - DNA, 25 bp, Homo sapien
tgcgacacacttattattatcatca

SEQ ID NO: 660656 - DNA, 25 bp, Homo sapien
tattcttatgcgacacacttattat

SEQ ID NO: 660657 - DNA, 25 bp, Homo sapien
aagcaggtttccctgaacgcccaat

SEQ ID NO: 660658 - DNA, 25 bp, Homo sapien
aaccctgaagtgatccgagctctgg

SEQ ID NO: 660659 - DNA, 25 bp, Homo sapien
tccaaagactctcctctaagcggga

SEQ ID NO: 660660 - DNA, 25 bp, Homo sapien
gttcagcaactcagcagctgtcagg

SEQ ID NO: 660661 - DNA, 25 bp, Homo sapien
gatgaagggtgcgttctccaaagac

SEQ ID NO: 660662 - DNA, 25 bp, Homo sapien
tccgatttctcgatcccttccccac

SEQ ID NO: 660663 - DNA, 25 bp, Homo sapien
atccgatttctcgatcccttcccca

SEQ ID NO: 660664 - DNA, 25 bp, Homo sapien
ggtctgcaagcccacttcaccatac

SEQ ID NO: 660665 - DNA, 25 bp, Homo sapien
taggtctgcaagcccacttcaccat

SEQ ID NO: 660666 - DNA, 25 bp, Homo sapien
tgcaagcccacttcaccatacccaa

SEQ ID NO: 660667 - DNA, 25 bp, Homo sapien
gctaggtctgcaagcccacttcacc

SEQ ID NO: 660668 - DNA, 25 bp, Homo sapien
ggatgacattgtacgaggtcttggc

SEQ ID NO: 660669 - DNA, 25 bp, Homo sapien
catgattatcattcggaccctccgg

SEQ ID NO: 660670 - DNA, 25 bp, Homo sapien
cggaaggacattgccaactacaaca

SEQ ID NO: 660671 - DNA, 25 bp, Homo sapien
tcaggtatcctgagcatgattatca

SEQ ID NO: 660672 - DNA, 25 bp, Homo sapien
ttcacccaaagtgatagggatggcc

SEQ ID NO: 660673 - DNA, 25 bp, Homo sapien
aattgtaaaactattctgcatgcca

SEQ ID NO: 660674 - DNA, 25 bp, Homo sapien
ggccacaatggcaaacaatatctgc

SEQ ID NO: 660675 - DNA, 25 bp, Homo sapien
gcataaaaaccgtggaagaaatcac

SEQ ID NO: 660676 - DNA, 25 bp, Homo sapien
tacaatctggccctctaagtaaaag

SEQ ID NO: 660677 - DNA, 25 bp, Homo sapien
tgtacccctacctccagtctggtga

SEQ ID NO: 660678 - DNA, 25 bp, Homo sapien
gatcatttagtgtagtgctgtaccc

SEQ ID NO: 660679 - DNA, 25 bp, Homo sapien
gggccagcaggcctgtttctataaa

SEQ ID NO: 660680 - DNA, 25 bp, Homo sapien
gatggataaatccaccgagataagg

SEQ ID NO: 660681 - DNA, 25 bp, Homo sapien
tattcaggtgtatttctggtttgga

SEQ ID NO: 660682 - DNA, 25 bp, Homo sapien
tgttttaacaaatggatccaggatg

SEQ ID NO: 660683 - DNA, 25 bp, Homo sapien
taagggttttggtcactgtctccac

SEQ ID NO: 660684 - DNA, 25 bp, Homo sapien
gaggcccagagattacagatcccct

SEQ ID NO: 660685 - DNA, 25 bp, Homo sapien
cagtgaactgtttttgtgccaagaa

SEQ ID NO: 660686 - DNA, 25 bp, Homo sapien
tccaaggtgtgctagcagtgggccc

SEQ ID NO: 660687 - DNA, 25 bp, Homo sapien
gggccaagtatttcccaagccaagc

SEQ ID NO: 660688 - DNA, 25 bp, Homo sapien
gggaatgggaaacggacacctcata

SEQ ID NO: 660689 - DNA, 25 bp, Homo sapien
gcagtagagagcgatattggagtct

SEQ ID NO: 660690 - DNA, 25 bp, Homo sapien
gaaaagggaacccaagcagtagaga

SEQ ID NO: 660691 - DNA, 25 bp, Homo sapien
cctcataaagggttcaaagatcatc

SEQ ID NO: 660692 - DNA, 25 bp, Homo sapien
catcctgttgtaatctctgtgccat

SEQ ID NO: 660693 - DNA, 25 bp, Homo sapien
acatcctgttgtaatctctgtgcca

SEQ ID NO: 660694 - DNA, 25 bp, Homo sapien
atcctgttgtaatctctgtgccatt

SEQ ID NO: 660695 - DNA, 25 bp, Homo sapien
tcctgttgtaatctctgtgccattt

SEQ ID NO: 660696 - DNA, 25 bp, Homo sapien
tcctgaacttctctacgtagccctt

SEQ ID NO: 660697 - DNA, 25 bp, Homo sapien
tctacgtagccctttatgtttcttc

SEQ ID NO: 660698 - DNA, 25 bp, Homo sapien
gaacttctctacgtagccctttatg

SEQ ID NO: 660699 - DNA, 25 bp, Homo sapien
tgatatcctgaacttctctacgtag

SEQ ID NO: 660700 - DNA, 25 bp, Homo sapien
aagccctttaccagctgttttccag

SEQ ID NO: 660701 - DNA, 25 bp, Homo sapien
gatatttgataagtgcatttctatg

SEQ ID NO: 660702 - DNA, 25 bp, Homo sapien
ttatccactgtaagccctttaccag

SEQ ID NO: 660703 - DNA, 25 bp, Homo sapien
tgatatttgataagtgcatttctat

SEQ ID NO: 660704 - DNA, 25 bp, Homo sapien
gaacaccttgcaatcattgcggaca

SEQ ID NO: 660705 - DNA, 25 bp, Homo sapien
ccttgcaatcattgcggacagacat

SEQ ID NO: 660706 - DNA, 25 bp, Homo sapien
caccttgcaatcattgcggacagac

SEQ ID NO: 660707 - DNA, 25 bp, Homo sapien
aacaccttgcaatcattgcggacag

SEQ ID NO: 660708 - DNA, 25 bp, Homo sapien
cccgaacagaaataacactcttgag

SEQ ID NO: 660709 - DNA, 25 bp, Homo sapien
gccccgaacagaaataacactcttg

SEQ ID NO: 660710 - DNA, 25 bp, Homo sapien
cagaaataacactcttgagacacat

SEQ ID NO: 660711 - DNA, 25 bp, Homo sapien
cgaacagaaataacactcttgagac

SEQ ID NO: 660712 - DNA, 25 bp, Homo sapien
cacaagcggctatggaggttcctgt

SEQ ID NO: 660713 - DNA, 25 bp, Homo sapien
tacaagattatggtaaaggccccaa

SEQ ID NO: 660714 - DNA, 25 bp, Homo sapien
catgaggaagcttatgtaggccgca

SEQ ID NO: 660715 - DNA, 25 bp, Homo sapien
aaaaatgttagcaagggctgggcgc

SEQ ID NO: 660716 - DNA, 25 bp, Homo sapien
tggatgatgaagctcctacgggcga

SEQ ID NO: 660717 - DNA, 25 bp, Homo sapien
ttagggcaccaaggttcaggagccg

SEQ ID NO: 660718 - DNA, 25 bp, Homo sapien
aatagacaccactcggcctgaggct

SEQ ID NO: 660719 - DNA, 25 bp, Homo sapien
taataatctgggcaaccctgtcggc

SEQ ID NO: 660720 - DNA, 25 bp, Homo sapien
gcgccctcctccttgttcgcgtcct

SEQ ID NO: 660721 - DNA, 25 bp, Homo sapien
gccctcctccttgttcgcgtcctcg

SEQ ID NO: 660722 - DNA, 25 bp, Homo sapien
tggcgccctcctccttgttcgcgtc

SEQ ID NO: 660723 - DNA, 25 bp, Homo sapien
cctcctccttgttcgcgtcctcggc

SEQ ID NO: 660724 - DNA, 25 bp, Homo sapien
cattttccaggctcggagtagtcgc

SEQ ID NO: 660725 - DNA, 25 bp, Homo sapien
agtagtcgccgtggaggccgcttcc

SEQ ID NO: 660726 - DNA, 25 bp, Homo sapien
gacccggccattttccaggctcgga

SEQ ID NO: 660727 - DNA, 25 bp, Homo sapien
tttccaggctcggagtagtcgccgt

SEQ ID NO: 660728 - DNA, 25 bp, Homo sapien
cgcctgcgggagcctctggcctgga

SEQ ID NO: 660729 - DNA, 25 bp, Homo sapien
gctcggggcgcgctggcgactgcgg

SEQ ID NO: 660730 - DNA, 25 bp, Homo sapien
ggcctggaggggctcggggcgcgct

SEQ ID NO: 660731 - DNA, 25 bp, Homo sapien
gcctgcgggagcctctggcctggag

SEQ ID NO: 660732 - DNA, 25 bp, Homo sapien
ctgaaactgggagcggcagataatg

SEQ ID NO: 660733 - DNA, 25 bp, Homo sapien
acacaaaggtgatcaacacgttcat

SEQ ID NO: 660734 - DNA, 25 bp, Homo sapien
cagactgaaactgggagcggcagat

SEQ ID NO: 660735 - DNA, 25 bp, Homo sapien
ctgggagcggcagataatggtaatt

SEQ ID NO: 660736 - DNA, 25 bp, Homo sapien
gaaagcaggtgcttgaaatattcat

SEQ ID NO: 660737 - DNA, 25 bp, Homo sapien
tgtctcaggagttctagtgccaaag

SEQ ID NO: 660738 - DNA, 25 bp, Homo sapien
tgcaagtgggaacaatcagctaagg

SEQ ID NO: 660739 - DNA, 25 bp, Homo sapien
tagaccctactctccagaggtgaag

SEQ ID NO: 660740 - DNA, 25 bp, Homo sapien
tccaaagccttgaccgctggtaggg

SEQ ID NO: 660741 - DNA, 25 bp, Homo sapien
aaagtaatcacacctgcttcccgga

SEQ ID NO: 660742 - DNA, 25 bp, Homo sapien
gagaggacggagaaaacagctacca

SEQ ID NO: 660743 - DNA, 25 bp, Homo sapien
tttgaacaaccaggccactaaggct

SEQ ID NO: 660744 - DNA, 25 bp, Homo sapien
gttgcagggaacctcattggcgctc

SEQ ID NO: 660745 - DNA, 25 bp, Homo sapien
cacagtgataggaaaattccttgtg

SEQ ID NO: 660746 - DNA, 25 bp, Homo sapien
ttcacagtgataggaaaattccttg

SEQ ID NO: 660747 - DNA, 25 bp, Homo sapien
gttcacagtgataggaaaattcctt

SEQ ID NO: 660748 - DNA, 25 bp, Homo sapien
acagtgataggaaaattccttgtgg

SEQ ID NO: 660749 - DNA, 25 bp, Homo sapien
tacaagtcccaataacatgcacagc

SEQ ID NO: 660750 - DNA, 25 bp, Homo sapien
tggcaacagcgagtcccaactggat

SEQ ID NO: 660751 - DNA, 25 bp, Homo sapien
gatacaacaaagaggatggcaacag

SEQ ID NO: 660752 - DNA, 25 bp, Homo sapien
aggaaaggactcctctaacagcccg

SEQ ID NO: 660753 - DNA, 25 bp, Homo sapien
gaaaccctactggagaagtcagcat

SEQ ID NO: 660754 - DNA, 25 bp, Homo sapien
gaaaccttgccggatactagcggaa

SEQ ID NO: 660755 - DNA, 25 bp, Homo sapien
tctgaatcagagtggaagcgtctca

SEQ ID NO: 660756 - DNA, 25 bp, Homo sapien
tgtcttctgtggataccgccgaggc

SEQ ID NO: 660757 - DNA, 25 bp, Homo sapien
tctagaggtcatccaaggtgaaacc

SEQ ID NO: 660758 - DNA, 25 bp, Homo sapien
tctggaatcgatcctagagcctgaa

SEQ ID NO: 660759 - DNA, 25 bp, Homo sapien
tctaaggctaacagcttggcaaggg

SEQ ID NO: 660760 - DNA, 25 bp, Homo sapien
agggcctgaccaactgactgctgtg

SEQ ID NO: 660761 - DNA, 25 bp, Homo sapien
tcatgggtctgcagatggttccgca

SEQ ID NO: 660762 - DNA, 25 bp, Homo sapien
ttacgagtatagaaccgccggtcgc

SEQ ID NO: 660763 - DNA, 25 bp, Homo sapien
tgcttcatctaggagggccgcagct

SEQ ID NO: 660764 - DNA, 25 bp, Homo sapien
tgggtactctcaaaggtctgcaggc

SEQ ID NO: 660765 - DNA, 25 bp, Homo sapien
aggaactgcaattcacagctccaga

SEQ ID NO: 660766 - DNA, 25 bp, Homo sapien
caacctcctgtgatggaactgacgt

SEQ ID NO: 660767 - DNA, 25 bp, Homo sapien
tatgcatgctcaagagtgctcgtgc

SEQ ID NO: 660768 - DNA, 25 bp, Homo sapien
tctacctggagggtatcaaacacac

SEQ ID NO: 660769 - DNA, 25 bp, Homo sapien
cattaagaaagtctaagaaggccgg

SEQ ID NO: 660770 - DNA, 25 bp, Homo sapien
tgtatttggaagcaaaagccttgcc

SEQ ID NO: 660771 - DNA, 25 bp, Homo sapien
catttgagaaaggtgttcccgaaat

SEQ ID NO: 660772 - DNA, 25 bp, Homo sapien
cttctccccatttgagaaaggtgtt

SEQ ID NO: 660773 - DNA, 25 bp, Homo sapien
gagggcagctatatggtctctgctc

SEQ ID NO: 660774 - DNA, 25 bp, Homo sapien
cctgggaactagtttccagcccact

SEQ ID NO: 660775 - DNA, 25 bp, Homo sapien
tcctcctgctttgcatcttgaatcc

SEQ ID NO: 660776 - DNA, 25 bp, Homo sapien
ccgaggcctgggaactagtttccag

SEQ ID NO: 660777 - DNA, 25 bp, Homo sapien
cagggggggacgctggtgaaaaatg

SEQ ID NO: 660778 - DNA, 25 bp, Homo sapien
gccatgttattgagaaagcctcccc

SEQ ID NO: 660779 - DNA, 25 bp, Homo sapien
agggccatgttattgagaaagcctc

SEQ ID NO: 660780 - DNA, 25 bp, Homo sapien
caaagggccatgttattgagaaagc

SEQ ID NO: 660781 - DNA, 25 bp, Homo sapien
tggcaaagggccatgttattgagaa

SEQ ID NO: 660782 - DNA, 25 bp, Homo sapien
cctggtgttagggagcccaatacca

SEQ ID NO: 660783 - DNA, 25 bp, Homo sapien
ctggtgttagggagcccaataccat

SEQ ID NO: 660784 - DNA, 25 bp, Homo sapien
cacctggtgttagggagcccaatac

SEQ ID NO: 660785 - DNA, 25 bp, Homo sapien
aacacctggtgttagggagcccaat

SEQ ID NO: 660786 - DNA, 25 bp, Homo sapien
ccgtgaacaagatgatgggatcagc

SEQ ID NO: 660787 - DNA, 25 bp, Homo sapien
atcagcgggttcatgccccagagag

SEQ ID NO: 660788 - DNA, 25 bp, Homo sapien
cattcatccaacagactggccgtga

SEQ ID NO: 660789 - DNA, 25 bp, Homo sapien
acatgagctacgtcctgttcaggaa

SEQ ID NO: 660790 - DNA, 25 bp, Homo sapien
ctatgcaccttggaattgagcagag

SEQ ID NO: 660791 - DNA, 25 bp, Homo sapien
cagcaattactatgcaccttggaat

SEQ ID NO: 660792 - DNA, 25 bp, Homo sapien
accagcaattactatgcaccttgga

SEQ ID NO: 660793 - DNA, 25 bp, Homo sapien
aattactatgcaccttggaattgag

SEQ ID NO: 660794 - DNA, 25 bp, Homo sapien
gggcccgagatgaggcgcgccgccg

SEQ ID NO: 660795 - DNA, 25 bp, Homo sapien
cgccgctccgggtacagggcgcgcg

SEQ ID NO: 660796 - DNA, 25 bp, Homo sapien
gcgcgcggacgcagcgagacggcct

SEQ ID NO: 660797 - DNA, 25 bp, Homo sapien
agcgagacggcctcccgcccctctc

SEQ ID NO: 660798 - DNA, 25 bp, Homo sapien
ctcaggccccggtagtggcggcggt

SEQ ID NO: 660799 - DNA, 25 bp, Homo sapien
cggtcgggccattgtgcggtgcatt

SEQ ID NO: 660800 - DNA, 25 bp, Homo sapien
gtgcattgtgggagccgcgcgagcg

SEQ ID NO: 660801 - DNA, 25 bp, Homo sapien
gcggtgccgcgggatctctatggtc

SEQ ID NO: 660802 - DNA, 25 bp, Homo sapien
tggccagagccattgttgtccccta

SEQ ID NO: 660803 - DNA, 25 bp, Homo sapien
tattaatgtaggtacctaaagtgac

SEQ ID NO: 660804 - DNA, 25 bp, Homo sapien
tgatacaaggtcatgactatcctag

SEQ ID NO: 660805 - DNA, 25 bp, Homo sapien
taaagtgaccttaactgaatgtgga

SEQ ID NO: 660806 - DNA, 25 bp, Homo sapien
ggacggccatggcaggaagctttta

SEQ ID NO: 660807 - DNA, 25 bp, Homo sapien
cctggacggccatggcaggaagctt

SEQ ID NO: 660808 - DNA, 25 bp, Homo sapien
ggcataggcagggaaccgagcagca

SEQ ID NO: 660809 - DNA, 25 bp, Homo sapien
gccatggcaggaagcttttagttgg

SEQ ID NO: 660810 - DNA, 25 bp, Homo sapien
gccggtaagcgaacaggaactctga

SEQ ID NO: 660811 - DNA, 25 bp, Homo sapien
tgctgccggtaagcgaacaggaact

SEQ ID NO: 660812 - DNA, 25 bp, Homo sapien
taagcgaacaggaactctgagcact

SEQ ID NO: 660813 - DNA, 25 bp, Homo sapien
agctgctgccggtaagcgaacagga

SEQ ID NO: 660814 - DNA, 25 bp, Homo sapien
cgttgagaggtgagtggttgatttc

SEQ ID NO: 660815 - DNA, 25 bp, Homo sapien
ctagacgttgagaggtgagtggttg

SEQ ID NO: 660816 - DNA, 25 bp, Homo sapien
tgagaggtgagtggttgatttctga

SEQ ID NO: 660817 - DNA, 25 bp, Homo sapien
gacgttgagaggtgagtggttgatt

SEQ ID NO: 660818 - DNA, 25 bp, Homo sapien
ttgtaggtgtctaaggccttggcag

SEQ ID NO: 660819 - DNA, 25 bp, Homo sapien
atctggaaaggccaatggcgcagtt

SEQ ID NO: 660820 - DNA, 25 bp, Homo sapien
tctggaaaggccaatggcgcagttc

SEQ ID NO: 660821 - DNA, 25 bp, Homo sapien
atgcttgtaggtgtctaaggccttg

SEQ ID NO: 660822 - DNA, 25 bp, Homo sapien
agctgctgaaagggattgtcatact

SEQ ID NO: 660823 - DNA, 25 bp, Homo sapien
agaaagaagggtgtgcaattttgca

SEQ ID NO: 660824 - DNA, 25 bp, Homo sapien
gctgctgaaagggattgtcatactg

SEQ ID NO: 660825 - DNA, 25 bp, Homo sapien
ggagaaagaagggtgtgcaattttg

SEQ ID NO: 660826 - DNA, 25 bp, Homo sapien
agaagaggggtcaaggggatgtctg

SEQ ID NO: 660827 - DNA, 25 bp, Homo sapien
gaagaggggtcaaggggatgtctgc

SEQ ID NO: 660828 - DNA, 25 bp, Homo sapien
aagaggggtcaaggggatgtctgct

SEQ ID NO: 660829 - DNA, 25 bp, Homo sapien
ggaatctggaatcagctttgctggg

SEQ ID NO: 660830 - DNA, 25 bp, Homo sapien
aataagttacccttaaactcagcag

SEQ ID NO: 660831 - DNA, 25 bp, Homo sapien
tcatacaagttggagtcagaaaaaa

SEQ ID NO: 660832 - DNA, 25 bp, Homo sapien
tcagcagctaacgacaacatttatt

SEQ ID NO: 660833 - DNA, 25 bp, Homo sapien
gcatgacttctcacatttacagtga

SEQ ID NO: 660834 - DNA, 25 bp, Homo sapien
agtgattgctttgctggagggcacc

SEQ ID NO: 660835 - DNA, 25 bp, Homo sapien
cagcatgacttctcacatttacagt

SEQ ID NO: 660836 - DNA, 25 bp, Homo sapien
tacagtgattgctttgctggagggc

SEQ ID NO: 660837 - DNA, 25 bp, Homo sapien
catccccatccatgatagatgcaag

SEQ ID NO: 660838 - DNA, 25 bp, Homo sapien
tccccatccatgatagatgcaagca

SEQ ID NO: 660839 - DNA, 25 bp, Homo sapien
tcatccccatccatgatagatgcaa

SEQ ID NO: 660840 - DNA, 25 bp, Homo sapien
atccccatccatgatagatgcaagc

SEQ ID NO: 660841 - DNA, 25 bp, Homo sapien
tctacagaaagatgtgctgcacaga

SEQ ID NO: 660842 - DNA, 25 bp, Homo sapien
ccaggtgtaggatataggaaagttc

SEQ ID NO: 660843 - DNA, 25 bp, Homo sapien
tagaagtttgagacacaaggtccag

SEQ ID NO: 660844 - DNA, 25 bp, Homo sapien
cactggtccagatcagagctgaagc

SEQ ID NO: 660845 - DNA, 25 bp, Homo sapien
tttagaaaggttgaacggcggctga

SEQ ID NO: 660846 - DNA, 25 bp, Homo sapien
ttgaacggcggctgaaatcgcgtgt

SEQ ID NO: 660847 - DNA, 25 bp, Homo sapien
tgaaatcgcgtgtgttccatttaca

SEQ ID NO: 660848 - DNA, 25 bp, Homo sapien
ggcggctgaaatcgcgtgtgttcca

SEQ ID NO: 660849 - DNA, 25 bp, Homo sapien
gagtcatttagctctaagctgtttc

SEQ ID NO: 660850 - DNA, 25 bp, Homo sapien
cagggtccgaacagctgaagcaggt

SEQ ID NO: 660851 - DNA, 25 bp, Homo sapien
gagcttgtattctgagtcatttagc

SEQ ID NO: 660852 - DNA, 25 bp, Homo sapien
cacttcttagtgatctaacttcagg

SEQ ID NO: 660853 - DNA, 25 bp, Homo sapien
tctttttagtcttctctttatccat

SEQ ID NO: 660854 - DNA, 25 bp, Homo sapien
ttctttttagtcttctctttatcca

SEQ ID NO: 660855 - DNA, 25 bp, Homo sapien
cgcctggctgaccttatgtttacaa

SEQ ID NO: 660856 - DNA, 25 bp, Homo sapien
ctagtgctgtggacctaatagaaac

SEQ ID NO: 660857 - DNA, 25 bp, Homo sapien
ctttttagagccgtcactgcatgac

SEQ ID NO: 660858 - DNA, 25 bp, Homo sapien
ttaggtctcctagtaggtcccctca

SEQ ID NO: 660859 - DNA, 25 bp, Homo sapien
tttgctttttctctaggaccgtagc

SEQ ID NO: 660860 - DNA, 25 bp, Homo sapien
ctttttctctaggaccgtagcatcc

SEQ ID NO: 660861 - DNA, 25 bp, Homo sapien
ttctctaggaccgtagcatcctgag

SEQ ID NO: 660862 - DNA, 25 bp, Homo sapien
ctctaggaccgtagcatcctgagac

SEQ ID NO: 660863 - DNA, 25 bp, Homo sapien
aagcttaattgagacatacttcaca

SEQ ID NO: 660864 - DNA, 25 bp, Homo sapien
cagcagcctgtaacttgtgggctca

SEQ ID NO: 660865 - DNA, 25 bp, Homo sapien
agtgtacaaatcagtccgggcatgg

SEQ ID NO: 660866 - DNA, 25 bp, Homo sapien
ctctatgttacctaagctgatctca

SEQ ID NO: 660867 - DNA, 25 bp, Homo sapien
aggtgcaggtcaaccacgcacggct

SEQ ID NO: 660868 - DNA, 25 bp, Homo sapien
gtgcaggtcaaccacgcacggctaa

SEQ ID NO: 660869 - DNA, 25 bp, Homo sapien
caggtgcaggtcaaccacgcacggc

SEQ ID NO: 660870 - DNA, 25 bp, Homo sapien
ggtgcaggtcaaccacgcacggcta

SEQ ID NO: 660871 - DNA, 25 bp, Homo sapien
tttgctctttggcccaggccagagt

SEQ ID NO: 660872 - DNA, 25 bp, Homo sapien
gattataggtgcctactaccacaca

SEQ ID NO: 660873 - DNA, 25 bp, Homo sapien
ataggtgcctactaccacacacagc

SEQ ID NO: 660874 - DNA, 25 bp, Homo sapien
ttataggtgcctactaccacacaca

SEQ ID NO: 660875 - DNA, 25 bp, Homo sapien
gaccaagggtggttaagtgacacat

SEQ ID NO: 660876 - DNA, 25 bp, Homo sapien
gacagacaagttgacaggcatgcct

SEQ ID NO: 660877 - DNA, 25 bp, Homo sapien
gaaaactgcagataaccctatacat

SEQ ID NO: 660878 - DNA, 25 bp, Homo sapien
taatactggtatctcgaggtgactc

SEQ ID NO: 660879 - DNA, 25 bp, Homo sapien
cccactgagggactaggttttcatg

SEQ ID NO: 660880 - DNA, 25 bp, Homo sapien
tatgtagaggacctaccaagcccac

SEQ ID NO: 660881 - DNA, 25 bp, Homo sapien
tgtcgtgctgtcaccagaaagctgc

SEQ ID NO: 660882 - DNA, 25 bp, Homo sapien
tagagcagattgtagaatgtcgtgc

SEQ ID NO: 660883 - DNA, 25 bp, Homo sapien
ccgtgatttcggtaaaaagcagctc

SEQ ID NO: 660884 - DNA, 25 bp, Homo sapien
attcaccgctctcatcacttgggca

SEQ ID NO: 660885 - DNA, 25 bp, Homo sapien
cagagagctgccattttccgtgatt

SEQ ID NO: 660886 - DNA, 25 bp, Homo sapien
caaaaggtaatatgtccatggctca

SEQ ID NO: 660887 - DNA, 25 bp, Homo sapien
gaaaacctatgtgctgggcgctctg

SEQ ID NO: 660888 - DNA, 25 bp, Homo sapien
ggattttgcttaccggactcacaag

SEQ ID NO: 660889 - DNA, 25 bp, Homo sapien
gctctgcaaatacacagcggcctga

SEQ ID NO: 660890 - DNA, 25 bp, Homo sapien
cagaaaacactgaaccccttggcgt

SEQ ID NO: 660891 - DNA, 25 bp, Homo sapien
gatagcctctattgtgcctaacgct

SEQ ID NO: 660892 - DNA, 25 bp, Homo sapien
gaacagtggtctcatcaacataaaa

SEQ ID NO: 660893 - DNA, 25 bp, Homo sapien
caaattgtgtgtcgtctcagtggag

SEQ ID NO: 660894 - DNA, 25 bp, Homo sapien
tcatttagaggtgcagtggctttcc

SEQ ID NO: 660895 - DNA, 25 bp, Homo sapien
tccaggttgtccaaaggattcagca

SEQ ID NO: 660896 - DNA, 25 bp, Homo sapien
ctactgttccaggttgtccaaagga

SEQ ID NO: 660897 - DNA, 25 bp, Homo sapien
gggaagttttgcatagtggtcgacc

SEQ ID NO: 660898 - DNA, 25 bp, Homo sapien
catagtggtcgaccaagggctagtt

SEQ ID NO: 660899 - DNA, 25 bp, Homo sapien
gtgacacctttgaaatcttttggca

SEQ ID NO: 660900 - DNA, 25 bp, Homo sapien
aggtagtagtgacacctttgaaatc

SEQ ID NO: 660901 - DNA, 25 bp, Homo sapien
tagtagtgacacctttgaaatcttt

SEQ ID NO: 660902 - DNA, 25 bp, Homo sapien
ttaaaggtagtagtgacacctttga

SEQ ID NO: 660903 - DNA, 25 bp, Homo sapien
tcttaaactcctaacctcaagtgat

SEQ ID NO: 660904 - DNA, 25 bp, Homo sapien
agatggggtttcacccccaggctgg

SEQ ID NO: 660905 - DNA, 25 bp, Homo sapien
tccacttgcttcggcctcccaaagt

SEQ ID NO: 660906 - DNA, 25 bp, Homo sapien
cccaagtgggattgcaggtgtgtgc

SEQ ID NO: 660907 - DNA, 25 bp, Homo sapien
tgttcttgtttatatccctaggagc

SEQ ID NO: 660908 - DNA, 25 bp, Homo sapien
gggtgattgtttgatgtgtctctcc

SEQ ID NO: 660909 - DNA, 25 bp, Homo sapien
ctcatggaatggaatgtttgaaaac

SEQ ID NO: 660910 - DNA, 25 bp, Homo sapien
tagtaatttttagtgtcaacaagga

SEQ ID NO: 660911 - DNA, 25 bp, Homo sapien
tcacagtgttgggtaaccatcttta

SEQ ID NO: 660912 - DNA, 25 bp, Homo sapien
ctcgcttctggcaaacaccagtctg

SEQ ID NO: 660913 - DNA, 25 bp, Homo sapien
tcccttcactcgcttctggcaaaca

SEQ ID NO: 660914 - DNA, 25 bp, Homo sapien
aatcatagcgtatgtagccttttgt

SEQ ID NO: 660915 - DNA, 25 bp, Homo sapien
cctcagcctcccaaattgatgggat

SEQ ID NO: 660916 - DNA, 25 bp, Homo sapien
tggctcatttttgtatttgtagtag

SEQ ID NO: 660917 - DNA, 25 bp, Homo sapien
ggcacccgccactacgcctggctca

SEQ ID NO: 660918 - DNA, 25 bp, Homo sapien
gcacccgccactacgcctggctcat

SEQ ID NO: 660919 - DNA, 25 bp, Homo sapien
aacaccctgtgttgggttggctcca

SEQ ID NO: 660920 - DNA, 25 bp, Homo sapien
tgagttcactcaagctctgaccagt

SEQ ID NO: 660921 - DNA, 25 bp, Homo sapien
aacccgcgtgggcttcaatactctg

SEQ ID NO: 660922 - DNA, 25 bp, Homo sapien
tctgaccagtcacatcagggtgttc

SEQ ID NO: 660923 - DNA, 25 bp, Homo sapien
taccaatattttactctcctgattt

SEQ ID NO: 660924 - DNA, 25 bp, Homo sapien
tagtaagtcatgagattggatagtg

SEQ ID NO: 660925 - DNA, 25 bp, Homo sapien
tgttagtagtgtgaatcctctgtgt

SEQ ID NO: 660926 - DNA, 25 bp, Homo sapien
ttactctcctgattttagtaagtca

SEQ ID NO: 660927 - DNA, 25 bp, Homo sapien
ccttatatgtaccttgggaattctc

SEQ ID NO: 660928 - DNA, 25 bp, Homo sapien
tttttcctgctctccgcatggacag

SEQ ID NO: 660929 - DNA, 25 bp, Homo sapien
tggctactcttttcacgtgcatgtg

SEQ ID NO: 660930 - DNA, 25 bp, Homo sapien
ctcctggtatgtcctgcctttccta

SEQ ID NO: 660931 - DNA, 25 bp, Homo sapien
tcaactcttgtctgcagtggttcct

SEQ ID NO: 660932 - DNA, 25 bp, Homo sapien
tagtcattctagtgaaccctcagga

SEQ ID NO: 660933 - DNA, 25 bp, Homo sapien
tattgccttactgtttagggacagg

SEQ ID NO: 660934 - DNA, 25 bp, Homo sapien
tcttatttagagtgtggcatctcac

SEQ ID NO: 660935 - DNA, 25 bp, Homo sapien
gaaggttgcattctccaccaaggga

SEQ ID NO: 660936 - DNA, 25 bp, Homo sapien
cacgatgactgtattggaccctcaa

SEQ ID NO: 660937 - DNA, 25 bp, Homo sapien
aaactttggtgcgagccacagtgca

SEQ ID NO: 660938 - DNA, 25 bp, Homo sapien
gaaagcatctcgctccagtgtgcgt

SEQ ID NO: 660939 - DNA, 25 bp, Homo sapien
tggaaccttgaatagctctgcttgg

SEQ ID NO: 660940 - DNA, 25 bp, Homo sapien
tcagtgtgatccactaacccacagg

SEQ ID NO: 660941 - DNA, 25 bp, Homo sapien
ggttaaagtaactcctggcattgcc

SEQ ID NO: 660942 - DNA, 25 bp, Homo sapien
ccagttgacggagcaagtttgacct

SEQ ID NO: 660943 - DNA, 25 bp, Homo sapien
cttttgacatcaggcaggtttggga

SEQ ID NO: 660944 - DNA, 25 bp, Homo sapien
aatacctgggaccatgctctcctgg

SEQ ID NO: 660945 - DNA, 25 bp, Homo sapien
tctacatctgttgtcagagccactg

SEQ ID NO: 660946 - DNA, 25 bp, Homo sapien
tgattgacttgtgacctgccaggtt

SEQ ID NO: 660947 - DNA, 25 bp, Homo sapien
caacttaagcgtctgtttaccaaag

SEQ ID NO: 660948 - DNA, 25 bp, Homo sapien
tattggccaagtccaagttgtcaac

SEQ ID NO: 660949 - DNA, 25 bp, Homo sapien
tgacactgatctggtccatgaggct

SEQ ID NO: 660950 - DNA, 25 bp, Homo sapien
ggacactcaagggtacagtttgaca

SEQ ID NO: 660951 - DNA, 25 bp, Homo sapien
gagtcggcctgtgctagtcattcca

SEQ ID NO: 660952 - DNA, 25 bp, Homo sapien
gaagagccacgttaagttgcatagg

SEQ ID NO: 660953 - DNA, 25 bp, Homo sapien
taagtgcttactatctggagccctg

SEQ ID NO: 660954 - DNA, 25 bp, Homo sapien
taataccatggagataacagctcga

SEQ ID NO: 660955 - DNA, 25 bp, Homo sapien
ctaaatggaccacataattgaggca

SEQ ID NO: 660956 - DNA, 25 bp, Homo sapien
caatctgagttctacgtggtatagg

SEQ ID NO: 660957 - DNA, 25 bp, Homo sapien
caccagcagccaataagaggtctct

SEQ ID NO: 660958 - DNA, 25 bp, Homo sapien
aattgaggcatatgggccatctacc

SEQ ID NO: 660959 - DNA, 25 bp, Homo sapien
tctaacatcagggtccacgaaggtg

SEQ ID NO: 660960 - DNA, 25 bp, Homo sapien
tcatggctacggagtgttgcacgga

SEQ ID NO: 660961 - DNA, 25 bp, Homo sapien
tggaggccacttgagagataacgac

SEQ ID NO: 660962 - DNA, 25 bp, Homo sapien
gattagcctcctgcaaagactctgg

SEQ ID NO: 660963 - DNA, 25 bp, Homo sapien
gttggcctcttccaagcaggtcaga

SEQ ID NO: 660964 - DNA, 25 bp, Homo sapien
cagagcacccgtgtggtgagattcc

SEQ ID NO: 660965 - DNA, 25 bp, Homo sapien
tgtaccaactggtgaggcaggaagc

SEQ ID NO: 660966 - DNA, 25 bp, Homo sapien
aaacagctcttttggatcccacctc

SEQ ID NO: 660967 - DNA, 25 bp, Homo sapien
tcagttctgctgtaggatgaggttt

SEQ ID NO: 660968 - DNA, 25 bp, Homo sapien
gctgtaggatgaggttttccagttc

SEQ ID NO: 660969 - DNA, 25 bp, Homo sapien
tgtaggatgaggttttccagttcat

SEQ ID NO: 660970 - DNA, 25 bp, Homo sapien
tctgctgtaggatgaggttttccag

SEQ ID NO: 660971 - DNA, 25 bp, Homo sapien
aaggcagcagactcccggtagcccg

SEQ ID NO: 660972 - DNA, 25 bp, Homo sapien
tagcccgcgatgagctgccgcacgg

SEQ ID NO: 660973 - DNA, 25 bp, Homo sapien
atgagctgccgcacggcgctgatct

SEQ ID NO: 660974 - DNA, 25 bp, Homo sapien
agactcccggtagcccgcgatgagc

SEQ ID NO: 660975 - DNA, 25 bp, Homo sapien
ccgcctttcatgctgaggtccgtgg

SEQ ID NO: 660976 - DNA, 25 bp, Homo sapien
gtgggcacgggcctgctggtgctgg

SEQ ID NO: 660977 - DNA, 25 bp, Homo sapien
ccccgcctttcatgctgaggtccgt

SEQ ID NO: 660978 - DNA, 25 bp, Homo sapien
cgcctttcatgctgaggtccgtggg

SEQ ID NO: 660979 - DNA, 25 bp, Homo sapien
agaagaaacatctgtgtgcccagac

SEQ ID NO: 660980 - DNA, 25 bp, Homo sapien
gaggagctgagagtcgagccacaaa

SEQ ID NO: 660981 - DNA, 25 bp, Homo sapien
atctgtgtgcccagacaagaaaggg

SEQ ID NO: 660982 - DNA, 25 bp, Homo sapien
agagatgcgtgtggggaaagcccag

SEQ ID NO: 660983 - DNA, 25 bp, Homo sapien
aggaagcctctgtctcttcgggggc

SEQ ID NO: 660984 - DNA, 25 bp, Homo sapien
tctcctctaatggtctgtgccccat

SEQ ID NO: 660985 - DNA, 25 bp, Homo sapien
gcacctgactccatgaggaagcctc

SEQ ID NO: 660986 - DNA, 25 bp, Homo sapien
gggctgtctcctctaatggtctgtg

SEQ ID NO: 660987 - DNA, 25 bp, Homo sapien
gcaagcgtcactggcggtgagaagg

SEQ ID NO: 660988 - DNA, 25 bp, Homo sapien
gaggcgccggtagtgaaggtgggaa

SEQ ID NO: 660989 - DNA, 25 bp, Homo sapien
aagtgttggagcaagcgtcactggc

SEQ ID NO: 660990 - DNA, 25 bp, Homo sapien
ctttaaccaactgagtctccttcac

SEQ ID NO: 660991 - DNA, 25 bp, Homo sapien
gcaggttgctgctcaaggccccgta

SEQ ID NO: 660992 - DNA, 25 bp, Homo sapien
cgccgttggcgtacacagggtcctg

SEQ ID NO: 660993 - DNA, 25 bp, Homo sapien
agtgggtgatggctgcggagtcccg

SEQ ID NO: 660994 - DNA, 25 bp, Homo sapien
agtcccgcgagtgctgcttgtccag

SEQ ID NO: 660995 - DNA, 25 bp, Homo sapien
gcttgtccagggctatgggctcatc

SEQ ID NO: 660996 - DNA, 25 bp, Homo sapien
ctgtgaggactggtagatctctaga

SEQ ID NO: 660997 - DNA, 25 bp, Homo sapien
tagatctctagacgcatccgcttgg

SEQ ID NO: 660998 - DNA, 25 bp, Homo sapien
tctgccatggccgaggtcagatggg

SEQ ID NO: 660999 - DNA, 25 bp, Homo sapien
tagacgcatccgcttggctgccttt

SEQ ID NO: 661000 - DNA, 25 bp, Homo sapien
agatgggcaccatgcggtccaggtt

SEQ ID NO: 661001 - DNA, 25 bp, Homo sapien
cgttcttcttcatgcgacggcagga

SEQ ID NO: 661002 - DNA, 25 bp, Homo sapien
ggtccaggttctcgtccacaaagag

SEQ ID NO: 661003 - DNA, 25 bp, Homo sapien
acttgaggtacgtgcggatgcgctt

SEQ ID NO: 661004 - DNA, 25 bp, Homo sapien
tgaaggccttaagacgctcagggtc

SEQ ID NO: 661005 - DNA, 25 bp, Homo sapien
aaggccttaagacgctcagggtcca

SEQ ID NO: 661006 - DNA, 25 bp, Homo sapien
ggccttaagacgctcagggtccatg

SEQ ID NO: 661007 - DNA, 25 bp, Homo sapien
cttaagacgctcagggtccatgcct

SEQ ID NO: 661008 - DNA, 25 bp, Homo sapien
tcctcatggtcatcgtggtcatcgt

SEQ ID NO: 661009 - DNA, 25 bp, Homo sapien
tggtcatcgtggtcatcgtcgtcat

SEQ ID NO: 661010 - DNA, 25 bp, Homo sapien
ctcatggtcatcgtggtcatcgtcg

SEQ ID NO: 661011 - DNA, 25 bp, Homo sapien
tgtcctcatggtcatcgtggtcatc

SEQ ID NO: 661012 - DNA, 25 bp, Homo sapien
tcaggtcctcagggcagccgctgac

SEQ ID NO: 661013 - DNA, 25 bp, Homo sapien
tgtcaggtcctcagggcagccgctg

SEQ ID NO: 661014 - DNA, 25 bp, Homo sapien
gtcaggtcctcagggcagccgctga

SEQ ID NO: 661015 - DNA, 25 bp, Homo sapien
cttgatggaatcgtagctcccagag

SEQ ID NO: 661016 - DNA, 25 bp, Homo sapien
ctcggtcttgatggaatcgtagctc

SEQ ID NO: 661017 - DNA, 25 bp, Homo sapien
ggtcttgatggaatcgtagctccca

SEQ ID NO: 661018 - DNA, 25 bp, Homo sapien
tcttgatggaatcgtagctcccaga

SEQ ID NO: 661019 - DNA, 25 bp, Homo sapien
tttcctcagcagaggccaacaccag

SEQ ID NO: 661020 - DNA, 25 bp, Homo sapien
taggagggtgtcagctgtttcctca

SEQ ID NO: 661021 - DNA, 25 bp, Homo sapien
ccggggctgctgagcgcttaggagg

SEQ ID NO: 661022 - DNA, 25 bp, Homo sapien
cgcttaggagggtgtcagctgtttc

SEQ ID NO: 661023 - DNA, 25 bp, Homo sapien
ccctgcgtgctgctcgacgtggatg

SEQ ID NO: 661024 - DNA, 25 bp, Homo sapien
tcctcggcggccgtggtgaagtcca

SEQ ID NO: 661025 - DNA, 25 bp, Homo sapien
cacacaggttgatgggctgatcctc

SEQ ID NO: 661026 - DNA, 25 bp, Homo sapien
gtcttcaccccgtatttgacgcggc

SEQ ID NO: 661027 - DNA, 25 bp, Homo sapien
ggcgcccgccaccatattcagctaa

SEQ ID NO: 661028 - DNA, 25 bp, Homo sapien
gattccacttctacgcagcatctgg

SEQ ID NO: 661029 - DNA, 25 bp, Homo sapien
caggccagacggacaaggatactca

SEQ ID NO: 661030 - DNA, 25 bp, Homo sapien
tggatgataaaaacacgaggctgtg

SEQ ID NO: 661031 - DNA, 25 bp, Homo sapien
tcatacgatggaatagtatccagcc

SEQ ID NO: 661032 - DNA, 25 bp, Homo sapien
ggctcccagactgcaacgggggctt

SEQ ID NO: 661033 - DNA, 25 bp, Homo sapien
tgaggtgggcccagtgagagggcca

SEQ ID NO: 661034 - DNA, 25 bp, Homo sapien
cccagcctgtgacagtctgaggtgg

SEQ ID NO: 661035 - DNA, 25 bp, Homo sapien
agctcatgctccagcagcgacaaat

SEQ ID NO: 661036 - DNA, 25 bp, Homo sapien
caggtacacggccactggaggccag

SEQ ID NO: 661037 - DNA, 25 bp, Homo sapien
agcaggccctgcgtgcagactgcct

SEQ ID NO: 661038 - DNA, 25 bp, Homo sapien
ggtacacggccactggaggccagca

SEQ ID NO: 661039 - DNA, 25 bp, Homo sapien
tgccttccgtgtccagaggtgtggc

SEQ ID NO: 661040 - DNA, 25 bp, Homo sapien
tgagacgcagcgtgtattgcacacc

SEQ ID NO: 661041 - DNA, 25 bp, Homo sapien
ctgtctgcactagccttttccaagg

SEQ ID NO: 661042 - DNA, 25 bp, Homo sapien
gataccgtgttatcagagctgagat

SEQ ID NO: 661043 - DNA, 25 bp, Homo sapien
tcttctttcctacggagccgctgag

SEQ ID NO: 661044 - DNA, 25 bp, Homo sapien
ccaagctgcagatgatgttcaggcc

SEQ ID NO: 661045 - DNA, 25 bp, Homo sapien
tggcccgtagagaggtgtccaagct

SEQ ID NO: 661046 - DNA, 25 bp, Homo sapien
tagacgtcacacacctagatcttcc

SEQ ID NO: 661047 - DNA, 25 bp, Homo sapien
tcagtagccgtccttggctaatgaa

SEQ ID NO: 661048 - DNA, 25 bp, Homo sapien
tcagtgtgcaaagatcgagccgaga

SEQ ID NO: 661049 - DNA, 25 bp, Homo sapien
ccaattatgcgtcaggtcccgagtg

SEQ ID NO: 661050 - DNA, 25 bp, Homo sapien
gccagtctgggttcggtgcattgca

SEQ ID NO: 661051 - DNA, 25 bp, Homo sapien
tccttaggtcggagtgatgacgcca

SEQ ID NO: 661052 - DNA, 25 bp, Homo sapien
acccactttctcagtaggtgaacct

SEQ ID NO: 661053 - DNA, 25 bp, Homo sapien
accacgcctggttcacccactttct

SEQ ID NO: 661054 - DNA, 25 bp, Homo sapien
ttctcagtaggtgaacctctcggct

SEQ ID NO: 661055 - DNA, 25 bp, Homo sapien
ccagagcttgtcctccccagcatcc

SEQ ID NO: 661056 - DNA, 25 bp, Homo sapien
gtggcccacagccaatccctggaag

SEQ ID NO: 661057 - DNA, 25 bp, Homo sapien
gatggacactttcctgtgacccggg

SEQ ID NO: 661058 - DNA, 25 bp, Homo sapien
agcattgtctgtgccgcctgcggcc

SEQ ID NO: 661059 - DNA, 25 bp, Homo sapien
cctggaaggcttgggccccagctct

SEQ ID NO: 661060 - DNA, 25 bp, Homo sapien
gtctggccatgagtgttgggtccac

SEQ ID NO: 661061 - DNA, 25 bp, Homo sapien
gcagcagcaggccggagttctgtgc

SEQ ID NO: 661062 - DNA, 25 bp, Homo sapien
cagcagcaggccggagttctgtgcc

SEQ ID NO: 661063 - DNA, 25 bp, Homo sapien
ctggccatgagtgttgggtccacgg

SEQ ID NO: 661064 - DNA, 25 bp, Homo sapien
taattgtaatacttctgaaataagg

SEQ ID NO: 661065 - DNA, 25 bp, Homo sapien
ttttctacaataattgtaatacttc

SEQ ID NO: 661066 - DNA, 25 bp, Homo sapien
aattgtaatacttctgaaataaggg

SEQ ID NO: 661067 - DNA, 25 bp, Homo sapien
ctacaataattgtaatacttctgaa

SEQ ID NO: 661068 - DNA, 25 bp, Homo sapien
cgactcttgctcagcaatcccccga

SEQ ID NO: 661069 - DNA, 25 bp, Homo sapien
tcttgctcagcaatcccccgactgc

SEQ ID NO: 661070 - DNA, 25 bp, Homo sapien
ccagggctccacacgactcttgctc

SEQ ID NO: 661071 - DNA, 25 bp, Homo sapien
gccagggctccacacgactcttgct

SEQ ID NO: 661072 - DNA, 25 bp, Homo sapien
tgaaagctgtggcacccgcacaact

SEQ ID NO: 661073 - DNA, 25 bp, Homo sapien
aaagctgtggcacccgcacaactca

SEQ ID NO: 661074 - DNA, 25 bp, Homo sapien
gggagtgaaagctgtggcacccgca

SEQ ID NO: 661075 - DNA, 25 bp, Homo sapien
agtgaaagctgtggcacccgcacaa

SEQ ID NO: 661076 - DNA, 25 bp, Homo sapien
gggctcagtttcaggacaagcagac

SEQ ID NO: 661077 - DNA, 25 bp, Homo sapien
tgggctcagtttcaggacaagcaga

SEQ ID NO: 661078 - DNA, 25 bp, Homo sapien
ctcagtttcaggacaagcagacact

SEQ ID NO: 661079 - DNA, 25 bp, Homo sapien
agtttcaggacaagcagacactcac

SEQ ID NO: 661080 - DNA, 25 bp, Homo sapien
acactcaccccggtagaggctcaga

SEQ ID NO: 661081 - DNA, 25 bp, Homo sapien
gacactcaccccggtagaggctcag

SEQ ID NO: 661082 - DNA, 25 bp, Homo sapien
actcaccccggtagaggctcagagg

SEQ ID NO: 661083 - DNA, 25 bp, Homo sapien
ctcaccccggtagaggctcagaggc

SEQ ID NO: 661084 - DNA, 25 bp, Homo sapien
cagacttccacgaaggacggaaggc

SEQ ID NO: 661085 - DNA, 25 bp, Homo sapien
agcaggcctcagacttccacgaagg

SEQ ID NO: 661086 - DNA, 25 bp, Homo sapien
ttggggggcttctgcaatggagacc

SEQ ID NO: 661087 - DNA, 25 bp, Homo sapien
gcctcagacttccacgaaggacgga

SEQ ID NO: 661088 - DNA, 25 bp, Homo sapien
cctcacatgtggctgcagaaacaca

SEQ ID NO: 661089 - DNA, 25 bp, Homo sapien
tgcagaaacacagcttgtttccctt

SEQ ID NO: 661090 - DNA, 25 bp, Homo sapien
aggtgacctgggctatagcctcaca

SEQ ID NO: 661091 - DNA, 25 bp, Homo sapien
acctgggctatagcctcacatgtgg

SEQ ID NO: 661092 - DNA, 25 bp, Homo sapien
gcccctcctcaactgccaccaaggg

SEQ ID NO: 661093 - DNA, 25 bp, Homo sapien
cgggcacagcccctcctcaactgcc

SEQ ID NO: 661094 - DNA, 25 bp, Homo sapien
caactgggagcagggggccgggcac

SEQ ID NO: 661095 - DNA, 25 bp, Homo sapien
tcaactgccaccaaggggcactcac

SEQ ID NO: 661096 - DNA, 25 bp, Homo sapien
gggctccgcatcctctcgtcctggc

SEQ ID NO: 661097 - DNA, 25 bp, Homo sapien
aggttctgcgggctccgcatcctct

SEQ ID NO: 661098 - DNA, 25 bp, Homo sapien
ggccaggtgcgggtcagctgacatc

SEQ ID NO: 661099 - DNA, 25 bp, Homo sapien
tcctcttgactgtggaggttctgcg

SEQ ID NO: 661100 - DNA, 25 bp, Homo sapien
atcaaaatcctcgctgctcacagaa

SEQ ID NO: 661101 - DNA, 25 bp, Homo sapien
caaaatcctcgctgctcacagaagt

SEQ ID NO: 661102 - DNA, 25 bp, Homo sapien
tcaaaatcctcgctgctcacagaag

SEQ ID NO: 661103 - DNA, 25 bp, Homo sapien
gttggaactttcttagactgctgtc

SEQ ID NO: 661104 - DNA, 25 bp, Homo sapien
tggaactttcttagactgctgtccc

SEQ ID NO: 661105 - DNA, 25 bp, Homo sapien
gaactttcttagactgctgtccctg

SEQ ID NO: 661106 - DNA, 25 bp, Homo sapien
tttggttggaactttcttagactgc

SEQ ID NO: 661107 - DNA, 25 bp, Homo sapien
cgccccgcgaccctgggcgctcagg

SEQ ID NO: 661108 - DNA, 25 bp, Homo sapien
gagtggggtgcgccccgcgaccctg

SEQ ID NO: 661109 - DNA, 25 bp, Homo sapien
agtggggtgcgccccgcgaccctgg

SEQ ID NO: 661110 - DNA, 25 bp, Homo sapien
gtgcgccccgcgaccctgggcgctc

SEQ ID NO: 661111 - DNA, 25 bp, Homo sapien
tcttgggcgccccgcggcccccaca

SEQ ID NO: 661112 - DNA, 25 bp, Homo sapien
ccccgcggcccccacagtgcagcct

SEQ ID NO: 661113 - DNA, 25 bp, Homo sapien
gcgccccgcggcccccacagtgcag

SEQ ID NO: 661114 - DNA, 25 bp, Homo sapien
tgggcgccccgcggcccccacagtg

SEQ ID NO: 661115 - DNA, 25 bp, Homo sapien
ggaagcgaggcggagatgggcggtc

SEQ ID NO: 661116 - DNA, 25 bp, Homo sapien
ggcggtcgggatccgcgagtgagcg

SEQ ID NO: 661117 - DNA, 25 bp, Homo sapien
gcgggcggcggtgacagccccacag

SEQ ID NO: 661118 - DNA, 25 bp, Homo sapien
ctggcaccaccgcggcgcgtcactg

SEQ ID NO: 661119 - DNA, 25 bp, Homo sapien
tttttagaacgaactagtggccaca

SEQ ID NO: 661120 - DNA, 25 bp, Homo sapien
ttccaaacgcgggaactgtccatcc

SEQ ID NO: 661121 - DNA, 25 bp, Homo sapien
gcaggtgggaggctttatttatcca

SEQ ID NO: 661122 - DNA, 25 bp, Homo sapien
tatttatccacacatgctggtgccc

SEQ ID NO: 661123 - DNA, 25 bp, Homo sapien
gcaatggggcgatctggcagacact

SEQ ID NO: 661124 - DNA, 25 bp, Homo sapien
tgtcctcggctcctgaagggaggca

SEQ ID NO: 661125 - DNA, 25 bp, Homo sapien
cccaatcaagtcatcaaattcagca

SEQ ID NO: 661126 - DNA, 25 bp, Homo sapien
gggccaccagacatgatgtcctcgg

SEQ ID NO: 661127 - DNA, 25 bp, Homo sapien
gagttttaccatgttgtccaggctg

SEQ ID NO: 661128 - DNA, 25 bp, Homo sapien
attcttgtgtctcagcctcccaagt

SEQ ID NO: 661129 - DNA, 25 bp, Homo sapien
catcctccacctccctgactcaagc

SEQ ID NO: 661130 - DNA, 25 bp, Homo sapien
cctccctgactcaagccattcttgt

SEQ ID NO: 661131 - DNA, 25 bp, Homo sapien
tatttatctcaatataagtaatgaa

SEQ ID NO: 661132 - DNA, 25 bp, Homo sapien
ggctttctaagtggtgtcaatacca

SEQ ID NO: 661133 - DNA, 25 bp, Homo sapien
taagtaatgaagtggggatctggct

SEQ ID NO: 661134 - DNA, 25 bp, Homo sapien
tcttctggaaactttatgtcttcat

SEQ ID NO: 661135 - DNA, 25 bp, Homo sapien
agggcttcacaagtgcctggattca

SEQ ID NO: 661136 - DNA, 25 bp, Homo sapien
gtttgacacctttgctgaaatctag

SEQ ID NO: 661137 - DNA, 25 bp, Homo sapien
tgggctgggccatagcgctgactat

SEQ ID NO: 661138 - DNA, 25 bp, Homo sapien
ttttgcatagctgcctgcaacctca

SEQ ID NO: 661139 - DNA, 25 bp, Homo sapien
cagctccggtgtggatgatggccca

SEQ ID NO: 661140 - DNA, 25 bp, Homo sapien
ggcctgcagtcccttcatgacagag

SEQ ID NO: 661141 - DNA, 25 bp, Homo sapien
tgcagtcccttcatgacagagccca

SEQ ID NO: 661142 - DNA, 25 bp, Homo sapien
atgctgcatggggacctttctgggg

SEQ ID NO: 661143 - DNA, 25 bp, Homo sapien
tgacctggatttagtgccattctgt

SEQ ID NO: 661144 - DNA, 25 bp, Homo sapien
tccggctgtttgtgcggttttgtgc

SEQ ID NO: 661145 - DNA, 25 bp, Homo sapien
ccggctgtttgtgcggttttgtgct

SEQ ID NO: 661146 - DNA, 25 bp, Homo sapien
gatttagtgccattctgtatgaaac

SEQ ID NO: 661147 - DNA, 25 bp, Homo sapien
cggtgataacagtgtttacgaagcc

SEQ ID NO: 661148 - DNA, 25 bp, Homo sapien
gcacagatgagcacggtgataacag

SEQ ID NO: 661149 - DNA, 25 bp, Homo sapien
tgagcacggtgataacagtgtttac

SEQ ID NO: 661150 - DNA, 25 bp, Homo sapien
aacagtgtttacgaagccaggtgcc

SEQ ID NO: 661151 - DNA, 25 bp, Homo sapien
tgggaattcatcactcgaagcttca

SEQ ID NO: 661152 - DNA, 25 bp, Homo sapien
cctgggaattcatcactcgaagctt

SEQ ID NO: 661153 - DNA, 25 bp, Homo sapien
ctgggaattcatcactcgaagcttc

SEQ ID NO: 661154 - DNA, 25 bp, Homo sapien
gggcatgttgtaatcaataatccca

SEQ ID NO: 661155 - DNA, 25 bp, Homo sapien
gtgaggggcatgttgtaatcaataa

SEQ ID NO: 661156 - DNA, 25 bp, Homo sapien
tgttgtaatcaataatcccagagac

SEQ ID NO: 661157 - DNA, 25 bp, Homo sapien
catgttgtaatcaataatcccagag

SEQ ID NO: 661158 - DNA, 25 bp, Homo sapien
gtcataggtattttccccaacatca

SEQ ID NO: 661159 - DNA, 25 bp, Homo sapien
aaggtgcccctggtacatagtccca

SEQ ID NO: 661160 - DNA, 25 bp, Homo sapien
taagtcattctctaacgattggcta

SEQ ID NO: 661161 - DNA, 25 bp, Homo sapien
ccaagctgctgtaggaattgtttca

SEQ ID NO: 661162 - DNA, 25 bp, Homo sapien
gctgtaaggtgaaatgcttgatttt

SEQ ID NO: 661163 - DNA, 25 bp, Homo sapien
attttgcagttccagaatgagagtt

SEQ ID NO: 661164 - DNA, 25 bp, Homo sapien
tgattttgcagttccagaatgagag

SEQ ID NO: 661165 - DNA, 25 bp, Homo sapien
tgaaatgcttgattttgcagttcca

SEQ ID NO: 661166 - DNA, 25 bp, Homo sapien
tggtgcaggctctgctttcccagca

SEQ ID NO: 661167 - DNA, 25 bp, Homo sapien
ctggggcaggaacactgggtctgcc

SEQ ID NO: 661168 - DNA, 25 bp, Homo sapien
ctggtgcaggctctgctttcccagc

SEQ ID NO: 661169 - DNA, 25 bp, Homo sapien
ggcaggaacactgggtctgcctctg

SEQ ID NO: 661170 - DNA, 25 bp, Homo sapien
cttgtgtctgggcaccgtaggccac

SEQ ID NO: 661171 - DNA, 25 bp, Homo sapien
gggtagaggcagaccttgtgtctct

SEQ ID NO: 661172 - DNA, 25 bp, Homo sapien
tctctgttgggccacctggacgttg

SEQ ID NO: 661173 - DNA, 25 bp, Homo sapien
cctggacgttggcagccttgtgtct

SEQ ID NO: 661174 - DNA, 25 bp, Homo sapien
ctggcatgatgcaccaggcagtcct

SEQ ID NO: 661175 - DNA, 25 bp, Homo sapien
aacttccacaggcccgatgcccggg

SEQ ID NO: 661176 - DNA, 25 bp, Homo sapien
cctggaaaccctgataaatcgccca

SEQ ID NO: 661177 - DNA, 25 bp, Homo sapien
cccgatgcccgggagctggcatgat

SEQ ID NO: 661178 - DNA, 25 bp, Homo sapien
agcattataattgtaccagccaaat

SEQ ID NO: 661179 - DNA, 25 bp, Homo sapien
atgtgctgggccgtctcaatgtgcc

SEQ ID NO: 661180 - DNA, 25 bp, Homo sapien
tgctgggccgtctcaatgtgccaaa

SEQ ID NO: 661181 - DNA, 25 bp, Homo sapien
cagccaaatgtgctgggccgtctca

SEQ ID NO: 661182 - DNA, 25 bp, Homo sapien
tggagttaaagtgcatcctcttctg

SEQ ID NO: 661183 - DNA, 25 bp, Homo sapien
cattggagttaaagtgcatcctctt

SEQ ID NO: 661184 - DNA, 25 bp, Homo sapien
gccattggagttaaagtgcatcctc

SEQ ID NO: 661185 - DNA, 25 bp, Homo sapien
ccaggccattggagttaaagtgcat

SEQ ID NO: 661186 - DNA, 25 bp, Homo sapien
gtacagctcatcaggaaccgggtca

SEQ ID NO: 661187 - DNA, 25 bp, Homo sapien
tctcgggaggaaggcataggtctct

SEQ ID NO: 661188 - DNA, 25 bp, Homo sapien
aggaaccgggtcacggcctctctcg

SEQ ID NO: 661189 - DNA, 25 bp, Homo sapien
actccgtacagctcatcaggaaccg

SEQ ID NO: 661190 - DNA, 25 bp, Homo sapien
catcacccaagcgttccgctgtcct

SEQ ID NO: 661191 - DNA, 25 bp, Homo sapien
agcatcacccaagcgttccgctgtc

SEQ ID NO: 661192 - DNA, 25 bp, Homo sapien
ggcagcatcacccaagcgttccgct

SEQ ID NO: 661193 - DNA, 25 bp, Homo sapien
tcacccaagcgttccgctgtcctcg

SEQ ID NO: 661194 - DNA, 25 bp, Homo sapien
gggaggatagaaggctgacaggtga

SEQ ID NO: 661195 - DNA, 25 bp, Homo sapien
ccctgggtcccattgatgggtggaa

SEQ ID NO: 661196 - DNA, 25 bp, Homo sapien
atagaaggctgacaggtgagaagtc

SEQ ID NO: 661197 - DNA, 25 bp, Homo sapien
tgacaggtgagaagtccttggaact

SEQ ID NO: 661198 - DNA, 25 bp, Homo sapien
ttttcttctgcccagcgtgcttggg

SEQ ID NO: 661199 - DNA, 25 bp, Homo sapien
gggggctttgcctggctccgctgag

SEQ ID NO: 661200 - DNA, 25 bp, Homo sapien
ggggctttgcctggctccgctgagc

SEQ ID NO: 661201 - DNA, 25 bp, Homo sapien
accacagcgacccgcttcagagaga

SEQ ID NO: 661202 - DNA, 25 bp, Homo sapien
cacagcgacccgcttcagagagatg

SEQ ID NO: 661203 - DNA, 25 bp, Homo sapien
acagcgacccgcttcagagagatgc

SEQ ID NO: 661204 - DNA, 25 bp, Homo sapien
gcgacccgcttcagagagatgccct

SEQ ID NO: 661205 - DNA, 25 bp, Homo sapien
acaatgggcagagaacggcgacaac

SEQ ID NO: 661206 - DNA, 25 bp, Homo sapien
gagaacggcgacaacgaaaatacaa

SEQ ID NO: 661207 - DNA, 25 bp, Homo sapien
gcagagaacggcgacaacgaaaata

SEQ ID NO: 661208 - DNA, 25 bp, Homo sapien
agcaacaatgggcagagaacggcga

SEQ ID NO: 661209 - DNA, 25 bp, Homo sapien
atacacagacccagagacactaggc

SEQ ID NO: 661210 - DNA, 25 bp, Homo sapien
agagacactaggctgtcagccacca

SEQ ID NO: 661211 - DNA, 25 bp, Homo sapien
cagacccagagacactaggctgtca

SEQ ID NO: 661212 - DNA, 25 bp, Homo sapien
agggagatacacagacccagagaca

SEQ ID NO: 661213 - DNA, 25 bp, Homo sapien
ttgactctggtaaacaacagctttg

SEQ ID NO: 661214 - DNA, 25 bp, Homo sapien
ctgccctcttaggttgactctggta

SEQ ID NO: 661215 - DNA, 25 bp, Homo sapien
ggttgactctggtaaacaacagctt

SEQ ID NO: 661216 - DNA, 25 bp, Homo sapien
cctcttaggttgactctggtaaaca

SEQ ID NO: 661217 - DNA, 25 bp, Homo sapien
gattccatgtgtgctacaccctagg

SEQ ID NO: 661218 - DNA, 25 bp, Homo sapien
aggatgtctacgtggccttcaagga

SEQ ID NO: 661219 - DNA, 25 bp, Homo sapien
aactgtcctctggtgagctagggcc

SEQ ID NO: 661220 - DNA, 25 bp, Homo sapien
gggaagaacgccaggatgtctacgt

SEQ ID NO: 661221 - DNA, 25 bp, Homo sapien
aaatattacagcaatggtccttaga

SEQ ID NO: 661222 - DNA, 25 bp, Homo sapien
acagcaatggtccttagaccagcag

SEQ ID NO: 661223 - DNA, 25 bp, Homo sapien
ttacagcaatggtccttagaccagc

SEQ ID NO: 661224 - DNA, 25 bp, Homo sapien
atattacagcaatggtccttagacc

SEQ ID NO: 661225 - DNA, 25 bp, Homo sapien
tttaacaggcccccccagatgattc

SEQ ID NO: 661226 - DNA, 25 bp, Homo sapien
taacaggcccccccagatgattctg

SEQ ID NO: 661227 - DNA, 25 bp, Homo sapien
attctgatgcaagacagattttgag

SEQ ID NO: 661228 - DNA, 25 bp, Homo sapien
atgattctgatgcaagacagatttt

SEQ ID NO: 661229 - DNA, 25 bp, Homo sapien
aacaggtattggctcattaaatata

SEQ ID NO: 661230 - DNA, 25 bp, Homo sapien
ttaaatatagacatgctctgtgctt

SEQ ID NO: 661231 - DNA, 25 bp, Homo sapien
ttaatattttcatttccgatgaagg

SEQ ID NO: 661232 - DNA, 25 bp, Homo sapien
gctcattaaatatagacatgctctg

SEQ ID NO: 661233 - DNA, 25 bp, Homo sapien
tctccacccttgtgcacaatctcca

SEQ ID NO: 661234 - DNA, 25 bp, Homo sapien
acccttgtgcacaatctccaactgt

SEQ ID NO: 661235 - DNA, 25 bp, Homo sapien
caatctccaactgttagcgcgtagc

SEQ ID NO: 661236 - DNA, 25 bp, Homo sapien
aactgttagcgcgtagctgccgccg

SEQ ID NO: 661237 - DNA, 25 bp, Homo sapien
ccatctggaacaggcctcacatatt

SEQ ID NO: 661238 - DNA, 25 bp, Homo sapien
gaacaggcctcacatattccaagac

SEQ ID NO: 661239 - DNA, 25 bp, Homo sapien
ccaagacctcctttctgcttcgctg

SEQ ID NO: 661240 - DNA, 25 bp, Homo sapien
ttctgcttcgctgaacctccatctt

SEQ ID NO: 661241 - DNA, 25 bp, Homo sapien
cctcataggaagtgtgtgggaaccc

SEQ ID NO: 661242 - DNA, 25 bp, Homo sapien
cgaatgacaatgacttatgagggct

SEQ ID NO: 661243 - DNA, 25 bp, Homo sapien
gagggaggagtactgtccagcatcc

SEQ ID NO: 661244 - DNA, 25 bp, Homo sapien
cctaggacagggaatcgggagtcac

SEQ ID NO: 661245 - DNA, 25 bp, Homo sapien
gcgcgctaacgagcggagagcccca

SEQ ID NO: 661246 - DNA, 25 bp, Homo sapien
gccctgggcgcgctaacgagcggag

SEQ ID NO: 661247 - DNA, 25 bp, Homo sapien
ctaacgagcggagagccccaggtgc

SEQ ID NO: 661248 - DNA, 25 bp, Homo sapien
ggaggcgccctgggcgcgctaacga

SEQ ID NO: 661249 - DNA, 25 bp, Homo sapien
cgcgtccacatccacatctgctgtg

SEQ ID NO: 661250 - DNA, 25 bp, Homo sapien
cacatctgctgtggctccggggcct

SEQ ID NO: 661251 - DNA, 25 bp, Homo sapien
gcgtccacatccacatctgctgtgg

SEQ ID NO: 661252 - DNA, 25 bp, Homo sapien
cacatccacatctgctgtggctccg

SEQ ID NO: 661253 - DNA, 25 bp, Homo sapien
aagaagcagaaccggctctgtgtcc

SEQ ID NO: 661254 - DNA, 25 bp, Homo sapien
gtccaagaagcagaaccggctctgt

SEQ ID NO: 661255 - DNA, 25 bp, Homo sapien
aagcagaaccggctctgtgtcccca

SEQ ID NO: 661256 - DNA, 25 bp, Homo sapien
tccaagaagcagaaccggctctgtg

SEQ ID NO: 661257 - DNA, 25 bp, Homo sapien
cgcctgaagccggctgtcaggagct

SEQ ID NO: 661258 - DNA, 25 bp, Homo sapien
aggagagaccagctggcggtgcagg

SEQ ID NO: 661259 - DNA, 25 bp, Homo sapien
ggctgtcaggagctcgtctggccac

SEQ ID NO: 661260 - DNA, 25 bp, Homo sapien
aggagctcgtctggccacagccgcc

SEQ ID NO: 661261 - DNA, 25 bp, Homo sapien
atgtcacgttgacatctccagcatg

SEQ ID NO: 661262 - DNA, 25 bp, Homo sapien
tgcgatgtcacgttgacatctccag

SEQ ID NO: 661263 - DNA, 25 bp, Homo sapien
cacgtgtgcgatgtcacgttgacat

SEQ ID NO: 661264 - DNA, 25 bp, Homo sapien
actcacacgtgtgcgatgtcacgtt

SEQ ID NO: 661265 - DNA, 25 bp, Homo sapien
tcacgttctagacattattgccggg

SEQ ID NO: 661266 - DNA, 25 bp, Homo sapien
tcggtcatcacacgaatggctcacg

SEQ ID NO: 661267 - DNA, 25 bp, Homo sapien
cactgaagtcttgcgagagcagaat

SEQ ID NO: 661268 - DNA, 25 bp, Homo sapien
taaactcgcccatgcttgaaatggc

SEQ ID NO: 661269 - DNA, 25 bp, Homo sapien
gcaagcatttaatatgtggcaggca

SEQ ID NO: 661270 - DNA, 25 bp, Homo sapien
cacagttctatcctggacggctgga

SEQ ID NO: 661271 - DNA, 25 bp, Homo sapien
ggcactgtgcctaaggcattaccta

SEQ ID NO: 661272 - DNA, 25 bp, Homo sapien
acggatgggactgatgattgacagc

SEQ ID NO: 661273 - DNA, 25 bp, Homo sapien
tcggccacaagaacactgggcattc

SEQ ID NO: 661274 - DNA, 25 bp, Homo sapien
ggcattctcacgcagtgcctgccgg

SEQ ID NO: 661275 - DNA, 25 bp, Homo sapien
gcttagccagcatcggccacaagaa

SEQ ID NO: 661276 - DNA, 25 bp, Homo sapien
gctgggcacccagtaggagcttagc

SEQ ID NO: 661277 - DNA, 25 bp, Homo sapien
agccccctgtcaccagggaccatgg

SEQ ID NO: 661278 - DNA, 25 bp, Homo sapien
cccctgtcaccagggaccatggggg

SEQ ID NO: 661279 - DNA, 25 bp, Homo sapien
cagccccctgtcaccagggaccatg

SEQ ID NO: 661280 - DNA, 25 bp, Homo sapien
ccccctgtcaccagggaccatgggg

SEQ ID NO: 661281 - DNA, 25 bp, Homo sapien
caagaggactagtgctccgggatcc

SEQ ID NO: 661282 - DNA, 25 bp, Homo sapien
gctctggagctcattgggaccttga

SEQ ID NO: 661283 - DNA, 25 bp, Homo sapien
tccgggatccacaaccacgtgggtg

SEQ ID NO: 661284 - DNA, 25 bp, Homo sapien
ctcactaaaggcgagagggcaccat

SEQ ID NO: 661285 - DNA, 25 bp, Homo sapien
gagtccaatccagatctcacatgag

SEQ ID NO: 661286 - DNA, 25 bp, Homo sapien
tagatgccgacaaacacgcagagga

SEQ ID NO: 661287 - DNA, 25 bp, Homo sapien
catgagtgcaagcacacgcagtcac

SEQ ID NO: 661288 - DNA, 25 bp, Homo sapien
gcccaggtgctcacatagatgccga

SEQ ID NO: 661289 - DNA, 25 bp, Homo sapien
cgcaggtgccaaaggtttacacaaa

SEQ ID NO: 661290 - DNA, 25 bp, Homo sapien
accagcggccgcaggtgccaaaggt

SEQ ID NO: 661291 - DNA, 25 bp, Homo sapien
gccgcaggtgccaaaggtttacaca

SEQ ID NO: 661292 - DNA, 25 bp, Homo sapien
gcggccgcaggtgccaaaggtttac

SEQ ID NO: 661293 - DNA, 25 bp, Homo sapien
tgggacaggacaagtggtgtcagat

SEQ ID NO: 661294 - DNA, 25 bp, Homo sapien
gctggccgggactaggagagggccc

SEQ ID NO: 661295 - DNA, 25 bp, Homo sapien
ggccgggactaggagagggccctga

SEQ ID NO: 661296 - DNA, 25 bp, Homo sapien
tgtcagatcatcgacccgaggctgg

SEQ ID NO: 661297 - DNA, 25 bp, Homo sapien
cgagcccgtcttgaccggcacatac

SEQ ID NO: 661298 - DNA, 25 bp, Homo sapien
cgtcttgaccggcacatacaccact

SEQ ID NO: 661299 - DNA, 25 bp, Homo sapien
gagcccgtcttgaccggcacataca

SEQ ID NO: 661300 - DNA, 25 bp, Homo sapien
cttgaccggcacatacaccacttgg

SEQ ID NO: 661301 - DNA, 25 bp, Homo sapien
tcggcgatccgctggtatttgctgc

SEQ ID NO: 661302 - DNA, 25 bp, Homo sapien
aggtgcgcaagcaccagtcccggaa

SEQ ID NO: 661303 - DNA, 25 bp, Homo sapien
ttggagcgcacccagaactggaact

SEQ ID NO: 661304 - DNA, 25 bp, Homo sapien
tatttgctgcgtgtcaccgtcttgg

SEQ ID NO: 661305 - DNA, 25 bp, Homo sapien
cagcagcagcgtcggcttcggcatc

SEQ ID NO: 661306 - DNA, 25 bp, Homo sapien
cgcagcagcagcgtcggcttcggca

SEQ ID NO: 661307 - DNA, 25 bp, Homo sapien
ggccgcgtctgtcccgcggtgtggc

SEQ ID NO: 661308 - DNA, 25 bp, Homo sapien
tggctccggcgaggctgctggatgg

SEQ ID NO: 661309 - DNA, 25 bp, Homo sapien
tcctccaggaacatgatctcaggaa

SEQ ID NO: 661310 - DNA, 25 bp, Homo sapien
gaccccagaaggtggataagactgc

SEQ ID NO: 661311 - DNA, 25 bp, Homo sapien
cagccggaagtacctgagagagacc

SEQ ID NO: 661312 - DNA, 25 bp, Homo sapien
agggagcatgaagcaccttgcccaa

SEQ ID NO: 661313 - DNA, 25 bp, Homo sapien
atctgggggaagcccgatttgctgg

SEQ ID NO: 661314 - DNA, 25 bp, Homo sapien
gcatctgggggaagcccgatttgct

SEQ ID NO: 661315 - DNA, 25 bp, Homo sapien
catctgggggaagcccgatttgctg

SEQ ID NO: 661316 - DNA, 25 bp, Homo sapien
tctgggggaagcccgatttgctggg

SEQ ID NO: 661317 - DNA, 25 bp, Homo sapien
gagcagggcatcttacaaaccatcg

SEQ ID NO: 661318 - DNA, 25 bp, Homo sapien
caaaccatcgttagacctgtcaggc

SEQ ID NO: 661319 - DNA, 25 bp, Homo sapien
gatgcttggtgtcccgcagtgcaac

SEQ ID NO: 661320 - DNA, 25 bp, Homo sapien
cctgctctagggtgcccatctggac

SEQ ID NO: 661321 - DNA, 25 bp, Homo sapien
tggtgacaatattccccgagcagcg

SEQ ID NO: 661322 - DNA, 25 bp, Homo sapien
cctgctggtgacaatattccccgag

SEQ ID NO: 661323 - DNA, 25 bp, Homo sapien
gctggtgacaatattccccgagcag

SEQ ID NO: 661324 - DNA, 25 bp, Homo sapien
acaatattccccgagcagcgggcag

SEQ ID NO: 661325 - DNA, 25 bp, Homo sapien
tgcctgcccgaggtacagtggggag

SEQ ID NO: 661326 - DNA, 25 bp, Homo sapien
cctgcccgaggtacagtggggagga

SEQ ID NO: 661327 - DNA, 25 bp, Homo sapien
tgcccgaggtacagtggggaggaca

SEQ ID NO: 661328 - DNA, 25 bp, Homo sapien
gatgcctgcccgaggtacagtgggg

SEQ ID NO: 661329 - DNA, 25 bp, Homo sapien
tcagtctgggcgctcataagaggca

SEQ ID NO: 661330 - DNA, 25 bp, Homo sapien
acatttaccctgtgcggtgggccca

SEQ ID NO: 661331 - DNA, 25 bp, Homo sapien
tctggaggtatgtgacaccgggaca

SEQ ID NO: 661332 - DNA, 25 bp, Homo sapien
gacttcagaattggccagagggcga

SEQ ID NO: 661333 - DNA, 25 bp, Homo sapien
gaattccgagatgaatccagcctga

SEQ ID NO: 661334 - DNA, 25 bp, Homo sapien
tcttgtggttgatccgtggaggcct

SEQ ID NO: 661335 - DNA, 25 bp, Homo sapien
cactccggactgtttcatgcgttca

SEQ ID NO: 661336 - DNA, 25 bp, Homo sapien
tgaaatgagccagttctaccccggt

SEQ ID NO: 661337 - DNA, 25 bp, Homo sapien
gagtctgaggtcccacttggtggcc

SEQ ID NO: 661338 - DNA, 25 bp, Homo sapien
gtctgaggtcccacttggtggccac

SEQ ID NO: 661339 - DNA, 25 bp, Homo sapien
aggagtctgaggtcccacttggtgg

SEQ ID NO: 661340 - DNA, 25 bp, Homo sapien
agtctgaggtcccacttggtggcca

SEQ ID NO: 661341 - DNA, 25 bp, Homo sapien
ggtctgactggggagatggaggcca

SEQ ID NO: 661342 - DNA, 25 bp, Homo sapien
cgggtctgactggggagatggaggc

SEQ ID NO: 661343 - DNA, 25 bp, Homo sapien
gactggggagatggaggccaacttc

SEQ ID NO: 661344 - DNA, 25 bp, Homo sapien
ctgactggggagatggaggccaact

SEQ ID NO: 661345 - DNA, 25 bp, Homo sapien
cttctctcctgaaaaatggccacag

SEQ ID NO: 661346 - DNA, 25 bp, Homo sapien
tcagcaaagctgtccttgcttcctc

SEQ ID NO: 661347 - DNA, 25 bp, Homo sapien
aatggccacagaagccgtggaccac

SEQ ID NO: 661348 - DNA, 25 bp, Homo sapien
gcaaagctgtccttgcttcctcttc

SEQ ID NO: 661349 - DNA, 25 bp, Homo sapien
tccaggcctccacatgggctggctg

SEQ ID NO: 661350 - DNA, 25 bp, Homo sapien
catgggctggctgccatgcactggc

SEQ ID NO: 661351 - DNA, 25 bp, Homo sapien
tgtctccaggcctccacatgggctg

SEQ ID NO: 661352 - DNA, 25 bp, Homo sapien
acatgggctggctgccatgcactgg

SEQ ID NO: 661353 - DNA, 25 bp, Homo sapien
tcttgaagccccctgcagacttggc

SEQ ID NO: 661354 - DNA, 25 bp, Homo sapien
ctggcccacaagtgtccagtgaatg

SEQ ID NO: 661355 - DNA, 25 bp, Homo sapien
agcaggtggaagagtaagtcctgct

SEQ ID NO: 661356 - DNA, 25 bp, Homo sapien
atggcatatgccccaccgccaggga

SEQ ID NO: 661357 - DNA, 25 bp, Homo sapien
catgaaagcatcatggccctgtggg

SEQ ID NO: 661358 - DNA, 25 bp, Homo sapien
atgaaagcatcatggccctgtgggg

SEQ ID NO: 661359 - DNA, 25 bp, Homo sapien
ccatgaaagcatcatggccctgtgg

SEQ ID NO: 661360 - DNA, 25 bp, Homo sapien
caccatgaaagcatcatggccctgt

SEQ ID NO: 661361 - DNA, 25 bp, Homo sapien
gccaggtatgggggcatgtgcctat

SEQ ID NO: 661362 - DNA, 25 bp, Homo sapien
ttagccaggtatgggggcatgtgcc

SEQ ID NO: 661363 - DNA, 25 bp, Homo sapien
caggtatgggggcatgtgcctatag

SEQ ID NO: 661364 - DNA, 25 bp, Homo sapien
tagccaggtatgggggcatgtgcct

SEQ ID NO: 661365 - DNA, 25 bp, Homo sapien
aactaaggcatggtacggtttggtg

SEQ ID NO: 661366 - DNA, 25 bp, Homo sapien
tgttctcagtctacgaaacagtgga

SEQ ID NO: 661367 - DNA, 25 bp, Homo sapien
aatgccagtccctccatgttctcag

SEQ ID NO: 661368 - DNA, 25 bp, Homo sapien
tgggtgggttctagcacactcctcc

SEQ ID NO: 661369 - DNA, 25 bp, Homo sapien
cccttggcccacagcttggactggg

SEQ ID NO: 661370 - DNA, 25 bp, Homo sapien
ctggttcggccccggaccatgggct

SEQ ID NO: 661371 - DNA, 25 bp, Homo sapien
gagcatgggcccctgtcctgaggtc

SEQ ID NO: 661372 - DNA, 25 bp, Homo sapien
tggactgggcctctaggatctggct

SEQ ID NO: 661373 - DNA, 25 bp, Homo sapien
cagcctcggtccctaatcatgtttg

SEQ ID NO: 661374 - DNA, 25 bp, Homo sapien
tttcagctgggcgtgccgggcccat

SEQ ID NO: 661375 - DNA, 25 bp, Homo sapien
tgctgaatgccttgaatacaagcgc

SEQ ID NO: 661376 - DNA, 25 bp, Homo sapien
catggtgtccctttccggatgtggg

SEQ ID NO: 661377 - DNA, 25 bp, Homo sapien
taattaaaggtgcaggcaacttgcc

SEQ ID NO: 661378 - DNA, 25 bp, Homo sapien
ctttcctgataagggcctgggtgtt

SEQ ID NO: 661379 - DNA, 25 bp, Homo sapien
aggacagagcttggccaaagtcccc

SEQ ID NO: 661380 - DNA, 25 bp, Homo sapien
cagcgaccgtgatgaattggagaga

SEQ ID NO: 661381 - DNA, 25 bp, Homo sapien
gctcagcattccagtttttgtaaag

SEQ ID NO: 661382 - DNA, 25 bp, Homo sapien
tgtaaagggaaaactggccaggcga

SEQ ID NO: 661383 - DNA, 25 bp, Homo sapien
cagcattccagtttttgtaaaggga

SEQ ID NO: 661384 - DNA, 25 bp, Homo sapien
ccggctcagcattccagtttttgta

SEQ ID NO: 661385 - DNA, 25 bp, Homo sapien
ttaagtgacttctgcaaagccacac

SEQ ID NO: 661386 - DNA, 25 bp, Homo sapien
tgcaaagccacaccactacggaaga

SEQ ID NO: 661387 - DNA, 25 bp, Homo sapien
agccacaccactacggaagaggaag

SEQ ID NO: 661388 - DNA, 25 bp, Homo sapien
aggaggaggattagagagcttaagt

SEQ ID NO: 661389 - DNA, 25 bp, Homo sapien
ctctctgaggctgtgcggtaagcac

SEQ ID NO: 661390 - DNA, 25 bp, Homo sapien
tctcagcagatctataagtcttcat

SEQ ID NO: 661391 - DNA, 25 bp, Homo sapien
tactcctgtcctgtacagggcagcc

SEQ ID NO: 661392 - DNA, 25 bp, Homo sapien
tgccagcgcatttgctcttctcagc

SEQ ID NO: 661393 - DNA, 25 bp, Homo sapien
ggttgtcccttcatccagacattga

SEQ ID NO: 661394 - DNA, 25 bp, Homo sapien
ccatgtgctggtgccacgtccacag

SEQ ID NO: 661395 - DNA, 25 bp, Homo sapien
cttgccatgtgctggtgccacgtcc

SEQ ID NO: 661396 - DNA, 25 bp, Homo sapien
gcctctcaactgaatttgctggttg

SEQ ID NO: 661397 - DNA, 25 bp, Homo sapien
ttttttcataatatggactctagct

SEQ ID NO: 661398 - DNA, 25 bp, Homo sapien
gtcaggaactctgctccccgcctcc

SEQ ID NO: 661399 - DNA, 25 bp, Homo sapien
tttttcataatatggactctagctc

SEQ ID NO: 661400 - DNA, 25 bp, Homo sapien
ttttcataatatggactctagctct

SEQ ID NO: 661401 - DNA, 25 bp, Homo sapien
ctgagggagccaagactgatctgat

SEQ ID NO: 661402 - DNA, 25 bp, Homo sapien
gagggagccaagactgatctgattg

SEQ ID NO: 661403 - DNA, 25 bp, Homo sapien
cttttcacgatgcttctgagggagc

SEQ ID NO: 661404 - DNA, 25 bp, Homo sapien
ccagaaggaggcttttcacgatgct

SEQ ID NO: 661405 - DNA, 25 bp, Homo sapien
ctgcagagagagaacagtgaaaacc

SEQ ID NO: 661406 - DNA, 25 bp, Homo sapien
gagagagaacagtgaaaacccgggc

SEQ ID NO: 661407 - DNA, 25 bp, Homo sapien
cagagagagaacagtgaaaacccgg

SEQ ID NO: 661408 - DNA, 25 bp, Homo sapien
tgcagagagagaacagtgaaaaccc

SEQ ID NO: 661409 - DNA, 25 bp, Homo sapien
cttttggctcagttaggaagtggaa

SEQ ID NO: 661410 - DNA, 25 bp, Homo sapien
ctcttttggctcagttaggaagtgg

SEQ ID NO: 661411 - DNA, 25 bp, Homo sapien
tggctcagttaggaagtggaaaagc

SEQ ID NO: 661412 - DNA, 25 bp, Homo sapien
cagttaggaagtggaaaagcacctc

SEQ ID NO: 661413 - DNA, 25 bp, Homo sapien
tctatgatattttgccttaacaaaa

SEQ ID NO: 661414 - DNA, 25 bp, Homo sapien
gtctatgatattttgccttaacaaa

SEQ ID NO: 661415 - DNA, 25 bp, Homo sapien
cagtgactctccttaactgggtgga

SEQ ID NO: 661416 - DNA, 25 bp, Homo sapien
tggtttttatctcgcaagcagcact

SEQ ID NO: 661417 - DNA, 25 bp, Homo sapien
cactgagatgtaagacggcagccca

SEQ ID NO: 661418 - DNA, 25 bp, Homo sapien
tcctgggaagtgacaacctagcggg

SEQ ID NO: 661419 - DNA, 25 bp, Homo sapien
cggcaccgggtcctcagtgcagtgc

SEQ ID NO: 661420 - DNA, 25 bp, Homo sapien
gcgcccagctggttcagctgctgca

SEQ ID NO: 661421 - DNA, 25 bp, Homo sapien
gcccagctggttcagctgctgcatg

SEQ ID NO: 661422 - DNA, 25 bp, Homo sapien
agctgctgcatgtcgccgcccacgg

SEQ ID NO: 661423 - DNA, 25 bp, Homo sapien
ggtacggcgcttggcctctctgaac

SEQ ID NO: 661424 - DNA, 25 bp, Homo sapien
gactaggtctcaaccttggaagggc

SEQ ID NO: 661425 - DNA, 25 bp, Homo sapien
agcctactcgatgccagacactggg

SEQ ID NO: 661426 - DNA, 25 bp, Homo sapien
caagaggtcttcaatcaatggctag

SEQ ID NO: 661427 - DNA, 25 bp, Homo sapien
caagcaaatatgtaagtcccaggtc

SEQ ID NO: 661428 - DNA, 25 bp, Homo sapien
tagtttactgcgtggagacagacca

SEQ ID NO: 661429 - DNA, 25 bp, Homo sapien
ctcagtcagtccatgcctgcagggt

SEQ ID NO: 661430 - DNA, 25 bp, Homo sapien
cagtggttcaatggtcatcccaggg

SEQ ID NO: 661431 - DNA, 25 bp, Homo sapien
cgccagctgcttcgagggctgctag

SEQ ID NO: 661432 - DNA, 25 bp, Homo sapien
aggaaacgtccacggaccctgcttg

SEQ ID NO: 661433 - DNA, 25 bp, Homo sapien
aagtaaacctagctcggcgatcggc

SEQ ID NO: 661434 - DNA, 25 bp, Homo sapien
atcggcgccggagattcgcgagccc

SEQ ID NO: 661435 - DNA, 25 bp, Homo sapien
ggtgaggaggggtttctgccatgca

SEQ ID NO: 661436 - DNA, 25 bp, Homo sapien
gggcgtccgccccttgcaactggga

SEQ ID NO: 661437 - DNA, 25 bp, Homo sapien
ctgccatgcaggtgggcgtccgccc

SEQ ID NO: 661438 - DNA, 25 bp, Homo sapien
gcaggtgggcgtccgccccttgcaa

SEQ ID NO: 661439 - DNA, 25 bp, Homo sapien
agggcgtgaggcagagggcgacctc

SEQ ID NO: 661440 - DNA, 25 bp, Homo sapien
cccaatcccagctttaggaaagagc

SEQ ID NO: 661441 - DNA, 25 bp, Homo sapien
tcccggggtgctcctgagctgagcc

SEQ ID NO: 661442 - DNA, 25 bp, Homo sapien
gaaagagctcgtgagtgtgggctta

SEQ ID NO: 661443 - DNA, 25 bp, Homo sapien
cctccctgggcttacttactgcatt

SEQ ID NO: 661444 - DNA, 25 bp, Homo sapien
actgcattgttttatggtgtctttt

SEQ ID NO: 661445 - DNA, 25 bp, Homo sapien
tgcctggatccttcccgctctctac

SEQ ID NO: 661446 - DNA, 25 bp, Homo sapien
cgctctctacttcacctaggtgtgg

SEQ ID NO: 661447 - DNA, 25 bp, Homo sapien
gattaagggtaggaaccactgcagg

SEQ ID NO: 661448 - DNA, 25 bp, Homo sapien
ggtagtgtgactcgctcaagctcag

SEQ ID NO: 661449 - DNA, 25 bp, Homo sapien
gataattgtatcaggtagacccaca

SEQ ID NO: 661450 - DNA, 25 bp, Homo sapien
gcagtgagccaccaaaccgtgggtg

SEQ ID NO: 661451 - DNA, 25 bp, Homo sapien
gaacgggaattcagacaagctgcat

SEQ ID NO: 661452 - DNA, 25 bp, Homo sapien
gaaaactgcaaagctcggtgctccc

SEQ ID NO: 661453 - DNA, 25 bp, Homo sapien
tttgtaactggagccacgacgtaac

SEQ ID NO: 661454 - DNA, 25 bp, Homo sapien
taccttccccacatctgagagatga

SEQ ID NO: 661455 - DNA, 25 bp, Homo sapien
cagttaacacagaatttactgggag

SEQ ID NO: 661456 - DNA, 25 bp, Homo sapien
cttcatcgtctgtgaagttagtaac

SEQ ID NO: 661457 - DNA, 25 bp, Homo sapien
cttgcccctattccccttgcttgtt

SEQ ID NO: 661458 - DNA, 25 bp, Homo sapien
cacagaatttactgggagcagtttg

SEQ ID NO: 661459 - DNA, 25 bp, Homo sapien
ccttgtggtattcgtatccttggga

SEQ ID NO: 661460 - DNA, 25 bp, Homo sapien
gattttagtccaaagcagtgctgtc

SEQ ID NO: 661461 - DNA, 25 bp, Homo sapien
tctacattcctaagtcgtcctggag

SEQ ID NO: 661462 - DNA, 25 bp, Homo sapien
cagtgctgtccaatgaaggtagaag

SEQ ID NO: 661463 - DNA, 25 bp, Homo sapien
gtgagatgcaattctactacccaag

SEQ ID NO: 661464 - DNA, 25 bp, Homo sapien
gaaggctttgtgatacctgatgaag

SEQ ID NO: 661465 - DNA, 25 bp, Homo sapien
tgatgacatgggtgaaattaccacc

SEQ ID NO: 661466 - DNA, 25 bp, Homo sapien
gtattaacagcctggaccagcagag

SEQ ID NO: 661467 - DNA, 25 bp, Homo sapien
ggattctgcaaaatgtgtctcaccc

SEQ ID NO: 661468 - DNA, 25 bp, Homo sapien
ctgagattgttcagcccctgatgta

SEQ ID NO: 661469 - DNA, 25 bp, Homo sapien
ccagattcagtgattaacaatgcca

SEQ ID NO: 661470 - DNA, 25 bp, Homo sapien
cttttgcggaaaatacagtaccgtg

SEQ ID NO: 661471 - DNA, 25 bp, Homo sapien
ctttctctgtactctattgaggttg

SEQ ID NO: 661472 - DNA, 25 bp, Homo sapien
ctattgaggttgtatccagtagctt

SEQ ID NO: 661473 - DNA, 25 bp, Homo sapien
tctgtactctattgaggttgtatcc

SEQ ID NO: 661474 - DNA, 25 bp, Homo sapien
tactctattgaggttgtatccagta

SEQ ID NO: 661475 - DNA, 25 bp, Homo sapien
gctgtgcaggttggtctgcaactcc

SEQ ID NO: 661476 - DNA, 25 bp, Homo sapien
gggatggggtttgactatgctgtgc

SEQ ID NO: 661477 - DNA, 25 bp, Homo sapien
gggtttgactatgctgtgcaggttg

SEQ ID NO: 661478 - DNA, 25 bp, Homo sapien
tatgctgtgcaggttggtctgcaac

SEQ ID NO: 661479 - DNA, 25 bp, Homo sapien
cctactgccagatgaaggtgtgatc

SEQ ID NO: 661480 - DNA, 25 bp, Homo sapien
tgtgagctgagttactgacctcaac

SEQ ID NO: 661481 - DNA, 25 bp, Homo sapien
gaaaccattggcatctgaacctgta

SEQ ID NO: 661482 - DNA, 25 bp, Homo sapien
ccggcctgaatcatggttttttgaa

SEQ ID NO: 661483 - DNA, 25 bp, Homo sapien
gaagccacgtccctgattgaaatct

SEQ ID NO: 661484 - DNA, 25 bp, Homo sapien
tctgttaatgtggtccttgggcccc

SEQ ID NO: 661485 - DNA, 25 bp, Homo sapien
tgcatcaagtctaggcctgccctga

SEQ ID NO: 661486 - DNA, 25 bp, Homo sapien
ggaaactgtcatatgtagggccaac

SEQ ID NO: 661487 - DNA, 25 bp, Homo sapien
tctcagggctttacccagtggtcct

SEQ ID NO: 661488 - DNA, 25 bp, Homo sapien
tcttgttacagcttcatatggtggc

SEQ ID NO: 661489 - DNA, 25 bp, Homo sapien
catgggcatctcacatccttacagg

SEQ ID NO: 661490 - DNA, 25 bp, Homo sapien
ttaacttgatgtttgagcatgggca

SEQ ID NO: 661491 - DNA, 25 bp, Homo sapien
cccaccattctaatgatagtgaata

SEQ ID NO: 661492 - DNA, 25 bp, Homo sapien
atctaacagatgtaagatgatatct

SEQ ID NO: 661493 - DNA, 25 bp, Homo sapien
ccatactatttctcgtagtggttga

SEQ ID NO: 661494 - DNA, 25 bp, Homo sapien
tattgatatgacatattgatctctt

SEQ ID NO: 661495 - DNA, 25 bp, Homo sapien
taacctcaatgagcacggtgccagg

SEQ ID NO: 661496 - DNA, 25 bp, Homo sapien
tcacattgatggaaacggaggctca

SEQ ID NO: 661497 - DNA, 25 bp, Homo sapien
cacacctgaatggaaggcgaggcgt

SEQ ID NO: 661498 - DNA, 25 bp, Homo sapien
cagtcacagttgctcaggaagtcct

SEQ ID NO: 661499 - DNA, 25 bp, Homo sapien
gtcatgcaggacgagacagggctca

SEQ ID NO: 661500 - DNA, 25 bp, Homo sapien
tcaagtttgcctggaaaagaaagtg

SEQ ID NO: 661501 - DNA, 25 bp, Homo sapien
tgttcgtcatgcataaaaccagtgc

SEQ ID NO: 661502 - DNA, 25 bp, Homo sapien
gttttgagaagagctgacatggcca

SEQ ID NO: 661503 - DNA, 25 bp, Homo sapien
aatctctcttagggtaggggttctg

SEQ ID NO: 661504 - DNA, 25 bp, Homo sapien
ttgaccgcactgaaagcccgggccg

SEQ ID NO: 661505 - DNA, 25 bp, Homo sapien
tacaggcaagtgaagcctgggttcc

SEQ ID NO: 661506 - DNA, 25 bp, Homo sapien
tcgcacgcggtacaggcaagtgaag

SEQ ID NO: 661507 - DNA, 25 bp, Homo sapien
cccagttgcttgagatcttcacctt

SEQ ID NO: 661508 - DNA, 25 bp, Homo sapien
tgaaactgaaatgcccccaggaaca

SEQ ID NO: 661509 - DNA, 25 bp, Homo sapien
gctgaaactgaaatgcccccaggaa

SEQ ID NO: 661510 - DNA, 25 bp, Homo sapien
ctgaaactgaaatgcccccaggaac

SEQ ID NO: 661511 - DNA, 25 bp, Homo sapien
caggctgcctgacaatgagatggtc

SEQ ID NO: 661512 - DNA, 25 bp, Homo sapien
tgaggttggacaggtaaaccttctg

SEQ ID NO: 661513 - DNA, 25 bp, Homo sapien
tgagccaattggatggtcacctggc

SEQ ID NO: 661514 - DNA, 25 bp, Homo sapien
tcaaaggcccagcaattgccaggtg

SEQ ID NO: 661515 - DNA, 25 bp, Homo sapien
tagttccacagctggatccagttcc

SEQ ID NO: 661516 - DNA, 25 bp, Homo sapien
ccttctcatggttataggtgactga

SEQ ID NO: 661517 - DNA, 25 bp, Homo sapien
cgtgtgctcaaagtcaatgctggcc

SEQ ID NO: 661518 - DNA, 25 bp, Homo sapien
tccagtaggagtgggccttctcatg

SEQ ID NO: 661519 - DNA, 25 bp, Homo sapien
aaagtctggcttttcgatgtaatct

SEQ ID NO: 661520 - DNA, 25 bp, Homo sapien
tgtaatctccgtgtatcatcttcat

SEQ ID NO: 661521 - DNA, 25 bp, Homo sapien
ggcttttcgatgtaatctccgtgta

SEQ ID NO: 661522 - DNA, 25 bp, Homo sapien
tcgatgtaatctccgtgtatcatct

SEQ ID NO: 661523 - DNA, 25 bp, Homo sapien
gctacctcggaggtcctggatttcc

SEQ ID NO: 661524 - DNA, 25 bp, Homo sapien
ctcggaggtcctggatttccccact

SEQ ID NO: 661525 - DNA, 25 bp, Homo sapien
gctggttcatgctacctcggaggtc

SEQ ID NO: 661526 - DNA, 25 bp, Homo sapien
catgctacctcggaggtcctggatt

SEQ ID NO: 661527 - DNA, 25 bp, Homo sapien
gctctgcagtggaccatttatgctg

SEQ ID NO: 661528 - DNA, 25 bp, Homo sapien
tctgcagtggaccatttatgctgtc

SEQ ID NO: 661529 - DNA, 25 bp, Homo sapien
agctctgcagtggaccatttatgct

SEQ ID NO: 661530 - DNA, 25 bp, Homo sapien
gcagtggaccatttatgctgtcatc

SEQ ID NO: 661531 - DNA, 25 bp, Homo sapien
cattttcgatggtaagtgaatagaa

SEQ ID NO: 661532 - DNA, 25 bp, Homo sapien
gactttcattttcgatggtaagtga

SEQ ID NO: 661533 - DNA, 25 bp, Homo sapien
ccagactttcattttcgatggtaag

SEQ ID NO: 661534 - DNA, 25 bp, Homo sapien
ctgccagactttcattttcgatggt

SEQ ID NO: 661535 - DNA, 25 bp, Homo sapien
tctgaagcatttcttggcttctaca

SEQ ID NO: 661536 - DNA, 25 bp, Homo sapien
ggagagctttataacttctgaagca

SEQ ID NO: 661537 - DNA, 25 bp, Homo sapien
gaagcatttcttggcttctacaata

SEQ ID NO: 661538 - DNA, 25 bp, Homo sapien
tttggggagagctttataacttctg

SEQ ID NO: 661539 - DNA, 25 bp, Homo sapien
acagcaacacccatcaggcagatgg

SEQ ID NO: 661540 - DNA, 25 bp, Homo sapien
cagcaacacccatcaggcagatggg

SEQ ID NO: 661541 - DNA, 25 bp, Homo sapien
gcccagtgtcctataatcagtgcca

SEQ ID NO: 661542 - DNA, 25 bp, Homo sapien
acgtggcagtgcagtgtcttgccca

SEQ ID NO: 661543 - DNA, 25 bp, Homo sapien
agtgtcttgcccagtgtcctataat

SEQ ID NO: 661544 - DNA, 25 bp, Homo sapien
gtcctataatcagtgccagggccca

SEQ ID NO: 661545 - DNA, 25 bp, Homo sapien
ctgggactgggcagggccctgggac

SEQ ID NO: 661546 - DNA, 25 bp, Homo sapien
ggactgggcagggccctgggacaca

SEQ ID NO: 661547 - DNA, 25 bp, Homo sapien
tgggactgggcagggccctgggaca

SEQ ID NO: 661548 - DNA, 25 bp, Homo sapien
gactgggcagggccctgggacacac

SEQ ID NO: 661549 - DNA, 25 bp, Homo sapien
tgagcttctggcacagcagcttgca

SEQ ID NO: 661550 - DNA, 25 bp, Homo sapien
agcacagaggagcagaatgcctgtc

SEQ ID NO: 661551 - DNA, 25 bp, Homo sapien
gagcagaatgcctgtcttctccatg

SEQ ID NO: 661552 - DNA, 25 bp, Homo sapien
gaatgcctgtcttctccatgagctt

SEQ ID NO: 661553 - DNA, 25 bp, Homo sapien
ctgcacgtgttaaacagaacctgct

SEQ ID NO: 661554 - DNA, 25 bp, Homo sapien
ccagcatgcactgagtcaggcctag

SEQ ID NO: 661555 - DNA, 25 bp, Homo sapien
agcatgcactgagtcaggcctaggg

SEQ ID NO: 661556 - DNA, 25 bp, Homo sapien
gcttggtcattgttgcggacaggca

SEQ ID NO: 661557 - DNA, 25 bp, Homo sapien
cggacaggcaacaggatgttgtcat

SEQ ID NO: 661558 - DNA, 25 bp, Homo sapien
tggtgttccggcctcgctgggcaat

SEQ ID NO: 661559 - DNA, 25 bp, Homo sapien
ggtgttccggcctcgctgggcaatc

SEQ ID NO: 661560 - DNA, 25 bp, Homo sapien
cctgctggtgttccggcctcgctgg

SEQ ID NO: 661561 - DNA, 25 bp, Homo sapien
catcctgctggtgttccggcctcgc

SEQ ID NO: 661562 - DNA, 25 bp, Homo sapien
catcttcgagtagggcgcctgggtc

SEQ ID NO: 661563 - DNA, 25 bp, Homo sapien
tgggccacatcttcgagtagggcgc

SEQ ID NO: 661564 - DNA, 25 bp, Homo sapien
gggtctgggattgtgggccacatct

SEQ ID NO: 661565 - DNA, 25 bp, Homo sapien
ccacatcttcgagtagggcgcctgg

SEQ ID NO: 661566 - DNA, 25 bp, Homo sapien
ttccttctttaggattggggatgga

SEQ ID NO: 661567 - DNA, 25 bp, Homo sapien
atttccttctttaggattggggatg

SEQ ID NO: 661568 - DNA, 25 bp, Homo sapien
aggaggaaggggctgatgcctctga

SEQ ID NO: 661569 - DNA, 25 bp, Homo sapien
gaaggggctgatgcctctgaatgtc

SEQ ID NO: 661570 - DNA, 25 bp, Homo sapien
ggaaggggctgatgcctctgaatgt

SEQ ID NO: 661571 - DNA, 25 bp, Homo sapien
gaggaaggggctgatgcctctgaat

SEQ ID NO: 661572 - DNA, 25 bp, Homo sapien
gtggcagccccagcgcacatgtggg

SEQ ID NO: 661573 - DNA, 25 bp, Homo sapien
gcgcacatgtgggatgagacacttt

SEQ ID NO: 661574 - DNA, 25 bp, Homo sapien
catgtgggatgagacactttggcaa

SEQ ID NO: 661575 - DNA, 25 bp, Homo sapien
ccccagcgcacatgtgggatgagac

SEQ ID NO: 661576 - DNA, 25 bp, Homo sapien
caacataatgtacttctctggctgc

SEQ ID NO: 661577 - DNA, 25 bp, Homo sapien
cctggttaaggctgcgagtgcccct

SEQ ID NO: 661578 - DNA, 25 bp, Homo sapien
cagtctcgccagctcttgcctggtt

SEQ ID NO: 661579 - DNA, 25 bp, Homo sapien
gagtgcccctggccttgcagttcct

SEQ ID NO: 661580 - DNA, 25 bp, Homo sapien
tcactcgtagtggggcaaaccaaac

SEQ ID NO: 661581 - DNA, 25 bp, Homo sapien
tggctcaagtttccatctggaacca

SEQ ID NO: 661582 - DNA, 25 bp, Homo sapien
cttggctcaagtttccatctggaac

SEQ ID NO: 661583 - DNA, 25 bp, Homo sapien
gaggcctttctggtcaggtcttggc

SEQ ID NO: 661584 - DNA, 25 bp, Homo sapien
cttcaaagacagggcactcctccac

SEQ ID NO: 661585 - DNA, 25 bp, Homo sapien
ttcaaagacagggcactcctccaca

SEQ ID NO: 661586 - DNA, 25 bp, Homo sapien
tcttcaaagacagggcactcctcca

SEQ ID NO: 661587 - DNA, 25 bp, Homo sapien
tcaaagacagggcactcctccacag

SEQ ID NO: 661588 - DNA, 25 bp, Homo sapien
ctggcacaagtcaggaatatggcag

SEQ ID NO: 661589 - DNA, 25 bp, Homo sapien
aggaatatggcagggtcgggcttgc

SEQ ID NO: 661590 - DNA, 25 bp, Homo sapien
cagggtcgggcttgctgctcttcac

SEQ ID NO: 661591 - DNA, 25 bp, Homo sapien
acaagtcaggaatatggcagggtcg

SEQ ID NO: 661592 - DNA, 25 bp, Homo sapien
ttcgggtcgtctcccagcatgatgt

SEQ ID NO: 661593 - DNA, 25 bp, Homo sapien
cttcacctcgaaggatgcagacttt

SEQ ID NO: 661594 - DNA, 25 bp, Homo sapien
ctgcttgtcttcacctcgaaggatg

SEQ ID NO: 661595 - DNA, 25 bp, Homo sapien
gggtcgtctcccagcatgatgtgat

SEQ ID NO: 661596 - DNA, 25 bp, Homo sapien
ttgtgtttccgaaggtggaggatga

SEQ ID NO: 661597 - DNA, 25 bp, Homo sapien
ggatgttgtgtttccgaaggtggag

SEQ ID NO: 661598 - DNA, 25 bp, Homo sapien
tgttgtgtttccgaaggtggaggat

SEQ ID NO: 661599 - DNA, 25 bp, Homo sapien
gatgttgtgtttccgaaggtggagg

SEQ ID NO: 661600 - DNA, 25 bp, Homo sapien
cagtggggaacacatcccttggcct

SEQ ID NO: 661601 - DNA, 25 bp, Homo sapien
ctggcttggctttcttccaacagct

SEQ ID NO: 661602 - DNA, 25 bp, Homo sapien
ggcctggcttggctttcttccaaca

SEQ ID NO: 661603 - DNA, 25 bp, Homo sapien
ctgcagtggggaacacatcccttgg

SEQ ID NO: 661604 - DNA, 25 bp, Homo sapien
caacgccttcttacccatgaccagg

SEQ ID NO: 661605 - DNA, 25 bp, Homo sapien
tgaccagggacttcacatccccggt

SEQ ID NO: 661606 - DNA, 25 bp, Homo sapien
ccgcaggggtacagccataatgcct

SEQ ID NO: 661607 - DNA, 25 bp, Homo sapien
gtattccttttcatagcgatcacat

SEQ ID NO: 661608 - DNA, 25 bp, Homo sapien
tctatttagcagtcacaggaaggac

SEQ ID NO: 661609 - DNA, 25 bp, Homo sapien
ggatggatgattcgtacttgactga

SEQ ID NO: 661610 - DNA, 25 bp, Homo sapien
tcaagtgtgagaaaccaggacctac

SEQ ID NO: 661611 - DNA, 25 bp, Homo sapien
caggaaggacagtaacgtgtgaaca

SEQ ID NO: 661612 - DNA, 25 bp, Homo sapien
taagaggaaatgcagccggacagaa

SEQ ID NO: 661613 - DNA, 25 bp, Homo sapien
tgagaacactcctgctatgtaagcc

SEQ ID NO: 661614 - DNA, 25 bp, Homo sapien
cagtctatctggtggttcaactcac

SEQ ID NO: 661615 - DNA, 25 bp, Homo sapien
catggttatggtgagacctgcagtc

SEQ ID NO: 661616 - DNA, 25 bp, Homo sapien
tgcattcattgcacacgtgtcccag

SEQ ID NO: 661617 - DNA, 25 bp, Homo sapien
gtacttgatagaggtggctcctgca

SEQ ID NO: 661618 - DNA, 25 bp, Homo sapien
cgtgtcccaggaaccatcttgggat

SEQ ID NO: 661619 - DNA, 25 bp, Homo sapien
tctggagttgcatttcattcgtgaa

SEQ ID NO: 661620 - DNA, 25 bp, Homo sapien
gtcctaacccaattggagagcctgg

SEQ ID NO: 661621 - DNA, 25 bp, Homo sapien
gggttagccatcctcactcaaatgt

SEQ ID NO: 661622 - DNA, 25 bp, Homo sapien
caattcagtcgtttggtcactcaac

SEQ ID NO: 661623 - DNA, 25 bp, Homo sapien
ggtcatgcccttaagaaagtcctaa

SEQ ID NO: 661624 - DNA, 25 bp, Homo sapien
gagctacccctttgatgatcactga

SEQ ID NO: 661625 - DNA, 25 bp, Homo sapien
ccagacattcatgggaggacggtgt

SEQ ID NO: 661626 - DNA, 25 bp, Homo sapien
cccacacatggtagaaagtcaggta

SEQ ID NO: 661627 - DNA, 25 bp, Homo sapien
tagggctatcccaccaaagatgaat

SEQ ID NO: 661628 - DNA, 25 bp, Homo sapien
caccaggcgtgtgtaacatcccatg

SEQ ID NO: 661629 - DNA, 25 bp, Homo sapien
ctggcccatgtgctggaagatgaca

SEQ ID NO: 661630 - DNA, 25 bp, Homo sapien
cacagttgccttctctccgaggaac

SEQ ID NO: 661631 - DNA, 25 bp, Homo sapien
tgtgctggaagatgacacagttgcc

SEQ ID NO: 661632 - DNA, 25 bp, Homo sapien
cagctttgatggtcaaggcagaggc

SEQ ID NO: 661633 - DNA, 25 bp, Homo sapien
agttctctggctaacgattttcccg

SEQ ID NO: 661634 - DNA, 25 bp, Homo sapien
gattttcccgcctatgtcggcaatg

SEQ ID NO: 661635 - DNA, 25 bp, Homo sapien
ccagggcagatgtggcacaacttcc

SEQ ID NO: 661636 - DNA, 25 bp, Homo sapien
gaaagcttcaagagccatcaccagg

SEQ ID NO: 661637 - DNA, 25 bp, Homo sapien
tcagtgcgtggagcatgggctctca

SEQ ID NO: 661638 - DNA, 25 bp, Homo sapien
ccagtgacagttggcaaggcctctg

SEQ ID NO: 661639 - DNA, 25 bp, Homo sapien
ctttggtggcaacaatggaggacct

SEQ ID NO: 661640 - DNA, 25 bp, Homo sapien
aatagttctatccatctcgttgcag

SEQ ID NO: 661641 - DNA, 25 bp, Homo sapien
cagagatgattcgaagggcaaagac

SEQ ID NO: 661642 - DNA, 25 bp, Homo sapien
cagaagaggctcattccaagggcga

SEQ ID NO: 661643 - DNA, 25 bp, Homo sapien
ccagcatagcagatacgggagggca

SEQ ID NO: 661644 - DNA, 25 bp, Homo sapien
tacaggagtcatgctcatcgtctct

SEQ ID NO: 661645 - DNA, 25 bp, Homo sapien
ttcagacgcgagaagagaccagcca

SEQ ID NO: 661646 - DNA, 25 bp, Homo sapien
tctgacgcgaacacgagatctttgg

SEQ ID NO: 661647 - DNA, 25 bp, Homo sapien
ggctcaaaccgaagtccagctggct

SEQ ID NO: 661648 - DNA, 25 bp, Homo sapien
taaaactccaagtgctgtcagacct

SEQ ID NO: 661649 - DNA, 25 bp, Homo sapien
caggctgaaaaagaggtccactggt

SEQ ID NO: 661650 - DNA, 25 bp, Homo sapien
gactcgggtttttactctgtgcctg

SEQ ID NO: 661651 - DNA, 25 bp, Homo sapien
cctcttccatttgaaaggactcggg

SEQ ID NO: 661652 - DNA, 25 bp, Homo sapien
ctgtaaaagctgttcacatagcagc

SEQ ID NO: 661653 - DNA, 25 bp, Homo sapien
gcagctttaaagagacacgttttcc

SEQ ID NO: 661654 - DNA, 25 bp, Homo sapien
ttaaagagacacgttttccactgac

SEQ ID NO: 661655 - DNA, 25 bp, Homo sapien
ttcacatagcagctttaaagagaca

SEQ ID NO: 661656 - DNA, 25 bp, Homo sapien
gttgcttcgccccttgcagcttatc

SEQ ID NO: 661657 - DNA, 25 bp, Homo sapien
ataaagttgcttcgccccttgcagc

SEQ ID NO: 661658 - DNA, 25 bp, Homo sapien
aaagttgcttcgccccttgcagctt

SEQ ID NO: 661659 - DNA, 25 bp, Homo sapien
ttgcttcgccccttgcagcttatct

SEQ ID NO: 661660 - DNA, 25 bp, Homo sapien
agtcagctctgaggccatcctctca

SEQ ID NO: 661661 - DNA, 25 bp, Homo sapien
gaggattgcccaagtcagctctgag

SEQ ID NO: 661662 - DNA, 25 bp, Homo sapien
tcagctctgaggccatcctctcagg

SEQ ID NO: 661663 - DNA, 25 bp, Homo sapien
ctgttggggaggattgcccaagtca

SEQ ID NO: 661664 - DNA, 25 bp, Homo sapien
ccctaagtgtctgagaactggctga

SEQ ID NO: 661665 - DNA, 25 bp, Homo sapien
tcccctaagtgtctgagaactggct

SEQ ID NO: 661666 - DNA, 25 bp, Homo sapien
ctaagtgtctgagaactggctgagg

SEQ ID NO: 661667 - DNA, 25 bp, Homo sapien
atgtcccctaagtgtctgagaactg

SEQ ID NO: 661668 - DNA, 25 bp, Homo sapien
aaataactaggactgtagcactggg

SEQ ID NO: 661669 - DNA, 25 bp, Homo sapien
gacttcatgtggagcctctagagga

SEQ ID NO: 661670 - DNA, 25 bp, Homo sapien
cccggaattgccctaggtgctagaa

SEQ ID NO: 661671 - DNA, 25 bp, Homo sapien
caaaaggaatctgatggaggcgacc

SEQ ID NO: 661672 - DNA, 25 bp, Homo sapien
gtctgtgtcctgccagcttctggtt

SEQ ID NO: 661673 - DNA, 25 bp, Homo sapien
tagggcatcagtctgtgtcctgcca

SEQ ID NO: 661674 - DNA, 25 bp, Homo sapien
ctagggcatcagtctgtgtcctgcc

SEQ ID NO: 661675 - DNA, 25 bp, Homo sapien
tcagtctgtgtcctgccagcttctg

SEQ ID NO: 661676 - DNA, 25 bp, Homo sapien
tatagctgatctgtgagtccaggga

SEQ ID NO: 661677 - DNA, 25 bp, Homo sapien
gagagaaaatcccacagccatatag

SEQ ID NO: 661678 - DNA, 25 bp, Homo sapien
gacccaagaaactcgagcacatgta

SEQ ID NO: 661679 - DNA, 25 bp, Homo sapien
catgtaagttaaagaggcctgagcc

SEQ ID NO: 661680 - DNA, 25 bp, Homo sapien
gcatcagggaagatcaccttaaggt

SEQ ID NO: 661681 - DNA, 25 bp, Homo sapien
cctgagcccagggttattgacatcc

SEQ ID NO: 661682 - DNA, 25 bp, Homo sapien
ggtcagtggcagagcgtttactgag

SEQ ID NO: 661683 - DNA, 25 bp, Homo sapien
tcagggaagatcaccttaaggtttc

SEQ ID NO: 661684 - DNA, 25 bp, Homo sapien
aaattgtgctcatcggttccttggg

SEQ ID NO: 661685 - DNA, 25 bp, Homo sapien
tagaagagtttatggatttgtcaca

SEQ ID NO: 661686 - DNA, 25 bp, Homo sapien
tggaatccactaccaaatagaagag

SEQ ID NO: 661687 - DNA, 25 bp, Homo sapien
aaggccacatcttagtagtgaaact

SEQ ID NO: 661688 - DNA, 25 bp, Homo sapien
tcttctcggaagatagtgatgagtt

SEQ ID NO: 661689 - DNA, 25 bp, Homo sapien
tcttccgggacatcatccttcagcc

SEQ ID NO: 661690 - DNA, 25 bp, Homo sapien
cttccactagcaccaactgggtaca

SEQ ID NO: 661691 - DNA, 25 bp, Homo sapien
tcggaagatagtgatgagttcctcc

SEQ ID NO: 661692 - DNA, 25 bp, Homo sapien
gactgtctggacgtgatcttcctcc

SEQ ID NO: 661693 - DNA, 25 bp, Homo sapien
caatgaaatcgctgctgaggctcac

SEQ ID NO: 661694 - DNA, 25 bp, Homo sapien
agaggaagcccatgttgtactgaac

SEQ ID NO: 661695 - DNA, 25 bp, Homo sapien
gaacttcccggagcaaagagactgt

SEQ ID NO: 661696 - DNA, 25 bp, Homo sapien
aatatggtgaactaactccacataa

SEQ ID NO: 661697 - DNA, 25 bp, Homo sapien
tggtgaactaactccacataagctt

SEQ ID NO: 661698 - DNA, 25 bp, Homo sapien
tgaactaactccacataagcttctc

SEQ ID NO: 661699 - DNA, 25 bp, Homo sapien
taactccacataagcttctcttgaa

SEQ ID NO: 661700 - DNA, 25 bp, Homo sapien
catggcagggcacacgagtaaatta

SEQ ID NO: 661701 - DNA, 25 bp, Homo sapien
taattccatacagcttgccttggga

SEQ ID NO: 661702 - DNA, 25 bp, Homo sapien
taaaatctcagagtgtgccacacca

SEQ ID NO: 661703 - DNA, 25 bp, Homo sapien
gttagcgaagcaagctccagtgccc

SEQ ID NO: 661704 - DNA, 25 bp, Homo sapien
cccctccgcatggcctccaacacac

SEQ ID NO: 661705 - DNA, 25 bp, Homo sapien
ggtggatctgtttacagatgttatc

SEQ ID NO: 661706 - DNA, 25 bp, Homo sapien
gctggcaggtggatctgtttacaga

SEQ ID NO: 661707 - DNA, 25 bp, Homo sapien
tggcaggtggatctgtttacagatg

SEQ ID NO: 661708 - DNA, 25 bp, Homo sapien
caggtggatctgtttacagatgtta

SEQ ID NO: 661709 - DNA, 25 bp, Homo sapien
tataaagttgttatgctgcctgggc

SEQ ID NO: 661710 - DNA, 25 bp, Homo sapien
tattagtgtcgtttttatgcctgct

SEQ ID NO: 661711 - DNA, 25 bp, Homo sapien
tgtacaaggagattattagtgtcgt

SEQ ID NO: 661712 - DNA, 25 bp, Homo sapien
tgacaacgcacctggtcatcccaga

SEQ ID NO: 661713 - DNA, 25 bp, Homo sapien
gctggttgacataagaggcctagct

SEQ ID NO: 661714 - DNA, 25 bp, Homo sapien
ggctcatggtgttccgaaacaattt

SEQ ID NO: 661715 - DNA, 25 bp, Homo sapien
atttcaagtgagagccctgcgaccc

SEQ ID NO: 661716 - DNA, 25 bp, Homo sapien
cattgtagggtgattaaatggccca

SEQ ID NO: 661717 - DNA, 25 bp, Homo sapien
tcatcaggaaaatccttggggtggg

SEQ ID NO: 661718 - DNA, 25 bp, Homo sapien
tggggagaggtaaaacggatcctca

SEQ ID NO: 661719 - DNA, 25 bp, Homo sapien
ctcatcaggaaaatccttggggtgg

SEQ ID NO: 661720 - DNA, 25 bp, Homo sapien
catcaggaaaatccttggggtgggg

SEQ ID NO: 661721 - DNA, 25 bp, Homo sapien
tgaactggacctccgaattgtcccg

SEQ ID NO: 661722 - DNA, 25 bp, Homo sapien
gatgagcaaaacgaagtcctccttg

SEQ ID NO: 661723 - DNA, 25 bp, Homo sapien
cacgactgagattggtaggcactgc

SEQ ID NO: 661724 - DNA, 25 bp, Homo sapien
tatagttggtggtaaagccacgact

SEQ ID NO: 661725 - DNA, 25 bp, Homo sapien
tcacttcctctagaatggaggcaat

SEQ ID NO: 661726 - DNA, 25 bp, Homo sapien
aatggaggcaataggccgactcctc

SEQ ID NO: 661727 - DNA, 25 bp, Homo sapien
tgttgtcacagcctcgcatgattga

SEQ ID NO: 661728 - DNA, 25 bp, Homo sapien
gaaaggaacaatgcagtagctacac

SEQ ID NO: 661729 - DNA, 25 bp, Homo sapien
tggcgcttgtctggactggcatgac

SEQ ID NO: 661730 - DNA, 25 bp, Homo sapien
caggaccagccaaaatatctaccat

SEQ ID NO: 661731 - DNA, 25 bp, Homo sapien
gaaggtcccggtaggcatcaggacc

SEQ ID NO: 661732 - DNA, 25 bp, Homo sapien
tcagcataggtctcgtccagagaga

SEQ ID NO: 661733 - DNA, 25 bp, Homo sapien
caaacctttcaagacatgaaccatg

SEQ ID NO: 661734 - DNA, 25 bp, Homo sapien
tacttacccacaactacacttgaac

SEQ ID NO: 661735 - DNA, 25 bp, Homo sapien
tctgtgtctggaacttacttaccca

SEQ ID NO: 661736 - DNA, 25 bp, Homo sapien
acctgtaagaaatgagtaagccatt

SEQ ID NO: 661737 - DNA, 25 bp, Homo sapien
tttttacaacggagtattactcagc

SEQ ID NO: 661738 - DNA, 25 bp, Homo sapien
tttacaacggagtattactcagcct

SEQ ID NO: 661739 - DNA, 25 bp, Homo sapien
gagtattactcagccttataaagga

SEQ ID NO: 661740 - DNA, 25 bp, Homo sapien
caacggagtattactcagccttata

SEQ ID NO: 661741 - DNA, 25 bp, Homo sapien
ttccaatcctcagaggaacccggga

SEQ ID NO: 661742 - DNA, 25 bp, Homo sapien
caaggctttaagctgatgtaaacgg

SEQ ID NO: 661743 - DNA, 25 bp, Homo sapien
aaacggttccagatggtctgctcag

SEQ ID NO: 661744 - DNA, 25 bp, Homo sapien
ctagaattccaatcctcagaggaac

SEQ ID NO: 661745 - DNA, 25 bp, Homo sapien
taaagccaggccatggaagaagggt

SEQ ID NO: 661746 - DNA, 25 bp, Homo sapien
catagttcagtgtcaagcagcagag

SEQ ID NO: 661747 - DNA, 25 bp, Homo sapien
tatagccggatagggaaacattaac

SEQ ID NO: 661748 - DNA, 25 bp, Homo sapien
tacgttcacctctgatgggagtcac

SEQ ID NO: 661749 - DNA, 25 bp, Homo sapien
gaggttactggtccgcaggtagcca

SEQ ID NO: 661750 - DNA, 25 bp, Homo sapien
ttactggtccgcaggtagccactct

SEQ ID NO: 661751 - DNA, 25 bp, Homo sapien
ctgtaagatggaccaggctatctct

SEQ ID NO: 661752 - DNA, 25 bp, Homo sapien
ccaggctatctctgtgtcattcaca

SEQ ID NO: 661753 - DNA, 25 bp, Homo sapien
ctggcagccataggtctcgaggtag

SEQ ID NO: 661754 - DNA, 25 bp, Homo sapien
tggcagccataggtctcgaggtaga

SEQ ID NO: 661755 - DNA, 25 bp, Homo sapien
gaagcccaaagggataagcgaagta

SEQ ID NO: 661756 - DNA, 25 bp, Homo sapien
aggaagcccaaagggataagcgaag

SEQ ID NO: 661757 - DNA, 25 bp, Homo sapien
tttctctgccttccaagaagttcat

SEQ ID NO: 661758 - DNA, 25 bp, Homo sapien
tgccttccaagaagttcatccatca

SEQ ID NO: 661759 - DNA, 25 bp, Homo sapien
tctgccttccaagaagttcatccat

SEQ ID NO: 661760 - DNA, 25 bp, Homo sapien
tctctgccttccaagaagttcatcc

SEQ ID NO: 661761 - DNA, 25 bp, Homo sapien
gggaggtgggtcttccacttctgaa

SEQ ID NO: 661762 - DNA, 25 bp, Homo sapien
ggtgggtcttccacttctgaagaca

SEQ ID NO: 661763 - DNA, 25 bp, Homo sapien
gaggtgggtcttccacttctgaaga

SEQ ID NO: 661764 - DNA, 25 bp, Homo sapien
gatagggaggtgggtcttccacttc

SEQ ID NO: 661765 - DNA, 25 bp, Homo sapien
gttgaaaagtcggtccagcagccag

SEQ ID NO: 661766 - DNA, 25 bp, Homo sapien
aatgttgaaaagtcggtccagcagc

SEQ ID NO: 661767 - DNA, 25 bp, Homo sapien
atgttgaaaagtcggtccagcagcc

SEQ ID NO: 661768 - DNA, 25 bp, Homo sapien
gaaaagtcggtccagcagccagcct

SEQ ID NO: 661769 - DNA, 25 bp, Homo sapien
ggtactagagagactgctgtgtgcc

SEQ ID NO: 661770 - DNA, 25 bp, Homo sapien
gtgtgccctgcacatcctcagcgac

SEQ ID NO: 661771 - DNA, 25 bp, Homo sapien
gtgccctgcacatcctcagcgacag

SEQ ID NO: 661772 - DNA, 25 bp, Homo sapien
agacacagaggccaatggtccccac

SEQ ID NO: 661773 - DNA, 25 bp, Homo sapien
tgcacttggaggacacactgtaaag

SEQ ID NO: 661774 - DNA, 25 bp, Homo sapien
ctctgcacttggaggacacactgta

SEQ ID NO: 661775 - DNA, 25 bp, Homo sapien
cacttggaggacacactgtaaaggg

SEQ ID NO: 661776 - DNA, 25 bp, Homo sapien
ttggaggacacactgtaaagggtgc

SEQ ID NO: 661777 - DNA, 25 bp, Homo sapien
cagccctagtaaactggcaggttcc

SEQ ID NO: 661778 - DNA, 25 bp, Homo sapien
tcacggcaggtgctaaacatcagtg

SEQ ID NO: 661779 - DNA, 25 bp, Homo sapien
ccattgtggtagctgcctcacggca

SEQ ID NO: 661780 - DNA, 25 bp, Homo sapien
tctagtggcctatggtactttcagc

SEQ ID NO: 661781 - DNA, 25 bp, Homo sapien
tggaagcaggggtgtgttgaaactg

SEQ ID NO: 661782 - DNA, 25 bp, Homo sapien
tcttgagccagtgcggtggctgaca

SEQ ID NO: 661783 - DNA, 25 bp, Homo sapien
cagacatggaagcaggggtgtgttg

SEQ ID NO: 661784 - DNA, 25 bp, Homo sapien
caatcttgagccagtgcggtggctg

SEQ ID NO: 661785 - DNA, 25 bp, Homo sapien
ggtgcaaagcattttccgcgaatta

SEQ ID NO: 661786 - DNA, 25 bp, Homo sapien
ccttgaaagaagtggaggtgacctg

SEQ ID NO: 661787 - DNA, 25 bp, Homo sapien
ccaggcgccagtcaaaagcgggtgc

SEQ ID NO: 661788 - DNA, 25 bp, Homo sapien
tgtcaaccccacttcacgggtggcg

SEQ ID NO: 661789 - DNA, 25 bp, Homo sapien
agcagcaacagtgcccggggtcccg

SEQ ID NO: 661790 - DNA, 25 bp, Homo sapien
gcagcagcaacagtgcccggggtcc

SEQ ID NO: 661791 - DNA, 25 bp, Homo sapien
ccgcagcagcaacagtgcccggggt

SEQ ID NO: 661792 - DNA, 25 bp, Homo sapien
ctcccgcagcagcaacagtgcccgg

SEQ ID NO: 661793 - DNA, 25 bp, Homo sapien
ctgccggcaagtcggatcccctcac

SEQ ID NO: 661794 - DNA, 25 bp, Homo sapien
ggcaagtcggatcccctcacaggtc

SEQ ID NO: 661795 - DNA, 25 bp, Homo sapien
tcacaggtccgccgctgcgttcata

SEQ ID NO: 661796 - DNA, 25 bp, Homo sapien
ctcacaggtccgccgctgcgttcat

SEQ ID NO: 661797 - DNA, 25 bp, Homo sapien
tccgttccgccgctacttcaggccg

SEQ ID NO: 661798 - DNA, 25 bp, Homo sapien
ccgccgctacttcaggccgggtcat

SEQ ID NO: 661799 - DNA, 25 bp, Homo sapien
ttccgccgctacttcaggccgggtc

SEQ ID NO: 661800 - DNA, 25 bp, Homo sapien
gacttccgttccgccgctacttcag

SEQ ID NO: 661801 - DNA, 25 bp, Homo sapien
cactagccacggacttaagcggcaa

SEQ ID NO: 661802 - DNA, 25 bp, Homo sapien
caaatgtgcgctaaatgtcagatac

SEQ ID NO: 661803 - DNA, 25 bp, Homo sapien
gctccgtggcggtgctgaactttag

SEQ ID NO: 661804 - DNA, 25 bp, Homo sapien
tcctcaaagtgggtgagtgcaaatc

SEQ ID NO: 661805 - DNA, 25 bp, Homo sapien
caatgctaccattgtaagtaagcta

SEQ ID NO: 661806 - DNA, 25 bp, Homo sapien
attgcctcaaagttaagttacctgg

SEQ ID NO: 661807 - DNA, 25 bp, Homo sapien
agaaacaatgctaccattgtaagta

SEQ ID NO: 661808 - DNA, 25 bp, Homo sapien
gctaccattgtaagtaagctaaaag

SEQ ID NO: 661809 - DNA, 25 bp, Homo sapien
agaccacatacactgggccgggctg

SEQ ID NO: 661810 - DNA, 25 bp, Homo sapien
gacccacagaacctaagagataatg

SEQ ID NO: 661811 - DNA, 25 bp, Homo sapien
tctttggcccatgtagtaaaggtct

SEQ ID NO: 661812 - DNA, 25 bp, Homo sapien
aaaggtgccctagtccttggtctgg

SEQ ID NO: 661813 - DNA, 25 bp, Homo sapien
ttcagggctagtgcatccggcgact

SEQ ID NO: 661814 - DNA, 25 bp, Homo sapien
cagggtactccagcttcagatggga

SEQ ID NO: 661815 - DNA, 25 bp, Homo sapien
cacaggctgtttatttatccaagag

SEQ ID NO: 661816 - DNA, 25 bp, Homo sapien
tcccagactcggaatggcttctgtg

SEQ ID NO: 661817 - DNA, 25 bp, Homo sapien
taggccaacagcccgaggcgggtga

SEQ ID NO: 661818 - DNA, 25 bp, Homo sapien
aggccaacagcccgaggcgggtgac

SEQ ID NO: 661819 - DNA, 25 bp, Homo sapien
ctaggccaacagcccgaggcgggtg

SEQ ID NO: 661820 - DNA, 25 bp, Homo sapien
tgaagactatggttttgggacacga

SEQ ID NO: 661821 - DNA, 25 bp, Homo sapien
tttggccgacaggaaggagtggatg

SEQ ID NO: 661822 - DNA, 25 bp, Homo sapien
ctatggttttgggacacgagtgcag

SEQ ID NO: 661823 - DNA, 25 bp, Homo sapien
ttttgggacacgagtgcaggtccag

SEQ ID NO: 661824 - DNA, 25 bp, Homo sapien
ctgtcgcaggagcacagctcgggct

SEQ ID NO: 661825 - DNA, 25 bp, Homo sapien
cagcttctcgaagggctgtcgcagg

SEQ ID NO: 661826 - DNA, 25 bp, Homo sapien
aaggagactggcaccgtcatctgaa

SEQ ID NO: 661827 - DNA, 25 bp, Homo sapien
cccttgtcgatgtgcacagacaggc

SEQ ID NO: 661828 - DNA, 25 bp, Homo sapien
ggacactcccagatcctcccagcac

SEQ ID NO: 661829 - DNA, 25 bp, Homo sapien
agggacactcccagatcctcccagc

SEQ ID NO: 661830 - DNA, 25 bp, Homo sapien
acactcccagatcctcccagcacac

SEQ ID NO: 661831 - DNA, 25 bp, Homo sapien
cagagggacactcccagatcctccc

SEQ ID NO: 661832 - DNA, 25 bp, Homo sapien
gtgagtgtccacaccgtgacgcgtg

SEQ ID NO: 661833 - DNA, 25 bp, Homo sapien
tgcggtgactccacgctgaacaggt

SEQ ID NO: 661834 - DNA, 25 bp, Homo sapien
catccacaagctggcgggtccaggc

SEQ ID NO: 661835 - DNA, 25 bp, Homo sapien
agagagctctgcatcgtagggcact

SEQ ID NO: 661836 - DNA, 25 bp, Homo sapien
gattgactcagcaggagacatctcc

SEQ ID NO: 661837 - DNA, 25 bp, Homo sapien
gcctgcctcagcacctttgcatatg

SEQ ID NO: 661838 - DNA, 25 bp, Homo sapien
tcaggccggaggcaaatagttctgg

SEQ ID NO: 661839 - DNA, 25 bp, Homo sapien
tctggctatactggtgtcatcacac

SEQ ID NO: 661840 - DNA, 25 bp, Homo sapien
ggggagacatactgcccctgcctgt

SEQ ID NO: 661841 - DNA, 25 bp, Homo sapien
tgggggagacatactgcccctgcct

SEQ ID NO: 661842 - DNA, 25 bp, Homo sapien
gggggagacatactgcccctgcctg

SEQ ID NO: 661843 - DNA, 25 bp, Homo sapien
ctggtggcgatgagtggggcagtac

SEQ ID NO: 661844 - DNA, 25 bp, Homo sapien
gagagacaagtagaggagcagttcc

SEQ ID NO: 661845 - DNA, 25 bp, Homo sapien
gcagtacgggctggccggctcaggg

SEQ ID NO: 661846 - DNA, 25 bp, Homo sapien
tctcggggagagacaagtagaggag

SEQ ID NO: 661847 - DNA, 25 bp, Homo sapien
gttagccagccaatctgcttgatgt

SEQ ID NO: 661848 - DNA, 25 bp, Homo sapien
tgacccgcggcgtcagagtattgac

SEQ ID NO: 661849 - DNA, 25 bp, Homo sapien
ggcttggatggcagtcgcccacgac

SEQ ID NO: 661850 - DNA, 25 bp, Homo sapien
gaagagggtgtcttgaccatctgcc

SEQ ID NO: 661851 - DNA, 25 bp, Homo sapien
ctccgggtcattgggggtgcacctc

SEQ ID NO: 661852 - DNA, 25 bp, Homo sapien
catcttcaaggacatgtgtttggcc

SEQ ID NO: 661853 - DNA, 25 bp, Homo sapien
cacctcttcgagacatatgccatct

SEQ ID NO: 661854 - DNA, 25 bp, Homo sapien
tgtttggcctcgctgaagttccggg

SEQ ID NO: 661855 - DNA, 25 bp, Homo sapien
gaaatacggtgagacgtccttcata

SEQ ID NO: 661856 - DNA, 25 bp, Homo sapien
aggtgagtcccagccgaccgaggtc

SEQ ID NO: 661857 - DNA, 25 bp, Homo sapien
caggaggtgagtcccagccgaccga

SEQ ID NO: 661858 - DNA, 25 bp, Homo sapien
cccaccagtagagttcttgaaatac

SEQ ID NO: 661859 - DNA, 25 bp, Homo sapien
gcctgatgcctgctagcccgtgggc

SEQ ID NO: 661860 - DNA, 25 bp, Homo sapien
ctgatgcctgctagcccgtgggcag

SEQ ID NO: 661861 - DNA, 25 bp, Homo sapien
cctgatgcctgctagcccgtgggca

SEQ ID NO: 661862 - DNA, 25 bp, Homo sapien
ctattggattatgtctcaaagggca

SEQ ID NO: 661863 - DNA, 25 bp, Homo sapien
gactattggattatgtctcaaaggg

SEQ ID NO: 661864 - DNA, 25 bp, Homo sapien
gactgactattggattatgtctcaa

SEQ ID NO: 661865 - DNA, 25 bp, Homo sapien
cccaggactgactattggattatgt

SEQ ID NO: 661866 - DNA, 25 bp, Homo sapien
aggagttccattcatgccctcttcc

SEQ ID NO: 661867 - DNA, 25 bp, Homo sapien
tctttgcggccatgggagaactgaa

SEQ ID NO: 661868 - DNA, 25 bp, Homo sapien
actgaacaggagttccattcatgcc

SEQ ID NO: 661869 - DNA, 25 bp, Homo sapien
tgggagaactgaacaggagttccat

SEQ ID NO: 661870 - DNA, 25 bp, Homo sapien
caagttcacatccaaaggacaggcc

SEQ ID NO: 661871 - DNA, 25 bp, Homo sapien
aatgtggtcagtgattcaactccgg

SEQ ID NO: 661872 - DNA, 25 bp, Homo sapien
cttgggccaggagaataggtcgaaa

SEQ ID NO: 661873 - DNA, 25 bp, Homo sapien
gaagtaaggctctagctgacacctg

SEQ ID NO: 661874 - DNA, 25 bp, Homo sapien
aataggcatcttgttctcccggccg

SEQ ID NO: 661875 - DNA, 25 bp, Homo sapien
catgggtagcagaggacaagtcttc

SEQ ID NO: 661876 - DNA, 25 bp, Homo sapien
tggtcagctgccaatcccttgaaga

SEQ ID NO: 661877 - DNA, 25 bp, Homo sapien
aaaaagggcctctgtctggtcagct

SEQ ID NO: 661878 - DNA, 25 bp, Homo sapien
gctccatgtcctgggcgcgctgcca

SEQ ID NO: 661879 - DNA, 25 bp, Homo sapien
tgggcgcgctgccagccccctgcgc

SEQ ID NO: 661880 - DNA, 25 bp, Homo sapien
ctcggctgcccccagacaccacgac

SEQ ID NO: 661881 - DNA, 25 bp, Homo sapien
agacaggaagcctccagctccatgt

SEQ ID NO: 661882 - DNA, 25 bp, Homo sapien
ccgcgccctcggtgtcccgcgccca

SEQ ID NO: 661883 - DNA, 25 bp, Homo sapien
cgcgccctcggtgtcccgcgcccac

SEQ ID NO: 661884 - DNA, 25 bp, Homo sapien
gccttgcgcaccgtcacgcggcgcc

SEQ ID NO: 661885 - DNA, 25 bp, Homo sapien
atgcccagcccaccggcgtcggcct

SEQ ID NO: 661886 - DNA, 25 bp, Homo sapien
gcccaccggcgtcggccttgcgcac

SEQ ID NO: 661887 - DNA, 25 bp, Homo sapien
tgctgatgcccagcccaccggcgtc

SEQ ID NO: 661888 - DNA, 25 bp, Homo sapien
gctccgcggcgccgttgagctgcgc

SEQ ID NO: 661889 - DNA, 25 bp, Homo sapien
ggctccgcggcgccgttgagctgcg

SEQ ID NO: 661890 - DNA, 25 bp, Homo sapien
cggctccgcggcgccgttgagctgc

SEQ ID NO: 661891 - DNA, 25 bp, Homo sapien
cagggtcgccgtcggcggggctcac

SEQ ID NO: 661892 - DNA, 25 bp, Homo sapien
ggtcagcacgtcctccgccagactc

SEQ ID NO: 661893 - DNA, 25 bp, Homo sapien
gtcagcacgtcctccgccagactca

SEQ ID NO: 661894 - DNA, 25 bp, Homo sapien
cgccagactcagcagcacccgctgc

SEQ ID NO: 661895 - DNA, 25 bp, Homo sapien
cagactcagcagcacccgctgccat

SEQ ID NO: 661896 - DNA, 25 bp, Homo sapien
cagctccagcagcccggtgcgcggg

SEQ ID NO: 661897 - DNA, 25 bp, Homo sapien
tccagcagcccggtgcgcggggcgc

SEQ ID NO: 661898 - DNA, 25 bp, Homo sapien
tgcgcggggcgcgcctgccggacgc

SEQ ID NO: 661899 - DNA, 25 bp, Homo sapien
cccgagcccgccccggcgcgcagct

SEQ ID NO: 661900 - DNA, 25 bp, Homo sapien
tccgaccaagcgcccagggcagagg

SEQ ID NO: 661901 - DNA, 25 bp, Homo sapien
ccgccgtgtgggactacctagcggg

SEQ ID NO: 661902 - DNA, 25 bp, Homo sapien
cctcgggcaaatgcaggaggccggg

SEQ ID NO: 661903 - DNA, 25 bp, Homo sapien
gccgcgctcgccctgtcccgctttg

SEQ ID NO: 661904 - DNA, 25 bp, Homo sapien
agtccaagagtctccaggaacgttg

SEQ ID NO: 661905 - DNA, 25 bp, Homo sapien
cactctcaagttgatgataagtgag

SEQ ID NO: 661906 - DNA, 25 bp, Homo sapien
caagagtctccaggaacgttgcaga

SEQ ID NO: 661907 - DNA, 25 bp, Homo sapien
ccaagtccaagagtctccaggaacg

SEQ ID NO: 661908 - DNA, 25 bp, Homo sapien
actggtcccagccacaaacaaatgg

SEQ ID NO: 661909 - DNA, 25 bp, Homo sapien
gttgaccaggctcatgggatgtttt

SEQ ID NO: 661910 - DNA, 25 bp, Homo sapien
cagcatcttcctttgatgcccaggc

SEQ ID NO: 661911 - DNA, 25 bp, Homo sapien
gccacaaacaaatggcataatttct

SEQ ID NO: 661912 - DNA, 25 bp, Homo sapien
tgccagataactggcggagcctgaa

SEQ ID NO: 661913 - DNA, 25 bp, Homo sapien
agcctgaagagtggagaccttatcc

SEQ ID NO: 661914 - DNA, 25 bp, Homo sapien
aaacaggagcaaagaagccaggcgt

SEQ ID NO: 661915 - DNA, 25 bp, Homo sapien
ccttatccagcggatgcttcttggg

SEQ ID NO: 661916 - DNA, 25 bp, Homo sapien
accaccacatctgcctggattttat

SEQ ID NO: 661917 - DNA, 25 bp, Homo sapien
ccaccaccacatctgcctggatttt

SEQ ID NO: 661918 - DNA, 25 bp, Homo sapien
caccaccacatctgcctggatttta

SEQ ID NO: 661919 - DNA, 25 bp, Homo sapien
gcccaccaccacatctgcctggatt

SEQ ID NO: 661920 - DNA, 25 bp, Homo sapien
gcatgcgcaaaagccatcaggcctg

SEQ ID NO: 661921 - DNA, 25 bp, Homo sapien
tcaggcctgtacctggagaactcag

SEQ ID NO: 661922 - DNA, 25 bp, Homo sapien
gaactcaggtgagacgttgccactc

SEQ ID NO: 661923 - DNA, 25 bp, Homo sapien
gcatttagaatacttcaggccaaaa

SEQ ID NO: 661924 - DNA, 25 bp, Homo sapien
cagtagttggctacctgggttcaca

SEQ ID NO: 661925 - DNA, 25 bp, Homo sapien
tacacccgcccgatgttgagggttg

SEQ ID NO: 661926 - DNA, 25 bp, Homo sapien
caggcttccccatttaggtagtgac

SEQ ID NO: 661927 - DNA, 25 bp, Homo sapien
ttgccggcgggcaagaatcattttg

SEQ ID NO: 661928 - DNA, 25 bp, Homo sapien
cacgtgaaagggaggctttacgctt

SEQ ID NO: 661929 - DNA, 25 bp, Homo sapien
aaaagtagatacacccagcttgcag

SEQ ID NO: 661930 - DNA, 25 bp, Homo sapien
ggcttgcaaaggtacagcatctctg

SEQ ID NO: 661931 - DNA, 25 bp, Homo sapien
ctaaagaggcggatagtgattactc

SEQ ID NO: 661932 - DNA, 25 bp, Homo sapien
ccctgaaagcttggaggctaatgaa

SEQ ID NO: 661933 - DNA, 25 bp, Homo sapien
taccaaggaagggatctcataatgc

SEQ ID NO: 661934 - DNA, 25 bp, Homo sapien
tcaataagcagatacgtcagccgag

SEQ ID NO: 661935 - DNA, 25 bp, Homo sapien
gctagtgtttgtacatgtgacagac

SEQ ID NO: 661936 - DNA, 25 bp, Homo sapien
ggtgggtcagagacctcaagtttga

SEQ ID NO: 661937 - DNA, 25 bp, Homo sapien
tgctcaatgagggataatgttattt

SEQ ID NO: 661938 - DNA, 25 bp, Homo sapien
tgttctgcattgacactatagtttt

SEQ ID NO: 661939 - DNA, 25 bp, Homo sapien
tcaaaaattacagtgtcgagaaggc

SEQ ID NO: 661940 - DNA, 25 bp, Homo sapien
tgcatggagtccaggtgttttactt

SEQ ID NO: 661941 - DNA, 25 bp, Homo sapien
cttgcctgatctacagctaacattg

SEQ ID NO: 661942 - DNA, 25 bp, Homo sapien
gcttgcctgatctacagctaacatt

SEQ ID NO: 661943 - DNA, 25 bp, Homo sapien
ttgcctgatctacagctaacattgt

SEQ ID NO: 661944 - DNA, 25 bp, Homo sapien
tgtcaaacacccaaattcagtatga

SEQ ID NO: 661945 - DNA, 25 bp, Homo sapien
tagctttttataggatactgacagg

SEQ ID NO: 661946 - DNA, 25 bp, Homo sapien
tactgacaggttattgtgggtactc

SEQ ID NO: 661947 - DNA, 25 bp, Homo sapien
tattgtgggtactccaatcttgttc

SEQ ID NO: 661948 - DNA, 25 bp, Homo sapien
cctcttcatctgtgtttaggatttt

SEQ ID NO: 661949 - DNA, 25 bp, Homo sapien
tcatctgtgtttaggattttgaaat

SEQ ID NO: 661950 - DNA, 25 bp, Homo sapien
atctgtgtttaggattttgaaatgc

SEQ ID NO: 661951 - DNA, 25 bp, Homo sapien
tcttcatctgtgtttaggattttga

SEQ ID NO: 661952 - DNA, 25 bp, Homo sapien
gatgtctgcatctcaagtgtatttg

SEQ ID NO: 661953 - DNA, 25 bp, Homo sapien
gatttgatctgataaatcaaactca

SEQ ID NO: 661954 - DNA, 25 bp, Homo sapien
ctgcatctcaagtgtatttgtagaa

SEQ ID NO: 661955 - DNA, 25 bp, Homo sapien
aaatcaaactcagatgtctgcatct

SEQ ID NO: 661956 - DNA, 25 bp, Homo sapien
agctgggagtataggcgtgccacca

SEQ ID NO: 661957 - DNA, 25 bp, Homo sapien
gctgggagtataggcgtgccaccat

SEQ ID NO: 661958 - DNA, 25 bp, Homo sapien
ccaagcatattttcatagcgagggt

SEQ ID NO: 661959 - DNA, 25 bp, Homo sapien
tcatgagaatcttactactaggagg

SEQ ID NO: 661960 - DNA, 25 bp, Homo sapien
ggactggaggcacataatgcaataa

SEQ ID NO: 661961 - DNA, 25 bp, Homo sapien
tcatagcgagggtccttgttggact

SEQ ID NO: 661962 - DNA, 25 bp, Homo sapien
gtttcatacctgtgatttgtactgt

SEQ ID NO: 661963 - DNA, 25 bp, Homo sapien
acttctttgaaacaagttgtttcat

SEQ ID NO: 661964 - DNA, 25 bp, Homo sapien
cctgtgatttgtactgtaactcaag

SEQ ID NO: 661965 - DNA, 25 bp, Homo sapien
cctaatttctaaagattactcatct

SEQ ID NO: 661966 - DNA, 25 bp, Homo sapien
ctcttatccccatcgtgtcatcagt

SEQ ID NO: 661967 - DNA, 25 bp, Homo sapien
ttatccccatcgtgtcatcagttcc

SEQ ID NO: 661968 - DNA, 25 bp, Homo sapien
tcttatccccatcgtgtcatcagtt

SEQ ID NO: 661969 - DNA, 25 bp, Homo sapien
cttatccccatcgtgtcatcagttc

SEQ ID NO: 661970 - DNA, 25 bp, Homo sapien
cacagctaagatctattacagaggc

SEQ ID NO: 661971 - DNA, 25 bp, Homo sapien
tgcctctcctgaatggtaacacaga

SEQ ID NO: 661972 - DNA, 25 bp, Homo sapien
caggacttgacatacagttgtgctc

SEQ ID NO: 661973 - DNA, 25 bp, Homo sapien
cagtctggaggaacccatctgcagg

SEQ ID NO: 661974 - DNA, 25 bp, Homo sapien
agatgcctgcacacccggtaagaaa

SEQ ID NO: 661975 - DNA, 25 bp, Homo sapien
atctaaaatctatgggagtagcttc

SEQ ID NO: 661976 - DNA, 25 bp, Homo sapien
tatgggtcgactgttccagaagcct

SEQ ID NO: 661977 - DNA, 25 bp, Homo sapien
ccagacatgagtatttttcgggaac

SEQ ID NO: 661978 - DNA, 25 bp, Homo sapien
tgtgacagctatcgacaccaacgga

SEQ ID NO: 661979 - DNA, 25 bp, Homo sapien
tgttggaacccgtgcatgtagctgc

SEQ ID NO: 661980 - DNA, 25 bp, Homo sapien
tccactgaagctgacttagccggcc

SEQ ID NO: 661981 - DNA, 25 bp, Homo sapien
tagctgccgggtcatcagcaagaaa

SEQ ID NO: 661982 - DNA, 25 bp, Homo sapien
catctggaacgctgtgggcatcttc

SEQ ID NO: 661983 - DNA, 25 bp, Homo sapien
caccacttggctatttgcacagtca

SEQ ID NO: 661984 - DNA, 25 bp, Homo sapien
catgttggccaactagtatcgtcaa

SEQ ID NO: 661985 - DNA, 25 bp, Homo sapien
gaatgaggctcagttgtggatagtc

SEQ ID NO: 661986 - DNA, 25 bp, Homo sapien
ttttgatgggagtctgaggaccccg

SEQ ID NO: 661987 - DNA, 25 bp, Homo sapien
gtaagtttaattggccctgctccag

SEQ ID NO: 661988 - DNA, 25 bp, Homo sapien
aggaaaagggatccacacaggtagc

SEQ ID NO: 661989 - DNA, 25 bp, Homo sapien
gctccagctggcctttgaagcacaa

SEQ ID NO: 661990 - DNA, 25 bp, Homo sapien
aagccacagtccttggtggggaact

SEQ ID NO: 661991 - DNA, 25 bp, Homo sapien
taagccacagtccttggtggggaac

SEQ ID NO: 661992 - DNA, 25 bp, Homo sapien
ttaagccacagtccttggtggggaa

SEQ ID NO: 661993 - DNA, 25 bp, Homo sapien
tgacagcacctcagctaccaggtgg

SEQ ID NO: 661994 - DNA, 25 bp, Homo sapien
cacacagaagtcacgagggcctctg

SEQ ID NO: 661995 - DNA, 25 bp, Homo sapien
agaggctgatctgcaaacctgggca

SEQ ID NO: 661996 - DNA, 25 bp, Homo sapien
tccaggttccttgcgtggttcccag

SEQ ID NO: 661997 - DNA, 25 bp, Homo sapien
cagtcaagcgcaggctcttcagaaa

SEQ ID NO: 661998 - DNA, 25 bp, Homo sapien
tcagtcaagcgcaggctcttcagaa

SEQ ID NO: 661999 - DNA, 25 bp, Homo sapien
agtcaagcgcaggctcttcagaaac

SEQ ID NO: 662000 - DNA, 25 bp, Homo sapien
aatgaaaacagaatgaccggatggc

SEQ ID NO: 662001 - DNA, 25 bp, Homo sapien
ttgtacggtagtgagctcttcaaaa

SEQ ID NO: 662002 - DNA, 25 bp, Homo sapien
gaaaacagaatgaccggatggccat

SEQ ID NO: 662003 - DNA, 25 bp, Homo sapien
tcagcacagctggaattgtacggta

SEQ ID NO: 662004 - DNA, 25 bp, Homo sapien
accaaacggaagaatagccagcgga

SEQ ID NO: 662005 - DNA, 25 bp, Homo sapien
aaactgggtggtagcgtgtctgaac

SEQ ID NO: 662006 - DNA, 25 bp, Homo sapien
cggagcatggactgttccagcacgg

SEQ ID NO: 662007 - DNA, 25 bp, Homo sapien
cagatggccagctgtcgagagcagc

SEQ ID NO: 662008 - DNA, 25 bp, Homo sapien
gcatcgacgtgctcatttccaaaga

SEQ ID NO: 662009 - DNA, 25 bp, Homo sapien
tgcctctttcctcgggcatcgacgt

SEQ ID NO: 662010 - DNA, 25 bp, Homo sapien
ttccaaagatgatggtgcaggtgac

SEQ ID NO: 662011 - DNA, 25 bp, Homo sapien
gatgatggtgcaggtgaccttttcc

SEQ ID NO: 662012 - DNA, 25 bp, Homo sapien
agaccccatctggtcgagcctacgg

SEQ ID NO: 662013 - DNA, 25 bp, Homo sapien
ccatccctaccttggagtcggcaga

SEQ ID NO: 662014 - DNA, 25 bp, Homo sapien
tacggctgcccagtgtacactcagt

SEQ ID NO: 662015 - DNA, 25 bp, Homo sapien
cttataccaaatagggcatgtgcgc

SEQ ID NO: 662016 - DNA, 25 bp, Homo sapien
aaagtagtcaataaaaaggctatat

SEQ ID NO: 662017 - DNA, 25 bp, Homo sapien
taaaaaggctatattccttttctgc

SEQ ID NO: 662018 - DNA, 25 bp, Homo sapien
taaagtagtcaataaaaaggctata

SEQ ID NO: 662019 - DNA, 25 bp, Homo sapien
aggctatattccttttctgcctcaa

SEQ ID NO: 662020 - DNA, 25 bp, Homo sapien
gggcctcaactggttctagtcgtgg

SEQ ID NO: 662021 - DNA, 25 bp, Homo sapien
tctagtcgtggcctgaagagcatcc

SEQ ID NO: 662022 - DNA, 25 bp, Homo sapien
aaagccagctgcaccaactggtcag

SEQ ID NO: 662023 - DNA, 25 bp, Homo sapien
caactggttctagtcgtggcctgaa

SEQ ID NO: 662024 - DNA, 25 bp, Homo sapien
ctttggcaccgtgaaaaggcggcag

SEQ ID NO: 662025 - DNA, 25 bp, Homo sapien
gctgtccggaaacactactgaacct

SEQ ID NO: 662026 - DNA, 25 bp, Homo sapien
tgtcaaccaattataagctgtccgg

SEQ ID NO: 662027 - DNA, 25 bp, Homo sapien
actcaagagttggagggagattgcc

SEQ ID NO: 662028 - DNA, 25 bp, Homo sapien
cttacagtggaagcgtttctgtggc

SEQ ID NO: 662029 - DNA, 25 bp, Homo sapien
gctccttacagtggaagcgtttctg

SEQ ID NO: 662030 - DNA, 25 bp, Homo sapien
ctgctccttacagtggaagcgtttc

SEQ ID NO: 662031 - DNA, 25 bp, Homo sapien
aagcgtttctgtggcggacgggtgg

SEQ ID NO: 662032 - DNA, 25 bp, Homo sapien
tgggaatgcccaccctgaactggtg

SEQ ID NO: 662033 - DNA, 25 bp, Homo sapien
caccagggcgttcaggaacatggaa

SEQ ID NO: 662034 - DNA, 25 bp, Homo sapien
ttacaacacaggacgtaaagcaggg

SEQ ID NO: 662035 - DNA, 25 bp, Homo sapien
cctctgtctggaaaactgacgccaa

SEQ ID NO: 662036 - DNA, 25 bp, Homo sapien
gggaccactgcctttattgcctctg

SEQ ID NO: 662037 - DNA, 25 bp, Homo sapien
ggaccactgcctttattgcctctgt

SEQ ID NO: 662038 - DNA, 25 bp, Homo sapien
agggaccactgcctttattgcctct

SEQ ID NO: 662039 - DNA, 25 bp, Homo sapien
tgcaaacgatatgcaaatgacatgc

SEQ ID NO: 662040 - DNA, 25 bp, Homo sapien
tactgccctgagaatgggtgggatg

SEQ ID NO: 662041 - DNA, 25 bp, Homo sapien
aattattgctacttggccaggtcac

SEQ ID NO: 662042 - DNA, 25 bp, Homo sapien
tgaccctggacccaaattattgcta

SEQ ID NO: 662043 - DNA, 25 bp, Homo sapien
gcccagcctcggaggcaaggtttga

SEQ ID NO: 662044 - DNA, 25 bp, Homo sapien
agatggcctgaggcccacccagaca

SEQ ID NO: 662045 - DNA, 25 bp, Homo sapien
caagtcctggtctttgcgctgggct

SEQ ID NO: 662046 - DNA, 25 bp, Homo sapien
aagaaagcaggaccctcgctaggcg

SEQ ID NO: 662047 - DNA, 25 bp, Homo sapien
cggggccctcggcgtgtgcaggtct

SEQ ID NO: 662048 - DNA, 25 bp, Homo sapien
tcccggggccctcggcgtgtgcagg

SEQ ID NO: 662049 - DNA, 25 bp, Homo sapien
ggccctcggcgtgtgcaggtctggc

SEQ ID NO: 662050 - DNA, 25 bp, Homo sapien
ggtcccggggccctcggcgtgtgca

SEQ ID NO: 662051 - DNA, 25 bp, Homo sapien
gttgttattcattatccaccaggag

SEQ ID NO: 662052 - DNA, 25 bp, Homo sapien
ttgttattcattatccaccaggagg

SEQ ID NO: 662053 - DNA, 25 bp, Homo sapien
tcagttgttattcattatccaccag

SEQ ID NO: 662054 - DNA, 25 bp, Homo sapien
cagttgttattcattatccaccagg

SEQ ID NO: 662055 - DNA, 25 bp, Homo sapien
gggcccgcaggtggtcgatgaggat

SEQ ID NO: 662056 - DNA, 25 bp, Homo sapien
cggggcccgcaggtggtcgatgagg

SEQ ID NO: 662057 - DNA, 25 bp, Homo sapien
gcccgcaggtggtcgatgaggatgc

SEQ ID NO: 662058 - DNA, 25 bp, Homo sapien
tccggggcccgcaggtggtcgatga

SEQ ID NO: 662059 - DNA, 25 bp, Homo sapien
ctgccagaactcatacagggtgaag

SEQ ID NO: 662060 - DNA, 25 bp, Homo sapien
catcctgccagaactcatacagggt

SEQ ID NO: 662061 - DNA, 25 bp, Homo sapien
tcctgccagaactcatacagggtga

SEQ ID NO: 662062 - DNA, 25 bp, Homo sapien
cctgccagaactcatacagggtgaa

SEQ ID NO: 662063 - DNA, 25 bp, Homo sapien
gaagtccacatagcagcgcagggct

SEQ ID NO: 662064 - DNA, 25 bp, Homo sapien
ctgtgaagtccacatagcagcgcag

SEQ ID NO: 662065 - DNA, 25 bp, Homo sapien
agtccacatagcagcgcagggctcg

SEQ ID NO: 662066 - DNA, 25 bp, Homo sapien
tgtgaagtccacatagcagcgcagg

SEQ ID NO: 662067 - DNA, 25 bp, Homo sapien
caggaggttctcagctgtttttctg

SEQ ID NO: 662068 - DNA, 25 bp, Homo sapien
ctggcccctagccttcttgactgat

SEQ ID NO: 662069 - DNA, 25 bp, Homo sapien
tggcctccaggaggttctcagctgt

SEQ ID NO: 662070 - DNA, 25 bp, Homo sapien
acacctggcccctagccttcttgac

SEQ ID NO: 662071 - DNA, 25 bp, Homo sapien
ttggccaggtcctcttcacgcaggg

SEQ ID NO: 662072 - DNA, 25 bp, Homo sapien
gtcctcttcacgcaggggttccagc

SEQ ID NO: 662073 - DNA, 25 bp, Homo sapien
ccaggtcctcttcacgcaggggttc

SEQ ID NO: 662074 - DNA, 25 bp, Homo sapien
tcttcacgcaggggttccagccggg

SEQ ID NO: 662075 - DNA, 25 bp, Homo sapien
ggcctggctctggtggataccagga

SEQ ID NO: 662076 - DNA, 25 bp, Homo sapien
tggtggataccaggagggtcctccc

SEQ ID NO: 662077 - DNA, 25 bp, Homo sapien
ggcacagagtgtgggccgggcctcc

SEQ ID NO: 662078 - DNA, 25 bp, Homo sapien
tggctctggtggataccaggagggt

SEQ ID NO: 662079 - DNA, 25 bp, Homo sapien
gcactcgagctggtcgatgagctcc

SEQ ID NO: 662080 - DNA, 25 bp, Homo sapien
cgatgagctcctggaggcggttcac

SEQ ID NO: 662081 - DNA, 25 bp, Homo sapien
tcgatgagctcctggaggcggttca

SEQ ID NO: 662082 - DNA, 25 bp, Homo sapien
cttgcactcgagctggtcgatgagc

SEQ ID NO: 662083 - DNA, 25 bp, Homo sapien
tgcatctcggcctctgagctgcgcc

SEQ ID NO: 662084 - DNA, 25 bp, Homo sapien
agccgccactgcatctcggcctctg

SEQ ID NO: 662085 - DNA, 25 bp, Homo sapien
gccactgcatctcggcctctgagct

SEQ ID NO: 662086 - DNA, 25 bp, Homo sapien
tggagccgccactgcatctcggcct

SEQ ID NO: 662087 - DNA, 25 bp, Homo sapien
tcagggctcggcgtcctgcccgccg

SEQ ID NO: 662088 - DNA, 25 bp, Homo sapien
tggatgaccggctgacactcctcag

SEQ ID NO: 662089 - DNA, 25 bp, Homo sapien
accaggtggatgaccggctgacact

SEQ ID NO: 662090 - DNA, 25 bp, Homo sapien
gggaccaggtggatgaccggctgac

SEQ ID NO: 662091 - DNA, 25 bp, Homo sapien
gcgcctccacgctctctgcatctga

SEQ ID NO: 662092 - DNA, 25 bp, Homo sapien
ctgcgcctccacgctctctgcatct

SEQ ID NO: 662093 - DNA, 25 bp, Homo sapien
tgcgcctccacgctctctgcatctg

SEQ ID NO: 662094 - DNA, 25 bp, Homo sapien
cgcctccacgctctctgcatctgac

SEQ ID NO: 662095 - DNA, 25 bp, Homo sapien
agaggaagtgaggctcacagggccg

SEQ ID NO: 662096 - DNA, 25 bp, Homo sapien
gaagtgaggctcacagggccgagga

SEQ ID NO: 662097 - DNA, 25 bp, Homo sapien
aggaagtgaggctcacagggccgag

SEQ ID NO: 662098 - DNA, 25 bp, Homo sapien
ctagaggaagtgaggctcacagggc

SEQ ID NO: 662099 - DNA, 25 bp, Homo sapien
tgggactccgaggcctagccccaaa

SEQ ID NO: 662100 - DNA, 25 bp, Homo sapien
gtgcactagccccacaggttgacag

SEQ ID NO: 662101 - DNA, 25 bp, Homo sapien
gcttccccgcccgaaaatgcaggct

SEQ ID NO: 662102 - DNA, 25 bp, Homo sapien
gtacaatgggcgcttgtgcactagc

SEQ ID NO: 662103 - DNA, 25 bp, Homo sapien
gcttgcagctggctcaccgtctccc

SEQ ID NO: 662104 - DNA, 25 bp, Homo sapien
tggctcaccgtctcccgcagcagga

SEQ ID NO: 662105 - DNA, 25 bp, Homo sapien
cctccagcgagctctgaagggcttg

SEQ ID NO: 662106 - DNA, 25 bp, Homo sapien
aactggtccactttggaggccctct

SEQ ID NO: 662107 - DNA, 25 bp, Homo sapien
gaagtgcctggcctctctggacctc

SEQ ID NO: 662108 - DNA, 25 bp, Homo sapien
ctgcccagcgaagtgcctggcctct

SEQ ID NO: 662109 - DNA, 25 bp, Homo sapien
agtgcctggcctctctggacctcat

SEQ ID NO: 662110 - DNA, 25 bp, Homo sapien
gcccagcgaagtgcctggcctctct

SEQ ID NO: 662111 - DNA, 25 bp, Homo sapien
tcagccatcggatgggacctcctgg

SEQ ID NO: 662112 - DNA, 25 bp, Homo sapien
gccaggcttatgagctaggagacag

SEQ ID NO: 662113 - DNA, 25 bp, Homo sapien
tccgaggagactccagaagccccat

SEQ ID NO: 662114 - DNA, 25 bp, Homo sapien
ctcagagccaagcactactgcaaga

SEQ ID NO: 662115 - DNA, 25 bp, Homo sapien
tacatgcattgcctcatttatgatc

SEQ ID NO: 662116 - DNA, 25 bp, Homo sapien
gcagggccaaaattcatacccaaac

SEQ ID NO: 662117 - DNA, 25 bp, Homo sapien
ggccaaaattcatacccaaaccaca

SEQ ID NO: 662118 - DNA, 25 bp, Homo sapien
gcctcatttatgatcattagcccag

SEQ ID NO: 662119 - DNA, 25 bp, Homo sapien
tgtgggccctggaaggcggtgctca

SEQ ID NO: 662120 - DNA, 25 bp, Homo sapien
tgggccctggaaggcggtgctcaga

SEQ ID NO: 662121 - DNA, 25 bp, Homo sapien
ctgtgggccctggaaggcggtgctc

SEQ ID NO: 662122 - DNA, 25 bp, Homo sapien
ggccctggaaggcggtgctcagagc

SEQ ID NO: 662123 - DNA, 25 bp, Homo sapien
ggtggagatcccaacacggagaatc

SEQ ID NO: 662124 - DNA, 25 bp, Homo sapien
cataaacttagacggagctggtctc

SEQ ID NO: 662125 - DNA, 25 bp, Homo sapien
tgcaattggtgaggtcagcccgtga

SEQ ID NO: 662126 - DNA, 25 bp, Homo sapien
tgtgggccatcgtccccagtggtga

SEQ ID NO: 662127 - DNA, 25 bp, Homo sapien
aggatcgtgctgattctccccctgg

SEQ ID NO: 662128 - DNA, 25 bp, Homo sapien
gcagccgctggccaacgctgggcaa

SEQ ID NO: 662129 - DNA, 25 bp, Homo sapien
cggagcgggcgaaggtagcgagcgc

SEQ ID NO: 662130 - DNA, 25 bp, Homo sapien
aacggattgactacgcgtccggcgc

SEQ ID NO: 662131 - DNA, 25 bp, Homo sapien
taaaaggatcagtcctagccatctc

SEQ ID NO: 662132 - DNA, 25 bp, Homo sapien
ccttcgccctcaaagttctgctcct

SEQ ID NO: 662133 - DNA, 25 bp, Homo sapien
tctaaaaggatcagtcctagccatc

SEQ ID NO: 662134 - DNA, 25 bp, Homo sapien
cacaaggccccttcgccctcaaagt

SEQ ID NO: 662135 - DNA, 25 bp, Homo sapien
gctgctgtacgatgtgttcaactga

SEQ ID NO: 662136 - DNA, 25 bp, Homo sapien
tccagcgccgctggataactcgggc

SEQ ID NO: 662137 - DNA, 25 bp, Homo sapien
acactgtttcctggcttcgccgagc

SEQ ID NO: 662138 - DNA, 25 bp, Homo sapien
taactcgggccatgtaccaggagtg

SEQ ID NO: 662139 - DNA, 25 bp, Homo sapien
gctctattgttatgatggtttacag

SEQ ID NO: 662140 - DNA, 25 bp, Homo sapien
ctagctctataaccctgagtcaaga

SEQ ID NO: 662141 - DNA, 25 bp, Homo sapien
atttgaacccaagcccctagctcta

SEQ ID NO: 662142 - DNA, 25 bp, Homo sapien
cacagtgatgtatgaagggcagctc

SEQ ID NO: 662143 - DNA, 25 bp, Homo sapien
gatgcccactgcctcacagtggatc

SEQ ID NO: 662144 - DNA, 25 bp, Homo sapien
tgtggaggatcccacagcacagcag

SEQ ID NO: 662145 - DNA, 25 bp, Homo sapien
gcccactgcctcacagtggatcccc

SEQ ID NO: 662146 - DNA, 25 bp, Homo sapien
tggatcccccaccatcagccactcc

SEQ ID NO: 662147 - DNA, 25 bp, Homo sapien
gcaccggccggtagacacccaggtg

SEQ ID NO: 662148 - DNA, 25 bp, Homo sapien
ggttcagcgattccaatgcagccag

SEQ ID NO: 662149 - DNA, 25 bp, Homo sapien
atgcagccagcaccggccggtagac

SEQ ID NO: 662150 - DNA, 25 bp, Homo sapien
ggcagcgagcactgcacggttcagc

SEQ ID NO: 662151 - DNA, 25 bp, Homo sapien
aaaagagctcccatgggcctactca

SEQ ID NO: 662152 - DNA, 25 bp, Homo sapien
aggagaccagcaacagtcccttgcc

SEQ ID NO: 662153 - DNA, 25 bp, Homo sapien
aagcaggccttatatcctgagccca

SEQ ID NO: 662154 - DNA, 25 bp, Homo sapien
agtcccttgccacacgtaccctggg

SEQ ID NO: 662155 - DNA, 25 bp, Homo sapien
cacacagtttttctgtttctaaatt

SEQ ID NO: 662156 - DNA, 25 bp, Homo sapien
acacagtttttctgtttctaaattg

SEQ ID NO: 662157 - DNA, 25 bp, Homo sapien
ggctgagaaccccatcggcaaagta

SEQ ID NO: 662158 - DNA, 25 bp, Homo sapien
atgcccatcaatgccgctgaacagt

SEQ ID NO: 662159 - DNA, 25 bp, Homo sapien
tgagaaccccatcggcaaagtaatt

SEQ ID NO: 662160 - DNA, 25 bp, Homo sapien
tcaatgccgctgaacagttcctgca

SEQ ID NO: 662161 - DNA, 25 bp, Homo sapien
acagagggccacgtacaggaagtgc

SEQ ID NO: 662162 - DNA, 25 bp, Homo sapien
tgtgtgaaagtcagcccctatctcc

SEQ ID NO: 662163 - DNA, 25 bp, Homo sapien
aagtgcctcacacaaggagcctggg

SEQ ID NO: 662164 - DNA, 25 bp, Homo sapien
tgcaaagacccaagttcgagcctat

SEQ ID NO: 662165 - DNA, 25 bp, Homo sapien
cattcttgtctgctctgcggaaaac

SEQ ID NO: 662166 - DNA, 25 bp, Homo sapien
tcgggcgcgagctgggggtgccgcg

SEQ ID NO: 662167 - DNA, 25 bp, Homo sapien
gctcgggctcggctgcggttgctgc

SEQ ID NO: 662168 - DNA, 25 bp, Homo sapien
ttgctgccgaccctggacgccgcgg

SEQ ID NO: 662169 - DNA, 25 bp, Homo sapien
tcggtgtggctagaggccgcccctt

SEQ ID NO: 662170 - DNA, 25 bp, Homo sapien
cggcggactcggtgtggctagaggc

SEQ ID NO: 662171 - DNA, 25 bp, Homo sapien
ccggtcctctatcccgctccctcct

SEQ ID NO: 662172 - DNA, 25 bp, Homo sapien
agccacactgctttctctccggtcc

SEQ ID NO: 662173 - DNA, 25 bp, Homo sapien
actgctttctctccggtcctctatc

SEQ ID NO: 662174 - DNA, 25 bp, Homo sapien
aggaccgcagccacactgctttctc

SEQ ID NO: 662175 - DNA, 25 bp, Homo sapien
gaaatgttcccaacagagtcccaaa

SEQ ID NO: 662176 - DNA, 25 bp, Homo sapien
gagttaggaccaaaacagcgaggaa

SEQ ID NO: 662177 - DNA, 25 bp, Homo sapien
gaggctcaaatcaaatcgggcacgg

SEQ ID NO: 662178 - DNA, 25 bp, Homo sapien
gctgacctttcttcgagttatgagg

SEQ ID NO: 662179 - DNA, 25 bp, Homo sapien
gaggcaggcgcttcagacactgcag

SEQ ID NO: 662180 - DNA, 25 bp, Homo sapien
tggggaggcaggcgcttcagacact

SEQ ID NO: 662181 - DNA, 25 bp, Homo sapien
ggaggcaggcgcttcagacactgca

SEQ ID NO: 662182 - DNA, 25 bp, Homo sapien
gggaggcaggcgcttcagacactgc

SEQ ID NO: 662183 - DNA, 25 bp, Homo sapien
acccatggctgtcagtcagtctgtc

SEQ ID NO: 662184 - DNA, 25 bp, Homo sapien
catctcatatccatcctggggggca

SEQ ID NO: 662185 - DNA, 25 bp, Homo sapien
tggagagggcccaccccaccatctg

SEQ ID NO: 662186 - DNA, 25 bp, Homo sapien
aataaatcacccaggcctcagttcc

SEQ ID NO: 662187 - DNA, 25 bp, Homo sapien
tggtcagagcaccagattctgggag

SEQ ID NO: 662188 - DNA, 25 bp, Homo sapien
ttgctcagcctcctagcggtagcca

SEQ ID NO: 662189 - DNA, 25 bp, Homo sapien
tgggtgtaggctgcatgcacataca

SEQ ID NO: 662190 - DNA, 25 bp, Homo sapien
caaaagggccgaaagtgcagttaga

SEQ ID NO: 662191 - DNA, 25 bp, Homo sapien
acaggcggtcctcgtccacgggagc

SEQ ID NO: 662192 - DNA, 25 bp, Homo sapien
ccaaagtcacagtcgaagaggtctc

SEQ ID NO: 662193 - DNA, 25 bp, Homo sapien
aagaggtctctgatgccctcgccct

SEQ ID NO: 662194 - DNA, 25 bp, Homo sapien
tcctcgaggccgaagtggtagtcga

SEQ ID NO: 662195 - DNA, 25 bp, Homo sapien
ggcaggggctgtcgtgcctgcccac

SEQ ID NO: 662196 - DNA, 25 bp, Homo sapien
gagacggggagcatcacaggccggg

SEQ ID NO: 662197 - DNA, 25 bp, Homo sapien
aaggcaggggctgtcgtgcctgccc

SEQ ID NO: 662198 - DNA, 25 bp, Homo sapien
ggctgtcgtgcctgcccacccccca

SEQ ID NO: 662199 - DNA, 25 bp, Homo sapien
actatggtggcagagtcagtggccc

SEQ ID NO: 662200 - DNA, 25 bp, Homo sapien
ggtgacactatggtggcagagtcag

SEQ ID NO: 662201 - DNA, 25 bp, Homo sapien
tgacactatggtggcagagtcagtg

SEQ ID NO: 662202 - DNA, 25 bp, Homo sapien
acactatggtggcagagtcagtggc

SEQ ID NO: 662203 - DNA, 25 bp, Homo sapien
gaaaacatcgatcgggccttgtttg

SEQ ID NO: 662204 - DNA, 25 bp, Homo sapien
atcgatcgggccttgtttgctctta

SEQ ID NO: 662205 - DNA, 25 bp, Homo sapien
ggcacaggaaaacatcgatcgggcc

SEQ ID NO: 662206 - DNA, 25 bp, Homo sapien
caggaaaacatcgatcgggccttgt

SEQ ID NO: 662207 - DNA, 25 bp, Homo sapien
gatcaccataaccatctgctctgca

SEQ ID NO: 662208 - DNA, 25 bp, Homo sapien
atcaccataaccatctgctctgcag

SEQ ID NO: 662209 - DNA, 25 bp, Homo sapien
tgatcaccataaccatctgctctgc

SEQ ID NO: 662210 - DNA, 25 bp, Homo sapien
tttgatcaccataaccatctgctct

SEQ ID NO: 662211 - DNA, 25 bp, Homo sapien
ggcagagtcaaggaccacatgacct

SEQ ID NO: 662212 - DNA, 25 bp, Homo sapien
gagtcaaggaccacatgacctttga

SEQ ID NO: 662213 - DNA, 25 bp, Homo sapien
tggcagagtcaaggaccacatgacc

SEQ ID NO: 662214 - DNA, 25 bp, Homo sapien
cagagtcaaggaccacatgaccttt

SEQ ID NO: 662215 - DNA, 25 bp, Homo sapien
gcaggcgcagctgcgtagtacagat

SEQ ID NO: 662216 - DNA, 25 bp, Homo sapien
gaggtcctgggtcaacccctcaagc

SEQ ID NO: 662217 - DNA, 25 bp, Homo sapien
gtccgccgacgcccactgtggtgtg

SEQ ID NO: 662218 - DNA, 25 bp, Homo sapien
tcctgcagctgtcggaggtcctggg

SEQ ID NO: 662219 - DNA, 25 bp, Homo sapien
ctccaggaagcgcttggtggtcaga

SEQ ID NO: 662220 - DNA, 25 bp, Homo sapien
cagtgaggtctcatagcgtgacttc

SEQ ID NO: 662221 - DNA, 25 bp, Homo sapien
cagttcaggtcgacgacaccgtcag

SEQ ID NO: 662222 - DNA, 25 bp, Homo sapien
gagctggatgccctcaaggacgttg

SEQ ID NO: 662223 - DNA, 25 bp, Homo sapien
cactgctctcggccaggtactgatg

SEQ ID NO: 662224 - DNA, 25 bp, Homo sapien
cttttcctggatggcggcctctgcc

SEQ ID NO: 662225 - DNA, 25 bp, Homo sapien
ttttcctggatggcggcctctgccc

SEQ ID NO: 662226 - DNA, 25 bp, Homo sapien
actgctctcggccaggtactgatgg

SEQ ID NO: 662227 - DNA, 25 bp, Homo sapien
tattatcactgagtccgacgctggg

SEQ ID NO: 662228 - DNA, 25 bp, Homo sapien
ggcatgcagtaaacgccagttgaat

SEQ ID NO: 662229 - DNA, 25 bp, Homo sapien
ccagttgaatacacgtgggctatta

SEQ ID NO: 662230 - DNA, 25 bp, Homo sapien
gcagctgtgctcactaccgagatgc

SEQ ID NO: 662231 - DNA, 25 bp, Homo sapien
cagcaggtcagggtcgcaggggccg

SEQ ID NO: 662232 - DNA, 25 bp, Homo sapien
ccgcggcgcactgggtgtgggccgg

SEQ ID NO: 662233 - DNA, 25 bp, Homo sapien
cgtcctgcgcggcggagatgatgac

SEQ ID NO: 662234 - DNA, 25 bp, Homo sapien
ctggcgtcctgcgcggcggagatga

SEQ ID NO: 662235 - DNA, 25 bp, Homo sapien
ggcgcgcatgggccgcccgcagggg

SEQ ID NO: 662236 - DNA, 25 bp, Homo sapien
atctgcgaggagtcgagcagccgca

SEQ ID NO: 662237 - DNA, 25 bp, Homo sapien
gatctgcgaggagtcgagcagccgc

SEQ ID NO: 662238 - DNA, 25 bp, Homo sapien
gcctccagcgccggcgcgcatgggc

SEQ ID NO: 662239 - DNA, 25 bp, Homo sapien
cccgcgcggcccgggtgacaggcgg

SEQ ID NO: 662240 - DNA, 25 bp, Homo sapien
ggcccgcgcggcccgggtgacaggc

SEQ ID NO: 662241 - DNA, 25 bp, Homo sapien
cgcgcggcccgggtgacaggcggcg

SEQ ID NO: 662242 - DNA, 25 bp, Homo sapien
cacggcccgcgcggcccgggtgaca

SEQ ID NO: 662243 - DNA, 25 bp, Homo sapien
cctcggcgagggctcgatcccgctc

SEQ ID NO: 662244 - DNA, 25 bp, Homo sapien
cggcgagggctcgatcccgctccgc

SEQ ID NO: 662245 - DNA, 25 bp, Homo sapien
tcggcgagggctcgatcccgctccg

SEQ ID NO: 662246 - DNA, 25 bp, Homo sapien
cgagggctcgatcccgctccgcccc

SEQ ID NO: 662247 - DNA, 25 bp, Homo sapien
taacagcttctttacacgatgcgtg

SEQ ID NO: 662248 - DNA, 25 bp, Homo sapien
caagcagagtttgcaaactggcccc

SEQ ID NO: 662249 - DNA, 25 bp, Homo sapien
tgaagggcacagagatgtccattgt

SEQ ID NO: 662250 - DNA, 25 bp, Homo sapien
agaaacaagcctttggagtcgggtg

SEQ ID NO: 662251 - DNA, 25 bp, Homo sapien
gagagccacgttcaaagtctgattc

SEQ ID NO: 662252 - DNA, 25 bp, Homo sapien
cacaaattgtggtgacgtgggcttc

SEQ ID NO: 662253 - DNA, 25 bp, Homo sapien
agcggcgagcatcaaacaaggcagc

SEQ ID NO: 662254 - DNA, 25 bp, Homo sapien
gagtcaccgcgctcacatgggttca

SEQ ID NO: 662255 - DNA, 25 bp, Homo sapien
tgtcatctactgtaaggctcaggac

SEQ ID NO: 662256 - DNA, 25 bp, Homo sapien
tcacactgatcacggcaaggatctg

SEQ ID NO: 662257 - DNA, 25 bp, Homo sapien
tctgtgggcctgaatgcttggtgtc

SEQ ID NO: 662258 - DNA, 25 bp, Homo sapien
caaggatctgcccaagatatttggg

SEQ ID NO: 662259 - DNA, 25 bp, Homo sapien
agtgaggagcggctctgccctcccg

SEQ ID NO: 662260 - DNA, 25 bp, Homo sapien
tcccgcccatcgtctgagctgtggg

SEQ ID NO: 662261 - DNA, 25 bp, Homo sapien
agtctcgaaagtggggagcgtctct

SEQ ID NO: 662262 - DNA, 25 bp, Homo sapien
gcccggccgccatcccatctaggaa

SEQ ID NO: 662263 - DNA, 25 bp, Homo sapien
gaattaacaggattgtagcaggtgt

SEQ ID NO: 662264 - DNA, 25 bp, Homo sapien
catgtcaaaagaattaacaggattg

SEQ ID NO: 662265 - DNA, 25 bp, Homo sapien
aaagaattaacaggattgtagcagg

SEQ ID NO: 662266 - DNA, 25 bp, Homo sapien
attttagtcttacatgtcaaaagaa

SEQ ID NO: 662267 - DNA, 25 bp, Homo sapien
tgtgcaacaagagccctctggccat

SEQ ID NO: 662268 - DNA, 25 bp, Homo sapien
ctaaaagcagggtgtgctcagtcct

SEQ ID NO: 662269 - DNA, 25 bp, Homo sapien
tgtccctgaccaccatgctatattg

SEQ ID NO: 662270 - DNA, 25 bp, Homo sapien
tcttagagagcagagacagtcggta

SEQ ID NO: 662271 - DNA, 25 bp, Homo sapien
tgaggtgtgtgctacgacaacgcct

SEQ ID NO: 662272 - DNA, 25 bp, Homo sapien
ccatcaaggcgtgacgggagacagt

SEQ ID NO: 662273 - DNA, 25 bp, Homo sapien
aagtgtaatggaactatctcggctc

SEQ ID NO: 662274 - DNA, 25 bp, Homo sapien
cagatgggataataatggacggctc

SEQ ID NO: 662275 - DNA, 25 bp, Homo sapien
caatagggtttgcattcctacgagc

SEQ ID NO: 662276 - DNA, 25 bp, Homo sapien
aagtgttccatatctgtgttgcccg

SEQ ID NO: 662277 - DNA, 25 bp, Homo sapien
ccacaggtgatggaacccggctaat

SEQ ID NO: 662278 - DNA, 25 bp, Homo sapien
acatgtggctactgggtcctgaaaa

SEQ ID NO: 662279 - DNA, 25 bp, Homo sapien
tgcactgtccactagaataatctgt

SEQ ID NO: 662280 - DNA, 25 bp, Homo sapien
cctagagagtagtgtggctggcccc

SEQ ID NO: 662281 - DNA, 25 bp, Homo sapien
ggccaaatcttgagccacagccaga

SEQ ID NO: 662282 - DNA, 25 bp, Homo sapien
gacagtgggaatctagaacttctcc

SEQ ID NO: 662283 - DNA, 25 bp, Homo sapien
tacttcagcaaacggaaccctggga

SEQ ID NO: 662284 - DNA, 25 bp, Homo sapien
gaagtctgagatgtcgtgccataca

SEQ ID NO: 662285 - DNA, 25 bp, Homo sapien
ctcatagaggtaggtcatggaggac

SEQ ID NO: 662286 - DNA, 25 bp, Homo sapien
cacctgggttcagggatgtagccct

SEQ ID NO: 662287 - DNA, 25 bp, Homo sapien
ggatcggtgatactcaaagagccac

SEQ ID NO: 662288 - DNA, 25 bp, Homo sapien
ggacgcgtgacaacaggtacatgtt

SEQ ID NO: 662289 - DNA, 25 bp, Homo sapien
tcagggcaaacaggacgcgtgacaa

SEQ ID NO: 662290 - DNA, 25 bp, Homo sapien
cgcgtgacaacaggtacatgttgat

SEQ ID NO: 662291 - DNA, 25 bp, Homo sapien
caaacaggacgcgtgacaacaggta

SEQ ID NO: 662292 - DNA, 25 bp, Homo sapien
ctgggattatatgtgacagccaata

SEQ ID NO: 662293 - DNA, 25 bp, Homo sapien
agtgggcttactggatctcggctca

SEQ ID NO: 662294 - DNA, 25 bp, Homo sapien
cattggcctgatttctgcacttatt

SEQ ID NO: 662295 - DNA, 25 bp, Homo sapien
ctgtcggctaggctagagagagtgg

SEQ ID NO: 662296 - DNA, 25 bp, Homo sapien
ttaatggaaatgggattaccggcat

SEQ ID NO: 662297 - DNA, 25 bp, Homo sapien
tttaatggaaatgggattaccggca

SEQ ID NO: 662298 - DNA, 25 bp, Homo sapien
tatgaaaaccttacttcagggtcat

SEQ ID NO: 662299 - DNA, 25 bp, Homo sapien
tttgggaaccatgaaattacagatg

SEQ ID NO: 662300 - DNA, 25 bp, Homo sapien
tcagacatgcaaaagagccaagagc

SEQ ID NO: 662301 - DNA, 25 bp, Homo sapien
taaaaacaatctttgccccagagag

SEQ ID NO: 662302 - DNA, 25 bp, Homo sapien
tatgtggcctgcagtatggcccaca

SEQ ID NO: 662303 - DNA, 25 bp, Homo sapien
taggtgaacacaaaccgtgccaggt

SEQ ID NO: 662304 - DNA, 25 bp, Homo sapien
tcttgccttgtatgtaggactgcag

SEQ ID NO: 662305 - DNA, 25 bp, Homo sapien
ttccaggagtggatatatgtggcct

SEQ ID NO: 662306 - DNA, 25 bp, Homo sapien
cacattctctcccagtttgagggat

SEQ ID NO: 662307 - DNA, 25 bp, Homo sapien
attctctcccagtttgagggatgtg

SEQ ID NO: 662308 - DNA, 25 bp, Homo sapien
acattctctcccagtttgagggatg

SEQ ID NO: 662309 - DNA, 25 bp, Homo sapien
ctctcccagtttgagggatgtgtac

SEQ ID NO: 662310 - DNA, 25 bp, Homo sapien
agagaaaggtcatgaccagcgcgtg

SEQ ID NO: 662311 - DNA, 25 bp, Homo sapien
aggggcccggattttggctccatag

SEQ ID NO: 662312 - DNA, 25 bp, Homo sapien
tgaggggcccggattttggctccat

SEQ ID NO: 662313 - DNA, 25 bp, Homo sapien
agaaaggtcatgaccagcgcgtgag

SEQ ID NO: 662314 - DNA, 25 bp, Homo sapien
ttccggaagcccttaagcacggcca

SEQ ID NO: 662315 - DNA, 25 bp, Homo sapien
ttgacgactacgagcagagccctta

SEQ ID NO: 662316 - DNA, 25 bp, Homo sapien
ccaacgcagcgtggtagcggcgctt

SEQ ID NO: 662317 - DNA, 25 bp, Homo sapien
gcgcagcagtgcgttgacgactacg

SEQ ID NO: 662318 - DNA, 25 bp, Homo sapien
gaggttccagctgcgcgcccacagc

SEQ ID NO: 662319 - DNA, 25 bp, Homo sapien
tcggggttaggaactgtaagcgcac

SEQ ID NO: 662320 - DNA, 25 bp, Homo sapien
taggaactgtaagcgcactgacagc

SEQ ID NO: 662321 - DNA, 25 bp, Homo sapien
cactgacagccggaggttccagctg

SEQ ID NO: 662322 - DNA, 25 bp, Homo sapien
aactgcttggtcagactttggaatc

SEQ ID NO: 662323 - DNA, 25 bp, Homo sapien
gagagattcatgattgatggtgaca

SEQ ID NO: 662324 - DNA, 25 bp, Homo sapien
gagtccaatccatggttgtcccgtt

SEQ ID NO: 662325 - DNA, 25 bp, Homo sapien
tcccgttgtatgacgatgtggccat

SEQ ID NO: 662326 - DNA, 25 bp, Homo sapien
cagagctggggggtcgggtccggtg

SEQ ID NO: 662327 - DNA, 25 bp, Homo sapien
tgggaatgggggattctgtgtcaga

SEQ ID NO: 662328 - DNA, 25 bp, Homo sapien
tcgggtccggtgagatggggatgcg

SEQ ID NO: 662329 - DNA, 25 bp, Homo sapien
tgtgtcagagctggggggtcgggtc

SEQ ID NO: 662330 - DNA, 25 bp, Homo sapien
aatgctcgcgtagccgggcttcggt

SEQ ID NO: 662331 - DNA, 25 bp, Homo sapien
agataatagggatgggaagttccgc

SEQ ID NO: 662332 - DNA, 25 bp, Homo sapien
ccgcgagcctaggttgggtttccag

SEQ ID NO: 662333 - DNA, 25 bp, Homo sapien
tggcgcaggcgatctttgaggccct

SEQ ID NO: 662334 - DNA, 25 bp, Homo sapien
tagcgagcatggactcgatctcgtg

SEQ ID NO: 662335 - DNA, 25 bp, Homo sapien
gttagcgagcatggactcgatctcg

SEQ ID NO: 662336 - DNA, 25 bp, Homo sapien
cgagcatggactcgatctcgtgacc

SEQ ID NO: 662337 - DNA, 25 bp, Homo sapien
gcgagcatggactcgatctcgtgac

SEQ ID NO: 662338 - DNA, 25 bp, Homo sapien
ctttaggctgtttggacttcctcat

SEQ ID NO: 662339 - DNA, 25 bp, Homo sapien
tttctctttaggctgtttggacttc

SEQ ID NO: 662340 - DNA, 25 bp, Homo sapien
ttctctttaggctgtttggacttcc

SEQ ID NO: 662341 - DNA, 25 bp, Homo sapien
ctctttaggctgtttggacttcctc

SEQ ID NO: 662342 - DNA, 25 bp, Homo sapien
gaatggacaatcagaccgttctggc

SEQ ID NO: 662343 - DNA, 25 bp, Homo sapien
tttttcaggaatggacaatcagacc

SEQ ID NO: 662344 - DNA, 25 bp, Homo sapien
tcagaccgttctggctgtccagtca

SEQ ID NO: 662345 - DNA, 25 bp, Homo sapien
caatcagaccgttctggctgtccag

SEQ ID NO: 662346 - DNA, 25 bp, Homo sapien
tggtggatcttcatcctcataacat

SEQ ID NO: 662347 - DNA, 25 bp, Homo sapien
ggtggatcttcatcctcataacatt

SEQ ID NO: 662348 - DNA, 25 bp, Homo sapien
tttggtggatcttcatcctcataac

SEQ ID NO: 662349 - DNA, 25 bp, Homo sapien
tggatcttcatcctcataacatttt

SEQ ID NO: 662350 - DNA, 25 bp, Homo sapien
cacctcattgatggccgaatgaccc

SEQ ID NO: 662351 - DNA, 25 bp, Homo sapien
ctggacaaccgcacacggatgcagt

SEQ ID NO: 662352 - DNA, 25 bp, Homo sapien
gacaaccgcacacggatgcagtatg

SEQ ID NO: 662353 - DNA, 25 bp, Homo sapien
cacggatgcagtatgggacattctt

SEQ ID NO: 662354 - DNA, 25 bp, Homo sapien
gaactggtctacacaagtgctgtcg

SEQ ID NO: 662355 - DNA, 25 bp, Homo sapien
tagaccagggtttttcagccttgcc

SEQ ID NO: 662356 - DNA, 25 bp, Homo sapien
ggagctgacctgcacatcgtggaat

SEQ ID NO: 662357 - DNA, 25 bp, Homo sapien
ggcaacagcttctatctagaccagg

SEQ ID NO: 662358 - DNA, 25 bp, Homo sapien
ttaatgaccacagagcattctattg

SEQ ID NO: 662359 - DNA, 25 bp, Homo sapien
gaccacagagcattctattgtaggg

SEQ ID NO: 662360 - DNA, 25 bp, Homo sapien
ttctattgtagggaccagcatttcc

SEQ ID NO: 662361 - DNA, 25 bp, Homo sapien
agcatttccgtatcgactgggttga

SEQ ID NO: 662362 - DNA, 25 bp, Homo sapien
cctgtgggttcctcaggtagcccat

SEQ ID NO: 662363 - DNA, 25 bp, Homo sapien
ccaggacgggtttaacagcaggaag

SEQ ID NO: 662364 - DNA, 25 bp, Homo sapien
ttgcaggcacctcccttgatttcct

SEQ ID NO: 662365 - DNA, 25 bp, Homo sapien
aggctgtgaccccacggcaactttg

SEQ ID NO: 662366 - DNA, 25 bp, Homo sapien
ggaatcttagctcccgcaaccatag

SEQ ID NO: 662367 - DNA, 25 bp, Homo sapien
agatgggctctggatcacgctgctg

SEQ ID NO: 662368 - DNA, 25 bp, Homo sapien
gggctggaatcttagctcccgcaac

SEQ ID NO: 662369 - DNA, 25 bp, Homo sapien
gtagctcagatgggctctggatcac

SEQ ID NO: 662370 - DNA, 25 bp, Homo sapien
tccagtatgatgaagtgcgccaggg

SEQ ID NO: 662371 - DNA, 25 bp, Homo sapien
tgtcataacgtgtccgggtggcctg

SEQ ID NO: 662372 - DNA, 25 bp, Homo sapien
ccttaccagtggaagcgagccatcg

SEQ ID NO: 662373 - DNA, 25 bp, Homo sapien
gaggcactcaggtgtcacggctaga

SEQ ID NO: 662374 - DNA, 25 bp, Homo sapien
aacaagatcagaaatccctctcgtg

SEQ ID NO: 662375 - DNA, 25 bp, Homo sapien
ggatagttagccacctccaaatccg

SEQ ID NO: 662376 - DNA, 25 bp, Homo sapien
aatccctctcgtgtcggcatctgga

SEQ ID NO: 662377 - DNA, 25 bp, Homo sapien
tccaaatccgttgtaaacaagatca

SEQ ID NO: 662378 - DNA, 25 bp, Homo sapien
cctccagacagtttggcattcacag

SEQ ID NO: 662379 - DNA, 25 bp, Homo sapien
gatgtcacaattcacggaaataatt

SEQ ID NO: 662380 - DNA, 25 bp, Homo sapien
ctggcgaggttgatgtcacaattca

SEQ ID NO: 662381 - DNA, 25 bp, Homo sapien
gagatcacaaattggccgctcatgg

SEQ ID NO: 662382 - DNA, 25 bp, Homo sapien
gaaggaataaagatggagacaggaa

SEQ ID NO: 662383 - DNA, 25 bp, Homo sapien
acaggaaggccaatgaggaagagta

SEQ ID NO: 662384 - DNA, 25 bp, Homo sapien
ggaagagtattaggttcctcttgct

SEQ ID NO: 662385 - DNA, 25 bp, Homo sapien
catgtagagaatgagctggaaggaa

SEQ ID NO: 662386 - DNA, 25 bp, Homo sapien
tgaagttcaagcatggcagtatccc

SEQ ID NO: 662387 - DNA, 25 bp, Homo sapien
atcccatactagcaataaatttttg

SEQ ID NO: 662388 - DNA, 25 bp, Homo sapien
ggcagtatcccatactagcaataaa

SEQ ID NO: 662389 - DNA, 25 bp, Homo sapien
caagcatggcagtatcccatactag

SEQ ID NO: 662390 - DNA, 25 bp, Homo sapien
tgttctgccactcctacagagcgca

SEQ ID NO: 662391 - DNA, 25 bp, Homo sapien
ctgttctgccactcctacagagcgc

SEQ ID NO: 662392 - DNA, 25 bp, Homo sapien
tgggattacaggcacgtgccagcac

SEQ ID NO: 662393 - DNA, 25 bp, Homo sapien
ctcctgcctcaaccttgtaagtagc

SEQ ID NO: 662394 - DNA, 25 bp, Homo sapien
tctcctgcctcaaccttgtaagtag

SEQ ID NO: 662395 - DNA, 25 bp, Homo sapien
tgccagcacacccagctaatttttg

SEQ ID NO: 662396 - DNA, 25 bp, Homo sapien
tcctgagtagctacaggtgcccacc

SEQ ID NO: 662397 - DNA, 25 bp, Homo sapien
cctcctgagtagctacaggtgccca

SEQ ID NO: 662398 - DNA, 25 bp, Homo sapien
tgcccaccaccacgccgggctaatt

SEQ ID NO: 662399 - DNA, 25 bp, Homo sapien
ccaaagtgctgagattataggcatg

SEQ ID NO: 662400 - DNA, 25 bp, Homo sapien
gattgacacattataccaggagact

SEQ ID NO: 662401 - DNA, 25 bp, Homo sapien
cagggcacagttgggcacattcaca

SEQ ID NO: 662402 - DNA, 25 bp, Homo sapien
cataggttgggaactgattgacaca

SEQ ID NO: 662403 - DNA, 25 bp, Homo sapien
cacattcacagagcgctggagtgac

SEQ ID NO: 662404 - DNA, 25 bp, Homo sapien
cagacagccaggtgttgctccaagc

SEQ ID NO: 662405 - DNA, 25 bp, Homo sapien
gccaggtgttgctccaagcagtttc

SEQ ID NO: 662406 - DNA, 25 bp, Homo sapien
agacagccaggtgttgctccaagca

SEQ ID NO: 662407 - DNA, 25 bp, Homo sapien
ccaggtgttgctccaagcagtttca

SEQ ID NO: 662408 - DNA, 25 bp, Homo sapien
tccaggcaagcagcgcagatgctgg

SEQ ID NO: 662409 - DNA, 25 bp, Homo sapien
ctgcctgcttattgtaaaagtcgag

SEQ ID NO: 662410 - DNA, 25 bp, Homo sapien
tgtagaaggtactggacatttttct

SEQ ID NO: 662411 - DNA, 25 bp, Homo sapien
agaggccagaactgaataatggttt

SEQ ID NO: 662412 - DNA, 25 bp, Homo sapien
tccagagtagacacatggtgatccc

SEQ ID NO: 662413 - DNA, 25 bp, Homo sapien
aagacattctggtggagtgctcagc

SEQ ID NO: 662414 - DNA, 25 bp, Homo sapien
cagaaccaggtctcacgtgtggtgg

SEQ ID NO: 662415 - DNA, 25 bp, Homo sapien
ccggagatagtttaagaccagtgcc

SEQ ID NO: 662416 - DNA, 25 bp, Homo sapien
gacttgccgcacatctctttgtgta

SEQ ID NO: 662417 - DNA, 25 bp, Homo sapien
tggactacgctgactccactgctga

SEQ ID NO: 662418 - DNA, 25 bp, Homo sapien
tccttgtaagtcagttgacttgccg

SEQ ID NO: 662419 - DNA, 25 bp, Homo sapien
ctcaatggaaagggtcgactggttg

SEQ ID NO: 662420 - DNA, 25 bp, Homo sapien
aatggatggtgttctcttgagagca

SEQ ID NO: 662421 - DNA, 25 bp, Homo sapien
gcccttagctgtaataatgcatctg

SEQ ID NO: 662422 - DNA, 25 bp, Homo sapien
tgattttgatttcctccagagctgt

SEQ ID NO: 662423 - DNA, 25 bp, Homo sapien
taactcattggaaacgtgcatacat

SEQ ID NO: 662424 - DNA, 25 bp, Homo sapien
agggtcttccctatttcttctctgc

SEQ ID NO: 662425 - DNA, 25 bp, Homo sapien
actctctgggtacagttcagggtga

SEQ ID NO: 662426 - DNA, 25 bp, Homo sapien
cttcagggtcttccctatttcttct

SEQ ID NO: 662427 - DNA, 25 bp, Homo sapien
tcagggtgagttggttcttgggtac

SEQ ID NO: 662428 - DNA, 25 bp, Homo sapien
catttatgtgaacaccggtgtggtg

SEQ ID NO: 662429 - DNA, 25 bp, Homo sapien
tctgagcttgcacgtgaaggagcag

SEQ ID NO: 662430 - DNA, 25 bp, Homo sapien
aaagtcagagggaagtactgtcgcc

SEQ ID NO: 662431 - DNA, 25 bp, Homo sapien
gatggcgaggtcactgtacttcctg

SEQ ID NO: 662432 - DNA, 25 bp, Homo sapien
tgaggcggagcaccatagaccaagg

SEQ ID NO: 662433 - DNA, 25 bp, Homo sapien
cggagcaccatagaccaagggaacc

SEQ ID NO: 662434 - DNA, 25 bp, Homo sapien
aggcggagcaccatagaccaaggga

SEQ ID NO: 662435 - DNA, 25 bp, Homo sapien
ctgtgaggcggagcaccatagacca

SEQ ID NO: 662436 - DNA, 25 bp, Homo sapien
cagggtgtgggttccgccgaatatc

SEQ ID NO: 662437 - DNA, 25 bp, Homo sapien
gccgaatatcttttgggaaacgctg

SEQ ID NO: 662438 - DNA, 25 bp, Homo sapien
ggtccctagagcgtgtgggtcctcc

SEQ ID NO: 662439 - DNA, 25 bp, Homo sapien
tatcttttgggaaacgctgtgcggg

SEQ ID NO: 662440 - DNA, 25 bp, Homo sapien
ctagctcatcttctaggcggtcttc

SEQ ID NO: 662441 - DNA, 25 bp, Homo sapien
tcttctaggcggtcttcctgttcca

SEQ ID NO: 662442 - DNA, 25 bp, Homo sapien
atcttctaggcggtcttcctgttcc

SEQ ID NO: 662443 - DNA, 25 bp, Homo sapien
gctcatcttctaggcggtcttcctg

SEQ ID NO: 662444 - DNA, 25 bp, Homo sapien
agggaagcccacgacatgaaacaga

SEQ ID NO: 662445 - DNA, 25 bp, Homo sapien
tcggccatcgcttggctctgagaac

SEQ ID NO: 662446 - DNA, 25 bp, Homo sapien
ctgcggatcactcggccatcgcttg

SEQ ID NO: 662447 - DNA, 25 bp, Homo sapien
agccatgggcagaggatttggtgtc

SEQ ID NO: 662448 - DNA, 25 bp, Homo sapien
gctctgagaacagcggctgggctga

SEQ ID NO: 662449 - DNA, 25 bp, Homo sapien
ccaatttgacttccaggcagtcttg

SEQ ID NO: 662450 - DNA, 25 bp, Homo sapien
aggcagtcttggacatctctgagag

SEQ ID NO: 662451 - DNA, 25 bp, Homo sapien
gcagtcttggacatctctgagagtc

SEQ ID NO: 662452 - DNA, 25 bp, Homo sapien
cttacccaatttgacttccaggcag

SEQ ID NO: 662453 - DNA, 25 bp, Homo sapien
ctttctcttccccgtgtgtcttctc

SEQ ID NO: 662454 - DNA, 25 bp, Homo sapien
tctcttccccgtgtgtcttctcttc

SEQ ID NO: 662455 - DNA, 25 bp, Homo sapien
gctcctggacgctgtctctgtctac

SEQ ID NO: 662456 - DNA, 25 bp, Homo sapien
cttgctcctctacacctgccaggcc

SEQ ID NO: 662457 - DNA, 25 bp, Homo sapien
ttgctcctctacacctgccaggcca

SEQ ID NO: 662458 - DNA, 25 bp, Homo sapien
ctctgggttctcgaggccccagggt

SEQ ID NO: 662459 - DNA, 25 bp, Homo sapien
tgcctctgggttctcgaggccccag

SEQ ID NO: 662460 - DNA, 25 bp, Homo sapien
ctcgaggaataaaagccacgtgggt

SEQ ID NO: 662461 - DNA, 25 bp, Homo sapien
gttgctcaccaaccacactgcagtg

SEQ ID NO: 662462 - DNA, 25 bp, Homo sapien
tcagtgggatgctcgaggaataaaa

SEQ ID NO: 662463 - DNA, 25 bp, Homo sapien
tgctgggagccgtatcctggcaagt

SEQ ID NO: 662464 - DNA, 25 bp, Homo sapien
catctttggtggttgctgtcgtcaa

SEQ ID NO: 662465 - DNA, 25 bp, Homo sapien
ctggccctcatctttggtggttgct

SEQ ID NO: 662466 - DNA, 25 bp, Homo sapien
tctttggtggttgctgtcgtcaagg

SEQ ID NO: 662467 - DNA, 25 bp, Homo sapien
cctcatctttggtggttgctgtcgt

SEQ ID NO: 662468 - DNA, 25 bp, Homo sapien
tgctcacaagtctgatcacgtcaca

SEQ ID NO: 662469 - DNA, 25 bp, Homo sapien
tcacaagtctgatcacgtcacacac

SEQ ID NO: 662470 - DNA, 25 bp, Homo sapien
ctgtgaaccactctccgcactggct

SEQ ID NO: 662471 - DNA, 25 bp, Homo sapien
tggctgctcacaagtctgatcacgt

SEQ ID NO: 662472 - DNA, 25 bp, Homo sapien
tgagccgagccccatcttcatgctt

SEQ ID NO: 662473 - DNA, 25 bp, Homo sapien
ttcatgcttcctacctatcttctgc

SEQ ID NO: 662474 - DNA, 25 bp, Homo sapien
tcagttaagcaggtctggtctggca

SEQ ID NO: 662475 - DNA, 25 bp, Homo sapien
gttgttcctctctgcgtcccaagtt

SEQ ID NO: 662476 - DNA, 25 bp, Homo sapien
gccaggcacgcctgagcactgtcca

SEQ ID NO: 662477 - DNA, 25 bp, Homo sapien
ccaggcacgcctgagcactgtccag

SEQ ID NO: 662478 - DNA, 25 bp, Homo sapien
tggctcttgcgctttactgccttga

SEQ ID NO: 662479 - DNA, 25 bp, Homo sapien
tccccgctggaggcgcttagctctc

SEQ ID NO: 662480 - DNA, 25 bp, Homo sapien
ctcttgcgctttactgccttgatgg

SEQ ID NO: 662481 - DNA, 25 bp, Homo sapien
cccgctggaggcgcttagctctctc

SEQ ID NO: 662482 - DNA, 25 bp, Homo sapien
tcacagatataaataagcgagagtt

SEQ ID NO: 662483 - DNA, 25 bp, Homo sapien
cacagatataaataagcgagagttt

SEQ ID NO: 662484 - DNA, 25 bp, Homo sapien
acagatataaataagcgagagtttc

SEQ ID NO: 662485 - DNA, 25 bp, Homo sapien
tgtttggcggccactggacacagac

SEQ ID NO: 662486 - DNA, 25 bp, Homo sapien
atctggcccagaagagatcccccac

SEQ ID NO: 662487 - DNA, 25 bp, Homo sapien
tcagctcttgtttggcggccactgg

SEQ ID NO: 662488 - DNA, 25 bp, Homo sapien
ttgtcagctcttgtttggcggccac

SEQ ID NO: 662489 - DNA, 25 bp, Homo sapien
gctgaatgaggtctggtaattgaat

SEQ ID NO: 662490 - DNA, 25 bp, Homo sapien
cacctaaaaggtaaaataggctctg

SEQ ID NO: 662491 - DNA, 25 bp, Homo sapien
taaagaggtcccacatgtgaaaaag

SEQ ID NO: 662492 - DNA, 25 bp, Homo sapien
tgaatttcacaatggatgcctccct

SEQ ID NO: 662493 - DNA, 25 bp, Homo sapien
cttctggctggcaaccttctcctcc

SEQ ID NO: 662494 - DNA, 25 bp, Homo sapien
tcaggtgtgatgaagaaattcccct

SEQ ID NO: 662495 - DNA, 25 bp, Homo sapien
tcccctctgtggacaactggagctc

SEQ ID NO: 662496 - DNA, 25 bp, Homo sapien
aaggctgccaagaaatcaggtgtga

SEQ ID NO: 662497 - DNA, 25 bp, Homo sapien
gagaaagctctcagcagggtcatag

SEQ ID NO: 662498 - DNA, 25 bp, Homo sapien
gtccacgaaaccatgatatgctggg

SEQ ID NO: 662499 - DNA, 25 bp, Homo sapien
ctcaaggatccatgtgtggtctggc

SEQ ID NO: 662500 - DNA, 25 bp, Homo sapien
ggtcatattcccataggatggctca

SEQ ID NO: 662501 - DNA, 25 bp, Homo sapien
cagatgaccccggatggattttcag

SEQ ID NO: 662502 - DNA, 25 bp, Homo sapien
tcaaatagtatgaaatactccttca

SEQ ID NO: 662503 - DNA, 25 bp, Homo sapien
ttactcaaatagtatgaaatactcc

SEQ ID NO: 662504 - DNA, 25 bp, Homo sapien
aagaggtgggaggaaacgaagatga

SEQ ID NO: 662505 - DNA, 25 bp, Homo sapien
acgaagatgaaccttttactcaaat

SEQ ID NO: 662506 - DNA, 25 bp, Homo sapien
ggctgggaccggtaggcatccttct

SEQ ID NO: 662507 - DNA, 25 bp, Homo sapien
tgcaccccattccttgtagccagag

SEQ ID NO: 662508 - DNA, 25 bp, Homo sapien
ttaggcattcgaaactgggcctctg

SEQ ID NO: 662509 - DNA, 25 bp, Homo sapien
agatggaaccgctctgtgtgcgtag

SEQ ID NO: 662510 - DNA, 25 bp, Homo sapien
tgaagaaccttctcgggctaagccc

SEQ ID NO: 662511 - DNA, 25 bp, Homo sapien
catactctttatggcctggaccaag

SEQ ID NO: 662512 - DNA, 25 bp, Homo sapien
tatgactgaccatggagaaggactc

SEQ ID NO: 662513 - DNA, 25 bp, Homo sapien
gaggacaaaccccagtatgcaggca

SEQ ID NO: 662514 - DNA, 25 bp, Homo sapien
caatatatacttgcaagggcctggc

SEQ ID NO: 662515 - DNA, 25 bp, Homo sapien
ggctcctggctaagacctgctaatg

SEQ ID NO: 662516 - DNA, 25 bp, Homo sapien
gagtttaacctgcatcgtactggca

SEQ ID NO: 662517 - DNA, 25 bp, Homo sapien
cagtaagtggattgaactgggcccg

SEQ ID NO: 662518 - DNA, 25 bp, Homo sapien
tataactgctggtatggcaaagcca

SEQ ID NO: 662519 - DNA, 25 bp, Homo sapien
tcaggaatcccgtctgttaagcagg

SEQ ID NO: 662520 - DNA, 25 bp, Homo sapien
cactaggaagactggttcaccggag

SEQ ID NO: 662521 - DNA, 25 bp, Homo sapien
catgaaatcacaggtcggaggaggc

SEQ ID NO: 662522 - DNA, 25 bp, Homo sapien
gagtttcttcctgcctcgtctcttc

SEQ ID NO: 662523 - DNA, 25 bp, Homo sapien
ggagtttcttcctgcctcgtctctt

SEQ ID NO: 662524 - DNA, 25 bp, Homo sapien
cttcctgcctcgtctcttccggatc

SEQ ID NO: 662525 - DNA, 25 bp, Homo sapien
tcctgcctcgtctcttccggatccc

SEQ ID NO: 662526 - DNA, 25 bp, Homo sapien
tctccatctcctgcacggccttccc

SEQ ID NO: 662527 - DNA, 25 bp, Homo sapien
ctcctgcacggccttccccactggt

SEQ ID NO: 662528 - DNA, 25 bp, Homo sapien
ccatctcctgcacggccttccccac

SEQ ID NO: 662529 - DNA, 25 bp, Homo sapien
tggttcccggctctccatctcctgc

SEQ ID NO: 662530 - DNA, 25 bp, Homo sapien
caggccgctgcctatttttagaaac

SEQ ID NO: 662531 - DNA, 25 bp, Homo sapien
aggccgctgcctatttttagaaact

SEQ ID NO: 662532 - DNA, 25 bp, Homo sapien
gccgctgcctatttttagaaactta

SEQ ID NO: 662533 - DNA, 25 bp, Homo sapien
ggcaggccgctgcctatttttagaa

SEQ ID NO: 662534 - DNA, 25 bp, Homo sapien
ctggttatggattctagttctttgt

SEQ ID NO: 662535 - DNA, 25 bp, Homo sapien
tctggttatggattctagttctttg

SEQ ID NO: 662536 - DNA, 25 bp, Homo sapien
ctctggttatggattctagttcttt

SEQ ID NO: 662537 - DNA, 25 bp, Homo sapien
tggttatggattctagttctttgtg

SEQ ID NO: 662538 - DNA, 25 bp, Homo sapien
gctctattttgtatgcaggtggaat

SEQ ID NO: 662539 - DNA, 25 bp, Homo sapien
gaattatctgaggtgtggtttctgg

SEQ ID NO: 662540 - DNA, 25 bp, Homo sapien
tgtagttcgtgaagcccattgccac

SEQ ID NO: 662541 - DNA, 25 bp, Homo sapien
cctttgaacactttgcagcaaggag

SEQ ID NO: 662542 - DNA, 25 bp, Homo sapien
tggggtctggaataataaggccatg

SEQ ID NO: 662543 - DNA, 25 bp, Homo sapien
ctgtggggtctggaataataaggcc

SEQ ID NO: 662544 - DNA, 25 bp, Homo sapien
caatttagcattgcctgtggggtct

SEQ ID NO: 662545 - DNA, 25 bp, Homo sapien
ccgatttcttccaacaatttagcat

SEQ ID NO: 662546 - DNA, 25 bp, Homo sapien
attcaggagttcagttggcagagat

SEQ ID NO: 662547 - DNA, 25 bp, Homo sapien
aagtaatgaggaagtacggaagcca

SEQ ID NO: 662548 - DNA, 25 bp, Homo sapien
gaatggtaggagtaaaagtaatgag

SEQ ID NO: 662549 - DNA, 25 bp, Homo sapien
tgtgtgctaaatctctgtgggccag

SEQ ID NO: 662550 - DNA, 25 bp, Homo sapien
aatgaggaagtacggaagccaggcc

SEQ ID NO: 662551 - DNA, 25 bp, Homo sapien
ttagcacaagaaagccaaagctact

SEQ ID NO: 662552 - DNA, 25 bp, Homo sapien
gcatgtgttccaaatcagaatctct

SEQ ID NO: 662553 - DNA, 25 bp, Homo sapien
ctactgcatgtgttccaaatcagaa

SEQ ID NO: 662554 - DNA, 25 bp, Homo sapien
agccaaagctactgcatgtgttcca

SEQ ID NO: 662555 - DNA, 25 bp, Homo sapien
ggttgggaaacacttatctagagaa

SEQ ID NO: 662556 - DNA, 25 bp, Homo sapien
gttgggaaacacttatctagagaaa

SEQ ID NO: 662557 - DNA, 25 bp, Homo sapien
aggttgggaaacacttatctagaga

SEQ ID NO: 662558 - DNA, 25 bp, Homo sapien
caggttgggaaacacttatctagag

SEQ ID NO: 662559 - DNA, 25 bp, Homo sapien
tctacagactgaacgggagctcagg

SEQ ID NO: 662560 - DNA, 25 bp, Homo sapien
agactgaacgggagctcaggctgtc

SEQ ID NO: 662561 - DNA, 25 bp, Homo sapien
ctacagactgaacgggagctcaggc

SEQ ID NO: 662562 - DNA, 25 bp, Homo sapien
ccttctacagactgaacgggagctc

SEQ ID NO: 662563 - DNA, 25 bp, Homo sapien
tcataactggatgcattggagaacc

SEQ ID NO: 662564 - DNA, 25 bp, Homo sapien
ctctaatgggagagatcaatcatca

SEQ ID NO: 662565 - DNA, 25 bp, Homo sapien
caatcatcatttgggatcaatggga

SEQ ID NO: 662566 - DNA, 25 bp, Homo sapien
tctcctctacggagtgcagagtcag

SEQ ID NO: 662567 - DNA, 25 bp, Homo sapien
tagtagtagccattggatggcagta

SEQ ID NO: 662568 - DNA, 25 bp, Homo sapien
taccaactgaaacttatttctagac

SEQ ID NO: 662569 - DNA, 25 bp, Homo sapien
tcctttgccagatttaaggttgtag

SEQ ID NO: 662570 - DNA, 25 bp, Homo sapien
ttattagcaagtaccaactgaaact

SEQ ID NO: 662571 - DNA, 25 bp, Homo sapien
ggcttcagcttaaacctggcagagg

SEQ ID NO: 662572 - DNA, 25 bp, Homo sapien
gaggatgtcagtaaccccttagcca

SEQ ID NO: 662573 - DNA, 25 bp, Homo sapien
ggaacgatatactcccaaggcttgt

SEQ ID NO: 662574 - DNA, 25 bp, Homo sapien
ggagccctgagcaacttgtcgataa

SEQ ID NO: 662575 - DNA, 25 bp, Homo sapien
aactgactaggtctccattcttcag

SEQ ID NO: 662576 - DNA, 25 bp, Homo sapien
gtctccattcttcagaagtagtagg

SEQ ID NO: 662577 - DNA, 25 bp, Homo sapien
ctccattcttcagaagtagtaggaa

SEQ ID NO: 662578 - DNA, 25 bp, Homo sapien
gactaggtctccattcttcagaagt

SEQ ID NO: 662579 - DNA, 25 bp, Homo sapien
tttatggaggccatggtcattccag

SEQ ID NO: 662580 - DNA, 25 bp, Homo sapien
aaaaaggctcttgtgctgtagcctc

SEQ ID NO: 662581 - DNA, 25 bp, Homo sapien
ggctcttgtgctgtagcctcacatt

SEQ ID NO: 662582 - DNA, 25 bp, Homo sapien
gcctcacattttatggaggccatgg

SEQ ID NO: 662583 - DNA, 25 bp, Homo sapien
taactttctaggcatagagcgtgct

SEQ ID NO: 662584 - DNA, 25 bp, Homo sapien
aagtcacaagggtagacagggacca

SEQ ID NO: 662585 - DNA, 25 bp, Homo sapien
tatgcaagaactggagtagtgagct

SEQ ID NO: 662586 - DNA, 25 bp, Homo sapien
tctaaggaacgaaaggaggccagtg

SEQ ID NO: 662587 - DNA, 25 bp, Homo sapien
gaccacttctaacacttgactggca

SEQ ID NO: 662588 - DNA, 25 bp, Homo sapien
tgaccacttctaacacttgactggc

SEQ ID NO: 662589 - DNA, 25 bp, Homo sapien
ggttggctttcgtttgatgcttagc

SEQ ID NO: 662590 - DNA, 25 bp, Homo sapien
tgcttagcttatggtagcagggcat

SEQ ID NO: 662591 - DNA, 25 bp, Homo sapien
ggctgttttttgtgaagttgcaggg

SEQ ID NO: 662592 - DNA, 25 bp, Homo sapien
ggttcattggttggctttcgtttga

SEQ ID NO: 662593 - DNA, 25 bp, Homo sapien
ccagtaattggaacatggcaccttc

SEQ ID NO: 662594 - DNA, 25 bp, Homo sapien
tgccaggcctgagtaatggccatag

SEQ ID NO: 662595 - DNA, 25 bp, Homo sapien
ccatagcctggagcagggttttcct

SEQ ID NO: 662596 - DNA, 25 bp, Homo sapien
tccaacttgtaatggatggcaaaac

SEQ ID NO: 662597 - DNA, 25 bp, Homo sapien
ttcactctggtacacacatgctgct

SEQ ID NO: 662598 - DNA, 25 bp, Homo sapien
cctctagtaaggataaggacaggtc

SEQ ID NO: 662599 - DNA, 25 bp, Homo sapien
gctgcttaactaatcacccaggaat

SEQ ID NO: 662600 - DNA, 25 bp, Homo sapien
gacacatgttcttgctcaggtgcac

SEQ ID NO: 662601 - DNA, 25 bp, Homo sapien
aagcacggacccgagacgacggcga

SEQ ID NO: 662602 - DNA, 25 bp, Homo sapien
cagggggaagcacggacccgagacg

SEQ ID NO: 662603 - DNA, 25 bp, Homo sapien
aggcctgccccagggggaagcacgg

SEQ ID NO: 662604 - DNA, 25 bp, Homo sapien
gacccgagacgacggcgatgaggaa

SEQ ID NO: 662605 - DNA, 25 bp, Homo sapien
tctgcaggtggagttactggcctac

SEQ ID NO: 662606 - DNA, 25 bp, Homo sapien
caggtggagttactggcctactcct

SEQ ID NO: 662607 - DNA, 25 bp, Homo sapien
tgcaggtggagttactggcctactc

SEQ ID NO: 662608 - DNA, 25 bp, Homo sapien
ggtggagttactggcctactccttc

SEQ ID NO: 662609 - DNA, 25 bp, Homo sapien
tacgaagtcgggcaacaagaaagcg

SEQ ID NO: 662610 - DNA, 25 bp, Homo sapien
tattccctcatgtggtaacagctgg

SEQ ID NO: 662611 - DNA, 25 bp, Homo sapien
tatggagtcattccctggacactga

SEQ ID NO: 662612 - DNA, 25 bp, Homo sapien
aacagcagttgggttcatcgtggca

SEQ ID NO: 662613 - DNA, 25 bp, Homo sapien
tctgacaggtgttaaagtaggcaat

SEQ ID NO: 662614 - DNA, 25 bp, Homo sapien
ttgcaaggacttcagaccaaccact

SEQ ID NO: 662615 - DNA, 25 bp, Homo sapien
taccccatatcacgtttctctgaca

SEQ ID NO: 662616 - DNA, 25 bp, Homo sapien
tacagaagtctatgaacgattttaa

SEQ ID NO: 662617 - DNA, 25 bp, Homo sapien
caagctttgcaaaatcagtgattag

SEQ ID NO: 662618 - DNA, 25 bp, Homo sapien
ttaatacaacggtatatccactctg

SEQ ID NO: 662619 - DNA, 25 bp, Homo sapien
gccacatctccacaacaagctttgc

SEQ ID NO: 662620 - DNA, 25 bp, Homo sapien
tctgatggcaaacctgtccagccac

SEQ ID NO: 662621 - DNA, 25 bp, Homo sapien
tccggtgatcggcatgtgtgacaag

SEQ ID NO: 662622 - DNA, 25 bp, Homo sapien
aaatagagtcgtgtgtccttctgca

SEQ ID NO: 662623 - DNA, 25 bp, Homo sapien
ttgcccgtgacagcctggaagccgg

SEQ ID NO: 662624 - DNA, 25 bp, Homo sapien
aagccggttttgatactggcaacag

SEQ ID NO: 662625 - DNA, 25 bp, Homo sapien
tttcagggtgatctaatgaaatgaa

SEQ ID NO: 662626 - DNA, 25 bp, Homo sapien
tgatatatcttctcaagacattttc

SEQ ID NO: 662627 - DNA, 25 bp, Homo sapien
gaatcttcctttgattacaagttgg

SEQ ID NO: 662628 - DNA, 25 bp, Homo sapien
gttggaatcttcctttgattacaag

SEQ ID NO: 662629 - DNA, 25 bp, Homo sapien
tttctatctgtttctgttggaatct

SEQ ID NO: 662630 - DNA, 25 bp, Homo sapien
tattcagtagcataggataaactct

SEQ ID NO: 662631 - DNA, 25 bp, Homo sapien
ggataaactctaggactggtgctat

SEQ ID NO: 662632 - DNA, 25 bp, Homo sapien
aattccagcacctttaaacttaatg

SEQ ID NO: 662633 - DNA, 25 bp, Homo sapien
actggtgctatactacttggtttcc

SEQ ID NO: 662634 - DNA, 25 bp, Homo sapien
agacggacgtccgagtgggactctc

SEQ ID NO: 662635 - DNA, 25 bp, Homo sapien
gactctcctggattatacactttaa

SEQ ID NO: 662636 - DNA, 25 bp, Homo sapien
tctgtcttgcgagagagacggacgt

SEQ ID NO: 662637 - DNA, 25 bp, Homo sapien
cactttaaatttgtaagctgttatc

SEQ ID NO: 662638 - DNA, 25 bp, Homo sapien
tactgaacctgtttccgaacgtgaa

SEQ ID NO: 662639 - DNA, 25 bp, Homo sapien
caagcctgttaggtgatcaagctgc

SEQ ID NO: 662640 - DNA, 25 bp, Homo sapien
cacaccaagtgtagcaaatcccaac

SEQ ID NO: 662641 - DNA, 25 bp, Homo sapien
tatctctgtactgccagtgacgcac

SEQ ID NO: 662642 - DNA, 25 bp, Homo sapien
cttgtacccaattcagccaacaaaa

SEQ ID NO: 662643 - DNA, 25 bp, Homo sapien
atgcaaggagatgtttgggctgacg

SEQ ID NO: 662644 - DNA, 25 bp, Homo sapien
aaaatgcaaggagatgtttgggctg

SEQ ID NO: 662645 - DNA, 25 bp, Homo sapien
caaggagatgtttgggctgacgatg

SEQ ID NO: 662646 - DNA, 25 bp, Homo sapien
aagatgttcggtgaagttttgcctc

SEQ ID NO: 662647 - DNA, 25 bp, Homo sapien
gagcagccacgtccaacttatggaa

SEQ ID NO: 662648 - DNA, 25 bp, Homo sapien
tgataataaaaacctgggagcagcc

SEQ ID NO: 662649 - DNA, 25 bp, Homo sapien
tctgagctactggaaagatacatgt

SEQ ID NO: 662650 - DNA, 25 bp, Homo sapien
tggaggtttcatgacaaatttcctt

SEQ ID NO: 662651 - DNA, 25 bp, Homo sapien
caacggccgttccaataagatttat

SEQ ID NO: 662652 - DNA, 25 bp, Homo sapien
tccaccatcagtcattacttcaacg

SEQ ID NO: 662653 - DNA, 25 bp, Homo sapien
agtactacaatgactgctgcactct

SEQ ID NO: 662654 - DNA, 25 bp, Homo sapien
cacgggtgcgcaccaggaattgctg

SEQ ID NO: 662655 - DNA, 25 bp, Homo sapien
tcgtatgtgtagtctctttctgagc

SEQ ID NO: 662656 - DNA, 25 bp, Homo sapien
ttctgagcctgcccaagcagggcct

SEQ ID NO: 662657 - DNA, 25 bp, Homo sapien
agataccatcatcttttttgttgtc

SEQ ID NO: 662658 - DNA, 25 bp, Homo sapien
ggcctgtctgattactgaatgagat

SEQ ID NO: 662659 - DNA, 25 bp, Homo sapien
ttcatcctcatctgggaacttaaca

SEQ ID NO: 662660 - DNA, 25 bp, Homo sapien
gttggttcttgaacatcactttcaa

SEQ ID NO: 662661 - DNA, 25 bp, Homo sapien
atcctctggttcagttggttcttga

SEQ ID NO: 662662 - DNA, 25 bp, Homo sapien
tcatctttctctagtatttcatcct

SEQ ID NO: 662663 - DNA, 25 bp, Homo sapien
gagtctgaacatttgatactgggac

SEQ ID NO: 662664 - DNA, 25 bp, Homo sapien
agaaagtgagatgagtctgaacatt

SEQ ID NO: 662665 - DNA, 25 bp, Homo sapien
gaacatttgatactgggactattct

SEQ ID NO: 662666 - DNA, 25 bp, Homo sapien
acattttctgttgagatgaggaggt

SEQ ID NO: 662667 - DNA, 25 bp, Homo sapien
caagacacttgtgggatctttcccc

SEQ ID NO: 662668 - DNA, 25 bp, Homo sapien
aaactggctcacagagactctgcca

SEQ ID NO: 662669 - DNA, 25 bp, Homo sapien
tgtcagaaatggaccaaactggctc

SEQ ID NO: 662670 - DNA, 25 bp, Homo sapien
tatttccaaaccaggctactgtcag

SEQ ID NO: 662671 - DNA, 25 bp, Homo sapien
aagttcccacattcgccatcaagag

SEQ ID NO: 662672 - DNA, 25 bp, Homo sapien
caatgccagttaggtgtcctccagt

SEQ ID NO: 662673 - DNA, 25 bp, Homo sapien
tgtccaacatggctataaactcgga

SEQ ID NO: 662674 - DNA, 25 bp, Homo sapien
cagatttcacaggtttaagggctca

SEQ ID NO: 662675 - DNA, 25 bp, Homo sapien
tatcctgaactgtgctgtcaacctt

SEQ ID NO: 662676 - DNA, 25 bp, Homo sapien
aagagcagaaaaggccagtctcagt

SEQ ID NO: 662677 - DNA, 25 bp, Homo sapien
tgtgcctacatcctgacctgggaca

SEQ ID NO: 662678 - DNA, 25 bp, Homo sapien
tgagtcataaacatcccagaagagc

SEQ ID NO: 662679 - DNA, 25 bp, Homo sapien
tgttaaccaaaactttctgtagcac

SEQ ID NO: 662680 - DNA, 25 bp, Homo sapien
cctgatgaccaggatacctctaaca

SEQ ID NO: 662681 - DNA, 25 bp, Homo sapien
tggaggaatcaaccaacaaagcctt

SEQ ID NO: 662682 - DNA, 25 bp, Homo sapien
gaatgtccgtgccttgcctgatgac

SEQ ID NO: 662683 - DNA, 25 bp, Homo sapien
gagggaaacatcagccattagcaac

SEQ ID NO: 662684 - DNA, 25 bp, Homo sapien
tcacagggtctcaagtatccacaag

SEQ ID NO: 662685 - DNA, 25 bp, Homo sapien
ctaaagtgattcctaggcagggtct

SEQ ID NO: 662686 - DNA, 25 bp, Homo sapien
aagaaaatgacgctaccagtggcaa

SEQ ID NO: 662687 - DNA, 25 bp, Homo sapien
aagaagttcaagtcatctagatcat

SEQ ID NO: 662688 - DNA, 25 bp, Homo sapien
gaagttcaagtcatctagatcatca

SEQ ID NO: 662689 - DNA, 25 bp, Homo sapien
aagttcaagtcatctagatcatcag

SEQ ID NO: 662690 - DNA, 25 bp, Homo sapien
gttcaagtcatctagatcatcagaa

SEQ ID NO: 662691 - DNA, 25 bp, Homo sapien
aaagaccaaggcataattattaaca

SEQ ID NO: 662692 - DNA, 25 bp, Homo sapien
aagaccaaggcataattattaacaa

SEQ ID NO: 662693 - DNA, 25 bp, Homo sapien
taaaaagaccaaggcataattatta

SEQ ID NO: 662694 - DNA, 25 bp, Homo sapien
ctaaaaagaccaaggcataattatt

SEQ ID NO: 662695 - DNA, 25 bp, Homo sapien
gttaggtatccccagagtgattgga

SEQ ID NO: 662696 - DNA, 25 bp, Homo sapien
tatacgtgcggtctctcaccaacaa

SEQ ID NO: 662697 - DNA, 25 bp, Homo sapien
tctgcttactccaactgaggtactt

SEQ ID NO: 662698 - DNA, 25 bp, Homo sapien
gacaaagtcagagctctaacacaat

SEQ ID NO: 662699 - DNA, 25 bp, Homo sapien
taaaaaggtccactgcatacagact

SEQ ID NO: 662700 - DNA, 25 bp, Homo sapien
gctctggaacagcaaggtttcatct

SEQ ID NO: 662701 - DNA, 25 bp, Homo sapien
gaggtcgctgcatatccaaaagcca

SEQ ID NO: 662702 - DNA, 25 bp, Homo sapien
gaaccagggcttctatgacaacagt

SEQ ID NO: 662703 - DNA, 25 bp, Homo sapien
tttttcctagtgtcctcttcatcag

SEQ ID NO: 662704 - DNA, 25 bp, Homo sapien
ctctgtttgggtatccccttcctca

SEQ ID NO: 662705 - DNA, 25 bp, Homo sapien
aaatccttgtcctcagttggctctg

SEQ ID NO: 662706 - DNA, 25 bp, Homo sapien
tgtttctgaaggctgggtttcctct

SEQ ID NO: 662707 - DNA, 25 bp, Homo sapien
cttcttgctcatagtaggatcaaaa

SEQ ID NO: 662708 - DNA, 25 bp, Homo sapien
ttcttcttgctcatagtaggatcaa

SEQ ID NO: 662709 - DNA, 25 bp, Homo sapien
ttttcttcttgctcatagtaggatc

SEQ ID NO: 662710 - DNA, 25 bp, Homo sapien
tgctcatagtaggatcaaaaatcat

SEQ ID NO: 662711 - DNA, 25 bp, Homo sapien
tgtccttgcccagtagagaagtatg

SEQ ID NO: 662712 - DNA, 25 bp, Homo sapien
gaagtgtccctaccaagatagaaga

SEQ ID NO: 662713 - DNA, 25 bp, Homo sapien
gatggcaaggatcctgatatcacca

SEQ ID NO: 662714 - DNA, 25 bp, Homo sapien
ttttttcaagcatcaagttccctag

SEQ ID NO: 662715 - DNA, 25 bp, Homo sapien
ccaagaaatcaactttatagtcata

SEQ ID NO: 662716 - DNA, 25 bp, Homo sapien
aaaaattagcgggtgcaagagcatg

SEQ ID NO: 662717 - DNA, 25 bp, Homo sapien
aaaaatcatagttctactaggttga

SEQ ID NO: 662718 - DNA, 25 bp, Homo sapien
aaaattagcgggtgcaagagcatgc

SEQ ID NO: 662719 - DNA, 25 bp, Homo sapien
ttttggcaagtttctggcttaatta

SEQ ID NO: 662720 - DNA, 25 bp, Homo sapien
tcctgtgagcacatttactggcctt

SEQ ID NO: 662721 - DNA, 25 bp, Homo sapien
acgtcgccggtagccctctgttaag

SEQ ID NO: 662722 - DNA, 25 bp, Homo sapien
gccccgacaagatagcctagaaagt

SEQ ID NO: 662723 - DNA, 25 bp, Homo sapien
caatgttaagcaatacctactggga

SEQ ID NO: 662724 - DNA, 25 bp, Homo sapien
caacgtgtgctctccattccggaaa

SEQ ID NO: 662725 - DNA, 25 bp, Homo sapien
tccgggaggacgactcaacgtgtgc

SEQ ID NO: 662726 - DNA, 25 bp, Homo sapien
cactggagtgggttaggcttctcgc

SEQ ID NO: 662727 - DNA, 25 bp, Homo sapien
aaggaatgcagggatcgccagcccc

SEQ ID NO: 662728 - DNA, 25 bp, Homo sapien
atcagcgaaaggaaacgacaccccg

SEQ ID NO: 662729 - DNA, 25 bp, Homo sapien
accgcactaggctcttgcatcagcg

SEQ ID NO: 662730 - DNA, 25 bp, Homo sapien
taggctcttgcatcagcgaaaggaa

SEQ ID NO: 662731 - DNA, 25 bp, Homo sapien
agcgctgcccctgccgatacctctc

SEQ ID NO: 662732 - DNA, 25 bp, Homo sapien
taaggagcctggactagtgccatca

SEQ ID NO: 662733 - DNA, 25 bp, Homo sapien
tgggagagacagaatcacccctgtt

SEQ ID NO: 662734 - DNA, 25 bp, Homo sapien
tgagaatctgaatccctaaggagcc

SEQ ID NO: 662735 - DNA, 25 bp, Homo sapien
tccagacaatctgatgccagtggct

SEQ ID NO: 662736 - DNA, 25 bp, Homo sapien
tcacaacaagtcatcctcaatgact

SEQ ID NO: 662737 - DNA, 25 bp, Homo sapien
cacaacaagtcatcctcaatgactg

SEQ ID NO: 662738 - DNA, 25 bp, Homo sapien
tctcttgtaactccagttcatcctc

SEQ ID NO: 662739 - DNA, 25 bp, Homo sapien
tggttctcttgtaactccagttcat

SEQ ID NO: 662740 - DNA, 25 bp, Homo sapien
gttctcttgtaactccagttcatcc

SEQ ID NO: 662741 - DNA, 25 bp, Homo sapien
ttctcccatatctttttcttggttc

SEQ ID NO: 662742 - DNA, 25 bp, Homo sapien
tccattatagaaaagctgcggctct

SEQ ID NO: 662743 - DNA, 25 bp, Homo sapien
cctgggatttgacagcagggctgca

SEQ ID NO: 662744 - DNA, 25 bp, Homo sapien
caaagtgcaggccatagtcgtttct

SEQ ID NO: 662745 - DNA, 25 bp, Homo sapien
tgggcagctcacatctgggaattac

SEQ ID NO: 662746 - DNA, 25 bp, Homo sapien
ctcctggaagacgacagactgtctc

SEQ ID NO: 662747 - DNA, 25 bp, Homo sapien
cctggaagacgacagactgtctctt

SEQ ID NO: 662748 - DNA, 25 bp, Homo sapien
tcctggaagacgacagactgtctct

SEQ ID NO: 662749 - DNA, 25 bp, Homo sapien
tcagaaaggagcaagtactctggtt

SEQ ID NO: 662750 - DNA, 25 bp, Homo sapien
cctcagctcggtccggtggactgct

SEQ ID NO: 662751 - DNA, 25 bp, Homo sapien
gcaagtactctggttgccatatttc

SEQ ID NO: 662752 - DNA, 25 bp, Homo sapien
gaagaccattcctcagctcggtccg

SEQ ID NO: 662753 - DNA, 25 bp, Homo sapien
gaaggccctctggtcccagcggtct

SEQ ID NO: 662754 - DNA, 25 bp, Homo sapien
ccctagagcccttagaggtctgcat

SEQ ID NO: 662755 - DNA, 25 bp, Homo sapien
ctgcgtagccggttctgaggggtga

SEQ ID NO: 662756 - DNA, 25 bp, Homo sapien
agagacaagaattggtctccagctg

SEQ ID NO: 662757 - DNA, 25 bp, Homo sapien
ggagagacaagaattggtctccagc

SEQ ID NO: 662758 - DNA, 25 bp, Homo sapien
gagagacaagaattggtctccagct

SEQ ID NO: 662759 - DNA, 25 bp, Homo sapien
gggccagagtagcacttcaaaaatt

SEQ ID NO: 662760 - DNA, 25 bp, Homo sapien
tcttctgcgggccagagtagcactt

SEQ ID NO: 662761 - DNA, 25 bp, Homo sapien
cattttcttctgcgggccagagtag

SEQ ID NO: 662762 - DNA, 25 bp, Homo sapien
tctgcgggccagagtagcacttcaa

SEQ ID NO: 662763 - DNA, 25 bp, Homo sapien
tcttttgcttcacaatctttgagta

SEQ ID NO: 662764 - DNA, 25 bp, Homo sapien
cagatgggatgaacggaaaaacttc

SEQ ID NO: 662765 - DNA, 25 bp, Homo sapien
ctttgagtatatgttctgaagcaga

SEQ ID NO: 662766 - DNA, 25 bp, Homo sapien
ccaggcaaataatcattcgatgaag

SEQ ID NO: 662767 - DNA, 25 bp, Homo sapien
gacagtctgctagagaggcttgcct

SEQ ID NO: 662768 - DNA, 25 bp, Homo sapien
agacagtctgctagagaggcttgcc

SEQ ID NO: 662769 - DNA, 25 bp, Homo sapien
atttgatcatcgctgctcaggaagg

SEQ ID NO: 662770 - DNA, 25 bp, Homo sapien
aaatttgatcatcgctgctcaggaa

SEQ ID NO: 662771 - DNA, 25 bp, Homo sapien
taaaatttgatcatcgctgctcagg

SEQ ID NO: 662772 - DNA, 25 bp, Homo sapien
aataaaatttgatcatcgctgctca

SEQ ID NO: 662773 - DNA, 25 bp, Homo sapien
tctgaacttttgcactggaatgacg

SEQ ID NO: 662774 - DNA, 25 bp, Homo sapien
gtggagaaagctttaataaatcttg

SEQ ID NO: 662775 - DNA, 25 bp, Homo sapien
ggtaagccatcttgctctgaacttt

SEQ ID NO: 662776 - DNA, 25 bp, Homo sapien
gaaaacaggtaagccatcttgctct

SEQ ID NO: 662777 - DNA, 25 bp, Homo sapien
gtcacagatgtatgctgataggaac

SEQ ID NO: 662778 - DNA, 25 bp, Homo sapien
agttcgcatcataccctgcaaagca

SEQ ID NO: 662779 - DNA, 25 bp, Homo sapien
gatgttaccagagttcgcatcatac

SEQ ID NO: 662780 - DNA, 25 bp, Homo sapien
agagttcgcatcataccctgcaaag

SEQ ID NO: 662781 - DNA, 25 bp, Homo sapien
taccagagttcgcatcataccctgc

SEQ ID NO: 662782 - DNA, 25 bp, Homo sapien
gagaagtgagcaccatgagatagat

SEQ ID NO: 662783 - DNA, 25 bp, Homo sapien
tgagaagtgagcaccatgagataga

SEQ ID NO: 662784 - DNA, 25 bp, Homo sapien
ctgagaagtgagcaccatgagatag

SEQ ID NO: 662785 - DNA, 25 bp, Homo sapien
gaagtgagcaccatgagatagatac

SEQ ID NO: 662786 - DNA, 25 bp, Homo sapien
tggaagagcttctgccaacatatac

SEQ ID NO: 662787 - DNA, 25 bp, Homo sapien
gagcttctgccaacatatacagcaa

SEQ ID NO: 662788 - DNA, 25 bp, Homo sapien
aagagcttctgccaacatatacagc

SEQ ID NO: 662789 - DNA, 25 bp, Homo sapien
gcttctgccaacatatacagcaatc

SEQ ID NO: 662790 - DNA, 25 bp, Homo sapien
tctgcgaacagaggccagtagtaac

SEQ ID NO: 662791 - DNA, 25 bp, Homo sapien
aaaactctgcgaacagaggccagta

SEQ ID NO: 662792 - DNA, 25 bp, Homo sapien
aaactctgcgaacagaggccagtag

SEQ ID NO: 662793 - DNA, 25 bp, Homo sapien
aaaatctggccaacatcttcttcct

SEQ ID NO: 662794 - DNA, 25 bp, Homo sapien
gaaaatctggccaacatcttcttcc

SEQ ID NO: 662795 - DNA, 25 bp, Homo sapien
caccagatttggaatgcactgttcc

SEQ ID NO: 662796 - DNA, 25 bp, Homo sapien
tccaccagatttggaatgcactgtt

SEQ ID NO: 662797 - DNA, 25 bp, Homo sapien
ccagatttggaatgcactgttccct

SEQ ID NO: 662798 - DNA, 25 bp, Homo sapien
agatttggaatgcactgttccctca

SEQ ID NO: 662799 - DNA, 25 bp, Homo sapien
gatatgagcgtctccctaattagtt

SEQ ID NO: 662800 - DNA, 25 bp, Homo sapien
tgagcttgcagccatgatatgagcg

SEQ ID NO: 662801 - DNA, 25 bp, Homo sapien
gatgttccagtacttgaaagcagaa

SEQ ID NO: 662802 - DNA, 25 bp, Homo sapien
tgcaacaaaaagcaaggcgaggact

SEQ ID NO: 662803 - DNA, 25 bp, Homo sapien
tctgggctagagcttctgcacacac

SEQ ID NO: 662804 - DNA, 25 bp, Homo sapien
ctctgggctagagcttctgcacaca

SEQ ID NO: 662805 - DNA, 25 bp, Homo sapien
tgaatcagcatttggatttagccct

SEQ ID NO: 662806 - DNA, 25 bp, Homo sapien
catttggatttagccctaatagagc

SEQ ID NO: 662807 - DNA, 25 bp, Homo sapien
ggatttagccctaatagagcctgtt

SEQ ID NO: 662808 - DNA, 25 bp, Homo sapien
cagcatttggatttagccctaatag

SEQ ID NO: 662809 - DNA, 25 bp, Homo sapien
tacttggagttttctggttataata

SEQ ID NO: 662810 - DNA, 25 bp, Homo sapien
gttttctggttataataggcttgcc

SEQ ID NO: 662811 - DNA, 25 bp, Homo sapien
gagttttctggttataataggcttg

SEQ ID NO: 662812 - DNA, 25 bp, Homo sapien
ttggagttttctggttataataggc

SEQ ID NO: 662813 - DNA, 25 bp, Homo sapien
ggccctcgtccttgtcgccgtagtc

SEQ ID NO: 662814 - DNA, 25 bp, Homo sapien
cctcgtccttgtcgccgtagtcctc

SEQ ID NO: 662815 - DNA, 25 bp, Homo sapien
agcggccctcgtccttgtcgccgta

SEQ ID NO: 662816 - DNA, 25 bp, Homo sapien
gcggccctcgtccttgtcgccgtag

SEQ ID NO: 662817 - DNA, 25 bp, Homo sapien
gagggccgtattgagcaactctgaa

SEQ ID NO: 662818 - DNA, 25 bp, Homo sapien
cccatgactcagaatcattgcttcg

SEQ ID NO: 662819 - DNA, 25 bp, Homo sapien
gagcaactctgaaactagatgcaga

SEQ ID NO: 662820 - DNA, 25 bp, Homo sapien
gcagaacagatgtcgttgtagaagc

SEQ ID NO: 662821 - DNA, 25 bp, Homo sapien
tggtcaagtgatttcccacaaggta

SEQ ID NO: 662822 - DNA, 25 bp, Homo sapien
taggaatagactcacacatgtatgg

SEQ ID NO: 662823 - DNA, 25 bp, Homo sapien
tagacaagtcagtagttcagaatag

SEQ ID NO: 662824 - DNA, 25 bp, Homo sapien
agtttgaagacttcactctccctga

SEQ ID NO: 662825 - DNA, 25 bp, Homo sapien
gaaacattaaattgggctttgtcga

SEQ ID NO: 662826 - DNA, 25 bp, Homo sapien
gctttgtcgaaattaataacttcta

SEQ ID NO: 662827 - DNA, 25 bp, Homo sapien
acagaaacattaaattgggctttgt

SEQ ID NO: 662828 - DNA, 25 bp, Homo sapien
caaaggacactgttaagaacaatga

SEQ ID NO: 662829 - DNA, 25 bp, Homo sapien
caaaggcccagatgaaggtctacac

SEQ ID NO: 662830 - DNA, 25 bp, Homo sapien
taagtgagcttgctttttaacccag

SEQ ID NO: 662831 - DNA, 25 bp, Homo sapien
tccaacagggacaacacaaaggccc

SEQ ID NO: 662832 - DNA, 25 bp, Homo sapien
ttaacccagggagatattacttcac

SEQ ID NO: 662833 - DNA, 25 bp, Homo sapien
tacatactgtaggatggttgcacaa

SEQ ID NO: 662834 - DNA, 25 bp, Homo sapien
caccaatttaccaggagccagtcaa

SEQ ID NO: 662835 - DNA, 25 bp, Homo sapien
taggctaacttttggcagaggtcac

SEQ ID NO: 662836 - DNA, 25 bp, Homo sapien
gaggtcaaaggtctgatgtcaccaa

SEQ ID NO: 662837 - DNA, 25 bp, Homo sapien
tatttcatgtttaccgcatctcttg

SEQ ID NO: 662838 - DNA, 25 bp, Homo sapien
taatgttgccagtaagaggccacat

SEQ ID NO: 662839 - DNA, 25 bp, Homo sapien
tacaaaatccatggctaatgttgcc

SEQ ID NO: 662840 - DNA, 25 bp, Homo sapien
catagctcctaagggtacaaaatcc

SEQ ID NO: 662841 - DNA, 25 bp, Homo sapien
gggtcctttgagattccatacaaat

SEQ ID NO: 662842 - DNA, 25 bp, Homo sapien
ttctattatgggtttatttattcta

SEQ ID NO: 662843 - DNA, 25 bp, Homo sapien
cacatttgtctttatgcaagtacca

SEQ ID NO: 662844 - DNA, 25 bp, Homo sapien
tattccatttttctacacatttgtc

SEQ ID NO: 662845 - DNA, 25 bp, Homo sapien
tttgtaaaacctctcttgatctgct

SEQ ID NO: 662846 - DNA, 25 bp, Homo sapien
ttttgtaaaacctctcttgatctgc

SEQ ID NO: 662847 - DNA, 25 bp, Homo sapien
aagtctccccgaataatttcatcct

SEQ ID NO: 662848 - DNA, 25 bp, Homo sapien
cctccccattactgaggcagcacag

SEQ ID NO: 662849 - DNA, 25 bp, Homo sapien
tgtaaagtctccccgaataatttca

SEQ ID NO: 662850 - DNA, 25 bp, Homo sapien
tcctccccattactgaggcagcaca

SEQ ID NO: 662851 - DNA, 25 bp, Homo sapien
gtttacaatgagcaacatcaggcat

SEQ ID NO: 662852 - DNA, 25 bp, Homo sapien
ttgtttacaatgagcaacatcaggc

SEQ ID NO: 662853 - DNA, 25 bp, Homo sapien
cattgtttacaatgagcaacatcag

SEQ ID NO: 662854 - DNA, 25 bp, Homo sapien
tgtttacaatgagcaacatcaggca

SEQ ID NO: 662855 - DNA, 25 bp, Homo sapien
ttactgattaactccaattcccaca

SEQ ID NO: 662856 - DNA, 25 bp, Homo sapien
taaacttgaagctccctttactgat

SEQ ID NO: 662857 - DNA, 25 bp, Homo sapien
ggcatgagccaatgtagcccgttgt

SEQ ID NO: 662858 - DNA, 25 bp, Homo sapien
ttaaaattgcagataaacttgaagc

SEQ ID NO: 662859 - DNA, 25 bp, Homo sapien
cttgatctgtgttcactgtccttca

SEQ ID NO: 662860 - DNA, 25 bp, Homo sapien
ccttcacagggatgagctttaccaa

SEQ ID NO: 662861 - DNA, 25 bp, Homo sapien
gggtccagctgatacttcttgatct

SEQ ID NO: 662862 - DNA, 25 bp, Homo sapien
caggtctctggccattggtgcttgg

SEQ ID NO: 662863 - DNA, 25 bp, Homo sapien
ggacctagggtcaggcagccattta

SEQ ID NO: 662864 - DNA, 25 bp, Homo sapien
gaaagctgagacctaggtggaccta

SEQ ID NO: 662865 - DNA, 25 bp, Homo sapien
gacagttgagaaacccagttacaca

SEQ ID NO: 662866 - DNA, 25 bp, Homo sapien
gagtgccgggcccttaaaactgaga

SEQ ID NO: 662867 - DNA, 25 bp, Homo sapien
tacgatctcagctcactgcaacttc

SEQ ID NO: 662868 - DNA, 25 bp, Homo sapien
aggctggagtgaagtggtacgatct

SEQ ID NO: 662869 - DNA, 25 bp, Homo sapien
tttgagacagtttccctctttcacc

SEQ ID NO: 662870 - DNA, 25 bp, Homo sapien
ggtacgatctcagctcactgcaact

SEQ ID NO: 662871 - DNA, 25 bp, Homo sapien
tgtgagaagggcaaataagtactgt

SEQ ID NO: 662872 - DNA, 25 bp, Homo sapien
tttgtatagcaagctaagcactgcg

SEQ ID NO: 662873 - DNA, 25 bp, Homo sapien
cactcatttgggctttgatgaccat

SEQ ID NO: 662874 - DNA, 25 bp, Homo sapien
cactgcgatcagtgggaaaggacaa

SEQ ID NO: 662875 - DNA, 25 bp, Homo sapien
tgacacaaactatacctgcattcgt

SEQ ID NO: 662876 - DNA, 25 bp, Homo sapien
acatatatgcttgtctgaaggggcc

SEQ ID NO: 662877 - DNA, 25 bp, Homo sapien
ggtttgggaatctaggatatgagcc

SEQ ID NO: 662878 - DNA, 25 bp, Homo sapien
cagggggcctatgtcaacagctcca

SEQ ID NO: 662879 - DNA, 25 bp, Homo sapien
gggtaagtcacctagcctctgggct

SEQ ID NO: 662880 - DNA, 25 bp, Homo sapien
gatcaagcatgcttcccagggtgct

SEQ ID NO: 662881 - DNA, 25 bp, Homo sapien
taagtaactagcacggatcacacag

SEQ ID NO: 662882 - DNA, 25 bp, Homo sapien
acatatgcaagtctgggatggacca

SEQ ID NO: 662883 - DNA, 25 bp, Homo sapien
tcagtaacctagagcagcagcgtcc

SEQ ID NO: 662884 - DNA, 25 bp, Homo sapien
cagcagcgtccaatagaaatacaat

SEQ ID NO: 662885 - DNA, 25 bp, Homo sapien
agtaacctagagcagcagcgtccaa

SEQ ID NO: 662886 - DNA, 25 bp, Homo sapien
aaactcagtaacctagagcagcagc

SEQ ID NO: 662887 - DNA, 25 bp, Homo sapien
accttctaggaaccccagcatgtct

SEQ ID NO: 662888 - DNA, 25 bp, Homo sapien
ccaaccccattaaatcacgcatttg

SEQ ID NO: 662889 - DNA, 25 bp, Homo sapien
ccccagcatgtctggctatcaggaa

SEQ ID NO: 662890 - DNA, 25 bp, Homo sapien
cattaaatcacgcatttgcccttgt

SEQ ID NO: 662891 - DNA, 25 bp, Homo sapien
agactcggcccaagaggtgtaccca

SEQ ID NO: 662892 - DNA, 25 bp, Homo sapien
ggccaattcccatttgcgaagagga

SEQ ID NO: 662893 - DNA, 25 bp, Homo sapien
tcccagctggatatacgagttgtag

SEQ ID NO: 662894 - DNA, 25 bp, Homo sapien
cagcaaatagcttcattggagtcca

SEQ ID NO: 662895 - DNA, 25 bp, Homo sapien
gagtcaccacacccggccctctgtt

SEQ ID NO: 662896 - DNA, 25 bp, Homo sapien
atgagtcaccacacccggccctctg

SEQ ID NO: 662897 - DNA, 25 bp, Homo sapien
tgagtcaccacacccggccctctgt

SEQ ID NO: 662898 - DNA, 25 bp, Homo sapien
agtcaccacacccggccctctgttt

SEQ ID NO: 662899 - DNA, 25 bp, Homo sapien
agctgctgcacccggtctgtgttgg

SEQ ID NO: 662900 - DNA, 25 bp, Homo sapien
cctaaggcaagctggccttcgtggg

SEQ ID NO: 662901 - DNA, 25 bp, Homo sapien
gctgcacccggtctgtgttggcttc

SEQ ID NO: 662902 - DNA, 25 bp, Homo sapien
ctcaactcactctaactgccacctc

SEQ ID NO: 662903 - DNA, 25 bp, Homo sapien
cacagccagtcacacagaggtgggc

SEQ ID NO: 662904 - DNA, 25 bp, Homo sapien
gacctgcagagtgacccggataagt

SEQ ID NO: 662905 - DNA, 25 bp, Homo sapien
taaagtcccgggattgagtccagac

SEQ ID NO: 662906 - DNA, 25 bp, Homo sapien
tggagaagcaaccaacctggaactg

SEQ ID NO: 662907 - DNA, 25 bp, Homo sapien
cagcccagatatcaggagtggagta

SEQ ID NO: 662908 - DNA, 25 bp, Homo sapien
tggatactgcaggacccttggccaa

SEQ ID NO: 662909 - DNA, 25 bp, Homo sapien
aaaaatccaaccagggctaggcctg

SEQ ID NO: 662910 - DNA, 25 bp, Homo sapien
tgggtacccggtcagtgtcacacat

SEQ ID NO: 662911 - DNA, 25 bp, Homo sapien
cagggactaaaagtactaacctcat

SEQ ID NO: 662912 - DNA, 25 bp, Homo sapien
ccagggttgtgaaaggaaccatctg

SEQ ID NO: 662913 - DNA, 25 bp, Homo sapien
tgaggtttaagagaaggcccagcac

SEQ ID NO: 662914 - DNA, 25 bp, Homo sapien
ccatctggttataaagtggtggcag

SEQ ID NO: 662915 - DNA, 25 bp, Homo sapien
catttggaacagtatgacggctgca

SEQ ID NO: 662916 - DNA, 25 bp, Homo sapien
gcttgaagagggtactctgttcccg

SEQ ID NO: 662917 - DNA, 25 bp, Homo sapien
cctagatggcaaaacacatgggctt

SEQ ID NO: 662918 - DNA, 25 bp, Homo sapien
tgactccactactgacttccaggct

SEQ ID NO: 662919 - DNA, 25 bp, Homo sapien
ggtcaacttcacattcagcttgccc

SEQ ID NO: 662920 - DNA, 25 bp, Homo sapien
gtgatccggcttgaaggggccatca

SEQ ID NO: 662921 - DNA, 25 bp, Homo sapien
ttagcttggtcaacttcacattcag

SEQ ID NO: 662922 - DNA, 25 bp, Homo sapien
tcagtagcggtagtgatccggcttg

SEQ ID NO: 662923 - DNA, 25 bp, Homo sapien
cttgggcaggaaatgaaccccaacg

SEQ ID NO: 662924 - DNA, 25 bp, Homo sapien
ttcttgggcaggaaatgaaccccaa

SEQ ID NO: 662925 - DNA, 25 bp, Homo sapien
cttcttgggcaggaaatgaacccca

SEQ ID NO: 662926 - DNA, 25 bp, Homo sapien
tcttgggcaggaaatgaaccccaac

SEQ ID NO: 662927 - DNA, 25 bp, Homo sapien
ctggatgggtccacagctcgatctg

SEQ ID NO: 662928 - DNA, 25 bp, Homo sapien
atgggtccacagctcgatctgcgcc

SEQ ID NO: 662929 - DNA, 25 bp, Homo sapien
gggtccacagctcgatctgcgccat

SEQ ID NO: 662930 - DNA, 25 bp, Homo sapien
ggatgggtccacagctcgatctgcg

SEQ ID NO: 662931 - DNA, 25 bp, Homo sapien
gcgcccattcttcaaccgataccgg

SEQ ID NO: 662932 - DNA, 25 bp, Homo sapien
atgatgcggcgcccattcttcaacc

SEQ ID NO: 662933 - DNA, 25 bp, Homo sapien
tgcggcgcccattcttcaaccgata

SEQ ID NO: 662934 - DNA, 25 bp, Homo sapien
cattcttcaaccgataccggtccac

SEQ ID NO: 662935 - DNA, 25 bp, Homo sapien
ccacggcgttctcgttgagccactt

SEQ ID NO: 662936 - DNA, 25 bp, Homo sapien
cggcgttctcgttgagccacttgac

SEQ ID NO: 662937 - DNA, 25 bp, Homo sapien
cacggcgttctcgttgagccacttg

SEQ ID NO: 662938 - DNA, 25 bp, Homo sapien
acggcgttctcgttgagccacttga

SEQ ID NO: 662939 - DNA, 25 bp, Homo sapien
aagaccgtgggagattgtcagggac

SEQ ID NO: 662940 - DNA, 25 bp, Homo sapien
caggcctcatccatggtggtcacct

SEQ ID NO: 662941 - DNA, 25 bp, Homo sapien
ggcctcatccatggtggtcacctca

SEQ ID NO: 662942 - DNA, 25 bp, Homo sapien
ggccaaggatgatgtcaatacagcc

SEQ ID NO: 662943 - DNA, 25 bp, Homo sapien
gatgtcaatacagcctgtggtggtg

SEQ ID NO: 662944 - DNA, 25 bp, Homo sapien
atgacgcgggctccgaaaccccgca

SEQ ID NO: 662945 - DNA, 25 bp, Homo sapien
ggtcaatctcggtgatgatgacgcg

SEQ ID NO: 662946 - DNA, 25 bp, Homo sapien
tctcggtgatgatgacgcgggctcc

SEQ ID NO: 662947 - DNA, 25 bp, Homo sapien
cacatctgtggcccgcttgatgcca

SEQ ID NO: 662948 - DNA, 25 bp, Homo sapien
accccagtcgtggtctcctcagaga

SEQ ID NO: 662949 - DNA, 25 bp, Homo sapien
gtggaccccagtcgtggtctcctca

SEQ ID NO: 662950 - DNA, 25 bp, Homo sapien
tgtagaggttgtggaccccagtcgt

SEQ ID NO: 662951 - DNA, 25 bp, Homo sapien
tcttgtagaggttgtggaccccagt

SEQ ID NO: 662952 - DNA, 25 bp, Homo sapien
cgcccccgtcgtccagaatcatgtt

SEQ ID NO: 662953 - DNA, 25 bp, Homo sapien
gcccgtccttgaagtacagggtctg

SEQ ID NO: 662954 - DNA, 25 bp, Homo sapien
gggtctgctcaatgcaccacaggta

SEQ ID NO: 662955 - DNA, 25 bp, Homo sapien
cagaagctgcgggtacttggtgtgg

SEQ ID NO: 662956 - DNA, 25 bp, Homo sapien
caaagagggcagaatcccttcacaa

SEQ ID NO: 662957 - DNA, 25 bp, Homo sapien
attttgtggcggtgactcctctccc

SEQ ID NO: 662958 - DNA, 25 bp, Homo sapien
taaggaagtctgttgctctagcagt

SEQ ID NO: 662959 - DNA, 25 bp, Homo sapien
tagcagtcagtgaagcaaagagggc

SEQ ID NO: 662960 - DNA, 25 bp, Homo sapien
ccggaatgccagccttggcaatggc

SEQ ID NO: 662961 - DNA, 25 bp, Homo sapien
cagccttggcaatggcagccgccgc

SEQ ID NO: 662962 - DNA, 25 bp, Homo sapien
cggaatgccagccttggcaatggca

SEQ ID NO: 662963 - DNA, 25 bp, Homo sapien
ttggcaatggcagccgccgcatggt

SEQ ID NO: 662964 - DNA, 25 bp, Homo sapien
gagaagatgttgcagctggaccact

SEQ ID NO: 662965 - DNA, 25 bp, Homo sapien
agatgttgcagctggaccactgcac

SEQ ID NO: 662966 - DNA, 25 bp, Homo sapien
gaagatgttgcagctggaccactgc

SEQ ID NO: 662967 - DNA, 25 bp, Homo sapien
tgggtggagaagatgttgcagctgg

SEQ ID NO: 662968 - DNA, 25 bp, Homo sapien
ggaggccgagtaccgctcccgcata

SEQ ID NO: 662969 - DNA, 25 bp, Homo sapien
cgctcccgcatacgcatcaggcccg

SEQ ID NO: 662970 - DNA, 25 bp, Homo sapien
cccgcatacgcatcaggcccggcat

SEQ ID NO: 662971 - DNA, 25 bp, Homo sapien
gtaccgctcccgcatacgcatcagg

SEQ ID NO: 662972 - DNA, 25 bp, Homo sapien
cttgcgtccccaggcagccaggccg

SEQ ID NO: 662973 - DNA, 25 bp, Homo sapien
ccccaggcagccaggccgatgtcgg

SEQ ID NO: 662974 - DNA, 25 bp, Homo sapien
gtccccaggcagccaggccgatgtc

SEQ ID NO: 662975 - DNA, 25 bp, Homo sapien
tgcgtccccaggcagccaggccgat

SEQ ID NO: 662976 - DNA, 25 bp, Homo sapien
ctgcaactgattgggtaactgctga

SEQ ID NO: 662977 - DNA, 25 bp, Homo sapien
tgcctgcaactgattgggtaactgc

SEQ ID NO: 662978 - DNA, 25 bp, Homo sapien
ccttgcctgcaactgattgggtaac

SEQ ID NO: 662979 - DNA, 25 bp, Homo sapien
caccttgcctgcaactgattgggta

SEQ ID NO: 662980 - DNA, 25 bp, Homo sapien
gaatctttgcaagtcacctcccaag

SEQ ID NO: 662981 - DNA, 25 bp, Homo sapien
tcatgctctatataacgggattacg

SEQ ID NO: 662982 - DNA, 25 bp, Homo sapien
tctactctggtagcaacttgatgaa

SEQ ID NO: 662983 - DNA, 25 bp, Homo sapien
gggattacgtccacctctatgaaga

SEQ ID NO: 662984 - DNA, 25 bp, Homo sapien
ggtccaatagtgtcaaagttacttg

SEQ ID NO: 662985 - DNA, 25 bp, Homo sapien
cacacccggtccaatagtgtcaaag

SEQ ID NO: 662986 - DNA, 25 bp, Homo sapien
tgtcaaagttacttgaaaagctacc

SEQ ID NO: 662987 - DNA, 25 bp, Homo sapien
tgaaaagctaccagccaaactgaac

SEQ ID NO: 662988 - DNA, 25 bp, Homo sapien
gaacagtttccctatagagccatga

SEQ ID NO: 662989 - DNA, 25 bp, Homo sapien
gaataaagctagaaggcagtgccga

SEQ ID NO: 662990 - DNA, 25 bp, Homo sapien
cacttcaatcggtgggacagcagga

SEQ ID NO: 662991 - DNA, 25 bp, Homo sapien
cagagatctagatggcctgcgttcc

SEQ ID NO: 662992 - DNA, 25 bp, Homo sapien
cgactttgtagggcagtttgtcaga

SEQ ID NO: 662993 - DNA, 25 bp, Homo sapien
actttgtagggcagtttgtcagaca

SEQ ID NO: 662994 - DNA, 25 bp, Homo sapien
ctttgtagggcagtttgtcagacat

SEQ ID NO: 662995 - DNA, 25 bp, Homo sapien
gactttgtagggcagtttgtcagac

SEQ ID NO: 662996 - DNA, 25 bp, Homo sapien
cggcactcgtgatggaaacgggcga

SEQ ID NO: 662997 - DNA, 25 bp, Homo sapien
cgagcagggatatgcgcgtggcgcc

SEQ ID NO: 662998 - DNA, 25 bp, Homo sapien
ctggcggcactcgtgatggaaacgg

SEQ ID NO: 662999 - DNA, 25 bp, Homo sapien
gcgggcagcgccgagcagggatatg

SEQ ID NO: 663000 - DNA, 25 bp, Homo sapien
gccccagtggagcttctggcgggaa

SEQ ID NO: 663001 - DNA, 25 bp, Homo sapien
agaacacacaaacaggtatttgcct

SEQ ID NO: 663002 - DNA, 25 bp, Homo sapien
gaaagctgccctggacgttaactgt

SEQ ID NO: 663003 - DNA, 25 bp, Homo sapien
caggtatttgcctatacatgcagaa

SEQ ID NO: 663004 - DNA, 25 bp, Homo sapien
caggcgctgagaaagcccgctgatg

SEQ ID NO: 663005 - DNA, 25 bp, Homo sapien
caaacaattaggtcctgggcgcgga

SEQ ID NO: 663006 - DNA, 25 bp, Homo sapien
tgcgtctcactctggattaactgga

SEQ ID NO: 663007 - DNA, 25 bp, Homo sapien
ggatggagccggattaagcagttct

SEQ ID NO: 663008 - DNA, 25 bp, Homo sapien
tacattcaatgtcctcacgttgcag

SEQ ID NO: 663009 - DNA, 25 bp, Homo sapien
cacgttgcaggattcttgtgttgct

SEQ ID NO: 663010 - DNA, 25 bp, Homo sapien
tctcttcctaatggagttgaaccca

SEQ ID NO: 663011 - DNA, 25 bp, Homo sapien
tttgcatagcaccaactgagtcatt

SEQ ID NO: 663012 - DNA, 25 bp, Homo sapien
cttcagggtcttatgcggaggaaaa

SEQ ID NO: 663013 - DNA, 25 bp, Homo sapien
ttccttcagggtcttatgcggagga

SEQ ID NO: 663014 - DNA, 25 bp, Homo sapien
ccttcagggtcttatgcggaggaaa

SEQ ID NO: 663015 - DNA, 25 bp, Homo sapien
ttcagggtcttatgcggaggaaaag

SEQ ID NO: 663016 - DNA, 25 bp, Homo sapien
ctgtaagggctgaatcagcctgttg

SEQ ID NO: 663017 - DNA, 25 bp, Homo sapien
cctctgtaagggctgaatcagcctg

SEQ ID NO: 663018 - DNA, 25 bp, Homo sapien
ttcctctgtaagggctgaatcagcc

SEQ ID NO: 663019 - DNA, 25 bp, Homo sapien
tctgtaagggctgaatcagcctgtt

SEQ ID NO: 663020 - DNA, 25 bp, Homo sapien
tcaggatctcaagcatgaatgcctc

SEQ ID NO: 663021 - DNA, 25 bp, Homo sapien
caggatctcaagcatgaatgcctcc

SEQ ID NO: 663022 - DNA, 25 bp, Homo sapien
gatctcaagcatgaatgcctccagg

SEQ ID NO: 663023 - DNA, 25 bp, Homo sapien
ggatctcaagcatgaatgcctccag

SEQ ID NO: 663024 - DNA, 25 bp, Homo sapien
gggttcctgctatcctgctacaagg

SEQ ID NO: 663025 - DNA, 25 bp, Homo sapien
tgggttcctgctatcctgctacaag

SEQ ID NO: 663026 - DNA, 25 bp, Homo sapien
gtgggttcctgctatcctgctacaa

SEQ ID NO: 663027 - DNA, 25 bp, Homo sapien
cattcgtgcaaagaaagagtaggtt

SEQ ID NO: 663028 - DNA, 25 bp, Homo sapien
taagctccagaaataaccatctgca

SEQ ID NO: 663029 - DNA, 25 bp, Homo sapien
gagtaggttctacaattttgtcttg

SEQ ID NO: 663030 - DNA, 25 bp, Homo sapien
tttgatttgcttgttaggccttcat

SEQ ID NO: 663031 - DNA, 25 bp, Homo sapien
tttagtaagtaatgacagatcagac

SEQ ID NO: 663032 - DNA, 25 bp, Homo sapien
aaatttaaatgcctgcaagggctgg

SEQ ID NO: 663033 - DNA, 25 bp, Homo sapien
taagtgaactagggaattcattccc

SEQ ID NO: 663034 - DNA, 25 bp, Homo sapien
gatcagactgggactttaagtgaac

SEQ ID NO: 663035 - DNA, 25 bp, Homo sapien
cagctgaagtgcaagggtcgcttaa

SEQ ID NO: 663036 - DNA, 25 bp, Homo sapien
tatgggaagatactgtgtacaggct

SEQ ID NO: 663037 - DNA, 25 bp, Homo sapien
tcagaatatgccaaggtgcagaggc

SEQ ID NO: 663038 - DNA, 25 bp, Homo sapien
gaataaccttgagacctattggctg

SEQ ID NO: 663039 - DNA, 25 bp, Homo sapien
tttgctcagaggatgtactaatctc

SEQ ID NO: 663040 - DNA, 25 bp, Homo sapien
tggtgaattttaaccttatctttgc

SEQ ID NO: 663041 - DNA, 25 bp, Homo sapien
aaatatggaacacttggtgaatttt

SEQ ID NO: 663042 - DNA, 25 bp, Homo sapien
tatctttgctcagaggatgtactaa

SEQ ID NO: 663043 - DNA, 25 bp, Homo sapien
gttgtaaataccagtgcagcagttg

SEQ ID NO: 663044 - DNA, 25 bp, Homo sapien
tagttgtaaataccagtgcagcagt

SEQ ID NO: 663045 - DNA, 25 bp, Homo sapien
agttgtaaataccagtgcagcagtt

SEQ ID NO: 663046 - DNA, 25 bp, Homo sapien
tgacacaatcatgcagcctcctgct

SEQ ID NO: 663047 - DNA, 25 bp, Homo sapien
tgggtacctgggtagttgctaatta

SEQ ID NO: 663048 - DNA, 25 bp, Homo sapien
tataattcatatcccctacaggtta

SEQ ID NO: 663049 - DNA, 25 bp, Homo sapien
gcctcctgctgtggtgactacagtc

SEQ ID NO: 663050 - DNA, 25 bp, Homo sapien
cataattgttattgcatagttgtca

SEQ ID NO: 663051 - DNA, 25 bp, Homo sapien
ggataactcagcagtcataatccct

SEQ ID NO: 663052 - DNA, 25 bp, Homo sapien
tatatggttctctaccagtcataat

SEQ ID NO: 663053 - DNA, 25 bp, Homo sapien
taatccctcataatcctcttgctct

SEQ ID NO: 663054 - DNA, 25 bp, Homo sapien
tggtaggcctaggtaagtggatctc

SEQ ID NO: 663055 - DNA, 25 bp, Homo sapien
tgtaaagtttgttaggccaggcctg

SEQ ID NO: 663056 - DNA, 25 bp, Homo sapien
ccccgttgatccttttgactgagac

SEQ ID NO: 663057 - DNA, 25 bp, Homo sapien
gaaatgacatttacgtgcaggcaca

SEQ ID NO: 663058 - DNA, 25 bp, Homo sapien
gacctcaagcctcttcaggaatatg

SEQ ID NO: 663059 - DNA, 25 bp, Homo sapien
tctcctagagcagatacttgcatag

SEQ ID NO: 663060 - DNA, 25 bp, Homo sapien
gagtgacttcggtatcctaggtaga

SEQ ID NO: 663061 - DNA, 25 bp, Homo sapien
ctgattataccctgattgagagtga

SEQ ID NO: 663062 - DNA, 25 bp, Homo sapien
taacaattacaacttgggctcactg

SEQ ID NO: 663063 - DNA, 25 bp, Homo sapien
ttaggccttgtgtagtgtctcaaca

SEQ ID NO: 663064 - DNA, 25 bp, Homo sapien
tttggaagacctaaagagaacgatc

SEQ ID NO: 663065 - DNA, 25 bp, Homo sapien
tctagggtcacaagagttttcaagg

SEQ ID NO: 663066 - DNA, 25 bp, Homo sapien
gagcaggcctagagtgagatcagat

SEQ ID NO: 663067 - DNA, 25 bp, Homo sapien
tttaggatgatactctgttagcagt

SEQ ID NO: 663068 - DNA, 25 bp, Homo sapien
gcagtatcagtataagagcaggcct

SEQ ID NO: 663069 - DNA, 25 bp, Homo sapien
gaaaacgagttaggtggctgttcaa

SEQ ID NO: 663070 - DNA, 25 bp, Homo sapien
tcagtgtacgagtcttttgccttct

SEQ ID NO: 663071 - DNA, 25 bp, Homo sapien
ctgtatgtctgatttgccaatacca

SEQ ID NO: 663072 - DNA, 25 bp, Homo sapien
tgccttcttgattaattcctaagta

SEQ ID NO: 663073 - DNA, 25 bp, Homo sapien
gccaataccacgctatagctttgta

SEQ ID NO: 663074 - DNA, 25 bp, Homo sapien
tagtaagtctaaatatccctatagc

SEQ ID NO: 663075 - DNA, 25 bp, Homo sapien
gggacatcactgtatattttataga

SEQ ID NO: 663076 - DNA, 25 bp, Homo sapien
caaaatggacacaagaacagatagt

SEQ ID NO: 663077 - DNA, 25 bp, Homo sapien
tgaaagatatgtcaccaaaatggac

SEQ ID NO: 663078 - DNA, 25 bp, Homo sapien
cttaacctatcttctaggtaaacag

SEQ ID NO: 663079 - DNA, 25 bp, Homo sapien
gctaaagtcgctaaacaaacataag

SEQ ID NO: 663080 - DNA, 25 bp, Homo sapien
aacattttgctaaagtcgctaaaca

SEQ ID NO: 663081 - DNA, 25 bp, Homo sapien
ctaggtaaacagatgagattatatg

SEQ ID NO: 663082 - DNA, 25 bp, Homo sapien
acagaatccactcatccatgtactc

SEQ ID NO: 663083 - DNA, 25 bp, Homo sapien
tacagaatccactcatccatgtact

SEQ ID NO: 663084 - DNA, 25 bp, Homo sapien
agtggactgtcactttatcttctga

SEQ ID NO: 663085 - DNA, 25 bp, Homo sapien
taaacaagccagagttccctcacat

SEQ ID NO: 663086 - DNA, 25 bp, Homo sapien
gatgagatgacaggttaaacaagcc

SEQ ID NO: 663087 - DNA, 25 bp, Homo sapien
gattattttcaaccacaacgtctag

SEQ ID NO: 663088 - DNA, 25 bp, Homo sapien
cacacacacggtaaattgttgttga

SEQ ID NO: 663089 - DNA, 25 bp, Homo sapien
ctttcacgagtgacagcatgtagta

SEQ ID NO: 663090 - DNA, 25 bp, Homo sapien
ttcttcctgccgatctgtacttgtg

SEQ ID NO: 663091 - DNA, 25 bp, Homo sapien
tctttagatgaatgccccatagtgg

SEQ ID NO: 663092 - DNA, 25 bp, Homo sapien
acaatgttaacactgtgattccttc

SEQ ID NO: 663093 - DNA, 25 bp, Homo sapien
caatgttaacactgtgattccttca

SEQ ID NO: 663094 - DNA, 25 bp, Homo sapien
agaagttaacctagggccgggcatg

SEQ ID NO: 663095 - DNA, 25 bp, Homo sapien
ggagagctgtggtactggctaaaaa

SEQ ID NO: 663096 - DNA, 25 bp, Homo sapien
gctttctagtccaaatagaggtcag

SEQ ID NO: 663097 - DNA, 25 bp, Homo sapien
tcatgaactggattgataaccctca

SEQ ID NO: 663098 - DNA, 25 bp, Homo sapien
cagtaaccacaggaatatattctct

SEQ ID NO: 663099 - DNA, 25 bp, Homo sapien
aagggttgcctcatcaagcagctca

SEQ ID NO: 663100 - DNA, 25 bp, Homo sapien
tcagaggcatagcatgaacaagtaa

SEQ ID NO: 663101 - DNA, 25 bp, Homo sapien
tgtaccccaggaaatactgtgtggt

SEQ ID NO: 663102 - DNA, 25 bp, Homo sapien
gcagaaccctgttccatatggaaaa

SEQ ID NO: 663103 - DNA, 25 bp, Homo sapien
tattatcttatgtcagagtgcagca

SEQ ID NO: 663104 - DNA, 25 bp, Homo sapien
gaaggacctcacttgtttcatcaaa

SEQ ID NO: 663105 - DNA, 25 bp, Homo sapien
tgaactatttcagtcaagcccactc

SEQ ID NO: 663106 - DNA, 25 bp, Homo sapien
aattcaggtattgtactcgggaggc

SEQ ID NO: 663107 - DNA, 25 bp, Homo sapien
gagtagagaaccaccaactagctag

SEQ ID NO: 663108 - DNA, 25 bp, Homo sapien
taaataagatctgagccctgaagac

SEQ ID NO: 663109 - DNA, 25 bp, Homo sapien
cagatgagactggatttggtgccca

SEQ ID NO: 663110 - DNA, 25 bp, Homo sapien
tctgagacaactaaaagaccgggac

SEQ ID NO: 663111 - DNA, 25 bp, Homo sapien
tttgtgatcaggatatctggagtga

SEQ ID NO: 663112 - DNA, 25 bp, Homo sapien
tcaggatatctggagtgaggagcca

SEQ ID NO: 663113 - DNA, 25 bp, Homo sapien
ttccatgttcataggactcctttgt

SEQ ID NO: 663114 - DNA, 25 bp, Homo sapien
gatcaggatatctggagtgaggagc

SEQ ID NO: 663115 - DNA, 25 bp, Homo sapien
tcggaggtgatgtgcccttaacgca

SEQ ID NO: 663116 - DNA, 25 bp, Homo sapien
ccaggatgttttagggtccagtctc

SEQ ID NO: 663117 - DNA, 25 bp, Homo sapien
tgcgccgggccaaaactctaagcct

SEQ ID NO: 663118 - DNA, 25 bp, Homo sapien
aatggttaagagttcctgcacagtc

SEQ ID NO: 663119 - DNA, 25 bp, Homo sapien
gaggttaccgatacttccctgaagc

SEQ ID NO: 663120 - DNA, 25 bp, Homo sapien
gttgaatccagcaagctacagtgcc

SEQ ID NO: 663121 - DNA, 25 bp, Homo sapien
gcacagggttcactaaacggcagca

SEQ ID NO: 663122 - DNA, 25 bp, Homo sapien
gaagctaccggagataacgttatgt

SEQ ID NO: 663123 - DNA, 25 bp, Homo sapien
gaagtgccttctgctaggtaacgcg

SEQ ID NO: 663124 - DNA, 25 bp, Homo sapien
tcctagaggacccagaaacgtttgc

SEQ ID NO: 663125 - DNA, 25 bp, Homo sapien
ccggaacaggacaacatagggctct

SEQ ID NO: 663126 - DNA, 25 bp, Homo sapien
gggctgagctcggattctaaagact

SEQ ID NO: 663127 - DNA, 25 bp, Homo sapien
agactcgaggtacctgactccagcc

SEQ ID NO: 663128 - DNA, 25 bp, Homo sapien
aggcctgcccgatcccgaagcgcat

SEQ ID NO: 663129 - DNA, 25 bp, Homo sapien
ccggagactcgaggtacctgactcc

SEQ ID NO: 663130 - DNA, 25 bp, Homo sapien
ggagactcgaggtacctgactccag

SEQ ID NO: 663131 - DNA, 25 bp, Homo sapien
gaaccagcttagacctccattgaga

SEQ ID NO: 663132 - DNA, 25 bp, Homo sapien
ttccgataccgagaaccagcactga

SEQ ID NO: 663133 - DNA, 25 bp, Homo sapien
tccgataccgagaaccagcatggtt

SEQ ID NO: 663134 - DNA, 25 bp, Homo sapien
gcacggctggagttgggaattttcc

SEQ ID NO: 663135 - DNA, 25 bp, Homo sapien
tcagagctccggacagggaatcggt

SEQ ID NO: 663136 - DNA, 25 bp, Homo sapien
gcgatggcaaccctggcaacgtttc

SEQ ID NO: 663137 - DNA, 25 bp, Homo sapien
tttcccgggagctcagtttgtggca

SEQ ID NO: 663138 - DNA, 25 bp, Homo sapien
catatctgttattcagcgccccgag

SEQ ID NO: 663139 - DNA, 25 bp, Homo sapien
gtgagcaattagttgtaaactgcat

SEQ ID NO: 663140 - DNA, 25 bp, Homo sapien
cataaacaaattaagtgccacgaca

SEQ ID NO: 663141 - DNA, 25 bp, Homo sapien
aatcatagttgttacccttgggcat

SEQ ID NO: 663142 - DNA, 25 bp, Homo sapien
cacaaagggaaaatccgctcaatcc

SEQ ID NO: 663143 - DNA, 25 bp, Homo sapien
gcacagttccagaggaccataatca

SEQ ID NO: 663144 - DNA, 25 bp, Homo sapien
agtgaggcgatctgcaacttctgcc

SEQ ID NO: 663145 - DNA, 25 bp, Homo sapien
gcagtgaggcgatctgcaacttctg

SEQ ID NO: 663146 - DNA, 25 bp, Homo sapien
cagtgaggcgatctgcaacttctgc

SEQ ID NO: 663147 - DNA, 25 bp, Homo sapien
acagagctcttgctctgtctcgcgg

SEQ ID NO: 663148 - DNA, 25 bp, Homo sapien
cctgggtgacagagctcttgctctg

SEQ ID NO: 663149 - DNA, 25 bp, Homo sapien
accactgtactcagcctgggtgaca

SEQ ID NO: 663150 - DNA, 25 bp, Homo sapien
caaggctgcagcgagtcatgatcgc

SEQ ID NO: 663151 - DNA, 25 bp, Homo sapien
cccaccaacggaacccctgtgtgca

SEQ ID NO: 663152 - DNA, 25 bp, Homo sapien
ctcacaccaatccagtgaccgtgtg

SEQ ID NO: 663153 - DNA, 25 bp, Homo sapien
gtggactagcacatggcagtcgctt

SEQ ID NO: 663154 - DNA, 25 bp, Homo sapien
atggcagtcgcttggaacccactca

SEQ ID NO: 663155 - DNA, 25 bp, Homo sapien
gattagtaactgtattaacatcctc

SEQ ID NO: 663156 - DNA, 25 bp, Homo sapien
cacacagctggagcttacgcggctt

SEQ ID NO: 663157 - DNA, 25 bp, Homo sapien
gatttgtcgtgcaccctagtagttg

SEQ ID NO: 663158 - DNA, 25 bp, Homo sapien
tgttggtctcacacaggtctgaaat

SEQ ID NO: 663159 - DNA, 25 bp, Homo sapien
gcttgtttagattcacatgtttacc

SEQ ID NO: 663160 - DNA, 25 bp, Homo sapien
tctgtggcccacaaattaatcatta

SEQ ID NO: 663161 - DNA, 25 bp, Homo sapien
tgtccttgttactaaactacattct

SEQ ID NO: 663162 - DNA, 25 bp, Homo sapien
aaaattatttcggcggccaggcgtg

SEQ ID NO: 663163 - DNA, 25 bp, Homo sapien
acttgtgaccctggactcgaacctc

SEQ ID NO: 663164 - DNA, 25 bp, Homo sapien
gtagccacaatctaacaagccctgc

SEQ ID NO: 663165 - DNA, 25 bp, Homo sapien
agcactcgcctgctggcaactctgg

SEQ ID NO: 663166 - DNA, 25 bp, Homo sapien
catgggtcccttttggtaccagaga

SEQ ID NO: 663167 - DNA, 25 bp, Homo sapien
caggaaggcatagaagtaatcagag

SEQ ID NO: 663168 - DNA, 25 bp, Homo sapien
tgtgccatccttggcggtcaagtag

SEQ ID NO: 663169 - DNA, 25 bp, Homo sapien
catgtgtgaggtagtactcccgccg

SEQ ID NO: 663170 - DNA, 25 bp, Homo sapien
actcccgccgcaggaaggcatagaa

SEQ ID NO: 663171 - DNA, 25 bp, Homo sapien
gagggtgtgaggcgctgctgggtac

SEQ ID NO: 663172 - DNA, 25 bp, Homo sapien
ctttccatttgggccgtgaggagag

SEQ ID NO: 663173 - DNA, 25 bp, Homo sapien
gggctttccatttgggccgtgagga

SEQ ID NO: 663174 - DNA, 25 bp, Homo sapien
tttccatttgggccgtgaggagagc

SEQ ID NO: 663175 - DNA, 25 bp, Homo sapien
gctttccatttgggccgtgaggaga

SEQ ID NO: 663176 - DNA, 25 bp, Homo sapien
tctagtctttgtgccagttaggacc

SEQ ID NO: 663177 - DNA, 25 bp, Homo sapien
cacccaatgtggctgaaatactgcc

SEQ ID NO: 663178 - DNA, 25 bp, Homo sapien
cctgcattgttacatggaccctgaa

SEQ ID NO: 663179 - DNA, 25 bp, Homo sapien
tttgctccagttctatggccccagg

SEQ ID NO: 663180 - DNA, 25 bp, Homo sapien
ccagggacggctcggtccacattcc

SEQ ID NO: 663181 - DNA, 25 bp, Homo sapien
ccccagggacggctcggtccacatt

SEQ ID NO: 663182 - DNA, 25 bp, Homo sapien
agggacggctcggtccacattcctc

SEQ ID NO: 663183 - DNA, 25 bp, Homo sapien
gggacggctcggtccacattcctct

SEQ ID NO: 663184 - DNA, 25 bp, Homo sapien
gagggctccagggccgcctccctct

SEQ ID NO: 663185 - DNA, 25 bp, Homo sapien
ctccagggccgcctccctctgggac

SEQ ID NO: 663186 - DNA, 25 bp, Homo sapien
tccagggccgcctccctctgggacc

SEQ ID NO: 663187 - DNA, 25 bp, Homo sapien
ggctccagggccgcctccctctggg

SEQ ID NO: 663188 - DNA, 25 bp, Homo sapien
caagcttgggatgctcagtgctgga

SEQ ID NO: 663189 - DNA, 25 bp, Homo sapien
tacctttacaccctgcggagtctgc

SEQ ID NO: 663190 - DNA, 25 bp, Homo sapien
cacaggcaccgcatatcgggagcaa

SEQ ID NO: 663191 - DNA, 25 bp, Homo sapien
gaaacctgaaatgggtctcgagcca

SEQ ID NO: 663192 - DNA, 25 bp, Homo sapien
taatggaacccacagtctactaaga

SEQ ID NO: 663193 - DNA, 25 bp, Homo sapien
ctttagatgtagacacagggcagga

SEQ ID NO: 663194 - DNA, 25 bp, Homo sapien
gtaatccagtagactagccagaggc

SEQ ID NO: 663195 - DNA, 25 bp, Homo sapien
tcaggccagctactgggatacaagg

SEQ ID NO: 663196 - DNA, 25 bp, Homo sapien
ccatcgttgaatgcttgaggctgca

SEQ ID NO: 663197 - DNA, 25 bp, Homo sapien
tactccctatgggtgctggaaccac

SEQ ID NO: 663198 - DNA, 25 bp, Homo sapien
caatgaccttcgagaagagaggacc

SEQ ID NO: 663199 - DNA, 25 bp, Homo sapien
tatgcagaatccaaggccatcgttg

SEQ ID NO: 663200 - DNA, 25 bp, Homo sapien
aagagcagggaacagacgatgatga

SEQ ID NO: 663201 - DNA, 25 bp, Homo sapien
aagaaattagagttggcacttcctg

SEQ ID NO: 663202 - DNA, 25 bp, Homo sapien
tcctgcataaatccagaggtgccac

SEQ ID NO: 663203 - DNA, 25 bp, Homo sapien
tgcccaacgttgaaggtcagtgtga

SEQ ID NO: 663204 - DNA, 25 bp, Homo sapien
cacaattgtgcgtctgtatgactca

SEQ ID NO: 663205 - DNA, 25 bp, Homo sapien
gagagtccagcgtctgggacctaca

SEQ ID NO: 663206 - DNA, 25 bp, Homo sapien
cttaaacgaggtgccaaaacacgtg

SEQ ID NO: 663207 - DNA, 25 bp, Homo sapien
caaatccagccctttggtaactggc

SEQ ID NO: 663208 - DNA, 25 bp, Homo sapien
taggcagcacagataggtcaccact

SEQ ID NO: 663209 - DNA, 25 bp, Homo sapien
ttgtgatatctaccctgacggagcc

SEQ ID NO: 663210 - DNA, 25 bp, Homo sapien
tcagaggcacactcctataggtagg

SEQ ID NO: 663211 - DNA, 25 bp, Homo sapien
tctgtgcagagaggatgtcaccaca

SEQ ID NO: 663212 - DNA, 25 bp, Homo sapien
ccactgtcgggtaggacttaaagat

SEQ ID NO: 663213 - DNA, 25 bp, Homo sapien
aaggccatgtagagcgccacgtccc

SEQ ID NO: 663214 - DNA, 25 bp, Homo sapien
ggacttaaagatggcgatgacagcg

SEQ ID NO: 663215 - DNA, 25 bp, Homo sapien
cagcgatctggataaacatgaagaa

SEQ ID NO: 663216 - DNA, 25 bp, Homo sapien
tttcaggttccccagaccatctagg

SEQ ID NO: 663217 - DNA, 25 bp, Homo sapien
tttccggaggctactaaaagcaatc

SEQ ID NO: 663218 - DNA, 25 bp, Homo sapien
ggataagcatagattctggagccag

SEQ ID NO: 663219 - DNA, 25 bp, Homo sapien
tacagaatgggaaccacgtgcattg

SEQ ID NO: 663220 - DNA, 25 bp, Homo sapien
tagctttatggctaaggggatggtg

SEQ ID NO: 663221 - DNA, 25 bp, Homo sapien
ttagctttatggctaaggggatggt

SEQ ID NO: 663222 - DNA, 25 bp, Homo sapien
tttagctttatggctaaggggatgg

SEQ ID NO: 663223 - DNA, 25 bp, Homo sapien
acatctctgcaaagaagtaccagaa

SEQ ID NO: 663224 - DNA, 25 bp, Homo sapien
aaagaagtaccagaaaagaccaatg

SEQ ID NO: 663225 - DNA, 25 bp, Homo sapien
gaccaatgtttggagtgagatctgg

SEQ ID NO: 663226 - DNA, 25 bp, Homo sapien
caaagaagaggctgaagtgctcaaa

SEQ ID NO: 663227 - DNA, 25 bp, Homo sapien
tagactgcggggatgaaatcccaag

SEQ ID NO: 663228 - DNA, 25 bp, Homo sapien
aagccatagactgcggggatgaaat

SEQ ID NO: 663229 - DNA, 25 bp, Homo sapien
ataaagccatagactgcggggatga

SEQ ID NO: 663230 - DNA, 25 bp, Homo sapien
atagactgcggggatgaaatcccaa

SEQ ID NO: 663231 - DNA, 25 bp, Homo sapien
aatgattaccactaggcttcccaca

SEQ ID NO: 663232 - DNA, 25 bp, Homo sapien
ggcaaatgattaccactaggcttcc

SEQ ID NO: 663233 - DNA, 25 bp, Homo sapien
gagaggcaaatgattaccactaggc

SEQ ID NO: 663234 - DNA, 25 bp, Homo sapien
aaggagaggcaaatgattaccacta

SEQ ID NO: 663235 - DNA, 25 bp, Homo sapien
tcatggcatactcccaagaaaagat

SEQ ID NO: 663236 - DNA, 25 bp, Homo sapien
atggcatactcccaagaaaagatcc

SEQ ID NO: 663237 - DNA, 25 bp, Homo sapien
ggcatactcccaagaaaagatccag

SEQ ID NO: 663238 - DNA, 25 bp, Homo sapien
atcatggcatactcccaagaaaaga

SEQ ID NO: 663239 - DNA, 25 bp, Homo sapien
caatgtgggacctaaatatgatcct

SEQ ID NO: 663240 - DNA, 25 bp, Homo sapien
cagactaggacagactaaggagata

SEQ ID NO: 663241 - DNA, 25 bp, Homo sapien
ggcagacactaacgtcaccaagtga

SEQ ID NO: 663242 - DNA, 25 bp, Homo sapien
tatggcaatatcatgaacccctcgg

SEQ ID NO: 663243 - DNA, 25 bp, Homo sapien
aagcccagctgctgaaacgacctgc

SEQ ID NO: 663244 - DNA, 25 bp, Homo sapien
gactactttaacctaccactgtctc

SEQ ID NO: 663245 - DNA, 25 bp, Homo sapien
tttaacctaccactgtctcaccaat

SEQ ID NO: 663246 - DNA, 25 bp, Homo sapien
aaaaacttgacttgtgtcaatgagc

SEQ ID NO: 663247 - DNA, 25 bp, Homo sapien
tgttcttttgtcaggaggcttggtt

SEQ ID NO: 663248 - DNA, 25 bp, Homo sapien
ggtgggtaatgttcttttgtcagga

SEQ ID NO: 663249 - DNA, 25 bp, Homo sapien
gggtaatgttcttttgtcaggaggc

SEQ ID NO: 663250 - DNA, 25 bp, Homo sapien
tggtggtgggtaatgttcttttgtc

SEQ ID NO: 663251 - DNA, 25 bp, Homo sapien
ctgggacaaacaaggtgagtgggta

SEQ ID NO: 663252 - DNA, 25 bp, Homo sapien
aaacaaggtgagtgggtacagagac

SEQ ID NO: 663253 - DNA, 25 bp, Homo sapien
gacaaacaaggtgagtgggtacaga

SEQ ID NO: 663254 - DNA, 25 bp, Homo sapien
tgggacaaacaaggtgagtgggtac

SEQ ID NO: 663255 - DNA, 25 bp, Homo sapien
caagaaaaatagcactgaggaaagc

SEQ ID NO: 663256 - DNA, 25 bp, Homo sapien
gaaaaatagcactgaggaaagcact

SEQ ID NO: 663257 - DNA, 25 bp, Homo sapien
gcaagaaaaatagcactgaggaaag

SEQ ID NO: 663258 - DNA, 25 bp, Homo sapien
aaggcaagaaaaatagcactgagga

SEQ ID NO: 663259 - DNA, 25 bp, Homo sapien
caggtgttaccccaactatgtgcag

SEQ ID NO: 663260 - DNA, 25 bp, Homo sapien
ttctggagaaagctaactaagggca

SEQ ID NO: 663261 - DNA, 25 bp, Homo sapien
cactagagtgcatcaggtgctatgg

SEQ ID NO: 663262 - DNA, 25 bp, Homo sapien
cagctcagtggcctacaaagaggat

SEQ ID NO: 663263 - DNA, 25 bp, Homo sapien
tttgtactctcctttcagggcctta

SEQ ID NO: 663264 - DNA, 25 bp, Homo sapien
ttgtactctcctttcagggccttac

SEQ ID NO: 663265 - DNA, 25 bp, Homo sapien
ctttgtactctcctttcagggcctt

SEQ ID NO: 663266 - DNA, 25 bp, Homo sapien
aatcgtgtaaggatttaagagatag

SEQ ID NO: 663267 - DNA, 25 bp, Homo sapien
cttttatcgtagtcaaaatgaagaa

SEQ ID NO: 663268 - DNA, 25 bp, Homo sapien
agaaagcaatgagggtgttgttgat

SEQ ID NO: 663269 - DNA, 25 bp, Homo sapien
acacaagacaaaatcgtgtaaggat

SEQ ID NO: 663270 - DNA, 25 bp, Homo sapien
aacagggccactttcaaagggatgt

SEQ ID NO: 663271 - DNA, 25 bp, Homo sapien
aaagggatgtaacgcatttccatag

SEQ ID NO: 663272 - DNA, 25 bp, Homo sapien
cctcagataggcataacagtgactt

SEQ ID NO: 663273 - DNA, 25 bp, Homo sapien
taagggtcctcattaacgacaggta

SEQ ID NO: 663274 - DNA, 25 bp, Homo sapien
cagaaggttaccaaattccaccagc

SEQ ID NO: 663275 - DNA, 25 bp, Homo sapien
tggtcccactatgcaattctccttg

SEQ ID NO: 663276 - DNA, 25 bp, Homo sapien
gggcaatagcagtgagtgcatcagt

SEQ ID NO: 663277 - DNA, 25 bp, Homo sapien
ggcaatagcagtgagtgcatcagtt

SEQ ID NO: 663278 - DNA, 25 bp, Homo sapien
gcaatagcagtgagtgcatcagtta

SEQ ID NO: 663279 - DNA, 25 bp, Homo sapien
caatagcagtgagtgcatcagttat

SEQ ID NO: 663280 - DNA, 25 bp, Homo sapien
ttaaacacaagatgacaagccgggc

SEQ ID NO: 663281 - DNA, 25 bp, Homo sapien
caagccgggcactgtgtcatgtgtc

SEQ ID NO: 663282 - DNA, 25 bp, Homo sapien
cataatactgccacagttccatgaa

SEQ ID NO: 663283 - DNA, 25 bp, Homo sapien
aactcctgagttcctatgttttttg

SEQ ID NO: 663284 - DNA, 25 bp, Homo sapien
cataaacaccaattcagcatagtca

SEQ ID NO: 663285 - DNA, 25 bp, Homo sapien
tgaaagaggtatattattaatggag

SEQ ID NO: 663286 - DNA, 25 bp, Homo sapien
tcagcatagtcaattaggaaatgaa

SEQ ID NO: 663287 - DNA, 25 bp, Homo sapien
ttaggaaatgaaagaggtatattat

SEQ ID NO: 663288 - DNA, 25 bp, Homo sapien
gagaataatttagtactgccggacc

SEQ ID NO: 663289 - DNA, 25 bp, Homo sapien
actgttctacgccagctggccggtg

SEQ ID NO: 663290 - DNA, 25 bp, Homo sapien
tgctgggactatctgttgaattgag

SEQ ID NO: 663291 - DNA, 25 bp, Homo sapien
tatgtcagcaaactattatgctagt

SEQ ID NO: 663292 - DNA, 25 bp, Homo sapien
actgcatccggctgatcacagctat

SEQ ID NO: 663293 - DNA, 25 bp, Homo sapien
catattaatcattgatcatagctat

SEQ ID NO: 663294 - DNA, 25 bp, Homo sapien
acataccctggtgaaattattctgt

SEQ ID NO: 663295 - DNA, 25 bp, Homo sapien
ctatttctagaatttccgtttgatt

SEQ ID NO: 663296 - DNA, 25 bp, Homo sapien
tggtctctagccagccaatttctgt

SEQ ID NO: 663297 - DNA, 25 bp, Homo sapien
cattttggttggtcctgcactccaa

SEQ ID NO: 663298 - DNA, 25 bp, Homo sapien
tactcctagagtgtagtccttcaga

SEQ ID NO: 663299 - DNA, 25 bp, Homo sapien
taaaggcaagtcctttaccagagcc

SEQ ID NO: 663300 - DNA, 25 bp, Homo sapien
tgcatatgctgatagaggtaggcac

SEQ ID NO: 663301 - DNA, 25 bp, Homo sapien
gagggaaggattgtaatgcatatgc

SEQ ID NO: 663302 - DNA, 25 bp, Homo sapien
tataagcaccatgaagccaggcact

SEQ ID NO: 663303 - DNA, 25 bp, Homo sapien
tctggtgatacccttggctctgaaa

SEQ ID NO: 663304 - DNA, 25 bp, Homo sapien
tgcagaggacatctaaaaacgggct

SEQ ID NO: 663305 - DNA, 25 bp, Homo sapien
tactgccgtagttttcatgggaaat

SEQ ID NO: 663306 - DNA, 25 bp, Homo sapien
tgtaaactactcttggtacccagaa

SEQ ID NO: 663307 - DNA, 25 bp, Homo sapien
tatttgcggactaaggactgtttgc

SEQ ID NO: 663308 - DNA, 25 bp, Homo sapien
gaatacggagatactcccaagtcca

SEQ ID NO: 663309 - DNA, 25 bp, Homo sapien
tgctccagaatacggagatactccc

SEQ ID NO: 663310 - DNA, 25 bp, Homo sapien
ctcccaagtccaacagtgaaaggcc

SEQ ID NO: 663311 - DNA, 25 bp, Homo sapien
tcatgaaatactgctccagaatacg

SEQ ID NO: 663312 - DNA, 25 bp, Homo sapien
aaccctacatccttcaagagtcagc

SEQ ID NO: 663313 - DNA, 25 bp, Homo sapien
aaaccctacatccttcaagagtcag

SEQ ID NO: 663314 - DNA, 25 bp, Homo sapien
aaaaccctacatccttcaagagtca

SEQ ID NO: 663315 - DNA, 25 bp, Homo sapien
caaaaccctacatccttcaagagtc

SEQ ID NO: 663316 - DNA, 25 bp, Homo sapien
actcggccagactggagcggaacaa

SEQ ID NO: 663317 - DNA, 25 bp, Homo sapien
tcggaaatgaactcggccagactgg

SEQ ID NO: 663318 - DNA, 25 bp, Homo sapien
agcggaacaaggccgcccgcactgt

SEQ ID NO: 663319 - DNA, 25 bp, Homo sapien
tccacccgctcggaaatgaactcgg

SEQ ID NO: 663320 - DNA, 25 bp, Homo sapien
gccacgctctgtagttccgcgggtg

SEQ ID NO: 663321 - DNA, 25 bp, Homo sapien
ccggagcgacggaaagcgggcgcct

SEQ ID NO: 663322 - DNA, 25 bp, Homo sapien
tcccagaaagccttgcggcgaggcg

SEQ ID NO: 663323 - DNA, 25 bp, Homo sapien
tggggactacggctcccagaaagcc

SEQ ID NO: 663324 - DNA, 25 bp, Homo sapien
taagtcagaagtctaggcacatctg

SEQ ID NO: 663325 - DNA, 25 bp, Homo sapien
catttggtccttcatgggagcacca

SEQ ID NO: 663326 - DNA, 25 bp, Homo sapien
gcttgggatcccacaagtctgaaat

SEQ ID NO: 663327 - DNA, 25 bp, Homo sapien
ggtgttggccaggtgtgtcctcata

SEQ ID NO: 663328 - DNA, 25 bp, Homo sapien
ttaagcgcagttcacacaaacaaac

SEQ ID NO: 663329 - DNA, 25 bp, Homo sapien
gagcatggagccagccattctgcag

SEQ ID NO: 663330 - DNA, 25 bp, Homo sapien
gactgggaggtatgttaagggagca

SEQ ID NO: 663331 - DNA, 25 bp, Homo sapien
caaacaaaccacgatgccttgaggt

SEQ ID NO: 663332 - DNA, 25 bp, Homo sapien
aagcccgccgagctgaggaaaaacg

SEQ ID NO: 663333 - DNA, 25 bp, Homo sapien
gcgaaatttcacgtcagcttcacta

SEQ ID NO: 663334 - DNA, 25 bp, Homo sapien
agcccagggcaattcctctccaagt

SEQ ID NO: 663335 - DNA, 25 bp, Homo sapien
tgtgggtcgagaacagggtccgcat

SEQ ID NO: 663336 - DNA, 25 bp, Homo sapien
gaggattagctctctcgaggtcaca

SEQ ID NO: 663337 - DNA, 25 bp, Homo sapien
taatccctgatttgtgtgcagcgcc

SEQ ID NO: 663338 - DNA, 25 bp, Homo sapien
tcttagaccccagtgcatggaaggg

SEQ ID NO: 663339 - DNA, 25 bp, Homo sapien
ggcgatttcctaggcttatccaggg

SEQ ID NO: 663340 - DNA, 25 bp, Homo sapien
ttcatatgacagacacaaccgaggt

SEQ ID NO: 663341 - DNA, 25 bp, Homo sapien
caaatcacatggtaagatggtagca

SEQ ID NO: 663342 - DNA, 25 bp, Homo sapien
agttctatgggatttctgctggcca

SEQ ID NO: 663343 - DNA, 25 bp, Homo sapien
ctagctctgagactttgggacagtt

SEQ ID NO: 663344 - DNA, 25 bp, Homo sapien
gaggttgggtgatagccgttccttc

SEQ ID NO: 663345 - DNA, 25 bp, Homo sapien
cgactcctcgggctggacaccgaaa

SEQ ID NO: 663346 - DNA, 25 bp, Homo sapien
ccttcttaaagcgtgtgaggttggg

SEQ ID NO: 663347 - DNA, 25 bp, Homo sapien
agttcaactactgagcgtccaccgg

SEQ ID NO: 663348 - DNA, 25 bp, Homo sapien
ccagcagtcctgagtaggagtccag

SEQ ID NO: 663349 - DNA, 25 bp, Homo sapien
caccctgctcagtatggctagccag

SEQ ID NO: 663350 - DNA, 25 bp, Homo sapien
gggtgaagccatcccaaggctgaca

SEQ ID NO: 663351 - DNA, 25 bp, Homo sapien
gagaaatgggtaccctatgatcccc

SEQ ID NO: 663352 - DNA, 25 bp, Homo sapien
tgcattcccatgagggcaaaggcag

SEQ ID NO: 663353 - DNA, 25 bp, Homo sapien
gacttcttggtacctatgaacatag

SEQ ID NO: 663354 - DNA, 25 bp, Homo sapien
aactctaggtttccaggcctcacag

SEQ ID NO: 663355 - DNA, 25 bp, Homo sapien
tccccttcttgtggtgagactgaat

SEQ ID NO: 663356 - DNA, 25 bp, Homo sapien
gagtggttccttcaagctgggtgtc

SEQ ID NO: 663357 - DNA, 25 bp, Homo sapien
taatgtcttaggtgcaacacggacc

SEQ ID NO: 663358 - DNA, 25 bp, Homo sapien
cagcagggcaccgtgtatgaatgca

SEQ ID NO: 663359 - DNA, 25 bp, Homo sapien
ggaggctcctgtattctagaaccca

SEQ ID NO: 663360 - DNA, 25 bp, Homo sapien
caaggctgtgtctgcttagttaagg

SEQ ID NO: 663361 - DNA, 25 bp, Homo sapien
tgaggactagataggaattccatcc

SEQ ID NO: 663362 - DNA, 25 bp, Homo sapien
ctcaacttgccaggcgggcatctca

SEQ ID NO: 663363 - DNA, 25 bp, Homo sapien
gcatctcaggttcaatgaggactag

SEQ ID NO: 663364 - DNA, 25 bp, Homo sapien
ttccacggcacaatacatcattagg

SEQ ID NO: 663365 - DNA, 25 bp, Homo sapien
tattcacacacagtacttccacggc

SEQ ID NO: 663366 - DNA, 25 bp, Homo sapien
tccaagtatcaagtcgcagtcctgc

SEQ ID NO: 663367 - DNA, 25 bp, Homo sapien
ttcaactcgcaacaccaaaagggct

SEQ ID NO: 663368 - DNA, 25 bp, Homo sapien
ttcgcttggattgcaccgcactggt

SEQ ID NO: 663369 - DNA, 25 bp, Homo sapien
gcttggattgcaccgcactggttat

SEQ ID NO: 663370 - DNA, 25 bp, Homo sapien
acttggattttcttcgcttggattg

SEQ ID NO: 663371 - DNA, 25 bp, Homo sapien
gattttcttcgcttggattgcaccg

SEQ ID NO: 663372 - DNA, 25 bp, Homo sapien
aggtggtggcgatgaagcacactga

SEQ ID NO: 663373 - DNA, 25 bp, Homo sapien
gaattggaatgtgacagaggtggtg

SEQ ID NO: 663374 - DNA, 25 bp, Homo sapien
tggaatgtgacagaggtggtggcga

SEQ ID NO: 663375 - DNA, 25 bp, Homo sapien
gaggtggtggcgatgaagcacactg

SEQ ID NO: 663376 - DNA, 25 bp, Homo sapien
tccgaagcacccaatgaactggtag

SEQ ID NO: 663377 - DNA, 25 bp, Homo sapien
aagaggtgcccagtacagtaatttc

SEQ ID NO: 663378 - DNA, 25 bp, Homo sapien
caattcagaataagcaacggcctgc

SEQ ID NO: 663379 - DNA, 25 bp, Homo sapien
actgctaagaagtgaggcctaggcc

SEQ ID NO: 663380 - DNA, 25 bp, Homo sapien
gatgtaagcaaactcggctctcgca

SEQ ID NO: 663381 - DNA, 25 bp, Homo sapien
taaacaacacatctgatcaggtgca

SEQ ID NO: 663382 - DNA, 25 bp, Homo sapien
aagaatgaccaaaaaccatgtgggc

SEQ ID NO: 663383 - DNA, 25 bp, Homo sapien
tgtgtaattataagtgacccaacca

SEQ ID NO: 663384 - DNA, 25 bp, Homo sapien
cagttcgggagtttcttcggcctgg

SEQ ID NO: 663385 - DNA, 25 bp, Homo sapien
gatcgtttacgatgtccattttcca

SEQ ID NO: 663386 - DNA, 25 bp, Homo sapien
gctgaagcaggtcgagaagatcgtt

SEQ ID NO: 663387 - DNA, 25 bp, Homo sapien
gaggccacagttggctcttcagttc

SEQ ID NO: 663388 - DNA, 25 bp, Homo sapien
tattggcatttactaatgatcccgg

SEQ ID NO: 663389 - DNA, 25 bp, Homo sapien
cccggtagagtcagataacagcata

SEQ ID NO: 663390 - DNA, 25 bp, Homo sapien
ggataattcacaatacactgctagg

SEQ ID NO: 663391 - DNA, 25 bp, Homo sapien
ggtatattgattgtccacaccccaa

SEQ ID NO: 663392 - DNA, 25 bp, Homo sapien
gaaactctggtgtaacccttgactc

SEQ ID NO: 663393 - DNA, 25 bp, Homo sapien
tctaggtgcctaaggaaacaaatct

SEQ ID NO: 663394 - DNA, 25 bp, Homo sapien
gggatgccactaaacgtaagcccca

SEQ ID NO: 663395 - DNA, 25 bp, Homo sapien
ccggaatcttttgggtacaggccag

SEQ ID NO: 663396 - DNA, 25 bp, Homo sapien
ccagaggaccctttgctagtagcac

SEQ ID NO: 663397 - DNA, 25 bp, Homo sapien
caccgtggttgggaactgggacaca

SEQ ID NO: 663398 - DNA, 25 bp, Homo sapien
aaacaatactggtcaaaaggctgcc

SEQ ID NO: 663399 - DNA, 25 bp, Homo sapien
gctttatgtataacagccgcccgac

SEQ ID NO: 663400 - DNA, 25 bp, Homo sapien
gagtgcagtgagcacgaccatggct

SEQ ID NO: 663401 - DNA, 25 bp, Homo sapien
catgttggagtgcagtgagcacgac

SEQ ID NO: 663402 - DNA, 25 bp, Homo sapien
ctcatgttggagtgcagtgagcacg

SEQ ID NO: 663403 - DNA, 25 bp, Homo sapien
cactgcaacctcgacctccctgggc

SEQ ID NO: 663404 - DNA, 25 bp, Homo sapien
agactatggcagcatttacctccag

SEQ ID NO: 663405 - DNA, 25 bp, Homo sapien
gactatggcagcatttacctccagc

SEQ ID NO: 663406 - DNA, 25 bp, Homo sapien
actatggcagcatttacctccagct

SEQ ID NO: 663407 - DNA, 25 bp, Homo sapien
tcatccagttacaaccaggttagca

SEQ ID NO: 663408 - DNA, 25 bp, Homo sapien
gattctcaccctacatggtatggag

SEQ ID NO: 663409 - DNA, 25 bp, Homo sapien
tatttaggctaaagtgtccctgtgc

SEQ ID NO: 663410 - DNA, 25 bp, Homo sapien
tatggagacaaagctggcacagata

SEQ ID NO: 663411 - DNA, 25 bp, Homo sapien
cttaatgccacccagagacgactga

SEQ ID NO: 663412 - DNA, 25 bp, Homo sapien
gaatcaggcgaaactaaactgtacc

SEQ ID NO: 663413 - DNA, 25 bp, Homo sapien
caaagtgcgttaatgcttgccagcc

SEQ ID NO: 663414 - DNA, 25 bp, Homo sapien
gattaccatgggatcctacttccag

SEQ ID NO: 663415 - DNA, 25 bp, Homo sapien
tggtctggcaacagaggcctgcagt

SEQ ID NO: 663416 - DNA, 25 bp, Homo sapien
tttgagactaaattctgcgacgggg

SEQ ID NO: 663417 - DNA, 25 bp, Homo sapien
tcctttgagactaaattctgcgacg

SEQ ID NO: 663418 - DNA, 25 bp, Homo sapien
ctggtctggcaacagaggcctgcag

SEQ ID NO: 663419 - DNA, 25 bp, Homo sapien
ggtaccctgagagaccaaactatat

SEQ ID NO: 663420 - DNA, 25 bp, Homo sapien
tggatatgccacagtcacatcttga

SEQ ID NO: 663421 - DNA, 25 bp, Homo sapien
ctctatgagagtggaaatggtcaca

SEQ ID NO: 663422 - DNA, 25 bp, Homo sapien
cctctagaagggaaccatcctggaa

SEQ ID NO: 663423 - DNA, 25 bp, Homo sapien
agtggtaggcactcgaagcatttta

SEQ ID NO: 663424 - DNA, 25 bp, Homo sapien
gtggtaggcactcgaagcattttag

SEQ ID NO: 663425 - DNA, 25 bp, Homo sapien
cagtggtaggcactcgaagcatttt

SEQ ID NO: 663426 - DNA, 25 bp, Homo sapien
gaagctgctgttcacacttaaggca

SEQ ID NO: 663427 - DNA, 25 bp, Homo sapien
ttataataccaacccaagcctactg

SEQ ID NO: 663428 - DNA, 25 bp, Homo sapien
taaatgggaggttcacagtatagac

SEQ ID NO: 663429 - DNA, 25 bp, Homo sapien
tctcctctagagtagcccagacaaa

SEQ ID NO: 663430 - DNA, 25 bp, Homo sapien
taaaactactgctattgccatttag

SEQ ID NO: 663431 - DNA, 25 bp, Homo sapien
aatgcaaacttaacatgggatttaa

SEQ ID NO: 663432 - DNA, 25 bp, Homo sapien
ggcccttagctctctttaatgaatg

SEQ ID NO: 663433 - DNA, 25 bp, Homo sapien
gcacctggcccttagctctctttaa

SEQ ID NO: 663434 - DNA, 25 bp, Homo sapien
gagatgatgaagccccaagtacata

SEQ ID NO: 663435 - DNA, 25 bp, Homo sapien
aactgacacaaagagatgatgaagc

SEQ ID NO: 663436 - DNA, 25 bp, Homo sapien
aaaaactgacacaaagagatgatga

SEQ ID NO: 663437 - DNA, 25 bp, Homo sapien
agagatgatgaagccccaagtacat

SEQ ID NO: 663438 - DNA, 25 bp, Homo sapien
cactcaattcgggatgcacaaggga

SEQ ID NO: 663439 - DNA, 25 bp, Homo sapien
ttactatcgagcgtacactggtggg

SEQ ID NO: 663440 - DNA, 25 bp, Homo sapien
tactagacgagactgggcttcgccg

SEQ ID NO: 663441 - DNA, 25 bp, Homo sapien
cttcccaagggagtattcacaggca

SEQ ID NO: 663442 - DNA, 25 bp, Homo sapien
gatttgggatcctgctgcatcatga

SEQ ID NO: 663443 - DNA, 25 bp, Homo sapien
gatcctgctgcatcatgagcatcat

SEQ ID NO: 663444 - DNA, 25 bp, Homo sapien
ctgatttgggatcctgctgcatcat

SEQ ID NO: 663445 - DNA, 25 bp, Homo sapien
tgggatcctgctgcatcatgagcat

SEQ ID NO: 663446 - DNA, 25 bp, Homo sapien
tctgttcaactggttgagaaggata

SEQ ID NO: 663447 - DNA, 25 bp, Homo sapien
tgttcaactggttgagaaggataac

SEQ ID NO: 663448 - DNA, 25 bp, Homo sapien
tgccacatgctgcatgagttgagga

SEQ ID NO: 663449 - DNA, 25 bp, Homo sapien
gcctctgttcaactggttgagaagg

SEQ ID NO: 663450 - DNA, 25 bp, Homo sapien
gcaggagtcctgtcaacagtgccaa

SEQ ID NO: 663451 - DNA, 25 bp, Homo sapien
taccaaagaggacagcatagacaat

SEQ ID NO: 663452 - DNA, 25 bp, Homo sapien
cagggaatgcaaactcctatgcctt

SEQ ID NO: 663453 - DNA, 25 bp, Homo sapien
catggctgctacagagtccagaagc

SEQ ID NO: 663454 - DNA, 25 bp, Homo sapien
catgtaataagtatataatctagct

SEQ ID NO: 663455 - DNA, 25 bp, Homo sapien
aagacatggaagccttgtaatgcca

SEQ ID NO: 663456 - DNA, 25 bp, Homo sapien
taataagtatataatctagctaaca

SEQ ID NO: 663457 - DNA, 25 bp, Homo sapien
ggaagccttgtaatgccacatgcac

SEQ ID NO: 663458 - DNA, 25 bp, Homo sapien
tccagaccagctgggcgagtatctg

SEQ ID NO: 663459 - DNA, 25 bp, Homo sapien
ggctgatcagcctcttccagaccag

SEQ ID NO: 663460 - DNA, 25 bp, Homo sapien
ctggtggccggtttgaaaattctgg

SEQ ID NO: 663461 - DNA, 25 bp, Homo sapien
tagggcctgagttatccaagttaat

SEQ ID NO: 663462 - DNA, 25 bp, Homo sapien
tgttggagcaaaacctgcccctgag

SEQ ID NO: 663463 - DNA, 25 bp, Homo sapien
gctgcatcatatttggcggcccgtg

SEQ ID NO: 663464 - DNA, 25 bp, Homo sapien
caacaatgggctcgttagcgtgaca

SEQ ID NO: 663465 - DNA, 25 bp, Homo sapien
tagcgtgacatccttattgactggg

SEQ ID NO: 663466 - DNA, 25 bp, Homo sapien
cacctgaccttgcataaagttcgga

SEQ ID NO: 663467 - DNA, 25 bp, Homo sapien
ttgcataaagttcggattggcctgt

SEQ ID NO: 663468 - DNA, 25 bp, Homo sapien
catgctggacattttgatttgcttg

SEQ ID NO: 663469 - DNA, 25 bp, Homo sapien
tcgaaggcacctgaccttgcataaa

SEQ ID NO: 663470 - DNA, 25 bp, Homo sapien
agccaggtgggaggcgtttaggcat

SEQ ID NO: 663471 - DNA, 25 bp, Homo sapien
gaagccaggtgggaggcgtttaggc

SEQ ID NO: 663472 - DNA, 25 bp, Homo sapien
tgagaagccaggtgggaggcgttta

SEQ ID NO: 663473 - DNA, 25 bp, Homo sapien
gagaagccaggtgggaggcgtttag

SEQ ID NO: 663474 - DNA, 25 bp, Homo sapien
taagttatatcaagtgtcaccacca

SEQ ID NO: 663475 - DNA, 25 bp, Homo sapien
tggtggaattccctctctaaggagc

SEQ ID NO: 663476 - DNA, 25 bp, Homo sapien
cctgaattttagtccagagagctag

SEQ ID NO: 663477 - DNA, 25 bp, Homo sapien
gaagttctactaagatctagctcca

SEQ ID NO: 663478 - DNA, 25 bp, Homo sapien
cctaggcctggatgtaaactctgtg

SEQ ID NO: 663479 - DNA, 25 bp, Homo sapien
tgttgaaccataggattccgacccg

SEQ ID NO: 663480 - DNA, 25 bp, Homo sapien
ggtggcacatttccctgttgaacca

SEQ ID NO: 663481 - DNA, 25 bp, Homo sapien
gcatcaccatgaagttaggtggcac

SEQ ID NO: 663482 - DNA, 25 bp, Homo sapien
gaggaaagtttgtgtgggcttgtga

SEQ ID NO: 663483 - DNA, 25 bp, Homo sapien
ttgctggctgccaaagggatatgga

SEQ ID NO: 663484 - DNA, 25 bp, Homo sapien
tgaggagctgtgaactggcctgggt

SEQ ID NO: 663485 - DNA, 25 bp, Homo sapien
cctgggttgctcatctgaggaaagt

SEQ ID NO: 663486 - DNA, 25 bp, Homo sapien
ctaaggatggtcttgcctggagttg

SEQ ID NO: 663487 - DNA, 25 bp, Homo sapien
cattgggccgggcaagggagccttc

SEQ ID NO: 663488 - DNA, 25 bp, Homo sapien
cgtggctaaggatggtcttgcctgg

SEQ ID NO: 663489 - DNA, 25 bp, Homo sapien
attgggccgggcaagggagccttct

SEQ ID NO: 663490 - DNA, 25 bp, Homo sapien
ctggaggaggttgaagggctccaga

SEQ ID NO: 663491 - DNA, 25 bp, Homo sapien
gctccagaaggcagctggttccagc

SEQ ID NO: 663492 - DNA, 25 bp, Homo sapien
aagggctccagaaggcagctggttc

SEQ ID NO: 663493 - DNA, 25 bp, Homo sapien
ggctccagaaggcagctggttccag

SEQ ID NO: 663494 - DNA, 25 bp, Homo sapien
cagtaaactggggtcgaattccctg

SEQ ID NO: 663495 - DNA, 25 bp, Homo sapien
gactttgctgctgtatatggagccc

SEQ ID NO: 663496 - DNA, 25 bp, Homo sapien
ggagctaaagatcctgagggatgac

SEQ ID NO: 663497 - DNA, 25 bp, Homo sapien
tgttcacagagacaggctgcattgg

SEQ ID NO: 663498 - DNA, 25 bp, Homo sapien
cacagagacaggctgcattgggtga

SEQ ID NO: 663499 - DNA, 25 bp, Homo sapien
tgacacatttccacccgggggtatc

SEQ ID NO: 663500 - DNA, 25 bp, Homo sapien
aacagtggcagggttgttcatcctt

SEQ ID NO: 663501 - DNA, 25 bp, Homo sapien
cacccgggggtatcataacagtggc

SEQ ID NO: 663502 - DNA, 25 bp, Homo sapien
gggcctggtgccatcatggaagatg

SEQ ID NO: 663503 - DNA, 25 bp, Homo sapien
ccatctcgacttcccgggcccaagt

SEQ ID NO: 663504 - DNA, 25 bp, Homo sapien
tatgtccttcagatatatatgtaga

SEQ ID NO: 663505 - DNA, 25 bp, Homo sapien
aatttgctcttatgtccttcagata

SEQ ID NO: 663506 - DNA, 25 bp, Homo sapien
tattgcaattgtggttaacagttct

SEQ ID NO: 663507 - DNA, 25 bp, Homo sapien
tctcccctaaggtttgctgtttaca

SEQ ID NO: 663508 - DNA, 25 bp, Homo sapien
tggccatcaattactcacagaggtg

SEQ ID NO: 663509 - DNA, 25 bp, Homo sapien
tagtggccctatataccttcagtga

SEQ ID NO: 663510 - DNA, 25 bp, Homo sapien
tatttactgaaacgtgctcttggaa

SEQ ID NO: 663511 - DNA, 25 bp, Homo sapien
gcttatttagatttaccccatgctt

SEQ ID NO: 663512 - DNA, 25 bp, Homo sapien
tgagcagttcaattagcaagggtct

SEQ ID NO: 663513 - DNA, 25 bp, Homo sapien
cctgaagtacatccttgagcagttc

SEQ ID NO: 663514 - DNA, 25 bp, Homo sapien
taatcctccactactagtttagaag

SEQ ID NO: 663515 - DNA, 25 bp, Homo sapien
aacatgcattccagtactagatggg

SEQ ID NO: 663516 - DNA, 25 bp, Homo sapien
tgttgcccatgctaagagaagaaag

SEQ ID NO: 663517 - DNA, 25 bp, Homo sapien
caagatccaaggttctcacctaggg

SEQ ID NO: 663518 - DNA, 25 bp, Homo sapien
tccataatgagcttcctaatcccag

SEQ ID NO: 663519 - DNA, 25 bp, Homo sapien
gaccacttgccataggaaatcccgc

SEQ ID NO: 663520 - DNA, 25 bp, Homo sapien
tcggttctgagccaaagccaggtta

SEQ ID NO: 663521 - DNA, 25 bp, Homo sapien
gctcccatgggtccattcattctca

SEQ ID NO: 663522 - DNA, 25 bp, Homo sapien
gcctccatcctaactgaatttccag

SEQ ID NO: 663523 - DNA, 25 bp, Homo sapien
caatcactgggagctaccagatgct

SEQ ID NO: 663524 - DNA, 25 bp, Homo sapien
catgcctggctaggtcagctttcta

SEQ ID NO: 663525 - DNA, 25 bp, Homo sapien
ggcacgtgccaatacaagcagctaa

SEQ ID NO: 663526 - DNA, 25 bp, Homo sapien
gctatagcttgcctctagaagtcag

SEQ ID NO: 663527 - DNA, 25 bp, Homo sapien
ctagatgggcacatggcaaagtaaa

SEQ ID NO: 663528 - DNA, 25 bp, Homo sapien
aatcccgaagctgctggttgttgct

SEQ ID NO: 663529 - DNA, 25 bp, Homo sapien
aatgtcacacgcacgctgttccagg

SEQ ID NO: 663530 - DNA, 25 bp, Homo sapien
ctctgagcaaggatccgtagccgct

SEQ ID NO: 663531 - DNA, 25 bp, Homo sapien
cttcaatctgaacggagagaatccc

SEQ ID NO: 663532 - DNA, 25 bp, Homo sapien
cacaaatgcccgtaagatatggaca

SEQ ID NO: 663533 - DNA, 25 bp, Homo sapien
tgaacaatttcaggcccagcaagac

SEQ ID NO: 663534 - DNA, 25 bp, Homo sapien
ggcttttcactatgtccgaagggat

SEQ ID NO: 663535 - DNA, 25 bp, Homo sapien
gctgctacttcgtaccatctgggag

SEQ ID NO: 663536 - DNA, 25 bp, Homo sapien
aattgggcacgtttttcaatattgc

SEQ ID NO: 663537 - DNA, 25 bp, Homo sapien
ttttcaatattgcatctaatttcca

SEQ ID NO: 663538 - DNA, 25 bp, Homo sapien
attgggcacgtttttcaatattgca

SEQ ID NO: 663539 - DNA, 25 bp, Homo sapien
acaaattgggcacgtttttcaatat

SEQ ID NO: 663540 - DNA, 25 bp, Homo sapien
tctaagtttggaaggtcatccaaaa

SEQ ID NO: 663541 - DNA, 25 bp, Homo sapien
atcttctagtccagagtcaaaatcc

SEQ ID NO: 663542 - DNA, 25 bp, Homo sapien
tcatcatcttctagtccagagtcaa

SEQ ID NO: 663543 - DNA, 25 bp, Homo sapien
tcatcttctagtccagagtcaaaat

SEQ ID NO: 663544 - DNA, 25 bp, Homo sapien
gcatatgccaagaggacaataagaa

SEQ ID NO: 663545 - DNA, 25 bp, Homo sapien
tccagaagcatatgccaagaggaca

SEQ ID NO: 663546 - DNA, 25 bp, Homo sapien
attattccagaagcatatgccaaga

SEQ ID NO: 663547 - DNA, 25 bp, Homo sapien
tgccaagaggacaataagaaaactt

SEQ ID NO: 663548 - DNA, 25 bp, Homo sapien
tcttctaagtccaaagaagctggca

SEQ ID NO: 663549 - DNA, 25 bp, Homo sapien
catttatccaggtcatcttctaagt

SEQ ID NO: 663550 - DNA, 25 bp, Homo sapien
ggtcatcttctaagtccaaagaagc

SEQ ID NO: 663551 - DNA, 25 bp, Homo sapien
tccaggtcatcttctaagtccaaag

SEQ ID NO: 663552 - DNA, 25 bp, Homo sapien
ggatttcaaggtagcagcccagcag

SEQ ID NO: 663553 - DNA, 25 bp, Homo sapien
tggatttcaaggtagcagcccagca

SEQ ID NO: 663554 - DNA, 25 bp, Homo sapien
cttggatttcaaggtagcagcccag

SEQ ID NO: 663555 - DNA, 25 bp, Homo sapien
ttggatttcaaggtagcagcccagc

SEQ ID NO: 663556 - DNA, 25 bp, Homo sapien
gcaaaactcacagacttatacaagc

SEQ ID NO: 663557 - DNA, 25 bp, Homo sapien
taacatcaggtcacactatctgcat

SEQ ID NO: 663558 - DNA, 25 bp, Homo sapien
tatctgcatatgcttagagcccaaa

SEQ ID NO: 663559 - DNA, 25 bp, Homo sapien
tctgtccagattaattaacatcagg

SEQ ID NO: 663560 - DNA, 25 bp, Homo sapien
gctgtggtgagctataatagcatct

SEQ ID NO: 663561 - DNA, 25 bp, Homo sapien
aagatgacgtatgtatagtgttatg

SEQ ID NO: 663562 - DNA, 25 bp, Homo sapien
cacttatcatcatataagatgacgt

SEQ ID NO: 663563 - DNA, 25 bp, Homo sapien
aattgcataaactattaacctagca

SEQ ID NO: 663564 - DNA, 25 bp, Homo sapien
ttgactcatgataagaacctggacc

SEQ ID NO: 663565 - DNA, 25 bp, Homo sapien
catgatcagcattccagcatgccgg

SEQ ID NO: 663566 - DNA, 25 bp, Homo sapien
cacctgctgattaaagacccatgag

SEQ ID NO: 663567 - DNA, 25 bp, Homo sapien
tccagcctgagcctataagttcgag

SEQ ID NO: 663568 - DNA, 25 bp, Homo sapien
ggagaatcacatgaactcagaggca

SEQ ID NO: 663569 - DNA, 25 bp, Homo sapien
gagaatcacatgaactcagaggcag

SEQ ID NO: 663570 - DNA, 25 bp, Homo sapien
gcaggagaatcacatgaactcagag

SEQ ID NO: 663571 - DNA, 25 bp, Homo sapien
caggagaatcacatgaactcagagg

SEQ ID NO: 663572 - DNA, 25 bp, Homo sapien
tcaccatagtagcctggctagtctc

SEQ ID NO: 663573 - DNA, 25 bp, Homo sapien
catagtagcctggctagtctcgaac

SEQ ID NO: 663574 - DNA, 25 bp, Homo sapien
gtttcaccatagtagcctggctagt

SEQ ID NO: 663575 - DNA, 25 bp, Homo sapien
ccatagtagcctggctagtctcgaa

SEQ ID NO: 663576 - DNA, 25 bp, Homo sapien
gaagacccatctaggctatgccgat

SEQ ID NO: 663577 - DNA, 25 bp, Homo sapien
gattattccccagccaagcgctaag

SEQ ID NO: 663578 - DNA, 25 bp, Homo sapien
tcctcctgagtatggactggcctgg

SEQ ID NO: 663579 - DNA, 25 bp, Homo sapien
gacaccttgactacctcctgtgaga

SEQ ID NO: 663580 - DNA, 25 bp, Homo sapien
agatcgtaaggtagccttgatttcc

SEQ ID NO: 663581 - DNA, 25 bp, Homo sapien
tgcccttctctgagatcgtaaggta

SEQ ID NO: 663582 - DNA, 25 bp, Homo sapien
tctgagatcgtaaggtagccttgat

SEQ ID NO: 663583 - DNA, 25 bp, Homo sapien
ccttctctgagatcgtaaggtagcc

SEQ ID NO: 663584 - DNA, 25 bp, Homo sapien
tagtcagtgggacccctctccattc

SEQ ID NO: 663585 - DNA, 25 bp, Homo sapien
actctctgaccactctcagaaaagt

SEQ ID NO: 663586 - DNA, 25 bp, Homo sapien
agttagtcagtgggacccctctcca

SEQ ID NO: 663587 - DNA, 25 bp, Homo sapien
ctctgaccactctcagaaaagttag

SEQ ID NO: 663588 - DNA, 25 bp, Homo sapien
taagttggccttgtaaccacacaac

SEQ ID NO: 663589 - DNA, 25 bp, Homo sapien
ccacacaaccttaaatgtttcagga

SEQ ID NO: 663590 - DNA, 25 bp, Homo sapien
tgttaaagacaatttgcctaggcat

SEQ ID NO: 663591 - DNA, 25 bp, Homo sapien
gcctaggcataactattataagatc

SEQ ID NO: 663592 - DNA, 25 bp, Homo sapien
tagcagataatctaaggcagcccct

SEQ ID NO: 663593 - DNA, 25 bp, Homo sapien
taaaagtttcagctggttaccgcta

SEQ ID NO: 663594 - DNA, 25 bp, Homo sapien
tataaagaataattgcaggctgggc

SEQ ID NO: 663595 - DNA, 25 bp, Homo sapien
tacactataggtaggacacttccca

SEQ ID NO: 663596 - DNA, 25 bp, Homo sapien
taggattttgtgttcctttgtggta

SEQ ID NO: 663597 - DNA, 25 bp, Homo sapien
gcccgacccggcagggcctcacgga

SEQ ID NO: 663598 - DNA, 25 bp, Homo sapien
ttggagcgccggcccgggccgtgcg

SEQ ID NO: 663599 - DNA, 25 bp, Homo sapien
tcgcgtgcgcccgtctgtcccgccg

SEQ ID NO: 663600 - DNA, 25 bp, Homo sapien
gtccgtccgtcagtcctcgcgtgcg

SEQ ID NO: 663601 - DNA, 25 bp, Homo sapien
cttaagccaagggtcatgggtgttc

SEQ ID NO: 663602 - DNA, 25 bp, Homo sapien
tgtccttaagccaagggtcatgggt

SEQ ID NO: 663603 - DNA, 25 bp, Homo sapien
taagccaagggtcatgggtgttcct

SEQ ID NO: 663604 - DNA, 25 bp, Homo sapien
tccttaagccaagggtcatgggtgt

SEQ ID NO: 663605 - DNA, 25 bp, Homo sapien
gacaggggcgcattgggcacctgca

SEQ ID NO: 663606 - DNA, 25 bp, Homo sapien
tgcaaagagctgagaagacaggggc

SEQ ID NO: 663607 - DNA, 25 bp, Homo sapien
aagacaggggcgcattgggcacctg

SEQ ID NO: 663608 - DNA, 25 bp, Homo sapien
gctgagaagacaggggcgcattggg

SEQ ID NO: 663609 - DNA, 25 bp, Homo sapien
taaaaatagcaggagcctaggcaac

SEQ ID NO: 663610 - DNA, 25 bp, Homo sapien
taggtaaaaatagcaggagcctagg

SEQ ID NO: 663611 - DNA, 25 bp, Homo sapien
ctgtaggtaaaaatagcaggagcct

SEQ ID NO: 663612 - DNA, 25 bp, Homo sapien
aaaatagcaggagcctaggcaacac

SEQ ID NO: 663613 - DNA, 25 bp, Homo sapien
cttcttccatcttttcccaggcaac

SEQ ID NO: 663614 - DNA, 25 bp, Homo sapien
cttcttcatcttcttcttccatctt

SEQ ID NO: 663615 - DNA, 25 bp, Homo sapien
tctcttcctccccatcttcttcatc

SEQ ID NO: 663616 - DNA, 25 bp, Homo sapien
ccttctcttcctccccatcttcttc

SEQ ID NO: 663617 - DNA, 25 bp, Homo sapien
gctttgccaccttagtgacataagg

SEQ ID NO: 663618 - DNA, 25 bp, Homo sapien
tcagctttgccaccttagtgacata

SEQ ID NO: 663619 - DNA, 25 bp, Homo sapien
cagctttgccaccttagtgacataa

SEQ ID NO: 663620 - DNA, 25 bp, Homo sapien
tttgccaccttagtgacataaggct

SEQ ID NO: 663621 - DNA, 25 bp, Homo sapien
ggggcattaggatcgttcttgcctc

SEQ ID NO: 663622 - DNA, 25 bp, Homo sapien
attaggatcgttcttgcctccctta

SEQ ID NO: 663623 - DNA, 25 bp, Homo sapien
ttgggggcattaggatcgttcttgc

SEQ ID NO: 663624 - DNA, 25 bp, Homo sapien
gcattaggatcgttcttgcctccct

SEQ ID NO: 663625 - DNA, 25 bp, Homo sapien
ggatttttcttatgctcttctctgc

SEQ ID NO: 663626 - DNA, 25 bp, Homo sapien
gatttttcttatgctcttctctgca

SEQ ID NO: 663627 - DNA, 25 bp, Homo sapien
tagtttcctggggtcacttctagcc

SEQ ID NO: 663628 - DNA, 25 bp, Homo sapien
gcagacatcttgccccttagtttcc

SEQ ID NO: 663629 - DNA, 25 bp, Homo sapien
gcggcgccatcaatccaccttctgg

SEQ ID NO: 663630 - DNA, 25 bp, Homo sapien
gcagcggcgccatcaatccaccttc

SEQ ID NO: 663631 - DNA, 25 bp, Homo sapien
ggcgccatcaatccaccttctggcc

SEQ ID NO: 663632 - DNA, 25 bp, Homo sapien
ccatcaatccaccttctggcctcaa

SEQ ID NO: 663633 - DNA, 25 bp, Homo sapien
ggtttgctaagcatcccctctggcc

SEQ ID NO: 663634 - DNA, 25 bp, Homo sapien
tccagttactctgggattgggtttg

SEQ ID NO: 663635 - DNA, 25 bp, Homo sapien
tactgtagatgctgacactcaccac

SEQ ID NO: 663636 - DNA, 25 bp, Homo sapien
gacagatagtctgattcctcaaggt

SEQ ID NO: 663637 - DNA, 25 bp, Homo sapien
catggacccaggataagacatctac

SEQ ID NO: 663638 - DNA, 25 bp, Homo sapien
gaagttgttggtccttcggctgcca

SEQ ID NO: 663639 - DNA, 25 bp, Homo sapien
tgggctccgagggtccttaacagcg

SEQ ID NO: 663640 - DNA, 25 bp, Homo sapien
actttctccacgtggtgacccctgg

SEQ ID NO: 663641 - DNA, 25 bp, Homo sapien
tgagacatggatttcccaaggccac

SEQ ID NO: 663642 - DNA, 25 bp, Homo sapien
gaaatggcaagactggttccaatcc

SEQ ID NO: 663643 - DNA, 25 bp, Homo sapien
cactgctccaatagaaatttgccaa

SEQ ID NO: 663644 - DNA, 25 bp, Homo sapien
tgctggttgaggcatgggcaccctt

SEQ ID NO: 663645 - DNA, 25 bp, Homo sapien
tcaaggtcaggacattcagcagaac

SEQ ID NO: 663646 - DNA, 25 bp, Homo sapien
aggttggactgcaggtccgggtgta

SEQ ID NO: 663647 - DNA, 25 bp, Homo sapien
ggctgtcactcaggttccggttcaa

SEQ ID NO: 663648 - DNA, 25 bp, Homo sapien
ggttcaaggtcaggacattcagcag

SEQ ID NO: 663649 - DNA, 25 bp, Homo sapien
ctgtggtagccaaggtacagaaaaa

SEQ ID NO: 663650 - DNA, 25 bp, Homo sapien
gtggtagccaaggtacagaaaaatc

SEQ ID NO: 663651 - DNA, 25 bp, Homo sapien
tgtggtagccaaggtacagaaaaat

SEQ ID NO: 663652 - DNA, 25 bp, Homo sapien
ttgagaattcttacaccgggtgtca

SEQ ID NO: 663653 - DNA, 25 bp, Homo sapien
ttcttacaccgggtgtcatctgagc

SEQ ID NO: 663654 - DNA, 25 bp, Homo sapien
agaattcttacaccgggtgtcatct

SEQ ID NO: 663655 - DNA, 25 bp, Homo sapien
attcttacaccgggtgtcatctgag

SEQ ID NO: 663656 - DNA, 25 bp, Homo sapien
gggaagatacaccactagaaccaag

SEQ ID NO: 663657 - DNA, 25 bp, Homo sapien
cttgggccggaacccaggagtgtct

SEQ ID NO: 663658 - DNA, 25 bp, Homo sapien
ccaagtctctttaatctagcccggg

SEQ ID NO: 663659 - DNA, 25 bp, Homo sapien
ttctctctggatagggcaaggttaa

SEQ ID NO: 663660 - DNA, 25 bp, Homo sapien
cctgccaaaataggtgcctggcata

SEQ ID NO: 663661 - DNA, 25 bp, Homo sapien
acctgccaaaataggtgcctggcat

SEQ ID NO: 663662 - DNA, 25 bp, Homo sapien
ccaaaataggtgcctggcatatata

SEQ ID NO: 663663 - DNA, 25 bp, Homo sapien
tgccaaaataggtgcctggcatata

SEQ ID NO: 663664 - DNA, 25 bp, Homo sapien
ccctaaagagggctggttgtctatt

SEQ ID NO: 663665 - DNA, 25 bp, Homo sapien
caccctaaagagggctggttgtcta

SEQ ID NO: 663666 - DNA, 25 bp, Homo sapien
accctaaagagggctggttgtctat

SEQ ID NO: 663667 - DNA, 25 bp, Homo sapien
tatgacaggcatctgcagtctaggc

SEQ ID NO: 663668 - DNA, 25 bp, Homo sapien
tttcactaagaaactcagcgcagcc

SEQ ID NO: 663669 - DNA, 25 bp, Homo sapien
ggatgcgcctggcacaaaacagcct

SEQ ID NO: 663670 - DNA, 25 bp, Homo sapien
cagcccatgtttgccgcatgaggaa

SEQ ID NO: 663671 - DNA, 25 bp, Homo sapien
ccgcgcagctccattggcccccaga

SEQ ID NO: 663672 - DNA, 25 bp, Homo sapien
cagagcgaggtaggttccacagagc

SEQ ID NO: 663673 - DNA, 25 bp, Homo sapien
ggcccccagagcgaggtaggttcca

SEQ ID NO: 663674 - DNA, 25 bp, Homo sapien
ccccagagcgaggtaggttccacag

SEQ ID NO: 663675 - DNA, 25 bp, Homo sapien
gcaggaaagagagtggccgcttccc

SEQ ID NO: 663676 - DNA, 25 bp, Homo sapien
ggaaagagagtggccgcttccctgg

SEQ ID NO: 663677 - DNA, 25 bp, Homo sapien
agcaggaaagagagtggccgcttcc

SEQ ID NO: 663678 - DNA, 25 bp, Homo sapien
caggaaagagagtggccgcttccct

SEQ ID NO: 663679 - DNA, 25 bp, Homo sapien
cccagagagggcaagatcttcacaa

SEQ ID NO: 663680 - DNA, 25 bp, Homo sapien
gaccgctagtgctggaaaatgccca

SEQ ID NO: 663681 - DNA, 25 bp, Homo sapien
tgttagaggacagagaccacaaggg

SEQ ID NO: 663682 - DNA, 25 bp, Homo sapien
tacatccactgagctatgaggctgc

SEQ ID NO: 663683 - DNA, 25 bp, Homo sapien
tagctgtccggttgggccaggagaa

SEQ ID NO: 663684 - DNA, 25 bp, Homo sapien
tgttgagcaggatccccgagggggt

SEQ ID NO: 663685 - DNA, 25 bp, Homo sapien
ggtgcagagtggttagctgtccggt

SEQ ID NO: 663686 - DNA, 25 bp, Homo sapien
gggtgataaggccgctgccaaaggg

SEQ ID NO: 663687 - DNA, 25 bp, Homo sapien
tcttggttcagaggatcccttgttc

SEQ ID NO: 663688 - DNA, 25 bp, Homo sapien
cctcttggttcagaggatcccttgt

SEQ ID NO: 663689 - DNA, 25 bp, Homo sapien
cttggttcagaggatcccttgttcc

SEQ ID NO: 663690 - DNA, 25 bp, Homo sapien
cccctcttggttcagaggatccctt

SEQ ID NO: 663691 - DNA, 25 bp, Homo sapien
gcagccgtgggagctccgtctagtt

SEQ ID NO: 663692 - DNA, 25 bp, Homo sapien
gagctccgtctagttcatagacagg

SEQ ID NO: 663693 - DNA, 25 bp, Homo sapien
gtctagttcatagacaggcaggagt

SEQ ID NO: 663694 - DNA, 25 bp, Homo sapien
cgtgggagctccgtctagttcatag

SEQ ID NO: 663695 - DNA, 25 bp, Homo sapien
ctgcctgggagtcattgatatggcc

SEQ ID NO: 663696 - DNA, 25 bp, Homo sapien
ggctgcctgggagtcattgatatgg

SEQ ID NO: 663697 - DNA, 25 bp, Homo sapien
attgatatggccccggaggtaggcg

SEQ ID NO: 663698 - DNA, 25 bp, Homo sapien
tcattgatatggccccggaggtagg

SEQ ID NO: 663699 - DNA, 25 bp, Homo sapien
tcagtgatggtagaatcatagacgg

SEQ ID NO: 663700 - DNA, 25 bp, Homo sapien
tggccagggctaatgcaatcttcag

SEQ ID NO: 663701 - DNA, 25 bp, Homo sapien
atgtcatccatgctctcagtgatgg

SEQ ID NO: 663702 - DNA, 25 bp, Homo sapien
catagacgggatctcccagtctgct

SEQ ID NO: 663703 - DNA, 25 bp, Homo sapien
agcctgttctcgggataccaggctg

SEQ ID NO: 663704 - DNA, 25 bp, Homo sapien
ggcagggcccgtgtgcggaggtggg

SEQ ID NO: 663705 - DNA, 25 bp, Homo sapien
tgttctcgggataccaggctggtga

SEQ ID NO: 663706 - DNA, 25 bp, Homo sapien
tgcggaggtgggggactaagaacca

SEQ ID NO: 663707 - DNA, 25 bp, Homo sapien
tgatctggctctcctagaagggaaa

SEQ ID NO: 663708 - DNA, 25 bp, Homo sapien
gcttcaacagttgactgcccaggta

SEQ ID NO: 663709 - DNA, 25 bp, Homo sapien
tctttttggcactatgaggagctgg

SEQ ID NO: 663710 - DNA, 25 bp, Homo sapien
tcacatggcaagtcaagggcagggc

SEQ ID NO: 663711 - DNA, 25 bp, Homo sapien
ttatgacaccccctgcgtgctgagc

SEQ ID NO: 663712 - DNA, 25 bp, Homo sapien
caagggcgctgtaattgctgaagtc

SEQ ID NO: 663713 - DNA, 25 bp, Homo sapien
cacaggcttctccacaagggcgctg

SEQ ID NO: 663714 - DNA, 25 bp, Homo sapien
tgaagtcctcttcggttatgacacc

SEQ ID NO: 663715 - DNA, 25 bp, Homo sapien
ttgccacctgcgtagaaggcagccg

SEQ ID NO: 663716 - DNA, 25 bp, Homo sapien
gtgccaagtacatccagcacctcag

SEQ ID NO: 663717 - DNA, 25 bp, Homo sapien
atggcaggaacgtctcccggaagcg

SEQ ID NO: 663718 - DNA, 25 bp, Homo sapien
cgatgcagcaacgagccaggtagtg

SEQ ID NO: 663719 - DNA, 25 bp, Homo sapien
aaagattctacccttctccatcaac

SEQ ID NO: 663720 - DNA, 25 bp, Homo sapien
gaccggatgagacgcgcaatagatg

SEQ ID NO: 663721 - DNA, 25 bp, Homo sapien
ggatgtctaagggcccttcccagac

SEQ ID NO: 663722 - DNA, 25 bp, Homo sapien
ttaagtgcgaggcagggatgtctaa

SEQ ID NO: 663723 - DNA, 25 bp, Homo sapien
agatcatgagtcacgttgaagccat

SEQ ID NO: 663724 - DNA, 25 bp, Homo sapien
ctagatcatgagtcacgttgaagcc

SEQ ID NO: 663725 - DNA, 25 bp, Homo sapien
gatcatgagtcacgttgaagccatc

SEQ ID NO: 663726 - DNA, 25 bp, Homo sapien
tagatcatgagtcacgttgaagcca

SEQ ID NO: 663727 - DNA, 25 bp, Homo sapien
ggccggagagcagggggtggaggag

SEQ ID NO: 663728 - DNA, 25 bp, Homo sapien
gggccggagagcagggggtggagga

SEQ ID NO: 663729 - DNA, 25 bp, Homo sapien
cggagagcagggggtggaggaggtc

SEQ ID NO: 663730 - DNA, 25 bp, Homo sapien
ccggagagcagggggtggaggaggt

SEQ ID NO: 663731 - DNA, 25 bp, Homo sapien
gtaggagaaggccacccaaggagag

SEQ ID NO: 663732 - DNA, 25 bp, Homo sapien
taggagaaggccacccaaggagaga

SEQ ID NO: 663733 - DNA, 25 bp, Homo sapien
agtaggagaaggccacccaaggaga

SEQ ID NO: 663734 - DNA, 25 bp, Homo sapien
aggagaaggccacccaaggagagat

SEQ ID NO: 663735 - DNA, 25 bp, Homo sapien
tgagcttcatgtagccccttcacca

SEQ ID NO: 663736 - DNA, 25 bp, Homo sapien
tcatgtagccccttcaccattccgg

SEQ ID NO: 663737 - DNA, 25 bp, Homo sapien
gagcttcatgtagccccttcaccat

SEQ ID NO: 663738 - DNA, 25 bp, Homo sapien
tgtagccccttcaccattccgggaa

SEQ ID NO: 663739 - DNA, 25 bp, Homo sapien
ctgggcaaggcgggtaggcgaggga

SEQ ID NO: 663740 - DNA, 25 bp, Homo sapien
tgggcaaggcgggtaggcgagggag

SEQ ID NO: 663741 - DNA, 25 bp, Homo sapien
gcaaggcgggtaggcgagggagaga

SEQ ID NO: 663742 - DNA, 25 bp, Homo sapien
aggcgggtaggcgagggagagagga

SEQ ID NO: 663743 - DNA, 25 bp, Homo sapien
ggctgaactccgcagagccccaagc

SEQ ID NO: 663744 - DNA, 25 bp, Homo sapien
gctgggctgaactccgcagagcccc

SEQ ID NO: 663745 - DNA, 25 bp, Homo sapien
tgaactccgcagagccccaagccag

SEQ ID NO: 663746 - DNA, 25 bp, Homo sapien
tgggctgaactccgcagagccccaa

SEQ ID NO: 663747 - DNA, 25 bp, Homo sapien
gattcccagagaagtaaggttccag

SEQ ID NO: 663748 - DNA, 25 bp, Homo sapien
gaaaggcctcttttagctgccgtag

SEQ ID NO: 663749 - DNA, 25 bp, Homo sapien
tgacatttcagggtactcagtagcc

SEQ ID NO: 663750 - DNA, 25 bp, Homo sapien
cacgtgccagataggtaagattccc

SEQ ID NO: 663751 - DNA, 25 bp, Homo sapien
gaagagagactcccctgaactctct

SEQ ID NO: 663752 - DNA, 25 bp, Homo sapien
aagagagactcccctgaactctctc

SEQ ID NO: 663753 - DNA, 25 bp, Homo sapien
agagagactcccctgaactctctct

SEQ ID NO: 663754 - DNA, 25 bp, Homo sapien
tttcgtcggatgtcatgtaccagca

SEQ ID NO: 663755 - DNA, 25 bp, Homo sapien
ctggtgcggactcccggaaatcaat

SEQ ID NO: 663756 - DNA, 25 bp, Homo sapien
aattaggtggctctcatttcgtcgg

SEQ ID NO: 663757 - DNA, 25 bp, Homo sapien
gatgtcatgtaccagcatcacgccc

SEQ ID NO: 663758 - DNA, 25 bp, Homo sapien
gatgataacatgctacccctctgta

SEQ ID NO: 663759 - DNA, 25 bp, Homo sapien
gactcagccaccctaagaggatggg

SEQ ID NO: 663760 - DNA, 25 bp, Homo sapien
gagccaagataggaactttgtcagc

SEQ ID NO: 663761 - DNA, 25 bp, Homo sapien
taatccctgattaggaaaagcccag

SEQ ID NO: 663762 - DNA, 25 bp, Homo sapien
aagtgcagcgggcagcatcggtcac

SEQ ID NO: 663763 - DNA, 25 bp, Homo sapien
cagaagatccctgtttactgagcac

SEQ ID NO: 663764 - DNA, 25 bp, Homo sapien
gatacccaaacacaaggctgctgcc

SEQ ID NO: 663765 - DNA, 25 bp, Homo sapien
acctcgatgcccagtgaagtgcagc

SEQ ID NO: 663766 - DNA, 25 bp, Homo sapien
gcggcatgaaggtcgaagccctgcc

SEQ ID NO: 663767 - DNA, 25 bp, Homo sapien
tagggcacctccactagccctagaa

SEQ ID NO: 663768 - DNA, 25 bp, Homo sapien
tggagctcctctctttgggaccttc

SEQ ID NO: 663769 - DNA, 25 bp, Homo sapien
gtgcctcctaatggatctgtcctta

SEQ ID NO: 663770 - DNA, 25 bp, Homo sapien
agaacgggtctttgcgcgtctcgcg

SEQ ID NO: 663771 - DNA, 25 bp, Homo sapien
tgagacaggccgtgacgatgaccgt

SEQ ID NO: 663772 - DNA, 25 bp, Homo sapien
gggtccccgaagtagatctgcatga

SEQ ID NO: 663773 - DNA, 25 bp, Homo sapien
atctgcatgaccagcgccacggtga

SEQ ID NO: 663774 - DNA, 25 bp, Homo sapien
tgggactattcagcgctttccctgc

SEQ ID NO: 663775 - DNA, 25 bp, Homo sapien
tcggtctgggcatctcctatctggc

SEQ ID NO: 663776 - DNA, 25 bp, Homo sapien
ctccaggtgggactattcagcgctt

SEQ ID NO: 663777 - DNA, 25 bp, Homo sapien
ctgccacacaatccccgcactggct

SEQ ID NO: 663778 - DNA, 25 bp, Homo sapien
ccccaggacaggcggggcaacggtg

SEQ ID NO: 663779 - DNA, 25 bp, Homo sapien
aggacaggcggggcaacggtgcccg

SEQ ID NO: 663780 - DNA, 25 bp, Homo sapien
cccaggacaggcggggcaacggtgc

SEQ ID NO: 663781 - DNA, 25 bp, Homo sapien
caggacaggcggggcaacggtgccc

SEQ ID NO: 663782 - DNA, 25 bp, Homo sapien
taggccaaatttcctggcacccagg

SEQ ID NO: 663783 - DNA, 25 bp, Homo sapien
cagccctcagtggaaatcggatcct

SEQ ID NO: 663784 - DNA, 25 bp, Homo sapien
ggaagagacagggacctccccagct

SEQ ID NO: 663785 - DNA, 25 bp, Homo sapien
agtggaaatcggatcctgccccagt

SEQ ID NO: 663786 - DNA, 25 bp, Homo sapien
cagatgaccagaaagtgtagaggag

SEQ ID NO: 663787 - DNA, 25 bp, Homo sapien
gtcagggccagatgaccagaaagtg

SEQ ID NO: 663788 - DNA, 25 bp, Homo sapien
gccagatgaccagaaagtgtagagg

SEQ ID NO: 663789 - DNA, 25 bp, Homo sapien
agggccagatgaccagaaagtgtag

SEQ ID NO: 663790 - DNA, 25 bp, Homo sapien
tcccagaaaggcgtcctcgtccttg

SEQ ID NO: 663791 - DNA, 25 bp, Homo sapien
agtccactggcgagtaggcgcccag

SEQ ID NO: 663792 - DNA, 25 bp, Homo sapien
ggtctcccagaaaggcgtcctcgtc

SEQ ID NO: 663793 - DNA, 25 bp, Homo sapien
gatgctcatgtagtccactggcgag

SEQ ID NO: 663794 - DNA, 25 bp, Homo sapien
ccccagcagcgcagcgcctgccgga

SEQ ID NO: 663795 - DNA, 25 bp, Homo sapien
gcgccccccagcagcgcagcgcctg

SEQ ID NO: 663796 - DNA, 25 bp, Homo sapien
gcccgcgccccccagcagcgcagcg

SEQ ID NO: 663797 - DNA, 25 bp, Homo sapien
cctcgcccgcgccccccagcagcgc

SEQ ID NO: 663798 - DNA, 25 bp, Homo sapien
cgcggagttggtctccgccgcccga

SEQ ID NO: 663799 - DNA, 25 bp, Homo sapien
agcgctaccgcgagctgcaccggcg

SEQ ID NO: 663800 - DNA, 25 bp, Homo sapien
tgcaccggcgctccgtggaggagcc

SEQ ID NO: 663801 - DNA, 25 bp, Homo sapien
cgaggtcagccgctccgcgcacgtc

SEQ ID NO: 663802 - DNA, 25 bp, Homo sapien
gaataaggcaactttaggattgacc

SEQ ID NO: 663803 - DNA, 25 bp, Homo sapien
gattgaccctaggacagaagctctg

SEQ ID NO: 663804 - DNA, 25 bp, Homo sapien
ggatccttgtatgctcctgaatatg

SEQ ID NO: 663805 - DNA, 25 bp, Homo sapien
catggctctcagtatatttcaatcc

SEQ ID NO: 663806 - DNA, 25 bp, Homo sapien
gccttttgaagactggccggtacag

SEQ ID NO: 663807 - DNA, 25 bp, Homo sapien
caagaactgtgctatccaacatgga

SEQ ID NO: 663808 - DNA, 25 bp, Homo sapien
gaggagaaggccctgaactagacat

SEQ ID NO: 663809 - DNA, 25 bp, Homo sapien
tttgagttggtgaaaagcccgtcca

SEQ ID NO: 663810 - DNA, 25 bp, Homo sapien
gagctgatctacttagggtggtcag

SEQ ID NO: 663811 - DNA, 25 bp, Homo sapien
ggagctctcccaattgatgtagatt

SEQ ID NO: 663812 - DNA, 25 bp, Homo sapien
tctgtacgagacaatgagggattca

SEQ ID NO: 663813 - DNA, 25 bp, Homo sapien
gaaggagtgccttccatctttggac

SEQ ID NO: 663814 - DNA, 25 bp, Homo sapien
gcattgtggtcatccaggcaagaga

SEQ ID NO: 663815 - DNA, 25 bp, Homo sapien
gactatcgttctcatataaagaggg

SEQ ID NO: 663816 - DNA, 25 bp, Homo sapien
tcatctcctctcataacaggtttgg

SEQ ID NO: 663817 - DNA, 25 bp, Homo sapien
taaagaactcagtctttccctcagc

SEQ ID NO: 663818 - DNA, 25 bp, Homo sapien
gagcaacgactcaaagatagggaat

SEQ ID NO: 663819 - DNA, 25 bp, Homo sapien
gataaccttactgagaagccaacat

SEQ ID NO: 663820 - DNA, 25 bp, Homo sapien
gctctgaggttaaatgttcttggtg

SEQ ID NO: 663821 - DNA, 25 bp, Homo sapien
tgtggctatctagggaaagaacatt

SEQ ID NO: 663822 - DNA, 25 bp, Homo sapien
ttatttattcaagatggaaactcac

SEQ ID NO: 663823 - DNA, 25 bp, Homo sapien
tctgtcatccagactggagtgcagt

SEQ ID NO: 663824 - DNA, 25 bp, Homo sapien
tgacctttgatctgtccaccttggc

SEQ ID NO: 663825 - DNA, 25 bp, Homo sapien
atttatttattcaagatggaaactc

SEQ ID NO: 663826 - DNA, 25 bp, Homo sapien
cattccatcgatctgctgccaaaga

SEQ ID NO: 663827 - DNA, 25 bp, Homo sapien
tcatttgtatcaaactggacctgct

SEQ ID NO: 663828 - DNA, 25 bp, Homo sapien
tagaacaccgtgctaggcaatttcc

SEQ ID NO: 663829 - DNA, 25 bp, Homo sapien
acagggacagggcttacatccaggc

SEQ ID NO: 663830 - DNA, 25 bp, Homo sapien
tacagcagaggtggagtcagcactt

SEQ ID NO: 663831 - DNA, 25 bp, Homo sapien
gtgaagggtgaatgcctctactgct

SEQ ID NO: 663832 - DNA, 25 bp, Homo sapien
ggaggcccagttatcactgcaagtt

SEQ ID NO: 663833 - DNA, 25 bp, Homo sapien
tgtcaccttgtgtgatggccacacc

SEQ ID NO: 663834 - DNA, 25 bp, Homo sapien
tgttcctagggccagaggagcttgt

SEQ ID NO: 663835 - DNA, 25 bp, Homo sapien
cagaacagagacgaaaaggctacct

SEQ ID NO: 663836 - DNA, 25 bp, Homo sapien
gtctccagagggtattcagatcatc

SEQ ID NO: 663837 - DNA, 25 bp, Homo sapien
ggaaaccagctttgtctccaggtag

SEQ ID NO: 663838 - DNA, 25 bp, Homo sapien
gagctatacccacatctcaaggatt

SEQ ID NO: 663839 - DNA, 25 bp, Homo sapien
tagggaaaggctatgcccctccact

SEQ ID NO: 663840 - DNA, 25 bp, Homo sapien
gaggtctttaggaggatacccctca

SEQ ID NO: 663841 - DNA, 25 bp, Homo sapien
tcatggacctttacctcagagcagc

SEQ ID NO: 663842 - DNA, 25 bp, Homo sapien
tcacacagggtatgggttgtccagg

SEQ ID NO: 663843 - DNA, 25 bp, Homo sapien
tctgcatgctcgatggctttggttc

SEQ ID NO: 663844 - DNA, 25 bp, Homo sapien
tttggttcgaagtagatgccccacg

SEQ ID NO: 663845 - DNA, 25 bp, Homo sapien
tgttcatcacgagtgtcttttcctg

SEQ ID NO: 663846 - DNA, 25 bp, Homo sapien
ccagctgagcagtacctgggtaact

SEQ ID NO: 663847 - DNA, 25 bp, Homo sapien
ggcttcatctgataccctggtaagg

SEQ ID NO: 663848 - DNA, 25 bp, Homo sapien
tggagtttccttcacggttgcaaag

SEQ ID NO: 663849 - DNA, 25 bp, Homo sapien
ggagtctccttctagtcctaggttg

SEQ ID NO: 663850 - DNA, 25 bp, Homo sapien
cccctctaggctggctcacttggct

SEQ ID NO: 663851 - DNA, 25 bp, Homo sapien
ccaggattcctgactctttccagtg

SEQ ID NO: 663852 - DNA, 25 bp, Homo sapien
acaggtaataaagctagtgattggc

SEQ ID NO: 663853 - DNA, 25 bp, Homo sapien
tgattggcagagctggcaccgaagc

SEQ ID NO: 663854 - DNA, 25 bp, Homo sapien
ctgaaatgcactggaccactcgggc

SEQ ID NO: 663855 - DNA, 25 bp, Homo sapien
tagcaggcaattctcaaaaggctca

SEQ ID NO: 663856 - DNA, 25 bp, Homo sapien
cccaaagatgcccagctctgaaatg

SEQ ID NO: 663857 - DNA, 25 bp, Homo sapien
aaaggctcaggttcgatcttctcca

SEQ ID NO: 663858 - DNA, 25 bp, Homo sapien
ctgcaatgaaactggccagtcaccc

SEQ ID NO: 663859 - DNA, 25 bp, Homo sapien
ttggccccatagtcatagccctagc

SEQ ID NO: 663860 - DNA, 25 bp, Homo sapien
cttgagtcctggatcaatgtgtccc

SEQ ID NO: 663861 - DNA, 25 bp, Homo sapien
taagttttgcaagttcccaccactg

SEQ ID NO: 663862 - DNA, 25 bp, Homo sapien
gcccaggcctctacgttgctcttct

SEQ ID NO: 663863 - DNA, 25 bp, Homo sapien
gctttagcacaaaccggctaggggc

SEQ ID NO: 663864 - DNA, 25 bp, Homo sapien
ctctggggctttagcacaaaccggc

SEQ ID NO: 663865 - DNA, 25 bp, Homo sapien
agggcctcggcgatggcctggtccc

SEQ ID NO: 663866 - DNA, 25 bp, Homo sapien
cacaaaccggctaggggcagcaagg

SEQ ID NO: 663867 - DNA, 25 bp, Homo sapien
ggcaagaagcttaggtccagctggt

SEQ ID NO: 663868 - DNA, 25 bp, Homo sapien
agcttaggtccagctggttatgcag

SEQ ID NO: 663869 - DNA, 25 bp, Homo sapien
caagaagcttaggtccagctggtta

SEQ ID NO: 663870 - DNA, 25 bp, Homo sapien
aagaggcaagaagcttaggtccagc

SEQ ID NO: 663871 - DNA, 25 bp, Homo sapien
agcatgtgacctctccagcagtaga

SEQ ID NO: 663872 - DNA, 25 bp, Homo sapien
tactgacgaggcatgtagccatccc

SEQ ID NO: 663873 - DNA, 25 bp, Homo sapien
catcccggaagtaaaccacagcaat

SEQ ID NO: 663874 - DNA, 25 bp, Homo sapien
gaggcatgtagccatcccggaagta

SEQ ID NO: 663875 - DNA, 25 bp, Homo sapien
ctgtagactgtactgacgaggcatg

SEQ ID NO: 663876 - DNA, 25 bp, Homo sapien
tgttcgtcggatcacatggatgttc

SEQ ID NO: 663877 - DNA, 25 bp, Homo sapien
aaacagccttcggtcttggtccaga

SEQ ID NO: 663878 - DNA, 25 bp, Homo sapien
tatcttcaaatgttcgtcggatcac

SEQ ID NO: 663879 - DNA, 25 bp, Homo sapien
cttcggtcttggtccagagacccct

SEQ ID NO: 663880 - DNA, 25 bp, Homo sapien
tctatggcacgctggtcaaatatgt

SEQ ID NO: 663881 - DNA, 25 bp, Homo sapien
cacgctggtcaaatatgtttctttc

SEQ ID NO: 663882 - DNA, 25 bp, Homo sapien
tagctcattctctatggcacgctgg

SEQ ID NO: 663883 - DNA, 25 bp, Homo sapien
ccttctcttgagcaatcagtagcac

SEQ ID NO: 663884 - DNA, 25 bp, Homo sapien
agagaagaactaacttgccaaggtc

SEQ ID NO: 663885 - DNA, 25 bp, Homo sapien
tcaggtgccacataactcctaccta

SEQ ID NO: 663886 - DNA, 25 bp, Homo sapien
gaacctatctcactctcacaatggg

SEQ ID NO: 663887 - DNA, 25 bp, Homo sapien
tcctacctaccagtgcctaattttg

SEQ ID NO: 663888 - DNA, 25 bp, Homo sapien
ggtgagccgtagagctcccaggctt

SEQ ID NO: 663889 - DNA, 25 bp, Homo sapien
gagccgtagagctcccaggctttgg

SEQ ID NO: 663890 - DNA, 25 bp, Homo sapien
ttgggtgagccgtagagctcccagg

SEQ ID NO: 663891 - DNA, 25 bp, Homo sapien
tgagccgtagagctcccaggctttg

SEQ ID NO: 663892 - DNA, 25 bp, Homo sapien
ctggcagagatggtgttgatttcga

SEQ ID NO: 663893 - DNA, 25 bp, Homo sapien
tgttgatttcgatctgtttcagggc

SEQ ID NO: 663894 - DNA, 25 bp, Homo sapien
tgcgctgcgctggaacatgtagtct

SEQ ID NO: 663895 - DNA, 25 bp, Homo sapien
tagtctgagcgattcaggcccagga

SEQ ID NO: 663896 - DNA, 25 bp, Homo sapien
ggaaaactgaaggctgacagtacct

SEQ ID NO: 663897 - DNA, 25 bp, Homo sapien
aggctgacagtacctgcccagggac

SEQ ID NO: 663898 - DNA, 25 bp, Homo sapien
aaactgaaggctgacagtacctgcc

SEQ ID NO: 663899 - DNA, 25 bp, Homo sapien
ggctgacagtacctgcccagggact

SEQ ID NO: 663900 - DNA, 25 bp, Homo sapien
caggtaccatgaactctacacagag

SEQ ID NO: 663901 - DNA, 25 bp, Homo sapien
aaacaaacagagatgggagggacag

SEQ ID NO: 663902 - DNA, 25 bp, Homo sapien
tacacagagattagaggtaccagca

SEQ ID NO: 663903 - DNA, 25 bp, Homo sapien
ccagtgagaggcagattcccatgag

SEQ ID NO: 663904 - DNA, 25 bp, Homo sapien
ttttaggacttgcttgtggatgtca

SEQ ID NO: 663905 - DNA, 25 bp, Homo sapien
gacgagcggtaaagtcatcctgttt

SEQ ID NO: 663906 - DNA, 25 bp, Homo sapien
gcttgtggatgtcaaagagacgagc

SEQ ID NO: 663907 - DNA, 25 bp, Homo sapien
tgtcaaagagacgagcggtaaagtc

SEQ ID NO: 663908 - DNA, 25 bp, Homo sapien
gcaggttgaagtccatctgcacagc

SEQ ID NO: 663909 - DNA, 25 bp, Homo sapien
tccatctgcacagcataggcttgct

SEQ ID NO: 663910 - DNA, 25 bp, Homo sapien
tccactagcaggttgaagtccatct

SEQ ID NO: 663911 - DNA, 25 bp, Homo sapien
agcataggcttgctccagcagggca

SEQ ID NO: 663912 - DNA, 25 bp, Homo sapien
gaggggaagagcgtgaatggggcat

SEQ ID NO: 663913 - DNA, 25 bp, Homo sapien
aagagcgtgaatggggcatagctca

SEQ ID NO: 663914 - DNA, 25 bp, Homo sapien
agcgtgaatggggcatagctcacca

SEQ ID NO: 663915 - DNA, 25 bp, Homo sapien
gggaagagcgtgaatggggcatagc

SEQ ID NO: 663916 - DNA, 25 bp, Homo sapien
tgctggttgatgttcaagcccaggc

SEQ ID NO: 663917 - DNA, 25 bp, Homo sapien
tgctccttgctggttgatgttcaag

SEQ ID NO: 663918 - DNA, 25 bp, Homo sapien
ccttgctggttgatgttcaagccca

SEQ ID NO: 663919 - DNA, 25 bp, Homo sapien
ctggttgatgttcaagcccaggccc

SEQ ID NO: 663920 - DNA, 25 bp, Homo sapien
caaacactgcaggagccaaatactc

SEQ ID NO: 663921 - DNA, 25 bp, Homo sapien
tgttaacaatgcttgcccctggtca

SEQ ID NO: 663922 - DNA, 25 bp, Homo sapien
ggacttactctgtactgaataccct

SEQ ID NO: 663923 - DNA, 25 bp, Homo sapien
actatatccacttatgcgccctgca

SEQ ID NO: 663924 - DNA, 25 bp, Homo sapien
cctggagaaacactcacataggtgc

SEQ ID NO: 663925 - DNA, 25 bp, Homo sapien
ataggtgccccaacagacatatgca

SEQ ID NO: 663926 - DNA, 25 bp, Homo sapien
tatgcctcagaatgaagatgaccct

SEQ ID NO: 663927 - DNA, 25 bp, Homo sapien
gagggaagctaaactgtgatacacc

SEQ ID NO: 663928 - DNA, 25 bp, Homo sapien
ctgtttatcctgcaagaggctcccc

SEQ ID NO: 663929 - DNA, 25 bp, Homo sapien
ctctagctgctgtttatcctgcaag

SEQ ID NO: 663930 - DNA, 25 bp, Homo sapien
cggtccacggcctgccgtgccagct

SEQ ID NO: 663931 - DNA, 25 bp, Homo sapien
agaggctcccccagttggtggccat

SEQ ID NO: 663932 - DNA, 25 bp, Homo sapien
ctcgcgccgctacccaggctcaggg

SEQ ID NO: 663933 - DNA, 25 bp, Homo sapien
gccctcgcgccgctacccaggctca

SEQ ID NO: 663934 - DNA, 25 bp, Homo sapien
gttctcccggccctcgcgccgctac

SEQ ID NO: 663935 - DNA, 25 bp, Homo sapien
cggttctcccggccctcgcgccgct

SEQ ID NO: 663936 - DNA, 25 bp, Homo sapien
gcggccttagcattaggagtgcgtc

SEQ ID NO: 663937 - DNA, 25 bp, Homo sapien
ctttggcgctgagtcgaggccagga

SEQ ID NO: 663938 - DNA, 25 bp, Homo sapien
ttaggagtgcgtcggctgcaccctg

SEQ ID NO: 663939 - DNA, 25 bp, Homo sapien
ggcggtcgatgagagggcggcctta

SEQ ID NO: 663940 - DNA, 25 bp, Homo sapien
tggttctggaagccgatatgagcag

SEQ ID NO: 663941 - DNA, 25 bp, Homo sapien
tggaagccgatatgagcagcagcaa

SEQ ID NO: 663942 - DNA, 25 bp, Homo sapien
gaagccgatatgagcagcagcaact

SEQ ID NO: 663943 - DNA, 25 bp, Homo sapien
tctggaagccgatatgagcagcagc

SEQ ID NO: 663944 - DNA, 25 bp, Homo sapien
ctgtgcatttggaatgggagcgcat

SEQ ID NO: 663945 - DNA, 25 bp, Homo sapien
tgagcaaggcttgaccacaaaggct

SEQ ID NO: 663946 - DNA, 25 bp, Homo sapien
caagaaggccgtaagacttgcccac

SEQ ID NO: 663947 - DNA, 25 bp, Homo sapien
ggttaacaccaagcgggtcattcag

SEQ ID NO: 663948 - DNA, 25 bp, Homo sapien
catgtttgtgtcgtccaagcggaga

SEQ ID NO: 663949 - DNA, 25 bp, Homo sapien
tttaaatattatgtcagcactgaag

SEQ ID NO: 663950 - DNA, 25 bp, Homo sapien
cagctgggcgtttaggtgattgaca

SEQ ID NO: 663951 - DNA, 25 bp, Homo sapien
cagtggatgagtttcatacgatgca

SEQ ID NO: 663952 - DNA, 25 bp, Homo sapien
caagagtagttcatgcagtggatga

SEQ ID NO: 663953 - DNA, 25 bp, Homo sapien
aaggatcccctgaatgagaccgtgg

SEQ ID NO: 663954 - DNA, 25 bp, Homo sapien
aagaaggcagcatcgttccagacgg

SEQ ID NO: 663955 - DNA, 25 bp, Homo sapien
tctctatgagaattatgcgggctcc

SEQ ID NO: 663956 - DNA, 25 bp, Homo sapien
gaagtcacagaataggctcctggcg

SEQ ID NO: 663957 - DNA, 25 bp, Homo sapien
cacacacacgcatggtgctgtgacc

SEQ ID NO: 663958 - DNA, 25 bp, Homo sapien
gccctgtgcatgtgtccacttagaa

SEQ ID NO: 663959 - DNA, 25 bp, Homo sapien
gaggttcacacagataccatacacg

SEQ ID NO: 663960 - DNA, 25 bp, Homo sapien
ggagatcgttccttatccccaggcg

SEQ ID NO: 663961 - DNA, 25 bp, Homo sapien
aagaagcacgccgaggcccttaagg

SEQ ID NO: 663962 - DNA, 25 bp, Homo sapien
ctggctcgcatgcaggacctggtgg

SEQ ID NO: 663963 - DNA, 25 bp, Homo sapien
cgtgtcaaggagctcgcataccagg

SEQ ID NO: 663964 - DNA, 25 bp, Homo sapien
cccttaagggcgtgcgcaagcatga

SEQ ID NO: 663965 - DNA, 25 bp, Homo sapien
ttaataaattggcaacacaaggaag

SEQ ID NO: 663966 - DNA, 25 bp, Homo sapien
ttggcaacacaaggaagggccccat

SEQ ID NO: 663967 - DNA, 25 bp, Homo sapien
ggagaacccccttggatgaacacag

SEQ ID NO: 663968 - DNA, 25 bp, Homo sapien
gaacacagcggccaatgagcaaaca

SEQ ID NO: 663969 - DNA, 25 bp, Homo sapien
taaatgtcctcttacctctgggtgg

SEQ ID NO: 663970 - DNA, 25 bp, Homo sapien
gaggctctccatgacctagggccct

SEQ ID NO: 663971 - DNA, 25 bp, Homo sapien
tgactgacagccaagaaaccggcag

SEQ ID NO: 663972 - DNA, 25 bp, Homo sapien
aaggtgggcatggtaccctgtcctc

SEQ ID NO: 663973 - DNA, 25 bp, Homo sapien
acactggcccagcagcctcccgagg

SEQ ID NO: 663974 - DNA, 25 bp, Homo sapien
agcagcctcccgaggcctggcccaa

SEQ ID NO: 663975 - DNA, 25 bp, Homo sapien
ccagcagcctcccgaggcctggccc

SEQ ID NO: 663976 - DNA, 25 bp, Homo sapien
ccacactggcccagcagcctcccga

SEQ ID NO: 663977 - DNA, 25 bp, Homo sapien
tccgggttcaacaggatggacactg

SEQ ID NO: 663978 - DNA, 25 bp, Homo sapien
gaagtccctgtctatgtccatgtag

SEQ ID NO: 663979 - DNA, 25 bp, Homo sapien
tccttccagtatgagaagctgatgc

SEQ ID NO: 663980 - DNA, 25 bp, Homo sapien
tagctaacgagagcagagggtgact

SEQ ID NO: 663981 - DNA, 25 bp, Homo sapien
aagcccagcaccgggacacccctct

SEQ ID NO: 663982 - DNA, 25 bp, Homo sapien
ggaggacccaggtcaagcccagcac

SEQ ID NO: 663983 - DNA, 25 bp, Homo sapien
tggaggacccaggtcaagcccagca

SEQ ID NO: 663984 - DNA, 25 bp, Homo sapien
cctggaggacccaggtcaagcccag

SEQ ID NO: 663985 - DNA, 25 bp, Homo sapien
gccggggtacttcttgctgtgctcc

SEQ ID NO: 663986 - DNA, 25 bp, Homo sapien
caggaagccggggtacttcttgctg

SEQ ID NO: 663987 - DNA, 25 bp, Homo sapien
ggggtacttcttgctgtgctccatc

SEQ ID NO: 663988 - DNA, 25 bp, Homo sapien
gaagccggggtacttcttgctgtgc

SEQ ID NO: 663989 - DNA, 25 bp, Homo sapien
gcagccgcaggtacaggggcagccg

SEQ ID NO: 663990 - DNA, 25 bp, Homo sapien
caggtacaggggcagccgctctttc

SEQ ID NO: 663991 - DNA, 25 bp, Homo sapien
cgctctttccgtcgggccagcatca

SEQ ID NO: 663992 - DNA, 25 bp, Homo sapien
caggggcagccgctctttccgtcgg

SEQ ID NO: 663993 - DNA, 25 bp, Homo sapien
cctgcacagaggtgagataggactg

SEQ ID NO: 663994 - DNA, 25 bp, Homo sapien
tggcccctggtgaacctgggtagcc

SEQ ID NO: 663995 - DNA, 25 bp, Homo sapien
ctccctgcacagaggtgagatagga

SEQ ID NO: 663996 - DNA, 25 bp, Homo sapien
ttcctgactgagcaccttcctcttc

SEQ ID NO: 663997 - DNA, 25 bp, Homo sapien
tgtacaatgggacactgattcctcc

SEQ ID NO: 663998 - DNA, 25 bp, Homo sapien
gaagggaaggctgcatgactattca

SEQ ID NO: 663999 - DNA, 25 bp, Homo sapien
tggtgcttcacctcagaacggaacc

SEQ ID NO: 664000 - DNA, 25 bp, Homo sapien
gcggttatcccgcttcagaagtgcc

SEQ ID NO: 664001 - DNA, 25 bp, Homo sapien
atatgtaggcgagcaggcggcattc

SEQ ID NO: 664002 - DNA, 25 bp, Homo sapien
gggtcagcgtctgcacgtggatgat

SEQ ID NO: 664003 - DNA, 25 bp, Homo sapien
aggaaggacatctgcgtgggcacct

SEQ ID NO: 664004 - DNA, 25 bp, Homo sapien
gcggcattcagacagtacctcggca

SEQ ID NO: 664005 - DNA, 25 bp, Homo sapien
gaaacgcgtgcgcatacacatggaa

SEQ ID NO: 664006 - DNA, 25 bp, Homo sapien
gaggtcctagcgcaactggttttcc

SEQ ID NO: 664007 - DNA, 25 bp, Homo sapien
tgaccgtgacaaggaacaagtgcct

SEQ ID NO: 664008 - DNA, 25 bp, Homo sapien
gatggatccatgacgctgcattaag

SEQ ID NO: 664009 - DNA, 25 bp, Homo sapien
tggttttcaaatcggtccagggaca

SEQ ID NO: 664010 - DNA, 25 bp, Homo sapien
tccaccagggagctgttgatctgct

SEQ ID NO: 664011 - DNA, 25 bp, Homo sapien
ggacagagtgacacagcgcaccagc

SEQ ID NO: 664012 - DNA, 25 bp, Homo sapien
gcaccagcatgttggagtccaccag

SEQ ID NO: 664013 - DNA, 25 bp, Homo sapien
gaccaggactccaggtgaacttctg

SEQ ID NO: 664014 - DNA, 25 bp, Homo sapien
ggttttacgctcaagggtgctggat

SEQ ID NO: 664015 - DNA, 25 bp, Homo sapien
gaatgtttgccaaagactgcccaga

SEQ ID NO: 664016 - DNA, 25 bp, Homo sapien
tactaagaggcactccccggaattc

SEQ ID NO: 664017 - DNA, 25 bp, Homo sapien
tgcatcaacgttgaacttcatcagc

SEQ ID NO: 664018 - DNA, 25 bp, Homo sapien
ggaggtcaaagtaactctggagcac

SEQ ID NO: 664019 - DNA, 25 bp, Homo sapien
ctttgcatcggtgttgatatattta

SEQ ID NO: 664020 - DNA, 25 bp, Homo sapien
tatatttattgaatctcttgaatgc

SEQ ID NO: 664021 - DNA, 25 bp, Homo sapien
gacttacactcgctgtccacaatgc

SEQ ID NO: 664022 - DNA, 25 bp, Homo sapien
ctcgctgtccacaatgcagtaaagg

SEQ ID NO: 664023 - DNA, 25 bp, Homo sapien
cttgacttacactcgctgtccacaa

SEQ ID NO: 664024 - DNA, 25 bp, Homo sapien
tacactcgctgtccacaatgcagta

SEQ ID NO: 664025 - DNA, 25 bp, Homo sapien
tctagattcttgtctgaggatgctg

SEQ ID NO: 664026 - DNA, 25 bp, Homo sapien
cctggcatggagctcagaccatgca

SEQ ID NO: 664027 - DNA, 25 bp, Homo sapien
cattggctttgagcaagcatcctgg

SEQ ID NO: 664028 - DNA, 25 bp, Homo sapien
gatggaactggcaacactgtctaga

SEQ ID NO: 664029 - DNA, 25 bp, Homo sapien
tgcccagggcgtacagctgaagcct

SEQ ID NO: 664030 - DNA, 25 bp, Homo sapien
ctctgtggtcaccaagatggccggg

SEQ ID NO: 664031 - DNA, 25 bp, Homo sapien
ccctgcccagggcgtacagctgaag

SEQ ID NO: 664032 - DNA, 25 bp, Homo sapien
gctctgtggtcaccaagatggccgg

SEQ ID NO: 664033 - DNA, 25 bp, Homo sapien
gaaagaccaattataactttggcca

SEQ ID NO: 664034 - DNA, 25 bp, Homo sapien
aaaatatcttcagggtcaaaatgcc

SEQ ID NO: 664035 - DNA, 25 bp, Homo sapien
caaaatgccttgctgggtaaccaaa

SEQ ID NO: 664036 - DNA, 25 bp, Homo sapien
taattcgtgggtcagtttcttgtcc

SEQ ID NO: 664037 - DNA, 25 bp, Homo sapien
aggacacagcaacgcgtgggctggg

SEQ ID NO: 664038 - DNA, 25 bp, Homo sapien
ggacaggacacagcaacgcgtgggc

SEQ ID NO: 664039 - DNA, 25 bp, Homo sapien
cacagcaacgcgtgggctgggggga

SEQ ID NO: 664040 - DNA, 25 bp, Homo sapien
acaggacacagcaacgcgtgggctg

SEQ ID NO: 664041 - DNA, 25 bp, Homo sapien
tccaagaggcctcgcttcagcagga

SEQ ID NO: 664042 - DNA, 25 bp, Homo sapien
ccaagaggcctcgcttcagcaggaa

SEQ ID NO: 664043 - DNA, 25 bp, Homo sapien
ctccaagaggcctcgcttcagcagg

SEQ ID NO: 664044 - DNA, 25 bp, Homo sapien
caagaggcctcgcttcagcaggaac

SEQ ID NO: 664045 - DNA, 25 bp, Homo sapien
tcggaggaaactctccacagcccga

SEQ ID NO: 664046 - DNA, 25 bp, Homo sapien
gtggtccctcggaggaaactctcca

SEQ ID NO: 664047 - DNA, 25 bp, Homo sapien
tctgcataggaggtggtccctcgga

SEQ ID NO: 664048 - DNA, 25 bp, Homo sapien
ggaaactctccacagcccgagcttg

SEQ ID NO: 664049 - DNA, 25 bp, Homo sapien
taacatctgggatcgaagggctggc

SEQ ID NO: 664050 - DNA, 25 bp, Homo sapien
gaatcggcaggtacttttccccaga

SEQ ID NO: 664051 - DNA, 25 bp, Homo sapien
gctctagggaattcatggcagggcc

SEQ ID NO: 664052 - DNA, 25 bp, Homo sapien
cataaggcaccagcacagaacaggt

SEQ ID NO: 664053 - DNA, 25 bp, Homo sapien
tgaaagacgactctgctggctcctt

SEQ ID NO: 664054 - DNA, 25 bp, Homo sapien
actctgctggctccttcttcatgac

SEQ ID NO: 664055 - DNA, 25 bp, Homo sapien
acgactctgctggctccttcttcat

SEQ ID NO: 664056 - DNA, 25 bp, Homo sapien
ctgaaagacgactctgctggctcct

SEQ ID NO: 664057 - DNA, 25 bp, Homo sapien
tgcagcagacgagttaataagcccc

SEQ ID NO: 664058 - DNA, 25 bp, Homo sapien
ctgcagcagacgagttaataagccc

SEQ ID NO: 664059 - DNA, 25 bp, Homo sapien
cagacgagttaataagcccctcttc

SEQ ID NO: 664060 - DNA, 25 bp, Homo sapien
cagcagacgagttaataagcccctc

SEQ ID NO: 664061 - DNA, 25 bp, Homo sapien
tcctggttgttgagtaacaagtact

SEQ ID NO: 664062 - DNA, 25 bp, Homo sapien
atgttggccttgagagagatggcac

SEQ ID NO: 664063 - DNA, 25 bp, Homo sapien
tgtcggtgttgaggacagcttccac

SEQ ID NO: 664064 - DNA, 25 bp, Homo sapien
agatggcactgagttcattcagctc

SEQ ID NO: 664065 - DNA, 25 bp, Homo sapien
caccaggctagtgtagggagtctcc

SEQ ID NO: 664066 - DNA, 25 bp, Homo sapien
ggctagtgtagggagtctcctgccc

SEQ ID NO: 664067 - DNA, 25 bp, Homo sapien
caccaggcactttcctctagcacct

SEQ ID NO: 664068 - DNA, 25 bp, Homo sapien
cagcaccaggctagtgtagggagtc

SEQ ID NO: 664069 - DNA, 25 bp, Homo sapien
ggtcactgaagctctgaagaagcct

SEQ ID NO: 664070 - DNA, 25 bp, Homo sapien
actgaagctctgaagaagcctcaaa

SEQ ID NO: 664071 - DNA, 25 bp, Homo sapien
tcgtggtggtcactgaagctctgaa

SEQ ID NO: 664072 - DNA, 25 bp, Homo sapien
tggtggtcactgaagctctgaagaa

SEQ ID NO: 664073 - DNA, 25 bp, Homo sapien
ttctcatgctggtaggcagggtgcc

SEQ ID NO: 664074 - DNA, 25 bp, Homo sapien
agacaggtcgctgagggaagtcccc

SEQ ID NO: 664075 - DNA, 25 bp, Homo sapien
tagtgccccatgagcaatcgaaaga

SEQ ID NO: 664076 - DNA, 25 bp, Homo sapien
taagcagtttccgaattgagccaga

SEQ ID NO: 664077 - DNA, 25 bp, Homo sapien
cacgcccgggagcacggttctatag

SEQ ID NO: 664078 - DNA, 25 bp, Homo sapien
tgctagctcatgcagtgggcagccc

SEQ ID NO: 664079 - DNA, 25 bp, Homo sapien
ggttctataggtggatgaaaattac

SEQ ID NO: 664080 - DNA, 25 bp, Homo sapien
tggagtgaaatgagatccctatcac

SEQ ID NO: 664081 - DNA, 25 bp, Homo sapien
cgcaagtgtctctcacactagtgag

SEQ ID NO: 664082 - DNA, 25 bp, Homo sapien
gagagacgcaagtgtctctcacact

SEQ ID NO: 664083 - DNA, 25 bp, Homo sapien
ttttagtgagagacgcaagtgtctc

SEQ ID NO: 664084 - DNA, 25 bp, Homo sapien
tttttagtgagagacgcaagtgtct

SEQ ID NO: 664085 - DNA, 25 bp, Homo sapien
ttgaaacaactactccaagccagtg

SEQ ID NO: 664086 - DNA, 25 bp, Homo sapien
gtcagcagcaggtcttgaaacaact

SEQ ID NO: 664087 - DNA, 25 bp, Homo sapien
gcaggtcttgaaacaactactccaa

SEQ ID NO: 664088 - DNA, 25 bp, Homo sapien
acaactactccaagccagtgaggcc

SEQ ID NO: 664089 - DNA, 25 bp, Homo sapien
ggttgtgaccatggaggacaagggc

SEQ ID NO: 664090 - DNA, 25 bp, Homo sapien
tctggttgtgaccatggaggacaag

SEQ ID NO: 664091 - DNA, 25 bp, Homo sapien
gttgtgaccatggaggacaagggca

SEQ ID NO: 664092 - DNA, 25 bp, Homo sapien
ttgtacatgatctcatgcataatct

SEQ ID NO: 664093 - DNA, 25 bp, Homo sapien
ttctggctgacgtgtgaggcaggcc

SEQ ID NO: 664094 - DNA, 25 bp, Homo sapien
tcatgcataatcttcattgactggg

SEQ ID NO: 664095 - DNA, 25 bp, Homo sapien
tggtttcgctgacgccccatcagca

SEQ ID NO: 664096 - DNA, 25 bp, Homo sapien
tatttatctggttgcttgtgcttca

SEQ ID NO: 664097 - DNA, 25 bp, Homo sapien
ctgacggctaatgatggtgaacatt

SEQ ID NO: 664098 - DNA, 25 bp, Homo sapien
tatttgcaaagatgtcccaccctgc

SEQ ID NO: 664099 - DNA, 25 bp, Homo sapien
cagatgtcattgtgtatgacagcta

SEQ ID NO: 664100 - DNA, 25 bp, Homo sapien
ctgtacccggcctagttcaagactg

SEQ ID NO: 664101 - DNA, 25 bp, Homo sapien
ccggcctagttcaagactgtttttg

SEQ ID NO: 664102 - DNA, 25 bp, Homo sapien
taggatcagctactccatttgtgca

SEQ ID NO: 664103 - DNA, 25 bp, Homo sapien
gtgggtgtcacgaggcttgcctaat

SEQ ID NO: 664104 - DNA, 25 bp, Homo sapien
aaacgatcaggaactcgtcttgttc

SEQ ID NO: 664105 - DNA, 25 bp, Homo sapien
gaagagaagtggcaatggcactgcc

SEQ ID NO: 664106 - DNA, 25 bp, Homo sapien
cctgatcttagtggtagaagctttc

SEQ ID NO: 664107 - DNA, 25 bp, Homo sapien
tagccagaacctccaatacgatgct

SEQ ID NO: 664108 - DNA, 25 bp, Homo sapien
gatctcctgtttgacccactggtta

SEQ ID NO: 664109 - DNA, 25 bp, Homo sapien
ttatttctaactcaccccactggga

SEQ ID NO: 664110 - DNA, 25 bp, Homo sapien
cccactgggatttgaggacatactt

SEQ ID NO: 664111 - DNA, 25 bp, Homo sapien
aaagtagtatgttaaggtctccagc

SEQ ID NO: 664112 - DNA, 25 bp, Homo sapien
tttggaatatgtgttgctgaagcaa

SEQ ID NO: 664113 - DNA, 25 bp, Homo sapien
aataaatatggaatgcatcaggaat

SEQ ID NO: 664114 - DNA, 25 bp, Homo sapien
ctctgtactgttccaattttggaat

SEQ ID NO: 664115 - DNA, 25 bp, Homo sapien
tgtactgttccaattttggaatatg

SEQ ID NO: 664116 - DNA, 25 bp, Homo sapien
gtgtgcactactacccctggttaac

SEQ ID NO: 664117 - DNA, 25 bp, Homo sapien
tgtgcactactacccctggttaact

SEQ ID NO: 664118 - DNA, 25 bp, Homo sapien
gtattccgacttggattctttgggc

SEQ ID NO: 664119 - DNA, 25 bp, Homo sapien
aacatgccaggcctcagcgttttta

SEQ ID NO: 664120 - DNA, 25 bp, Homo sapien
ttgggcttcttgaatgtgtgcatta

SEQ ID NO: 664121 - DNA, 25 bp, Homo sapien
cccattatgcatatcttggtgtgct

SEQ ID NO: 664122 - DNA, 25 bp, Homo sapien
ccatggccatctaacctttatattt

SEQ ID NO: 664123 - DNA, 25 bp, Homo sapien
cagttcatatctactgctgagtctt

SEQ ID NO: 664124 - DNA, 25 bp, Homo sapien
taatctctatcaacctattttgctg

SEQ ID NO: 664125 - DNA, 25 bp, Homo sapien
tcatcttgattattatactacttaa

SEQ ID NO: 664126 - DNA, 25 bp, Homo sapien
taattaagaagagggtacctggcca

SEQ ID NO: 664127 - DNA, 25 bp, Homo sapien
tgggatgacattgagccaggctgtc

SEQ ID NO: 664128 - DNA, 25 bp, Homo sapien
taatgccctggagtatacactgctc

SEQ ID NO: 664129 - DNA, 25 bp, Homo sapien
tagctggcctgtagatcaccctgtt

SEQ ID NO: 664130 - DNA, 25 bp, Homo sapien
ttttatttgcttaccatcaaaatct

SEQ ID NO: 664131 - DNA, 25 bp, Homo sapien
ctgcctctctctgtgggcaaattct

SEQ ID NO: 664132 - DNA, 25 bp, Homo sapien
gcatgaacttccctggactctgttc

SEQ ID NO: 664133 - DNA, 25 bp, Homo sapien
ggactctgttcttattaactgcctc

SEQ ID NO: 664134 - DNA, 25 bp, Homo sapien
caaagccgctcaacaaagccaggaa

SEQ ID NO: 664135 - DNA, 25 bp, Homo sapien
cagggcatctagcaccaaagcattg

SEQ ID NO: 664136 - DNA, 25 bp, Homo sapien
tggctgtgcccgttgactctgacac

SEQ ID NO: 664137 - DNA, 25 bp, Homo sapien
ttcgagtcgccagtttgcaaagccg

SEQ ID NO: 664138 - DNA, 25 bp, Homo sapien
acacacccctcccataattagtgag

SEQ ID NO: 664139 - DNA, 25 bp, Homo sapien
gtggctataagatgatgtttgacct

SEQ ID NO: 664140 - DNA, 25 bp, Homo sapien
tagtgagtggctataagatgatgtt

SEQ ID NO: 664141 - DNA, 25 bp, Homo sapien
gctataagatgatgtttgaccttag

SEQ ID NO: 664142 - DNA, 25 bp, Homo sapien
aaatggcagatagcaccaaacccta

SEQ ID NO: 664143 - DNA, 25 bp, Homo sapien
tagtcctcccttagtcaagaccctc

SEQ ID NO: 664144 - DNA, 25 bp, Homo sapien
cctcccttagtcaagaccctcacag

SEQ ID NO: 664145 - DNA, 25 bp, Homo sapien
tgaaatggcagatagcaccaaaccc

SEQ ID NO: 664146 - DNA, 25 bp, Homo sapien
cgagctgctgctgatcgaaattgga

SEQ ID NO: 664147 - DNA, 25 bp, Homo sapien
gcaagaagcgtgtgcttgtcatcat

SEQ ID NO: 664148 - DNA, 25 bp, Homo sapien
gaaatggtgacagccagaatccggc

SEQ ID NO: 664149 - DNA, 25 bp, Homo sapien
gggacttcatctagtcggatcattt

SEQ ID NO: 664150 - DNA, 25 bp, Homo sapien
caattgttcttgtggtatattttgc

SEQ ID NO: 664151 - DNA, 25 bp, Homo sapien
tcaattgttcttgtggtatattttg

SEQ ID NO: 664152 - DNA, 25 bp, Homo sapien
tgttttcaattgttcttgtggtata

SEQ ID NO: 664153 - DNA, 25 bp, Homo sapien
cactgttttcaattgttcttgtggt

SEQ ID NO: 664154 - DNA, 25 bp, Homo sapien
acatctccaatgtgttcctacagac

SEQ ID NO: 664155 - DNA, 25 bp, Homo sapien
gctaaggagtctggagtttccactc

SEQ ID NO: 664156 - DNA, 25 bp, Homo sapien
gactcctatgctgagactgctaagg

SEQ ID NO: 664157 - DNA, 25 bp, Homo sapien
caaagggcacaaagggtctgtctgg

SEQ ID NO: 664158 - DNA, 25 bp, Homo sapien
catttgtctcctactgcgctggtgc

SEQ ID NO: 664159 - DNA, 25 bp, Homo sapien
gaggcatcaccctacattcacagag

SEQ ID NO: 664160 - DNA, 25 bp, Homo sapien
aagaacttgccccaacggtgatgag

SEQ ID NO: 664161 - DNA, 25 bp, Homo sapien
tattaaccttatgaccaagtggcag

SEQ ID NO: 664162 - DNA, 25 bp, Homo sapien
gtaaacaggaagatcacaaagtcat

SEQ ID NO: 664163 - DNA, 25 bp, Homo sapien
gagggttgctgtttgtaagaatgtc

SEQ ID NO: 664164 - DNA, 25 bp, Homo sapien
gccaaacgctttgtaactccctctg

SEQ ID NO: 664165 - DNA, 25 bp, Homo sapien
caaaatatcttcaatgagggttgct

SEQ ID NO: 664166 - DNA, 25 bp, Homo sapien
acatttcggttcttcagtcgtagca

SEQ ID NO: 664167 - DNA, 25 bp, Homo sapien
gttgttattcccgaactacatacag

SEQ ID NO: 664168 - DNA, 25 bp, Homo sapien
tacctacactggctatgatatgtga

SEQ ID NO: 664169 - DNA, 25 bp, Homo sapien
cgtatataaatctttgacgatcaca

SEQ ID NO: 664170 - DNA, 25 bp, Homo sapien
gaagccaaatttgtgcccatccgta

SEQ ID NO: 664171 - DNA, 25 bp, Homo sapien
cacacattggattttgagagctcaa

SEQ ID NO: 664172 - DNA, 25 bp, Homo sapien
tgttggctgctaagaagcttgaagc

SEQ ID NO: 664173 - DNA, 25 bp, Homo sapien
caattgcacagcactattatagatg

SEQ ID NO: 664174 - DNA, 25 bp, Homo sapien
gccaagggccagaacacaaaatcag

SEQ ID NO: 664175 - DNA, 25 bp, Homo sapien
actacggcttgggaggtgtactaag

SEQ ID NO: 664176 - DNA, 25 bp, Homo sapien
taatagcgctcgtctcattctgcca

SEQ ID NO: 664177 - DNA, 25 bp, Homo sapien
aaatcaggtcctaacactaagtgcc

SEQ ID NO: 664178 - DNA, 25 bp, Homo sapien
gatactcaagcagtccttggacatt

SEQ ID NO: 664179 - DNA, 25 bp, Homo sapien
agacacaggtattatacaggatact

SEQ ID NO: 664180 - DNA, 25 bp, Homo sapien
ttatacaggatactcaagcagtcct

SEQ ID NO: 664181 - DNA, 25 bp, Homo sapien
cagtccttggacatttcatcactta

SEQ ID NO: 664182 - DNA, 25 bp, Homo sapien
tctgtgttgggcaaatggctcttaa

SEQ ID NO: 664183 - DNA, 25 bp, Homo sapien
tttccattgaaagttctactgcagc

SEQ ID NO: 664184 - DNA, 25 bp, Homo sapien
gaaactactacttccctgtgagcag

SEQ ID NO: 664185 - DNA, 25 bp, Homo sapien
gctaggactgcatgcgcgtgtacca

SEQ ID NO: 664186 - DNA, 25 bp, Homo sapien
tttctgtccccggatagagatcgta

SEQ ID NO: 664187 - DNA, 25 bp, Homo sapien
cgtaggcctcataagaatttctaca

SEQ ID NO: 664188 - DNA, 25 bp, Homo sapien
gatagagatcgtaggcctcataaga

SEQ ID NO: 664189 - DNA, 25 bp, Homo sapien
tgtccccggatagagatcgtaggcc

SEQ ID NO: 664190 - DNA, 25 bp, Homo sapien
tcacatgccatgagattgctcgtgg

SEQ ID NO: 664191 - DNA, 25 bp, Homo sapien
gctataggccaatacttaggcagca

SEQ ID NO: 664192 - DNA, 25 bp, Homo sapien
taaatcaagctaggagctaccccag

SEQ ID NO: 664193 - DNA, 25 bp, Homo sapien
tgtccaagacacctcaagccaaatg

SEQ ID NO: 664194 - DNA, 25 bp, Homo sapien
tcacaccaggaaacactaaccattt

SEQ ID NO: 664195 - DNA, 25 bp, Homo sapien
gatctttactgcaaccttgtctgta

SEQ ID NO: 664196 - DNA, 25 bp, Homo sapien
caccaggaaacactaaccatttaat

SEQ ID NO: 664197 - DNA, 25 bp, Homo sapien
gtaaaagatctttactgcaaccttg

SEQ ID NO: 664198 - DNA, 25 bp, Homo sapien
cttcagtaacaaatgccatagcctc

SEQ ID NO: 664199 - DNA, 25 bp, Homo sapien
tgccatagcctccatggagagaaga

SEQ ID NO: 664200 - DNA, 25 bp, Homo sapien
gtaacaaatgccatagcctccatgg

SEQ ID NO: 664201 - DNA, 25 bp, Homo sapien
tgtaagtatttggataagtggtttc

SEQ ID NO: 664202 - DNA, 25 bp, Homo sapien
gagcagctgaggaattccactccac

SEQ ID NO: 664203 - DNA, 25 bp, Homo sapien
gaggatgttttgacactcaacaaag

SEQ ID NO: 664204 - DNA, 25 bp, Homo sapien
cactccacttggattgtttgtccct

SEQ ID NO: 664205 - DNA, 25 bp, Homo sapien
ctcaacaaagtcactgtggaggtgg

SEQ ID NO: 664206 - DNA, 25 bp, Homo sapien
aaagttatgcaagacggctacatag

SEQ ID NO: 664207 - DNA, 25 bp, Homo sapien
aattatcaactattacagcaatata

SEQ ID NO: 664208 - DNA, 25 bp, Homo sapien
caactattacagcaatatacatgaa

SEQ ID NO: 664209 - DNA, 25 bp, Homo sapien
tgcagatgatataatattcacagat

SEQ ID NO: 664210 - DNA, 25 bp, Homo sapien
aggccccggccggtcagctggccct

SEQ ID NO: 664211 - DNA, 25 bp, Homo sapien
tgtggctgccgaccgtctccctcgg

SEQ ID NO: 664212 - DNA, 25 bp, Homo sapien
agaatgttaccaggccgcggccggc

SEQ ID NO: 664213 - DNA, 25 bp, Homo sapien
ccgcagctgcagcagaatgttacca

SEQ ID NO: 664214 - DNA, 25 bp, Homo sapien
ggacaaacaggaagcaagcggcctc

SEQ ID NO: 664215 - DNA, 25 bp, Homo sapien
gtctcctcgtcggacaaacaggaag

SEQ ID NO: 664216 - DNA, 25 bp, Homo sapien
tcggacaaacaggaagcaagcggcc

SEQ ID NO: 664217 - DNA, 25 bp, Homo sapien
caaacaggaagcaagcggcctcggg

SEQ ID NO: 664218 - DNA, 25 bp, Homo sapien
ggctgcggctggcacacaaaggtgc

SEQ ID NO: 664219 - DNA, 25 bp, Homo sapien
aggacaggtggatagataggtcaac

SEQ ID NO: 664220 - DNA, 25 bp, Homo sapien
taataaatcttcgttgcttggaagg

SEQ ID NO: 664221 - DNA, 25 bp, Homo sapien
gatagataggtcaactaaagagtaa

SEQ ID NO: 664222 - DNA, 25 bp, Homo sapien
ataaatcttcgttgcttggaaggac

SEQ ID NO: 664223 - DNA, 25 bp, Homo sapien
actatcgacccctaggatctttgga

SEQ ID NO: 664224 - DNA, 25 bp, Homo sapien
aggaagggagattcaactatcgacc

SEQ ID NO: 664225 - DNA, 25 bp, Homo sapien
ttcaactatcgacccctaggatctt

SEQ ID NO: 664226 - DNA, 25 bp, Homo sapien
gagattcaactatcgacccctagga

SEQ ID NO: 664227 - DNA, 25 bp, Homo sapien
atctcatgagacagcccaatatgta

SEQ ID NO: 664228 - DNA, 25 bp, Homo sapien
ttaactagagtcacaattgcccgta

SEQ ID NO: 664229 - DNA, 25 bp, Homo sapien
tagagtcacaattgcccgtagccac

SEQ ID NO: 664230 - DNA, 25 bp, Homo sapien
tctcatgagacagcccaatatgtaa

SEQ ID NO: 664231 - DNA, 25 bp, Homo sapien
gcaatttattatagtttagcctcaa

SEQ ID NO: 664232 - DNA, 25 bp, Homo sapien
aaagcaatttattatagtttagcct

SEQ ID NO: 664233 - DNA, 25 bp, Homo sapien
agcaatttattatagtttagcctca

SEQ ID NO: 664234 - DNA, 25 bp, Homo sapien
ccaaaagcaatttattatagtttag

SEQ ID NO: 664235 - DNA, 25 bp, Homo sapien
tcaccgcgtcgaaggtggacccatt

SEQ ID NO: 664236 - DNA, 25 bp, Homo sapien
gaagaacgactccatgcggttgtcc

SEQ ID NO: 664237 - DNA, 25 bp, Homo sapien
catggccccgaactaacagtgtttt

SEQ ID NO: 664238 - DNA, 25 bp, Homo sapien
agaggtatttcacagtctcggccag

SEQ ID NO: 664239 - DNA, 25 bp, Homo sapien
ctcacctggattatcacataagctt

SEQ ID NO: 664240 - DNA, 25 bp, Homo sapien
ggattatcacataagcttccaaatg

SEQ ID NO: 664241 - DNA, 25 bp, Homo sapien
agcttccaatcttagccctgcagtt

SEQ ID NO: 664242 - DNA, 25 bp, Homo sapien
ttagccctgcagtttatatacacac

SEQ ID NO: 664243 - DNA, 25 bp, Homo sapien
tgttcccatcattcaccatggaaga

SEQ ID NO: 664244 - DNA, 25 bp, Homo sapien
cttgccctgtttgagaaaggtcaga

SEQ ID NO: 664245 - DNA, 25 bp, Homo sapien
ggaaggccccagtgggcttatcatt

SEQ ID NO: 664246 - DNA, 25 bp, Homo sapien
tctcagtggactctatcttacattt

SEQ ID NO: 664247 - DNA, 25 bp, Homo sapien
ttcaatctattcttcacaaagcagc

SEQ ID NO: 664248 - DNA, 25 bp, Homo sapien
caacactgtaggcttttcaggggat

SEQ ID NO: 664249 - DNA, 25 bp, Homo sapien
ccctttcaatctattcttcacaaag

SEQ ID NO: 664250 - DNA, 25 bp, Homo sapien
gcatggatgtgagatggctctcacc

SEQ ID NO: 664251 - DNA, 25 bp, Homo sapien
tgagatctttagcaaggcacttagc

SEQ ID NO: 664252 - DNA, 25 bp, Homo sapien
caaggtcccttctagtgctgatatg

SEQ ID NO: 664253 - DNA, 25 bp, Homo sapien
tgctgtaacccttgggcctagcaga

SEQ ID NO: 664254 - DNA, 25 bp, Homo sapien
gcattatgtatatctccaaggtccc

SEQ ID NO: 664255 - DNA, 25 bp, Homo sapien
tctcttccgagttctaggagggtgg

SEQ ID NO: 664256 - DNA, 25 bp, Homo sapien
tgttgcaaatccgcactccaccttg

SEQ ID NO: 664257 - DNA, 25 bp, Homo sapien
aggtacattgcgctttcaataagtt

SEQ ID NO: 664258 - DNA, 25 bp, Homo sapien
tggcacggtagaggtacattgcgct

SEQ ID NO: 664259 - DNA, 25 bp, Homo sapien
cgttctaagataggatggaccaaaa

SEQ ID NO: 664260 - DNA, 25 bp, Homo sapien
gcttggcatcataaggctcgttcta

SEQ ID NO: 664261 - DNA, 25 bp, Homo sapien
agaagagtaagagcttggcatcata

SEQ ID NO: 664262 - DNA, 25 bp, Homo sapien
tcagagtctaacctaattctaaaac

SEQ ID NO: 664263 - DNA, 25 bp, Homo sapien
gaaaaggtctctgcctatctcccca

SEQ ID NO: 664264 - DNA, 25 bp, Homo sapien
tcctcacaggcctctagacaattgc

SEQ ID NO: 664265 - DNA, 25 bp, Homo sapien
gctcatattctaaggcacagactag

SEQ ID NO: 664266 - DNA, 25 bp, Homo sapien
cacagactagggtacattcattact

SEQ ID NO: 664267 - DNA, 25 bp, Homo sapien
tctaaccctaagattgtgcaagcct

SEQ ID NO: 664268 - DNA, 25 bp, Homo sapien
aactagataaccacttgacagggcc

SEQ ID NO: 664269 - DNA, 25 bp, Homo sapien
tcactcgtggtaactaagcaaaaac

SEQ ID NO: 664270 - DNA, 25 bp, Homo sapien
tgcctctgttaagtagcaagctcct

SEQ ID NO: 664271 - DNA, 25 bp, Homo sapien
caaactgcttccatacagtgtagta

SEQ ID NO: 664272 - DNA, 25 bp, Homo sapien
cagtgtagtagttgaggaaggtcct

SEQ ID NO: 664273 - DNA, 25 bp, Homo sapien
ggaaggtcctcatggcattgtcaat

SEQ ID NO: 664274 - DNA, 25 bp, Homo sapien
tcatggcattgtcaatgtctccaat

SEQ ID NO: 664275 - DNA, 25 bp, Homo sapien
cacaggtaccagtcatcgaagcggg

SEQ ID NO: 664276 - DNA, 25 bp, Homo sapien
tcatcgaagcgggtgtagttccgga

SEQ ID NO: 664277 - DNA, 25 bp, Homo sapien
cccttgtacatctgaacccacaggt

SEQ ID NO: 664278 - DNA, 25 bp, Homo sapien
tgaagaccaggccagtaggcctcca

SEQ ID NO: 664279 - DNA, 25 bp, Homo sapien
cttgccagtgagcacatcaatgtgg

SEQ ID NO: 664280 - DNA, 25 bp, Homo sapien
catgagcttcttatcctgaagcagg

SEQ ID NO: 664281 - DNA, 25 bp, Homo sapien
gcaggatggctcctttcaccaagta

SEQ ID NO: 664282 - DNA, 25 bp, Homo sapien
tactcaaagtaggagtccacgccag

SEQ ID NO: 664283 - DNA, 25 bp, Homo sapien
catctggtccaaagtgtgttcaatt

SEQ ID NO: 664284 - DNA, 25 bp, Homo sapien
gttcaatttccatgggttaatagta

SEQ ID NO: 664285 - DNA, 25 bp, Homo sapien
tgttcaatttccatgggttaatagt

SEQ ID NO: 664286 - DNA, 25 bp, Homo sapien
gatcatctggtccaaagtgtgttca

SEQ ID NO: 664287 - DNA, 25 bp, Homo sapien
tgctgcctgccagaaacgtgctttc

SEQ ID NO: 664288 - DNA, 25 bp, Homo sapien
tgggcctcgtaagcagggactcaaa

SEQ ID NO: 664289 - DNA, 25 bp, Homo sapien
tgaaggccggacgagctgatgatct

SEQ ID NO: 664290 - DNA, 25 bp, Homo sapien
gagaatctcaactggtcaaagctga

SEQ ID NO: 664291 - DNA, 25 bp, Homo sapien
catcttcgaacaccgggtcaccagt

SEQ ID NO: 664292 - DNA, 25 bp, Homo sapien
cagggtggcaaattcaacaatgaag

SEQ ID NO: 664293 - DNA, 25 bp, Homo sapien
aggcgcatcaaagccactctggcca

SEQ ID NO: 664294 - DNA, 25 bp, Homo sapien
cggctctcccagaggcgcatcaaag

SEQ ID NO: 664295 - DNA, 25 bp, Homo sapien
gggttcacgccatgaagtaagttca

SEQ ID NO: 664296 - DNA, 25 bp, Homo sapien
tgggttcacgccatgaagtaagttc

SEQ ID NO: 664297 - DNA, 25 bp, Homo sapien
tgtacagttgatgctactgagcctg

SEQ ID NO: 664298 - DNA, 25 bp, Homo sapien
tagacaaaaacatggaggcttgacc

SEQ ID NO: 664299 - DNA, 25 bp, Homo sapien
taaaagtgttggacgttctctaagc

SEQ ID NO: 664300 - DNA, 25 bp, Homo sapien
ttagcctctccaaaacccgatgtgg

SEQ ID NO: 664301 - DNA, 25 bp, Homo sapien
caggacactcctgatttccatggtg

SEQ ID NO: 664302 - DNA, 25 bp, Homo sapien
ggtcaactcatccatccgggtcagg

SEQ ID NO: 664303 - DNA, 25 bp, Homo sapien
catcccctgcaaacaataatgaggt

SEQ ID NO: 664304 - DNA, 25 bp, Homo sapien
gaaagaccaaatacacctggtgaga

SEQ ID NO: 664305 - DNA, 25 bp, Homo sapien
agaggcccggaacagggccatccag

SEQ ID NO: 664306 - DNA, 25 bp, Homo sapien
aggagttttcgggccgcctcctcag

SEQ ID NO: 664307 - DNA, 25 bp, Homo sapien
gccattctcaggagaggcccggaac

SEQ ID NO: 664308 - DNA, 25 bp, Homo sapien
attctcaggagaggcccggaacagg

SEQ ID NO: 664309 - DNA, 25 bp, Homo sapien
tctttcccctgtgcgagttaaacat

SEQ ID NO: 664310 - DNA, 25 bp, Homo sapien
aagcaaatggcacagtccaaaggga

SEQ ID NO: 664311 - DNA, 25 bp, Homo sapien
tggcacagtccaaagggaaagacca

SEQ ID NO: 664312 - DNA, 25 bp, Homo sapien
gaaagaccaagggatcaaggatctt

SEQ ID NO: 664313 - DNA, 25 bp, Homo sapien
ggaattctgagacattccccaaaat

SEQ ID NO: 664314 - DNA, 25 bp, Homo sapien
catcaatatcaaagtccacgctgtc

SEQ ID NO: 664315 - DNA, 25 bp, Homo sapien
aaacacagaggcgttcacatcaata

SEQ ID NO: 664316 - DNA, 25 bp, Homo sapien
ggagcacttcaaccactctttggaa

SEQ ID NO: 664317 - DNA, 25 bp, Homo sapien
gccctacagaaacatactaactagt

SEQ ID NO: 664318 - DNA, 25 bp, Homo sapien
agcatcaggtttcttaacgataaga

SEQ ID NO: 664319 - DNA, 25 bp, Homo sapien
ggacttgagcaatgttggcctccca

SEQ ID NO: 664320 - DNA, 25 bp, Homo sapien
acatgtctgtactaagccctacaga

SEQ ID NO: 664321 - DNA, 25 bp, Homo sapien
ccagtgcatcaattagagtcagaga

SEQ ID NO: 664322 - DNA, 25 bp, Homo sapien
tccagtgcatcaattagagtcagag

SEQ ID NO: 664323 - DNA, 25 bp, Homo sapien
tgcatcaattagagtcagagaaaaa

SEQ ID NO: 664324 - DNA, 25 bp, Homo sapien
agtgcatcaattagagtcagagaaa

SEQ ID NO: 664325 - DNA, 25 bp, Homo sapien
gaggtcgcagctcatcgaagggaaa

SEQ ID NO: 664326 - DNA, 25 bp, Homo sapien
tctccaggtagctgtcgtaggcgtg

SEQ ID NO: 664327 - DNA, 25 bp, Homo sapien
cccaggtgtcgtgcccgtcacaggt

SEQ ID NO: 664328 - DNA, 25 bp, Homo sapien
gtagaacatggccttgactcgctcc

SEQ ID NO: 664329 - DNA, 25 bp, Homo sapien
cctagcggctgtgtcggagcaagtc

SEQ ID NO: 664330 - DNA, 25 bp, Homo sapien
tctccctgggacctagcggctgtgt

SEQ ID NO: 664331 - DNA, 25 bp, Homo sapien
ggaatcactagctgatttctccctg

SEQ ID NO: 664332 - DNA, 25 bp, Homo sapien
gggaagaacaagatacagggcggaa

SEQ ID NO: 664333 - DNA, 25 bp, Homo sapien
agcagcgcgcacaggaggccgagcg

SEQ ID NO: 664334 - DNA, 25 bp, Homo sapien
ccgtcgggacctggcgcaccatggt

SEQ ID NO: 664335 - DNA, 25 bp, Homo sapien
gcgggatgagcagccggaaaggcat

SEQ ID NO: 664336 - DNA, 25 bp, Homo sapien
ggccgagcgggatgagcagccggaa

SEQ ID NO: 664337 - DNA, 25 bp, Homo sapien
gcgcctgcgcgctgagaaatcagcc

SEQ ID NO: 664338 - DNA, 25 bp, Homo sapien
gagaaatcagcctctcacttccgga

SEQ ID NO: 664339 - DNA, 25 bp, Homo sapien
gttcttccgggaatccgcgccactg

SEQ ID NO: 664340 - DNA, 25 bp, Homo sapien
agctgctgcgggttcttccgggaat

SEQ ID NO: 664341 - DNA, 25 bp, Homo sapien
taagaatgaataccctggttgggcg

SEQ ID NO: 664342 - DNA, 25 bp, Homo sapien
catcgccgggctgtctgactactga

SEQ ID NO: 664343 - DNA, 25 bp, Homo sapien
cattattacctagcaggacaagccg

SEQ ID NO: 664344 - DNA, 25 bp, Homo sapien
gatgtggttacacaatcatggtccc

SEQ ID NO: 664345 - DNA, 25 bp, Homo sapien
atagaatcgttcactctgcaggctg

SEQ ID NO: 664346 - DNA, 25 bp, Homo sapien
agcaagatagaatcgttcactctgc

SEQ ID NO: 664347 - DNA, 25 bp, Homo sapien
ccagcaagatagaatcgttcactct

SEQ ID NO: 664348 - DNA, 25 bp, Homo sapien
aagatagaatcgttcactctgcagg

SEQ ID NO: 664349 - DNA, 25 bp, Homo sapien
caagtggtctggctccatgggtccc

SEQ ID NO: 664350 - DNA, 25 bp, Homo sapien
cccacagagctcagcaagctaagat

SEQ ID NO: 664351 - DNA, 25 bp, Homo sapien
tggtgggaggggttgtccgccattg

SEQ ID NO: 664352 - DNA, 25 bp, Homo sapien
gagcttggtggtgggaggggttgtc

SEQ ID NO: 664353 - DNA, 25 bp, Homo sapien
tatcacgtgtggtaccagggcaacg

SEQ ID NO: 664354 - DNA, 25 bp, Homo sapien
gacacctaacgcacgtgctggaagg

SEQ ID NO: 664355 - DNA, 25 bp, Homo sapien
tcctcctggcagagttactgtcagc

SEQ ID NO: 664356 - DNA, 25 bp, Homo sapien
tactgtcagcgtcaaacgggagaag

SEQ ID NO: 664357 - DNA, 25 bp, Homo sapien
aaatttctcattgagttaaattcag

SEQ ID NO: 664358 - DNA, 25 bp, Homo sapien
gccttgcacaatgtggccccaacct

SEQ ID NO: 664359 - DNA, 25 bp, Homo sapien
ccttgcacaatgtggccccaaccta

SEQ ID NO: 664360 - DNA, 25 bp, Homo sapien
cagacgctgttttaggacgtgggaa

SEQ ID NO: 664361 - DNA, 25 bp, Homo sapien
gacgtgggaatagagcaatatagca

SEQ ID NO: 664362 - DNA, 25 bp, Homo sapien
ctacagtttactgggagggacagac

SEQ ID NO: 664363 - DNA, 25 bp, Homo sapien
gagtcgggtcactagaattactaaa

SEQ ID NO: 664364 - DNA, 25 bp, Homo sapien
taggctcactttgtgaacattcact

SEQ ID NO: 664365 - DNA, 25 bp, Homo sapien
gatgctggctatatcaataggctca

SEQ ID NO: 664366 - DNA, 25 bp, Homo sapien
tctggatgctggctatatcaatagg

SEQ ID NO: 664367 - DNA, 25 bp, Homo sapien
aataggctcactttgtgaacattca

SEQ ID NO: 664368 - DNA, 25 bp, Homo sapien
gggagactcaataagtccattctca

SEQ ID NO: 664369 - DNA, 25 bp, Homo sapien
gactcaataagtccattctcaatga

SEQ ID NO: 664370 - DNA, 25 bp, Homo sapien
cataactgggagactcaataagtcc

SEQ ID NO: 664371 - DNA, 25 bp, Homo sapien
taactgggagactcaataagtccat

SEQ ID NO: 664372 - DNA, 25 bp, Homo sapien
ataaaaccacataaagcatgttctc

SEQ ID NO: 664373 - DNA, 25 bp, Homo sapien
taaaaccacataaagcatgttctct

SEQ ID NO: 664374 - DNA, 25 bp, Homo sapien
aaaaccacataaagcatgttctctg

SEQ ID NO: 664375 - DNA, 25 bp, Homo sapien
taactgggagacttcaataactctg

SEQ ID NO: 664376 - DNA, 25 bp, Homo sapien
gagccgagatcatccacataaatgg

SEQ ID NO: 664377 - DNA, 25 bp, Homo sapien
aataactctgttctcaataactgat

SEQ ID NO: 664378 - DNA, 25 bp, Homo sapien
ggagacttcaataactctgttctca

SEQ ID NO: 664379 - DNA, 25 bp, Homo sapien
gaaaaagtcggcttggagcctcaac

SEQ ID NO: 664380 - DNA, 25 bp, Homo sapien
ggcctttcttatgaagactagcaga

SEQ ID NO: 664381 - DNA, 25 bp, Homo sapien
gactagcagaactacaattatgaag

SEQ ID NO: 664382 - DNA, 25 bp, Homo sapien
ggaactttctcaggtggagtacatc

SEQ ID NO: 664383 - DNA, 25 bp, Homo sapien
gagtggcttctgagtaatgtttaca

SEQ ID NO: 664384 - DNA, 25 bp, Homo sapien
caaaggcaccaagggttaaggacat

SEQ ID NO: 664385 - DNA, 25 bp, Homo sapien
ccttagaatccacttcacaggacag

SEQ ID NO: 664386 - DNA, 25 bp, Homo sapien
ttagtgtcagacacttgggttctac

SEQ ID NO: 664387 - DNA, 25 bp, Homo sapien
acctctaagtattagagttgcccca

SEQ ID NO: 664388 - DNA, 25 bp, Homo sapien
cccaggatccagtcattggaactct

SEQ ID NO: 664389 - DNA, 25 bp, Homo sapien
ctaagtattagagttgccccaggat

SEQ ID NO: 664390 - DNA, 25 bp, Homo sapien
gatccagtcattggaactctttgct

SEQ ID NO: 664391 - DNA, 25 bp, Homo sapien
ccaactgctcctgcaccactggtgg

SEQ ID NO: 664392 - DNA, 25 bp, Homo sapien
ctgcaccactggtggctcctgcacg

SEQ ID NO: 664393 - DNA, 25 bp, Homo sapien
cgcggcttgaaatggaccccaactg

SEQ ID NO: 664394 - DNA, 25 bp, Homo sapien
tggtggctcctgcacgtgcgccggc

SEQ ID NO: 664395 - DNA, 25 bp, Homo sapien
tacttgaaggtgtccaaaatatcca

SEQ ID NO: 664396 - DNA, 25 bp, Homo sapien
tcacagatcttgtggtcaccccagt

SEQ ID NO: 664397 - DNA, 25 bp, Homo sapien
tttcagcaagtctaaaaccgagctc

SEQ ID NO: 664398 - DNA, 25 bp, Homo sapien
catgaggactccgtttctgtgaaga

SEQ ID NO: 664399 - DNA, 25 bp, Homo sapien
gggccgccgaggccgggagctgctt

SEQ ID NO: 664400 - DNA, 25 bp, Homo sapien
agcaccgcggacaggggcagcgggc

SEQ ID NO: 664401 - DNA, 25 bp, Homo sapien
cgagcacgagggtcgggtttgttgt

SEQ ID NO: 664402 - DNA, 25 bp, Homo sapien
cgccttgggtccgggctggcgcggc

SEQ ID NO: 664403 - DNA, 25 bp, Homo sapien
gtggttccacaagctcacccttgag

SEQ ID NO: 664404 - DNA, 25 bp, Homo sapien
ccttcttagagatgggactcattgc

SEQ ID NO: 664405 - DNA, 25 bp, Homo sapien
ctttaattgagttgcccaagggcac

SEQ ID NO: 664406 - DNA, 25 bp, Homo sapien
gaaattgagagataaccgtgacctt

SEQ ID NO: 664407 - DNA, 25 bp, Homo sapien
atattataaactcccttggacgcag

SEQ ID NO: 664408 - DNA, 25 bp, Homo sapien
actaatgtttgacaaagctggctgg

SEQ ID NO: 664409 - DNA, 25 bp, Homo sapien
acgcagcacccacaaggatcacttg

SEQ ID NO: 664410 - DNA, 25 bp, Homo sapien
caatcaatcagtccactcaggagtc

SEQ ID NO: 664411 - DNA, 25 bp, Homo sapien
attttaggcgcgaaccaccacgcct

SEQ ID NO: 664412 - DNA, 25 bp, Homo sapien
ggattttaggcgcgaaccaccacgc

SEQ ID NO: 664413 - DNA, 25 bp, Homo sapien
tgggattttaggcgcgaaccaccac

SEQ ID NO: 664414 - DNA, 25 bp, Homo sapien
ctgggattttaggcgcgaaccacca

SEQ ID NO: 664415 - DNA, 25 bp, Homo sapien
tgcaatatgaacacagcgacgctaa

SEQ ID NO: 664416 - DNA, 25 bp, Homo sapien
taggtagaataatccatgccccaga

SEQ ID NO: 664417 - DNA, 25 bp, Homo sapien
gattaaatcagataccggccagctt

SEQ ID NO: 664418 - DNA, 25 bp, Homo sapien
gggttgaactaagggctcttctgct

SEQ ID NO: 664419 - DNA, 25 bp, Homo sapien
cttttctcaacaaactagagtggaa

SEQ ID NO: 664420 - DNA, 25 bp, Homo sapien
atttacttttctcaacaaactagag

SEQ ID NO: 664421 - DNA, 25 bp, Homo sapien
aaactagagtggaatcctttattcg

SEQ ID NO: 664422 - DNA, 25 bp, Homo sapien
ctagagtggaatcctttattcgaca

SEQ ID NO: 664423 - DNA, 25 bp, Homo sapien
tctgaggcccgtgccaagtgcttgc

SEQ ID NO: 664424 - DNA, 25 bp, Homo sapien
tctgggcattatggccctggagccc

SEQ ID NO: 664425 - DNA, 25 bp, Homo sapien
aagtgcttgccacccattatgtgtg

SEQ ID NO: 664426 - DNA, 25 bp, Homo sapien
tggagcccatgctgtcagccatcat

SEQ ID NO: 664427 - DNA, 25 bp, Homo sapien
ggacccagggaaccagcgctcacca

SEQ ID NO: 664428 - DNA, 25 bp, Homo sapien
ggggacccagggaaccagcgctcac

SEQ ID NO: 664429 - DNA, 25 bp, Homo sapien
acccagggaaccagcgctcaccata

SEQ ID NO: 664430 - DNA, 25 bp, Homo sapien
agggaaccagcgctcaccatatgga

SEQ ID NO: 664431 - DNA, 25 bp, Homo sapien
gacttgtctcagagctgcctgggtg

SEQ ID NO: 664432 - DNA, 25 bp, Homo sapien
tgacggcaacttcaacacagtggcc

SEQ ID NO: 664433 - DNA, 25 bp, Homo sapien
tgctgctgggtgaatcaactgttcc

SEQ ID NO: 664434 - DNA, 25 bp, Homo sapien
tcaccatcggagaggaaacacgagc

SEQ ID NO: 664435 - DNA, 25 bp, Homo sapien
atcagccatggactgacagggtggc

SEQ ID NO: 664436 - DNA, 25 bp, Homo sapien
ctgacagggtggcagtctgcttgac

SEQ ID NO: 664437 - DNA, 25 bp, Homo sapien
tggcagtctgcttgacgtgttgcag

SEQ ID NO: 664438 - DNA, 25 bp, Homo sapien
ccatggactgacagggtggcagtct

SEQ ID NO: 664439 - DNA, 25 bp, Homo sapien
cactcagcctacgttgggtccaaaa

SEQ ID NO: 664440 - DNA, 25 bp, Homo sapien
tcaatcactggatgaggaagggcat

SEQ ID NO: 664441 - DNA, 25 bp, Homo sapien
catccagtgactgaggagagctctc

SEQ ID NO: 664442 - DNA, 25 bp, Homo sapien
tctgaagcagggaacatccccaaag

SEQ ID NO: 664443 - DNA, 25 bp, Homo sapien
gatccaactgaaccgttcataggca

SEQ ID NO: 664444 - DNA, 25 bp, Homo sapien
gcaggtccgggttttatcatcccca

SEQ ID NO: 664445 - DNA, 25 bp, Homo sapien
ttcttctgcactcattctactttga

SEQ ID NO: 664446 - DNA, 25 bp, Homo sapien
ttcataggcaggtccgggttttatc

SEQ ID NO: 664447 - DNA, 25 bp, Homo sapien
tatcctcagtgtactccagggacgc

SEQ ID NO: 664448 - DNA, 25 bp, Homo sapien
gattcacggcagagagacgttgtca

SEQ ID NO: 664449 - DNA, 25 bp, Homo sapien
gactgacttcattccttcagacagc

SEQ ID NO: 664450 - DNA, 25 bp, Homo sapien
cagctgccaagtcacactttttcat

SEQ ID NO: 664451 - DNA, 25 bp, Homo sapien
caggacgacgtggacatcatggtga

SEQ ID NO: 664452 - DNA, 25 bp, Homo sapien
tgtcacctactataagcggccagtc

SEQ ID NO: 664453 - DNA, 25 bp, Homo sapien
gagccctctctatccacttggtctg

SEQ ID NO: 664454 - DNA, 25 bp, Homo sapien
tggtgaccatcaacgatgtgccggg

SEQ ID NO: 664455 - DNA, 25 bp, Homo sapien
catgaaactcgtgttaggccctggg

SEQ ID NO: 664456 - DNA, 25 bp, Homo sapien
gagaggttgttacttgcccgggcca

SEQ ID NO: 664457 - DNA, 25 bp, Homo sapien
gaacacagcctgatgatgcctcctt

SEQ ID NO: 664458 - DNA, 25 bp, Homo sapien
agtaaccttaggacgctctgggaag

SEQ ID NO: 664459 - DNA, 25 bp, Homo sapien
gatattaataaaaggcagacgaagt

SEQ ID NO: 664460 - DNA, 25 bp, Homo sapien
cagacgaagtcaggaggtcagcaac

SEQ ID NO: 664461 - DNA, 25 bp, Homo sapien
gagcacggttatcagcaatacagat

SEQ ID NO: 664462 - DNA, 25 bp, Homo sapien
tgggacacatagtcaagagcacggt

SEQ ID NO: 664463 - DNA, 25 bp, Homo sapien
cttcgaattctctgctatctctggg

SEQ ID NO: 664464 - DNA, 25 bp, Homo sapien
tctgggtgtaggctgggaagcaggc

SEQ ID NO: 664465 - DNA, 25 bp, Homo sapien
acggcggacagacgggcgacatcct

SEQ ID NO: 664466 - DNA, 25 bp, Homo sapien
gggtggtcacgaaggtctgagctgg

SEQ ID NO: 664467 - DNA, 25 bp, Homo sapien
ctgttccgggccctccggcgccgca

SEQ ID NO: 664468 - DNA, 25 bp, Homo sapien
gcgatgaggaagcgcacgtcgtcca

SEQ ID NO: 664469 - DNA, 25 bp, Homo sapien
accaggaagtgcaggcgatgaggaa

SEQ ID NO: 664470 - DNA, 25 bp, Homo sapien
tgcaggcgatgaggaagcgcacgtc

SEQ ID NO: 664471 - DNA, 25 bp, Homo sapien
tgcaagaagagaagccctttaaggt

SEQ ID NO: 664472 - DNA, 25 bp, Homo sapien
tctgggtcgccgggacaccccgcta

SEQ ID NO: 664473 - DNA, 25 bp, Homo sapien
ctgggtcgccgggacaccccgctag

SEQ ID NO: 664474 - DNA, 25 bp, Homo sapien
agaagagaagccctttaaggtctgg

SEQ ID NO: 664475 - DNA, 25 bp, Homo sapien
cagccagacccgcgggtctcccgga

SEQ ID NO: 664476 - DNA, 25 bp, Homo sapien
cgcagccagacccgcgggtctcccg

SEQ ID NO: 664477 - DNA, 25 bp, Homo sapien
ctcgcagccagacccgcgggtctcc

SEQ ID NO: 664478 - DNA, 25 bp, Homo sapien
ctctcgcagccagacccgcgggtct

SEQ ID NO: 664479 - DNA, 25 bp, Homo sapien
ttagtcaaagaatgccccgaagcca

SEQ ID NO: 664480 - DNA, 25 bp, Homo sapien
caccctccgtgcgttggagcggaaa

SEQ ID NO: 664481 - DNA, 25 bp, Homo sapien
gaacggactctctgcctttcaaggc

SEQ ID NO: 664482 - DNA, 25 bp, Homo sapien
aaactgtgagaactagaccgggcgc

SEQ ID NO: 664483 - DNA, 25 bp, Homo sapien
cagcatccggtacagattgggcgga

SEQ ID NO: 664484 - DNA, 25 bp, Homo sapien
tccaggcgataagcacaggtggaaa

SEQ ID NO: 664485 - DNA, 25 bp, Homo sapien
agagccaggagcccatggaacaact

SEQ ID NO: 664486 - DNA, 25 bp, Homo sapien
tttgcagtaatgatagatccaggcg

SEQ ID NO: 664487 - DNA, 25 bp, Homo sapien
gcgcacggtcagtagctgtttcaca

SEQ ID NO: 664488 - DNA, 25 bp, Homo sapien
cacggtcagtagctgtttcacagag

SEQ ID NO: 664489 - DNA, 25 bp, Homo sapien
agagaaaggaaagcgcacggtcagt

SEQ ID NO: 664490 - DNA, 25 bp, Homo sapien
ggaaagcgcacggtcagtagctgtt

SEQ ID NO: 664491 - DNA, 25 bp, Homo sapien
tggtggcaatggtgctaggctgggc

SEQ ID NO: 664492 - DNA, 25 bp, Homo sapien
agggaatcccgcatgctggtggcaa

SEQ ID NO: 664493 - DNA, 25 bp, Homo sapien
gaatcccgcatgctggtggcaatgg

SEQ ID NO: 664494 - DNA, 25 bp, Homo sapien
gtcaatgagggaatcccgcatgctg

SEQ ID NO: 664495 - DNA, 25 bp, Homo sapien
agaaggcacaccagtcattcaccac

SEQ ID NO: 664496 - DNA, 25 bp, Homo sapien
caggccacagaaggcacaccagtca

SEQ ID NO: 664497 - DNA, 25 bp, Homo sapien
tcactgcctcggttcacagtccccg

SEQ ID NO: 664498 - DNA, 25 bp, Homo sapien
tcacctcactgcctcggttcacagt

SEQ ID NO: 664499 - DNA, 25 bp, Homo sapien
agggggacttgaagaagagaggaca

SEQ ID NO: 664500 - DNA, 25 bp, Homo sapien
ttgagcacatctgccagaatttctt

SEQ ID NO: 664501 - DNA, 25 bp, Homo sapien
cctccctgattgctgaagacacagt

SEQ ID NO: 664502 - DNA, 25 bp, Homo sapien
gtcttgggatgcaccagccctccct

SEQ ID NO: 664503 - DNA, 25 bp, Homo sapien
tagcttcctactagcacctggtcgg

SEQ ID NO: 664504 - DNA, 25 bp, Homo sapien
tgttcagggctcagaacttacagcc

SEQ ID NO: 664505 - DNA, 25 bp, Homo sapien
gcttagagcagagtcaagggcagct

SEQ ID NO: 664506 - DNA, 25 bp, Homo sapien
ggactggatggttcaatctccccaa

SEQ ID NO: 664507 - DNA, 25 bp, Homo sapien
gaaccaaggttctccatgcccagaa

SEQ ID NO: 664508 - DNA, 25 bp, Homo sapien
ccaaggctgagagccgctcctccac

SEQ ID NO: 664509 - DNA, 25 bp, Homo sapien
aggtggtgacattgcccaaggctga

SEQ ID NO: 664510 - DNA, 25 bp, Homo sapien
caaggccacgtagtcattgcaggtg

SEQ ID NO: 664511 - DNA, 25 bp, Homo sapien
tccacccgcctaatctgcactgtgt

SEQ ID NO: 664512 - DNA, 25 bp, Homo sapien
ggtggtattgttgggtaccaggaga

SEQ ID NO: 664513 - DNA, 25 bp, Homo sapien
cggtggtattgttgggtaccaggag

SEQ ID NO: 664514 - DNA, 25 bp, Homo sapien
tggtcggtggtattgttgggtacca

SEQ ID NO: 664515 - DNA, 25 bp, Homo sapien
tcggtggtattgttgggtaccagga

SEQ ID NO: 664516 - DNA, 25 bp, Homo sapien
ggatggtatcggagagctcgccctc

SEQ ID NO: 664517 - DNA, 25 bp, Homo sapien
agccggcgatagacgcgtgcaccac

SEQ ID NO: 664518 - DNA, 25 bp, Homo sapien
acacatgcgcccgatgatgcggcag

SEQ ID NO: 664519 - DNA, 25 bp, Homo sapien
acgcgtgcaccacggggatggtatc

SEQ ID NO: 664520 - DNA, 25 bp, Homo sapien
ctgtagggacatggactcggtggtg

SEQ ID NO: 664521 - DNA, 25 bp, Homo sapien
tagggacatggactcggtggtggcg

SEQ ID NO: 664522 - DNA, 25 bp, Homo sapien
agggacatggactcggtggtggcgg

SEQ ID NO: 664523 - DNA, 25 bp, Homo sapien
acatggactcggtggtggcggggca

SEQ ID NO: 664524 - DNA, 25 bp, Homo sapien
agttctctgagcctccgatcgctac

SEQ ID NO: 664525 - DNA, 25 bp, Homo sapien
gcagccgatctcacagttgttctcg

SEQ ID NO: 664526 - DNA, 25 bp, Homo sapien
tgttctcgaacgaagctcggaccgc

SEQ ID NO: 664527 - DNA, 25 bp, Homo sapien
tctcacagttgttctcgaacgaagc

SEQ ID NO: 664528 - DNA, 25 bp, Homo sapien
ggcaaagcagccgatctcacagttg

SEQ ID NO: 664529 - DNA, 25 bp, Homo sapien
gaacctccggccctgaatcctctgg

SEQ ID NO: 664530 - DNA, 25 bp, Homo sapien
gcggaggcgggagttcaaggccggc

SEQ ID NO: 664531 - DNA, 25 bp, Homo sapien
gccggcggatcctttcccaagtatc

SEQ ID NO: 664532 - DNA, 25 bp, Homo sapien
aggaccggagctgaccctcccaggt

SEQ ID NO: 664533 - DNA, 25 bp, Homo sapien
ccagtaacaagctccgcacgcggcg

SEQ ID NO: 664534 - DNA, 25 bp, Homo sapien
acaagctccgcacgcggcgactgta

SEQ ID NO: 664535 - DNA, 25 bp, Homo sapien
aacaagctccgcacgcggcgactgt

SEQ ID NO: 664536 - DNA, 25 bp, Homo sapien
gtaacaagctccgcacgcggcgact

SEQ ID NO: 664537 - DNA, 25 bp, Homo sapien
cggactctatggtcgcgagcggtct

SEQ ID NO: 664538 - DNA, 25 bp, Homo sapien
agacttccgggagagcccggcgctc

SEQ ID NO: 664539 - DNA, 25 bp, Homo sapien
ttccacttccgtccagggagacttc

SEQ ID NO: 664540 - DNA, 25 bp, Homo sapien
tttaggagctgtcatcgacctagac

SEQ ID NO: 664541 - DNA, 25 bp, Homo sapien
tgtttccgggtatccacatactctg

SEQ ID NO: 664542 - DNA, 25 bp, Homo sapien
ctatcccgggtaagtggtgagttca

SEQ ID NO: 664543 - DNA, 25 bp, Homo sapien
ggaaaatggcccacaacctgtcaca

SEQ ID NO: 664544 - DNA, 25 bp, Homo sapien
tctgacctgggtttctagacacctc

SEQ ID NO: 664545 - DNA, 25 bp, Homo sapien
cttgatatcgggagaccattgggcc

SEQ ID NO: 664546 - DNA, 25 bp, Homo sapien
tggccccgtgcaactgatgatactt

SEQ ID NO: 664547 - DNA, 25 bp, Homo sapien
attgagatggccacccttgggaccc

SEQ ID NO: 664548 - DNA, 25 bp, Homo sapien
tcaggaggtctgattggccacggct

SEQ ID NO: 664549 - DNA, 25 bp, Homo sapien
cactgccaaggttaaggggctggta

SEQ ID NO: 664550 - DNA, 25 bp, Homo sapien
ggcaccccgatggaactggaggagg

SEQ ID NO: 664551 - DNA, 25 bp, Homo sapien
gggagcgaggaagcagaggtgaccc

SEQ ID NO: 664552 - DNA, 25 bp, Homo sapien
gctggtactattatggttgagggca

SEQ ID NO: 664553 - DNA, 25 bp, Homo sapien
gattggccctatagagcccaggagg

SEQ ID NO: 664554 - DNA, 25 bp, Homo sapien
tgggaccatgggtatgcccctagct

SEQ ID NO: 664555 - DNA, 25 bp, Homo sapien
tagcttgccgagattggccctatag

SEQ ID NO: 664556 - DNA, 25 bp, Homo sapien
ttagggtctgacagttggcgatgta

SEQ ID NO: 664557 - DNA, 25 bp, Homo sapien
accatgctagtgtgggcctggctgc

SEQ ID NO: 664558 - DNA, 25 bp, Homo sapien
ctgcgactcagcgtacagacagcgg

SEQ ID NO: 664559 - DNA, 25 bp, Homo sapien
gaggagcgacccataagcggtgact

SEQ ID NO: 664560 - DNA, 25 bp, Homo sapien
ggtcaaagtcttccacgatgcggcc

SEQ ID NO: 664561 - DNA, 25 bp, Homo sapien
caccacttgctcacagtcaatgagg

SEQ ID NO: 664562 - DNA, 25 bp, Homo sapien
accacttgctcacagtcaatgagga

SEQ ID NO: 664563 - DNA, 25 bp, Homo sapien
agggcctgccccgtgaagcggcggc

SEQ ID NO: 664564 - DNA, 25 bp, Homo sapien
gctgcagtatgtgtccccacacgtg

SEQ ID NO: 664565 - DNA, 25 bp, Homo sapien
agtatgtgtccccacacgtgctccg

SEQ ID NO: 664566 - DNA, 25 bp, Homo sapien
agccttgctgcagtatgtgtcccca

SEQ ID NO: 664567 - DNA, 25 bp, Homo sapien
tacacagggacaccacgccggcttg

SEQ ID NO: 664568 - DNA, 25 bp, Homo sapien
agcaggtacacagggacaccacgcc

SEQ ID NO: 664569 - DNA, 25 bp, Homo sapien
tgaggtcacacagaagctccatgtc

SEQ ID NO: 664570 - DNA, 25 bp, Homo sapien
ccattgaggtccatcttgtagcaca

SEQ ID NO: 664571 - DNA, 25 bp, Homo sapien
ctggactctatcacttcctggtgac

SEQ ID NO: 664572 - DNA, 25 bp, Homo sapien
actctatcacttcctggtgacacag

SEQ ID NO: 664573 - DNA, 25 bp, Homo sapien
tggactctatcacttcctggtgaca

SEQ ID NO: 664574 - DNA, 25 bp, Homo sapien
gactctatcacttcctggtgacaca

SEQ ID NO: 664575 - DNA, 25 bp, Homo sapien
agcggtgagctctcccgccaccacg

SEQ ID NO: 664576 - DNA, 25 bp, Homo sapien
agctcccgctcctcggagatgaccc

SEQ ID NO: 664577 - DNA, 25 bp, Homo sapien
catggctggtcatgtagtccacatc

SEQ ID NO: 664578 - DNA, 25 bp, Homo sapien
tgtccctctggaagtggaccacagc

SEQ ID NO: 664579 - DNA, 25 bp, Homo sapien
gaggagaccagcagaaccgccttct

SEQ ID NO: 664580 - DNA, 25 bp, Homo sapien
ggctgcctcacccgccggcagggcc

SEQ ID NO: 664581 - DNA, 25 bp, Homo sapien
ggagaccagcagaaccgccttctgc

SEQ ID NO: 664582 - DNA, 25 bp, Homo sapien
acgcggctgcctcacccgccggcag

SEQ ID NO: 664583 - DNA, 25 bp, Homo sapien
gaatcaggcatttggctgagcactg

SEQ ID NO: 664584 - DNA, 25 bp, Homo sapien
cggatatcgtgactgtacctggagg

SEQ ID NO: 664585 - DNA, 25 bp, Homo sapien
ataagggtagcctccaaggaacctg

SEQ ID NO: 664586 - DNA, 25 bp, Homo sapien
ggacacatagcatgatctctccagg

SEQ ID NO: 664587 - DNA, 25 bp, Homo sapien
gaattaatgtgtagagttgggagcc

SEQ ID NO: 664588 - DNA, 25 bp, Homo sapien
tagagttgggagccaaaatctgttc

SEQ ID NO: 664589 - DNA, 25 bp, Homo sapien
tgaattaatgtgtagagttgggagc

SEQ ID NO: 664590 - DNA, 25 bp, Homo sapien
agttgggagccaaaatctgttccat

SEQ ID NO: 664591 - DNA, 25 bp, Homo sapien
tgtatcttggcctgaacagagacac

SEQ ID NO: 664592 - DNA, 25 bp, Homo sapien
tgggtctgctacaactaagccagga

SEQ ID NO: 664593 - DNA, 25 bp, Homo sapien
gccaagacaggagacagcatgttcc

SEQ ID NO: 664594 - DNA, 25 bp, Homo sapien
cttaggatgtgaaagcccttggtca

SEQ ID NO: 664595 - DNA, 25 bp, Homo sapien
tcaaccccatggctgaaagccgagg

SEQ ID NO: 664596 - DNA, 25 bp, Homo sapien
gactcctgggcacactaagaggaaa

SEQ ID NO: 664597 - DNA, 25 bp, Homo sapien
tgtaccccagcagatcagactcctg

SEQ ID NO: 664598 - DNA, 25 bp, Homo sapien
tcctggaggttcctcgaagccagct

SEQ ID NO: 664599 - DNA, 25 bp, Homo sapien
agatcctccccgttcatggagtcca

SEQ ID NO: 664600 - DNA, 25 bp, Homo sapien
actagagggcgccagctcacctccc

SEQ ID NO: 664601 - DNA, 25 bp, Homo sapien
ccctcgtcgttgtaagtcggagaat

SEQ ID NO: 664602 - DNA, 25 bp, Homo sapien
atcctccccgttcatggagtccagg

SEQ ID NO: 664603 - DNA, 25 bp, Homo sapien
gccaagccgtctctgatctcctaga

SEQ ID NO: 664604 - DNA, 25 bp, Homo sapien
taatttcactaaggtggttcagaga

SEQ ID NO: 664605 - DNA, 25 bp, Homo sapien
gggcagttagggaattccctatcac

SEQ ID NO: 664606 - DNA, 25 bp, Homo sapien
cctatcacacctctgaatggagaca

SEQ ID NO: 664607 - DNA, 25 bp, Homo sapien
tgttgtcctctagtgggcccctggt

SEQ ID NO: 664608 - DNA, 25 bp, Homo sapien
cagtgctaggcactcacgctttaaa

SEQ ID NO: 664609 - DNA, 25 bp, Homo sapien
tctcgcacgtgtcttggctctggat

SEQ ID NO: 664610 - DNA, 25 bp, Homo sapien
catcttaggctttaggtcattcccc

SEQ ID NO: 664611 - DNA, 25 bp, Homo sapien
gggcttctggcacaagcccaccatg

SEQ ID NO: 664612 - DNA, 25 bp, Homo sapien
ccacatgggacctcttgtagggaca

SEQ ID NO: 664613 - DNA, 25 bp, Homo sapien
tcctagagggccctcggagaagtcc

SEQ ID NO: 664614 - DNA, 25 bp, Homo sapien
ttgctttgcgaattgctactcccgt

SEQ ID NO: 664615 - DNA, 25 bp, Homo sapien
tgaagagtggtcaaacagaagtcct

SEQ ID NO: 664616 - DNA, 25 bp, Homo sapien
gatttgaagagtggtcaaacagaag

SEQ ID NO: 664617 - DNA, 25 bp, Homo sapien
aagagtggtcaaacagaagtcctgg

SEQ ID NO: 664618 - DNA, 25 bp, Homo sapien
tttgaagagtggtcaaacagaagtc

SEQ ID NO: 664619 - DNA, 25 bp, Homo sapien
tagcactgggcgcacagtaggcaat

SEQ ID NO: 664620 - DNA, 25 bp, Homo sapien
catcaatacaggatctgagggcagg

SEQ ID NO: 664621 - DNA, 25 bp, Homo sapien
tacttgactgtggagagcatctagc

SEQ ID NO: 664622 - DNA, 25 bp, Homo sapien
ccactgcggagctttctcgtagaag

SEQ ID NO: 664623 - DNA, 25 bp, Homo sapien
gcccagttcatggttggacatacag

SEQ ID NO: 664624 - DNA, 25 bp, Homo sapien
gctggtccttggtaactccacctct

SEQ ID NO: 664625 - DNA, 25 bp, Homo sapien
cgtctagtgctgatgtgatctggtc

SEQ ID NO: 664626 - DNA, 25 bp, Homo sapien
gaaggcgctccttcttcagcgtcta

SEQ ID NO: 664627 - DNA, 25 bp, Homo sapien
gcaattcaagatgtcgagggtcttc

SEQ ID NO: 664628 - DNA, 25 bp, Homo sapien
agcggccagcccatgatcatctgaa

SEQ ID NO: 664629 - DNA, 25 bp, Homo sapien
tcacatactctaccagcaattcaag

SEQ ID NO: 664630 - DNA, 25 bp, Homo sapien
cacatttccggttgaagaaggttct

SEQ ID NO: 664631 - DNA, 25 bp, Homo sapien
ccaccagttaggtgatgcagagctg

SEQ ID NO: 664632 - DNA, 25 bp, Homo sapien
tggaacatacagcacagcagtggtc

SEQ ID NO: 664633 - DNA, 25 bp, Homo sapien
ggtcttacaagggtatctggcccaa

SEQ ID NO: 664634 - DNA, 25 bp, Homo sapien
accatggaatcagctcagaagggcc

SEQ ID NO: 664635 - DNA, 25 bp, Homo sapien
caccttcgggtgacttgttgaacca

SEQ ID NO: 664636 - DNA, 25 bp, Homo sapien
cacagttgggtaaaatggctctgcc

SEQ ID NO: 664637 - DNA, 25 bp, Homo sapien
tactgatgaaaggatcgactgagcc

SEQ ID NO: 664638 - DNA, 25 bp, Homo sapien
tagagccacctgcaataaagaccat

SEQ ID NO: 664639 - DNA, 25 bp, Homo sapien
aatgatttgtcatgaggatcatgtt

SEQ ID NO: 664640 - DNA, 25 bp, Homo sapien
ttgtcatgaggatcatgttcttctt

SEQ ID NO: 664641 - DNA, 25 bp, Homo sapien
tgtcatgaggatcatgttcttcttc

SEQ ID NO: 664642 - DNA, 25 bp, Homo sapien
aaatgatttgtcatgaggatcatgt

SEQ ID NO: 664643 - DNA, 25 bp, Homo sapien
aggaatgtagctgccccttcctgtg

SEQ ID NO: 664644 - DNA, 25 bp, Homo sapien
ctggaaggaatgtagctgccccttc

SEQ ID NO: 664645 - DNA, 25 bp, Homo sapien
ctgtgttggaatagacactggaagg

SEQ ID NO: 664646 - DNA, 25 bp, Homo sapien
acactggaaggaatgtagctgcccc

SEQ ID NO: 664647 - DNA, 25 bp, Homo sapien
aagaaatgctaatgtggtcttgagt

SEQ ID NO: 664648 - DNA, 25 bp, Homo sapien
gcagaggcagaactaagaaatgcta

SEQ ID NO: 664649 - DNA, 25 bp, Homo sapien
taaacacaactcagagattccagtt

SEQ ID NO: 664650 - DNA, 25 bp, Homo sapien
ggtcttgagtaaacacaactcagag

SEQ ID NO: 664651 - DNA, 25 bp, Homo sapien
tcactacatgtaggtcggtatcatt

SEQ ID NO: 664652 - DNA, 25 bp, Homo sapien
tttccagtaatttgttcactacatg

SEQ ID NO: 664653 - DNA, 25 bp, Homo sapien
tgtaggtcggtatcattactccggg

SEQ ID NO: 664654 - DNA, 25 bp, Homo sapien
cggtatcattactccgggccctctg

SEQ ID NO: 664655 - DNA, 25 bp, Homo sapien
ttgaaggagaaggagtatagccaca

SEQ ID NO: 664656 - DNA, 25 bp, Homo sapien
tgaaggagaaggagtatagccacaa

SEQ ID NO: 664657 - DNA, 25 bp, Homo sapien
aaggagaaggagtatagccacaaac

SEQ ID NO: 664658 - DNA, 25 bp, Homo sapien
aggagaaggagtatagccacaaaca

SEQ ID NO: 664659 - DNA, 25 bp, Homo sapien
cagactgtgaaaactcttggctgca

SEQ ID NO: 664660 - DNA, 25 bp, Homo sapien
tggaaagagctgtacaatgacctct

SEQ ID NO: 664661 - DNA, 25 bp, Homo sapien
tgccctagttttgccctccagtaaa

SEQ ID NO: 664662 - DNA, 25 bp, Homo sapien
tattttaagagtgcagaaggttcca

SEQ ID NO: 664663 - DNA, 25 bp, Homo sapien
tcaagtttcacatgtcgttagccca

SEQ ID NO: 664664 - DNA, 25 bp, Homo sapien
tcctcttagcgaggagaacagtaac

SEQ ID NO: 664665 - DNA, 25 bp, Homo sapien
ggttctcaaactagagagctggtga

SEQ ID NO: 664666 - DNA, 25 bp, Homo sapien
gtggcaacaaagacacccgagttct

SEQ ID NO: 664667 - DNA, 25 bp, Homo sapien
tggcctgagctagcatccctaacga

SEQ ID NO: 664668 - DNA, 25 bp, Homo sapien
acgagttcccaagcgatgctgaggc

SEQ ID NO: 664669 - DNA, 25 bp, Homo sapien
taaacagtctaagattccccagtaa

SEQ ID NO: 664670 - DNA, 25 bp, Homo sapien
agtgcaaatgcacagtctaggctca

SEQ ID NO: 664671 - DNA, 25 bp, Homo sapien
taaataggactgagactgccaacac

SEQ ID NO: 664672 - DNA, 25 bp, Homo sapien
ttataatcggttggccagaagcaca

SEQ ID NO: 664673 - DNA, 25 bp, Homo sapien
ttaaaggctgccgatctcactctgg

SEQ ID NO: 664674 - DNA, 25 bp, Homo sapien
tgattacaaagatagctctcaggcg

SEQ ID NO: 664675 - DNA, 25 bp, Homo sapien
tcatggttctactttggatgctccc

SEQ ID NO: 664676 - DNA, 25 bp, Homo sapien
ggaactacaagctactaaaacgtga

SEQ ID NO: 664677 - DNA, 25 bp, Homo sapien
ttctgggtcgggtggatacttgcac

SEQ ID NO: 664678 - DNA, 25 bp, Homo sapien
tcccaagctgggaggcaatgaaatg

SEQ ID NO: 664679 - DNA, 25 bp, Homo sapien
cctttctcaggttaattattaaatg

SEQ ID NO: 664680 - DNA, 25 bp, Homo sapien
tctattgtcattacatcccatgtga

SEQ ID NO: 664681 - DNA, 25 bp, Homo sapien
tctgtataaccagctatattctagt

SEQ ID NO: 664682 - DNA, 25 bp, Homo sapien
caactccggacacactatgatctgt

SEQ ID NO: 664683 - DNA, 25 bp, Homo sapien
gccagtgatcaaggagcttgagttt

SEQ ID NO: 664684 - DNA, 25 bp, Homo sapien
ggttgccagtgatcaaggagcttga

SEQ ID NO: 664685 - DNA, 25 bp, Homo sapien
tctaggttgccagtgatcaaggagc

SEQ ID NO: 664686 - DNA, 25 bp, Homo sapien
cttctaggttgccagtgatcaagga

SEQ ID NO: 664687 - DNA, 25 bp, Homo sapien
cagggcctcccatcagaactaattt

SEQ ID NO: 664688 - DNA, 25 bp, Homo sapien
tctccatacaggatgacttcacact

SEQ ID NO: 664689 - DNA, 25 bp, Homo sapien
ccacgatttgggctttacaatccca

SEQ ID NO: 664690 - DNA, 25 bp, Homo sapien
aaaagtgactttagcggaactgcca

SEQ ID NO: 664691 - DNA, 25 bp, Homo sapien
caaactcaaacccttctctggaatt

SEQ ID NO: 664692 - DNA, 25 bp, Homo sapien
aactccaaactcaaacccttctctg

SEQ ID NO: 664693 - DNA, 25 bp, Homo sapien
taaaagcagggccattttacaacag

SEQ ID NO: 664694 - DNA, 25 bp, Homo sapien
ctaaaagcagggccattttacaaca

SEQ ID NO: 664695 - DNA, 25 bp, Homo sapien
ctgcttcattcggactagacacatc

SEQ ID NO: 664696 - DNA, 25 bp, Homo sapien
tcctcccacataaaatgaactatga

SEQ ID NO: 664697 - DNA, 25 bp, Homo sapien
tgaactatgatacgacacatgtact

SEQ ID NO: 664698 - DNA, 25 bp, Homo sapien
atgactctgccgcgctgctgaacat

SEQ ID NO: 664699 - DNA, 25 bp, Homo sapien
cagtggctcccctgtggctattgag

SEQ ID NO: 664700 - DNA, 25 bp, Homo sapien
gctagtcaaagctgagatgtggcac

SEQ ID NO: 664701 - DNA, 25 bp, Homo sapien
cgagatacagattatttagggcacc

SEQ ID NO: 664702 - DNA, 25 bp, Homo sapien
gcaggagtcctaaagacggaaagta

SEQ ID NO: 664703 - DNA, 25 bp, Homo sapien
caggccaacatactattattctcag

SEQ ID NO: 664704 - DNA, 25 bp, Homo sapien
ccacaccaggccaacatactattat

SEQ ID NO: 664705 - DNA, 25 bp, Homo sapien
aaattacatctgatattggaatgga

SEQ ID NO: 664706 - DNA, 25 bp, Homo sapien
aaaaattacatctgatattggaatg

SEQ ID NO: 664707 - DNA, 25 bp, Homo sapien
cagagcaattgaggttcaacaggta

SEQ ID NO: 664708 - DNA, 25 bp, Homo sapien
tataacaagagtaactgctagcagc

SEQ ID NO: 664709 - DNA, 25 bp, Homo sapien
tgctagcagcctagtaggaaaagag

SEQ ID NO: 664710 - DNA, 25 bp, Homo sapien
gctaactggaggcaagcatacctat

SEQ ID NO: 664711 - DNA, 25 bp, Homo sapien
tgtgtacatggctatctccacctgg

SEQ ID NO: 664712 - DNA, 25 bp, Homo sapien
cactatgaagcctaacccttctggg

SEQ ID NO: 664713 - DNA, 25 bp, Homo sapien
ttccagggctgtgtacatggctatc

SEQ ID NO: 664714 - DNA, 25 bp, Homo sapien
caaactccctcactatgaagcctaa

SEQ ID NO: 664715 - DNA, 25 bp, Homo sapien
gaaggctataccttacaagtcagca

SEQ ID NO: 664716 - DNA, 25 bp, Homo sapien
tctgggcttatgctttgacctttaa

SEQ ID NO: 664717 - DNA, 25 bp, Homo sapien
taaaaatgtgcttcaagacaccagt

SEQ ID NO: 664718 - DNA, 25 bp, Homo sapien
gtttttaacacctgaacaactgcca

SEQ ID NO: 664719 - DNA, 25 bp, Homo sapien
ttgaatgtatcaggcatctgacacc

SEQ ID NO: 664720 - DNA, 25 bp, Homo sapien
catgaattgaatgtatcaggcatct

SEQ ID NO: 664721 - DNA, 25 bp, Homo sapien
attgaatgtatcaggcatctgacac

SEQ ID NO: 664722 - DNA, 25 bp, Homo sapien
aaaccatgaattgaatgtatcaggc

SEQ ID NO: 664723 - DNA, 25 bp, Homo sapien
gaactttgaatcatagcacgccagg

SEQ ID NO: 664724 - DNA, 25 bp, Homo sapien
tatattaaatattggcaggcacggc

SEQ ID NO: 664725 - DNA, 25 bp, Homo sapien
tatgctattgcagaaaagtccagta

SEQ ID NO: 664726 - DNA, 25 bp, Homo sapien
ccagtagaacaatagggcgagacca

SEQ ID NO: 664727 - DNA, 25 bp, Homo sapien
aattcctcgaagtcagttttctcca

SEQ ID NO: 664728 - DNA, 25 bp, Homo sapien
cacagctagtatacatgcgcagggc

SEQ ID NO: 664729 - DNA, 25 bp, Homo sapien
ttcctcgaagtcagttttctccaca

SEQ ID NO: 664730 - DNA, 25 bp, Homo sapien
tgcgcagggccgcaatcttaatctt

SEQ ID NO: 664731 - DNA, 25 bp, Homo sapien
gaaacatggcaaaacgtttccatct

SEQ ID NO: 664732 - DNA, 25 bp, Homo sapien
ggaggctgagcctggaaggcggagg

SEQ ID NO: 664733 - DNA, 25 bp, Homo sapien
gcaaaacgtttccatctctaccaaa

SEQ ID NO: 664734 - DNA, 25 bp, Homo sapien
gtaggaggctgagcctggaaggcgg

SEQ ID NO: 664735 - DNA, 25 bp, Homo sapien
aaatgcttgtggaattactgttcac

SEQ ID NO: 664736 - DNA, 25 bp, Homo sapien
tttcattggcaattaagaagatact

SEQ ID NO: 664737 - DNA, 25 bp, Homo sapien
tttaagtttgtaaatccaaatgcca

SEQ ID NO: 664738 - DNA, 25 bp, Homo sapien
ccttagggactcaagaacatcattg

SEQ ID NO: 664739 - DNA, 25 bp, Homo sapien
acagcttcaaaaaggtcgcacatag

SEQ ID NO: 664740 - DNA, 25 bp, Homo sapien
caaaaaggtcgcacatagagtggtc

SEQ ID NO: 664741 - DNA, 25 bp, Homo sapien
cgcacatagagtggtcaaggaggaa

SEQ ID NO: 664742 - DNA, 25 bp, Homo sapien
aaggtcgcacatagagtggtcaagg

SEQ ID NO: 664743 - DNA, 25 bp, Homo sapien
atcccatggcttctattatctttgt

SEQ ID NO: 664744 - DNA, 25 bp, Homo sapien
gaatcccatggcttctattatcttt

SEQ ID NO: 664745 - DNA, 25 bp, Homo sapien
tgtatttcaaaggtcccgtgaatcc

SEQ ID NO: 664746 - DNA, 25 bp, Homo sapien
ggtcccgtgaatcccatggcttcta

SEQ ID NO: 664747 - DNA, 25 bp, Homo sapien
ctgtggggaatctttggtagtagaa

SEQ ID NO: 664748 - DNA, 25 bp, Homo sapien
tgtggggaatctttggtagtagaaa

SEQ ID NO: 664749 - DNA, 25 bp, Homo sapien
gctgtggggaatctttggtagtaga

SEQ ID NO: 664750 - DNA, 25 bp, Homo sapien
tattcagctgtatgtctattccagg

SEQ ID NO: 664751 - DNA, 25 bp, Homo sapien
ggaatctgttctgatccaccacatg

SEQ ID NO: 664752 - DNA, 25 bp, Homo sapien
atccaccacatgctcgggactggct

SEQ ID NO: 664753 - DNA, 25 bp, Homo sapien
ttacgtgtggtgtgatacttcctat

SEQ ID NO: 664754 - DNA, 25 bp, Homo sapien
gatagtgccactgccaagatagtgt

SEQ ID NO: 664755 - DNA, 25 bp, Homo sapien
tactatgtgaaaacgcagctcacac

SEQ ID NO: 664756 - DNA, 25 bp, Homo sapien
gatactaccactcatcgaaggaagg

SEQ ID NO: 664757 - DNA, 25 bp, Homo sapien
caataataggattacagcactggac

SEQ ID NO: 664758 - DNA, 25 bp, Homo sapien
gaagcagaagtttccaaccagggga

SEQ ID NO: 664759 - DNA, 25 bp, Homo sapien
tctgaagcagaagtttccaaccagg

SEQ ID NO: 664760 - DNA, 25 bp, Homo sapien
atgccattctgaagcagaagtttcc

SEQ ID NO: 664761 - DNA, 25 bp, Homo sapien
tgccattctgaagcagaagtttcca

SEQ ID NO: 664762 - DNA, 25 bp, Homo sapien
ctgggaagtgcgagacagagccctg

SEQ ID NO: 664763 - DNA, 25 bp, Homo sapien
tgggaagtgcgagacagagccctgt

SEQ ID NO: 664764 - DNA, 25 bp, Homo sapien
gtccttgggtaggagacacaggtat

SEQ ID NO: 664765 - DNA, 25 bp, Homo sapien
cttgggtaggagacacaggtatcaa

SEQ ID NO: 664766 - DNA, 25 bp, Homo sapien
actggaacccactgagaaatgctag

SEQ ID NO: 664767 - DNA, 25 bp, Homo sapien
ccactgagaaatgctagtctggttc

SEQ ID NO: 664768 - DNA, 25 bp, Homo sapien
aacccactgagaaatgctagtctgg

SEQ ID NO: 664769 - DNA, 25 bp, Homo sapien
tggaacccactgagaaatgctagtc

SEQ ID NO: 664770 - DNA, 25 bp, Homo sapien
tgttttcataaacactgacttactt

SEQ ID NO: 664771 - DNA, 25 bp, Homo sapien
gcctagtcatggtgctaacattgca

SEQ ID NO: 664772 - DNA, 25 bp, Homo sapien
taaaggcttgcatagctgtgcctgg

SEQ ID NO: 664773 - DNA, 25 bp, Homo sapien
tgtgcctggcttacaatgtgttttc

SEQ ID NO: 664774 - DNA, 25 bp, Homo sapien
tcatagaatccctttatagtaagca

SEQ ID NO: 664775 - DNA, 25 bp, Homo sapien
catagaatccctttatagtaagcaa

SEQ ID NO: 664776 - DNA, 25 bp, Homo sapien
atagaatccctttatagtaagcaat

SEQ ID NO: 664777 - DNA, 25 bp, Homo sapien
ttcatagaatccctttatagtaagc

SEQ ID NO: 664778 - DNA, 25 bp, Homo sapien
gatagccatgtacacagcactggaa

SEQ ID NO: 664779 - DNA, 25 bp, Homo sapien
tgggaaaacacacgtgggcaacttg

SEQ ID NO: 664780 - DNA, 25 bp, Homo sapien
gaaaggtctcttggccaaagtgaga

SEQ ID NO: 664781 - DNA, 25 bp, Homo sapien
gaaccaactctagggatctgagggt

SEQ ID NO: 664782 - DNA, 25 bp, Homo sapien
gataagcaacctcccaatgtcacat

SEQ ID NO: 664783 - DNA, 25 bp, Homo sapien
tgaggaacacttaatgagcatttga

SEQ ID NO: 664784 - DNA, 25 bp, Homo sapien
gtaatttaacctctgtgacattcag

SEQ ID NO: 664785 - DNA, 25 bp, Homo sapien
ttaaacttcacaatcaccactcatg

SEQ ID NO: 664786 - DNA, 25 bp, Homo sapien
atcatgtaatttccaatgtcaacaa

SEQ ID NO: 664787 - DNA, 25 bp, Homo sapien
aatgttaactatgggataagaggaa

SEQ ID NO: 664788 - DNA, 25 bp, Homo sapien
tcatgtaatttccaatgtcaacaaa

SEQ ID NO: 664789 - DNA, 25 bp, Homo sapien
tgttaccgaattatacaagccctgc

SEQ ID NO: 664790 - DNA, 25 bp, Homo sapien
cagcaaactgccagagaagcaaaaa

SEQ ID NO: 664791 - DNA, 25 bp, Homo sapien
tcaagaaatctctctaggccgggcg

SEQ ID NO: 664792 - DNA, 25 bp, Homo sapien
gctatctcacaggagtgttcccagg

SEQ ID NO: 664793 - DNA, 25 bp, Homo sapien
tgccctgcaagaataaggcagacct

SEQ ID NO: 664794 - DNA, 25 bp, Homo sapien
caatgttcgggaaggaacagagcta

SEQ ID NO: 664795 - DNA, 25 bp, Homo sapien
ttgtcagtagtagacttgccctgca

SEQ ID NO: 664796 - DNA, 25 bp, Homo sapien
tcattgtaatcccagggcagccact

SEQ ID NO: 664797 - DNA, 25 bp, Homo sapien
tatcaacagactgaaacagcaaccc

SEQ ID NO: 664798 - DNA, 25 bp, Homo sapien
cccataggataggaaaaatacatgc

SEQ ID NO: 664799 - DNA, 25 bp, Homo sapien
tgtgtatcaaagaatagtatcaaca

SEQ ID NO: 664800 - DNA, 25 bp, Homo sapien
tgatgagggattgatattcaaaata

SEQ ID NO: 664801 - DNA, 25 bp, Homo sapien
actacacttcagcacgcatgacaga

SEQ ID NO: 664802 - DNA, 25 bp, Homo sapien
cactacacttcagcacgcatgacag

SEQ ID NO: 664803 - DNA, 25 bp, Homo sapien
ccactacacttcagcacgcatgaca

SEQ ID NO: 664804 - DNA, 25 bp, Homo sapien
ggccaggaatacctctctgtggttc

SEQ ID NO: 664805 - DNA, 25 bp, Homo sapien
gcacctggccaggaatacctctctg

SEQ ID NO: 664806 - DNA, 25 bp, Homo sapien
cctggccaggaatacctctctgtgg

SEQ ID NO: 664807 - DNA, 25 bp, Homo sapien
acggcacctggccaggaatacctct

SEQ ID NO: 664808 - DNA, 25 bp, Homo sapien
catttccgggtgaagagtgagtttc

SEQ ID NO: 664809 - DNA, 25 bp, Homo sapien
caataaccatttccgggtgaagagt

SEQ ID NO: 664810 - DNA, 25 bp, Homo sapien
aaccatttccgggtgaagagtgagt

SEQ ID NO: 664811 - DNA, 25 bp, Homo sapien
cctcaataaccatttccgggtgaag

SEQ ID NO: 664812 - DNA, 25 bp, Homo sapien
tcgctacgcgcacgcgctgttgttt

SEQ ID NO: 664813 - DNA, 25 bp, Homo sapien
accaggctgtcgtgcccgggcacgc

SEQ ID NO: 664814 - DNA, 25 bp, Homo sapien
cgcaggcgcaaagaggtcgctacgc

SEQ ID NO: 664815 - DNA, 25 bp, Homo sapien
tgttttctcggctgtgcaccaggct

SEQ ID NO: 664816 - DNA, 25 bp, Homo sapien
ctactgttgaagcagctttggtgag

SEQ ID NO: 664817 - DNA, 25 bp, Homo sapien
gcgagcaagcttattggaatcccct

SEQ ID NO: 664818 - DNA, 25 bp, Homo sapien
cctgagaggtgcttaggagagtcca

SEQ ID NO: 664819 - DNA, 25 bp, Homo sapien
tgccactggtcacatcagcagacgg

SEQ ID NO: 664820 - DNA, 25 bp, Homo sapien
agtcagcttctcaactgtcccaggg

SEQ ID NO: 664821 - DNA, 25 bp, Homo sapien
cagtggaaagcctcgtactcaaggg

SEQ ID NO: 664822 - DNA, 25 bp, Homo sapien
tccgactgcagcgagccttaaggtt

SEQ ID NO: 664823 - DNA, 25 bp, Homo sapien
gatgactgcatgattcgtgggctcc

SEQ ID NO: 664824 - DNA, 25 bp, Homo sapien
gtcccagcccatgtccttgaagttg

SEQ ID NO: 664825 - DNA, 25 bp, Homo sapien
tcatacacggtcttatcgtcctggc

SEQ ID NO: 664826 - DNA, 25 bp, Homo sapien
gtcttatcgtcctggccagagcggg

SEQ ID NO: 664827 - DNA, 25 bp, Homo sapien
gaacaggtactcatacacggtctta

SEQ ID NO: 664828 - DNA, 25 bp, Homo sapien
ccgttttcgccgctggctgaacagg

SEQ ID NO: 664829 - DNA, 25 bp, Homo sapien
ggtgcggccaaacaccaggaacagg

SEQ ID NO: 664830 - DNA, 25 bp, Homo sapien
cagctgggccgagttcttaaagttt

SEQ ID NO: 664831 - DNA, 25 bp, Homo sapien
gagcttccagatgtcgaacacctcc

SEQ ID NO: 664832 - DNA, 25 bp, Homo sapien
aggaacagggccttctcgtggacct

SEQ ID NO: 664833 - DNA, 25 bp, Homo sapien
agggcactaatgtcaaacacgtacc

SEQ ID NO: 664834 - DNA, 25 bp, Homo sapien
taatgtcaaacacgtacctctgctt

SEQ ID NO: 664835 - DNA, 25 bp, Homo sapien
ttcttccgcaagatccgcagctcgg

SEQ ID NO: 664836 - DNA, 25 bp, Homo sapien
gcttggccgtgtccgagggcttctt

SEQ ID NO: 664837 - DNA, 25 bp, Homo sapien
agggagccagtcacttcgaggctgc

SEQ ID NO: 664838 - DNA, 25 bp, Homo sapien
attccctgcaacctcaccaagggag

SEQ ID NO: 664839 - DNA, 25 bp, Homo sapien
gagccaaaccactgagagccttttt

SEQ ID NO: 664840 - DNA, 25 bp, Homo sapien
gagaacacccagaagtcattccctg

SEQ ID NO: 664841 - DNA, 25 bp, Homo sapien
tagccgaccaagtaggggtgttcac

SEQ ID NO: 664842 - DNA, 25 bp, Homo sapien
catagccgaccaagtaggggtgttc

SEQ ID NO: 664843 - DNA, 25 bp, Homo sapien
tacatagccgaccaagtaggggtgt

SEQ ID NO: 664844 - DNA, 25 bp, Homo sapien
ctacatagccgaccaagtaggggtg

SEQ ID NO: 664845 - DNA, 25 bp, Homo sapien
tcagcatcggacagcgtcctgtaca

SEQ ID NO: 664846 - DNA, 25 bp, Homo sapien
cctgtacagcgagagcatgtactcg

SEQ ID NO: 664847 - DNA, 25 bp, Homo sapien
acacagtgcagatgaattccaggtc

SEQ ID NO: 664848 - DNA, 25 bp, Homo sapien
aaacggctccttgggctctcgtggg

SEQ ID NO: 664849 - DNA, 25 bp, Homo sapien
ctcttgaagtctgccgggtgtgtgt

SEQ ID NO: 664850 - DNA, 25 bp, Homo sapien
gtgtttgtatccagtcccatagtgg

SEQ ID NO: 664851 - DNA, 25 bp, Homo sapien
tctcctcagtctgagactcttgaag

SEQ ID NO: 664852 - DNA, 25 bp, Homo sapien
ggaaatgctctcgtatccagacgtg

SEQ ID NO: 664853 - DNA, 25 bp, Homo sapien
actgactgagggcttgaaggaggct

SEQ ID NO: 664854 - DNA, 25 bp, Homo sapien
gaagaatggcgtaatgctgcctgtg

SEQ ID NO: 664855 - DNA, 25 bp, Homo sapien
tgaaaataactcgttcttgaaagga

SEQ ID NO: 664856 - DNA, 25 bp, Homo sapien
aggcttgtataaggctgagggattt

SEQ ID NO: 664857 - DNA, 25 bp, Homo sapien
caatgaagtaaattgcggccaggcg

SEQ ID NO: 664858 - DNA, 25 bp, Homo sapien
atgaagtaaattgcggccaggcgca

SEQ ID NO: 664859 - DNA, 25 bp, Homo sapien
tcttgttggagattcaatgaagtaa

SEQ ID NO: 664860 - DNA, 25 bp, Homo sapien
ttcaatgaagtaaattgcggccagg

SEQ ID NO: 664861 - DNA, 25 bp, Homo sapien
tccctctggtaattgcaaccagatg

SEQ ID NO: 664862 - DNA, 25 bp, Homo sapien
gatgctgccgctggcagtgcttcag

SEQ ID NO: 664863 - DNA, 25 bp, Homo sapien
tctggtaattgcaaccagatgctgc

SEQ ID NO: 664864 - DNA, 25 bp, Homo sapien
gctggcagtgcttcagtcccgacat

SEQ ID NO: 664865 - DNA, 25 bp, Homo sapien
tctcggagcgtctgagcagcaaggt

SEQ ID NO: 664866 - DNA, 25 bp, Homo sapien
ggtcgcgctgccagtattatcgcta

SEQ ID NO: 664867 - DNA, 25 bp, Homo sapien
tgaacaaccctcagaaaccggtcgc

SEQ ID NO: 664868 - DNA, 25 bp, Homo sapien
ctgtaagtgttatgctgcctgaagc

SEQ ID NO: 664869 - DNA, 25 bp, Homo sapien
tgatcttcgggctgcagctgtcaag

SEQ ID NO: 664870 - DNA, 25 bp, Homo sapien
gacggatcagctcccaaatgtaggt

SEQ ID NO: 664871 - DNA, 25 bp, Homo sapien
tgggccctaactgagagcaagacgg

SEQ ID NO: 664872 - DNA, 25 bp, Homo sapien
gctgtcgagttctgaaaacaccctg

SEQ ID NO: 664873 - DNA, 25 bp, Homo sapien
cctttttggccagtagttagaggag

SEQ ID NO: 664874 - DNA, 25 bp, Homo sapien
tgtctttgatgcttgtactcccttc

SEQ ID NO: 664875 - DNA, 25 bp, Homo sapien
cagagcaggcgagaaatgctttgca

SEQ ID NO: 664876 - DNA, 25 bp, Homo sapien
gccagtagttagaggaggagaacca

SEQ ID NO: 664877 - DNA, 25 bp, Homo sapien
caccacccagtttgaattagaagct

SEQ ID NO: 664878 - DNA, 25 bp, Homo sapien
gaattcttcactgattctccactac

SEQ ID NO: 664879 - DNA, 25 bp, Homo sapien
gaagcttctccttatactctgatag

SEQ ID NO: 664880 - DNA, 25 bp, Homo sapien
tactctgatagcacctcatgcttat

SEQ ID NO: 664881 - DNA, 25 bp, Homo sapien
tggacaacacggcgaaaccccattc

SEQ ID NO: 664882 - DNA, 25 bp, Homo sapien
ctggacaacacggcgaaaccccatt

SEQ ID NO: 664883 - DNA, 25 bp, Homo sapien
tctgtgcctagtctatagtcggtgc

SEQ ID NO: 664884 - DNA, 25 bp, Homo sapien
tgcgatttcgtagctggagggttca

SEQ ID NO: 664885 - DNA, 25 bp, Homo sapien
tatgaggcaggcttattggcaagat

SEQ ID NO: 664886 - DNA, 25 bp, Homo sapien
tctagcaggaatcagatgtatacca

SEQ ID NO: 664887 - DNA, 25 bp, Homo sapien
cgtgatcagggcttaacggcagcct

SEQ ID NO: 664888 - DNA, 25 bp, Homo sapien
cactgtcaattgtatggtctgggaa

SEQ ID NO: 664889 - DNA, 25 bp, Homo sapien
tatatgtgaactaccacgtccagcc

SEQ ID NO: 664890 - DNA, 25 bp, Homo sapien
ccaaggaagtgttagtttaggcgtg

SEQ ID NO: 664891 - DNA, 25 bp, Homo sapien
cttttctactcccaagaggagtgct

SEQ ID NO: 664892 - DNA, 25 bp, Homo sapien
tccttttctactcccaagaggagtg

SEQ ID NO: 664893 - DNA, 25 bp, Homo sapien
ttctactcccaagaggagtgctgca

SEQ ID NO: 664894 - DNA, 25 bp, Homo sapien
tttctactcccaagaggagtgctgc

SEQ ID NO: 664895 - DNA, 25 bp, Homo sapien
gtggagtgtcccaccaataatggtg

SEQ ID NO: 664896 - DNA, 25 bp, Homo sapien
gacaactgctgttttcatcagctcc

SEQ ID NO: 664897 - DNA, 25 bp, Homo sapien
cagtagcaggattgcctctgtggag

SEQ ID NO: 664898 - DNA, 25 bp, Homo sapien
cactcgagcttgtggatgatcttcc

SEQ ID NO: 664899 - DNA, 25 bp, Homo sapien
cacatgtggcagggtataaccagaa

SEQ ID NO: 664900 - DNA, 25 bp, Homo sapien
gaatccagcagacgggaggagtccc

SEQ ID NO: 664901 - DNA, 25 bp, Homo sapien
cagcagacgggaggagtccctggca

SEQ ID NO: 664902 - DNA, 25 bp, Homo sapien
tcacatgtggcagggtataaccaga

SEQ ID NO: 664903 - DNA, 25 bp, Homo sapien
gccacagagattatcttcttgcaga

SEQ ID NO: 664904 - DNA, 25 bp, Homo sapien
tgctttgatagaagctggtactggc

SEQ ID NO: 664905 - DNA, 25 bp, Homo sapien
gatagaagctggtactggctggaaa

SEQ ID NO: 664906 - DNA, 25 bp, Homo sapien
cctaatcttgtctgctttgatagaa

SEQ ID NO: 664907 - DNA, 25 bp, Homo sapien
cttgaccagccggaattgggttagg

SEQ ID NO: 664908 - DNA, 25 bp, Homo sapien
cctatattccaaatacgcatggccc

SEQ ID NO: 664909 - DNA, 25 bp, Homo sapien
ttccaaatacgcatggcccaggact

SEQ ID NO: 664910 - DNA, 25 bp, Homo sapien
ggttggagtagcttcttgaccagcc

SEQ ID NO: 664911 - DNA, 25 bp, Homo sapien
atccaccggcctctggagatggcgt

SEQ ID NO: 664912 - DNA, 25 bp, Homo sapien
cattgcaactggaggcccagcggag

SEQ ID NO: 664913 - DNA, 25 bp, Homo sapien
gactgtttatcactcacccctggtt

SEQ ID NO: 664914 - DNA, 25 bp, Homo sapien
tggttccagtaccaaggaaaggctg

SEQ ID NO: 664915 - DNA, 25 bp, Homo sapien
tgaaggcaggctttgtagatgcggg

SEQ ID NO: 664916 - DNA, 25 bp, Homo sapien
ggccagtggcagaacttctagaagt

SEQ ID NO: 664917 - DNA, 25 bp, Homo sapien
aaagcagtgagctgacttccaggcc

SEQ ID NO: 664918 - DNA, 25 bp, Homo sapien
cagaacttctagaagtacctgtggg

SEQ ID NO: 664919 - DNA, 25 bp, Homo sapien
agtcacatggtgataagacagaatc

SEQ ID NO: 664920 - DNA, 25 bp, Homo sapien
aatgtagccctttaatgccaccaga

SEQ ID NO: 664921 - DNA, 25 bp, Homo sapien
agaatgtagccctttaatgccacca

SEQ ID NO: 664922 - DNA, 25 bp, Homo sapien
tggtaagatacagcataagagagtc

SEQ ID NO: 664923 - DNA, 25 bp, Homo sapien
tagcagagtaatctccatccagggt

SEQ ID NO: 664924 - DNA, 25 bp, Homo sapien
catccagggtctgcttgaagcccta

SEQ ID NO: 664925 - DNA, 25 bp, Homo sapien
tggaaacatctcagccgtagacagc

SEQ ID NO: 664926 - DNA, 25 bp, Homo sapien
caaggtccccttggctacctgtcaa

SEQ ID NO: 664927 - DNA, 25 bp, Homo sapien
agtaatgggaccaccttttgcaatt

SEQ ID NO: 664928 - DNA, 25 bp, Homo sapien
taatgggaccaccttttgcaattgt

SEQ ID NO: 664929 - DNA, 25 bp, Homo sapien
aatgggaccaccttttgcaattgtc

SEQ ID NO: 664930 - DNA, 25 bp, Homo sapien
tgggaccaccttttgcaattgtctt

SEQ ID NO: 664931 - DNA, 25 bp, Homo sapien
gattggataagacaaaagatggtgg

SEQ ID NO: 664932 - DNA, 25 bp, Homo sapien
gagaatggagttcaccttcttcaag

SEQ ID NO: 664933 - DNA, 25 bp, Homo sapien
ctcaaccactagtgtgccaggcttc

SEQ ID NO: 664934 - DNA, 25 bp, Homo sapien
atggaacacctatcatgccttcagc

SEQ ID NO: 664935 - DNA, 25 bp, Homo sapien
ggaagtagaggctgatcaccagcac

SEQ ID NO: 664936 - DNA, 25 bp, Homo sapien
tatgcaaggcatacaacagagccac

SEQ ID NO: 664937 - DNA, 25 bp, Homo sapien
caaggacggatactgaccatggttc

SEQ ID NO: 664938 - DNA, 25 bp, Homo sapien
cagagccacaaactccaaggacgga

SEQ ID NO: 664939 - DNA, 25 bp, Homo sapien
ccactatcatgttgtcctaccactt

SEQ ID NO: 664940 - DNA, 25 bp, Homo sapien
tatcatgttgtcctaccactttccc

SEQ ID NO: 664941 - DNA, 25 bp, Homo sapien
tggctacccactatcatgttgtcct

SEQ ID NO: 664942 - DNA, 25 bp, Homo sapien
tacccactatcatgttgtcctacca

SEQ ID NO: 664943 - DNA, 25 bp, Homo sapien
caccaggaacctgaaccgtctgaaa

SEQ ID NO: 664944 - DNA, 25 bp, Homo sapien
accaggaacctgaaccgtctgaaat

SEQ ID NO: 664945 - DNA, 25 bp, Homo sapien
tctctttggagttacctctgtcact

SEQ ID NO: 664946 - DNA, 25 bp, Homo sapien
tatccagccagggtctctttggagt

SEQ ID NO: 664947 - DNA, 25 bp, Homo sapien
agacttcagccttaagtaagccttg

SEQ ID NO: 664948 - DNA, 25 bp, Homo sapien
cactccctacagtgacctcactccc

SEQ ID NO: 664949 - DNA, 25 bp, Homo sapien
taacgcgcatggtggtcctgttccc

SEQ ID NO: 664950 - DNA, 25 bp, Homo sapien
ccagatgaattcaacggaagcagca

SEQ ID NO: 664951 - DNA, 25 bp, Homo sapien
cagtacacttatgaaccactccaga

SEQ ID NO: 664952 - DNA, 25 bp, Homo sapien
gcaatcccagggtacataacgcgca

SEQ ID NO: 664953 - DNA, 25 bp, Homo sapien
aagttaggatggtcatttagaggag

SEQ ID NO: 664954 - DNA, 25 bp, Homo sapien
aaaggaagttaggatggtcatttag

SEQ ID NO: 664955 - DNA, 25 bp, Homo sapien
ttaggatggtcatttagaggaggaa

SEQ ID NO: 664956 - DNA, 25 bp, Homo sapien
aggaagttaggatggtcatttagag

SEQ ID NO: 664957 - DNA, 25 bp, Homo sapien
cttcatgttgattaatcctgaagcc

SEQ ID NO: 664958 - DNA, 25 bp, Homo sapien
gaggaccacttcatgttgattaatc

SEQ ID NO: 664959 - DNA, 25 bp, Homo sapien
ccatagagaccttgagtttcccacc

SEQ ID NO: 664960 - DNA, 25 bp, Homo sapien
gctccatagagaccttgagtttccc

SEQ ID NO: 664961 - DNA, 25 bp, Homo sapien
cacaggggaggtgctttaatcagct

SEQ ID NO: 664962 - DNA, 25 bp, Homo sapien
cttctctgacttgaccctctcgagt

SEQ ID NO: 664963 - DNA, 25 bp, Homo sapien
aggggaggtgctttaatcagctgct

SEQ ID NO: 664964 - DNA, 25 bp, Homo sapien
ttctctgacttgaccctctcgagtc

SEQ ID NO: 664965 - DNA, 25 bp, Homo sapien
tatcttggccatattacggaggtcc

SEQ ID NO: 664966 - DNA, 25 bp, Homo sapien
tatcagagcatcattggacgtggga

SEQ ID NO: 664967 - DNA, 25 bp, Homo sapien
tactgtcgaagcgtctgtcaaacca

SEQ ID NO: 664968 - DNA, 25 bp, Homo sapien
caatgaaaggacataggcagccacc

SEQ ID NO: 664969 - DNA, 25 bp, Homo sapien
cctggcagacagtagattggccccg

SEQ ID NO: 664970 - DNA, 25 bp, Homo sapien
tgcccctggcagacagtagattggc

SEQ ID NO: 664971 - DNA, 25 bp, Homo sapien
ggtgcccctggcagacagtagattg

SEQ ID NO: 664972 - DNA, 25 bp, Homo sapien
ggcagacagtagattggccccgaca

SEQ ID NO: 664973 - DNA, 25 bp, Homo sapien
cagaggtacactgcttcttgtggac

SEQ ID NO: 664974 - DNA, 25 bp, Homo sapien
cttggtcttggtcaacagactggta

SEQ ID NO: 664975 - DNA, 25 bp, Homo sapien
agactggagtgatgcctctgatgca

SEQ ID NO: 664976 - DNA, 25 bp, Homo sapien
gccctgatgcgatccagtggtgtta

SEQ ID NO: 664977 - DNA, 25 bp, Homo sapien
ggcagtatttccttggagcccttgg

SEQ ID NO: 664978 - DNA, 25 bp, Homo sapien
caggtaagacaatcaggccaggatt

SEQ ID NO: 664979 - DNA, 25 bp, Homo sapien
tctgctcctgcactagacgtgggca

SEQ ID NO: 664980 - DNA, 25 bp, Homo sapien
tgtccacacgctagctgatggatga

SEQ ID NO: 664981 - DNA, 25 bp, Homo sapien
ctattctgatccaaatccaaagagg

SEQ ID NO: 664982 - DNA, 25 bp, Homo sapien
ttctgatccaaatccaaagagggtg

SEQ ID NO: 664983 - DNA, 25 bp, Homo sapien
tattctgatccaaatccaaagaggg

SEQ ID NO: 664984 - DNA, 25 bp, Homo sapien
ctgatccaaatccaaagagggtgac

SEQ ID NO: 664985 - DNA, 25 bp, Homo sapien
cgtgtctttgctatcttccactcca

SEQ ID NO: 664986 - DNA, 25 bp, Homo sapien
agggaaccagaccatcttccaaaat

SEQ ID NO: 664987 - DNA, 25 bp, Homo sapien
tagggaaccagaccatcttccaaaa

SEQ ID NO: 664988 - DNA, 25 bp, Homo sapien
ctagggaaccagaccatcttccaaa

SEQ ID NO: 664989 - DNA, 25 bp, Homo sapien
ccacacagagaatgtctggggacac

SEQ ID NO: 664990 - DNA, 25 bp, Homo sapien
cagagaatgtctggggacacctcca

SEQ ID NO: 664991 - DNA, 25 bp, Homo sapien
ccccacacagagaatgtctggggac

SEQ ID NO: 664992 - DNA, 25 bp, Homo sapien
acacagagaatgtctggggacacct

SEQ ID NO: 664993 - DNA, 25 bp, Homo sapien
gcttccgcagtagcatctccagctg

SEQ ID NO: 664994 - DNA, 25 bp, Homo sapien
gagagcttccgcagtagcatctcca

SEQ ID NO: 664995 - DNA, 25 bp, Homo sapien
cttccgcagtagcatctccagctgc

SEQ ID NO: 664996 - DNA, 25 bp, Homo sapien
agcttccgcagtagcatctccagct

SEQ ID NO: 664997 - DNA, 25 bp, Homo sapien
ggatctgtgggcgccccaacagcac

SEQ ID NO: 664998 - DNA, 25 bp, Homo sapien
aatttcccaagctcgctccctgagt

SEQ ID NO: 664999 - DNA, 25 bp, Homo sapien
gggtattggtcgatgtcgttgccaa

SEQ ID NO: 665000 - DNA, 25 bp, Homo sapien
tcaaaatggctcaccgagagcctgg

SEQ ID NO: 665001 - DNA, 25 bp, Homo sapien
gcagggatttgggcggaaagtggga

SEQ ID NO: 665002 - DNA, 25 bp, Homo sapien
gagatgggtgaggcccggaaagcat

SEQ ID NO: 665003 - DNA, 25 bp, Homo sapien
ggatttgggcggaaagtgggagatg

SEQ ID NO: 665004 - DNA, 25 bp, Homo sapien
tgggtgggtgagatctccatccaga

SEQ ID NO: 665005 - DNA, 25 bp, Homo sapien
tggccgggcccagtgttgaccactg

SEQ ID NO: 665006 - DNA, 25 bp, Homo sapien
gatatggccgggcccagtgttgacc

SEQ ID NO: 665007 - DNA, 25 bp, Homo sapien
gccgggcccagtgttgaccactgac

SEQ ID NO: 665008 - DNA, 25 bp, Homo sapien
tatggccgggcccagtgttgaccac

SEQ ID NO: 665009 - DNA, 25 bp, Homo sapien
tcccggaactgaaccaagggcagtc

SEQ ID NO: 665010 - DNA, 25 bp, Homo sapien
tcctggagcacgcatcaagccagtt

SEQ ID NO: 665011 - DNA, 25 bp, Homo sapien
ggtaccccatagtcttcctggagca

SEQ ID NO: 665012 - DNA, 25 bp, Homo sapien
gcacagtgtcagaggtcatagactc

SEQ ID NO: 665013 - DNA, 25 bp, Homo sapien
gggtgctgattcaggtgtcagatcc

SEQ ID NO: 665014 - DNA, 25 bp, Homo sapien
gattcaggtgtcagatccagatagg

SEQ ID NO: 665015 - DNA, 25 bp, Homo sapien
tacattcgtttttcctggggtgctg

SEQ ID NO: 665016 - DNA, 25 bp, Homo sapien
tcagatccagatagggggtcatcag

SEQ ID NO: 665017 - DNA, 25 bp, Homo sapien
tcaaaacggtctctgactgggcatg

SEQ ID NO: 665018 - DNA, 25 bp, Homo sapien
caaaacggtctctgactgggcatgg

SEQ ID NO: 665019 - DNA, 25 bp, Homo sapien
aaaacggtctctgactgggcatggg

SEQ ID NO: 665020 - DNA, 25 bp, Homo sapien
ctcaaaacggtctctgactgggcat

SEQ ID NO: 665021 - DNA, 25 bp, Homo sapien
taaacctggagggatagagcgtgtc

SEQ ID NO: 665022 - DNA, 25 bp, Homo sapien
tcaggagaagcactgggacgctgtt

SEQ ID NO: 665023 - DNA, 25 bp, Homo sapien
tattcagaaagcagcgctcaggaga

SEQ ID NO: 665024 - DNA, 25 bp, Homo sapien
gattcccagagtactttgaggtcca

SEQ ID NO: 665025 - DNA, 25 bp, Homo sapien
gcatcagctttcctcatgatggctg

SEQ ID NO: 665026 - DNA, 25 bp, Homo sapien
tcagctttcctcatgatggctggga

SEQ ID NO: 665027 - DNA, 25 bp, Homo sapien
catcagctttcctcatgatggctgg

SEQ ID NO: 665028 - DNA, 25 bp, Homo sapien
tgcctcctcttagtgcggatgtgcg

SEQ ID NO: 665029 - DNA, 25 bp, Homo sapien
cttgagggcccgtttgtccttggag

SEQ ID NO: 665030 - DNA, 25 bp, Homo sapien
tgagggcccgtttgtccttggagac

SEQ ID NO: 665031 - DNA, 25 bp, Homo sapien
ttgagggcccgtttgtccttggaga

SEQ ID NO: 665032 - DNA, 25 bp, Homo sapien
tcatacggggcgaaaccacacacct

SEQ ID NO: 665033 - DNA, 25 bp, Homo sapien
acaccatggcgtgccgctcatacgg

SEQ ID NO: 665034 - DNA, 25 bp, Homo sapien
gagtaacaccatggcgtgccgctca

SEQ ID NO: 665035 - DNA, 25 bp, Homo sapien
ttgagtaacaccatggcgtgccgct

SEQ ID NO: 665036 - DNA, 25 bp, Homo sapien
tgtcaaggcacacggccatagtggg

SEQ ID NO: 665037 - DNA, 25 bp, Homo sapien
cggccatagtgggtagcacagagcc

SEQ ID NO: 665038 - DNA, 25 bp, Homo sapien
cacacggccatagtgggtagcacag

SEQ ID NO: 665039 - DNA, 25 bp, Homo sapien
ggcccttgtcaaggcacacggccat

SEQ ID NO: 665040 - DNA, 25 bp, Homo sapien
tttaaagggctcactcatagggctg

SEQ ID NO: 665041 - DNA, 25 bp, Homo sapien
tcatagggctgttggcaggatgcct

SEQ ID NO: 665042 - DNA, 25 bp, Homo sapien
tctcagtagggttgcttgtgtgtcc

SEQ ID NO: 665043 - DNA, 25 bp, Homo sapien
ttgtatcacggcaactggcttcccc

SEQ ID NO: 665044 - DNA, 25 bp, Homo sapien
gcaatatactagtgcttacacaggt

SEQ ID NO: 665045 - DNA, 25 bp, Homo sapien
taagaggcaattagatgtaccagtc

SEQ ID NO: 665046 - DNA, 25 bp, Homo sapien
tcagcaggtacagggtagtttaaac

SEQ ID NO: 665047 - DNA, 25 bp, Homo sapien
cagccttactcattgtgggagagga

SEQ ID NO: 665048 - DNA, 25 bp, Homo sapien
caagaaagacttctctttaggccag

SEQ ID NO: 665049 - DNA, 25 bp, Homo sapien
tatggagagaagatagtcgcacgtt

SEQ ID NO: 665050 - DNA, 25 bp, Homo sapien
gagcccagggtatgaagatggcctc

SEQ ID NO: 665051 - DNA, 25 bp, Homo sapien
gcaggaagatgatcagtgtcaagct

SEQ ID NO: 665052 - DNA, 25 bp, Homo sapien
gccccagccccaggttgataaatct

SEQ ID NO: 665053 - DNA, 25 bp, Homo sapien
ctctttctccctggcctgtggttgt

SEQ ID NO: 665054 - DNA, 25 bp, Homo sapien
tggcctgtggttgtcccccagcctc

SEQ ID NO: 665055 - DNA, 25 bp, Homo sapien
gtcaccctcggtgcttcctctgtct

SEQ ID NO: 665056 - DNA, 25 bp, Homo sapien
tcagatcatgtctcgaatgttgatg

SEQ ID NO: 665057 - DNA, 25 bp, Homo sapien
cagatcatgtctcgaatgttgatgc

SEQ ID NO: 665058 - DNA, 25 bp, Homo sapien
atcatgtctcgaatgttgatgcaag

SEQ ID NO: 665059 - DNA, 25 bp, Homo sapien
gatcatgtctcgaatgttgatgcaa

SEQ ID NO: 665060 - DNA, 25 bp, Homo sapien
ggtgagtgtccaaggtcagcgagag

SEQ ID NO: 665061 - DNA, 25 bp, Homo sapien
ttgaagggttggcaccctgggtgag

SEQ ID NO: 665062 - DNA, 25 bp, Homo sapien
tcacatgggtaagaaagacttccag

SEQ ID NO: 665063 - DNA, 25 bp, Homo sapien
gactctggggtagctcacatgggta

SEQ ID NO: 665064 - DNA, 25 bp, Homo sapien
acttgtggaggggacggaagatgac

SEQ ID NO: 665065 - DNA, 25 bp, Homo sapien
tcacttgtggaggggacggaagatg

SEQ ID NO: 665066 - DNA, 25 bp, Homo sapien
cacttgtggaggggacggaagatga

SEQ ID NO: 665067 - DNA, 25 bp, Homo sapien
acaaaggtcttcagcgggttcacaa

SEQ ID NO: 665068 - DNA, 25 bp, Homo sapien
cagtaccggcgccagatgaagaaga

SEQ ID NO: 665069 - DNA, 25 bp, Homo sapien
gggtgcgccagtaccggcgccagat

SEQ ID NO: 665070 - DNA, 25 bp, Homo sapien
cacaaaccagttgaaggaagttttg

SEQ ID NO: 665071 - DNA, 25 bp, Homo sapien
tccacagtcagcagctcaaactctg

SEQ ID NO: 665072 - DNA, 25 bp, Homo sapien
ctgggtttctccagaggctctggct

SEQ ID NO: 665073 - DNA, 25 bp, Homo sapien
tccccactggccgtttctcggcctc

SEQ ID NO: 665074 - DNA, 25 bp, Homo sapien
ggctctggctgcttccgccccttcc

SEQ ID NO: 665075 - DNA, 25 bp, Homo sapien
ctggcctctgcccacgggcacccac

SEQ ID NO: 665076 - DNA, 25 bp, Homo sapien
gcagggggcgggctcaggccccagc

SEQ ID NO: 665077 - DNA, 25 bp, Homo sapien
gggggcgggctcaggccccagctca

SEQ ID NO: 665078 - DNA, 25 bp, Homo sapien
ggagcagggggcgggctcaggcccc

SEQ ID NO: 665079 - DNA, 25 bp, Homo sapien
tccttcagcttcactaccggccacc

SEQ ID NO: 665080 - DNA, 25 bp, Homo sapien
tacacattgccacccatgtctgtga

SEQ ID NO: 665081 - DNA, 25 bp, Homo sapien
ttcagcttcactaccggccaccagc

SEQ ID NO: 665082 - DNA, 25 bp, Homo sapien
tgtacacattgccacccatgtctgt

SEQ ID NO: 665083 - DNA, 25 bp, Homo sapien
gcggcggcagcgaaacagattgcac

SEQ ID NO: 665084 - DNA, 25 bp, Homo sapien
cgcaccatgtctggtagctgcaact

SEQ ID NO: 665085 - DNA, 25 bp, Homo sapien
cccattgcgggccagctgcacagag

SEQ ID NO: 665086 - DNA, 25 bp, Homo sapien
tcggcccggccccattgcgggccag

SEQ ID NO: 665087 - DNA, 25 bp, Homo sapien
tgaggaggcaacacaccaaggttgt

SEQ ID NO: 665088 - DNA, 25 bp, Homo sapien
gattaggcatgggatcaaagtctca

SEQ ID NO: 665089 - DNA, 25 bp, Homo sapien
aatggaggttactgtggtctaggcc

SEQ ID NO: 665090 - DNA, 25 bp, Homo sapien
tgcaagtccagagcacaccagatta

SEQ ID NO: 665091 - DNA, 25 bp, Homo sapien
gcagagatgcggtcatagtcccaga

SEQ ID NO: 665092 - DNA, 25 bp, Homo sapien
tggcagagatgcggtcatagtccca

SEQ ID NO: 665093 - DNA, 25 bp, Homo sapien
cagagatgcggtcatagtcccagac

SEQ ID NO: 665094 - DNA, 25 bp, Homo sapien
ggcagagatgcggtcatagtcccag

SEQ ID NO: 665095 - DNA, 25 bp, Homo sapien
cacaaagcgccaattgaagttcccc

SEQ ID NO: 665096 - DNA, 25 bp, Homo sapien
ccagtcagggagttgaagtgaacgt

SEQ ID NO: 665097 - DNA, 25 bp, Homo sapien
tgggcaggtagtcaaagcggaacac

SEQ ID NO: 665098 - DNA, 25 bp, Homo sapien
agggcaaagggtccagacctgcgcc

SEQ ID NO: 665099 - DNA, 25 bp, Homo sapien
tcagggctggagctacatggagaac

SEQ ID NO: 665100 - DNA, 25 bp, Homo sapien
gggctctggactcagcccgagggcc

SEQ ID NO: 665101 - DNA, 25 bp, Homo sapien
cgagggcccacacccatttgcaatc

SEQ ID NO: 665102 - DNA, 25 bp, Homo sapien
cgctctcagcaccacggagggcctg

SEQ ID NO: 665103 - DNA, 25 bp, Homo sapien
tcttcacatagatgtcactcgacat

SEQ ID NO: 665104 - DNA, 25 bp, Homo sapien
tgagtggattctcgtcatccagaac

SEQ ID NO: 665105 - DNA, 25 bp, Homo sapien
ccagatgacaactctgagctcatag

SEQ ID NO: 665106 - DNA, 25 bp, Homo sapien
gaaccacatcctccgtgttccagat

SEQ ID NO: 665107 - DNA, 25 bp, Homo sapien
tggcttcagactctcgagtggggcc

SEQ ID NO: 665108 - DNA, 25 bp, Homo sapien
gggggcacattagggggtggcttca

SEQ ID NO: 665109 - DNA, 25 bp, Homo sapien
ggtggcttcagactctcgagtgggg

SEQ ID NO: 665110 - DNA, 25 bp, Homo sapien
ggggcacattagggggtggcttcag

SEQ ID NO: 665111 - DNA, 25 bp, Homo sapien
ggcgctgcactgttgcatggtgtgg

SEQ ID NO: 665112 - DNA, 25 bp, Homo sapien
cagatggccccaggaatggtctgtg

SEQ ID NO: 665113 - DNA, 25 bp, Homo sapien
tggagctaccacaagccagagtttg

SEQ ID NO: 665114 - DNA, 25 bp, Homo sapien
tccttcccgtgaatttagaatcagg

SEQ ID NO: 665115 - DNA, 25 bp, Homo sapien
tgattggctgccgaggcttgatgtc

SEQ ID NO: 665116 - DNA, 25 bp, Homo sapien
ctgccgaggcttgatgtcaactggg

SEQ ID NO: 665117 - DNA, 25 bp, Homo sapien
attggctgccgaggcttgatgtcaa

SEQ ID NO: 665118 - DNA, 25 bp, Homo sapien
tggctgccgaggcttgatgtcaact

SEQ ID NO: 665119 - DNA, 25 bp, Homo sapien
agctggatcccaaaacccggcattt

SEQ ID NO: 665120 - DNA, 25 bp, Homo sapien
aaaacccggcatttcctgccagcgc

SEQ ID NO: 665121 - DNA, 25 bp, Homo sapien
cgcagcacaagcaatgcctgggcct

SEQ ID NO: 665122 - DNA, 25 bp, Homo sapien
tttctacatgctcgggtaccagctg

SEQ ID NO: 665123 - DNA, 25 bp, Homo sapien
taccgacatcttgcttgaacagaaa

SEQ ID NO: 665124 - DNA, 25 bp, Homo sapien
cttgttctaccgacatcttgcttga

SEQ ID NO: 665125 - DNA, 25 bp, Homo sapien
ttctaccgacatcttgcttgaacag

SEQ ID NO: 665126 - DNA, 25 bp, Homo sapien
cgacatcttgcttgaacagaaaggg

SEQ ID NO: 665127 - DNA, 25 bp, Homo sapien
gcagggtctccggtggtgtcaggaa

SEQ ID NO: 665128 - DNA, 25 bp, Homo sapien
gggtctccggtggtgtcaggaagac

SEQ ID NO: 665129 - DNA, 25 bp, Homo sapien
tctccggtggtgtcaggaagacttt

SEQ ID NO: 665130 - DNA, 25 bp, Homo sapien
tccggtggtgtcaggaagactttgc

SEQ ID NO: 665131 - DNA, 25 bp, Homo sapien
gacagcaccggctcggtattcaggg

SEQ ID NO: 665132 - DNA, 25 bp, Homo sapien
ccgccaggatctgcgaaggccagaa

SEQ ID NO: 665133 - DNA, 25 bp, Homo sapien
ggccagaatgcatcacgccaggcat

SEQ ID NO: 665134 - DNA, 25 bp, Homo sapien
agggaggccacagcgttggcacagc

SEQ ID NO: 665135 - DNA, 25 bp, Homo sapien
ggcagtgatgacgtcatgaagacat

SEQ ID NO: 665136 - DNA, 25 bp, Homo sapien
gacatgaggtctaggttcaaaactc

SEQ ID NO: 665137 - DNA, 25 bp, Homo sapien
cagaaaaagaagatgcgtcagctgg

SEQ ID NO: 665138 - DNA, 25 bp, Homo sapien
cgggagacaggttagtcctcattta

SEQ ID NO: 665139 - DNA, 25 bp, Homo sapien
gagacagagcgaaaatataaaaatt

SEQ ID NO: 665140 - DNA, 25 bp, Homo sapien
ttagctggacatgggggcccacgcc

SEQ ID NO: 665141 - DNA, 25 bp, Homo sapien
tgggagacagagcgaaaatataaaa

SEQ ID NO: 665142 - DNA, 25 bp, Homo sapien
attagctggacatgggggcccacgc

SEQ ID NO: 665143 - DNA, 25 bp, Homo sapien
gagcttgaatgtgtttggccagaaa

SEQ ID NO: 665144 - DNA, 25 bp, Homo sapien
aagtgacattcgttacaggatcccg

SEQ ID NO: 665145 - DNA, 25 bp, Homo sapien
gaaactcagaatggctcctgtgggc

SEQ ID NO: 665146 - DNA, 25 bp, Homo sapien
gagggtccccttccatgaaatcata

SEQ ID NO: 665147 - DNA, 25 bp, Homo sapien
gaggtcgtcagaacccacgaggtca

SEQ ID NO: 665148 - DNA, 25 bp, Homo sapien
cgaggtcatgatcaaatacggcgac

SEQ ID NO: 665149 - DNA, 25 bp, Homo sapien
gtgggtctccccgatgaggtcgtca

SEQ ID NO: 665150 - DNA, 25 bp, Homo sapien
cacagtttgctctgtggtggctata

SEQ ID NO: 665151 - DNA, 25 bp, Homo sapien
gaggtcacttccatgctccaggagg

SEQ ID NO: 665152 - DNA, 25 bp, Homo sapien
gtcacttccatgctccaggaggtgg

SEQ ID NO: 665153 - DNA, 25 bp, Homo sapien
cttccatgctccaggaggtggtctg

SEQ ID NO: 665154 - DNA, 25 bp, Homo sapien
gagagggactgaggtcacttccatg

SEQ ID NO: 665155 - DNA, 25 bp, Homo sapien
gggatgtagcgttccttggtgtcct

SEQ ID NO: 665156 - DNA, 25 bp, Homo sapien
tagcgttccttggtgtcctgccgct

SEQ ID NO: 665157 - DNA, 25 bp, Homo sapien
tcaccaccacgtaagggtctgcttt

SEQ ID NO: 665158 - DNA, 25 bp, Homo sapien
ctgcttggggatgtagcgttccttg

SEQ ID NO: 665159 - DNA, 25 bp, Homo sapien
tgaccttggattttgcaaaggtttc

SEQ ID NO: 665160 - DNA, 25 bp, Homo sapien
gttctgtgggatcccccgggagatc

SEQ ID NO: 665161 - DNA, 25 bp, Homo sapien
tacactctgaccaggagcttgatgg

SEQ ID NO: 665162 - DNA, 25 bp, Homo sapien
ttacaacatacactctgaccaggag

SEQ ID NO: 665163 - DNA, 25 bp, Homo sapien
tgatgggccggttctgtgggatccc

SEQ ID NO: 665164 - DNA, 25 bp, Homo sapien
tcaaagtggttaaattcttccttca

SEQ ID NO: 665165 - DNA, 25 bp, Homo sapien
ccctcggtacagaggaaacacattc

SEQ ID NO: 665166 - DNA, 25 bp, Homo sapien
ccttgccctcggtacagaggaaaca

SEQ ID NO: 665167 - DNA, 25 bp, Homo sapien
ttgaacttgcccacaaggtgtccag

SEQ ID NO: 665168 - DNA, 25 bp, Homo sapien
gcaacagcccgatgtccagaatcca

SEQ ID NO: 665169 - DNA, 25 bp, Homo sapien
aacagcccgatgtccagaatccaaa

SEQ ID NO: 665170 - DNA, 25 bp, Homo sapien
cagcccgatgtccagaatccaaagg

SEQ ID NO: 665171 - DNA, 25 bp, Homo sapien
aaaggcaaggacttcagcaacagcc

SEQ ID NO: 665172 - DNA, 25 bp, Homo sapien
ttggggacacagtgcctttgacttc

SEQ ID NO: 665173 - DNA, 25 bp, Homo sapien
ggggacacagtgcctttgacttcag

SEQ ID NO: 665174 - DNA, 25 bp, Homo sapien
tggggacacagtgcctttgacttca

SEQ ID NO: 665175 - DNA, 25 bp, Homo sapien
tttggggacacagtgcctttgactt

SEQ ID NO: 665176 - DNA, 25 bp, Homo sapien
accatagaaatgaggttgaccccat

SEQ ID NO: 665177 - DNA, 25 bp, Homo sapien
tggatctccccaaccatagaaatga

SEQ ID NO: 665178 - DNA, 25 bp, Homo sapien
ctggtcttggatctccccaaccata

SEQ ID NO: 665179 - DNA, 25 bp, Homo sapien
gatctccccaaccatagaaatgagg

SEQ ID NO: 665180 - DNA, 25 bp, Homo sapien
gcaaaaatgccccagtcagaaatat

SEQ ID NO: 665181 - DNA, 25 bp, Homo sapien
aacagcaaaaatgccccagtcagaa

SEQ ID NO: 665182 - DNA, 25 bp, Homo sapien
cagcaaaaatgccccagtcagaaat

SEQ ID NO: 665183 - DNA, 25 bp, Homo sapien
ggaaacagcaaaaatgccccagtca

SEQ ID NO: 665184 - DNA, 25 bp, Homo sapien
ccatttcatcttcatcaaagttgtg

SEQ ID NO: 665185 - DNA, 25 bp, Homo sapien
atccatttcatcttcatcaaagttg

SEQ ID NO: 665186 - DNA, 25 bp, Homo sapien
ctgaatctccaggatcatccatttc

SEQ ID NO: 665187 - DNA, 25 bp, Homo sapien
gaatctccaggatcatccatttcat

SEQ ID NO: 665188 - DNA, 25 bp, Homo sapien
cagtcgagctcctctggatctggga

SEQ ID NO: 665189 - DNA, 25 bp, Homo sapien
cagcgacgcatagtacttggacccc

SEQ ID NO: 665190 - DNA, 25 bp, Homo sapien
cccagtcgagctcctctggatctgg

SEQ ID NO: 665191 - DNA, 25 bp, Homo sapien
ggagctcctgcagcgacgcatagta

SEQ ID NO: 665192 - DNA, 25 bp, Homo sapien
ctagtgggagcttcttcagaggagg

SEQ ID NO: 665193 - DNA, 25 bp, Homo sapien
gcttcagccaagaagggatccaggg

SEQ ID NO: 665194 - DNA, 25 bp, Homo sapien
gccaagaagggatccagggacttct

SEQ ID NO: 665195 - DNA, 25 bp, Homo sapien
caagaagggatccagggacttctgt

SEQ ID NO: 665196 - DNA, 25 bp, Homo sapien
ccgcttcagccaagaagggatccag

SEQ ID NO: 665197 - DNA, 25 bp, Homo sapien
ttgggcatcatatcccctgtctcct

SEQ ID NO: 665198 - DNA, 25 bp, Homo sapien
ttgaggtcccttgggcatcatatcc

SEQ ID NO: 665199 - DNA, 25 bp, Homo sapien
ttcctcctcaggaggatcctcatga

SEQ ID NO: 665200 - DNA, 25 bp, Homo sapien
tcctcctcaggaggatcctcatgac

SEQ ID NO: 665201 - DNA, 25 bp, Homo sapien
tgaatcgcagcatgtgggggacaat

SEQ ID NO: 665202 - DNA, 25 bp, Homo sapien
cggcgctcaatcaccaagatgctga

SEQ ID NO: 665203 - DNA, 25 bp, Homo sapien
tgcaagtaaggctgctccggcaagt

SEQ ID NO: 665204 - DNA, 25 bp, Homo sapien
cacaaggactgtgtggccaaaggcc

SEQ ID NO: 665205 - DNA, 25 bp, Homo sapien
ggtggaagagaggagctgtgtcttt

SEQ ID NO: 665206 - DNA, 25 bp, Homo sapien
ggaagagaggagctgtgtctttgaa

SEQ ID NO: 665207 - DNA, 25 bp, Homo sapien
agagaggagctgtgtctttgaagac

SEQ ID NO: 665208 - DNA, 25 bp, Homo sapien
ctgggggtggaagagaggagctgtg

SEQ ID NO: 665209 - DNA, 25 bp, Homo sapien
tatggaattccatatctatcaatgg

SEQ ID NO: 665210 - DNA, 25 bp, Homo sapien
tccatatctatcaatggatcctaag

SEQ ID NO: 665211 - DNA, 25 bp, Homo sapien
tctatcaatggatcctaagggaaac

SEQ ID NO: 665212 - DNA, 25 bp, Homo sapien
caatggatcctaagggaaacaattt

SEQ ID NO: 665213 - DNA, 25 bp, Homo sapien
atgcacacgaccaagtcccctaaga

SEQ ID NO: 665214 - DNA, 25 bp, Homo sapien
tgcctgacaagctcagtgaaattgg

SEQ ID NO: 665215 - DNA, 25 bp, Homo sapien
ggctgctccacctcgagcagatgca

SEQ ID NO: 665216 - DNA, 25 bp, Homo sapien
gaaattggggctctcacggtagctg

SEQ ID NO: 665217 - DNA, 25 bp, Homo sapien
tgggcacacgttgggtggaagggac

SEQ ID NO: 665218 - DNA, 25 bp, Homo sapien
ggtggaagggacaggcgtccagagt

SEQ ID NO: 665219 - DNA, 25 bp, Homo sapien
gtggaagggacaggcgtccagagtg

SEQ ID NO: 665220 - DNA, 25 bp, Homo sapien
agcactgggcacacgttgggtggaa

SEQ ID NO: 665221 - DNA, 25 bp, Homo sapien
gaaacagtcagagggcgaagaggaa

SEQ ID NO: 665222 - DNA, 25 bp, Homo sapien
aagcagcttcgtgcaggaagggagc

SEQ ID NO: 665223 - DNA, 25 bp, Homo sapien
ccaaggctggattggtggaagggag

SEQ ID NO: 665224 - DNA, 25 bp, Homo sapien
ggtgaaatgtaaatgcacaggaacc

SEQ ID NO: 665225 - DNA, 25 bp, Homo sapien
aagtcggccactgtagtctagttca

SEQ ID NO: 665226 - DNA, 25 bp, Homo sapien
gtatgggtcctccatcagctttacc

SEQ ID NO: 665227 - DNA, 25 bp, Homo sapien
tgaaaggcggcaatgagctctccgg

SEQ ID NO: 665228 - DNA, 25 bp, Homo sapien
caactctgggcgttggtatgggtcc

SEQ ID NO: 665229 - DNA, 25 bp, Homo sapien
gatgatcactaatggaggctcctcc

SEQ ID NO: 665230 - DNA, 25 bp, Homo sapien
ttgatgatcactaatggaggctcct

SEQ ID NO: 665231 - DNA, 25 bp, Homo sapien
tacattgatgatcactaatggaggc

SEQ ID NO: 665232 - DNA, 25 bp, Homo sapien
ccctcctcccatccacgatcaactg

SEQ ID NO: 665233 - DNA, 25 bp, Homo sapien
tggtctgacactgggtagagatgag

SEQ ID NO: 665234 - DNA, 25 bp, Homo sapien
gcctggtacaagtgagcccggagtt

SEQ ID NO: 665235 - DNA, 25 bp, Homo sapien
actgtcatctgcagccaacacaccc

SEQ ID NO: 665236 - DNA, 25 bp, Homo sapien
agcccggagttggaagtagctaaag

SEQ ID NO: 665237 - DNA, 25 bp, Homo sapien
tcgggcagcaaatccgggggcagct

SEQ ID NO: 665238 - DNA, 25 bp, Homo sapien
aagagctccagcttggcacagacct

SEQ ID NO: 665239 - DNA, 25 bp, Homo sapien
aggcccagccgcaggaagagctcca

SEQ ID NO: 665240 - DNA, 25 bp, Homo sapien
gcaggccttggcttgcttgcccagg

SEQ ID NO: 665241 - DNA, 25 bp, Homo sapien
tgcccgctgagcatccagaccagca

SEQ ID NO: 665242 - DNA, 25 bp, Homo sapien
tgagcatccagaccagcacatcggg

SEQ ID NO: 665243 - DNA, 25 bp, Homo sapien
tcttcccacagtctcggccccgttc

SEQ ID NO: 665244 - DNA, 25 bp, Homo sapien
cggcgctgcccgctgagcatccaga

SEQ ID NO: 665245 - DNA, 25 bp, Homo sapien
tcttttgcacattgcgccgtctcag

SEQ ID NO: 665246 - DNA, 25 bp, Homo sapien
tcctcagccagaaagcgcagttttg

SEQ ID NO: 665247 - DNA, 25 bp, Homo sapien
gtcgcagtccttgcttagccaaaag

SEQ ID NO: 665248 - DNA, 25 bp, Homo sapien
tcaggccgcgtagaagtcgcagtcc

SEQ ID NO: 665249 - DNA, 25 bp, Homo sapien
gcgctcggcaccgtggcaaaactgt

SEQ ID NO: 665250 - DNA, 25 bp, Homo sapien
tcggcatcgatccagggcattgggc

SEQ ID NO: 665251 - DNA, 25 bp, Homo sapien
ttgggccgggtcatcgtcctgcgct

SEQ ID NO: 665252 - DNA, 25 bp, Homo sapien
tcctgcgctcggcaccgtggcaaaa

SEQ ID NO: 665253 - DNA, 25 bp, Homo sapien
gcctgcttgagctgtgcacaggcgc

SEQ ID NO: 665254 - DNA, 25 bp, Homo sapien
cctgcttgagctgtgcacaggcgcc

SEQ ID NO: 665255 - DNA, 25 bp, Homo sapien
ctgcttgagctgtgcacaggcgcca

SEQ ID NO: 665256 - DNA, 25 bp, Homo sapien
agccaccagtacttccagtgcctgc

SEQ ID NO: 665257 - DNA, 25 bp, Homo sapien
cctcccagcaactccacacatgcat

SEQ ID NO: 665258 - DNA, 25 bp, Homo sapien
tgcgcacgcagttgctgctctgcag

SEQ ID NO: 665259 - DNA, 25 bp, Homo sapien
tctcggccactttgcgcacgcagtt

SEQ ID NO: 665260 - DNA, 25 bp, Homo sapien
gcaggcgccaggtgtggtcctccca

SEQ ID NO: 665261 - DNA, 25 bp, Homo sapien
acagaggggcaagcagaagtatggc

SEQ ID NO: 665262 - DNA, 25 bp, Homo sapien
cttgcagtgacagaggggcaagcag

SEQ ID NO: 665263 - DNA, 25 bp, Homo sapien
tgacagaggggcaagcagaagtatg

SEQ ID NO: 665264 - DNA, 25 bp, Homo sapien
agtgacagaggggcaagcagaagta

SEQ ID NO: 665265 - DNA, 25 bp, Homo sapien
cccttccagccaccggcagcactca

SEQ ID NO: 665266 - DNA, 25 bp, Homo sapien
cccccttccagccaccggcagcact

SEQ ID NO: 665267 - DNA, 25 bp, Homo sapien
ccccttccagccaccggcagcactc

SEQ ID NO: 665268 - DNA, 25 bp, Homo sapien
ccttccagccaccggcagcactcac

SEQ ID NO: 665269 - DNA, 25 bp, Homo sapien
attgctcctccagacggcctgcgcg

SEQ ID NO: 665270 - DNA, 25 bp, Homo sapien
agcctccacggctgcaccctcagtt

SEQ ID NO: 665271 - DNA, 25 bp, Homo sapien
gctgagcatgggtccccagttcttc

SEQ ID NO: 665272 - DNA, 25 bp, Homo sapien
gccgtccatgggctcaggccgctga

SEQ ID NO: 665273 - DNA, 25 bp, Homo sapien
gaacctgccccttactgaaagtcaa

SEQ ID NO: 665274 - DNA, 25 bp, Homo sapien
agcaagggtcagtgggcgccaggct

SEQ ID NO: 665275 - DNA, 25 bp, Homo sapien
tgaaatggcactcaggggttcggct

SEQ ID NO: 665276 - DNA, 25 bp, Homo sapien
ccagggttctaaggtctgaaatggc

SEQ ID NO: 665277 - DNA, 25 bp, Homo sapien
gcacaccgaaaagcaggaaatcttc

SEQ ID NO: 665278 - DNA, 25 bp, Homo sapien
gaaatcttcacagggcgccaggaca

SEQ ID NO: 665279 - DNA, 25 bp, Homo sapien
ggcctcgaagagcacaccgaaaagc

SEQ ID NO: 665280 - DNA, 25 bp, Homo sapien
gtcgatcatggtggcctcgaagagc

SEQ ID NO: 665281 - DNA, 25 bp, Homo sapien
tccatggcacgggggatctcaggcc

SEQ ID NO: 665282 - DNA, 25 bp, Homo sapien
tcggcaccggggctggcgtccaagt

SEQ ID NO: 665283 - DNA, 25 bp, Homo sapien
acgggggatctcaggcccctcggca

SEQ ID NO: 665284 - DNA, 25 bp, Homo sapien
tggcacgggggatctcaggcccctc

SEQ ID NO: 665285 - DNA, 25 bp, Homo sapien
ctgcggaaccgcctttggggtctga

SEQ ID NO: 665286 - DNA, 25 bp, Homo sapien
ctttggggtctgatcccttctggct

SEQ ID NO: 665287 - DNA, 25 bp, Homo sapien
ccgggacaacgtggacccctgctgg

SEQ ID NO: 665288 - DNA, 25 bp, Homo sapien
ctttcgggtgagccgggacaacgtg

SEQ ID NO: 665289 - DNA, 25 bp, Homo sapien
gaaccaaatgccttggccaacgcct

SEQ ID NO: 665290 - DNA, 25 bp, Homo sapien
aggcggccgcggaaccaaatgcctt

SEQ ID NO: 665291 - DNA, 25 bp, Homo sapien
caacgccttcgttgagaccttgaag

SEQ ID NO: 665292 - DNA, 25 bp, Homo sapien
gagaccttgaagactatcccggagc

SEQ ID NO: 665293 - DNA, 25 bp, Homo sapien
acgcgccgctgtggaacacgacctg

SEQ ID NO: 665294 - DNA, 25 bp, Homo sapien
tctgaaacggaagaagttggccagc

SEQ ID NO: 665295 - DNA, 25 bp, Homo sapien
gggcgagtgctggtaaatctctgca

SEQ ID NO: 665296 - DNA, 25 bp, Homo sapien
gatctcctccaagtattcgggggtg

SEQ ID NO: 665297 - DNA, 25 bp, Homo sapien
ctcaggtccggcacgtgcgtagcga

SEQ ID NO: 665298 - DNA, 25 bp, Homo sapien
agctcagctgctcgttccattcggg

SEQ ID NO: 665299 - DNA, 25 bp, Homo sapien
tgcgtagcgagtgccgcgtcgacca

SEQ ID NO: 665300 - DNA, 25 bp, Homo sapien
cggcccggatgggagatccgcctca

SEQ ID NO: 665301 - DNA, 25 bp, Homo sapien
tcggcgcggtacaggcgcacgcgga

SEQ ID NO: 665302 - DNA, 25 bp, Homo sapien
ccaggaaagacacccgcacataggg

SEQ ID NO: 665303 - DNA, 25 bp, Homo sapien
tggtcgtgcagggcgcggaccaggc

SEQ ID NO: 665304 - DNA, 25 bp, Homo sapien
gcgcccatggcctctcggcgggcac

SEQ ID NO: 665305 - DNA, 25 bp, Homo sapien
gagaaactgggatctcggcccctcc

SEQ ID NO: 665306 - DNA, 25 bp, Homo sapien
ccacggccacccccggatccatgtc

SEQ ID NO: 665307 - DNA, 25 bp, Homo sapien
ggagaaactgggatctcggcccctc

SEQ ID NO: 665308 - DNA, 25 bp, Homo sapien
cacccccggatccatgtcctcctcc

SEQ ID NO: 665309 - DNA, 25 bp, Homo sapien
gcggaacccatctttggtagaactg

SEQ ID NO: 665310 - DNA, 25 bp, Homo sapien
tgtctcggggatcatgcagcggaac

SEQ ID NO: 665311 - DNA, 25 bp, Homo sapien
gcgccctcacggacaaggtgacctt

SEQ ID NO: 665312 - DNA, 25 bp, Homo sapien
tctcgatgtccgaacagtgccctgg

SEQ ID NO: 665313 - DNA, 25 bp, Homo sapien
aagagttcagcctccgccagagatg

SEQ ID NO: 665314 - DNA, 25 bp, Homo sapien
gagatggccctctccgaagtgagtg

SEQ ID NO: 665315 - DNA, 25 bp, Homo sapien
ctatcggagtgacggacaatggcca

SEQ ID NO: 665316 - DNA, 25 bp, Homo sapien
ggtcaatctctagggcccttgtccg

SEQ ID NO: 665317 - DNA, 25 bp, Homo sapien
gaaggtgcctatccgggtggccata

SEQ ID NO: 665318 - DNA, 25 bp, Homo sapien
cctgaaggtgcctatccgggtggcc

SEQ ID NO: 665319 - DNA, 25 bp, Homo sapien
ggtgcctatccgggtggccataaag

SEQ ID NO: 665320 - DNA, 25 bp, Homo sapien
gtgcctatccgggtggccataaagg

SEQ ID NO: 665321 - DNA, 25 bp, Homo sapien
aggtggtgttagtcctgcagctttc

SEQ ID NO: 665322 - DNA, 25 bp, Homo sapien
tctgaaggacactggtcacccctac

SEQ ID NO: 665323 - DNA, 25 bp, Homo sapien
gggaaggtggtgttagtcctgcagc

SEQ ID NO: 665324 - DNA, 25 bp, Homo sapien
cagctttctcatccccccttctctg

SEQ ID NO: 665325 - DNA, 25 bp, Homo sapien
agcagcaagtcttggagacgaagcc

SEQ ID NO: 665326 - DNA, 25 bp, Homo sapien
aagccgcgtgtcatgaaattcgaac

SEQ ID NO: 665327 - DNA, 25 bp, Homo sapien
tgtcatgaaattcgaacaagaagta

SEQ ID NO: 665328 - DNA, 25 bp, Homo sapien
tcttggagacgaagccgcgtgtcat

SEQ ID NO: 665329 - DNA, 25 bp, Homo sapien
tcccacgctgtgtggcggtcacacg

SEQ ID NO: 665330 - DNA, 25 bp, Homo sapien
gttaatgttgactcccaccagtttc

SEQ ID NO: 665331 - DNA, 25 bp, Homo sapien
ctcattgtagaaggggcaactggtc

SEQ ID NO: 665332 - DNA, 25 bp, Homo sapien
cacttgcacggccacataggggtta

SEQ ID NO: 665333 - DNA, 25 bp, Homo sapien
agaaggatgaggaaaggaagccaga

SEQ ID NO: 665334 - DNA, 25 bp, Homo sapien
ctgagaggtacagaaggatgaggaa

SEQ ID NO: 665335 - DNA, 25 bp, Homo sapien
agaggtacagaaggatgaggaaagg

SEQ ID NO: 665336 - DNA, 25 bp, Homo sapien
gaaggatgaggaaaggaagccagac

SEQ ID NO: 665337 - DNA, 25 bp, Homo sapien
agctctggacacctggaagggatcc

SEQ ID NO: 665338 - DNA, 25 bp, Homo sapien
gtcttgagctctggacacctggaag

SEQ ID NO: 665339 - DNA, 25 bp, Homo sapien
ctggaagtcttgagctctggacacc

SEQ ID NO: 665340 - DNA, 25 bp, Homo sapien
acctggaagggatccccatgggcca

SEQ ID NO: 665341 - DNA, 25 bp, Homo sapien
gcctagacttcgagctagcctgcgg

SEQ ID NO: 665342 - DNA, 25 bp, Homo sapien
ttcgagctagcctgcggcctagagc

SEQ ID NO: 665343 - DNA, 25 bp, Homo sapien
tctcttcatcgtcctgctggcctag

SEQ ID NO: 665344 - DNA, 25 bp, Homo sapien
cagaaagttccacgtcaggctcatc

SEQ ID NO: 665345 - DNA, 25 bp, Homo sapien
tgtcctggatgggtgccccaaagtc

SEQ ID NO: 665346 - DNA, 25 bp, Homo sapien
ctgtcctggatgggtgccccaaagt

SEQ ID NO: 665347 - DNA, 25 bp, Homo sapien
gctggtacttcaggtcaagctccac

SEQ ID NO: 665348 - DNA, 25 bp, Homo sapien
ggggctggtacttcaggtcaagctc

SEQ ID NO: 665349 - DNA, 25 bp, Homo sapien
tgtgcccagccgcaagttacctctt

SEQ ID NO: 665350 - DNA, 25 bp, Homo sapien
acaggattccaaaattgtctcattt

SEQ ID NO: 665351 - DNA, 25 bp, Homo sapien
ttattatgtaccttgcccaggttgg

SEQ ID NO: 665352 - DNA, 25 bp, Homo sapien
atcccttacggtggccttcactact

SEQ ID NO: 665353 - DNA, 25 bp, Homo sapien
ccttcaagtctaagttcaggtacta

SEQ ID NO: 665354 - DNA, 25 bp, Homo sapien
tcaggtactatttcctcagggaacc

SEQ ID NO: 665355 - DNA, 25 bp, Homo sapien
aaggcgctggacttttgcatatgcc

SEQ ID NO: 665356 - DNA, 25 bp, Homo sapien
ccaagtagatcatactcccctgtgg

SEQ ID NO: 665357 - DNA, 25 bp, Homo sapien
tagggcttcccgtagcaccaaatgc

SEQ ID NO: 665358 - DNA, 25 bp, Homo sapien
caaatgcccagcattctgtagctgc

SEQ ID NO: 665359 - DNA, 25 bp, Homo sapien
gacacttgaagattctcatccacta

SEQ ID NO: 665360 - DNA, 25 bp, Homo sapien
tgtagctgctgcagggagatcacca

SEQ ID NO: 665361 - DNA, 25 bp, Homo sapien
ctaaggctgaatacacggctgcagt

SEQ ID NO: 665362 - DNA, 25 bp, Homo sapien
ttgaccacctgcacagacagacact

SEQ ID NO: 665363 - DNA, 25 bp, Homo sapien
ccagccagtggagccccatagtggg

SEQ ID NO: 665364 - DNA, 25 bp, Homo sapien
aatacacggctgcagttgaccacct

SEQ ID NO: 665365 - DNA, 25 bp, Homo sapien
catgctgtgctgaccctaaactcca

SEQ ID NO: 665366 - DNA, 25 bp, Homo sapien
gctgtgctgaccctaaactccaatc

SEQ ID NO: 665367 - DNA, 25 bp, Homo sapien
gctgaccctaaactccaatccaaag

SEQ ID NO: 665368 - DNA, 25 bp, Homo sapien
acccatgctgtgctgaccctaaact

SEQ ID NO: 665369 - DNA, 25 bp, Homo sapien
atatctgcttctggaccacagtgaa

SEQ ID NO: 665370 - DNA, 25 bp, Homo sapien
ttctggaccacagtgaatttttctt

SEQ ID NO: 665371 - DNA, 25 bp, Homo sapien
ctcaccgatatctgcttctggacca

SEQ ID NO: 665372 - DNA, 25 bp, Homo sapien
tgcttctggaccacagtgaattttt

SEQ ID NO: 665373 - DNA, 25 bp, Homo sapien
gtgtcaagtccctcctggattcacc

SEQ ID NO: 665374 - DNA, 25 bp, Homo sapien
ctcctggattcacccttaaagaaag

SEQ ID NO: 665375 - DNA, 25 bp, Homo sapien
cacttgtcggtcgtgggtgccggtc

SEQ ID NO: 665376 - DNA, 25 bp, Homo sapien
tgagcttcacttgtcggtcgtgggt

SEQ ID NO: 665377 - DNA, 25 bp, Homo sapien
tgtcggtcgtgggtgccggtcagcc

SEQ ID NO: 665378 - DNA, 25 bp, Homo sapien
cttcacttgtcggtcgtgggtgccg

SEQ ID NO: 665379 - DNA, 25 bp, Homo sapien
gagctcatcacttaggttaataacc

SEQ ID NO: 665380 - DNA, 25 bp, Homo sapien
cacttttgtggactaagagctcatc

SEQ ID NO: 665381 - DNA, 25 bp, Homo sapien
tgctgagtgaagtcatgaatgtatc

SEQ ID NO: 665382 - DNA, 25 bp, Homo sapien
cagccaggccctttaattatataca

SEQ ID NO: 665383 - DNA, 25 bp, Homo sapien
ggctcatgtctgttgggagcccaag

SEQ ID NO: 665384 - DNA, 25 bp, Homo sapien
agaaaagaaagcggccgggcatgat

SEQ ID NO: 665385 - DNA, 25 bp, Homo sapien
taaaaaatgggtttaggctcagcac

SEQ ID NO: 665386 - DNA, 25 bp, Homo sapien
ccagcctaggctattaataaagcaa

SEQ ID NO: 665387 - DNA, 25 bp, Homo sapien
ctctgtgacgtcagcagccggccgg

SEQ ID NO: 665388 - DNA, 25 bp, Homo sapien
gctgccatggctacggctccaggtg

SEQ ID NO: 665389 - DNA, 25 bp, Homo sapien
gctccaggtgacgtcacggccagct

SEQ ID NO: 665390 - DNA, 25 bp, Homo sapien
agcccgcggagaccgaggctcctct

SEQ ID NO: 665391 - DNA, 25 bp, Homo sapien
gacagcaaagggctccggtcagcgg

SEQ ID NO: 665392 - DNA, 25 bp, Homo sapien
cagcaaagggctccggtcagcggag

SEQ ID NO: 665393 - DNA, 25 bp, Homo sapien
gcccggggcccgagctgcggtgagc

SEQ ID NO: 665394 - DNA, 25 bp, Homo sapien
ggggcccgagctgcggtgagcccgc

SEQ ID NO: 665395 - DNA, 25 bp, Homo sapien
gcagaaacaagtataaaagtatcaa

SEQ ID NO: 665396 - DNA, 25 bp, Homo sapien
ggtgggatcaagagcagcaaaagca

SEQ ID NO: 665397 - DNA, 25 bp, Homo sapien
aaagcagaaacaagtataaaagtat

SEQ ID NO: 665398 - DNA, 25 bp, Homo sapien
agcaaaagcagaaacaagtataaaa

SEQ ID NO: 665399 - DNA, 25 bp, Homo sapien
gagaagggttgggttgtggcccaga

SEQ ID NO: 665400 - DNA, 25 bp, Homo sapien
gacacaggattgaggacttgccaca

SEQ ID NO: 665401 - DNA, 25 bp, Homo sapien
tgggacacaggattgaggacttgcc

SEQ ID NO: 665402 - DNA, 25 bp, Homo sapien
gagtgagaagggttgggttgtggcc

SEQ ID NO: 665403 - DNA, 25 bp, Homo sapien
gggcctgtgcaggatccttggctga

SEQ ID NO: 665404 - DNA, 25 bp, Homo sapien
cctgtgcaggatccttggctgaggg

SEQ ID NO: 665405 - DNA, 25 bp, Homo sapien
ctgtgcaggatccttggctgagggt

SEQ ID NO: 665406 - DNA, 25 bp, Homo sapien
gggggcctgtgcaggatccttggct

SEQ ID NO: 665407 - DNA, 25 bp, Homo sapien
gggcacttctgcgagcacggtctgt

SEQ ID NO: 665408 - DNA, 25 bp, Homo sapien
tctgcgagcacggtctgtgccaatg

SEQ ID NO: 665409 - DNA, 25 bp, Homo sapien
gaccagttgtgtgggcacttctgcg

SEQ ID NO: 665410 - DNA, 25 bp, Homo sapien
agtatgagaccagttgtgtgggcac

SEQ ID NO: 665411 - DNA, 25 bp, Homo sapien
cccaaagtctgtatttcatgctcaa

SEQ ID NO: 665412 - DNA, 25 bp, Homo sapien
ggtgaaagggtaaactcccagatca

SEQ ID NO: 665413 - DNA, 25 bp, Homo sapien
gggcctcaaccctactcacatcagg

SEQ ID NO: 665414 - DNA, 25 bp, Homo sapien
gaacccaaccatatcccaggcttag

SEQ ID NO: 665415 - DNA, 25 bp, Homo sapien
ccggcggtagggtacaaactgcaca

SEQ ID NO: 665416 - DNA, 25 bp, Homo sapien
acatgggcaggttcgaggcacgcac

SEQ ID NO: 665417 - DNA, 25 bp, Homo sapien
aaactgcacaatgtcgcgggcagca

SEQ ID NO: 665418 - DNA, 25 bp, Homo sapien
cagcctgcccagaacgtgtatgcag

SEQ ID NO: 665419 - DNA, 25 bp, Homo sapien
gtggcttccacatccgtcacagcac

SEQ ID NO: 665420 - DNA, 25 bp, Homo sapien
cttccacatccgtcacagcaccatc

SEQ ID NO: 665421 - DNA, 25 bp, Homo sapien
ttccacatccgtcacagcaccatca

SEQ ID NO: 665422 - DNA, 25 bp, Homo sapien
gcttccacatccgtcacagcaccat

SEQ ID NO: 665423 - DNA, 25 bp, Homo sapien
ctgaagcagatcctcctcctaaacc

SEQ ID NO: 665424 - DNA, 25 bp, Homo sapien
tgaagcagatcctcctcctaaaccc

SEQ ID NO: 665425 - DNA, 25 bp, Homo sapien
cagccacacatccccacactcataa

SEQ ID NO: 665426 - DNA, 25 bp, Homo sapien
ctgcaaacaccccagccacacatcc

SEQ ID NO: 665427 - DNA, 25 bp, Homo sapien
gccacacatccccacactcataaga

SEQ ID NO: 665428 - DNA, 25 bp, Homo sapien
acacatccccacactcataagaagt

SEQ ID NO: 665429 - DNA, 25 bp, Homo sapien
aggagtttgtgaccaccccagccaa

SEQ ID NO: 665430 - DNA, 25 bp, Homo sapien
cttgttacaggccgggtgcgatggc

SEQ ID NO: 665431 - DNA, 25 bp, Homo sapien
gagtttgtgaccaccccagccaaca

SEQ ID NO: 665432 - DNA, 25 bp, Homo sapien
tgttacaggccgggtgcgatggctc

SEQ ID NO: 665433 - DNA, 25 bp, Homo sapien
cgaggcagtcccctgatgtgcagcc

SEQ ID NO: 665434 - DNA, 25 bp, Homo sapien
gaggcagtcccctgatgtgcagcct

SEQ ID NO: 665435 - DNA, 25 bp, Homo sapien
gtgcaaagttggtagggccatagag

SEQ ID NO: 665436 - DNA, 25 bp, Homo sapien
ttggtagggccatagaggcgaactt

SEQ ID NO: 665437 - DNA, 25 bp, Homo sapien
gcaaagttggtagggccatagaggc

SEQ ID NO: 665438 - DNA, 25 bp, Homo sapien
agttggtagggccatagaggcgaac

SEQ ID NO: 665439 - DNA, 25 bp, Homo sapien
gcaagaaataccgtaaaatcctgga

SEQ ID NO: 665440 - DNA, 25 bp, Homo sapien
tggacctctcaggactacaccagtc

SEQ ID NO: 665441 - DNA, 25 bp, Homo sapien
tgaattagcacccagatgagaggga

SEQ ID NO: 665442 - DNA, 25 bp, Homo sapien
taactgtctcctacacatgaggaaa

SEQ ID NO: 665443 - DNA, 25 bp, Homo sapien
aaatgactgattcaggcaaggatca

SEQ ID NO: 665444 - DNA, 25 bp, Homo sapien
taaaactagagagtatagccaggca

SEQ ID NO: 665445 - DNA, 25 bp, Homo sapien
gatgttaaaactagagagtatagcc

SEQ ID NO: 665446 - DNA, 25 bp, Homo sapien
aaactagagagtatagccaggcaca

SEQ ID NO: 665447 - DNA, 25 bp, Homo sapien
tggtagggccatagaagcaaacctg

SEQ ID NO: 665448 - DNA, 25 bp, Homo sapien
cctgacccctgagttccaagggact

SEQ ID NO: 665449 - DNA, 25 bp, Homo sapien
gagctcctatgactattcttgcaac

SEQ ID NO: 665450 - DNA, 25 bp, Homo sapien
tgaggcagggctattcactacagca

SEQ ID NO: 665451 - DNA, 25 bp, Homo sapien
taagtacctgttagcttctaggcaa

SEQ ID NO: 665452 - DNA, 25 bp, Homo sapien
accttggcctcgcaactgagtgcta

SEQ ID NO: 665453 - DNA, 25 bp, Homo sapien
tccagaggcctagctctaaaatcca

SEQ ID NO: 665454 - DNA, 25 bp, Homo sapien
cctggcctggcatgacgatttgatt

SEQ ID NO: 665455 - DNA, 25 bp, Homo sapien
cctgcctcagggtggatggggaaac

SEQ ID NO: 665456 - DNA, 25 bp, Homo sapien
aggcttgcccctctttgtgtggaca

SEQ ID NO: 665457 - DNA, 25 bp, Homo sapien
gcccctctttgtgtggacagacctg

SEQ ID NO: 665458 - DNA, 25 bp, Homo sapien
gcttgcccctctttgtgtggacaga

SEQ ID NO: 665459 - DNA, 25 bp, Homo sapien
ggcgtgtgccaagattcctatagga

SEQ ID NO: 665460 - DNA, 25 bp, Homo sapien
tgtctacgtgcctgcaggaatccaa

SEQ ID NO: 665461 - DNA, 25 bp, Homo sapien
tatggagtcctgagcacttgctgtc

SEQ ID NO: 665462 - DNA, 25 bp, Homo sapien
gctgagtgccaagtagcaagtaaat

SEQ ID NO: 665463 - DNA, 25 bp, Homo sapien
tccaaatgcagggaacagcttgtct

SEQ ID NO: 665464 - DNA, 25 bp, Homo sapien
ccaaatccaaatgcagggaacagct

SEQ ID NO: 665465 - DNA, 25 bp, Homo sapien
tgccagtcagggggaacctgggccc

SEQ ID NO: 665466 - DNA, 25 bp, Homo sapien
ctgccagtcagggggaacctgggcc

SEQ ID NO: 665467 - DNA, 25 bp, Homo sapien
tgaagcatctgcagggagcgggtat

SEQ ID NO: 665468 - DNA, 25 bp, Homo sapien
catctgcagggagcgggtatagccc

SEQ ID NO: 665469 - DNA, 25 bp, Homo sapien
gggagcgggtatagcccagagaagc

SEQ ID NO: 665470 - DNA, 25 bp, Homo sapien
cagtgaggggactgtaagctcagag

SEQ ID NO: 665471 - DNA, 25 bp, Homo sapien
acactccacagtgccatcaggtact

SEQ ID NO: 665472 - DNA, 25 bp, Homo sapien
ccctgttggactcaggtagtgtagg

SEQ ID NO: 665473 - DNA, 25 bp, Homo sapien
actcattgacccctgttggactcag

SEQ ID NO: 665474 - DNA, 25 bp, Homo sapien
atagtcctgaaccacgctgcccaca

SEQ ID NO: 665475 - DNA, 25 bp, Homo sapien
tgaagttgatctgacagcctcccat

SEQ ID NO: 665476 - DNA, 25 bp, Homo sapien
gtgaagttgatctgacagcctccca

SEQ ID NO: 665477 - DNA, 25 bp, Homo sapien
agtgaagttgatctgacagcctccc

SEQ ID NO: 665478 - DNA, 25 bp, Homo sapien
caaatcttgacacggatagttccag

SEQ ID NO: 665479 - DNA, 25 bp, Homo sapien
gctgcttctcagggtggatgcattc

SEQ ID NO: 665480 - DNA, 25 bp, Homo sapien
ccgacaaatcttgacacggatagtt

SEQ ID NO: 665481 - DNA, 25 bp, Homo sapien
tgacacggatagttccagagttctt

SEQ ID NO: 665482 - DNA, 25 bp, Homo sapien
tgtgacccgtcactgtcataatcgg

SEQ ID NO: 665483 - DNA, 25 bp, Homo sapien
ccaagctggtgtggaaggtaccgat

SEQ ID NO: 665484 - DNA, 25 bp, Homo sapien
cactgtcataatcggagcattgcac

SEQ ID NO: 665485 - DNA, 25 bp, Homo sapien
gaaggtaccgatgagatcatgtgac

SEQ ID NO: 665486 - DNA, 25 bp, Homo sapien
tgctgaacggggactgagaaacgct

SEQ ID NO: 665487 - DNA, 25 bp, Homo sapien
ttcccaccacagaaatgctgaacgg

SEQ ID NO: 665488 - DNA, 25 bp, Homo sapien
tcccaccacagaaatgctgaacggg

SEQ ID NO: 665489 - DNA, 25 bp, Homo sapien
tgagaaacgcttccatgtagggttc

SEQ ID NO: 665490 - DNA, 25 bp, Homo sapien
tctgtacaccaggtgccatttccca

SEQ ID NO: 665491 - DNA, 25 bp, Homo sapien
ctcagatctgtacaccaggtgccat

SEQ ID NO: 665492 - DNA, 25 bp, Homo sapien
ccatttcccatcaccctggcggaag

SEQ ID NO: 665493 - DNA, 25 bp, Homo sapien
gatctgtacaccaggtgccatttcc

SEQ ID NO: 665494 - DNA, 25 bp, Homo sapien
cttatctaggtttctggcctctacc

SEQ ID NO: 665495 - DNA, 25 bp, Homo sapien
tatctaggtttctggcctctacctc

SEQ ID NO: 665496 - DNA, 25 bp, Homo sapien
tcttatctaggtttctggcctctac

SEQ ID NO: 665497 - DNA, 25 bp, Homo sapien
cttcttatctaggtttctggcctct

SEQ ID NO: 665498 - DNA, 25 bp, Homo sapien
tactacacgattgtcctttaattcc

SEQ ID NO: 665499 - DNA, 25 bp, Homo sapien
ttactacacgattgtcctttaattc

SEQ ID NO: 665500 - DNA, 25 bp, Homo sapien
tcctcaacccttgctgggttcctta

SEQ ID NO: 665501 - DNA, 25 bp, Homo sapien
tacatcacctcatgaattcattgat

SEQ ID NO: 665502 - DNA, 25 bp, Homo sapien
ttcattgatgttaagtccctcctca

SEQ ID NO: 665503 - DNA, 25 bp, Homo sapien
taggggagactacatcacctcatga

SEQ ID NO: 665504 - DNA, 25 bp, Homo sapien
ggagagtcagtacctggctggacac

SEQ ID NO: 665505 - DNA, 25 bp, Homo sapien
cagcatcaaggggagagtcagtacc

SEQ ID NO: 665506 - DNA, 25 bp, Homo sapien
gagtcagtacctggctggacacaat

SEQ ID NO: 665507 - DNA, 25 bp, Homo sapien
tcaaggggagagtcagtacctggct

SEQ ID NO: 665508 - DNA, 25 bp, Homo sapien
gactgtctcaaagcggtactcaagc

SEQ ID NO: 665509 - DNA, 25 bp, Homo sapien
gagtcttggagaactcagggcttga

SEQ ID NO: 665510 - DNA, 25 bp, Homo sapien
aaagcgtagcttctggactgtctca

SEQ ID NO: 665511 - DNA, 25 bp, Homo sapien
tcagctctggcgtcttgttgtctat

SEQ ID NO: 665512 - DNA, 25 bp, Homo sapien
caggaaatggacagctgaaccaagg

SEQ ID NO: 665513 - DNA, 25 bp, Homo sapien
tccttgtcaatgagatggtcacagg

SEQ ID NO: 665514 - DNA, 25 bp, Homo sapien
cccacatcctgtaaaaggacgcaga

SEQ ID NO: 665515 - DNA, 25 bp, Homo sapien
tgggtcagacttggagccgatgtcc

SEQ ID NO: 665516 - DNA, 25 bp, Homo sapien
tggctgttgcccctagaatgtggcc

SEQ ID NO: 665517 - DNA, 25 bp, Homo sapien
tcccaaagctataccctgagatgcc

SEQ ID NO: 665518 - DNA, 25 bp, Homo sapien
tgagaactcatctgatacctggaag

SEQ ID NO: 665519 - DNA, 25 bp, Homo sapien
gcagaatacatgctccctcaaggga

SEQ ID NO: 665520 - DNA, 25 bp, Homo sapien
tggaactgctatgaccacgtgttag

SEQ ID NO: 665521 - DNA, 25 bp, Homo sapien
taatctcactaaacttcaggttcct

SEQ ID NO: 665522 - DNA, 25 bp, Homo sapien
ttcctagccacaataatgacatact

SEQ ID NO: 665523 - DNA, 25 bp, Homo sapien
tgcttagtacagaggctggaactgc

SEQ ID NO: 665524 - DNA, 25 bp, Homo sapien
tccccagcagctcagaatccatgac

SEQ ID NO: 665525 - DNA, 25 bp, Homo sapien
cactatagttggagttggcaaactg

SEQ ID NO: 665526 - DNA, 25 bp, Homo sapien
cctccacactatagttggagttggc

SEQ ID NO: 665527 - DNA, 25 bp, Homo sapien
taagggccctccacactatagttgg

SEQ ID NO: 665528 - DNA, 25 bp, Homo sapien
ggtaatgaaccatcaagtagcccat

SEQ ID NO: 665529 - DNA, 25 bp, Homo sapien
tgaactactcccacccattaggagg

SEQ ID NO: 665530 - DNA, 25 bp, Homo sapien
gaagcacaaactctaagtgacaagg

SEQ ID NO: 665531 - DNA, 25 bp, Homo sapien
tactcacgctagtctcaattcctgg

SEQ ID NO: 665532 - DNA, 25 bp, Homo sapien
aaagagcgcttcacaaattgcgtgt

SEQ ID NO: 665533 - DNA, 25 bp, Homo sapien
aaaaaagagcgcttcacaaattgcg

SEQ ID NO: 665534 - DNA, 25 bp, Homo sapien
ctaatcttctctgtttaattcgttt

SEQ ID NO: 665535 - DNA, 25 bp, Homo sapien
tttaattcgtttttaatatgtgctg

SEQ ID NO: 665536 - DNA, 25 bp, Homo sapien
gcagttaaagcattaaaagcatcag

SEQ ID NO: 665537 - DNA, 25 bp, Homo sapien
cagttaaagcattaaaagcatcagc

SEQ ID NO: 665538 - DNA, 25 bp, Homo sapien
agttaaagcattaaaagcatcagcc

SEQ ID NO: 665539 - DNA, 25 bp, Homo sapien
tgcagttaaagcattaaaagcatca

SEQ ID NO: 665540 - DNA, 25 bp, Homo sapien
gactggccttaactacactgaatat

SEQ ID NO: 665541 - DNA, 25 bp, Homo sapien
cttggagtacaaagctaggaactac

SEQ ID NO: 665542 - DNA, 25 bp, Homo sapien
tgagattttacacttggcccatacc

SEQ ID NO: 665543 - DNA, 25 bp, Homo sapien
taaaaactgaaactccaatgcccag

SEQ ID NO: 665544 - DNA, 25 bp, Homo sapien
tacagtccacaacgagcactgttgt

SEQ ID NO: 665545 - DNA, 25 bp, Homo sapien
cgagcactgttgtgattcatataaa

SEQ ID NO: 665546 - DNA, 25 bp, Homo sapien
gcatttaattacagtccacaacgag

SEQ ID NO: 665547 - DNA, 25 bp, Homo sapien
ggcaaagcatttaattacagtccac

SEQ ID NO: 665548 - DNA, 25 bp, Homo sapien
tatctgtggctgaaatacaactctc

SEQ ID NO: 665549 - DNA, 25 bp, Homo sapien
caggctcctgatcgaacaactatgc

SEQ ID NO: 665550 - DNA, 25 bp, Homo sapien
gcggctgcacttgtactctgtatga

SEQ ID NO: 665551 - DNA, 25 bp, Homo sapien
gaaagtaaccataactagagccctg

SEQ ID NO: 665552 - DNA, 25 bp, Homo sapien
ggtttctggttttcgataccatcca

SEQ ID NO: 665553 - DNA, 25 bp, Homo sapien
cactttcttatgaatgggcccctct

SEQ ID NO: 665554 - DNA, 25 bp, Homo sapien
tacaattagtccatatgaaaaggac

SEQ ID NO: 665555 - DNA, 25 bp, Homo sapien
aatttcacataatcgggacaggagg

SEQ ID NO: 665556 - DNA, 25 bp, Homo sapien
aatcaaagtttgaggttatagcaca

SEQ ID NO: 665557 - DNA, 25 bp, Homo sapien
gcaggactgtctatacagcaaggac

SEQ ID NO: 665558 - DNA, 25 bp, Homo sapien
ggcaaaagtcttattccacacagtt

SEQ ID NO: 665559 - DNA, 25 bp, Homo sapien
ttatagcacaaacgaagtgtggact

SEQ ID NO: 665560 - DNA, 25 bp, Homo sapien
ccaaattctgagagtagccaacttc

SEQ ID NO: 665561 - DNA, 25 bp, Homo sapien
gctggcaagagcaccctcaatgagt

SEQ ID NO: 665562 - DNA, 25 bp, Homo sapien
tggaaatactaggaaaacaatctgg

SEQ ID NO: 665563 - DNA, 25 bp, Homo sapien
ccaatgctctatgttatggaaacca

SEQ ID NO: 665564 - DNA, 25 bp, Homo sapien
gggattacttgatagccataaaaga

SEQ ID NO: 665565 - DNA, 25 bp, Homo sapien
tctcatcaatagacacagtaaaggg

SEQ ID NO: 665566 - DNA, 25 bp, Homo sapien
acctgtgggcatacctttttcattg

SEQ ID NO: 665567 - DNA, 25 bp, Homo sapien
ccatggcttcacctgtgggcatacc

SEQ ID NO: 665568 - DNA, 25 bp, Homo sapien
gaccaccaatatggattgggccagg

SEQ ID NO: 665569 - DNA, 25 bp, Homo sapien
cagggggaccaccaatatggattgg

SEQ ID NO: 665570 - DNA, 25 bp, Homo sapien
ccggggccaggcccaaaagctggtg

SEQ ID NO: 665571 - DNA, 25 bp, Homo sapien
ggggaccaccaatatggattgggcc

SEQ ID NO: 665572 - DNA, 25 bp, Homo sapien
aggggcacttccaagaccaggaggg

SEQ ID NO: 665573 - DNA, 25 bp, Homo sapien
gtcctagaccaggcaaaccactgtt

SEQ ID NO: 665574 - DNA, 25 bp, Homo sapien
tcctagaccaggcaaaccactgttt

SEQ ID NO: 665575 - DNA, 25 bp, Homo sapien
cctagaccaggcaaaccactgtttc

SEQ ID NO: 665576 - DNA, 25 bp, Homo sapien
ctagaccaggcaaaccactgtttcc

SEQ ID NO: 665577 - DNA, 25 bp, Homo sapien
tggcccaaaggcatttgatccacca

SEQ ID NO: 665578 - DNA, 25 bp, Homo sapien
ggcctagcatcaccaaaggccccgc

SEQ ID NO: 665579 - DNA, 25 bp, Homo sapien
caaaggcatttgatccaccaaaatt

SEQ ID NO: 665580 - DNA, 25 bp, Homo sapien
ttggtggcccaaaggcatttgatcc

SEQ ID NO: 665581 - DNA, 25 bp, Homo sapien
aaatggaggcccattattggcttcc

SEQ ID NO: 665582 - DNA, 25 bp, Homo sapien
gttaaatggaggcccattattggct

SEQ ID NO: 665583 - DNA, 25 bp, Homo sapien
aaagttaaatggaggcccattattg

SEQ ID NO: 665584 - DNA, 25 bp, Homo sapien
taaatggaggcccattattggcttc

SEQ ID NO: 665585 - DNA, 25 bp, Homo sapien
tgcactaggtattcctgcactgggc

SEQ ID NO: 665586 - DNA, 25 bp, Homo sapien
actgggcattcccgcaccaggcagt

SEQ ID NO: 665587 - DNA, 25 bp, Homo sapien
taggtattcctgcactgggcattcc

SEQ ID NO: 665588 - DNA, 25 bp, Homo sapien
tattcctgcactgggcattcccgca

SEQ ID NO: 665589 - DNA, 25 bp, Homo sapien
tgcaccgggaagtcctgcactgggc

SEQ ID NO: 665590 - DNA, 25 bp, Homo sapien
ggcctgcaccgggaagtcctgcact

SEQ ID NO: 665591 - DNA, 25 bp, Homo sapien
acaccgggcagtcccgcattgggca

SEQ ID NO: 665592 - DNA, 25 bp, Homo sapien
cattgggcattcctggaactgcagg

SEQ ID NO: 665593 - DNA, 25 bp, Homo sapien
ggcacaggcatctttaatccctttt

SEQ ID NO: 665594 - DNA, 25 bp, Homo sapien
ctggcacaggcatctttaatccctt

SEQ ID NO: 665595 - DNA, 25 bp, Homo sapien
tggcacaggcatctttaatcccttt

SEQ ID NO: 665596 - DNA, 25 bp, Homo sapien
gcacaggcatctttaatcccttttt

SEQ ID NO: 665597 - DNA, 25 bp, Homo sapien
tttacggtgtaagcgttcagactta

SEQ ID NO: 665598 - DNA, 25 bp, Homo sapien
ctacatgaacaaaagcttctctccc

SEQ ID NO: 665599 - DNA, 25 bp, Homo sapien
gaacaaaagcttctctcccattaag

SEQ ID NO: 665600 - DNA, 25 bp, Homo sapien
caaaagcttctctcccattaagttt

SEQ ID NO: 665601 - DNA, 25 bp, Homo sapien
tcaaattcataggtgctccagagcc

SEQ ID NO: 665602 - DNA, 25 bp, Homo sapien
cattccagcaggtagaggtgccaca

SEQ ID NO: 665603 - DNA, 25 bp, Homo sapien
cagactttggcagagttgacatccc

SEQ ID NO: 665604 - DNA, 25 bp, Homo sapien
cactgggcgattttgacctgggaag

SEQ ID NO: 665605 - DNA, 25 bp, Homo sapien
caatccagagaagaagtggcgaatg

SEQ ID NO: 665606 - DNA, 25 bp, Homo sapien
ccagagaagaagtggcgaatgtcca

SEQ ID NO: 665607 - DNA, 25 bp, Homo sapien
ggagaccttgcaaacggatgaccac

SEQ ID NO: 665608 - DNA, 25 bp, Homo sapien
aatgtccatggtccccgccacaatt

SEQ ID NO: 665609 - DNA, 25 bp, Homo sapien
ccttaacaagaagtagaggccaagt

SEQ ID NO: 665610 - DNA, 25 bp, Homo sapien
cttaacaagaagtagaggccaagtc

SEQ ID NO: 665611 - DNA, 25 bp, Homo sapien
tccttaacaagaagtagaggccaag

SEQ ID NO: 665612 - DNA, 25 bp, Homo sapien
ttaacaagaagtagaggccaagtca

SEQ ID NO: 665613 - DNA, 25 bp, Homo sapien
tggcctagcctaactaagtctaagg

SEQ ID NO: 665614 - DNA, 25 bp, Homo sapien
cgcgatctaggctcattaggctcat

SEQ ID NO: 665615 - DNA, 25 bp, Homo sapien
tggttttaccacaaaaagctatgca

SEQ ID NO: 665616 - DNA, 25 bp, Homo sapien
tcaacacaatcaaaagtctagagca

SEQ ID NO: 665617 - DNA, 25 bp, Homo sapien
ggcacagagatgtagttataacctc

SEQ ID NO: 665618 - DNA, 25 bp, Homo sapien
taggcgtgtttttactgcagtcccc

SEQ ID NO: 665619 - DNA, 25 bp, Homo sapien
gacaagaaatcctccgtactcggga

SEQ ID NO: 665620 - DNA, 25 bp, Homo sapien
gggagtcctcgctatggcctcgtcc

SEQ ID NO: 665621 - DNA, 25 bp, Homo sapien
cggggaaagctgcgcggcaccagaa

SEQ ID NO: 665622 - DNA, 25 bp, Homo sapien
aagctgcgcggcaccagaacccaga

SEQ ID NO: 665623 - DNA, 25 bp, Homo sapien
gcaccagaacccagaccccgaatta

SEQ ID NO: 665624 - DNA, 25 bp, Homo sapien
gggaaagctgcgcggcaccagaacc

SEQ ID NO: 665625 - DNA, 25 bp, Homo sapien
cccccgcgcgagtgcctccgccccg

SEQ ID NO: 665626 - DNA, 25 bp, Homo sapien
ccccgcgcgagtgcctccgccccgc

SEQ ID NO: 665627 - DNA, 25 bp, Homo sapien
gcttcacaaaatggccgtcggcccg

SEQ ID NO: 665628 - DNA, 25 bp, Homo sapien
ctccttcgccgcttcacaaaatggc

SEQ ID NO: 665629 - DNA, 25 bp, Homo sapien
tcagcggctccgcgttccagaaggg

SEQ ID NO: 665630 - DNA, 25 bp, Homo sapien
cgccgcttcacaaaatggccgtcgg

SEQ ID NO: 665631 - DNA, 25 bp, Homo sapien
catctctccactaaaatttaaaact

SEQ ID NO: 665632 - DNA, 25 bp, Homo sapien
aaatttaaaactcagtgagggcagg

SEQ ID NO: 665633 - DNA, 25 bp, Homo sapien
ttgtttaattattttccatctctcc

SEQ ID NO: 665634 - DNA, 25 bp, Homo sapien
tttgtttaattattttccatctctc

SEQ ID NO: 665635 - DNA, 25 bp, Homo sapien
atacccagaacaaatctggctcctg

SEQ ID NO: 665636 - DNA, 25 bp, Homo sapien
ttctccacaattcccaagtacagct

SEQ ID NO: 665637 - DNA, 25 bp, Homo sapien
aatcagatggagtggcggtcttctc

SEQ ID NO: 665638 - DNA, 25 bp, Homo sapien
taaccagtgtattcctaatacccag

SEQ ID NO: 665639 - DNA, 25 bp, Homo sapien
gagcatccactaggtgtaacaaggt

SEQ ID NO: 665640 - DNA, 25 bp, Homo sapien
gctgttaaagaagctggtccagccg

SEQ ID NO: 665641 - DNA, 25 bp, Homo sapien
taacaaggtgtctggttgtgcacgg

SEQ ID NO: 665642 - DNA, 25 bp, Homo sapien
tgtagagcatcatggtccctgacca

SEQ ID NO: 665643 - DNA, 25 bp, Homo sapien
gctcttgaggtcaatgccatcctga

SEQ ID NO: 665644 - DNA, 25 bp, Homo sapien
cttgaggtcaatgccatcctgaacc

SEQ ID NO: 665645 - DNA, 25 bp, Homo sapien
aggtcaatgccatcctgaaccatct

SEQ ID NO: 665646 - DNA, 25 bp, Homo sapien
ttgatgctcttgaggtcaatgccat

SEQ ID NO: 665647 - DNA, 25 bp, Homo sapien
ctaaatcctaagatccaagtacgct

SEQ ID NO: 665648 - DNA, 25 bp, Homo sapien
cctaagatccaagtacgcttgaact

SEQ ID NO: 665649 - DNA, 25 bp, Homo sapien
gatccaagtacgcttgaactttggt

SEQ ID NO: 665650 - DNA, 25 bp, Homo sapien
tacgcttgaactttggttttggcag

SEQ ID NO: 665651 - DNA, 25 bp, Homo sapien
ttcctcctctgtagtgaagcggcca

SEQ ID NO: 665652 - DNA, 25 bp, Homo sapien
ctctgtagtgaagcggccaattcca

SEQ ID NO: 665653 - DNA, 25 bp, Homo sapien
gaagacgcttcacatgctgaatgca

SEQ ID NO: 665654 - DNA, 25 bp, Homo sapien
tcatttctcgaagacgcttcacatg

SEQ ID NO: 665655 - DNA, 25 bp, Homo sapien
tgatagaagagtgcgctaaatcctc

SEQ ID NO: 665656 - DNA, 25 bp, Homo sapien
tgcgctaaatcctcatcagtgccaa

SEQ ID NO: 665657 - DNA, 25 bp, Homo sapien
taagcacataagagggctccaggga

SEQ ID NO: 665658 - DNA, 25 bp, Homo sapien
tcatcagtgccaattgctctaagca

SEQ ID NO: 665659 - DNA, 25 bp, Homo sapien
gataccacatgggtttgacaagaag

SEQ ID NO: 665660 - DNA, 25 bp, Homo sapien
gatgtgtgaacctagctcctctggc

SEQ ID NO: 665661 - DNA, 25 bp, Homo sapien
caaagtgtgacagagcatgatacca

SEQ ID NO: 665662 - DNA, 25 bp, Homo sapien
caagagaccttctaatctggcagaa

SEQ ID NO: 665663 - DNA, 25 bp, Homo sapien
atcccctgggacgataaaaggcaca

SEQ ID NO: 665664 - DNA, 25 bp, Homo sapien
tccacactgggaagtttaatagcct

SEQ ID NO: 665665 - DNA, 25 bp, Homo sapien
gagcatcttcaattctagaggcctg

SEQ ID NO: 665666 - DNA, 25 bp, Homo sapien
tgtatgactcttctaagtggccctg

SEQ ID NO: 665667 - DNA, 25 bp, Homo sapien
ctccctgaggataaggcaacgtcct

SEQ ID NO: 665668 - DNA, 25 bp, Homo sapien
ccatcagcagactttccccttccac

SEQ ID NO: 665669 - DNA, 25 bp, Homo sapien
ccttccacatatgcaaaggagaggt

SEQ ID NO: 665670 - DNA, 25 bp, Homo sapien
gataaggcaacgtccttcagtgcca

SEQ ID NO: 665671 - DNA, 25 bp, Homo sapien
accacatctggaaggctcttcatta

SEQ ID NO: 665672 - DNA, 25 bp, Homo sapien
gggataatggtgcttagggtcccca

SEQ ID NO: 665673 - DNA, 25 bp, Homo sapien
caactttgagattcgcttgtggtca

SEQ ID NO: 665674 - DNA, 25 bp, Homo sapien
cattatattctgtatcagccgctct

SEQ ID NO: 665675 - DNA, 25 bp, Homo sapien
ccattaaccagctcagaaagacagt

SEQ ID NO: 665676 - DNA, 25 bp, Homo sapien
gaagcctctaaataggagacccagc

SEQ ID NO: 665677 - DNA, 25 bp, Homo sapien
tgataactactaaaaggccatgggt

SEQ ID NO: 665678 - DNA, 25 bp, Homo sapien
caaaaggcgcttgataactggacac

SEQ ID NO: 665679 - DNA, 25 bp, Homo sapien
cttgctgtgccacctcacacgcagc

SEQ ID NO: 665680 - DNA, 25 bp, Homo sapien
tgctgtgccacctcacacgcagccc

SEQ ID NO: 665681 - DNA, 25 bp, Homo sapien
ttgctgtgccacctcacacgcagcc

SEQ ID NO: 665682 - DNA, 25 bp, Homo sapien
ggccggcgacggatgtagatggcac

SEQ ID NO: 665683 - DNA, 25 bp, Homo sapien
cccagaccgcataccccgctcctgc

SEQ ID NO: 665684 - DNA, 25 bp, Homo sapien
gcgacggatgtagatggcaccaacc

SEQ ID NO: 665685 - DNA, 25 bp, Homo sapien
cggcgacggatgtagatggcaccaa

SEQ ID NO: 665686 - DNA, 25 bp, Homo sapien
gaagaagcttgttctgaactgacac

SEQ ID NO: 665687 - DNA, 25 bp, Homo sapien
ggtcaaatagattatggcatgtcca

SEQ ID NO: 665688 - DNA, 25 bp, Homo sapien
aatactgggaacaacttagatgtcc

SEQ ID NO: 665689 - DNA, 25 bp, Homo sapien
aatggtttaaagtagctccctatgc

SEQ ID NO: 665690 - DNA, 25 bp, Homo sapien
cactaatgctcatgagatcaatttt

SEQ ID NO: 665691 - DNA, 25 bp, Homo sapien
cattgacatcaagtgggatttttcc

SEQ ID NO: 665692 - DNA, 25 bp, Homo sapien
cctgggctgcatcagtatggaaata

SEQ ID NO: 665693 - DNA, 25 bp, Homo sapien
ctaatgctcatgagatcaattttca

SEQ ID NO: 665694 - DNA, 25 bp, Homo sapien
tctggctggatagcagcctctagtt

SEQ ID NO: 665695 - DNA, 25 bp, Homo sapien
caggctagtatctggctggatagca

SEQ ID NO: 665696 - DNA, 25 bp, Homo sapien
atgactgacaccaggctagtatctg

SEQ ID NO: 665697 - DNA, 25 bp, Homo sapien
ctgacaccaggctagtatctggctg

SEQ ID NO: 665698 - DNA, 25 bp, Homo sapien
agaaatgcttaaatccaggttgcag

SEQ ID NO: 665699 - DNA, 25 bp, Homo sapien
ctttaggtcaatgatcccactcttc

SEQ ID NO: 665700 - DNA, 25 bp, Homo sapien
gatcaagtgctttttccgtgacctg

SEQ ID NO: 665701 - DNA, 25 bp, Homo sapien
ccgtgacctgtagaatcgggccacc

SEQ ID NO: 665702 - DNA, 25 bp, Homo sapien
tccagtgaacggcaggagtccaaga

SEQ ID NO: 665703 - DNA, 25 bp, Homo sapien
gaatattaaaccatataggacaaaa

SEQ ID NO: 665704 - DNA, 25 bp, Homo sapien
aatattaaaccatataggacaaaat

SEQ ID NO: 665705 - DNA, 25 bp, Homo sapien
atattaaaccatataggacaaaatt

SEQ ID NO: 665706 - DNA, 25 bp, Homo sapien
tattaaaccatataggacaaaatta

SEQ ID NO: 665707 - DNA, 25 bp, Homo sapien
agtatttacatcagtaagtaaaaat

SEQ ID NO: 665708 - DNA, 25 bp, Homo sapien
tgttaacatgatcaggcagagtgct

SEQ ID NO: 665709 - DNA, 25 bp, Homo sapien
gagtgctgatgaccctgaagcccgt

SEQ ID NO: 665710 - DNA, 25 bp, Homo sapien
caaagatcttctatgtacccaggac

SEQ ID NO: 665711 - DNA, 25 bp, Homo sapien
cagagttcaaagtacagcaagccac

SEQ ID NO: 665712 - DNA, 25 bp, Homo sapien
tggattcagtagcaccactagtaaa

SEQ ID NO: 665713 - DNA, 25 bp, Homo sapien
tctcacgaggatcagctccaatcag

SEQ ID NO: 665714 - DNA, 25 bp, Homo sapien
caccactagtaaaaatgatctcacg

SEQ ID NO: 665715 - DNA, 25 bp, Homo sapien
tcagctccaatcagagatgctactt

SEQ ID NO: 665716 - DNA, 25 bp, Homo sapien
tgcctgcagtcaaactccaaggctg

SEQ ID NO: 665717 - DNA, 25 bp, Homo sapien
tatgggaaccaatcaaatgcctgca

SEQ ID NO: 665718 - DNA, 25 bp, Homo sapien
taatccacccagtaaccctacagag

SEQ ID NO: 665719 - DNA, 25 bp, Homo sapien
ttagaacctcctagactcctgtgta

SEQ ID NO: 665720 - DNA, 25 bp, Homo sapien
tcccatagtagttgattaggtaagg

SEQ ID NO: 665721 - DNA, 25 bp, Homo sapien
aagggagcatggcatcaagcacccg

SEQ ID NO: 665722 - DNA, 25 bp, Homo sapien
acgagcacgttccatggctgcctca

SEQ ID NO: 665723 - DNA, 25 bp, Homo sapien
ctgacgagcacgttccatggctgcc

SEQ ID NO: 665724 - DNA, 25 bp, Homo sapien
gaggagttgtagcttgcacatccat

SEQ ID NO: 665725 - DNA, 25 bp, Homo sapien
agaggagttgtagcttgcacatcca

SEQ ID NO: 665726 - DNA, 25 bp, Homo sapien
cagaggagttgtagcttgcacatcc

SEQ ID NO: 665727 - DNA, 25 bp, Homo sapien
tggccccacctccggggcagcggct

SEQ ID NO: 665728 - DNA, 25 bp, Homo sapien
actggccccacctccggggcagcgg

SEQ ID NO: 665729 - DNA, 25 bp, Homo sapien
tcgcagcactggccccacctccggg

SEQ ID NO: 665730 - DNA, 25 bp, Homo sapien
cagcactggccccacctccggggca

SEQ ID NO: 665731 - DNA, 25 bp, Homo sapien
tgcgggaaccgcagactgaggagca

SEQ ID NO: 665732 - DNA, 25 bp, Homo sapien
aaccgcagactgaggagcacggtct

SEQ ID NO: 665733 - DNA, 25 bp, Homo sapien
gcagactgaggagcacggtctccaa

SEQ ID NO: 665734 - DNA, 25 bp, Homo sapien
ctgcgggaaccgcagactgaggagc

SEQ ID NO: 665735 - DNA, 25 bp, Homo sapien
aggaaggctctaaagggcaaagacg

SEQ ID NO: 665736 - DNA, 25 bp, Homo sapien
caaatggtatcgtaggaaggaaggc

SEQ ID NO: 665737 - DNA, 25 bp, Homo sapien
tgacacgctgtaaaaggaggtaagg

SEQ ID NO: 665738 - DNA, 25 bp, Homo sapien
ttagaaggaacgtggagccagagta

SEQ ID NO: 665739 - DNA, 25 bp, Homo sapien
cgaaggtaacggtctgcacgggagc

SEQ ID NO: 665740 - DNA, 25 bp, Homo sapien
aaggacgcgcctccacggctctggg

SEQ ID NO: 665741 - DNA, 25 bp, Homo sapien
gagcggtctgaaggacgcgcctcca

SEQ ID NO: 665742 - DNA, 25 bp, Homo sapien
tggccaggagcggtctgaaggacgc

SEQ ID NO: 665743 - DNA, 25 bp, Homo sapien
atattcagttgcgtcgccgcgcgga

SEQ ID NO: 665744 - DNA, 25 bp, Homo sapien
aggaaggctccggaatattcagttg

SEQ ID NO: 665745 - DNA, 25 bp, Homo sapien
tccggaatattcagttgcgtcgccg

SEQ ID NO: 665746 - DNA, 25 bp, Homo sapien
cccgcctaagaaagtttgagggatg

SEQ ID NO: 665747 - DNA, 25 bp, Homo sapien
cccgagtgggcgccgcgggcttcgg

SEQ ID NO: 665748 - DNA, 25 bp, Homo sapien
ggcgccgcgggcttcggccctggag

SEQ ID NO: 665749 - DNA, 25 bp, Homo sapien
cgcgcaggcgcagcccccgagtggg

SEQ ID NO: 665750 - DNA, 25 bp, Homo sapien
gccgcccgcctccaagcggctcgga

SEQ ID NO: 665751 - DNA, 25 bp, Homo sapien
cgaagccgctgcagtcctgggcccc

SEQ ID NO: 665752 - DNA, 25 bp, Homo sapien
ccgaagccgctgcagtcctgggccc

SEQ ID NO: 665753 - DNA, 25 bp, Homo sapien
tccgaagccgctgcagtcctgggcc

SEQ ID NO: 665754 - DNA, 25 bp, Homo sapien
ctgatgggcggcattgggaaaacca

SEQ ID NO: 665755 - DNA, 25 bp, Homo sapien
ttcatggccattgggatgggcatcc

SEQ ID NO: 665756 - DNA, 25 bp, Homo sapien
aaccatgatgcagagtggcggcacc

SEQ ID NO: 665757 - DNA, 25 bp, Homo sapien
tggcggcacctttggcacattcatg

SEQ ID NO: 665758 - DNA, 25 bp, Homo sapien
tatgcccagacaatgcaggagacca

SEQ ID NO: 665759 - DNA, 25 bp, Homo sapien
cacagggctagactctaatagaata

SEQ ID NO: 665760 - DNA, 25 bp, Homo sapien
accagtttgaagttaagccattttg

SEQ ID NO: 665761 - DNA, 25 bp, Homo sapien
tgcccaggttttaaggccaggctgt

SEQ ID NO: 665762 - DNA, 25 bp, Homo sapien
ctctcacgtttaaacatcttcagga

SEQ ID NO: 665763 - DNA, 25 bp, Homo sapien
ggatttactatttagggagaatgag

SEQ ID NO: 665764 - DNA, 25 bp, Homo sapien
cagactctcacgtttaaacatcttc

SEQ ID NO: 665765 - DNA, 25 bp, Homo sapien
taccagactctcacgtttaaacatc

SEQ ID NO: 665766 - DNA, 25 bp, Homo sapien
tttttcaaggtaacaggaaattgca

SEQ ID NO: 665767 - DNA, 25 bp, Homo sapien
caaggtaacaggaaattgcatacaa

SEQ ID NO: 665768 - DNA, 25 bp, Homo sapien
ttcaaggtaacaggaaattgcatac

SEQ ID NO: 665769 - DNA, 25 bp, Homo sapien
ttttcaaggtaacaggaaattgcat

SEQ ID NO: 665770 - DNA, 25 bp, Homo sapien
tatacataagggactatatcttcct

SEQ ID NO: 665771 - DNA, 25 bp, Homo sapien
gacagtagatccttgcctctttatt

SEQ ID NO: 665772 - DNA, 25 bp, Homo sapien
aacaggttgtggtaagttggaagag

SEQ ID NO: 665773 - DNA, 25 bp, Homo sapien
caggttgtggtaagttggaagaggt

SEQ ID NO: 665774 - DNA, 25 bp, Homo sapien
ttgctgtcatagaatcaggaaacag

SEQ ID NO: 665775 - DNA, 25 bp, Homo sapien
acaggttgtggtaagttggaagagg

SEQ ID NO: 665776 - DNA, 25 bp, Homo sapien
gcagcaatagctgcagcaattgatg

SEQ ID NO: 665777 - DNA, 25 bp, Homo sapien
caatgcattgacagcagcaatagct

SEQ ID NO: 665778 - DNA, 25 bp, Homo sapien
aaaccacctgccatgcaatgcattg

SEQ ID NO: 665779 - DNA, 25 bp, Homo sapien
caattgatgggcacttcacatacac

SEQ ID NO: 665780 - DNA, 25 bp, Homo sapien
gctttgagcattactagaaatcctc

SEQ ID NO: 665781 - DNA, 25 bp, Homo sapien
cataatggttccactggctaatagg

SEQ ID NO: 665782 - DNA, 25 bp, Homo sapien
tatgcagcctaagaatgaatcaaga

SEQ ID NO: 665783 - DNA, 25 bp, Homo sapien
tggaagacggttaaccataacatgc

SEQ ID NO: 665784 - DNA, 25 bp, Homo sapien
cataaatatgaataactcctccatg

SEQ ID NO: 665785 - DNA, 25 bp, Homo sapien
taatctcggtatcccatccaacttc

SEQ ID NO: 665786 - DNA, 25 bp, Homo sapien
ttcaatcacatcatccttaatctcg

SEQ ID NO: 665787 - DNA, 25 bp, Homo sapien
atcatccttaatctcggtatcccat

SEQ ID NO: 665788 - DNA, 25 bp, Homo sapien
aaaaagcacattgacagaacgtctc

SEQ ID NO: 665789 - DNA, 25 bp, Homo sapien
taaggactcttaaatactattgaaa

SEQ ID NO: 665790 - DNA, 25 bp, Homo sapien
tgccccaaagaacactgcagtctgg

SEQ ID NO: 665791 - DNA, 25 bp, Homo sapien
cactgcagtctggtattgaaaaata

SEQ ID NO: 665792 - DNA, 25 bp, Homo sapien
tattagcatcctaatcactagctag

SEQ ID NO: 665793 - DNA, 25 bp, Homo sapien
cactagctaggcatagttactagca

SEQ ID NO: 665794 - DNA, 25 bp, Homo sapien
catagtttccgcacctggccgaaaa

SEQ ID NO: 665795 - DNA, 25 bp, Homo sapien
aaatagcattctaatcactagctag

SEQ ID NO: 665796 - DNA, 25 bp, Homo sapien
taaacatgttagagagttggaaaca

SEQ ID NO: 665797 - DNA, 25 bp, Homo sapien
ttttccaagacagttgctccaatgc

SEQ ID NO: 665798 - DNA, 25 bp, Homo sapien
taccagtagctgttacagaactcac

SEQ ID NO: 665799 - DNA, 25 bp, Homo sapien
tatcagtagcttttaggtgccagaa

SEQ ID NO: 665800 - DNA, 25 bp, Homo sapien
tccactactaccaaaacatactggg

SEQ ID NO: 665801 - DNA, 25 bp, Homo sapien
taatcatattatctgaccaaatttc

SEQ ID NO: 665802 - DNA, 25 bp, Homo sapien
cgtaatcatattatctgaccaaatt

SEQ ID NO: 665803 - DNA, 25 bp, Homo sapien
tattatctgaccaaatttcattcca

SEQ ID NO: 665804 - DNA, 25 bp, Homo sapien
tcatattatctgaccaaatttcatt

SEQ ID NO: 665805 - DNA, 25 bp, Homo sapien
tactaagacaacttccagattccag

SEQ ID NO: 665806 - DNA, 25 bp, Homo sapien
tgtgtcactgtgtcaaaatttggtc

SEQ ID NO: 665807 - DNA, 25 bp, Homo sapien
gaacacacaggtaggcataaaacaa

SEQ ID NO: 665808 - DNA, 25 bp, Homo sapien
tcactgagtactatgtcttaagcaa

SEQ ID NO: 665809 - DNA, 25 bp, Homo sapien
cttcagtctgctgggaaagtcttgt

SEQ ID NO: 665810 - DNA, 25 bp, Homo sapien
tctgctgggaaagtcttgtttgcaa

SEQ ID NO: 665811 - DNA, 25 bp, Homo sapien
tgctgggaaagtcttgtttgcaaat

SEQ ID NO: 665812 - DNA, 25 bp, Homo sapien
agtctgctgggaaagtcttgtttgc

SEQ ID NO: 665813 - DNA, 25 bp, Homo sapien
tgggtcctaggtgctcaaaattggc

SEQ ID NO: 665814 - DNA, 25 bp, Homo sapien
tacagtggacgccatctgaaagctg

SEQ ID NO: 665815 - DNA, 25 bp, Homo sapien
ggaagcacaccggtcagaaaatgag

SEQ ID NO: 665816 - DNA, 25 bp, Homo sapien
tagaaagggcctatcaaactggcag

SEQ ID NO: 665817 - DNA, 25 bp, Homo sapien
tacatagataaagggtagggacact

SEQ ID NO: 665818 - DNA, 25 bp, Homo sapien
atattttaatgaccaccatctggag

SEQ ID NO: 665819 - DNA, 25 bp, Homo sapien
gaacccaagaggtacattcatccat

SEQ ID NO: 665820 - DNA, 25 bp, Homo sapien
ctattgtcaggaatccatatggagc

SEQ ID NO: 665821 - DNA, 25 bp, Homo sapien
aagaggttgagccacagagtgagac

SEQ ID NO: 665822 - DNA, 25 bp, Homo sapien
ggaggaagaggttgagccacagagt

SEQ ID NO: 665823 - DNA, 25 bp, Homo sapien
ggaagaggttgagccacagagtgag

SEQ ID NO: 665824 - DNA, 25 bp, Homo sapien
gtggtgggaaatgtctgtgatccca

SEQ ID NO: 665825 - DNA, 25 bp, Homo sapien
catctgtagagcttgctgtgctgct

SEQ ID NO: 665826 - DNA, 25 bp, Homo sapien
gcaccaaatgccaaagagccactca

SEQ ID NO: 665827 - DNA, 25 bp, Homo sapien
gctggcggaatctgcaaacctgtac

SEQ ID NO: 665828 - DNA, 25 bp, Homo sapien
gtgctgctggcggaatctgcaaacc

SEQ ID NO: 665829 - DNA, 25 bp, Homo sapien
acgaagtttcctgggtcattaatat

SEQ ID NO: 665830 - DNA, 25 bp, Homo sapien
aagttcctactatgttgagagcaga

SEQ ID NO: 665831 - DNA, 25 bp, Homo sapien
ggttgacgcctgtaacttagctagc

SEQ ID NO: 665832 - DNA, 25 bp, Homo sapien
tatcatgatcacttcactaaaataa

SEQ ID NO: 665833 - DNA, 25 bp, Homo sapien
gcaacaattgtgaaactctcttttt

SEQ ID NO: 665834 - DNA, 25 bp, Homo sapien
gggcaacaattgtgaaactctcttt

SEQ ID NO: 665835 - DNA, 25 bp, Homo sapien
ctgggcaacaattgtgaaactctct

SEQ ID NO: 665836 - DNA, 25 bp, Homo sapien
tgttgcacaggctcttgttgcacag

SEQ ID NO: 665837 - DNA, 25 bp, Homo sapien
ccaaattgggcaacagagccagacc

SEQ ID NO: 665838 - DNA, 25 bp, Homo sapien
tccaaattgggcaacagagccagac

SEQ ID NO: 665839 - DNA, 25 bp, Homo sapien
cactcgaagcatcagtacgttcagt

SEQ ID NO: 665840 - DNA, 25 bp, Homo sapien
gcactcgaagcatcagtacgttcag

SEQ ID NO: 665841 - DNA, 25 bp, Homo sapien
tcccttggatcgaccagtttcactg

SEQ ID NO: 665842 - DNA, 25 bp, Homo sapien
catatcccttggatcgaccagtttc

SEQ ID NO: 665843 - DNA, 25 bp, Homo sapien
ccttggatcgaccagtttcactgtc

SEQ ID NO: 665844 - DNA, 25 bp, Homo sapien
atccatatcccttggatcgaccagt

SEQ ID NO: 665845 - DNA, 25 bp, Homo sapien
aaagctgctacattatgtttactgg

SEQ ID NO: 665846 - DNA, 25 bp, Homo sapien
catatgccacccaagaccggctaat

SEQ ID NO: 665847 - DNA, 25 bp, Homo sapien
gggtgacagcgcaggactcagactc

SEQ ID NO: 665848 - DNA, 25 bp, Homo sapien
cttaatgcatactaattgttctggg

SEQ ID NO: 665849 - DNA, 25 bp, Homo sapien
gacaggacagtcttggcaactttct

SEQ ID NO: 665850 - DNA, 25 bp, Homo sapien
tttctttcggagacactctggctct

SEQ ID NO: 665851 - DNA, 25 bp, Homo sapien
cacagaactagttggacactcttgg

SEQ ID NO: 665852 - DNA, 25 bp, Homo sapien
cactcttggtttaggtagatagcac

SEQ ID NO: 665853 - DNA, 25 bp, Homo sapien
gaagtgtaatgagcccacataaagc

SEQ ID NO: 665854 - DNA, 25 bp, Homo sapien
tgttgaagtgtaatgagcccacata

SEQ ID NO: 665855 - DNA, 25 bp, Homo sapien
ttatgttgaagtgtaatgagcccac

SEQ ID NO: 665856 - DNA, 25 bp, Homo sapien
tgtaatgagcccacataaagcctca

SEQ ID NO: 665857 - DNA, 25 bp, Homo sapien
catcgacgaactccacataagcaat

SEQ ID NO: 665858 - DNA, 25 bp, Homo sapien
taacatcgacgaactccacataagc

SEQ ID NO: 665859 - DNA, 25 bp, Homo sapien
gaggcactgagctaacatcgacgaa

SEQ ID NO: 665860 - DNA, 25 bp, Homo sapien
tgagctaacatcgacgaactccaca

SEQ ID NO: 665861 - DNA, 25 bp, Homo sapien
ggtcgaattcttgccgccagctgca

SEQ ID NO: 665862 - DNA, 25 bp, Homo sapien
ttcctactgtagagaaaaactcttc

SEQ ID NO: 665863 - DNA, 25 bp, Homo sapien
actcttccaaatcccttggtcgaat

SEQ ID NO: 665864 - DNA, 25 bp, Homo sapien
aaatcccttggtcgaattcttgccg

SEQ ID NO: 665865 - DNA, 25 bp, Homo sapien
ctttcctcaggagttaaattatcaa

SEQ ID NO: 665866 - DNA, 25 bp, Homo sapien
cagaagactgtccttgcatctcttt

SEQ ID NO: 665867 - DNA, 25 bp, Homo sapien
caggagttaaattatcaataggttc

SEQ ID NO: 665868 - DNA, 25 bp, Homo sapien
tcctcaggagttaaattatcaatag

SEQ ID NO: 665869 - DNA, 25 bp, Homo sapien
ggccctggattttcagaccaactga

SEQ ID NO: 665870 - DNA, 25 bp, Homo sapien
ggattgcttatgaccggccattaga

SEQ ID NO: 665871 - DNA, 25 bp, Homo sapien
caaaagtactcggattgtaggcgtc

SEQ ID NO: 665872 - DNA, 25 bp, Homo sapien
tctttttggaaacgcagtctagctg

SEQ ID NO: 665873 - DNA, 25 bp, Homo sapien
ccacgcctggcctaatttttgtagt

SEQ ID NO: 665874 - DNA, 25 bp, Homo sapien
cagcttactgcaacccttgcctcct

SEQ ID NO: 665875 - DNA, 25 bp, Homo sapien
tgggttcaagtgattctcttgcctc

SEQ ID NO: 665876 - DNA, 25 bp, Homo sapien
gattctcttgcctcagcatcccaag

SEQ ID NO: 665877 - DNA, 25 bp, Homo sapien
aaagtactggaagtgcaaaagaaag

SEQ ID NO: 665878 - DNA, 25 bp, Homo sapien
cttgaccttaaagtactggaagtgc

SEQ ID NO: 665879 - DNA, 25 bp, Homo sapien
ggtccaaattactaaatatcatcaa

SEQ ID NO: 665880 - DNA, 25 bp, Homo sapien
agtgaaaactactgaaaactcagta

SEQ ID NO: 665881 - DNA, 25 bp, Homo sapien
agggctcttgtcttttctgaatgga

SEQ ID NO: 665882 - DNA, 25 bp, Homo sapien
atggacttttgcttcgggaacgtcg

SEQ ID NO: 665883 - DNA, 25 bp, Homo sapien
ttctgaatggacttttgcttcggga

SEQ ID NO: 665884 - DNA, 25 bp, Homo sapien
tgaatggacttttgcttcgggaacg

SEQ ID NO: 665885 - DNA, 25 bp, Homo sapien
tcagaagttatccaaacaagtacag

SEQ ID NO: 665886 - DNA, 25 bp, Homo sapien
ttcagaagttatccaaacaagtaca

SEQ ID NO: 665887 - DNA, 25 bp, Homo sapien
aagtacagcatgttagttccttgaa

SEQ ID NO: 665888 - DNA, 25 bp, Homo sapien
caaacaagtacagcatgttagttcc

SEQ ID NO: 665889 - DNA, 25 bp, Homo sapien
ttaatttgatgctatgaggcaaccc

SEQ ID NO: 665890 - DNA, 25 bp, Homo sapien
tgctatgaggcaacccaatctttcc

SEQ ID NO: 665891 - DNA, 25 bp, Homo sapien
cccaatctttcctcggatggcactg

SEQ ID NO: 665892 - DNA, 25 bp, Homo sapien
ggcaacccaatctttcctcggatgg

SEQ ID NO: 665893 - DNA, 25 bp, Homo sapien
tagggtcttgctaagatcgcattca

SEQ ID NO: 665894 - DNA, 25 bp, Homo sapien
tagatatctttgtaagctacatata

SEQ ID NO: 665895 - DNA, 25 bp, Homo sapien
gatcgcattcatgcgctctccagca

SEQ ID NO: 665896 - DNA, 25 bp, Homo sapien
ccagcaagactaacattgtttaggc

SEQ ID NO: 665897 - DNA, 25 bp, Homo sapien
taaactgccatctgaatacccagag

SEQ ID NO: 665898 - DNA, 25 bp, Homo sapien
taagctttcttaggtatttgggcac

SEQ ID NO: 665899 - DNA, 25 bp, Homo sapien
aatagtcagtatgcctagtaaaagc

SEQ ID NO: 665900 - DNA, 25 bp, Homo sapien
tttagcaaatactgtaacagcccag

SEQ ID NO: 665901 - DNA, 25 bp, Homo sapien
atctcgacttcttgagcggctccgt

SEQ ID NO: 665902 - DNA, 25 bp, Homo sapien
taaggacttctgtagcggcctctaa

SEQ ID NO: 665903 - DNA, 25 bp, Homo sapien
tcgacttcttgagcggctccgtcgc

SEQ ID NO: 665904 - DNA, 25 bp, Homo sapien
aggacttctgtagcggcctctaaat

SEQ ID NO: 665905 - DNA, 25 bp, Homo sapien
tgggcaaaaccgtaatgacaaagga

SEQ ID NO: 665906 - DNA, 25 bp, Homo sapien
taaatagtttgtcatacaacaggcc

SEQ ID NO: 665907 - DNA, 25 bp, Homo sapien
taacacgttcaaagggtcacataga

SEQ ID NO: 665908 - DNA, 25 bp, Homo sapien
gaaagacaccatcctctaagagtag

SEQ ID NO: 665909 - DNA, 25 bp, Homo sapien
tgtaagcaggtcatctttagagtgc

SEQ ID NO: 665910 - DNA, 25 bp, Homo sapien
cccaaattttagaggtgccttcaga

SEQ ID NO: 665911 - DNA, 25 bp, Homo sapien
tatagaaacctgtgggatgcaatca

SEQ ID NO: 665912 - DNA, 25 bp, Homo sapien
tatcacaagagcaactgaggtctgc

SEQ ID NO: 665913 - DNA, 25 bp, Homo sapien
ctggaatcttgaaacccacactcca

SEQ ID NO: 665914 - DNA, 25 bp, Homo sapien
tgaaacccacactccaatcacaagg

SEQ ID NO: 665915 - DNA, 25 bp, Homo sapien
cacactccaatcacaaggagatgta

SEQ ID NO: 665916 - DNA, 25 bp, Homo sapien
aatcacaaggagatgtagagctttc

SEQ ID NO: 665917 - DNA, 25 bp, Homo sapien
aatttcaagataatccacctgactg

SEQ ID NO: 665918 - DNA, 25 bp, Homo sapien
tttcaagataatccacctgactgtc

SEQ ID NO: 665919 - DNA, 25 bp, Homo sapien
tcaagataatccacctgactgtcag

SEQ ID NO: 665920 - DNA, 25 bp, Homo sapien
aagataatccacctgactgtcagaa

SEQ ID NO: 665921 - DNA, 25 bp, Homo sapien
tccaactatagaactctgagatttc

SEQ ID NO: 665922 - DNA, 25 bp, Homo sapien
ttgttgcctaagaaacctaacacta

SEQ ID NO: 665923 - DNA, 25 bp, Homo sapien
tctctgtgacactattccaactata

SEQ ID NO: 665924 - DNA, 25 bp, Homo sapien
ggcaataggtaacactccaattttg

SEQ ID NO: 665925 - DNA, 25 bp, Homo sapien
gagaggcaaccaacctatttacctc

SEQ ID NO: 665926 - DNA, 25 bp, Homo sapien
tacctctcataggacccaaaactta

SEQ ID NO: 665927 - DNA, 25 bp, Homo sapien
cctatttacctctcataggacccaa

SEQ ID NO: 665928 - DNA, 25 bp, Homo sapien
caagagaggcaaccaacctatttac

SEQ ID NO: 665929 - DNA, 25 bp, Homo sapien
tacaagggtgcaagaaaccagtata

SEQ ID NO: 665930 - DNA, 25 bp, Homo sapien
aactacaagggtgcaagaaaccagt

SEQ ID NO: 665931 - DNA, 25 bp, Homo sapien
aaactacaagggtgcaagaaaccag

SEQ ID NO: 665932 - DNA, 25 bp, Homo sapien
aaaatacaatcttttgcataaaagc

SEQ ID NO: 665933 - DNA, 25 bp, Homo sapien
tagtcaaatcctgttacaacttaaa

SEQ ID NO: 665934 - DNA, 25 bp, Homo sapien
gttatcgaaatccacactaatagtc

SEQ ID NO: 665935 - DNA, 25 bp, Homo sapien
ctttaatggcagtgaaattttgtac

SEQ ID NO: 665936 - DNA, 25 bp, Homo sapien
gaaatccacactaatagtcaaatcc

SEQ ID NO: 665937 - DNA, 25 bp, Homo sapien
ttttgctataactggatttgacctc

SEQ ID NO: 665938 - DNA, 25 bp, Homo sapien
agtaaatggtccactgggctgggcc

SEQ ID NO: 665939 - DNA, 25 bp, Homo sapien
ggttatatggcctctgcagtaaagg

SEQ ID NO: 665940 - DNA, 25 bp, Homo sapien
ggatttgacctcttccatgtaagaa

SEQ ID NO: 665941 - DNA, 25 bp, Homo sapien
tgcaacacggcactttcctttggtt

SEQ ID NO: 665942 - DNA, 25 bp, Homo sapien
aagtctgactggaaagtattttaag

SEQ ID NO: 665943 - DNA, 25 bp, Homo sapien
tatttatcacctataattgacgaga

SEQ ID NO: 665944 - DNA, 25 bp, Homo sapien
caagagtcctgattgaacaagggaa

SEQ ID NO: 665945 - DNA, 25 bp, Homo sapien
cactcggcctgacacctaaattgga

SEQ ID NO: 665946 - DNA, 25 bp, Homo sapien
tagacaccggagatgaccttagtgg

SEQ ID NO: 665947 - DNA, 25 bp, Homo sapien
gaagcgaaatctttagccactcggc

SEQ ID NO: 665948 - DNA, 25 bp, Homo sapien
ccttagtggcaaaaagcgacatgag

SEQ ID NO: 665949 - DNA, 25 bp, Homo sapien
ctaacacagttgtagtgagaaagac

SEQ ID NO: 665950 - DNA, 25 bp, Homo sapien
gagaaagactgacatacttactatg

SEQ ID NO: 665951 - DNA, 25 bp, Homo sapien
tatgaagcatttagggatcttagga

SEQ ID NO: 665952 - DNA, 25 bp, Homo sapien
actatgaagcatttagggatcttag

SEQ ID NO: 665953 - DNA, 25 bp, Homo sapien
tcacttccaaaagggcctctgagca

SEQ ID NO: 665954 - DNA, 25 bp, Homo sapien
ttccatcacttccaaaagggcctct

SEQ ID NO: 665955 - DNA, 25 bp, Homo sapien
agaaataattcacagctttgactcc

SEQ ID NO: 665956 - DNA, 25 bp, Homo sapien
aattcacagctttgactccttcggc

SEQ ID NO: 665957 - DNA, 25 bp, Homo sapien
gctacgttcttcatggccgttggca

SEQ ID NO: 665958 - DNA, 25 bp, Homo sapien
ttggcactgctcaacttgttctcat

SEQ ID NO: 665959 - DNA, 25 bp, Homo sapien
tttttgctacgttcttcatggccgt

SEQ ID NO: 665960 - DNA, 25 bp, Homo sapien
tcttcatggccgttggcactgctca

SEQ ID NO: 665961 - DNA, 25 bp, Homo sapien
tagtttaacatggaaggctataaaa

SEQ ID NO: 665962 - DNA, 25 bp, Homo sapien
atgaggacgaagtggtaacatttca

SEQ ID NO: 665963 - DNA, 25 bp, Homo sapien
ctaagcagggttgatagaagaacat

SEQ ID NO: 665964 - DNA, 25 bp, Homo sapien
atcatgaggacgaagtggtaacatt

SEQ ID NO: 665965 - DNA, 25 bp, Homo sapien
tatccagatttacaatgttgaagtg

SEQ ID NO: 665966 - DNA, 25 bp, Homo sapien
tgtttaaccactttgttgcttacat

SEQ ID NO: 665967 - DNA, 25 bp, Homo sapien
ttacaatgttgaagtggttaaatat

SEQ ID NO: 665968 - DNA, 25 bp, Homo sapien
cagatttacaatgttgaagtggtta

SEQ ID NO: 665969 - DNA, 25 bp, Homo sapien
tatttctgcctaagccccaagtggc

SEQ ID NO: 665970 - DNA, 25 bp, Homo sapien
tgctagcagccagccactatcgatt

SEQ ID NO: 665971 - DNA, 25 bp, Homo sapien
cctgtgaccgatgccattcctgaga

SEQ ID NO: 665972 - DNA, 25 bp, Homo sapien
gagatcttcgcccatttccgttgga

SEQ ID NO: 665973 - DNA, 25 bp, Homo sapien
ggtcgtgctatacaatccaaaacaa

SEQ ID NO: 665974 - DNA, 25 bp, Homo sapien
cagggattcacactgctttagtaat

SEQ ID NO: 665975 - DNA, 25 bp, Homo sapien
caaattggtaccacatggtcgtgct

SEQ ID NO: 665976 - DNA, 25 bp, Homo sapien
tagtaatgttgactcccaagaaccc

SEQ ID NO: 665977 - DNA, 25 bp, Homo sapien
cacggtacagcgataagtcactcaa

SEQ ID NO: 665978 - DNA, 25 bp, Homo sapien
caaagcttacagtttgtgacaccag

SEQ ID NO: 665979 - DNA, 25 bp, Homo sapien
tacatcagctataggagtaaagtgc

SEQ ID NO: 665980 - DNA, 25 bp, Homo sapien
tgctttgttattcttggacccctgc

SEQ ID NO: 665981 - DNA, 25 bp, Homo sapien
agttcacactggaatcaaaggtgaa

SEQ ID NO: 665982 - DNA, 25 bp, Homo sapien
caaaggtgaattcatgggagtagag

SEQ ID NO: 665983 - DNA, 25 bp, Homo sapien
tagaggtgagatatcgttaggcaag

SEQ ID NO: 665984 - DNA, 25 bp, Homo sapien
cttatgattgacagttcacactgga

SEQ ID NO: 665985 - DNA, 25 bp, Homo sapien
taagttacacgtaatgcatctctga

SEQ ID NO: 665986 - DNA, 25 bp, Homo sapien
gagatagatgggcatttattcatca

SEQ ID NO: 665987 - DNA, 25 bp, Homo sapien
tcatcacgctgaagtgaaactactg

SEQ ID NO: 665988 - DNA, 25 bp, Homo sapien
tgcacaatattattacatcaatagc

SEQ ID NO: 665989 - DNA, 25 bp, Homo sapien
cttgtaaggagcctcaagcattgct

SEQ ID NO: 665990 - DNA, 25 bp, Homo sapien
ccaaaagccctacaattaatgacta

SEQ ID NO: 665991 - DNA, 25 bp, Homo sapien
ttaatgactaaagtgacatgcactt

SEQ ID NO: 665992 - DNA, 25 bp, Homo sapien
gccgacacactcgaaaacttaagaa

SEQ ID NO: 665993 - DNA, 25 bp, Homo sapien
tgcactttaaccaggtttggcttac

SEQ ID NO: 665994 - DNA, 25 bp, Homo sapien
acgagagcgcctctttccgggcaaa

SEQ ID NO: 665995 - DNA, 25 bp, Homo sapien
gagacaggtcaccattctaccgcgg

SEQ ID NO: 665996 - DNA, 25 bp, Homo sapien
cgcggtcactgaaacagggccgatt

SEQ ID NO: 665997 - DNA, 25 bp, Homo sapien
actggaaaataagggcgcggtcact

SEQ ID NO: 665998 - DNA, 25 bp, Homo sapien
cgtcgacaagctccctgaaatggcg

SEQ ID NO: 665999 - DNA, 25 bp, Homo sapien
ctcgtgttcgggaagagattgctgc

SEQ ID NO: 666000 - DNA, 25 bp, Homo sapien
cggctaggcccgagagaatctaaaa

SEQ ID NO: 666001 - DNA, 25 bp, Homo sapien
cgaatatcgggttccaaggacggct

SEQ ID NO: 666002 - DNA, 25 bp, Homo sapien
cggccgaagtatcgcgagacctaag

SEQ ID NO: 666003 - DNA, 25 bp, Homo sapien
caagctccaaatttgagcggccgaa

SEQ ID NO: 666004 - DNA, 25 bp, Homo sapien
gagacctaagtatggctccggcgac

SEQ ID NO: 666005 - DNA, 25 bp, Homo sapien
ccgtagcccaatctcgcgcaatgat

SEQ ID NO: 666006 - DNA, 25 bp, Homo sapien
ccttatgcaggggtcatgtgaatct

SEQ ID NO: 666007 - DNA, 25 bp, Homo sapien
gcttatccttatgcaggggtcatgt

SEQ ID NO: 666008 - DNA, 25 bp, Homo sapien
atgcaggggtcatgtgaatcttttc

SEQ ID NO: 666009 - DNA, 25 bp, Homo sapien
tgcatgcttatccttatgcaggggt

SEQ ID NO: 666010 - DNA, 25 bp, Homo sapien
tacgctgggcgcgtcccgggggtca

SEQ ID NO: 666011 - DNA, 25 bp, Homo sapien
acgtggtgcagagcacgcagagtcc

SEQ ID NO: 666012 - DNA, 25 bp, Homo sapien
gggcggggcatacgctgggcgcgtc

SEQ ID NO: 666013 - DNA, 25 bp, Homo sapien
tggtggcgatgatgcgtgtgtgtgg

SEQ ID NO: 666014 - DNA, 25 bp, Homo sapien
ttccccagtctggtcagtgcaccca

SEQ ID NO: 666015 - DNA, 25 bp, Homo sapien
tccccttgaggtgctttccccagtc

SEQ ID NO: 666016 - DNA, 25 bp, Homo sapien
tccccagtctggtcagtgcacccat

SEQ ID NO: 666017 - DNA, 25 bp, Homo sapien
cggcacactgcaacctctgtctcct

SEQ ID NO: 666018 - DNA, 25 bp, Homo sapien
tcgccaggctagtcttgaactcctg

SEQ ID NO: 666019 - DNA, 25 bp, Homo sapien
tctcctgggttcaagcaattctcct

SEQ ID NO: 666020 - DNA, 25 bp, Homo sapien
gcccagaagtgcagtggtgcaacct

SEQ ID NO: 666021 - DNA, 25 bp, Homo sapien
tatatctttatcatagtagtagctt

SEQ ID NO: 666022 - DNA, 25 bp, Homo sapien
tatgcgggttttgttagtttggata

SEQ ID NO: 666023 - DNA, 25 bp, Homo sapien
tgtagtcctactgtaatgaattttg

SEQ ID NO: 666024 - DNA, 25 bp, Homo sapien
tacatctactctctgtaaagttagt

SEQ ID NO: 666025 - DNA, 25 bp, Homo sapien
ggaacaatcaccaataacctataac

SEQ ID NO: 666026 - DNA, 25 bp, Homo sapien
ggaatgggttgtttaatagatagct

SEQ ID NO: 666027 - DNA, 25 bp, Homo sapien
taatcctttacattatacacttgtg

SEQ ID NO: 666028 - DNA, 25 bp, Homo sapien
gatagcttattgtccttcacatgta

SEQ ID NO: 666029 - DNA, 25 bp, Homo sapien
gccacctcatctggctgtgtatgag

SEQ ID NO: 666030 - DNA, 25 bp, Homo sapien
attataagcctgagccacctcatct

SEQ ID NO: 666031 - DNA, 25 bp, Homo sapien
tgtatgagttttaatgtgagctcca

SEQ ID NO: 666032 - DNA, 25 bp, Homo sapien
tctggctgtgtatgagttttaatgt

SEQ ID NO: 666033 - DNA, 25 bp, Homo sapien
aacacgcagtggtccgtggactgct

SEQ ID NO: 666034 - DNA, 25 bp, Homo sapien
catggagaccttgtggaccagcagc

SEQ ID NO: 666035 - DNA, 25 bp, Homo sapien
taaagagggtccagattacagaaaa

SEQ ID NO: 666036 - DNA, 25 bp, Homo sapien
cagctctgtgttcaccaacacgcag

SEQ ID NO: 666037 - DNA, 25 bp, Homo sapien
aaattttatctctatgcctggagct

SEQ ID NO: 666038 - DNA, 25 bp, Homo sapien
agaacttggaattgattggactgta

SEQ ID NO: 666039 - DNA, 25 bp, Homo sapien
gcagagtcttttataagcccttaaa

SEQ ID NO: 666040 - DNA, 25 bp, Homo sapien
ttataggtgtaagctcgtcctgcag

SEQ ID NO: 666041 - DNA, 25 bp, Homo sapien
tcttcattaatgccatatcttaatg

SEQ ID NO: 666042 - DNA, 25 bp, Homo sapien
gggtacacagtgctttaacttggca

SEQ ID NO: 666043 - DNA, 25 bp, Homo sapien
ttaatgccatatcttaatgggtaca

SEQ ID NO: 666044 - DNA, 25 bp, Homo sapien
atatcttaatgggtacacagtgctt

SEQ ID NO: 666045 - DNA, 25 bp, Homo sapien
gttatatatgtccacatagcaatac

SEQ ID NO: 666046 - DNA, 25 bp, Homo sapien
ttatatatgtccacatagcaataca

SEQ ID NO: 666047 - DNA, 25 bp, Homo sapien
tgttatatatgtccacatagcaata

SEQ ID NO: 666048 - DNA, 25 bp, Homo sapien
gaaagcagttgtgagaagaaaggaa

SEQ ID NO: 666049 - DNA, 25 bp, Homo sapien
actagttgaaagcagttgtgagaag

SEQ ID NO: 666050 - DNA, 25 bp, Homo sapien
tgaaagcagttgtgagaagaaagga

SEQ ID NO: 666051 - DNA, 25 bp, Homo sapien
aaaagactagttgaaagcagttgtg

SEQ ID NO: 666052 - DNA, 25 bp, Homo sapien
catgcccagccgattcaaaggattt

SEQ ID NO: 666053 - DNA, 25 bp, Homo sapien
tggtaacctcaagaatgtttttgcc

SEQ ID NO: 666054 - DNA, 25 bp, Homo sapien
tacatgatacctttagtggtaacct

SEQ ID NO: 666055 - DNA, 25 bp, Homo sapien
tcaaaggattttgatacatgatacc

SEQ ID NO: 666056 - DNA, 25 bp, Homo sapien
ctgaactcccaacaagaagggcaat

SEQ ID NO: 666057 - DNA, 25 bp, Homo sapien
caacaagaagggcaatttcagttta

SEQ ID NO: 666058 - DNA, 25 bp, Homo sapien
tggctgttaccgagaatgcctgttc

SEQ ID NO: 666059 - DNA, 25 bp, Homo sapien
tcagaatagtttgggggacttgaaa

SEQ ID NO: 666060 - DNA, 25 bp, Homo sapien
cctatagattccaggcttgccagcc

SEQ ID NO: 666061 - DNA, 25 bp, Homo sapien
cctccctagaatgtgcctggaacat

SEQ ID NO: 666062 - DNA, 25 bp, Homo sapien
gaaaccatggctaataatacggtgg

SEQ ID NO: 666063 - DNA, 25 bp, Homo sapien
tgctggagagtcagaccaatttgct

SEQ ID NO: 666064 - DNA, 25 bp, Homo sapien
agaaacttcacaagtttgagtgtca

SEQ ID NO: 666065 - DNA, 25 bp, Homo sapien
tgtagaaacttcacaagtttgagtg

SEQ ID NO: 666066 - DNA, 25 bp, Homo sapien
aatgtagaaacttcacaagtttgag

SEQ ID NO: 666067 - DNA, 25 bp, Homo sapien
aaaatgtagaaacttcacaagtttg

SEQ ID NO: 666068 - DNA, 25 bp, Homo sapien
tcgatctactgaccttgcgatccac

SEQ ID NO: 666069 - DNA, 25 bp, Homo sapien
gatctactgaccttgcgatccacct

SEQ ID NO: 666070 - DNA, 25 bp, Homo sapien
cgatctactgaccttgcgatccacc

SEQ ID NO: 666071 - DNA, 25 bp, Homo sapien
acagtatctttagcgacctttggaa

SEQ ID NO: 666072 - DNA, 25 bp, Homo sapien
tacttttgcaggttacggttccaca

SEQ ID NO: 666073 - DNA, 25 bp, Homo sapien
catgctgcttaaggtccaggtacaa

SEQ ID NO: 666074 - DNA, 25 bp, Homo sapien
catgctttgaggagtgacccatttc

SEQ ID NO: 666075 - DNA, 25 bp, Homo sapien
ggctgtttctcactgctaacgttgg

SEQ ID NO: 666076 - DNA, 25 bp, Homo sapien
aaaacgacgattcctctacaagagg

SEQ ID NO: 666077 - DNA, 25 bp, Homo sapien
gcatggcatgcacgttcagacagct

SEQ ID NO: 666078 - DNA, 25 bp, Homo sapien
gctttctgtagccacacctgtgagg

SEQ ID NO: 666079 - DNA, 25 bp, Homo sapien
gaattaaccctatgttggagcactg

SEQ ID NO: 666080 - DNA, 25 bp, Homo sapien
agaaatatgtgcactatcagctggg

SEQ ID NO: 666081 - DNA, 25 bp, Homo sapien
tgttcaacgatgtaagcagaaactg

SEQ ID NO: 666082 - DNA, 25 bp, Homo sapien
ggagcactggaaaccgttatttgca

SEQ ID NO: 666083 - DNA, 25 bp, Homo sapien
cactgtggatacatatctatgttta

SEQ ID NO: 666084 - DNA, 25 bp, Homo sapien
aaggcgctgtatatagaaatgttgc

SEQ ID NO: 666085 - DNA, 25 bp, Homo sapien
tatttgcaaaacacgcagacttctg

SEQ ID NO: 666086 - DNA, 25 bp, Homo sapien
gtttacgcgctattagaacagaagg

SEQ ID NO: 666087 - DNA, 25 bp, Homo sapien
gccccagtccgcacagagcgcccgg

SEQ ID NO: 666088 - DNA, 25 bp, Homo sapien
gctgccaaaactcatttttcattaa

SEQ ID NO: 666089 - DNA, 25 bp, Homo sapien
cgctgccaaaactcatttttcatta

SEQ ID NO: 666090 - DNA, 25 bp, Homo sapien
gctcaggcccccgggcccgatcatg

SEQ ID NO: 666091 - DNA, 25 bp, Homo sapien
gtgcggatgtcaggccgcagccact

SEQ ID NO: 666092 - DNA, 25 bp, Homo sapien
ctgctccttggtgcggatgtcaggc

SEQ ID NO: 666093 - DNA, 25 bp, Homo sapien
tgccggaaacgctggcggaacgtct

SEQ ID NO: 666094 - DNA, 25 bp, Homo sapien
tcagccagtgatgcgcacatccgtg

SEQ ID NO: 666095 - DNA, 25 bp, Homo sapien
cctgaggcgctacgctcacgggtgc

SEQ ID NO: 666096 - DNA, 25 bp, Homo sapien
ttcagcttcggcctgaggcgctacg

SEQ ID NO: 666097 - DNA, 25 bp, Homo sapien
gcctggtgtggagcgcgcttcagct

SEQ ID NO: 666098 - DNA, 25 bp, Homo sapien
acgctcacgggtgcgggcccgagag

SEQ ID NO: 666099 - DNA, 25 bp, Homo sapien
tggcttcagggaccgcggcgttggg

SEQ ID NO: 666100 - DNA, 25 bp, Homo sapien
gctcggggcgtagggatggcttcag

SEQ ID NO: 666101 - DNA, 25 bp, Homo sapien
gatggcttcagggaccgcggcgttg

SEQ ID NO: 666102 - DNA, 25 bp, Homo sapien
cggaggccgcagctcggggcgtagg

SEQ ID NO: 666103 - DNA, 25 bp, Homo sapien
aggcctctggcagcgaggagcccac

SEQ ID NO: 666104 - DNA, 25 bp, Homo sapien
agtggccgccaagatcggctccgta

SEQ ID NO: 666105 - DNA, 25 bp, Homo sapien
gggctgagctcgaaccggctccttc

SEQ ID NO: 666106 - DNA, 25 bp, Homo sapien
tttctccggtggcaccgccgcggga

SEQ ID NO: 666107 - DNA, 25 bp, Homo sapien
ctctttgtccggtagctgtgtgctc

SEQ ID NO: 666108 - DNA, 25 bp, Homo sapien
agctccgggcgtcactctttgtccg

SEQ ID NO: 666109 - DNA, 25 bp, Homo sapien
cgggcgtcactctttgtccggtagc

SEQ ID NO: 666110 - DNA, 25 bp, Homo sapien
gtcactctttgtccggtagctgtgt

SEQ ID NO: 666111 - DNA, 25 bp, Homo sapien
ccggccgagagtgtgcggagcttac

SEQ ID NO: 666112 - DNA, 25 bp, Homo sapien
tttccggttaaagggcagagctcgc

SEQ ID NO: 666113 - DNA, 25 bp, Homo sapien
tgagcagggagacgtttccggttaa

SEQ ID NO: 666114 - DNA, 25 bp, Homo sapien
tcacccttgagggagtcggactcgg

SEQ ID NO: 666115 - DNA, 25 bp, Homo sapien
tctcgagtcgcatgaggcggctgct

SEQ ID NO: 666116 - DNA, 25 bp, Homo sapien
gatagacttcaagtcccggacctta

SEQ ID NO: 666117 - DNA, 25 bp, Homo sapien
gattgaccctgatgagctgtagctc

SEQ ID NO: 666118 - DNA, 25 bp, Homo sapien
gccgcttcggtttgcaggtgacctt

SEQ ID NO: 666119 - DNA, 25 bp, Homo sapien
gaatgattagggtgacggctggccg

SEQ ID NO: 666120 - DNA, 25 bp, Homo sapien
ctcgcttggtcaaactaggagggcg

SEQ ID NO: 666121 - DNA, 25 bp, Homo sapien
tgacccgaacaggagagcgggacgg

SEQ ID NO: 666122 - DNA, 25 bp, Homo sapien
cgggacggcgaccattctctcggga

SEQ ID NO: 666123 - DNA, 25 bp, Homo sapien
tgcgacgatgacaaagtacaacaca

SEQ ID NO: 666124 - DNA, 25 bp, Homo sapien
accgtctggcgcgaaggagatgctc

SEQ ID NO: 666125 - DNA, 25 bp, Homo sapien
aaccaagggaaatgcggctctgtgg

SEQ ID NO: 666126 - DNA, 25 bp, Homo sapien
tgttgttatttttcgcgtgtcctcc

SEQ ID NO: 666127 - DNA, 25 bp, Homo sapien
aacgtagctagttgataaccctcga

SEQ ID NO: 666128 - DNA, 25 bp, Homo sapien
gagttgactcagctcttgcaacgta

SEQ ID NO: 666129 - DNA, 25 bp, Homo sapien
aagtgaactctaaatgcattgcccc

SEQ ID NO: 666130 - DNA, 25 bp, Homo sapien
cattgccccttatggtggccgctgg

SEQ ID NO: 666131 - DNA, 25 bp, Homo sapien
tgtataatcatttgggcttggctct

SEQ ID NO: 666132 - DNA, 25 bp, Homo sapien
gtatatttaaccatccattgaagga

SEQ ID NO: 666133 - DNA, 25 bp, Homo sapien
tggcacaattccctggagattcacc

SEQ ID NO: 666134 - DNA, 25 bp, Homo sapien
cacccaagtggttgcttgtatcaat

SEQ ID NO: 666135 - DNA, 25 bp, Homo sapien
acaatcgtggtggaagacaaggagg

SEQ ID NO: 666136 - DNA, 25 bp, Homo sapien
ctcacaatcgtggtggaagacaagg

SEQ ID NO: 666137 - DNA, 25 bp, Homo sapien
cacaatcgtggtggaagacaaggag

SEQ ID NO: 666138 - DNA, 25 bp, Homo sapien
cctcacaatcgtggtggaagacaag

SEQ ID NO: 666139 - DNA, 25 bp, Homo sapien
tctggatcttctcagcacccctcat

SEQ ID NO: 666140 - DNA, 25 bp, Homo sapien
tggtgcataacaactagcttctggg

SEQ ID NO: 666141 - DNA, 25 bp, Homo sapien
gagatgtcctgactagtagctgcca

SEQ ID NO: 666142 - DNA, 25 bp, Homo sapien
tatactgcctgcaattagtcgtgcc

SEQ ID NO: 666143 - DNA, 25 bp, Homo sapien
catcttgacagccagcagtgttgca

SEQ ID NO: 666144 - DNA, 25 bp, Homo sapien
cctatgtcccttgctgtgttcaggg

SEQ ID NO: 666145 - DNA, 25 bp, Homo sapien
tatgtcccttgctgtgttcagggca

SEQ ID NO: 666146 - DNA, 25 bp, Homo sapien
tcctatgtcccttgctgtgttcagg

SEQ ID NO: 666147 - DNA, 25 bp, Homo sapien
ttcctatgtcccttgctgtgttcag

SEQ ID NO: 666148 - DNA, 25 bp, Homo sapien
tctaatttaatctctgtaacaactc

SEQ ID NO: 666149 - DNA, 25 bp, Homo sapien
caactctacgagtactattataatc

SEQ ID NO: 666150 - DNA, 25 bp, Homo sapien
gcagctcagtgttgttatcggtatg

SEQ ID NO: 666151 - DNA, 25 bp, Homo sapien
ttgtttgttccaggttgcgcaggta

SEQ ID NO: 666152 - DNA, 25 bp, Homo sapien
cagggatatctgcagcagtcctgga

SEQ ID NO: 666153 - DNA, 25 bp, Homo sapien
cagtcctggaaaggttgactgtgac

SEQ ID NO: 666154 - DNA, 25 bp, Homo sapien
caaggagtcagggatatctgcagca

SEQ ID NO: 666155 - DNA, 25 bp, Homo sapien
agtcagggatatctgcagcagtcct

SEQ ID NO: 666156 - DNA, 25 bp, Homo sapien
gtggagacagggcagcaaaccatac

SEQ ID NO: 666157 - DNA, 25 bp, Homo sapien
ggcagcaaaccataccaagcactgt

SEQ ID NO: 666158 - DNA, 25 bp, Homo sapien
gagctcatgggaacatgaacgggca

SEQ ID NO: 666159 - DNA, 25 bp, Homo sapien
tcatgggaacatgaacgggcagcct

SEQ ID NO: 666160 - DNA, 25 bp, Homo sapien
aggtttttcatggctgctgccaaac

SEQ ID NO: 666161 - DNA, 25 bp, Homo sapien
agcaaacaatgaggatgagtagcag

SEQ ID NO: 666162 - DNA, 25 bp, Homo sapien
gataagcaggatcaaagcataaaca

SEQ ID NO: 666163 - DNA, 25 bp, Homo sapien
tgagtagcagtttctaggtggctga

SEQ ID NO: 666164 - DNA, 25 bp, Homo sapien
gatcatcagctcatggggtttgccc

SEQ ID NO: 666165 - DNA, 25 bp, Homo sapien
tccaaacagcgcttgtcttctgtcc

SEQ ID NO: 666166 - DNA, 25 bp, Homo sapien
cacatcctcatcagcttcgatgatc

SEQ ID NO: 666167 - DNA, 25 bp, Homo sapien
gtttgccccctctgcgagaagcatc

SEQ ID NO: 666168 - DNA, 25 bp, Homo sapien
gcctaggagagctggcatcactgaa

SEQ ID NO: 666169 - DNA, 25 bp, Homo sapien
gaggcctaggagagctggcatcact

SEQ ID NO: 666170 - DNA, 25 bp, Homo sapien
agagctggcatcactgaatctaaaa

SEQ ID NO: 666171 - DNA, 25 bp, Homo sapien
gagctggcatcactgaatctaaaac

SEQ ID NO: 666172 - DNA, 25 bp, Homo sapien
aatgaatagtctgcattcgctccta

SEQ ID NO: 666173 - DNA, 25 bp, Homo sapien
catctgaactaatctcaggagcaca

SEQ ID NO: 666174 - DNA, 25 bp, Homo sapien
cactttactaaaaacgctcttgtag

SEQ ID NO: 666175 - DNA, 25 bp, Homo sapien
gcgacaggccgttgtacacttttaa

SEQ ID NO: 666176 - DNA, 25 bp, Homo sapien
ggcacgtgtcacttagagctgatgt

SEQ ID NO: 666177 - DNA, 25 bp, Homo sapien
cttagagctgatgttatctcacttc

SEQ ID NO: 666178 - DNA, 25 bp, Homo sapien
ataggcacgtgtcacttagagctga

SEQ ID NO: 666179 - DNA, 25 bp, Homo sapien
taggcacgtgtcacttagagctgat

SEQ ID NO: 666180 - DNA, 25 bp, Homo sapien
actaatttgtccgttatatatacaa

SEQ ID NO: 666181 - DNA, 25 bp, Homo sapien
gagatggtcaaacaaattcctatgc

SEQ ID NO: 666182 - DNA, 25 bp, Homo sapien
gacagcaaagtctggtagaatgaag

SEQ ID NO: 666183 - DNA, 25 bp, Homo sapien
tccgacagcaaagtctggtagaatg

SEQ ID NO: 666184 - DNA, 25 bp, Homo sapien
cgcccaatggcgacagagtggtcac

SEQ ID NO: 666185 - DNA, 25 bp, Homo sapien
caggactaggtaggtctcgcccaat

SEQ ID NO: 666186 - DNA, 25 bp, Homo sapien
ttaaggcctttgtccgttgtcgtca

SEQ ID NO: 666187 - DNA, 25 bp, Homo sapien
ctttgtccgttgtcgtcaggactag

SEQ ID NO: 666188 - DNA, 25 bp, Homo sapien
cgccttaatggcctccgccgcgcgg

SEQ ID NO: 666189 - DNA, 25 bp, Homo sapien
acgccttaatggcctccgccgcgcg

SEQ ID NO: 666190 - DNA, 25 bp, Homo sapien
tcgctgcggcttcaaggtctgggca

SEQ ID NO: 666191 - DNA, 25 bp, Homo sapien
agccagtgggcgggcacagccagtg

SEQ ID NO: 666192 - DNA, 25 bp, Homo sapien
gggtgggaaagagaggttcgctgcg

SEQ ID NO: 666193 - DNA, 25 bp, Homo sapien
cagaggcctccgttatctgcagggc

SEQ ID NO: 666194 - DNA, 25 bp, Homo sapien
ccggagggcctggagggccctggag

SEQ ID NO: 666195 - DNA, 25 bp, Homo sapien
gccggagggcctggagggccctgga

SEQ ID NO: 666196 - DNA, 25 bp, Homo sapien
gagggcctggagggccctggaggag

SEQ ID NO: 666197 - DNA, 25 bp, Homo sapien
ggagggcctggagggccctggagga

SEQ ID NO: 666198 - DNA, 25 bp, Homo sapien
tctctccgcgatctctgccggaccg

SEQ ID NO: 666199 - DNA, 25 bp, Homo sapien
cgggctgcgttctgcgtctctccgc

SEQ ID NO: 666200 - DNA, 25 bp, Homo sapien
gtctctccgcgatctctgccggacc

SEQ ID NO: 666201 - DNA, 25 bp, Homo sapien
gaggatgagaaaatgccgaccccgt

SEQ ID NO: 666202 - DNA, 25 bp, Homo sapien
aatcatgcccgcctgagcaagagga

SEQ ID NO: 666203 - DNA, 25 bp, Homo sapien
cattgttgcgccagatttccctaag

SEQ ID NO: 666204 - DNA, 25 bp, Homo sapien
tgagtgctcgccttgacattgttgc

SEQ ID NO: 666205 - DNA, 25 bp, Homo sapien
catcttcctcttccaccttttcctg

SEQ ID NO: 666206 - DNA, 25 bp, Homo sapien
ctcttccaccttttcctgggcaact

SEQ ID NO: 666207 - DNA, 25 bp, Homo sapien
ttcctcttccaccttttcctgggca

SEQ ID NO: 666208 - DNA, 25 bp, Homo sapien
caccttttcctgggcaactttagca

SEQ ID NO: 666209 - DNA, 25 bp, Homo sapien
ttccttttgccttatagtcagaaac

SEQ ID NO: 666210 - DNA, 25 bp, Homo sapien
atcaaactttccttttgccttatag

SEQ ID NO: 666211 - DNA, 25 bp, Homo sapien
actttccttttgccttatagtcaga

SEQ ID NO: 666212 - DNA, 25 bp, Homo sapien
ttgccgccttagtgaagtaaggctg

SEQ ID NO: 666213 - DNA, 25 bp, Homo sapien
ctattccacatttcacccaactttt

SEQ ID NO: 666214 - DNA, 25 bp, Homo sapien
gtctccaatagagatgccagggttt

SEQ ID NO: 666215 - DNA, 25 bp, Homo sapien
gagatgccagggtttgtggatttga

SEQ ID NO: 666216 - DNA, 25 bp, Homo sapien
atagagatgccagggtttgtggatt

SEQ ID NO: 666217 - DNA, 25 bp, Homo sapien
agatgccagggtttgtggatttgat

SEQ ID NO: 666218 - DNA, 25 bp, Homo sapien
agacagtagccttttggggcattag

SEQ ID NO: 666219 - DNA, 25 bp, Homo sapien
gacagtagccttttggggcattagg

SEQ ID NO: 666220 - DNA, 25 bp, Homo sapien
gcctttgccatttcattgaatttag

SEQ ID NO: 666221 - DNA, 25 bp, Homo sapien
tgccatttcattgaatttagacttc

SEQ ID NO: 666222 - DNA, 25 bp, Homo sapien
ccatttcattgaatttagacttctc

SEQ ID NO: 666223 - DNA, 25 bp, Homo sapien
ttatccgcctttgccatttcattga

SEQ ID NO: 666224 - DNA, 25 bp, Homo sapien
gtttcttggtgtcacctttagccat

SEQ ID NO: 666225 - DNA, 25 bp, Homo sapien
cataagcagacatctttccctttgg

SEQ ID NO: 666226 - DNA, 25 bp, Homo sapien
tctgcaaaattgacaaggacctctg

SEQ ID NO: 666227 - DNA, 25 bp, Homo sapien
tctcggagcacttcctggaatattc

SEQ ID NO: 666228 - DNA, 25 bp, Homo sapien
ctaagttgctacaaaaagacatagt

SEQ ID NO: 666229 - DNA, 25 bp, Homo sapien
aagttgctacaaaaagacatagtaa

SEQ ID NO: 666230 - DNA, 25 bp, Homo sapien
taagttgctacaaaaagacatagta

SEQ ID NO: 666231 - DNA, 25 bp, Homo sapien
cacatacagtcacataattgtctgg

SEQ ID NO: 666232 - DNA, 25 bp, Homo sapien
gagttcatcactcccaaggtggtcc

SEQ ID NO: 666233 - DNA, 25 bp, Homo sapien
tcttttatctcctggaccactgcag

SEQ ID NO: 666234 - DNA, 25 bp, Homo sapien
ggtcaccaggatcctagttcaattt

SEQ ID NO: 666235 - DNA, 25 bp, Homo sapien
taggtgctgtgctgggtaccaggta

SEQ ID NO: 666236 - DNA, 25 bp, Homo sapien
aggtgctgtgctgggtaccaggtac

SEQ ID NO: 666237 - DNA, 25 bp, Homo sapien
ctaggtgctgtgctgggtaccaggt

SEQ ID NO: 666238 - DNA, 25 bp, Homo sapien
cagtgaagaaccagaattgttgggc

SEQ ID NO: 666239 - DNA, 25 bp, Homo sapien
tgaagaaccagaattgttgggcttc

SEQ ID NO: 666240 - DNA, 25 bp, Homo sapien
aggcatggaccacagtgaagaacca

SEQ ID NO: 666241 - DNA, 25 bp, Homo sapien
ctgaggcatggaccacagtgaagaa

SEQ ID NO: 666242 - DNA, 25 bp, Homo sapien
ggagtgatgactcatgatgccgcca

SEQ ID NO: 666243 - DNA, 25 bp, Homo sapien
cggcaccccggatggagcaggaact

SEQ ID NO: 666244 - DNA, 25 bp, Homo sapien
gatgccgccattgagagtaagagag

SEQ ID NO: 666245 - DNA, 25 bp, Homo sapien
ctttgttttgccaagaagaatttgg

SEQ ID NO: 666246 - DNA, 25 bp, Homo sapien
ttcttggctttatggaagacacttt

SEQ ID NO: 666247 - DNA, 25 bp, Homo sapien
tggctttatggaagacactttggaa

SEQ ID NO: 666248 - DNA, 25 bp, Homo sapien
cttcccaacttggaggtgctgtgat

SEQ ID NO: 666249 - DNA, 25 bp, Homo sapien
gcccggggcgtgtcaaagcttcttc

SEQ ID NO: 666250 - DNA, 25 bp, Homo sapien
agtgctccaggcaccagaatggctg

SEQ ID NO: 666251 - DNA, 25 bp, Homo sapien
accaacagctgtcagtgcttcattc

SEQ ID NO: 666252 - DNA, 25 bp, Homo sapien
aaatggtccattccccggggatcag

SEQ ID NO: 666253 - DNA, 25 bp, Homo sapien
gggatcagcactttctccagacagc

SEQ ID NO: 666254 - DNA, 25 bp, Homo sapien
cagagggccggcctttgtgccaaat

SEQ ID NO: 666255 - DNA, 25 bp, Homo sapien
gagtcctgctgtacaccattcctgg

SEQ ID NO: 666256 - DNA, 25 bp, Homo sapien
tttggcaggtttggccacacccatg

SEQ ID NO: 666257 - DNA, 25 bp, Homo sapien
cacacccatgagcagtgcgatggct

SEQ ID NO: 666258 - DNA, 25 bp, Homo sapien
ggagcaggcctgaggaggcagtgct

SEQ ID NO: 666259 - DNA, 25 bp, Homo sapien
gagcaggcctgaggaggcagtgctg

SEQ ID NO: 666260 - DNA, 25 bp, Homo sapien
aggaggcagtgctgccctgtcctta

SEQ ID NO: 666261 - DNA, 25 bp, Homo sapien
ggcagtgctgccctgtccttacccc

SEQ ID NO: 666262 - DNA, 25 bp, Homo sapien
cctgttcctcccgaccttcagacca

SEQ ID NO: 666263 - DNA, 25 bp, Homo sapien
cctgagaccataattgactgagaac

SEQ ID NO: 666264 - DNA, 25 bp, Homo sapien
gaggaaaggccctcgcacttgctgc

SEQ ID NO: 666265 - DNA, 25 bp, Homo sapien
gaaccaggctttctgaacgtctcca

SEQ ID NO: 666266 - DNA, 25 bp, Homo sapien
ggctttcccatggcatgcagctggc

SEQ ID NO: 666267 - DNA, 25 bp, Homo sapien
aggctttcccatggcatgcagctgg

SEQ ID NO: 666268 - DNA, 25 bp, Homo sapien
tacaggctttcccatggcatgcagc

SEQ ID NO: 666269 - DNA, 25 bp, Homo sapien
caggctttcccatggcatgcagctg

SEQ ID NO: 666270 - DNA, 25 bp, Homo sapien
ggaagtgcctctgccttgtgggaaa

SEQ ID NO: 666271 - DNA, 25 bp, Homo sapien
cttgtgggaaaggaactgaccctcg

SEQ ID NO: 666272 - DNA, 25 bp, Homo sapien
actctctgatacaggaagtgcctct

SEQ ID NO: 666273 - DNA, 25 bp, Homo sapien
gggacactctctgatacaggaagtg

SEQ ID NO: 666274 - DNA, 25 bp, Homo sapien
agagatcggtaccataacttccctg

SEQ ID NO: 666275 - DNA, 25 bp, Homo sapien
caggcttctacgagagtctgattca

SEQ ID NO: 666276 - DNA, 25 bp, Homo sapien
gatcggtaccataacttccctgtcc

SEQ ID NO: 666277 - DNA, 25 bp, Homo sapien
ctgtcctcaagctgctcacaggctt

SEQ ID NO: 666278 - DNA, 25 bp, Homo sapien
taaacctgtgtgaagcccaatgtgt

SEQ ID NO: 666279 - DNA, 25 bp, Homo sapien
taatgatagaacaaacacaggcctt

SEQ ID NO: 666280 - DNA, 25 bp, Homo sapien
cccaatgtgtgtaggattaatgata

SEQ ID NO: 666281 - DNA, 25 bp, Homo sapien
gaacagaatatgtcagtatctccag

SEQ ID NO: 666282 - DNA, 25 bp, Homo sapien
ccagtgtaactgtgtaagcgtaacc

SEQ ID NO: 666283 - DNA, 25 bp, Homo sapien
tgtctgggaacatcctgcctcggtc

SEQ ID NO: 666284 - DNA, 25 bp, Homo sapien
gcccacgattgggaaggctcagcca

SEQ ID NO: 666285 - DNA, 25 bp, Homo sapien
tgtagcctggattctcctgggaaag

SEQ ID NO: 666286 - DNA, 25 bp, Homo sapien
cttctgtctggagggtgggcctgtt

SEQ ID NO: 666287 - DNA, 25 bp, Homo sapien
ttctgtctggagggtgggcctgttc

SEQ ID NO: 666288 - DNA, 25 bp, Homo sapien
tctgtctggagggtgggcctgttct

SEQ ID NO: 666289 - DNA, 25 bp, Homo sapien
tgaaggcaccggaagctttgtctaa

SEQ ID NO: 666290 - DNA, 25 bp, Homo sapien
cttcatccgctgctgaacctggtga

SEQ ID NO: 666291 - DNA, 25 bp, Homo sapien
gctcttcatccgctgctgaacctgg

SEQ ID NO: 666292 - DNA, 25 bp, Homo sapien
gggagtgaaggcaccggaagctttg

SEQ ID NO: 666293 - DNA, 25 bp, Homo sapien
cttggttttgagccatgatctctgc

SEQ ID NO: 666294 - DNA, 25 bp, Homo sapien
gctcagacacatacagcaagtgcgc

SEQ ID NO: 666295 - DNA, 25 bp, Homo sapien
gagctcaggtgcacactcagcctgt

SEQ ID NO: 666296 - DNA, 25 bp, Homo sapien
catgatctctgccacaagctgcttg

SEQ ID NO: 666297 - DNA, 25 bp, Homo sapien
cctgctgtaggatgagcggtgggtg

SEQ ID NO: 666298 - DNA, 25 bp, Homo sapien
accggctggcccagtctcttttcgg

SEQ ID NO: 666299 - DNA, 25 bp, Homo sapien
tggcccagtctcttttcggagagca

SEQ ID NO: 666300 - DNA, 25 bp, Homo sapien
tctcttttcggagagcactcctgct

SEQ ID NO: 666301 - DNA, 25 bp, Homo sapien
gttgcttttccctcggagctctgag

SEQ ID NO: 666302 - DNA, 25 bp, Homo sapien
tcacttctggatccgcatagcacct

SEQ ID NO: 666303 - DNA, 25 bp, Homo sapien
tcagctgccagccatcgtcgttgct

SEQ ID NO: 666304 - DNA, 25 bp, Homo sapien
gactggcagacgtatatggctcaaa

SEQ ID NO: 666305 - DNA, 25 bp, Homo sapien
aggtgggaatgtgagacggccagat

SEQ ID NO: 666306 - DNA, 25 bp, Homo sapien
gggaatgtgagacggccagatttag

SEQ ID NO: 666307 - DNA, 25 bp, Homo sapien
tgggaatgtgagacggccagattta

SEQ ID NO: 666308 - DNA, 25 bp, Homo sapien
cggccagatttaggacctctccagg

SEQ ID NO: 666309 - DNA, 25 bp, Homo sapien
acctgggcaacagtctttggtgtca

SEQ ID NO: 666310 - DNA, 25 bp, Homo sapien
cacctgggcaacagtctttggtgtc

SEQ ID NO: 666311 - DNA, 25 bp, Homo sapien
cctgggcaacagtctttggtgtcat

SEQ ID NO: 666312 - DNA, 25 bp, Homo sapien
gccatctctgggtgggacataccaa

SEQ ID NO: 666313 - DNA, 25 bp, Homo sapien
gatttaagaggacagaagccaccta

SEQ ID NO: 666314 - DNA, 25 bp, Homo sapien
tgcctcagggccagtagataacatg

SEQ ID NO: 666315 - DNA, 25 bp, Homo sapien
aacgtagaactttggtctgcatgcc

SEQ ID NO: 666316 - DNA, 25 bp, Homo sapien
caggccagcagaggtggacgtcctc

SEQ ID NO: 666317 - DNA, 25 bp, Homo sapien
gaggactccagtcgtttctattgga

SEQ ID NO: 666318 - DNA, 25 bp, Homo sapien
ttctattggatccagcccacgcaga

SEQ ID NO: 666319 - DNA, 25 bp, Homo sapien
tctctccagcctccgacaagggagg

SEQ ID NO: 666320 - DNA, 25 bp, Homo sapien
caattcaggctgtgaaaccacgctg

SEQ ID NO: 666321 - DNA, 25 bp, Homo sapien
tgttagcttggccacaaagaccctc

SEQ ID NO: 666322 - DNA, 25 bp, Homo sapien
gaagagaagcgctccaccaacttag

SEQ ID NO: 666323 - DNA, 25 bp, Homo sapien
cctaaacgggcctgggtgtagctca

SEQ ID NO: 666324 - DNA, 25 bp, Homo sapien
tgagccaccgcacccagcctaattt

SEQ ID NO: 666325 - DNA, 25 bp, Homo sapien
gcgtgagccaccgcacccagcctaa

SEQ ID NO: 666326 - DNA, 25 bp, Homo sapien
gggtgatctgcccgccttggcctcc

SEQ ID NO: 666327 - DNA, 25 bp, Homo sapien
tagtctcgatcccctgacctcgggt

SEQ ID NO: 666328 - DNA, 25 bp, Homo sapien
aggaagggaagtagacattgtatgc

SEQ ID NO: 666329 - DNA, 25 bp, Homo sapien
cggatgtgctttgaagttatgtata

SEQ ID NO: 666330 - DNA, 25 bp, Homo sapien
gaggtttgtacggatgtgctttgaa

SEQ ID NO: 666331 - DNA, 25 bp, Homo sapien
cattatgaaggtgcagcttgtagga

SEQ ID NO: 666332 - DNA, 25 bp, Homo sapien
tatccaaagggaggtggtgctctca

SEQ ID NO: 666333 - DNA, 25 bp, Homo sapien
tgagctcagaaagtgccccttgatg

SEQ ID NO: 666334 - DNA, 25 bp, Homo sapien
cgggtgatgttgctcataggctcca

SEQ ID NO: 666335 - DNA, 25 bp, Homo sapien
gaagatggtggctttaacctgactg

SEQ ID NO: 666336 - DNA, 25 bp, Homo sapien
aaaagcaccttaacaaccaattgcg

SEQ ID NO: 666337 - DNA, 25 bp, Homo sapien
ccaattgcgatgctgtcctgttcct

SEQ ID NO: 666338 - DNA, 25 bp, Homo sapien
agtgctccgtgctgtatgcgtgtgc

SEQ ID NO: 666339 - DNA, 25 bp, Homo sapien
catctgagggtacaggaagtaccag

SEQ ID NO: 666340 - DNA, 25 bp, Homo sapien
gatggatcctgagctagccaagcgc

SEQ ID NO: 666341 - DNA, 25 bp, Homo sapien
gattgactataactcctgggaggtc

SEQ ID NO: 666342 - DNA, 25 bp, Homo sapien
gctctgtggacaaggctaatccgaa

SEQ ID NO: 666343 - DNA, 25 bp, Homo sapien
ggagaagctacagcccgagaatcga

SEQ ID NO: 666344 - DNA, 25 bp, Homo sapien
tatttctatgtacttcctctcagtc

SEQ ID NO: 666345 - DNA, 25 bp, Homo sapien
aaacaggattgaagtatattattac

SEQ ID NO: 666346 - DNA, 25 bp, Homo sapien
tttcatgtcactaacagtcactttt

SEQ ID NO: 666347 - DNA, 25 bp, Homo sapien
tgtaatctgccttaatataaatgtt

SEQ ID NO: 666348 - DNA, 25 bp, Homo sapien
aatgccgggcaatagtgggcagtgc

SEQ ID NO: 666349 - DNA, 25 bp, Homo sapien
tgagtcggttcattcatgccgcccc

SEQ ID NO: 666350 - DNA, 25 bp, Homo sapien
cagatttagctgagagcgctccgca

SEQ ID NO: 666351 - DNA, 25 bp, Homo sapien
gcccggcctgcctgcatattcatga

SEQ ID NO: 666352 - DNA, 25 bp, Homo sapien
tgtgacagttgcctctaaatccaag

SEQ ID NO: 666353 - DNA, 25 bp, Homo sapien
tcaccagaggatgcacgggttgatg

SEQ ID NO: 666354 - DNA, 25 bp, Homo sapien
ttgaccagacgttcactggtgaggc

SEQ ID NO: 666355 - DNA, 25 bp, Homo sapien
taaatccaagatttggattagtggg

SEQ ID NO: 666356 - DNA, 25 bp, Homo sapien
tcacaggggtgctgacacacagtag

SEQ ID NO: 666357 - DNA, 25 bp, Homo sapien
tttctgaattgaatcaacgaaggga

SEQ ID NO: 666358 - DNA, 25 bp, Homo sapien
gccctggccaggacatttagacctg

SEQ ID NO: 666359 - DNA, 25 bp, Homo sapien
aattgaatcaacgaagggagagggt

SEQ ID NO: 666360 - DNA, 25 bp, Homo sapien
ccagttctgtcttccgatcccgggt

SEQ ID NO: 666361 - DNA, 25 bp, Homo sapien
tccggttgggatcgccccatccatg

SEQ ID NO: 666362 - DNA, 25 bp, Homo sapien
cctgaaccgggggacggcgctggcg

SEQ ID NO: 666363 - DNA, 25 bp, Homo sapien
atgtctccccggaccctcaaatcgg

SEQ ID NO: 666364 - DNA, 25 bp, Homo sapien
gcccacactccaaagatgcctattg

SEQ ID NO: 666365 - DNA, 25 bp, Homo sapien
ctgtggggatggctacttccacgtg

SEQ ID NO: 666366 - DNA, 25 bp, Homo sapien
gatgcctattgagcgtctgctccca

SEQ ID NO: 666367 - DNA, 25 bp, Homo sapien
gggatggctacttccacgtggtgag

SEQ ID NO: 666368 - DNA, 25 bp, Homo sapien
ttttgtttgtatctcaggggtcagc

SEQ ID NO: 666369 - DNA, 25 bp, Homo sapien
actatggcctatgggcagcctgttt

SEQ ID NO: 666370 - DNA, 25 bp, Homo sapien
aaactatggcctatgggcagcctgt

SEQ ID NO: 666371 - DNA, 25 bp, Homo sapien
gcaaactatggcctatgggcagcct

SEQ ID NO: 666372 - DNA, 25 bp, Homo sapien
agcccttgagatgaggtggcattgg

SEQ ID NO: 666373 - DNA, 25 bp, Homo sapien
tgtatccagtgaccgtccctgcttg

SEQ ID NO: 666374 - DNA, 25 bp, Homo sapien
actgtatccagtgaccgtccctgct

SEQ ID NO: 666375 - DNA, 25 bp, Homo sapien
atccagtgaccgtccctgcttgtgt

SEQ ID NO: 666376 - DNA, 25 bp, Homo sapien
tccttagtgctgatgtcaggggtgt

SEQ ID NO: 666377 - DNA, 25 bp, Homo sapien
ccttagtgctgatgtcaggggtgtt

SEQ ID NO: 666378 - DNA, 25 bp, Homo sapien
gctgtttggggtgcggggcactcgt

SEQ ID NO: 666379 - DNA, 25 bp, Homo sapien
ggtgcggggcactcgtttgcctctg

SEQ ID NO: 666380 - DNA, 25 bp, Homo sapien
aagtgtgcaaactggaccaaggggc

SEQ ID NO: 666381 - DNA, 25 bp, Homo sapien
tatcctgctgcgtggcagcatgggc

SEQ ID NO: 666382 - DNA, 25 bp, Homo sapien
gaagacatcatatttggcataggcc

SEQ ID NO: 666383 - DNA, 25 bp, Homo sapien
gctgggagaagacatcacagaagac

SEQ ID NO: 666384 - DNA, 25 bp, Homo sapien
gtctggaaacccagccctcttggta

SEQ ID NO: 666385 - DNA, 25 bp, Homo sapien
tctggacttatttcccctgaggtct

SEQ ID NO: 666386 - DNA, 25 bp, Homo sapien
gctggcctggatttctggacttatt

SEQ ID NO: 666387 - DNA, 25 bp, Homo sapien
cctcttggtaagctgggaagtatgg

SEQ ID NO: 666388 - DNA, 25 bp, Homo sapien
aactccgaaggcaacgagtctccgg

SEQ ID NO: 666389 - DNA, 25 bp, Homo sapien
ccggagactcgttgccttcggagtt

SEQ ID NO: 666390 - DNA, 25 bp, Homo sapien
ggccagcactgccattctcgaccat

SEQ ID NO: 666391 - DNA, 25 bp, Homo sapien
tggccagcactgccattctcgacca

SEQ ID NO: 666392 - DNA, 25 bp, Homo sapien
ctggccagcactgccattctcgacc

SEQ ID NO: 666393 - DNA, 25 bp, Homo sapien
gcagcctctgcacggttcagagcct

SEQ ID NO: 666394 - DNA, 25 bp, Homo sapien
gagggggtagttgaggagcgggtca

SEQ ID NO: 666395 - DNA, 25 bp, Homo sapien
ctagcagcctctgcacggttcagag

SEQ ID NO: 666396 - DNA, 25 bp, Homo sapien
cagctgcggtcgagggggtagttga

SEQ ID NO: 666397 - DNA, 25 bp, Homo sapien
gtcttcctttgctgtatgtccccat

SEQ ID NO: 666398 - DNA, 25 bp, Homo sapien
ctgtcttcctttgctgtatgtcccc

SEQ ID NO: 666399 - DNA, 25 bp, Homo sapien
tgtcttcctttgctgtatgtcccca

SEQ ID NO: 666400 - DNA, 25 bp, Homo sapien
agagagagacaaggacctgctcagg

SEQ ID NO: 666401 - DNA, 25 bp, Homo sapien
gacaggcaaacttgtagcccaggcc

SEQ ID NO: 666402 - DNA, 25 bp, Homo sapien
tctttgtaggaactagacagcccag

SEQ ID NO: 666403 - DNA, 25 bp, Homo sapien
tcggaagccagtggagttctccctg

SEQ ID NO: 666404 - DNA, 25 bp, Homo sapien
catcactccatctgggcagtttcct

SEQ ID NO: 666405 - DNA, 25 bp, Homo sapien
gacgaggacctattattgactgcgg

SEQ ID NO: 666406 - DNA, 25 bp, Homo sapien
cagggatgcagtaataggagttgtc

SEQ ID NO: 666407 - DNA, 25 bp, Homo sapien
taggttggatagttctagcctctcc

SEQ ID NO: 666408 - DNA, 25 bp, Homo sapien
acactgtcttaatgaccatcttaac

SEQ ID NO: 666409 - DNA, 25 bp, Homo sapien
tcattcttcagtgggccgctcacta

SEQ ID NO: 666410 - DNA, 25 bp, Homo sapien
cagcccttgctcacaaatacagtta

SEQ ID NO: 666411 - DNA, 25 bp, Homo sapien
gggccgctcactagtccatttttaa

SEQ ID NO: 666412 - DNA, 25 bp, Homo sapien
ttctttctatgaattctattactct

SEQ ID NO: 666413 - DNA, 25 bp, Homo sapien
atgaattctattactctaggtatct

SEQ ID NO: 666414 - DNA, 25 bp, Homo sapien
ttctatgaattctattactctaggt

SEQ ID NO: 666415 - DNA, 25 bp, Homo sapien
tatgaattctattactctaggtatc

SEQ ID NO: 666416 - DNA, 25 bp, Homo sapien
tcaagaagctccagtgttgatgggc

SEQ ID NO: 666417 - DNA, 25 bp, Homo sapien
ttgttggggcagagttctatggaca

SEQ ID NO: 666418 - DNA, 25 bp, Homo sapien
ccattgttggggcagagttctatgg

SEQ ID NO: 666419 - DNA, 25 bp, Homo sapien
ggcagagttctatggacaggatggg

SEQ ID NO: 666420 - DNA, 25 bp, Homo sapien
gttggtgaccttctgattggtagat

SEQ ID NO: 666421 - DNA, 25 bp, Homo sapien
ctttcagaggtagttgagaggaacg

SEQ ID NO: 666422 - DNA, 25 bp, Homo sapien
aggtagttgagaggaacgttgagtg

SEQ ID NO: 666423 - DNA, 25 bp, Homo sapien
ttcagaggtagttgagaggaacgtt

SEQ ID NO: 666424 - DNA, 25 bp, Homo sapien
gtagttgagaggaacgttgagtggg

SEQ ID NO: 666425 - DNA, 25 bp, Homo sapien
gcagtcctagggcaatagacagggc

SEQ ID NO: 666426 - DNA, 25 bp, Homo sapien
taatgacagttcctcacctgccaag

SEQ ID NO: 666427 - DNA, 25 bp, Homo sapien
gctcctcaggcaattgtaatgacag

SEQ ID NO: 666428 - DNA, 25 bp, Homo sapien
cagacccaggagcttaagtcataca

SEQ ID NO: 666429 - DNA, 25 bp, Homo sapien
cctcagcctcccaaatcgctgagat

SEQ ID NO: 666430 - DNA, 25 bp, Homo sapien
gcctcagcctcccaaatcgctgaga

SEQ ID NO: 666431 - DNA, 25 bp, Homo sapien
gattactggcatgagataccatgcc

SEQ ID NO: 666432 - DNA, 25 bp, Homo sapien
tactggcatgagataccatgcccgg

SEQ ID NO: 666433 - DNA, 25 bp, Homo sapien
gggagaagcaatccagtttgagctt

SEQ ID NO: 666434 - DNA, 25 bp, Homo sapien
gagaaaacagggacgcaaaagacca

SEQ ID NO: 666435 - DNA, 25 bp, Homo sapien
ggacgcaaaagaccaggcctgctgg

SEQ ID NO: 666436 - DNA, 25 bp, Homo sapien
tgattgtgggtaagatgggccatag

SEQ ID NO: 666437 - DNA, 25 bp, Homo sapien
agggagtgcatcatagcttctgtac

SEQ ID NO: 666438 - DNA, 25 bp, Homo sapien
cgaagggagtgcatcatagcttctg

SEQ ID NO: 666439 - DNA, 25 bp, Homo sapien
gaagggagtgcatcatagcttctgt

SEQ ID NO: 666440 - DNA, 25 bp, Homo sapien
aagggagtgcatcatagcttctgta

SEQ ID NO: 666441 - DNA, 25 bp, Homo sapien
ggatgtttgggtccgaggtagatgc

SEQ ID NO: 666442 - DNA, 25 bp, Homo sapien
gctccctgagctttatggctttgtc

SEQ ID NO: 666443 - DNA, 25 bp, Homo sapien
cttcttggcttctgtggatgtttgg

SEQ ID NO: 666444 - DNA, 25 bp, Homo sapien
tccgaggtagatgcagatccttgag

SEQ ID NO: 666445 - DNA, 25 bp, Homo sapien
ctgttcctcttgaggagtgtagacc

SEQ ID NO: 666446 - DNA, 25 bp, Homo sapien
gaggagtgtagaccgcctctccttt

SEQ ID NO: 666447 - DNA, 25 bp, Homo sapien
tcctcttgaggagtgtagaccgcct

SEQ ID NO: 666448 - DNA, 25 bp, Homo sapien
tcttgaggagtgtagaccgcctctc

SEQ ID NO: 666449 - DNA, 25 bp, Homo sapien
cacttcaaagccgttcatctcagtc

SEQ ID NO: 666450 - DNA, 25 bp, Homo sapien
gaccacaagagcgaggtgactagcc

SEQ ID NO: 666451 - DNA, 25 bp, Homo sapien
tccagagcagtactgagtctgccca

SEQ ID NO: 666452 - DNA, 25 bp, Homo sapien
tgactagccagtcgggcctgagcaa

SEQ ID NO: 666453 - DNA, 25 bp, Homo sapien
catttgctctgtgagaccagtcacc

SEQ ID NO: 666454 - DNA, 25 bp, Homo sapien
ggacatggcgtcagctgccctgatg

SEQ ID NO: 666455 - DNA, 25 bp, Homo sapien
gtaaacaggcaaccttatgaccttg

SEQ ID NO: 666456 - DNA, 25 bp, Homo sapien
tctctggccctcttggtgactcact

SEQ ID NO: 666457 - DNA, 25 bp, Homo sapien
ggttcctaaagctactgcaggcaga

SEQ ID NO: 666458 - DNA, 25 bp, Homo sapien
gatcaagcgcaacctctcctatgga

SEQ ID NO: 666459 - DNA, 25 bp, Homo sapien
caactccatcagcatcgatgccggt

SEQ ID NO: 666460 - DNA, 25 bp, Homo sapien
gccgagacggctactggttcctaaa

SEQ ID NO: 666461 - DNA, 25 bp, Homo sapien
tagccctggaagtcacgtagtaact

SEQ ID NO: 666462 - DNA, 25 bp, Homo sapien
catgacacctgaggtatggaattac

SEQ ID NO: 666463 - DNA, 25 bp, Homo sapien
ggttacaagcaagtcacaagcccaa

SEQ ID NO: 666464 - DNA, 25 bp, Homo sapien
tagttaacgtgtgtgcctggcactt

SEQ ID NO: 666465 - DNA, 25 bp, Homo sapien
catggctttgtagcacgccttggta

SEQ ID NO: 666466 - DNA, 25 bp, Homo sapien
ccttggtatctggtgagtgctcctt

SEQ ID NO: 666467 - DNA, 25 bp, Homo sapien
actattcttgtatcttcattcttcc

SEQ ID NO: 666468 - DNA, 25 bp, Homo sapien
ctttatcctttttgtgcagaaagaa

SEQ ID NO: 666469 - DNA, 25 bp, Homo sapien
taaccaggaagggtaagagcagtat

SEQ ID NO: 666470 - DNA, 25 bp, Homo sapien
taaccaaatgtggtaagcagtaacc

SEQ ID NO: 666471 - DNA, 25 bp, Homo sapien
ccactgcacaggcagggtcggtgtt

SEQ ID NO: 666472 - DNA, 25 bp, Homo sapien
agagcagtatagtgtccactgcaca

SEQ ID NO: 666473 - DNA, 25 bp, Homo sapien
tccaggctatgtgcccagttaaaaa

SEQ ID NO: 666474 - DNA, 25 bp, Homo sapien
agcatcctaagtgcattccagccag

SEQ ID NO: 666475 - DNA, 25 bp, Homo sapien
tgataagatcttctcaactgtcaga

SEQ ID NO: 666476 - DNA, 25 bp, Homo sapien
gctttggccagaatttagacataca

SEQ ID NO: 666477 - DNA, 25 bp, Homo sapien
tcttacctgttaggagggctggccc

SEQ ID NO: 666478 - DNA, 25 bp, Homo sapien
ctggccctgccagggtcaaaagcaa

SEQ ID NO: 666479 - DNA, 25 bp, Homo sapien
ggagtgagtgtttgtctccaagacc

SEQ ID NO: 666480 - DNA, 25 bp, Homo sapien
gttgcgttgtcatggaacagagtga

SEQ ID NO: 666481 - DNA, 25 bp, Homo sapien
gtgaatcgggcttctctcggtgtca

SEQ ID NO: 666482 - DNA, 25 bp, Homo sapien
ctgggagtgaatcgggcttctctcg

SEQ ID NO: 666483 - DNA, 25 bp, Homo sapien
gagtgaatcgggcttctctcggtgt

SEQ ID NO: 666484 - DNA, 25 bp, Homo sapien
gggagtgaatcgggcttctctcggt

SEQ ID NO: 666485 - DNA, 25 bp, Homo sapien
caaattcctggtcggcaataacgct

SEQ ID NO: 666486 - DNA, 25 bp, Homo sapien
tacagctgtccatcgaggatatcag

SEQ ID NO: 666487 - DNA, 25 bp, Homo sapien
tctccgtgtgtcgtctttgagctgg

SEQ ID NO: 666488 - DNA, 25 bp, Homo sapien
tgcccacatcggtcagtgctgcttg

SEQ ID NO: 666489 - DNA, 25 bp, Homo sapien
cagagagatggacatgcgtcccctc

SEQ ID NO: 666490 - DNA, 25 bp, Homo sapien
gtctcagccctctctgcggttgagg

SEQ ID NO: 666491 - DNA, 25 bp, Homo sapien
caagcggctttctgggtctcagccc

SEQ ID NO: 666492 - DNA, 25 bp, Homo sapien
agatggaggcgcctcactgggaggt

SEQ ID NO: 666493 - DNA, 25 bp, Homo sapien
gaaatgagacgaagccacagttatc

SEQ ID NO: 666494 - DNA, 25 bp, Homo sapien
acagttatcacactccagactcctg

SEQ ID NO: 666495 - DNA, 25 bp, Homo sapien
taggactcccgagtggcttccaggg

SEQ ID NO: 666496 - DNA, 25 bp, Homo sapien
tcttccttcagcaaaatctaggact

SEQ ID NO: 666497 - DNA, 25 bp, Homo sapien
tctggcatccgagacatcctcttgg

SEQ ID NO: 666498 - DNA, 25 bp, Homo sapien
ttggccgccgtctgtgaccttgggc

SEQ ID NO: 666499 - DNA, 25 bp, Homo sapien
tatgctgtgtatgcgcctctctggc

SEQ ID NO: 666500 - DNA, 25 bp, Homo sapien
cccgaagccagctcagtacctgagg

SEQ ID NO: 666501 - DNA, 25 bp, Homo sapien
acgttcaggggtgcagctagcagcc

SEQ ID NO: 666502 - DNA, 25 bp, Homo sapien
gatggacccttagccttcctgcttc

SEQ ID NO: 666503 - DNA, 25 bp, Homo sapien
ctagcagccggctctcccggatggg

SEQ ID NO: 666504 - DNA, 25 bp, Homo sapien
cattgaagcagacgttcaggggtgc

SEQ ID NO: 666505 - DNA, 25 bp, Homo sapien
gctaaaactagcaaactcttacaag

SEQ ID NO: 666506 - DNA, 25 bp, Homo sapien
tgaaagctaaaactagcaaactctt

SEQ ID NO: 666507 - DNA, 25 bp, Homo sapien
taaaactagcaaactcttacaagaa

SEQ ID NO: 666508 - DNA, 25 bp, Homo sapien
aagctaaaactagcaaactcttaca

SEQ ID NO: 666509 - DNA, 25 bp, Homo sapien
acgtcgagagccgttgcccgtcagg

SEQ ID NO: 666510 - DNA, 25 bp, Homo sapien
gaagcggccctggacattccgtttg

SEQ ID NO: 666511 - DNA, 25 bp, Homo sapien
gcccatacaagtgggaggcctctgg

SEQ ID NO: 666512 - DNA, 25 bp, Homo sapien
actcccacggcccatacaagtggga

SEQ ID NO: 666513 - DNA, 25 bp, Homo sapien
agcagagagtgcagaccgggtggcc

SEQ ID NO: 666514 - DNA, 25 bp, Homo sapien
cttaagtacagtgctcccagccaca

SEQ ID NO: 666515 - DNA, 25 bp, Homo sapien
cttgtgcaagcccttaagtacagtg

SEQ ID NO: 666516 - DNA, 25 bp, Homo sapien
tcccacaattgctggggtggacatg

SEQ ID NO: 666517 - DNA, 25 bp, Homo sapien
ggaggcactgggtcttcaggcgcat

SEQ ID NO: 666518 - DNA, 25 bp, Homo sapien
aggaggcactgggtcttcaggcgca

SEQ ID NO: 666519 - DNA, 25 bp, Homo sapien
cacccgccatgggagtgtgctcagg

SEQ ID NO: 666520 - DNA, 25 bp, Homo sapien
ggcagcgtggacatctgtcccagag

SEQ ID NO: 666521 - DNA, 25 bp, Homo sapien
aaatgcaagctcaccaaggtcccct

SEQ ID NO: 666522 - DNA, 25 bp, Homo sapien
tgtgctcaggagtcgcgggcagcgt

SEQ ID NO: 666523 - DNA, 25 bp, Homo sapien
atgctgctcctgacaggtgtgatgg

SEQ ID NO: 666524 - DNA, 25 bp, Homo sapien
aggctgaggcacgagaatcacttga

SEQ ID NO: 666525 - DNA, 25 bp, Homo sapien
ctgcctgtaatcctagctcctcagg

SEQ ID NO: 666526 - DNA, 25 bp, Homo sapien
ctgctcctgacaggtgtgatggctc

SEQ ID NO: 666527 - DNA, 25 bp, Homo sapien
tccagcctgggtgacacagtgagac

SEQ ID NO: 666528 - DNA, 25 bp, Homo sapien
tgagctgagatcacaccactgcact

SEQ ID NO: 666529 - DNA, 25 bp, Homo sapien
gaacctgggagatataggttgctgt

SEQ ID NO: 666530 - DNA, 25 bp, Homo sapien
tgggagatataggttgctgtgagct

SEQ ID NO: 666531 - DNA, 25 bp, Homo sapien
aggtaggaggagcttcttatcacaa

SEQ ID NO: 666532 - DNA, 25 bp, Homo sapien
tagaaactggcaggatgaacctgga

SEQ ID NO: 666533 - DNA, 25 bp, Homo sapien
taaacctatgtgatcaccaagttca

SEQ ID NO: 666534 - DNA, 25 bp, Homo sapien
tcacatccaagagcctccggtttgg

SEQ ID NO: 666535 - DNA, 25 bp, Homo sapien
gtttgcaattttcccgaatgaacag

SEQ ID NO: 666536 - DNA, 25 bp, Homo sapien
agttgctataatgggccagctcctg

SEQ ID NO: 666537 - DNA, 25 bp, Homo sapien
cctgcggtagagaggtctcagagtt

SEQ ID NO: 666538 - DNA, 25 bp, Homo sapien
tagttgtttgcaattttcccgaatg

SEQ ID NO: 666539 - DNA, 25 bp, Homo sapien
taagtgcccggactaagtggcctca

SEQ ID NO: 666540 - DNA, 25 bp, Homo sapien
tcagtttcccctcgaagcaacggga

SEQ ID NO: 666541 - DNA, 25 bp, Homo sapien
cattgaggtcgtaacaagcgtctcc

SEQ ID NO: 666542 - DNA, 25 bp, Homo sapien
aagtgccccgcacagcgtcgttgta

SEQ ID NO: 666543 - DNA, 25 bp, Homo sapien
ccgctatgggtaggccatgcagcat

SEQ ID NO: 666544 - DNA, 25 bp, Homo sapien
ccaccgccgctatgggtaggccatg

SEQ ID NO: 666545 - DNA, 25 bp, Homo sapien
caaggagcacagtaggcgctccgga

SEQ ID NO: 666546 - DNA, 25 bp, Homo sapien
gatttgcagaagttcccactcggta

SEQ ID NO: 666547 - DNA, 25 bp, Homo sapien
cattcacggcagtagttagcccagg

SEQ ID NO: 666548 - DNA, 25 bp, Homo sapien
aaaacaaccgtatgagcgcattggc

SEQ ID NO: 666549 - DNA, 25 bp, Homo sapien
gatgtaacagaaccgactccagttg

SEQ ID NO: 666550 - DNA, 25 bp, Homo sapien
caagaagggtgctgaaggctccagc

SEQ ID NO: 666551 - DNA, 25 bp, Homo sapien
taacttgggtgggtggatctagcca

SEQ ID NO: 666552 - DNA, 25 bp, Homo sapien
tttgtcctgagtagtgtcactgggc

SEQ ID NO: 666553 - DNA, 25 bp, Homo sapien
gttcctggatactgactaacttggg

SEQ ID NO: 666554 - DNA, 25 bp, Homo sapien
tcactgggccaaaagatagatcagg

SEQ ID NO: 666555 - DNA, 25 bp, Homo sapien
catggcttcatccaggttaactgat

SEQ ID NO: 666556 - DNA, 25 bp, Homo sapien
tcatccaggttaactgatgctgcca

SEQ ID NO: 666557 - DNA, 25 bp, Homo sapien
gtggggaagaatgaacatggcttca

SEQ ID NO: 666558 - DNA, 25 bp, Homo sapien
atccaggttaactgatgctgccatt

SEQ ID NO: 666559 - DNA, 25 bp, Homo sapien
tgagcaaaaactactgtaaataact

SEQ ID NO: 666560 - DNA, 25 bp, Homo sapien
aagcacagttgtcccattgaattat

SEQ ID NO: 666561 - DNA, 25 bp, Homo sapien
tgttgggtagggcagactctgcttg

SEQ ID NO: 666562 - DNA, 25 bp, Homo sapien
caggtctggtgcaactgctgcagga

SEQ ID NO: 666563 - DNA, 25 bp, Homo sapien
agcaggtctggcatcggtctcattc

SEQ ID NO: 666564 - DNA, 25 bp, Homo sapien
cccaggcaggcgtgtactggcgtga

SEQ ID NO: 666565 - DNA, 25 bp, Homo sapien
gcaggcgtgtactggcgtgatctcg

SEQ ID NO: 666566 - DNA, 25 bp, Homo sapien
ggtctggcatcggtctcattctttt

SEQ ID NO: 666567 - DNA, 25 bp, Homo sapien
ctgttcatttcatgaggtgtcactc

SEQ ID NO: 666568 - DNA, 25 bp, Homo sapien
tgtgtagctgatagttttacaacag

SEQ ID NO: 666569 - DNA, 25 bp, Homo sapien
tactgttcatttcatgaggtgtcac

SEQ ID NO: 666570 - DNA, 25 bp, Homo sapien
caggtactgttcatttcatgaggtg

SEQ ID NO: 666571 - DNA, 25 bp, Homo sapien
agggcccatcgtcagcttctacatc

SEQ ID NO: 666572 - DNA, 25 bp, Homo sapien
cagggcccatcgtcagcttctacat

SEQ ID NO: 666573 - DNA, 25 bp, Homo sapien
atccagggcccatcgtcagcttcta

SEQ ID NO: 666574 - DNA, 25 bp, Homo sapien
tccagggcccatcgtcagcttctac

SEQ ID NO: 666575 - DNA, 25 bp, Homo sapien
tactatgtatccatacagtagaatg

SEQ ID NO: 666576 - DNA, 25 bp, Homo sapien
ccttaaaacatcatactaagtggaa

SEQ ID NO: 666577 - DNA, 25 bp, Homo sapien
tatgcaaaatctccacagtgagcaa

SEQ ID NO: 666578 - DNA, 25 bp, Homo sapien
gaaccttaaaacatcatactaagtg

SEQ ID NO: 666579 - DNA, 25 bp, Homo sapien
agaccatgtgttgtgtaattccata

SEQ ID NO: 666580 - DNA, 25 bp, Homo sapien
tacagcacaggaacttgatcgttgg

SEQ ID NO: 666581 - DNA, 25 bp, Homo sapien
tcctggaccgcgaatcagtgtgttg

SEQ ID NO: 666582 - DNA, 25 bp, Homo sapien
aagtgctccctatccagtccaaagg

SEQ ID NO: 666583 - DNA, 25 bp, Homo sapien
tctgcaagggttgtgacctgaaact

SEQ ID NO: 666584 - DNA, 25 bp, Homo sapien
cagcatggctgtatgtgcgtggtcc

SEQ ID NO: 666585 - DNA, 25 bp, Homo sapien
tgcgtggtccatagcacagtacatg

SEQ ID NO: 666586 - DNA, 25 bp, Homo sapien
taatttgatgcacctctggattcag

SEQ ID NO: 666587 - DNA, 25 bp, Homo sapien
aattgtcttcctcgattctccatcg

SEQ ID NO: 666588 - DNA, 25 bp, Homo sapien
caagatctgctgctacggtaagaca

SEQ ID NO: 666589 - DNA, 25 bp, Homo sapien
tagcttgggaaccagtaggagcact

SEQ ID NO: 666590 - DNA, 25 bp, Homo sapien
tgcactcgcactagaggtcgcaggt

SEQ ID NO: 666591 - DNA, 25 bp, Homo sapien
aatgactttctcgttgactctaggg

SEQ ID NO: 666592 - DNA, 25 bp, Homo sapien
gagaccctcactgagaagagactcc

SEQ ID NO: 666593 - DNA, 25 bp, Homo sapien
ctgatgtagaagctgagggactccc

SEQ ID NO: 666594 - DNA, 25 bp, Homo sapien
tagaagctgagggactcccggagac

SEQ ID NO: 666595 - DNA, 25 bp, Homo sapien
caaagagacagcctcgtcattcagg

SEQ ID NO: 666596 - DNA, 25 bp, Homo sapien
gtgtcctctgcacagtcacaggtag

SEQ ID NO: 666597 - DNA, 25 bp, Homo sapien
tctttccagttgagtggtgtcctct

SEQ ID NO: 666598 - DNA, 25 bp, Homo sapien
gtatatccttgccagggagcgggcc

SEQ ID NO: 666599 - DNA, 25 bp, Homo sapien
caggtaggggtatatccttgccagg

SEQ ID NO: 666600 - DNA, 25 bp, Homo sapien
aggcagcagatgtcatccgccagct

SEQ ID NO: 666601 - DNA, 25 bp, Homo sapien
cagggctccttgagtaggcagcaga

SEQ ID NO: 666602 - DNA, 25 bp, Homo sapien
ttgagtaggcagcagatgtcatccg

SEQ ID NO: 666603 - DNA, 25 bp, Homo sapien
ccttgagtaggcagcagatgtcatc

SEQ ID NO: 666604 - DNA, 25 bp, Homo sapien
cgcggtgagatgtacagccagccat

SEQ ID NO: 666605 - DNA, 25 bp, Homo sapien
tgtcaaggcagtggatcctgtagtg

SEQ ID NO: 666606 - DNA, 25 bp, Homo sapien
gctgaggcggactgacagagagtaa

SEQ ID NO: 666607 - DNA, 25 bp, Homo sapien
tcctgtagtgtctgatccggtccca

SEQ ID NO: 666608 - DNA, 25 bp, Homo sapien
ttcccaggtaacaacagcagttcct

SEQ ID NO: 666609 - DNA, 25 bp, Homo sapien
ggttcccaggtaacaacagcagttc

SEQ ID NO: 666610 - DNA, 25 bp, Homo sapien
gttcccaggtaacaacagcagttcc

SEQ ID NO: 666611 - DNA, 25 bp, Homo sapien
agacagcaccgtccaccagtctcca

SEQ ID NO: 666612 - DNA, 25 bp, Homo sapien
ggacgctggggatgttatactctct

SEQ ID NO: 666613 - DNA, 25 bp, Homo sapien
catgggagactttggccacgtggac

SEQ ID NO: 666614 - DNA, 25 bp, Homo sapien
ccacgtggacgctggggatgttata

SEQ ID NO: 666615 - DNA, 25 bp, Homo sapien
gagacgatggtcaatggctccccga

SEQ ID NO: 666616 - DNA, 25 bp, Homo sapien
tgccgggaaactgcccagggccacg

SEQ ID NO: 666617 - DNA, 25 bp, Homo sapien
ctccccgagtctcagcgacagctcg

SEQ ID NO: 666618 - DNA, 25 bp, Homo sapien
ccacctgccgggaaactgcccaggg

SEQ ID NO: 666619 - DNA, 25 bp, Homo sapien
ctttggggtaagtaaatctgctctg

SEQ ID NO: 666620 - DNA, 25 bp, Homo sapien
aaatctgctctgaattgtcttggct

SEQ ID NO: 666621 - DNA, 25 bp, Homo sapien
taaatctgctctgaattgtcttggc

SEQ ID NO: 666622 - DNA, 25 bp, Homo sapien
cttctttggggtaagtaaatctgct

SEQ ID NO: 666623 - DNA, 25 bp, Homo sapien
cctggccttggacagaggaactcaa

SEQ ID NO: 666624 - DNA, 25 bp, Homo sapien
tggccttggacagaggaactcaagc

SEQ ID NO: 666625 - DNA, 25 bp, Homo sapien
gaactcaagcttgggcttggcagag

SEQ ID NO: 666626 - DNA, 25 bp, Homo sapien
ggacagaggaactcaagcttgggct

SEQ ID NO: 666627 - DNA, 25 bp, Homo sapien
tcagaagcacatcatcgagggaaat

SEQ ID NO: 666628 - DNA, 25 bp, Homo sapien
cactcagaagcacatcatcgaggga

SEQ ID NO: 666629 - DNA, 25 bp, Homo sapien
actcagaagcacatcatcgagggaa

SEQ ID NO: 666630 - DNA, 25 bp, Homo sapien
ctcagaagcacatcatcgagggaaa

SEQ ID NO: 666631 - DNA, 25 bp, Homo sapien
tgttggtttgggtagctcagcatct

SEQ ID NO: 666632 - DNA, 25 bp, Homo sapien
tggaagtctgccagtgtccttggtc

SEQ ID NO: 666633 - DNA, 25 bp, Homo sapien
cagtttgtacaccagggatggatca

SEQ ID NO: 666634 - DNA, 25 bp, Homo sapien
tctgctgagacgcatgctctggctg

SEQ ID NO: 666635 - DNA, 25 bp, Homo sapien
tggtatcagatactgcagcgacagc

SEQ ID NO: 666636 - DNA, 25 bp, Homo sapien
tagagagaggttcagtggccatgca

SEQ ID NO: 666637 - DNA, 25 bp, Homo sapien
caatctttctaatggctgggagcaa

SEQ ID NO: 666638 - DNA, 25 bp, Homo sapien
ttcatttggacagaaggagcctctc

SEQ ID NO: 666639 - DNA, 25 bp, Homo sapien
catctgactgattgctggtgacaga

SEQ ID NO: 666640 - DNA, 25 bp, Homo sapien
gactttctccagagccgaggctact

SEQ ID NO: 666641 - DNA, 25 bp, Homo sapien
gtgacagaccggctgaagggacttt

SEQ ID NO: 666642 - DNA, 25 bp, Homo sapien
gactcacaggattcttgagttccat

SEQ ID NO: 666643 - DNA, 25 bp, Homo sapien
tcaggtgactgagctgcacatacgg

SEQ ID NO: 666644 - DNA, 25 bp, Homo sapien
aggtgactgagctgcacatacggga

SEQ ID NO: 666645 - DNA, 25 bp, Homo sapien
caggtgactgagctgcacatacggg

SEQ ID NO: 666646 - DNA, 25 bp, Homo sapien
gaaaaggcaggttagtgaccccaga

SEQ ID NO: 666647 - DNA, 25 bp, Homo sapien
gcctggtagacactgacagaatact

SEQ ID NO: 666648 - DNA, 25 bp, Homo sapien
tcagctgcctggtagacactgacag

SEQ ID NO: 666649 - DNA, 25 bp, Homo sapien
ccagagtgccaagtggcaacctcag

SEQ ID NO: 666650 - DNA, 25 bp, Homo sapien
agacagctcgccaatgaccattatc

SEQ ID NO: 666651 - DNA, 25 bp, Homo sapien
cagacagctcgccaatgaccattat

SEQ ID NO: 666652 - DNA, 25 bp, Homo sapien
agctcgccaatgaccattatccaca

SEQ ID NO: 666653 - DNA, 25 bp, Homo sapien
acagctcgccaatgaccattatcca

SEQ ID NO: 666654 - DNA, 25 bp, Homo sapien
tagcccattccctgcaaaaagtact

SEQ ID NO: 666655 - DNA, 25 bp, Homo sapien
attccctgcaaaaagtacttgaagg

SEQ ID NO: 666656 - DNA, 25 bp, Homo sapien
tgtagcccattccctgcaaaaagta

SEQ ID NO: 666657 - DNA, 25 bp, Homo sapien
tacttgaaggcctcggtgagcttcc

SEQ ID NO: 666658 - DNA, 25 bp, Homo sapien
aactacctggggcagtcccccacag

SEQ ID NO: 666659 - DNA, 25 bp, Homo sapien
ctacctggggcagtcccccacagtc

SEQ ID NO: 666660 - DNA, 25 bp, Homo sapien
ctgaactacctggggcagtccccca

SEQ ID NO: 666661 - DNA, 25 bp, Homo sapien
tgaactacctggggcagtcccccac

SEQ ID NO: 666662 - DNA, 25 bp, Homo sapien
caaggatttctagggtatggcttca

SEQ ID NO: 666663 - DNA, 25 bp, Homo sapien
cagctggttattctcacgtgtgcaa

SEQ ID NO: 666664 - DNA, 25 bp, Homo sapien
gattcagccggcttgctcagtcagc

SEQ ID NO: 666665 - DNA, 25 bp, Homo sapien
tatctttcctccgtgagtaagggca

SEQ ID NO: 666666 - DNA, 25 bp, Homo sapien
catgggaaaggctatgtcataaagt

SEQ ID NO: 666667 - DNA, 25 bp, Homo sapien
agcatcaggagcacaaatcctcgaa

SEQ ID NO: 666668 - DNA, 25 bp, Homo sapien
caatattaaatcatgttgacgaagt

SEQ ID NO: 666669 - DNA, 25 bp, Homo sapien
tacagggttgtaaatactctttgac

SEQ ID NO: 666670 - DNA, 25 bp, Homo sapien
ttatagggttcaggcgggaattgca

SEQ ID NO: 666671 - DNA, 25 bp, Homo sapien
atttatagggttcaggcgggaattg

SEQ ID NO: 666672 - DNA, 25 bp, Homo sapien
tttatagggttcaggcgggaattgc

SEQ ID NO: 666673 - DNA, 25 bp, Homo sapien
tgtatttatagggttcaggcgggaa

SEQ ID NO: 666674 - DNA, 25 bp, Homo sapien
ctcaactgcaggcgaattgtcccct

SEQ ID NO: 666675 - DNA, 25 bp, Homo sapien
gcctcaactgcaggcgaattgtccc

SEQ ID NO: 666676 - DNA, 25 bp, Homo sapien
aactgcaggcgaattgtcccctacc

SEQ ID NO: 666677 - DNA, 25 bp, Homo sapien
tcaactgcaggcgaattgtccccta

SEQ ID NO: 666678 - DNA, 25 bp, Homo sapien
cccagtatgggtctttcgatctcca

SEQ ID NO: 666679 - DNA, 25 bp, Homo sapien
gcccagtatgggtctttcgatctcc

SEQ ID NO: 666680 - DNA, 25 bp, Homo sapien
tacatttaagtgaagaaacaggaaa

SEQ ID NO: 666681 - DNA, 25 bp, Homo sapien
tttacatttaagtgaagaaacagga

SEQ ID NO: 666682 - DNA, 25 bp, Homo sapien
ctgtttacatttaagtgaagaaaca

SEQ ID NO: 666683 - DNA, 25 bp, Homo sapien
tgtttacatttaagtgaagaaacag

SEQ ID NO: 666684 - DNA, 25 bp, Homo sapien
tctgtaggtttggatcaggtccagg

SEQ ID NO: 666685 - DNA, 25 bp, Homo sapien
tcttgggcaatatgcattctgtagg

SEQ ID NO: 666686 - DNA, 25 bp, Homo sapien
ttctgtaggtttggatcaggtccag

SEQ ID NO: 666687 - DNA, 25 bp, Homo sapien
caggttgtcttggttgatgtcttgg

SEQ ID NO: 666688 - DNA, 25 bp, Homo sapien
attcagataattccctaccttcaga

SEQ ID NO: 666689 - DNA, 25 bp, Homo sapien
actggtcaagagcagtggtgagaaa

SEQ ID NO: 666690 - DNA, 25 bp, Homo sapien
cagataattccctaccttcagacca

SEQ ID NO: 666691 - DNA, 25 bp, Homo sapien
caattcagataattccctaccttca

SEQ ID NO: 666692 - DNA, 25 bp, Homo sapien
taatgtccacaacattggttgtcag

SEQ ID NO: 666693 - DNA, 25 bp, Homo sapien
caaagtgatgagccaaaataatgtc

SEQ ID NO: 666694 - DNA, 25 bp, Homo sapien
caacattggttgtcaggccagagag

SEQ ID NO: 666695 - DNA, 25 bp, Homo sapien
aaaataatgtccacaacattggttg

SEQ ID NO: 666696 - DNA, 25 bp, Homo sapien
gccttccacaagctctggatggttg

SEQ ID NO: 666697 - DNA, 25 bp, Homo sapien
tagcgcaagggtcaacattaatgag

SEQ ID NO: 666698 - DNA, 25 bp, Homo sapien
gaagctgcccagtcaatccagcctt

SEQ ID NO: 666699 - DNA, 25 bp, Homo sapien
tcaatccagcctttagcgcaagggt

SEQ ID NO: 666700 - DNA, 25 bp, Homo sapien
atgccttaatgcctcacatttgaaa

SEQ ID NO: 666701 - DNA, 25 bp, Homo sapien
tgccttaatgcctcacatttgaaag

SEQ ID NO: 666702 - DNA, 25 bp, Homo sapien
ccttaatgcctcacatttgaaagta

SEQ ID NO: 666703 - DNA, 25 bp, Homo sapien
taatgcctcacatttgaaagtaaga

SEQ ID NO: 666704 - DNA, 25 bp, Homo sapien
tgcaaatctgctgaggatgtaagct

SEQ ID NO: 666705 - DNA, 25 bp, Homo sapien
aatctgctgaggatgtaagctccag

SEQ ID NO: 666706 - DNA, 25 bp, Homo sapien
atctgctgaggatgtaagctccagc

SEQ ID NO: 666707 - DNA, 25 bp, Homo sapien
caaatctgctgaggatgtaagctcc

SEQ ID NO: 666708 - DNA, 25 bp, Homo sapien
cttaggtgggtaagaacaggaggca

SEQ ID NO: 666709 - DNA, 25 bp, Homo sapien
taggtgggtaagaacaggaggcagc

SEQ ID NO: 666710 - DNA, 25 bp, Homo sapien
aacaggaggcagcatttcagccagc

SEQ ID NO: 666711 - DNA, 25 bp, Homo sapien
aggcagcatttcagccagctcatcc

SEQ ID NO: 666712 - DNA, 25 bp, Homo sapien
aaagaatgcattgaaacaggattta

SEQ ID NO: 666713 - DNA, 25 bp, Homo sapien
tgcatatcctcaaagttaaagaatg

SEQ ID NO: 666714 - DNA, 25 bp, Homo sapien
tctcttgcatatcctcaaagttaaa

SEQ ID NO: 666715 - DNA, 25 bp, Homo sapien
tcctcaaagttaaagaatgcattga

SEQ ID NO: 666716 - DNA, 25 bp, Homo sapien
tcaagtatgataagaagggaaggtg

SEQ ID NO: 666717 - DNA, 25 bp, Homo sapien
agtatgataagaagggaaggtgtaa

SEQ ID NO: 666718 - DNA, 25 bp, Homo sapien
caagtatgataagaagggaaggtgt

SEQ ID NO: 666719 - DNA, 25 bp, Homo sapien
agatcaagtatgataagaagggaag

SEQ ID NO: 666720 - DNA, 25 bp, Homo sapien
ggccaatgtcatgatatgttagtat

SEQ ID NO: 666721 - DNA, 25 bp, Homo sapien
gatatgttagtataactggtctgtt

SEQ ID NO: 666722 - DNA, 25 bp, Homo sapien
caatgtcatgatatgttagtataac

SEQ ID NO: 666723 - DNA, 25 bp, Homo sapien
tcatgatatgttagtataactggtc

SEQ ID NO: 666724 - DNA, 25 bp, Homo sapien
cacaccatgagttgtttctatatca

SEQ ID NO: 666725 - DNA, 25 bp, Homo sapien
caccatgagttgtttctatatcatg

SEQ ID NO: 666726 - DNA, 25 bp, Homo sapien
catgagttgtttctatatcatgttc

SEQ ID NO: 666727 - DNA, 25 bp, Homo sapien
gaccacaccatgagttgtttctata

SEQ ID NO: 666728 - DNA, 25 bp, Homo sapien
ctgttgagaatacatttgcaattgg

SEQ ID NO: 666729 - DNA, 25 bp, Homo sapien
gagcccagggatctgttgagaatac

SEQ ID NO: 666730 - DNA, 25 bp, Homo sapien
ggatctgttgagaatacatttgcaa

SEQ ID NO: 666731 - DNA, 25 bp, Homo sapien
cccagggatctgttgagaatacatt

SEQ ID NO: 666732 - DNA, 25 bp, Homo sapien
ggcatgcatatttttcgtgaccttg

SEQ ID NO: 666733 - DNA, 25 bp, Homo sapien
ggtgattggcatgcatatttttcgt

SEQ ID NO: 666734 - DNA, 25 bp, Homo sapien
catatttttcgtgaccttgtgaatg

SEQ ID NO: 666735 - DNA, 25 bp, Homo sapien
gattggcatgcatatttttcgtgac

SEQ ID NO: 666736 - DNA, 25 bp, Homo sapien
acaggctctctatccagttatctca

SEQ ID NO: 666737 - DNA, 25 bp, Homo sapien
ccccagcattctagagtgtgactac

SEQ ID NO: 666738 - DNA, 25 bp, Homo sapien
gggagtaacgtgctgttgctacctt

SEQ ID NO: 666739 - DNA, 25 bp, Homo sapien
aaggagctgattcagttgtcaggcc

SEQ ID NO: 666740 - DNA, 25 bp, Homo sapien
tctcctatcttctctgcggtaaggt

SEQ ID NO: 666741 - DNA, 25 bp, Homo sapien
tcttctctgcggtaaggtagcaacc

SEQ ID NO: 666742 - DNA, 25 bp, Homo sapien
aaggtagcaaccctccatttgccac

SEQ ID NO: 666743 - DNA, 25 bp, Homo sapien
tgcggtaaggtagcaaccctccatt

SEQ ID NO: 666744 - DNA, 25 bp, Homo sapien
agtcctggaagtttcttgtaccatt

SEQ ID NO: 666745 - DNA, 25 bp, Homo sapien
tcaaagtcctggaagtttcttgtac

SEQ ID NO: 666746 - DNA, 25 bp, Homo sapien
aagtcctggaagtttcttgtaccat

SEQ ID NO: 666747 - DNA, 25 bp, Homo sapien
tcacagggttcagtagtatctgaac

SEQ ID NO: 666748 - DNA, 25 bp, Homo sapien
gctttcacagggttcagtagtatct

SEQ ID NO: 666749 - DNA, 25 bp, Homo sapien
tttcacagggttcagtagtatctga

SEQ ID NO: 666750 - DNA, 25 bp, Homo sapien
tggctttcacagggttcagtagtat

SEQ ID NO: 666751 - DNA, 25 bp, Homo sapien
acaaaaccatccacttgctgcgcaa

SEQ ID NO: 666752 - DNA, 25 bp, Homo sapien
catccacttgctgcgcaaagacaga

SEQ ID NO: 666753 - DNA, 25 bp, Homo sapien
cacttgctgcgcaaagacagaagca

SEQ ID NO: 666754 - DNA, 25 bp, Homo sapien
tgctgcgcaaagacagaagcattca

SEQ ID NO: 666755 - DNA, 25 bp, Homo sapien
tttagaagtggtttgatctctgtga

SEQ ID NO: 666756 - DNA, 25 bp, Homo sapien
cttatcatttagaagtggtttgatc

SEQ ID NO: 666757 - DNA, 25 bp, Homo sapien
catttagaagtggtttgatctctgt

SEQ ID NO: 666758 - DNA, 25 bp, Homo sapien
tgatctctgtgagctgaacatcctg

SEQ ID NO: 666759 - DNA, 25 bp, Homo sapien
cagataacgagagtagaggaatctc

SEQ ID NO: 666760 - DNA, 25 bp, Homo sapien
gataacgagagtagaggaatctcaa

SEQ ID NO: 666761 - DNA, 25 bp, Homo sapien
taacgagagtagaggaatctcaaga

SEQ ID NO: 666762 - DNA, 25 bp, Homo sapien
ggtcagataacgagagtagaggaat

SEQ ID NO: 666763 - DNA, 25 bp, Homo sapien
cagctgagacaatgggcatgtgcca

SEQ ID NO: 666764 - DNA, 25 bp, Homo sapien
tgcaaattctcggattccactccag

SEQ ID NO: 666765 - DNA, 25 bp, Homo sapien
ccagaagtgaggaccattagagctt

SEQ ID NO: 666766 - DNA, 25 bp, Homo sapien
tccactccagaactaatgaatcaga

SEQ ID NO: 666767 - DNA, 25 bp, Homo sapien
tcagaaactctgaaggtcgagccca

SEQ ID NO: 666768 - DNA, 25 bp, Homo sapien
ggcacccgccgtcagtgcagcagca

SEQ ID NO: 666769 - DNA, 25 bp, Homo sapien
cgcgggcacccgccgtcagtgcagc

SEQ ID NO: 666770 - DNA, 25 bp, Homo sapien
gcgggcacccgccgtcagtgcagca

SEQ ID NO: 666771 - DNA, 25 bp, Homo sapien
cgggcacccgccgtcagtgcagcag

SEQ ID NO: 666772 - DNA, 25 bp, Homo sapien
cacttgcgccaaggtttaagactta

SEQ ID NO: 666773 - DNA, 25 bp, Homo sapien
caaatgtaggtccaagcaaggagat

SEQ ID NO: 666774 - DNA, 25 bp, Homo sapien
gcatatggcgggtactcggtaaata

SEQ ID NO: 666775 - DNA, 25 bp, Homo sapien
caatcctagaactgtgtgtggcata

SEQ ID NO: 666776 - DNA, 25 bp, Homo sapien
tcttgtgaagtgacatatgtatccc

SEQ ID NO: 666777 - DNA, 25 bp, Homo sapien
gcacactacagacaacaggacatag

SEQ ID NO: 666778 - DNA, 25 bp, Homo sapien
gaatccaggatttaggtcaactcaa

SEQ ID NO: 666779 - DNA, 25 bp, Homo sapien
tatcccaatgatgcaaataatgctc

SEQ ID NO: 666780 - DNA, 25 bp, Homo sapien
gcacattcctgggaaaattgtctat

SEQ ID NO: 666781 - DNA, 25 bp, Homo sapien
gaaatcacgcagtcaccacgtgctg

SEQ ID NO: 666782 - DNA, 25 bp, Homo sapien
cagttatcttcaaaggcaacgagca

SEQ ID NO: 666783 - DNA, 25 bp, Homo sapien
tttacaatcggaatccaacttggcc

SEQ ID NO: 666784 - DNA, 25 bp, Homo sapien
cagatccagatccatgtatggcagg

SEQ ID NO: 666785 - DNA, 25 bp, Homo sapien
ggatctaattgttgcatgcttctct

SEQ ID NO: 666786 - DNA, 25 bp, Homo sapien
gctggtgagggatctaattgttgca

SEQ ID NO: 666787 - DNA, 25 bp, Homo sapien
gcttcaacagttttcgagctggtga

SEQ ID NO: 666788 - DNA, 25 bp, Homo sapien
ccataaaggcctgcagctgtttcac

SEQ ID NO: 666789 - DNA, 25 bp, Homo sapien
tgacaccttctggaagcactgggta

SEQ ID NO: 666790 - DNA, 25 bp, Homo sapien
tgggtactttcatccataaaggcct

SEQ ID NO: 666791 - DNA, 25 bp, Homo sapien
gctgtttcactgatccttgcagttc

SEQ ID NO: 666792 - DNA, 25 bp, Homo sapien
taagaacttcattctgagaagaccc

SEQ ID NO: 666793 - DNA, 25 bp, Homo sapien
catacagtcaaagactttgctctgg

SEQ ID NO: 666794 - DNA, 25 bp, Homo sapien
tctggtagtcaggttttgtattaag

SEQ ID NO: 666795 - DNA, 25 bp, Homo sapien
cccaagatatgtcataggttccact

SEQ ID NO: 666796 - DNA, 25 bp, Homo sapien
agagctgatcccaagtctgacgttc

SEQ ID NO: 666797 - DNA, 25 bp, Homo sapien
tgatcccaagtctgacgttctaaag

SEQ ID NO: 666798 - DNA, 25 bp, Homo sapien
tggacaatatctctttagcctcctg

SEQ ID NO: 666799 - DNA, 25 bp, Homo sapien
tcctgctggtagtgaagcaagagct

SEQ ID NO: 666800 - DNA, 25 bp, Homo sapien
atctcagccacagatgcttccaaag

SEQ ID NO: 666801 - DNA, 25 bp, Homo sapien
gttatgtattccttcatctcagcca

SEQ ID NO: 666802 - DNA, 25 bp, Homo sapien
agccacagatgcttccaaagaaaaa

SEQ ID NO: 666803 - DNA, 25 bp, Homo sapien
tttgttatgtattccttcatctcag

SEQ ID NO: 666804 - DNA, 25 bp, Homo sapien
tcattgcaagctccgcataccgggt

SEQ ID NO: 666805 - DNA, 25 bp, Homo sapien
cattgcaagctccgcataccgggtt

SEQ ID NO: 666806 - DNA, 25 bp, Homo sapien
gagttccatcagtttccagtccgtc

SEQ ID NO: 666807 - DNA, 25 bp, Homo sapien
agagttccatcagtttccagtccgt

SEQ ID NO: 666808 - DNA, 25 bp, Homo sapien
tccatcagtttccagtccgtctgca

SEQ ID NO: 666809 - DNA, 25 bp, Homo sapien
gttccatcagtttccagtccgtctg

SEQ ID NO: 666810 - DNA, 25 bp, Homo sapien
tactgttacatgttggtcctcaagc

SEQ ID NO: 666811 - DNA, 25 bp, Homo sapien
tacgttttcatagtgagatgctgac

SEQ ID NO: 666812 - DNA, 25 bp, Homo sapien
tcaagcccacccaaaagtgtggagt

SEQ ID NO: 666813 - DNA, 25 bp, Homo sapien
tagtctcagctctaggtactgttac

SEQ ID NO: 666814 - DNA, 25 bp, Homo sapien
tgaagcccttagtgtcccttaggaa

SEQ ID NO: 666815 - DNA, 25 bp, Homo sapien
tggctctaaaactttcaagactgaa

SEQ ID NO: 666816 - DNA, 25 bp, Homo sapien
aaactttcaagactgaagcccttag

SEQ ID NO: 666817 - DNA, 25 bp, Homo sapien
tttcaagactgaagcccttagtgtc

SEQ ID NO: 666818 - DNA, 25 bp, Homo sapien
taaatcgacactgatagaccggctg

SEQ ID NO: 666819 - DNA, 25 bp, Homo sapien
aatcgacactgatagaccggctgag

SEQ ID NO: 666820 - DNA, 25 bp, Homo sapien
ctgctaaatcgacactgatagaccg

SEQ ID NO: 666821 - DNA, 25 bp, Homo sapien
tcgacactgatagaccggctgagct

SEQ ID NO: 666822 - DNA, 25 bp, Homo sapien
ctaacataaaacatagccacattta

SEQ ID NO: 666823 - DNA, 25 bp, Homo sapien
cacatttaaggagctggatagttac

SEQ ID NO: 666824 - DNA, 25 bp, Homo sapien
ggagctggatagttacatagttagc

SEQ ID NO: 666825 - DNA, 25 bp, Homo sapien
taaaacatagccacatttaaggagc

SEQ ID NO: 666826 - DNA, 25 bp, Homo sapien
tgaatgggatgcagcgacttccgcc

SEQ ID NO: 666827 - DNA, 25 bp, Homo sapien
ggatgcagcgacttccgccggttcg

SEQ ID NO: 666828 - DNA, 25 bp, Homo sapien
atgggatgcagcgacttccgccggt

SEQ ID NO: 666829 - DNA, 25 bp, Homo sapien
atgcagcgacttccgccggttcgtt

SEQ ID NO: 666830 - DNA, 25 bp, Homo sapien
acttgctcgccgccaggattgcctc

SEQ ID NO: 666831 - DNA, 25 bp, Homo sapien
aatgaagggacttcgactgaagtct

SEQ ID NO: 666832 - DNA, 25 bp, Homo sapien
acaaatgaagggacttcgactgaag

SEQ ID NO: 666833 - DNA, 25 bp, Homo sapien
ggacttcgactgaagtctttcctgg

SEQ ID NO: 666834 - DNA, 25 bp, Homo sapien
gaagggacttcgactgaagtctttc

SEQ ID NO: 666835 - DNA, 25 bp, Homo sapien
cctctgaaacgccttgattcatctc

SEQ ID NO: 666836 - DNA, 25 bp, Homo sapien
cttttttagggctagagccaaggtg

SEQ ID NO: 666837 - DNA, 25 bp, Homo sapien
tttagggctagagccaaggtgaatt

SEQ ID NO: 666838 - DNA, 25 bp, Homo sapien
tctgaaacgccttgattcatctcca

SEQ ID NO: 666839 - DNA, 25 bp, Homo sapien
agacttgattccaattgatgatcat

SEQ ID NO: 666840 - DNA, 25 bp, Homo sapien
aacataaagaaagcatctctgcaaa

SEQ ID NO: 666841 - DNA, 25 bp, Homo sapien
aagatttgggtatagctcagaagcc

SEQ ID NO: 666842 - DNA, 25 bp, Homo sapien
aaagtaaatgtatgcccctagatcg

SEQ ID NO: 666843 - DNA, 25 bp, Homo sapien
gatcaagcccgccacaactatttgt

SEQ ID NO: 666844 - DNA, 25 bp, Homo sapien
atctctgatctagtcactgaagtca

SEQ ID NO: 666845 - DNA, 25 bp, Homo sapien
tctctgatctagtcactgaagtcat

SEQ ID NO: 666846 - DNA, 25 bp, Homo sapien
gatctctgatctagtcactgaagtc

SEQ ID NO: 666847 - DNA, 25 bp, Homo sapien
taaataggccgtgtgctttccagcc

SEQ ID NO: 666848 - DNA, 25 bp, Homo sapien
tattcttagttctccagatccaaag

SEQ ID NO: 666849 - DNA, 25 bp, Homo sapien
ctccctgacagagaatatcagcagg

SEQ ID NO: 666850 - DNA, 25 bp, Homo sapien
gacattatggtctacctggtcttcc

SEQ ID NO: 666851 - DNA, 25 bp, Homo sapien
taaacgcttattctgtgctaggacc

SEQ ID NO: 666852 - DNA, 25 bp, Homo sapien
caatatcacacaaatccaggcttgg

SEQ ID NO: 666853 - DNA, 25 bp, Homo sapien
taacaaggagggctcggtcaaggat

SEQ ID NO: 666854 - DNA, 25 bp, Homo sapien
gagttggtggttatgccccttggcc

SEQ ID NO: 666855 - DNA, 25 bp, Homo sapien
gcacggcagatacgtctctaatggg

SEQ ID NO: 666856 - DNA, 25 bp, Homo sapien
tgtttctggagcctagacccctggc

SEQ ID NO: 666857 - DNA, 25 bp, Homo sapien
tagacccctggcacggcagatacgt

SEQ ID NO: 666858 - DNA, 25 bp, Homo sapien
gggactgccctcgggtttcatttca

SEQ ID NO: 666859 - DNA, 25 bp, Homo sapien
gggccacatcagaggacaagtctgt

SEQ ID NO: 666860 - DNA, 25 bp, Homo sapien
gcgggtcgagctgggccgacgggta

SEQ ID NO: 666861 - DNA, 25 bp, Homo sapien
tacgacgccgaagagattagtgcgg

SEQ ID NO: 666862 - DNA, 25 bp, Homo sapien
gggaggaggtcgcagcgccctcggg

SEQ ID NO: 666863 - DNA, 25 bp, Homo sapien
tgacgcccgtccagtccggaacctc

SEQ ID NO: 666864 - DNA, 25 bp, Homo sapien
ctgacgcccgtccagtccggaacct

SEQ ID NO: 666865 - DNA, 25 bp, Homo sapien
catgcgcggccgtcagtttctcggg

SEQ ID NO: 666866 - DNA, 25 bp, Homo sapien
gaaacacaaggccacgggtcgctct

SEQ ID NO: 666867 - DNA, 25 bp, Homo sapien
ggcgatgcacatgcgtacaccgccg

SEQ ID NO: 666868 - DNA, 25 bp, Homo sapien
cgcagccgatactccctgatcaggg

SEQ ID NO: 666869 - DNA, 25 bp, Homo sapien
gagagctggtggattggactgcagt

SEQ ID NO: 666870 - DNA, 25 bp, Homo sapien
aaaggagagaatagtggacaagaga

SEQ ID NO: 666871 - DNA, 25 bp, Homo sapien
tagcacccgatccatcctaggaagg

SEQ ID NO: 666872 - DNA, 25 bp, Homo sapien
gattggactgcagttgtcctagcac

SEQ ID NO: 666873 - DNA, 25 bp, Homo sapien
tcacagtattggcgggggctgggga

SEQ ID NO: 666874 - DNA, 25 bp, Homo sapien
tggctagcccagatcagcagttggc

SEQ ID NO: 666875 - DNA, 25 bp, Homo sapien
tatctggcctatggtgaggttccca

SEQ ID NO: 666876 - DNA, 25 bp, Homo sapien
gcactgtctacaaggtatccctggg

SEQ ID NO: 666877 - DNA, 25 bp, Homo sapien
gaatactatagtgagctccggaccc

SEQ ID NO: 666878 - DNA, 25 bp, Homo sapien
caaggagactcgcaggcacagtgtt

SEQ ID NO: 666879 - DNA, 25 bp, Homo sapien
gactagaaacatgatctcgccaagg

SEQ ID NO: 666880 - DNA, 25 bp, Homo sapien
tactgaacccctatgattaagattg

SEQ ID NO: 666881 - DNA, 25 bp, Homo sapien
tcagtttggttgaggactcgatccc

SEQ ID NO: 666882 - DNA, 25 bp, Homo sapien
gtgaccactgcacccacccctcaac

SEQ ID NO: 666883 - DNA, 25 bp, Homo sapien
cacccacccctcaaccccaggagag

SEQ ID NO: 666884 - DNA, 25 bp, Homo sapien
cacccctcaaccccaggagagtttg

SEQ ID NO: 666885 - DNA, 25 bp, Homo sapien
ctgcacccacccctcaaccccagga

SEQ ID NO: 666886 - DNA, 25 bp, Homo sapien
tcacagcaaaatgggcgcactaacc

SEQ ID NO: 666887 - DNA, 25 bp, Homo sapien
ctgcctcccagagttgtccctgaga

SEQ ID NO: 666888 - DNA, 25 bp, Homo sapien
tctatatagtaaagtgctttaggcg

SEQ ID NO: 666889 - DNA, 25 bp, Homo sapien
taaagtgctttaggcgggatgtgca

SEQ ID NO: 666890 - DNA, 25 bp, Homo sapien
agccactgatgcaccaaaatgactt

SEQ ID NO: 666891 - DNA, 25 bp, Homo sapien
gagccactgatgcaccaaaatgact

SEQ ID NO: 666892 - DNA, 25 bp, Homo sapien
agagccactgatgcaccaaaatgac

SEQ ID NO: 666893 - DNA, 25 bp, Homo sapien
ttctccccgaggctgagtacgcagc

SEQ ID NO: 666894 - DNA, 25 bp, Homo sapien
gaacagtgatgagtggccttgcaca

SEQ ID NO: 666895 - DNA, 25 bp, Homo sapien
tcctggacggtacgatggtaaggct

SEQ ID NO: 666896 - DNA, 25 bp, Homo sapien
gcttgtggcctgatgtgaatcccct

SEQ ID NO: 666897 - DNA, 25 bp, Homo sapien
gcatccaagagcggaactggcccac

SEQ ID NO: 666898 - DNA, 25 bp, Homo sapien
atccaagagcggaactggcccacag

SEQ ID NO: 666899 - DNA, 25 bp, Homo sapien
ccaagagcggaactggcccacagct

SEQ ID NO: 666900 - DNA, 25 bp, Homo sapien
aagagcggaactggcccacagctcc

SEQ ID NO: 666901 - DNA, 25 bp, Homo sapien
gcttttggtcttcctgatgggcaat

SEQ ID NO: 666902 - DNA, 25 bp, Homo sapien
tgatccatcctggtgtttccactct

SEQ ID NO: 666903 - DNA, 25 bp, Homo sapien
ccccagtcagttacaggaaggctga

SEQ ID NO: 666904 - DNA, 25 bp, Homo sapien
ctgatgggcaattctgcagacaagc

SEQ ID NO: 666905 - DNA, 25 bp, Homo sapien
ccaaggcgaggccatgggaggcgct

SEQ ID NO: 666906 - DNA, 25 bp, Homo sapien
agccacatcgaaatccaaccaatgg

SEQ ID NO: 666907 - DNA, 25 bp, Homo sapien
tgcaatgagccacatcgaaatccaa

SEQ ID NO: 666908 - DNA, 25 bp, Homo sapien
aggcgaggccatgggaggcgctgcc

SEQ ID NO: 666909 - DNA, 25 bp, Homo sapien
agaagagccgtgaaaggccataagg

SEQ ID NO: 666910 - DNA, 25 bp, Homo sapien
taggcaagatacgtgtttccaggcc

SEQ ID NO: 666911 - DNA, 25 bp, Homo sapien
cactcaggtttatgtgcaaagctgc

SEQ ID NO: 666912 - DNA, 25 bp, Homo sapien
tgttagaggcctcatgttgtcccag

SEQ ID NO: 666913 - DNA, 25 bp, Homo sapien
catttgggaaacttggagggatctc

SEQ ID NO: 666914 - DNA, 25 bp, Homo sapien
ctcttactgggaatatctttgcccc

SEQ ID NO: 666915 - DNA, 25 bp, Homo sapien
cagtggagatgtagtgcctgctgcc

SEQ ID NO: 666916 - DNA, 25 bp, Homo sapien
cagctgcaggatgtaaacacagtgg

SEQ ID NO: 666917 - DNA, 25 bp, Homo sapien
tggccaaccaagaatctcttactgg

SEQ ID NO: 666918 - DNA, 25 bp, Homo sapien
tctctcagtggatgcttgggaagcc

SEQ ID NO: 666919 - DNA, 25 bp, Homo sapien
ggacactaagcaatggccctggcta

SEQ ID NO: 666920 - DNA, 25 bp, Homo sapien
gtgtcccagcaatctagagcagtgg

SEQ ID NO: 666921 - DNA, 25 bp, Homo sapien
ggctctctcttaggacccagggatc

SEQ ID NO: 666922 - DNA, 25 bp, Homo sapien
ctggcagtggcatcactgctgtccc

SEQ ID NO: 666923 - DNA, 25 bp, Homo sapien
ctcgcctcacctcgtctcgtctctg

SEQ ID NO: 666924 - DNA, 25 bp, Homo sapien
tcacctcgtctcgtctctgctggtt

SEQ ID NO: 666925 - DNA, 25 bp, Homo sapien
cattctggcagtggcatcactgctg

SEQ ID NO: 666926 - DNA, 25 bp, Homo sapien
gagcttggctgctctgtcactcgct

SEQ ID NO: 666927 - DNA, 25 bp, Homo sapien
cttggctgctctgtcactcgctggg

SEQ ID NO: 666928 - DNA, 25 bp, Homo sapien
tgtcactcgctgggggggagtgccc

SEQ ID NO: 666929 - DNA, 25 bp, Homo sapien
ctggttgaggcggggagcttggctg

SEQ ID NO: 666930 - DNA, 25 bp, Homo sapien
acgatcgggcgaagcaggaggtgag

SEQ ID NO: 666931 - DNA, 25 bp, Homo sapien
ctggactctgaagggtgcagcctgc

SEQ ID NO: 666932 - DNA, 25 bp, Homo sapien
tgcagcctgcacttggaaggagagt

SEQ ID NO: 666933 - DNA, 25 bp, Homo sapien
gggtactacagtcacaaacagcgtc

SEQ ID NO: 666934 - DNA, 25 bp, Homo sapien
tcactttttatgtacatctgggtag

SEQ ID NO: 666935 - DNA, 25 bp, Homo sapien
catgcctggctgatcgccttctttt

SEQ ID NO: 666936 - DNA, 25 bp, Homo sapien
gggtgctcatgcctcccaaaggcat

SEQ ID NO: 666937 - DNA, 25 bp, Homo sapien
tcttttttagtgtctctgtaccatt

SEQ ID NO: 666938 - DNA, 25 bp, Homo sapien
tactgggtcaatgggtagcacgcac

SEQ ID NO: 666939 - DNA, 25 bp, Homo sapien
tatattcaatatgactgggccacag

SEQ ID NO: 666940 - DNA, 25 bp, Homo sapien
tacatactgaacaatatttggatca

SEQ ID NO: 666941 - DNA, 25 bp, Homo sapien
ccacaggtgccgagatattacgtaa

SEQ ID NO: 666942 - DNA, 25 bp, Homo sapien
caagtggctggaactgtaagcatgt

SEQ ID NO: 666943 - DNA, 25 bp, Homo sapien
aagtggctggaactgtaagcatgtg

SEQ ID NO: 666944 - DNA, 25 bp, Homo sapien
gcctcaatcacccaagtggctggaa

SEQ ID NO: 666945 - DNA, 25 bp, Homo sapien
ctcatgcctcaatcacccaagtggc

SEQ ID NO: 666946 - DNA, 25 bp, Homo sapien
caccatgcctggcctcttttttttt

SEQ ID NO: 666947 - DNA, 25 bp, Homo sapien
ataggcgcatgctgccacgcctggc

SEQ ID NO: 666948 - DNA, 25 bp, Homo sapien
ccaccatgcctggcctctttttttt

SEQ ID NO: 666949 - DNA, 25 bp, Homo sapien
actataggcgcatgctgccacgcct

SEQ ID NO: 666950 - DNA, 25 bp, Homo sapien
ggaagctgtagatatggcacacttt

SEQ ID NO: 666951 - DNA, 25 bp, Homo sapien
tcagccagctgagtgagagtataga

SEQ ID NO: 666952 - DNA, 25 bp, Homo sapien
caatttggcagtatttatcaaataa

SEQ ID NO: 666953 - DNA, 25 bp, Homo sapien
aaaagtaacgcactcgccacacact

SEQ ID NO: 666954 - DNA, 25 bp, Homo sapien
gaggagccccgatttgtagtgttta

SEQ ID NO: 666955 - DNA, 25 bp, Homo sapien
ggccaatctcaaggtaccaaggtga

SEQ ID NO: 666956 - DNA, 25 bp, Homo sapien
tggagaagtggtatgcccgctaatg

SEQ ID NO: 666957 - DNA, 25 bp, Homo sapien
ttttgcaccaagatgttcaccacag

SEQ ID NO: 666958 - DNA, 25 bp, Homo sapien
tggcaggagagcagtaaggcccctt

SEQ ID NO: 666959 - DNA, 25 bp, Homo sapien
caaaagctgctagttaagccatgct

SEQ ID NO: 666960 - DNA, 25 bp, Homo sapien
ggaacacatggccatatccctgaat

SEQ ID NO: 666961 - DNA, 25 bp, Homo sapien
aagccatgctcactagtctcttgga

SEQ ID NO: 666962 - DNA, 25 bp, Homo sapien
acctcggcccatatctctgaactta

SEQ ID NO: 666963 - DNA, 25 bp, Homo sapien
ggcccatatctctgaacttaaaaac

SEQ ID NO: 666964 - DNA, 25 bp, Homo sapien
tcggcccatatctctgaacttaaaa

SEQ ID NO: 666965 - DNA, 25 bp, Homo sapien
catatctctgaacttaaaaaccaaa

SEQ ID NO: 666966 - DNA, 25 bp, Homo sapien
agaaaggacagatcccacccaccta

SEQ ID NO: 666967 - DNA, 25 bp, Homo sapien
tatatactaactccacctactaaga

SEQ ID NO: 666968 - DNA, 25 bp, Homo sapien
tccacctactaagagaaaggacaga

SEQ ID NO: 666969 - DNA, 25 bp, Homo sapien
taactccacctactaagagaaagga

SEQ ID NO: 666970 - DNA, 25 bp, Homo sapien
catctcaaagtcatgcagggccgct

SEQ ID NO: 666971 - DNA, 25 bp, Homo sapien
tttgtcatgaaccacagggactccg

SEQ ID NO: 666972 - DNA, 25 bp, Homo sapien
ctcgatgcgcgaatggaccttgtcc

SEQ ID NO: 666973 - DNA, 25 bp, Homo sapien
gactatagtagactcggatgcccgt

SEQ ID NO: 666974 - DNA, 25 bp, Homo sapien
ccaaaggcagggttgttaggcagct

SEQ ID NO: 666975 - DNA, 25 bp, Homo sapien
aggtggttgcagtccctcgacgaga

SEQ ID NO: 666976 - DNA, 25 bp, Homo sapien
tgttaggcagcttcttgccccgggc

SEQ ID NO: 666977 - DNA, 25 bp, Homo sapien
gcaaactttcaaactcagacatgga

SEQ ID NO: 666978 - DNA, 25 bp, Homo sapien
tctggtctaccaccctggtccgtgt

SEQ ID NO: 666979 - DNA, 25 bp, Homo sapien
gagggcaaagaccaggaccgtcttg

SEQ ID NO: 666980 - DNA, 25 bp, Homo sapien
tggtccgtgtgctgcgtgagggcaa

SEQ ID NO: 666981 - DNA, 25 bp, Homo sapien
gacagaggaggaaacgtcgttatta

SEQ ID NO: 666982 - DNA, 25 bp, Homo sapien
caaacaggtcttgatatgtcaccca

SEQ ID NO: 666983 - DNA, 25 bp, Homo sapien
ttttctcccaaacaggtcttgatat

SEQ ID NO: 666984 - DNA, 25 bp, Homo sapien
tttttctcccaaacaggtcttgata

SEQ ID NO: 666985 - DNA, 25 bp, Homo sapien
tcccaaacaggtcttgatatgtcac

SEQ ID NO: 666986 - DNA, 25 bp, Homo sapien
ttcctccaagctcaacttcggaaac

SEQ ID NO: 666987 - DNA, 25 bp, Homo sapien
caagctcaacttcggaaacagcctc

SEQ ID NO: 666988 - DNA, 25 bp, Homo sapien
ctcaacttcggaaacagcctccttg

SEQ ID NO: 666989 - DNA, 25 bp, Homo sapien
tccaagctcaacttcggaaacagcc

SEQ ID NO: 666990 - DNA, 25 bp, Homo sapien
tccagctccgagtgcttcaggaccc

SEQ ID NO: 666991 - DNA, 25 bp, Homo sapien
caggacccaggggtcggcagccttc

SEQ ID NO: 666992 - DNA, 25 bp, Homo sapien
gacccaggggtcggcagccttctgc

SEQ ID NO: 666993 - DNA, 25 bp, Homo sapien
aggacccaggggtcggcagccttct

SEQ ID NO: 666994 - DNA, 25 bp, Homo sapien
cttgaattcatgtctagggctttgc

SEQ ID NO: 666995 - DNA, 25 bp, Homo sapien
gacaaacagtaataagggcaacaat

SEQ ID NO: 666996 - DNA, 25 bp, Homo sapien
tacttgtacttgaattcatgtctag

SEQ ID NO: 666997 - DNA, 25 bp, Homo sapien
caaacagtaataagggcaacaatga

SEQ ID NO: 666998 - DNA, 25 bp, Homo sapien
ccagtctggcttaatcgtcagtcca

SEQ ID NO: 666999 - DNA, 25 bp, Homo sapien
tgagaaggtcaagaatggtcatcct

SEQ ID NO: 667000 - DNA, 25 bp, Homo sapien
gaccatagaatcaaaccaagcccca

SEQ ID NO: 667001 - DNA, 25 bp, Homo sapien
tcagtccagtgtaaagaagaatgct

SEQ ID NO: 667002 - DNA, 25 bp, Homo sapien
cagtcacactgaataaggaaggcct

SEQ ID NO: 667003 - DNA, 25 bp, Homo sapien
tatgagcatgaaactaacagtggcc

SEQ ID NO: 667004 - DNA, 25 bp, Homo sapien
gtatctccacactaggaacaccagg

SEQ ID NO: 667005 - DNA, 25 bp, Homo sapien
gaaggcctccatactcttgtgaaca

SEQ ID NO: 667006 - DNA, 25 bp, Homo sapien
tccatgacagcgctgtaggactcag

SEQ ID NO: 667007 - DNA, 25 bp, Homo sapien
agctgccgagtcagctccatgacag

SEQ ID NO: 667008 - DNA, 25 bp, Homo sapien
cgctcactgatctgcagctgccgag

SEQ ID NO: 667009 - DNA, 25 bp, Homo sapien
gctccagttgcgctcactgatctgc

SEQ ID NO: 667010 - DNA, 25 bp, Homo sapien
cagcgtcaccttcatgtcggccagt

SEQ ID NO: 667011 - DNA, 25 bp, Homo sapien
tgtcggccagtgtcttgatgtactc

SEQ ID NO: 667012 - DNA, 25 bp, Homo sapien
tgaagctccgtcagaccacggcgtt

SEQ ID NO: 667013 - DNA, 25 bp, Homo sapien
gccttggcaaactgttgctgaagct

SEQ ID NO: 667014 - DNA, 25 bp, Homo sapien
tccatcagcaagtacagctccttca

SEQ ID NO: 667015 - DNA, 25 bp, Homo sapien
cccgtgcaggccttgttatcagaat

SEQ ID NO: 667016 - DNA, 25 bp, Homo sapien
atgctgagcgtttatctcctcttcc

SEQ ID NO: 667017 - DNA, 25 bp, Homo sapien
catcagcaagtacagctccttcatg

SEQ ID NO: 667018 - DNA, 25 bp, Homo sapien
cagcaggaagttgtgcttgaattgc

SEQ ID NO: 667019 - DNA, 25 bp, Homo sapien
gaattgctgggactcctgcaccagc

SEQ ID NO: 667020 - DNA, 25 bp, Homo sapien
atccccttcgctgggcaaaaccttg

SEQ ID NO: 667021 - DNA, 25 bp, Homo sapien
ttgccctgccgccagcgcttgagga

SEQ ID NO: 667022 - DNA, 25 bp, Homo sapien
tgtaggaatagctgcctggaaagcg

SEQ ID NO: 667023 - DNA, 25 bp, Homo sapien
tcagagaggctgtaggaatagctgc

SEQ ID NO: 667024 - DNA, 25 bp, Homo sapien
ggcccatagatcctcaaggcctctg

SEQ ID NO: 667025 - DNA, 25 bp, Homo sapien
agagggcccatagatcctcaaggcc

SEQ ID NO: 667026 - DNA, 25 bp, Homo sapien
tggttgaaattgtcggcctcctcct

SEQ ID NO: 667027 - DNA, 25 bp, Homo sapien
tcctttcgtagctgccgctcctggg

SEQ ID NO: 667028 - DNA, 25 bp, Homo sapien
tttctggttgaaattgtcggcctcc

SEQ ID NO: 667029 - DNA, 25 bp, Homo sapien
agagctgctcttgcaagccccggag

SEQ ID NO: 667030 - DNA, 25 bp, Homo sapien
tcccattccggcaggtccctgaagt

SEQ ID NO: 667031 - DNA, 25 bp, Homo sapien
gtcaccagtgcggaaagcctctcgg

SEQ ID NO: 667032 - DNA, 25 bp, Homo sapien
gggtcgggcttagagtccaagtcac

SEQ ID NO: 667033 - DNA, 25 bp, Homo sapien
ccattccggcaggtccctgaagtca

SEQ ID NO: 667034 - DNA, 25 bp, Homo sapien
caggcagaacaaaccaaagatcacc

SEQ ID NO: 667035 - DNA, 25 bp, Homo sapien
cacaggcagaacaaaccaaagatca

SEQ ID NO: 667036 - DNA, 25 bp, Homo sapien
gcacaggcagaacaaaccaaagatc

SEQ ID NO: 667037 - DNA, 25 bp, Homo sapien
ggcagaacaaaccaaagatcaccat

SEQ ID NO: 667038 - DNA, 25 bp, Homo sapien
tccccatagagcgagcggtacttca

SEQ ID NO: 667039 - DNA, 25 bp, Homo sapien
gacatcgatggccttactgaccagg

SEQ ID NO: 667040 - DNA, 25 bp, Homo sapien
ggaagtcagcacactcgttgtccag

SEQ ID NO: 667041 - DNA, 25 bp, Homo sapien
gaatctccttagagagcccctggga

SEQ ID NO: 667042 - DNA, 25 bp, Homo sapien
gagggctgactcctcctttgcaaag

SEQ ID NO: 667043 - DNA, 25 bp, Homo sapien
actggcacttcaggtctgcactgtc

SEQ ID NO: 667044 - DNA, 25 bp, Homo sapien
tcctttgcaaagtgcaactggcact

SEQ ID NO: 667045 - DNA, 25 bp, Homo sapien
agtgcaactggcacttcaggtctgc

SEQ ID NO: 667046 - DNA, 25 bp, Homo sapien
cacaacccaggaaggttagtgctgg

SEQ ID NO: 667047 - DNA, 25 bp, Homo sapien
gtgctgggagtctcagtaccagcca

SEQ ID NO: 667048 - DNA, 25 bp, Homo sapien
tgctgggagtctcagtaccagccat

SEQ ID NO: 667049 - DNA, 25 bp, Homo sapien
acacaacccaggaaggttagtgctg

SEQ ID NO: 667050 - DNA, 25 bp, Homo sapien
tcttcttatcggccttccccaggga

SEQ ID NO: 667051 - DNA, 25 bp, Homo sapien
ctgcaccaaagtcttcttatcggcc

SEQ ID NO: 667052 - DNA, 25 bp, Homo sapien
aagtcttcttatcggccttccccag

SEQ ID NO: 667053 - DNA, 25 bp, Homo sapien
caccaaagtcttcttatcggccttc

SEQ ID NO: 667054 - DNA, 25 bp, Homo sapien
gccatgtggctcttgattagggaga

SEQ ID NO: 667055 - DNA, 25 bp, Homo sapien
gcccggcctactgtagattctagaa

SEQ ID NO: 667056 - DNA, 25 bp, Homo sapien
gatggagccaactgcacgtgaagat

SEQ ID NO: 667057 - DNA, 25 bp, Homo sapien
caaagatttaggcattcattcttcc

SEQ ID NO: 667058 - DNA, 25 bp, Homo sapien
cacaccatgtccgtgggaaggctgt

SEQ ID NO: 667059 - DNA, 25 bp, Homo sapien
gagtgagggctcaaacacagcagct

SEQ ID NO: 667060 - DNA, 25 bp, Homo sapien
ggttaaacaatgtgctggtgtggtc

SEQ ID NO: 667061 - DNA, 25 bp, Homo sapien
gccaacaaacagtggcacctataaa

SEQ ID NO: 667062 - DNA, 25 bp, Homo sapien
ggcaacagtgccaccgcagccctcg

SEQ ID NO: 667063 - DNA, 25 bp, Homo sapien
gaggggtgtgacactggaagagagg

SEQ ID NO: 667064 - DNA, 25 bp, Homo sapien
cagtgccaccgcagccctcggccag

SEQ ID NO: 667065 - DNA, 25 bp, Homo sapien
ggaggggtgtgacactggaagagag

SEQ ID NO: 667066 - DNA, 25 bp, Homo sapien
cacaaataaattccaaatactttct

SEQ ID NO: 667067 - DNA, 25 bp, Homo sapien
atttcacaaataaattccaaatact

SEQ ID NO: 667068 - DNA, 25 bp, Homo sapien
ttctttgagacggagtcccgttctg

SEQ ID NO: 667069 - DNA, 25 bp, Homo sapien
gcaagcttcacctccggggttcatg

SEQ ID NO: 667070 - DNA, 25 bp, Homo sapien
ggaagtggcttcagggttccagcca

SEQ ID NO: 667071 - DNA, 25 bp, Homo sapien
tgtttgcttgcttatcctgatgtca

SEQ ID NO: 667072 - DNA, 25 bp, Homo sapien
ccaccgtgcaggctttgcttgtttg

SEQ ID NO: 667073 - DNA, 25 bp, Homo sapien
cagtttcattacttgtaccgtgacc

SEQ ID NO: 667074 - DNA, 25 bp, Homo sapien
ctcccacagcggctgtggttctttg

SEQ ID NO: 667075 - DNA, 25 bp, Homo sapien
gagccccatgcctgacattgttgca

SEQ ID NO: 667076 - DNA, 25 bp, Homo sapien
ctttgatgaatgactctctctctca

SEQ ID NO: 667077 - DNA, 25 bp, Homo sapien
acatgcgttattcctgttggtcctc

SEQ ID NO: 667078 - DNA, 25 bp, Homo sapien
cacagagacactggcttgggggggc

SEQ ID NO: 667079 - DNA, 25 bp, Homo sapien
cagagacactggcttgggggggctt

SEQ ID NO: 667080 - DNA, 25 bp, Homo sapien
ccttgccagggaggcataagctgcc

SEQ ID NO: 667081 - DNA, 25 bp, Homo sapien
cagggaggcataagctgcccatttc

SEQ ID NO: 667082 - DNA, 25 bp, Homo sapien
gctccttatgcagccgcatggagat

SEQ ID NO: 667083 - DNA, 25 bp, Homo sapien
gccgcatggagatgtccttagagac

SEQ ID NO: 667084 - DNA, 25 bp, Homo sapien
tgcttagccagctcagtctcgatga

SEQ ID NO: 667085 - DNA, 25 bp, Homo sapien
agccgcgcccgtttcttctccacca

SEQ ID NO: 667086 - DNA, 25 bp, Homo sapien
gggaggctaccagtccccatcaaga

SEQ ID NO: 667087 - DNA, 25 bp, Homo sapien
caaataaatccaagggtccaacaag

SEQ ID NO: 667088 - DNA, 25 bp, Homo sapien
tacatggggagtggtacctgccctc

SEQ ID NO: 667089 - DNA, 25 bp, Homo sapien
tctcaaatgagctcccatctgggcc

SEQ ID NO: 667090 - DNA, 25 bp, Homo sapien
gcaaaggccccaccgaggttctgta

SEQ ID NO: 667091 - DNA, 25 bp, Homo sapien
caaaggccccaccgaggttctgtag

SEQ ID NO: 667092 - DNA, 25 bp, Homo sapien
ggcgctcggctttgcgcagccggta

SEQ ID NO: 667093 - DNA, 25 bp, Homo sapien
tgatacacgtcctcctccatataga

SEQ ID NO: 667094 - DNA, 25 bp, Homo sapien
caggatgcggcaggtcttgctggcc

SEQ ID NO: 667095 - DNA, 25 bp, Homo sapien
tgctccagaccacggataagctcgc

SEQ ID NO: 667096 - DNA, 25 bp, Homo sapien
tcggcccgcagctcctcaatctcgt

SEQ ID NO: 667097 - DNA, 25 bp, Homo sapien
ctcggcccgcagctcctcaatctcg

SEQ ID NO: 667098 - DNA, 25 bp, Homo sapien
cggcccgcagctcctcaatctcgtc

SEQ ID NO: 667099 - DNA, 25 bp, Homo sapien
tactggccacacctaggactgaatg

SEQ ID NO: 667100 - DNA, 25 bp, Homo sapien
tgatttctagacctttgacctccag

SEQ ID NO: 667101 - DNA, 25 bp, Homo sapien
tgaatgacagacctccaaagacgtc

SEQ ID NO: 667102 - DNA, 25 bp, Homo sapien
aagacgtccatgttcacattcccag

SEQ ID NO: 667103 - DNA, 25 bp, Homo sapien
gtccaaggggcaagaaggcctctgt

SEQ ID NO: 667104 - DNA, 25 bp, Homo sapien
cagggatgaatgacctgctaaaggc

SEQ ID NO: 667105 - DNA, 25 bp, Homo sapien
tgaatgacctgctaaaggcatccct

SEQ ID NO: 667106 - DNA, 25 bp, Homo sapien
ggatgaatgacctgctaaaggcatc

SEQ ID NO: 667107 - DNA, 25 bp, Homo sapien
ggctactcttgaagctaacccagat

SEQ ID NO: 667108 - DNA, 25 bp, Homo sapien
gctactcttgaagctaacccagatt

SEQ ID NO: 667109 - DNA, 25 bp, Homo sapien
gctaccacctattaggaggctcact

SEQ ID NO: 667110 - DNA, 25 bp, Homo sapien
tcaacaaacaaaacacggctaccac

SEQ ID NO: 667111 - DNA, 25 bp, Homo sapien
gagacagactgtttcaacaaacaaa

SEQ ID NO: 667112 - DNA, 25 bp, Homo sapien
caaaacacggctaccacctattagg

SEQ ID NO: 667113 - DNA, 25 bp, Homo sapien
ccggctgggccggacagccaaacat

SEQ ID NO: 667114 - DNA, 25 bp, Homo sapien
tggactgattcccaagaatcctggg

SEQ ID NO: 667115 - DNA, 25 bp, Homo sapien
aagagcctcttggtcccggctgggc

SEQ ID NO: 667116 - DNA, 25 bp, Homo sapien
agccaaacatgagctcacactactg

SEQ ID NO: 667117 - DNA, 25 bp, Homo sapien
ggctggagatgaaagtgaccaaaca

SEQ ID NO: 667118 - DNA, 25 bp, Homo sapien
tttggggcccactggaacctttgca

SEQ ID NO: 667119 - DNA, 25 bp, Homo sapien
atgcatggctatgacggaattggcc

SEQ ID NO: 667120 - DNA, 25 bp, Homo sapien
gagatgaaagtgaccaaacaccagg

SEQ ID NO: 667121 - DNA, 25 bp, Homo sapien
cggaagggctgctctgtggagtggg

SEQ ID NO: 667122 - DNA, 25 bp, Homo sapien
ggctgctctgtggagtgggccggca

SEQ ID NO: 667123 - DNA, 25 bp, Homo sapien
ggagtgggccggcagtggccacagg

SEQ ID NO: 667124 - DNA, 25 bp, Homo sapien
ccccggaagggctgctctgtggagt

SEQ ID NO: 667125 - DNA, 25 bp, Homo sapien
ccacccaagaggccagggcagccat

SEQ ID NO: 667126 - DNA, 25 bp, Homo sapien
gccagccccacccaagaggccaggg

SEQ ID NO: 667127 - DNA, 25 bp, Homo sapien
gccccacccaagaggccagggcagc

SEQ ID NO: 667128 - DNA, 25 bp, Homo sapien
cagccccacccaagaggccagggca

SEQ ID NO: 667129 - DNA, 25 bp, Homo sapien
gaaatgagatgctccctgtgcaccc

SEQ ID NO: 667130 - DNA, 25 bp, Homo sapien
gggaaagaaggccaggacacgcagc

SEQ ID NO: 667131 - DNA, 25 bp, Homo sapien
tggcatcaccgtgccacatgatgtc

SEQ ID NO: 667132 - DNA, 25 bp, Homo sapien
acgtcctgctcctctggttgggaat

SEQ ID NO: 667133 - DNA, 25 bp, Homo sapien
agagcagaccataccagactggaga

SEQ ID NO: 667134 - DNA, 25 bp, Homo sapien
ccttctatcttctcactgggagaga

SEQ ID NO: 667135 - DNA, 25 bp, Homo sapien
cccagagcagaccataccagactgg

SEQ ID NO: 667136 - DNA, 25 bp, Homo sapien
gagagttgcccgatttatgctttcc

SEQ ID NO: 667137 - DNA, 25 bp, Homo sapien
acagtccttcgcagttgacagttcc

SEQ ID NO: 667138 - DNA, 25 bp, Homo sapien
tcacagtccttcgcagttgacagtt

SEQ ID NO: 667139 - DNA, 25 bp, Homo sapien
cacagtccttcgcagttgacagttc

SEQ ID NO: 667140 - DNA, 25 bp, Homo sapien
gacatactggggatttggagtcctt

SEQ ID NO: 667141 - DNA, 25 bp, Homo sapien
gcatcttagaggcaaagtagtccag

SEQ ID NO: 667142 - DNA, 25 bp, Homo sapien
accagacctggtgggacctccttca

SEQ ID NO: 667143 - DNA, 25 bp, Homo sapien
tcctttcccttgtactcagtttctg

SEQ ID NO: 667144 - DNA, 25 bp, Homo sapien
taattctggtctccccaaaagctct

SEQ ID NO: 667145 - DNA, 25 bp, Homo sapien
ctggccttagcgctgttcttgaact

SEQ ID NO: 667146 - DNA, 25 bp, Homo sapien
tcgtgtgctcctggcaaactgtccc

SEQ ID NO: 667147 - DNA, 25 bp, Homo sapien
actcagttggctccacggcatcctg

SEQ ID NO: 667148 - DNA, 25 bp, Homo sapien
cttgagatagtcgttctccgagcgc

SEQ ID NO: 667149 - DNA, 25 bp, Homo sapien
gatagtcgttctccgagcgcagctc

SEQ ID NO: 667150 - DNA, 25 bp, Homo sapien
gagatagtcgttctccgagcgcagc

SEQ ID NO: 667151 - DNA, 25 bp, Homo sapien
tgagatagtcgttctccgagcgcag

SEQ ID NO: 667152 - DNA, 25 bp, Homo sapien
cccaccgacgacgcggccaccgacg

SEQ ID NO: 667153 - DNA, 25 bp, Homo sapien
gcccaccgacgacgcggccaccgac

SEQ ID NO: 667154 - DNA, 25 bp, Homo sapien
tgcccaccgacgacgcggccaccga

SEQ ID NO: 667155 - DNA, 25 bp, Homo sapien
ccaccgacgacgcggccaccgacgg

SEQ ID NO: 667156 - DNA, 25 bp, Homo sapien
gcagtccgacacctccgagctgcta

SEQ ID NO: 667157 - DNA, 25 bp, Homo sapien
gacacctccgagctgctatccgtga

SEQ ID NO: 667158 - DNA, 25 bp, Homo sapien
tcctccgacgcgcagtccgacacct

SEQ ID NO: 667159 - DNA, 25 bp, Homo sapien
cacctccgagctgctatccgtgagg

SEQ ID NO: 667160 - DNA, 25 bp, Homo sapien
caggcgactgctgagcccgggcctg

SEQ ID NO: 667161 - DNA, 25 bp, Homo sapien
cagccggccacgtctttgggccggg

SEQ ID NO: 667162 - DNA, 25 bp, Homo sapien
tcttgtccggccgtgaggagaacgc

SEQ ID NO: 667163 - DNA, 25 bp, Homo sapien
ggcgcgcggtggctctttttcctct

SEQ ID NO: 667164 - DNA, 25 bp, Homo sapien
aacccgcatccatgcacgcccagcg

SEQ ID NO: 667165 - DNA, 25 bp, Homo sapien
cccctcgccccgtgccgagcgtgcg

SEQ ID NO: 667166 - DNA, 25 bp, Homo sapien
cgtgccgagcgtgcgcgaactccgc

SEQ ID NO: 667167 - DNA, 25 bp, Homo sapien
aggaacccgcatccatgcacgccca

SEQ ID NO: 667168 - DNA, 25 bp, Homo sapien
cacacacaattgaagctcccagggc

SEQ ID NO: 667169 - DNA, 25 bp, Homo sapien
ccaagcttagaacttgatccctgcc

SEQ ID NO: 667170 - DNA, 25 bp, Homo sapien
ggcagcgtcctgtctgtcgtggaaa

SEQ ID NO: 667171 - DNA, 25 bp, Homo sapien
gcaaacagaccgacaagtcgcacgg

SEQ ID NO: 667172 - DNA, 25 bp, Homo sapien
caccaaggcaaaggtgggctcggca

SEQ ID NO: 667173 - DNA, 25 bp, Homo sapien
catggacaacggaacctaaactgga

SEQ ID NO: 667174 - DNA, 25 bp, Homo sapien
caaactggcttaacaccggcagaga

SEQ ID NO: 667175 - DNA, 25 bp, Homo sapien
ccatccctggtgaggacaaattctc

SEQ ID NO: 667176 - DNA, 25 bp, Homo sapien
tttttgtctgccaccagtgccaggt

SEQ ID NO: 667177 - DNA, 25 bp, Homo sapien
atattgtcaaaccttagaaacctgg

SEQ ID NO: 667178 - DNA, 25 bp, Homo sapien
tactgtagcagcgtcgttcctcctc

SEQ ID NO: 667179 - DNA, 25 bp, Homo sapien
tatccttccagacaatgttccatga

SEQ ID NO: 667180 - DNA, 25 bp, Homo sapien
gatgtctgacccctatagaggcacc

SEQ ID NO: 667181 - DNA, 25 bp, Homo sapien
aacgaagttacctagcggagcctgg

SEQ ID NO: 667182 - DNA, 25 bp, Homo sapien
tctcaccagcgtgttggaggccact

SEQ ID NO: 667183 - DNA, 25 bp, Homo sapien
ccccagtgtggacggaacagaatct

SEQ ID NO: 667184 - DNA, 25 bp, Homo sapien
tacttagcttcagcatgcgtgtaca

SEQ ID NO: 667185 - DNA, 25 bp, Homo sapien
gcaggagagggagtttgtaaacaac

SEQ ID NO: 667186 - DNA, 25 bp, Homo sapien
tcatagtatagtaagatttgcctaa

SEQ ID NO: 667187 - DNA, 25 bp, Homo sapien
tgattgaagcctctaaatgaattgt

SEQ ID NO: 667188 - DNA, 25 bp, Homo sapien
cttttggatgcttctcggaggcgag

SEQ ID NO: 667189 - DNA, 25 bp, Homo sapien
tgaagtactgtcgttccattccttt

SEQ ID NO: 667190 - DNA, 25 bp, Homo sapien
tggattttggactgaagtactgtcg

SEQ ID NO: 667191 - DNA, 25 bp, Homo sapien
tgagtggggctataacatcgccatc

SEQ ID NO: 667192 - DNA, 25 bp, Homo sapien
aagacgggatgcactgaacccctag

SEQ ID NO: 667193 - DNA, 25 bp, Homo sapien
gggatgcactgaacccctagcttct

SEQ ID NO: 667194 - DNA, 25 bp, Homo sapien
gtcccctctgcaataaaaggcccag

SEQ ID NO: 667195 - DNA, 25 bp, Homo sapien
ttcacggagcacaaactctgtcctg

SEQ ID NO: 667196 - DNA, 25 bp, Homo sapien
caatgacgtgaaaccatagaggtaa

SEQ ID NO: 667197 - DNA, 25 bp, Homo sapien
ccatgcctgttggtttccagttaga

SEQ ID NO: 667198 - DNA, 25 bp, Homo sapien
tttggttacaagatgatgcacgatc

SEQ ID NO: 667199 - DNA, 25 bp, Homo sapien
ccaaagggaggcgatacaatgacgt

SEQ ID NO: 667200 - DNA, 25 bp, Homo sapien
aatgctccctactgctcttggctga

SEQ ID NO: 667201 - DNA, 25 bp, Homo sapien
gctgacaggactttgataaagcccc

SEQ ID NO: 667202 - DNA, 25 bp, Homo sapien
taaaacccttcagtgtcaatgctcc

SEQ ID NO: 667203 - DNA, 25 bp, Homo sapien
gctccttcctgaaatgcatcatgtt

SEQ ID NO: 667204 - DNA, 25 bp, Homo sapien
tatttccagactctccaagttccag

SEQ ID NO: 667205 - DNA, 25 bp, Homo sapien
ggctgtgtctatactaagcatgtac

SEQ ID NO: 667206 - DNA, 25 bp, Homo sapien
agttccagtctatctgcagctagag

SEQ ID NO: 667207 - DNA, 25 bp, Homo sapien
tgatttagtttcacagtacctagga

SEQ ID NO: 667208 - DNA, 25 bp, Homo sapien
tctagttggagatgacacacattca

SEQ ID NO: 667209 - DNA, 25 bp, Homo sapien
taacagtaagaactttctggctggg

SEQ ID NO: 667210 - DNA, 25 bp, Homo sapien
tattcccacgggtgtcactctagtt

SEQ ID NO: 667211 - DNA, 25 bp, Homo sapien
cacattcaggtagatcatacagtgc

SEQ ID NO: 667212 - DNA, 25 bp, Homo sapien
tgataaagcaccgacatcctgagct

SEQ ID NO: 667213 - DNA, 25 bp, Homo sapien
ctggatcatgccttgtggcacttga

SEQ ID NO: 667214 - DNA, 25 bp, Homo sapien
cctgagctacgctttcatgtctcac

SEQ ID NO: 667215 - DNA, 25 bp, Homo sapien
gccttgtggcacttgataaagcacc

SEQ ID NO: 667216 - DNA, 25 bp, Homo sapien
ggacaataatgctaaacagtatcca

SEQ ID NO: 667217 - DNA, 25 bp, Homo sapien
caaatgactataacttaaatgggaa

SEQ ID NO: 667218 - DNA, 25 bp, Homo sapien
agtatccattcccaactcctgtagg

SEQ ID NO: 667219 - DNA, 25 bp, Homo sapien
gaacttttcagcagatagacttact

SEQ ID NO: 667220 - DNA, 25 bp, Homo sapien
aaaattgtgcaaagtttgtgagtaa

SEQ ID NO: 667221 - DNA, 25 bp, Homo sapien
gtgcaaagtttgtgagtaacaggcc

SEQ ID NO: 667222 - DNA, 25 bp, Homo sapien
agtttgtgagtaacaggccacctac

SEQ ID NO: 667223 - DNA, 25 bp, Homo sapien
gcaaagtttgtgagtaacaggccac

SEQ ID NO: 667224 - DNA, 25 bp, Homo sapien
tcttgcggcatacaaactctttctg

SEQ ID NO: 667225 - DNA, 25 bp, Homo sapien
tctgcacaccactgaacaaaatatt

SEQ ID NO: 667226 - DNA, 25 bp, Homo sapien
ttacaatatactcgaatcagctgct

SEQ ID NO: 667227 - DNA, 25 bp, Homo sapien
acaaaatattgtcttgcggcataca

SEQ ID NO: 667228 - DNA, 25 bp, Homo sapien
gcaaatttctctggcagaagttgtg

SEQ ID NO: 667229 - DNA, 25 bp, Homo sapien
ctgcaaatttctctggcagaagttg

SEQ ID NO: 667230 - DNA, 25 bp, Homo sapien
aatttctctggcagaagttgtgaaa

SEQ ID NO: 667231 - DNA, 25 bp, Homo sapien
aaatttctctggcagaagttgtgaa

SEQ ID NO: 667232 - DNA, 25 bp, Homo sapien
tggtttttagtaatcctgattgctc

SEQ ID NO: 667233 - DNA, 25 bp, Homo sapien
ttttagtaatcctgattgctctgtt

SEQ ID NO: 667234 - DNA, 25 bp, Homo sapien
gtttttagtaatcctgattgctctg

SEQ ID NO: 667235 - DNA, 25 bp, Homo sapien
ctggtttttagtaatcctgattgct

SEQ ID NO: 667236 - DNA, 25 bp, Homo sapien
gaagctaacatgatcaattggattc

SEQ ID NO: 667237 - DNA, 25 bp, Homo sapien
aatagaagctaacatgatcaattgg

SEQ ID NO: 667238 - DNA, 25 bp, Homo sapien
gctaacatgatcaattggattcttt

SEQ ID NO: 667239 - DNA, 25 bp, Homo sapien
tagaagctaacatgatcaattggat

SEQ ID NO: 667240 - DNA, 25 bp, Homo sapien
ttataaaagtattcaaccacagttg

SEQ ID NO: 667241 - DNA, 25 bp, Homo sapien
ggcagccctagattgaaattcaaca

SEQ ID NO: 667242 - DNA, 25 bp, Homo sapien
taattataaaagtattcaaccacag

SEQ ID NO: 667243 - DNA, 25 bp, Homo sapien
cacaaaccaggcagccctagattga

SEQ ID NO: 667244 - DNA, 25 bp, Homo sapien
tgtctcctggatttagcaactctga

SEQ ID NO: 667245 - DNA, 25 bp, Homo sapien
aactctgaagtcaccggtgattctg

SEQ ID NO: 667246 - DNA, 25 bp, Homo sapien
tttactaagtgagcaagaaacaaac

SEQ ID NO: 667247 - DNA, 25 bp, Homo sapien
caccggtgattctggagagagtaca

SEQ ID NO: 667248 - DNA, 25 bp, Homo sapien
gcccagcttagtttcgtgaccggaa

SEQ ID NO: 667249 - DNA, 25 bp, Homo sapien
tggccttctgctaggtagatgcaaa

SEQ ID NO: 667250 - DNA, 25 bp, Homo sapien
gaatcacactaagcctgccagaagg

SEQ ID NO: 667251 - DNA, 25 bp, Homo sapien
tatgcctgtatagtgatggtatcca

SEQ ID NO: 667252 - DNA, 25 bp, Homo sapien
tactttgggtttagcactggcaacc

SEQ ID NO: 667253 - DNA, 25 bp, Homo sapien
actggcaacctcttttggaagagat

SEQ ID NO: 667254 - DNA, 25 bp, Homo sapien
ccactataaaatcttcagccttcag

SEQ ID NO: 667255 - DNA, 25 bp, Homo sapien
agccttcagtttcacgtctagcaat

SEQ ID NO: 667256 - DNA, 25 bp, Homo sapien
ctcacccacatacttgaatagatta

SEQ ID NO: 667257 - DNA, 25 bp, Homo sapien
gaatagattacggtattcaatttgt

SEQ ID NO: 667258 - DNA, 25 bp, Homo sapien
taaaatctctcgtgcgtctttcaat

SEQ ID NO: 667259 - DNA, 25 bp, Homo sapien
caatttgggatcagtagagtataaa

SEQ ID NO: 667260 - DNA, 25 bp, Homo sapien
tcaaacacagtttaggaggagctag

SEQ ID NO: 667261 - DNA, 25 bp, Homo sapien
gctgtggtagaacggcagcactctc

SEQ ID NO: 667262 - DNA, 25 bp, Homo sapien
cactctcggcaggaagctacggtag

SEQ ID NO: 667263 - DNA, 25 bp, Homo sapien
cagtgtgcagcaaatagaatccagc

SEQ ID NO: 667264 - DNA, 25 bp, Homo sapien
tgtcgtcaattgctgtagaaatgcg

SEQ ID NO: 667265 - DNA, 25 bp, Homo sapien
ctctatgtagtcatctgctttgagg

SEQ ID NO: 667266 - DNA, 25 bp, Homo sapien
tccagcacctgtaatctctatgtag

SEQ ID NO: 667267 - DNA, 25 bp, Homo sapien
tgtcagcttagtataggcttccatg

SEQ ID NO: 667268 - DNA, 25 bp, Homo sapien
gacaactgcttctccaccgtactaa

SEQ ID NO: 667269 - DNA, 25 bp, Homo sapien
aatttgtgcttggtaagctgtgagc

SEQ ID NO: 667270 - DNA, 25 bp, Homo sapien
gaggcacagtgttctaaagacaact

SEQ ID NO: 667271 - DNA, 25 bp, Homo sapien
tgagctgccatgcttactgtgttcc

SEQ ID NO: 667272 - DNA, 25 bp, Homo sapien
cctagtatgatactctagccaagta

SEQ ID NO: 667273 - DNA, 25 bp, Homo sapien
gatactctagccaagtatcaaggaa

SEQ ID NO: 667274 - DNA, 25 bp, Homo sapien
tagaaatgtctagttgagcctagta

SEQ ID NO: 667275 - DNA, 25 bp, Homo sapien
tattcacttgaactcatctagaaat

SEQ ID NO: 667276 - DNA, 25 bp, Homo sapien
ttgtgttgataagctctacggtgta

SEQ ID NO: 667277 - DNA, 25 bp, Homo sapien
tctacggtgtaaagagttgcgagtg

SEQ ID NO: 667278 - DNA, 25 bp, Homo sapien
aataatgttgccaactttgtgttga

SEQ ID NO: 667279 - DNA, 25 bp, Homo sapien
ttgcgagtgtggaacatgtcataca

SEQ ID NO: 667280 - DNA, 25 bp, Homo sapien
tcattaacacctttgaccccactaa

SEQ ID NO: 667281 - DNA, 25 bp, Homo sapien
gattatgttaacgttattagagaca

SEQ ID NO: 667282 - DNA, 25 bp, Homo sapien
tgaggaggcagattagtaaagccat

SEQ ID NO: 667283 - DNA, 25 bp, Homo sapien
aaggaaaagggatagtggcagacaa

SEQ ID NO: 667284 - DNA, 25 bp, Homo sapien
tttcattcttaataaactaggccag

SEQ ID NO: 667285 - DNA, 25 bp, Homo sapien
cattcttaataaactaggccaggtg

SEQ ID NO: 667286 - DNA, 25 bp, Homo sapien
gcccggccaagaactttcattctta

SEQ ID NO: 667287 - DNA, 25 bp, Homo sapien
ccggccaagaactttcattcttaat

SEQ ID NO: 667288 - DNA, 25 bp, Homo sapien
taaagcgcttgtaatcaaaattatt

SEQ ID NO: 667289 - DNA, 25 bp, Homo sapien
cgcaactcattgtctacttcacaga

SEQ ID NO: 667290 - DNA, 25 bp, Homo sapien
cttatctctagcacaaatacgcaac

SEQ ID NO: 667291 - DNA, 25 bp, Homo sapien
cacgggcaaacttaataaagcgctt

SEQ ID NO: 667292 - DNA, 25 bp, Homo sapien
tgttttcaggacgccctttatatgg

SEQ ID NO: 667293 - DNA, 25 bp, Homo sapien
ttttcaggacgccctttatatggcc

SEQ ID NO: 667294 - DNA, 25 bp, Homo sapien
tttcaggacgccctttatatggcca

SEQ ID NO: 667295 - DNA, 25 bp, Homo sapien
ttgttttcaggacgccctttatatg

SEQ ID NO: 667296 - DNA, 25 bp, Homo sapien
cccactggaagttttaggataggca

SEQ ID NO: 667297 - DNA, 25 bp, Homo sapien
tggaagttttaggataggcaccaaa

SEQ ID NO: 667298 - DNA, 25 bp, Homo sapien
actggaagttttaggataggcacca

SEQ ID NO: 667299 - DNA, 25 bp, Homo sapien
cactggaagttttaggataggcacc

SEQ ID NO: 667300 - DNA, 25 bp, Homo sapien
ccattagaattaataaggtgctcaa

SEQ ID NO: 667301 - DNA, 25 bp, Homo sapien
gacaggtgattcaagtggtcctaca

SEQ ID NO: 667302 - DNA, 25 bp, Homo sapien
ggtgctcaaacatcataactgagcc

SEQ ID NO: 667303 - DNA, 25 bp, Homo sapien
tcagggatgagaccatattgttcca

SEQ ID NO: 667304 - DNA, 25 bp, Homo sapien
cattttatggttacctggcatccca

SEQ ID NO: 667305 - DNA, 25 bp, Homo sapien
cagctggcttcaagagataataatt

SEQ ID NO: 667306 - DNA, 25 bp, Homo sapien
ccccaagtaacaagtgtggaaacag

SEQ ID NO: 667307 - DNA, 25 bp, Homo sapien
gggcgtgacatgattgctgttctat

SEQ ID NO: 667308 - DNA, 25 bp, Homo sapien
tggagagagaccaaaaccaagtgga

SEQ ID NO: 667309 - DNA, 25 bp, Homo sapien
accaagtggatgttagacctcaata

SEQ ID NO: 667310 - DNA, 25 bp, Homo sapien
ggcttgcagaaccagagtacttcat

SEQ ID NO: 667311 - DNA, 25 bp, Homo sapien
tcaatacttagaagggagaggtgct

SEQ ID NO: 667312 - DNA, 25 bp, Homo sapien
gagataacgataacttccttacaga

SEQ ID NO: 667313 - DNA, 25 bp, Homo sapien
tccttacagactactgtgagaacca

SEQ ID NO: 667314 - DNA, 25 bp, Homo sapien
gaaagcaccctggacactgtaatgg

SEQ ID NO: 667315 - DNA, 25 bp, Homo sapien
tataacacagtagtggaaccaaaca

SEQ ID NO: 667316 - DNA, 25 bp, Homo sapien
cctccgggcgagcaagtggaataaa

SEQ ID NO: 667317 - DNA, 25 bp, Homo sapien
caagtggaataaatcgtccatcaaa

SEQ ID NO: 667318 - DNA, 25 bp, Homo sapien
gtccatttcacctccgggcgagcaa

SEQ ID NO: 667319 - DNA, 25 bp, Homo sapien
taaatcgtccatcaaacatgtgaga

SEQ ID NO: 667320 - DNA, 25 bp, Homo sapien
aaagtccagcaatctgaacacagag

SEQ ID NO: 667321 - DNA, 25 bp, Homo sapien
tggttgtttttcacccagtgcgtga

SEQ ID NO: 667322 - DNA, 25 bp, Homo sapien
gaactagacatcctgctagataccc

SEQ ID NO: 667323 - DNA, 25 bp, Homo sapien
gaacatctcgttcacttatctgcag

SEQ ID NO: 667324 - DNA, 25 bp, Homo sapien
agataactatttcatgagacagaga

SEQ ID NO: 667325 - DNA, 25 bp, Homo sapien
catgcctggcctaagataactattt

SEQ ID NO: 667326 - DNA, 25 bp, Homo sapien
tacaggtgcgcacaatcatgtctgg

SEQ ID NO: 667327 - DNA, 25 bp, Homo sapien
attacaggtgcgcacaatcatgtct

SEQ ID NO: 667328 - DNA, 25 bp, Homo sapien
tgtatcaatgattcggacgaggaga

SEQ ID NO: 667329 - DNA, 25 bp, Homo sapien
ctcaatgtggccatggataggatca

SEQ ID NO: 667330 - DNA, 25 bp, Homo sapien
acctcccagctgtttgatgtatcga

SEQ ID NO: 667331 - DNA, 25 bp, Homo sapien
ctcaaatcgattgtgtgaagctcct

SEQ ID NO: 667332 - DNA, 25 bp, Homo sapien
cttatttaggtatcactaccagaca

SEQ ID NO: 667333 - DNA, 25 bp, Homo sapien
tttaggtatcactaccagacagatc

SEQ ID NO: 667334 - DNA, 25 bp, Homo sapien
cagatcaagtatattggatttgagt

SEQ ID NO: 667335 - DNA, 25 bp, Homo sapien
taccagacagatcaagtatattgga

SEQ ID NO: 667336 - DNA, 25 bp, Homo sapien
cataattgagttatatcactttata

SEQ ID NO: 667337 - DNA, 25 bp, Homo sapien
tttagaaaagatccactactcacaa

SEQ ID NO: 667338 - DNA, 25 bp, Homo sapien
ctcacaattctatcactgagaagca

SEQ ID NO: 667339 - DNA, 25 bp, Homo sapien
aaaacataacaaactcagatcctct

SEQ ID NO: 667340 - DNA, 25 bp, Homo sapien
caatcgctggatataactaagcagc

SEQ ID NO: 667341 - DNA, 25 bp, Homo sapien
tgaaccaatcgctggatataactaa

SEQ ID NO: 667342 - DNA, 25 bp, Homo sapien
tgtatcaacgtggatttgaaccaat

SEQ ID NO: 667343 - DNA, 25 bp, Homo sapien
tatcaacgtggatttgaaccaatcg

SEQ ID NO: 667344 - DNA, 25 bp, Homo sapien
tcaaaacgagactcatcaagacaag

SEQ ID NO: 667345 - DNA, 25 bp, Homo sapien
gcagtaatgcgcctgtgatttcatt

SEQ ID NO: 667346 - DNA, 25 bp, Homo sapien
tcatcaagacaaggcagtaatgcgc

SEQ ID NO: 667347 - DNA, 25 bp, Homo sapien
tttcaaaacgagactcatcaagaca

SEQ ID NO: 667348 - DNA, 25 bp, Homo sapien
ttcagcagcaccggctcttcaaagc

SEQ ID NO: 667349 - DNA, 25 bp, Homo sapien
atgtcttgtagtcgggatggagttc

SEQ ID NO: 667350 - DNA, 25 bp, Homo sapien
tgctccggaccccatgtcttgtagt

SEQ ID NO: 667351 - DNA, 25 bp, Homo sapien
ccaccgcgcctgaggaaggagcaca

SEQ ID NO: 667352 - DNA, 25 bp, Homo sapien
ctgtcatcgcaacggggacgcttgg

SEQ ID NO: 667353 - DNA, 25 bp, Homo sapien
ggggttctcgggctgtcatcgcaac

SEQ ID NO: 667354 - DNA, 25 bp, Homo sapien
gttctcgggctgtcatcgcaacggg

SEQ ID NO: 667355 - DNA, 25 bp, Homo sapien
tttgagggggttctcgggctgtcat

SEQ ID NO: 667356 - DNA, 25 bp, Homo sapien
agcagtcaagaacctcggcgccgga

SEQ ID NO: 667357 - DNA, 25 bp, Homo sapien
tacacctggcgtccggcacagcagt

SEQ ID NO: 667358 - DNA, 25 bp, Homo sapien
agcctattggcctcctgcgcaggct

SEQ ID NO: 667359 - DNA, 25 bp, Homo sapien
agtccaaggagtattggcagcctat

SEQ ID NO: 667360 - DNA, 25 bp, Homo sapien
tatagctgtaaaactaccaccacaa

SEQ ID NO: 667361 - DNA, 25 bp, Homo sapien
aagtgcacaattcgatgaattttag

SEQ ID NO: 667362 - DNA, 25 bp, Homo sapien
gaattttagtgatgcatatagctgt

SEQ ID NO: 667363 - DNA, 25 bp, Homo sapien
gctgtaaaactaccaccacaaacaa

SEQ ID NO: 667364 - DNA, 25 bp, Homo sapien
ttacaggcatgcacccggctaattt

SEQ ID NO: 667365 - DNA, 25 bp, Homo sapien
atagtagagacagagtttcaccatg

SEQ ID NO: 667366 - DNA, 25 bp, Homo sapien
ttgtatttatagtagagacagagtt

SEQ ID NO: 667367 - DNA, 25 bp, Homo sapien
tgagccactgtgcccggcccaagca

SEQ ID NO: 667368 - DNA, 25 bp, Homo sapien
gtgaatacatctcaagaaatctgat

SEQ ID NO: 667369 - DNA, 25 bp, Homo sapien
atagactaatacagtaattttggta

SEQ ID NO: 667370 - DNA, 25 bp, Homo sapien
tggtggcaggtgattgaattacggg

SEQ ID NO: 667371 - DNA, 25 bp, Homo sapien
gtgtccccattcaaaactcattttg

SEQ ID NO: 667372 - DNA, 25 bp, Homo sapien
gcgcctggccggactattagtattt

SEQ ID NO: 667373 - DNA, 25 bp, Homo sapien
catcttcaggagtacccagtggtca

SEQ ID NO: 667374 - DNA, 25 bp, Homo sapien
gtggtcaaacactagcaggaaactc

SEQ ID NO: 667375 - DNA, 25 bp, Homo sapien
gatggtatataaccctctggccagg

SEQ ID NO: 667376 - DNA, 25 bp, Homo sapien
tagtcgtttcagtaaaacgtcatca

SEQ ID NO: 667377 - DNA, 25 bp, Homo sapien
gctctttcactgacaacatcctgta

SEQ ID NO: 667378 - DNA, 25 bp, Homo sapien
gggattctgcatcactatcgatggc

SEQ ID NO: 667379 - DNA, 25 bp, Homo sapien
cattttcttgacagacgcgtttggc

SEQ ID NO: 667380 - DNA, 25 bp, Homo sapien
caccttgccttatcatgttgttgat

SEQ ID NO: 667381 - DNA, 25 bp, Homo sapien
gccttatcatgttgttgatatcttt

SEQ ID NO: 667382 - DNA, 25 bp, Homo sapien
ctcaccttgccttatcatgttgttg

SEQ ID NO: 667383 - DNA, 25 bp, Homo sapien
tgctcaccttgccttatcatgttgt

SEQ ID NO: 667384 - DNA, 25 bp, Homo sapien
gccctcccaatgattttaaagctcc

SEQ ID NO: 667385 - DNA, 25 bp, Homo sapien
ttaacaagccctcccaatgatttta

SEQ ID NO: 667386 - DNA, 25 bp, Homo sapien
caagccctcccaatgattttaaagc

SEQ ID NO: 667387 - DNA, 25 bp, Homo sapien
cctcccaatgattttaaagctccct

SEQ ID NO: 667388 - DNA, 25 bp, Homo sapien
aaagaggcaggattaacagttactg

SEQ ID NO: 667389 - DNA, 25 bp, Homo sapien
aagaggcaggattaacagttactga

SEQ ID NO: 667390 - DNA, 25 bp, Homo sapien
taaggcctgacccattcttgtgcgg

SEQ ID NO: 667391 - DNA, 25 bp, Homo sapien
cttagaagggctgccattgaacttg

SEQ ID NO: 667392 - DNA, 25 bp, Homo sapien
gcagagcgcttcttggtgtaaggcc

SEQ ID NO: 667393 - DNA, 25 bp, Homo sapien
attgaacttgtacagcagagcgctt

SEQ ID NO: 667394 - DNA, 25 bp, Homo sapien
gggaaatgcggcgtggtgagcctgg

SEQ ID NO: 667395 - DNA, 25 bp, Homo sapien
ctggctgttgtttaatatgtggaaa

SEQ ID NO: 667396 - DNA, 25 bp, Homo sapien
gagcctggctgttgtttaatatgtg

SEQ ID NO: 667397 - DNA, 25 bp, Homo sapien
ctgctgggaaatgcggcgtggtgag

SEQ ID NO: 667398 - DNA, 25 bp, Homo sapien
ccaaagcagtagcagagagaataaa

SEQ ID NO: 667399 - DNA, 25 bp, Homo sapien
caggatgattccaacgtggaaaaaa

SEQ ID NO: 667400 - DNA, 25 bp, Homo sapien
tctattagccagcaggatgattcca

SEQ ID NO: 667401 - DNA, 25 bp, Homo sapien
tgctcacaaccaaagcagtagcaga

SEQ ID NO: 667402 - DNA, 25 bp, Homo sapien
gacttcactcttcctacatatattg

SEQ ID NO: 667403 - DNA, 25 bp, Homo sapien
catatggtcctgattcgccaagtcg

SEQ ID NO: 667404 - DNA, 25 bp, Homo sapien
tatttcagtgcaaatgacttcactc

SEQ ID NO: 667405 - DNA, 25 bp, Homo sapien
tcactggtccactggaacagtcagg

SEQ ID NO: 667406 - DNA, 25 bp, Homo sapien
gcctacaaacattgagaacatgggt

SEQ ID NO: 667407 - DNA, 25 bp, Homo sapien
aaagctctcattctcaatacactgg

SEQ ID NO: 667408 - DNA, 25 bp, Homo sapien
gaacatgggtagaagcaatgccttc

SEQ ID NO: 667409 - DNA, 25 bp, Homo sapien
ttctaaaggatcttgacgagggtgg

SEQ ID NO: 667410 - DNA, 25 bp, Homo sapien
tgtctggttttgtaggaacagaaaa

SEQ ID NO: 667411 - DNA, 25 bp, Homo sapien
ctgatgtctggttttgtaggaacag

SEQ ID NO: 667412 - DNA, 25 bp, Homo sapien
gatgtctggttttgtaggaacagaa

SEQ ID NO: 667413 - DNA, 25 bp, Homo sapien
ctctgatgtctggttttgtaggaac

SEQ ID NO: 667414 - DNA, 25 bp, Homo sapien
ttagttgggtgtggcacaagactga

SEQ ID NO: 667415 - DNA, 25 bp, Homo sapien
ttgggtgtggcacaagactgagatg

SEQ ID NO: 667416 - DNA, 25 bp, Homo sapien
ggtgtggcacaagactgagatgaaa

SEQ ID NO: 667417 - DNA, 25 bp, Homo sapien
attagttgggtgtggcacaagactg

SEQ ID NO: 667418 - DNA, 25 bp, Homo sapien
attatatgccacaacttctcttgga

SEQ ID NO: 667419 - DNA, 25 bp, Homo sapien
tatatgccacaacttctcttggaat

SEQ ID NO: 667420 - DNA, 25 bp, Homo sapien
tattatatgccacaacttctcttgg

SEQ ID NO: 667421 - DNA, 25 bp, Homo sapien
ttatatgccacaacttctcttggaa

SEQ ID NO: 667422 - DNA, 25 bp, Homo sapien
gtattaagaagatattcagggaacc

SEQ ID NO: 667423 - DNA, 25 bp, Homo sapien
gcgcctggaccagagtcatttgttc

SEQ ID NO: 667424 - DNA, 25 bp, Homo sapien
gactcacactaacctcaccttaatg

SEQ ID NO: 667425 - DNA, 25 bp, Homo sapien
cctctgagatagctggaaaggcatg

SEQ ID NO: 667426 - DNA, 25 bp, Homo sapien
ttatataacttgtcagtggaaaaga

SEQ ID NO: 667427 - DNA, 25 bp, Homo sapien
tttatataacttgtcagtggaaaag

SEQ ID NO: 667428 - DNA, 25 bp, Homo sapien
ttttatataacttgtcagtggaaaa

SEQ ID NO: 667429 - DNA, 25 bp, Homo sapien
gggctgattcctataacttttcata

SEQ ID NO: 667430 - DNA, 25 bp, Homo sapien
tgactattagcttggggctgattcc

SEQ ID NO: 667431 - DNA, 25 bp, Homo sapien
tagcttggggctgattcctataact

SEQ ID NO: 667432 - DNA, 25 bp, Homo sapien
gcttggggctgattcctataacttt

SEQ ID NO: 667433 - DNA, 25 bp, Homo sapien
caattataagttggcactgagagca

SEQ ID NO: 667434 - DNA, 25 bp, Homo sapien
agtccatgactaaaaaccactaaca

SEQ ID NO: 667435 - DNA, 25 bp, Homo sapien
aaacttcaattataagttggcactg

SEQ ID NO: 667436 - DNA, 25 bp, Homo sapien
ccgcatttatcaactgctttttgaa

SEQ ID NO: 667437 - DNA, 25 bp, Homo sapien
tgaacatagtcggtgcttttttaca

SEQ ID NO: 667438 - DNA, 25 bp, Homo sapien
gaacatagtcggtgcttttttacat

SEQ ID NO: 667439 - DNA, 25 bp, Homo sapien
atttcttgtattgaacatagtcggt

SEQ ID NO: 667440 - DNA, 25 bp, Homo sapien
cttgtattgaacatagtcggtgctt

SEQ ID NO: 667441 - DNA, 25 bp, Homo sapien
ttcattagatcaggacagtgaacta

SEQ ID NO: 667442 - DNA, 25 bp, Homo sapien
catccagttttagacatagatcacg

SEQ ID NO: 667443 - DNA, 25 bp, Homo sapien
ctaaagtgaattcaaaacacgtcca

SEQ ID NO: 667444 - DNA, 25 bp, Homo sapien
tatcttccttcgtaactcatttgaa

SEQ ID NO: 667445 - DNA, 25 bp, Homo sapien
cactgtgcccggctcgaatgcataa

SEQ ID NO: 667446 - DNA, 25 bp, Homo sapien
tgctagggggtctaacatgccaaat

SEQ ID NO: 667447 - DNA, 25 bp, Homo sapien
tacactttttaggagcacaatggga

SEQ ID NO: 667448 - DNA, 25 bp, Homo sapien
cctcaagtaatccatgcactgcagc

SEQ ID NO: 667449 - DNA, 25 bp, Homo sapien
tagtgctaaggacccagttctcttt

SEQ ID NO: 667450 - DNA, 25 bp, Homo sapien
gtgctaaggacccagttctctttgg

SEQ ID NO: 667451 - DNA, 25 bp, Homo sapien
atagtgctaaggacccagttctctt

SEQ ID NO: 667452 - DNA, 25 bp, Homo sapien
gctaaggacccagttctctttggcc

SEQ ID NO: 667453 - DNA, 25 bp, Homo sapien
ttggagaagcaccaattaatgaatg

SEQ ID NO: 667454 - DNA, 25 bp, Homo sapien
ctcttgtgctttagtcagattggtc

SEQ ID NO: 667455 - DNA, 25 bp, Homo sapien
gtatcagtgtgatctctccagcatc

SEQ ID NO: 667456 - DNA, 25 bp, Homo sapien
tcagtgtgatctctccagcatcatt

SEQ ID NO: 667457 - DNA, 25 bp, Homo sapien
tatgtcctgttgttcctgttactgg

SEQ ID NO: 667458 - DNA, 25 bp, Homo sapien
ggctgtggccattgttagaagagtt

SEQ ID NO: 667459 - DNA, 25 bp, Homo sapien
gaagaaggagcgattttcaattttg

SEQ ID NO: 667460 - DNA, 25 bp, Homo sapien
gagtttgaccaggtaaaattgatac

SEQ ID NO: 667461 - DNA, 25 bp, Homo sapien
gaactgtagcgttcatggacagaaa

SEQ ID NO: 667462 - DNA, 25 bp, Homo sapien
ctgcggtaggagaactgtagcgttc

SEQ ID NO: 667463 - DNA, 25 bp, Homo sapien
taggagaactgtagcgttcatggac

SEQ ID NO: 667464 - DNA, 25 bp, Homo sapien
tagcgttcatggacagaaattggag

SEQ ID NO: 667465 - DNA, 25 bp, Homo sapien
agactcccactgtcagttcgaactt

SEQ ID NO: 667466 - DNA, 25 bp, Homo sapien
agttcgaacttccttgactcttggg

SEQ ID NO: 667467 - DNA, 25 bp, Homo sapien
gactcttgggtgcattagaggagac

SEQ ID NO: 667468 - DNA, 25 bp, Homo sapien
cattagaggagacattggcatcagg

SEQ ID NO: 667469 - DNA, 25 bp, Homo sapien
actgatgaatactgaagagtggccc

SEQ ID NO: 667470 - DNA, 25 bp, Homo sapien
gagtggcccaataagttactgtctg

SEQ ID NO: 667471 - DNA, 25 bp, Homo sapien
gagcaacggcttcaatactaatcct

SEQ ID NO: 667472 - DNA, 25 bp, Homo sapien
ggcagtatcattctccatttaggga

SEQ ID NO: 667473 - DNA, 25 bp, Homo sapien
tcttctgagcggatcaccacctcaa

SEQ ID NO: 667474 - DNA, 25 bp, Homo sapien
ccacagtgcagaatcgtgactccat

SEQ ID NO: 667475 - DNA, 25 bp, Homo sapien
tcaatgctgtttaggtgtttcacca

SEQ ID NO: 667476 - DNA, 25 bp, Homo sapien
gtgactccatgctaaactctccaaa

SEQ ID NO: 667477 - DNA, 25 bp, Homo sapien
tgagctataggcaaagagcacaatt

SEQ ID NO: 667478 - DNA, 25 bp, Homo sapien
tgagaacttcaataatccaaggaaa

SEQ ID NO: 667479 - DNA, 25 bp, Homo sapien
tccaaggaaaagtacgaggtgagct

SEQ ID NO: 667480 - DNA, 25 bp, Homo sapien
aaaatggttgcaagttgagaacttc

SEQ ID NO: 667481 - DNA, 25 bp, Homo sapien
ttctgccagctttagtctgtttaca

SEQ ID NO: 667482 - DNA, 25 bp, Homo sapien
cattccatgaagtcttcgtgtttcc

SEQ ID NO: 667483 - DNA, 25 bp, Homo sapien
taatacaaaatttctgccagcttta

SEQ ID NO: 667484 - DNA, 25 bp, Homo sapien
tcgtgtttcctgaaccattacagtc

SEQ ID NO: 667485 - DNA, 25 bp, Homo sapien
tctgttgattgagtatagtgttgac

SEQ ID NO: 667486 - DNA, 25 bp, Homo sapien
ttccacaggattacgcacacaagat

SEQ ID NO: 667487 - DNA, 25 bp, Homo sapien
ctatgtgagatcctggctgttcatc

SEQ ID NO: 667488 - DNA, 25 bp, Homo sapien
tagtgttgacagaaagtctctccta

SEQ ID NO: 667489 - DNA, 25 bp, Homo sapien
tcagaccagccacaatactctgtaa

SEQ ID NO: 667490 - DNA, 25 bp, Homo sapien
gtcacttggtgcatttttcagacca

SEQ ID NO: 667491 - DNA, 25 bp, Homo sapien
tttataagttggtcacttggtgcat

SEQ ID NO: 667492 - DNA, 25 bp, Homo sapien
gccacaatactctgtaaccggctca

SEQ ID NO: 667493 - DNA, 25 bp, Homo sapien
taaatatctccgtccggtcagtggg

SEQ ID NO: 667494 - DNA, 25 bp, Homo sapien
tgcaacaggagtaatgactgcttct

SEQ ID NO: 667495 - DNA, 25 bp, Homo sapien
tggggtagaaggtgcaaatgacctt

SEQ ID NO: 667496 - DNA, 25 bp, Homo sapien
ctttgggtggctgatgcaacaggag

SEQ ID NO: 667497 - DNA, 25 bp, Homo sapien
cgagtgaactttcgaggtgttccaa

SEQ ID NO: 667498 - DNA, 25 bp, Homo sapien
tccacattagcctgtgctgtcagtt

SEQ ID NO: 667499 - DNA, 25 bp, Homo sapien
tctgcgtctgctcccaaaaagatcc

SEQ ID NO: 667500 - DNA, 25 bp, Homo sapien
caaagtgctgttgaaggttatactc

SEQ ID NO: 667501 - DNA, 25 bp, Homo sapien
aaataaatacgtaagtatcaataat

SEQ ID NO: 667502 - DNA, 25 bp, Homo sapien
taagccattgcacgcctggctgagt

SEQ ID NO: 667503 - DNA, 25 bp, Homo sapien
tttaaatgccaattggccgggtgtg

SEQ ID NO: 667504 - DNA, 25 bp, Homo sapien
tagctgttttaaatgccaattggcc

SEQ ID NO: 667505 - DNA, 25 bp, Homo sapien
cagtaaaacttgaaaggtccaggag

SEQ ID NO: 667506 - DNA, 25 bp, Homo sapien
gaagccgtaaagtcagcagtatgaa

SEQ ID NO: 667507 - DNA, 25 bp, Homo sapien
agcaatgatgcagggtggctcttca

SEQ ID NO: 667508 - DNA, 25 bp, Homo sapien
tatatggcttaaagtagtgctcctt

SEQ ID NO: 667509 - DNA, 25 bp, Homo sapien
tgcttctacgagaagtccatcatgc

SEQ ID NO: 667510 - DNA, 25 bp, Homo sapien
atttgggcacataatcgcattggca

SEQ ID NO: 667511 - DNA, 25 bp, Homo sapien
taagtcatccccaatcatccgaaaa

SEQ ID NO: 667512 - DNA, 25 bp, Homo sapien
cagatccaagcagcatagaagtaaa

SEQ ID NO: 667513 - DNA, 25 bp, Homo sapien
aatgatggatttagcaagtcttgtc

SEQ ID NO: 667514 - DNA, 25 bp, Homo sapien
aattaaacagatccttaacactgca

SEQ ID NO: 667515 - DNA, 25 bp, Homo sapien
cagatccttaacactgcaaggaatc

SEQ ID NO: 667516 - DNA, 25 bp, Homo sapien
gaaattaaacagatccttaacactg

SEQ ID NO: 667517 - DNA, 25 bp, Homo sapien
taaacagatccttaacactgcaagg

SEQ ID NO: 667518 - DNA, 25 bp, Homo sapien
tctgcttccggcttcgtggtaactt

SEQ ID NO: 667519 - DNA, 25 bp, Homo sapien
ctctgcttccggcttcgtggtaact

SEQ ID NO: 667520 - DNA, 25 bp, Homo sapien
gaaatatatctaaaaaaattggctc

SEQ ID NO: 667521 - DNA, 25 bp, Homo sapien
tgcttccggcttcgtggtaactttg

SEQ ID NO: 667522 - DNA, 25 bp, Homo sapien
cttgtggtagatttgacatgtccat

SEQ ID NO: 667523 - DNA, 25 bp, Homo sapien
gttcacgaaattcttgtggtagatt

SEQ ID NO: 667524 - DNA, 25 bp, Homo sapien
ttcacgaaattcttgtggtagattt

SEQ ID NO: 667525 - DNA, 25 bp, Homo sapien
gtggtagatttgacatgtccatcca

SEQ ID NO: 667526 - DNA, 25 bp, Homo sapien
ccagtttttctccactaaggcaatc

SEQ ID NO: 667527 - DNA, 25 bp, Homo sapien
tcccagtttttctccactaaggcaa

SEQ ID NO: 667528 - DNA, 25 bp, Homo sapien
agtttttctccactaaggcaatcat

SEQ ID NO: 667529 - DNA, 25 bp, Homo sapien
tgcctcccagtttttctccactaag

SEQ ID NO: 667530 - DNA, 25 bp, Homo sapien
cacttcatggttgccaaaatgtcaa

SEQ ID NO: 667531 - DNA, 25 bp, Homo sapien
acttcatggttgccaaaatgtcaac

SEQ ID NO: 667532 - DNA, 25 bp, Homo sapien
tcacttcatggttgccaaaatgtca

SEQ ID NO: 667533 - DNA, 25 bp, Homo sapien
gctgggctggactaacagctaaaca

SEQ ID NO: 667534 - DNA, 25 bp, Homo sapien
gctgggccaggatcataaggtttct

SEQ ID NO: 667535 - DNA, 25 bp, Homo sapien
acagagcatgtgtctctatgccggg

SEQ ID NO: 667536 - DNA, 25 bp, Homo sapien
gggcctagggacaagaatacaacca

SEQ ID NO: 667537 - DNA, 25 bp, Homo sapien
ggctttaaactttgctcctcttcta

SEQ ID NO: 667538 - DNA, 25 bp, Homo sapien
gctttaaactttgctcctcttctat

SEQ ID NO: 667539 - DNA, 25 bp, Homo sapien
tagtattctggtaagtgaaacacag

SEQ ID NO: 667540 - DNA, 25 bp, Homo sapien
caaccgtgggaataatgcttttgcg

SEQ ID NO: 667541 - DNA, 25 bp, Homo sapien
acacagttgccttccatgataccct

SEQ ID NO: 667542 - DNA, 25 bp, Homo sapien
tgcggcatgcaacatataatgaaca

SEQ ID NO: 667543 - DNA, 25 bp, Homo sapien
gtagttgcctcggatggcagtaaag

SEQ ID NO: 667544 - DNA, 25 bp, Homo sapien
tggcacagggcctgtagcgcctccc

SEQ ID NO: 667545 - DNA, 25 bp, Homo sapien
taaagtcgtccagggcttcggccgc

SEQ ID NO: 667546 - DNA, 25 bp, Homo sapien
cctcgtccaggttcagctcctggca

SEQ ID NO: 667547 - DNA, 25 bp, Homo sapien
tcccaggcgcgctacccacaaccac

SEQ ID NO: 667548 - DNA, 25 bp, Homo sapien
tccctcccaggcgcgctacccacaa

SEQ ID NO: 667549 - DNA, 25 bp, Homo sapien
cctcccaggcgcgctacccacaacc

SEQ ID NO: 667550 - DNA, 25 bp, Homo sapien
ttctccctcccaggcgcgctaccca

SEQ ID NO: 667551 - DNA, 25 bp, Homo sapien
ctttcccatatcacctccaagatgt

SEQ ID NO: 667552 - DNA, 25 bp, Homo sapien
tcttctttcccatatcacctccaag

SEQ ID NO: 667553 - DNA, 25 bp, Homo sapien
tttcttctttcccatatcacctcca

SEQ ID NO: 667554 - DNA, 25 bp, Homo sapien
ttctttcccatatcacctccaagat

SEQ ID NO: 667555 - DNA, 25 bp, Homo sapien
agactggaattctgctgggtgccgt

SEQ ID NO: 667556 - DNA, 25 bp, Homo sapien
ttgacctgtttctcaagactggaat

SEQ ID NO: 667557 - DNA, 25 bp, Homo sapien
caagactagcttgccgcacaacata

SEQ ID NO: 667558 - DNA, 25 bp, Homo sapien
ttcaagactagcttgccgcacaaca

SEQ ID NO: 667559 - DNA, 25 bp, Homo sapien
catgagcttctgcaaccagttcact

SEQ ID NO: 667560 - DNA, 25 bp, Homo sapien
ctgcccatgagcttctgcaaccagt

SEQ ID NO: 667561 - DNA, 25 bp, Homo sapien
tgagcttctgcaaccagttcactct

SEQ ID NO: 667562 - DNA, 25 bp, Homo sapien
cccatgagcttctgcaaccagttca

SEQ ID NO: 667563 - DNA, 25 bp, Homo sapien
ctcgccatctggactagtaacagag

SEQ ID NO: 667564 - DNA, 25 bp, Homo sapien
tcgccatctggactagtaacagagt

SEQ ID NO: 667565 - DNA, 25 bp, Homo sapien
cctcgccatctggactagtaacaga

SEQ ID NO: 667566 - DNA, 25 bp, Homo sapien
tgggaagcgatgatgcacagcgagg

SEQ ID NO: 667567 - DNA, 25 bp, Homo sapien
ctgggaagcgatgatgcacagcgag

SEQ ID NO: 667568 - DNA, 25 bp, Homo sapien
aagcgatgatgcacagcgagggctc

SEQ ID NO: 667569 - DNA, 25 bp, Homo sapien
ggaagcgatgatgcacagcgagggc

SEQ ID NO: 667570 - DNA, 25 bp, Homo sapien
caggttggaggtaaaagcccctgag

SEQ ID NO: 667571 - DNA, 25 bp, Homo sapien
cacaggttggaggtaaaagcccctg

SEQ ID NO: 667572 - DNA, 25 bp, Homo sapien
gcaaacacaggttggaggtaaaagc

SEQ ID NO: 667573 - DNA, 25 bp, Homo sapien
cgtcctctatccagtcagtacccat

SEQ ID NO: 667574 - DNA, 25 bp, Homo sapien
tctatccagtcagtacccatcctcc

SEQ ID NO: 667575 - DNA, 25 bp, Homo sapien
agctcattgtgatccatgtacttcg

SEQ ID NO: 667576 - DNA, 25 bp, Homo sapien
tcctgagctcattgtgatccatgta

SEQ ID NO: 667577 - DNA, 25 bp, Homo sapien
ctgctgatcttctgatgggaagttt

SEQ ID NO: 667578 - DNA, 25 bp, Homo sapien
agttttgggttcttggagtacatca

SEQ ID NO: 667579 - DNA, 25 bp, Homo sapien
aagactgctgatcttctgatgggaa

SEQ ID NO: 667580 - DNA, 25 bp, Homo sapien
tttgggttcttggagtacatcagtg

SEQ ID NO: 667581 - DNA, 25 bp, Homo sapien
ggaactgggcacatatagttaggac

SEQ ID NO: 667582 - DNA, 25 bp, Homo sapien
cagtaggtttgatgtgccagggatc

SEQ ID NO: 667583 - DNA, 25 bp, Homo sapien
tgcagattgttcctgcttcagtagg

SEQ ID NO: 667584 - DNA, 25 bp, Homo sapien
ggatctttggagtacacttcttggg

SEQ ID NO: 667585 - DNA, 25 bp, Homo sapien
aatacagaagtagtgggaccaagct

SEQ ID NO: 667586 - DNA, 25 bp, Homo sapien
ccaaagagagtcacggagaaacgat

SEQ ID NO: 667587 - DNA, 25 bp, Homo sapien
tacagactttatggcggctccaaag

SEQ ID NO: 667588 - DNA, 25 bp, Homo sapien
caagctgtccaggacttggttctct

SEQ ID NO: 667589 - DNA, 25 bp, Homo sapien
ctcctcctaggaaagtctgtcctct

SEQ ID NO: 667590 - DNA, 25 bp, Homo sapien
cctaggaaagtctgtcctctctgat

SEQ ID NO: 667591 - DNA, 25 bp, Homo sapien
ggaaagtctgtcctctctgattgtc

SEQ ID NO: 667592 - DNA, 25 bp, Homo sapien
agtctgtcctctctgattgtcttac

SEQ ID NO: 667593 - DNA, 25 bp, Homo sapien
tgtctacaatgtatggcaacaggct

SEQ ID NO: 667594 - DNA, 25 bp, Homo sapien
tctcatcggtttcacgcaagctgtc

SEQ ID NO: 667595 - DNA, 25 bp, Homo sapien
cagccagggtagtgaaatccattgt

SEQ ID NO: 667596 - DNA, 25 bp, Homo sapien
gatggctgacagaacgatcttctca

SEQ ID NO: 667597 - DNA, 25 bp, Homo sapien
cagtctcttggccactggactccgg

SEQ ID NO: 667598 - DNA, 25 bp, Homo sapien
ccctcaggccgagaattctaaagag

SEQ ID NO: 667599 - DNA, 25 bp, Homo sapien
aagagatgatttccatcttgtagcc

SEQ ID NO: 667600 - DNA, 25 bp, Homo sapien
tcttgtagccagtctttaaagcggg

SEQ ID NO: 667601 - DNA, 25 bp, Homo sapien
atcattccctcggttaagaagaggg

SEQ ID NO: 667602 - DNA, 25 bp, Homo sapien
taagaagagggactaataagtacat

SEQ ID NO: 667603 - DNA, 25 bp, Homo sapien
cctgcagatgtgagtttatgtttat

SEQ ID NO: 667604 - DNA, 25 bp, Homo sapien
taagtacatgaccttctgtgcaagg

SEQ ID NO: 667605 - DNA, 25 bp, Homo sapien
aaatagtccctgaagatggccatct

SEQ ID NO: 667606 - DNA, 25 bp, Homo sapien
aatagtccctgaagatggccatctt

SEQ ID NO: 667607 - DNA, 25 bp, Homo sapien
gaggagagtctttgtagcctgcatg

SEQ ID NO: 667608 - DNA, 25 bp, Homo sapien
agagtctttgtagcctgcatggcaa

SEQ ID NO: 667609 - DNA, 25 bp, Homo sapien
ggagagtctttgtagcctgcatggc

SEQ ID NO: 667610 - DNA, 25 bp, Homo sapien
ggaggagagtctttgtagcctgcat

SEQ ID NO: 667611 - DNA, 25 bp, Homo sapien
tcaatgaaataatgatgggcagtac

SEQ ID NO: 667612 - DNA, 25 bp, Homo sapien
caggccacttgggatgtcgacatca

SEQ ID NO: 667613 - DNA, 25 bp, Homo sapien
cgacatcagacatggtgaggccgat

SEQ ID NO: 667614 - DNA, 25 bp, Homo sapien
gctgctcgaagcctgtttcccaaaa

SEQ ID NO: 667615 - DNA, 25 bp, Homo sapien
aaagagtcggaacgtagctgctcga

SEQ ID NO: 667616 - DNA, 25 bp, Homo sapien
tgtcaatcccttggcagaaacactg

SEQ ID NO: 667617 - DNA, 25 bp, Homo sapien
agaaacactgtagacttataaatgg

SEQ ID NO: 667618 - DNA, 25 bp, Homo sapien
gctttgagagggaccaaaaggaaca

SEQ ID NO: 667619 - DNA, 25 bp, Homo sapien
cgagtttgtattaaggcattctgac

SEQ ID NO: 667620 - DNA, 25 bp, Homo sapien
cctgtgcaggctcattatggcattt

SEQ ID NO: 667621 - DNA, 25 bp, Homo sapien
gcaggctcattatggcatttctgca

SEQ ID NO: 667622 - DNA, 25 bp, Homo sapien
tgtgcaggctcattatggcatttct

SEQ ID NO: 667623 - DNA, 25 bp, Homo sapien
accgacagcattctccacacctcag

SEQ ID NO: 667624 - DNA, 25 bp, Homo sapien
tgcaatctacaagaggttctcctct

SEQ ID NO: 667625 - DNA, 25 bp, Homo sapien
ttatttgccaacaagcagagtagga

SEQ ID NO: 667626 - DNA, 25 bp, Homo sapien
tcagggtgtcaaaagactgactttg

SEQ ID NO: 667627 - DNA, 25 bp, Homo sapien
aatggctgattccaatgcaatctac

SEQ ID NO: 667628 - DNA, 25 bp, Homo sapien
gacttcaaggctattcataacctgg

SEQ ID NO: 667629 - DNA, 25 bp, Homo sapien
tgaaaaccctatacctttgcttatg

SEQ ID NO: 667630 - DNA, 25 bp, Homo sapien
caggttttatcgaatcaagttccca

SEQ ID NO: 667631 - DNA, 25 bp, Homo sapien
cattgcctcagcgtggacttcaagg

SEQ ID NO: 667632 - DNA, 25 bp, Homo sapien
gccactgccctaatcagggcatcat

SEQ ID NO: 667633 - DNA, 25 bp, Homo sapien
ccgtgtctggccaatgctcctgttt

SEQ ID NO: 667634 - DNA, 25 bp, Homo sapien
tgaagccactgccctaatcagggca

SEQ ID NO: 667635 - DNA, 25 bp, Homo sapien
ctgccctaatcagggcatcatcatc

SEQ ID NO: 667636 - DNA, 25 bp, Homo sapien
tgtacttgggtctggatataaataa

SEQ ID NO: 667637 - DNA, 25 bp, Homo sapien
gaagctgagcactatatctgtgtac

SEQ ID NO: 667638 - DNA, 25 bp, Homo sapien
ctgagcactatatctgtgtacttgg

SEQ ID NO: 667639 - DNA, 25 bp, Homo sapien
aggaagctgagcactatatctgtgt

SEQ ID NO: 667640 - DNA, 25 bp, Homo sapien
gtatttatgatttgttggcggactc

SEQ ID NO: 667641 - DNA, 25 bp, Homo sapien
ggataactgggcacagataactccc

SEQ ID NO: 667642 - DNA, 25 bp, Homo sapien
tctaggctggctgattatggataac

SEQ ID NO: 667643 - DNA, 25 bp, Homo sapien
cagataactcccataatttctggca

SEQ ID NO: 667644 - DNA, 25 bp, Homo sapien
aatgtagtcattataaactggcaga

SEQ ID NO: 667645 - DNA, 25 bp, Homo sapien
tctcaaattgggactctgtattttt

SEQ ID NO: 667646 - DNA, 25 bp, Homo sapien
gcagagctcatttgaatcaagaaaa

SEQ ID NO: 667647 - DNA, 25 bp, Homo sapien
ccaaagttagcagtaattctcctgc

SEQ ID NO: 667648 - DNA, 25 bp, Homo sapien
tgaagggacagttgtagaagcattt

SEQ ID NO: 667649 - DNA, 25 bp, Homo sapien
gctgatctttcttgtcatgagtgat

SEQ ID NO: 667650 - DNA, 25 bp, Homo sapien
gctgtggagctccaggaattctcga

SEQ ID NO: 667651 - DNA, 25 bp, Homo sapien
tagaagcatttagcggcagagctgt

SEQ ID NO: 667652 - DNA, 25 bp, Homo sapien
catcagagccactaggtgtccaagt

SEQ ID NO: 667653 - DNA, 25 bp, Homo sapien
tatgcagcagggagtgaatgccctc

SEQ ID NO: 667654 - DNA, 25 bp, Homo sapien
gccatcagagccactaggtgtccaa

SEQ ID NO: 667655 - DNA, 25 bp, Homo sapien
tcagcctcagggtgatatgcagcag

SEQ ID NO: 667656 - DNA, 25 bp, Homo sapien
ttcctggccgtcatcccgtctagga

SEQ ID NO: 667657 - DNA, 25 bp, Homo sapien
gtgcctcttcctggccgtcatcccg

SEQ ID NO: 667658 - DNA, 25 bp, Homo sapien
tgaggagtgcctcttcctggccgtc

SEQ ID NO: 667659 - DNA, 25 bp, Homo sapien
tcctggccgtcatcccgtctaggaa

SEQ ID NO: 667660 - DNA, 25 bp, Homo sapien
gaacttgagccatgctggccgtggc

SEQ ID NO: 667661 - DNA, 25 bp, Homo sapien
ggcacttcagaacttgagccatgct

SEQ ID NO: 667662 - DNA, 25 bp, Homo sapien
ctgactgtaaccaggggaccaagtg

SEQ ID NO: 667663 - DNA, 25 bp, Homo sapien
ggcccgttcccgctcatggtctttg

SEQ ID NO: 667664 - DNA, 25 bp, Homo sapien
tgccggagggattatactgactgct

SEQ ID NO: 667665 - DNA, 25 bp, Homo sapien
caacatgctactaattttaaagttt

SEQ ID NO: 667666 - DNA, 25 bp, Homo sapien
ccggagggattatactgactgcttg

SEQ ID NO: 667667 - DNA, 25 bp, Homo sapien
ctgccggagggattatactgactgc

SEQ ID NO: 667668 - DNA, 25 bp, Homo sapien
cctgaaacgtctgcctgtaaagaca

SEQ ID NO: 667669 - DNA, 25 bp, Homo sapien
gtcttttaccaccaaactctggagc

SEQ ID NO: 667670 - DNA, 25 bp, Homo sapien
tctggagcatctcagagaatgcctg

SEQ ID NO: 667671 - DNA, 25 bp, Homo sapien
taatggtgtcaagattttccaaatg

SEQ ID NO: 667672 - DNA, 25 bp, Homo sapien
gaacaactcagctcgatcttcagag

SEQ ID NO: 667673 - DNA, 25 bp, Homo sapien
ggcagagtgattatactcttgatgg

SEQ ID NO: 667674 - DNA, 25 bp, Homo sapien
ctcgatcttcagagcccaacagcaa

SEQ ID NO: 667675 - DNA, 25 bp, Homo sapien
gatggtaagactgaacaactcagct

SEQ ID NO: 667676 - DNA, 25 bp, Homo sapien
gctggaaagacggtttgatttgata

SEQ ID NO: 667677 - DNA, 25 bp, Homo sapien
caagctggaaagacggtttgatttg

SEQ ID NO: 667678 - DNA, 25 bp, Homo sapien
ggaacagcaagctggaaagacggtt

SEQ ID NO: 667679 - DNA, 25 bp, Homo sapien
cagcaagctggaaagacggtttgat

SEQ ID NO: 667680 - DNA, 25 bp, Homo sapien
tggtgacaaagacctcctggcgcat

SEQ ID NO: 667681 - DNA, 25 bp, Homo sapien
gatcagcgatggtgacaaagacctc

SEQ ID NO: 667682 - DNA, 25 bp, Homo sapien
ctgagatcagcgatggtgacaaaga

SEQ ID NO: 667683 - DNA, 25 bp, Homo sapien
gcgatggtgacaaagacctcctggc

SEQ ID NO: 667684 - DNA, 25 bp, Homo sapien
gcgggcgttcctcttgtaccagtac

SEQ ID NO: 667685 - DNA, 25 bp, Homo sapien
tgcgggcgttcctcttgtaccagta

SEQ ID NO: 667686 - DNA, 25 bp, Homo sapien
tggacagagaatgcgggcgttcctc

SEQ ID NO: 667687 - DNA, 25 bp, Homo sapien
actggacagagaatgcgggcgttcc

SEQ ID NO: 667688 - DNA, 25 bp, Homo sapien
gaaatgggtacttcaaagctctgtg

SEQ ID NO: 667689 - DNA, 25 bp, Homo sapien
atctgtcccagagtagacaccaagg

SEQ ID NO: 667690 - DNA, 25 bp, Homo sapien
tgtccccaacccacagaaatgggta

SEQ ID NO: 667691 - DNA, 25 bp, Homo sapien
gtgtctgctaggtcattctgtccca

SEQ ID NO: 667692 - DNA, 25 bp, Homo sapien
gctgcttctagaggatttctcttac

SEQ ID NO: 667693 - DNA, 25 bp, Homo sapien
ttgtgtttcagctgcttctagagga

SEQ ID NO: 667694 - DNA, 25 bp, Homo sapien
ttttgtgtttcagctgcttctagag

SEQ ID NO: 667695 - DNA, 25 bp, Homo sapien
ttcagctgcttctagaggatttctc

SEQ ID NO: 667696 - DNA, 25 bp, Homo sapien
tgacaggcacaaagcgggagttgct

SEQ ID NO: 667697 - DNA, 25 bp, Homo sapien
gacaggcacaaagcgggagttgcta

SEQ ID NO: 667698 - DNA, 25 bp, Homo sapien
cgggagttgctagagggttgagtca

SEQ ID NO: 667699 - DNA, 25 bp, Homo sapien
cacaaagcgggagttgctagagggt

SEQ ID NO: 667700 - DNA, 25 bp, Homo sapien
gggtcacaagcactggtaaatgcct

SEQ ID NO: 667701 - DNA, 25 bp, Homo sapien
tccttgtcggttcctcagcagaaat

SEQ ID NO: 667702 - DNA, 25 bp, Homo sapien
tggatacttggagccatgcactggt

SEQ ID NO: 667703 - DNA, 25 bp, Homo sapien
gctgttgagacctgcatttgtggat

SEQ ID NO: 667704 - DNA, 25 bp, Homo sapien
tgcggtttcatcataaggtaaagct

SEQ ID NO: 667705 - DNA, 25 bp, Homo sapien
aatgattttgcggtttcatcataag

SEQ ID NO: 667706 - DNA, 25 bp, Homo sapien
agacagatctcctaggaatttcagc

SEQ ID NO: 667707 - DNA, 25 bp, Homo sapien
gagaagacagatctcctaggaattt

SEQ ID NO: 667708 - DNA, 25 bp, Homo sapien
tcactgagcgggtcctgttgggtca

SEQ ID NO: 667709 - DNA, 25 bp, Homo sapien
ggatcagtttctcaacaatggcctc

SEQ ID NO: 667710 - DNA, 25 bp, Homo sapien
gaaaaccttctggatggactggatc

SEQ ID NO: 667711 - DNA, 25 bp, Homo sapien
tcacaatggagtccagggatgtcag

SEQ ID NO: 667712 - DNA, 25 bp, Homo sapien
ctgtcagttcaatgctacttgagcc

SEQ ID NO: 667713 - DNA, 25 bp, Homo sapien
tgtcataggcacaggggatcactac

SEQ ID NO: 667714 - DNA, 25 bp, Homo sapien
cttgagccttttttaataatctcta

SEQ ID NO: 667715 - DNA, 25 bp, Homo sapien
gcacaggggatcactacttcttcct

SEQ ID NO: 667716 - DNA, 25 bp, Homo sapien
tagtggctatcataacagacacaga

SEQ ID NO: 667717 - DNA, 25 bp, Homo sapien
tgtggctagtacaaatgagagactg

SEQ ID NO: 667718 - DNA, 25 bp, Homo sapien
tctcccatgcgggataacatttggg

SEQ ID NO: 667719 - DNA, 25 bp, Homo sapien
tacatcagcactgcccaatggaact

SEQ ID NO: 667720 - DNA, 25 bp, Homo sapien
gtgagacggagatttactcgttgcc

SEQ ID NO: 667721 - DNA, 25 bp, Homo sapien
tggtgagacggagatttactcgttg

SEQ ID NO: 667722 - DNA, 25 bp, Homo sapien
aggcatgtgtgaccacgcccggcta

SEQ ID NO: 667723 - DNA, 25 bp, Homo sapien
ttacaggcatgtgtgaccacgcccg

SEQ ID NO: 667724 - DNA, 25 bp, Homo sapien
cgcccggccagaaactgccacaatt

SEQ ID NO: 667725 - DNA, 25 bp, Homo sapien
cccggccagaaactgccacaatttt

SEQ ID NO: 667726 - DNA, 25 bp, Homo sapien
atcccttctaagctatcccctcccg

SEQ ID NO: 667727 - DNA, 25 bp, Homo sapien
taagctatcccctcccgacgagacc

SEQ ID NO: 667728 - DNA, 25 bp, Homo sapien
agagcctgccgcgagtccctggcgt

SEQ ID NO: 667729 - DNA, 25 bp, Homo sapien
ttagaactcatcctggcccgcagag

SEQ ID NO: 667730 - DNA, 25 bp, Homo sapien
cctgtggcgggctcttggagccact

SEQ ID NO: 667731 - DNA, 25 bp, Homo sapien
tttcccgagcggaagtcagcccgcg

SEQ ID NO: 667732 - DNA, 25 bp, Homo sapien
gaggttactagtcgccgctcgagag

SEQ ID NO: 667733 - DNA, 25 bp, Homo sapien
ccgcgggaggttactagtcgccgct

SEQ ID NO: 667734 - DNA, 25 bp, Homo sapien
tgtcgcccgcgggaggttactagtc

SEQ ID NO: 667735 - DNA, 25 bp, Homo sapien
ggagagggctgtcgcccgcgggagg

SEQ ID NO: 667736 - DNA, 25 bp, Homo sapien
ctggctggggcgctctcggatcgag

SEQ ID NO: 667737 - DNA, 25 bp, Homo sapien
tcgagggtccgaaggagggctgcga

SEQ ID NO: 667738 - DNA, 25 bp, Homo sapien
gctggtgggagtgcccgcgacctgg

SEQ ID NO: 667739 - DNA, 25 bp, Homo sapien
ggctgcgagctggtgggagtgcccg

SEQ ID NO: 667740 - DNA, 25 bp, Homo sapien
cacatgggagtgttgtaccgaagtt

SEQ ID NO: 667741 - DNA, 25 bp, Homo sapien
cccacacgaggtttctggaagtcat

SEQ ID NO: 667742 - DNA, 25 bp, Homo sapien
tgttacccagatctaccatgcagtt

SEQ ID NO: 667743 - DNA, 25 bp, Homo sapien
ccatgcagttgcagctctaagtggc

SEQ ID NO: 667744 - DNA, 25 bp, Homo sapien
aagattctgtagtagagtggataga

SEQ ID NO: 667745 - DNA, 25 bp, Homo sapien
tttaaagattctgtagtagagtgga

SEQ ID NO: 667746 - DNA, 25 bp, Homo sapien
caatcatagctcatgctaactcttg

SEQ ID NO: 667747 - DNA, 25 bp, Homo sapien
atagctcatgctaactcttgggctc

SEQ ID NO: 667748 - DNA, 25 bp, Homo sapien
ggctgggtcagtgttattatcatcc

SEQ ID NO: 667749 - DNA, 25 bp, Homo sapien
gacattttaggcctcggaatgggag

SEQ ID NO: 667750 - DNA, 25 bp, Homo sapien
ttggaaatattactgggctgggtca

SEQ ID NO: 667751 - DNA, 25 bp, Homo sapien
ggattttttcatgcctttactcacc

SEQ ID NO: 667752 - DNA, 25 bp, Homo sapien
cagaccccaactttactcaactagg

SEQ ID NO: 667753 - DNA, 25 bp, Homo sapien
cccagatccttattggctcagcggg

SEQ ID NO: 667754 - DNA, 25 bp, Homo sapien
tagggtgaaccatcaaggctctttg

SEQ ID NO: 667755 - DNA, 25 bp, Homo sapien
tcaactagggtagctatagaggcca

SEQ ID NO: 667756 - DNA, 25 bp, Homo sapien
gttgtaagcaggaacatggcacagg

SEQ ID NO: 667757 - DNA, 25 bp, Homo sapien
gaacatggcacaggtcgctgaagtc

SEQ ID NO: 667758 - DNA, 25 bp, Homo sapien
aatgaatgccaagtataacatgaca

SEQ ID NO: 667759 - DNA, 25 bp, Homo sapien
ataacatgacagaggagttttaaac

SEQ ID NO: 667760 - DNA, 25 bp, Homo sapien
aagtccagattgtagttatactttt

SEQ ID NO: 667761 - DNA, 25 bp, Homo sapien
tcctaacttacccagatgttgcttt

SEQ ID NO: 667762 - DNA, 25 bp, Homo sapien
aaaagtccagattgtagttatactt

SEQ ID NO: 667763 - DNA, 25 bp, Homo sapien
agtccagattgtagttatacttttg

SEQ ID NO: 667764 - DNA, 25 bp, Homo sapien
aactctatgccgttctgaatgggat

SEQ ID NO: 667765 - DNA, 25 bp, Homo sapien
actctatgccgttctgaatgggatc

SEQ ID NO: 667766 - DNA, 25 bp, Homo sapien
gagcagggacacttgccacctatca

SEQ ID NO: 667767 - DNA, 25 bp, Homo sapien
agcagggacacttgccacctatcac

SEQ ID NO: 667768 - DNA, 25 bp, Homo sapien
tggaagacagactgggtgcggggct

SEQ ID NO: 667769 - DNA, 25 bp, Homo sapien
ctggtcactgggaacaaaggacagc

SEQ ID NO: 667770 - DNA, 25 bp, Homo sapien
tgagggtggaagtacaaaggctgct

SEQ ID NO: 667771 - DNA, 25 bp, Homo sapien
gcctgagggtggaagtacaaaggct

SEQ ID NO: 667772 - DNA, 25 bp, Homo sapien
gcttttgtcaggataggccaaggaa

SEQ ID NO: 667773 - DNA, 25 bp, Homo sapien
caggtcccagcagtcgttattttat

SEQ ID NO: 667774 - DNA, 25 bp, Homo sapien
ctaattggaagttgaaagagccctc

SEQ ID NO: 667775 - DNA, 25 bp, Homo sapien
tgaaagagccctcggcttttgcttt

SEQ ID NO: 667776 - DNA, 25 bp, Homo sapien
aaatgagaggattaactggatccag

SEQ ID NO: 667777 - DNA, 25 bp, Homo sapien
tgcacaccggtatgggggaatttta

SEQ ID NO: 667778 - DNA, 25 bp, Homo sapien
cattttggctacaggtagcccgggt

SEQ ID NO: 667779 - DNA, 25 bp, Homo sapien
gtagcccgggtcacaggaggaatct

SEQ ID NO: 667780 - DNA, 25 bp, Homo sapien
tcatctgccgtaggcctggtgctgc

SEQ ID NO: 667781 - DNA, 25 bp, Homo sapien
gcctggtgctgcttgtaggtggtga

SEQ ID NO: 667782 - DNA, 25 bp, Homo sapien
catctgccgtaggcctggtgctgct

SEQ ID NO: 667783 - DNA, 25 bp, Homo sapien
ttgtaggtggtgaaatctctgggct

SEQ ID NO: 667784 - DNA, 25 bp, Homo sapien
aagtccctagatgcacccatgcaca

SEQ ID NO: 667785 - DNA, 25 bp, Homo sapien
ttcagagaggagtggattttttcct

SEQ ID NO: 667786 - DNA, 25 bp, Homo sapien
cttcagagaggagtggattttttcc

SEQ ID NO: 667787 - DNA, 25 bp, Homo sapien
tgaagtccctagatgcacccatgca

SEQ ID NO: 667788 - DNA, 25 bp, Homo sapien
cacatgctgtctacctgacgaccaa

SEQ ID NO: 667789 - DNA, 25 bp, Homo sapien
ccaagccgtgcccttgctcctcgct

SEQ ID NO: 667790 - DNA, 25 bp, Homo sapien
ctgtctacctgacgaccaagccgtg

SEQ ID NO: 667791 - DNA, 25 bp, Homo sapien
ccgtgcccttgctcctcgctcttgg

SEQ ID NO: 667792 - DNA, 25 bp, Homo sapien
gcaccttccggtagctgttggtgaa

SEQ ID NO: 667793 - DNA, 25 bp, Homo sapien
aagatggcatctgcataccgccgca

SEQ ID NO: 667794 - DNA, 25 bp, Homo sapien
gatggcatctgcataccgccgcatc

SEQ ID NO: 667795 - DNA, 25 bp, Homo sapien
gggcggacagctggcccagcacctt

SEQ ID NO: 667796 - DNA, 25 bp, Homo sapien
agacccctctgagtgacctctgtga

SEQ ID NO: 667797 - DNA, 25 bp, Homo sapien
caagagagactcagacccctctgag

SEQ ID NO: 667798 - DNA, 25 bp, Homo sapien
ctctgagtgacctctgtgaagctgt

SEQ ID NO: 667799 - DNA, 25 bp, Homo sapien
gagagactcagacccctctgagtga

SEQ ID NO: 667800 - DNA, 25 bp, Homo sapien
tgagggtgaggatcacaaagaagaa

SEQ ID NO: 667801 - DNA, 25 bp, Homo sapien
cctggattcaggataaacgggcact

SEQ ID NO: 667802 - DNA, 25 bp, Homo sapien
ttagatgtacttgagattgcctgga

SEQ ID NO: 667803 - DNA, 25 bp, Homo sapien
taaacgggcacttgatctacatccg

SEQ ID NO: 667804 - DNA, 25 bp, Homo sapien
cgttggcaccttttgccagctttca

SEQ ID NO: 667805 - DNA, 25 bp, Homo sapien
agcctgcccacgcatcctcgaagga

SEQ ID NO: 667806 - DNA, 25 bp, Homo sapien
tgcccacgcatcctcgaaggagcac

SEQ ID NO: 667807 - DNA, 25 bp, Homo sapien
gcactgagacctcaccacctgcgac

SEQ ID NO: 667808 - DNA, 25 bp, Homo sapien
cgaagcctgcccacgcatcctcgaa

SEQ ID NO: 667809 - DNA, 25 bp, Homo sapien
gagccagtccgccacgcgcccaagt

SEQ ID NO: 667810 - DNA, 25 bp, Homo sapien
gccacgcgcccaagttaagacaagc

SEQ ID NO: 667811 - DNA, 25 bp, Homo sapien
gcgcccaagttaagacaagccccaa

SEQ ID NO: 667812 - DNA, 25 bp, Homo sapien
agtccgccacgcgcccaagttaaga

SEQ ID NO: 667813 - DNA, 25 bp, Homo sapien
gatggcggtgggcctcttggactca

SEQ ID NO: 667814 - DNA, 25 bp, Homo sapien
tggcggtgggcctcttggactcagt

SEQ ID NO: 667815 - DNA, 25 bp, Homo sapien
atggcggtgggcctcttggactcag

SEQ ID NO: 667816 - DNA, 25 bp, Homo sapien
gcctggcgttcccatcatttatctc

SEQ ID NO: 667817 - DNA, 25 bp, Homo sapien
ccgcctggcgttcccatcatttatc

SEQ ID NO: 667818 - DNA, 25 bp, Homo sapien
ctggcgttcccatcatttatctctt

SEQ ID NO: 667819 - DNA, 25 bp, Homo sapien
tctgctccgaggcactgctcaaatc

SEQ ID NO: 667820 - DNA, 25 bp, Homo sapien
ttccctggtgaagatatgaccatac

SEQ ID NO: 667821 - DNA, 25 bp, Homo sapien
tgtccccagctgatcctcgggtaac

SEQ ID NO: 667822 - DNA, 25 bp, Homo sapien
ttttgagttggtagacttggtgcag

SEQ ID NO: 667823 - DNA, 25 bp, Homo sapien
caggtgccacgcctgctgcatagga

SEQ ID NO: 667824 - DNA, 25 bp, Homo sapien
ttgtgctctcctgttaggatgtcgt

SEQ ID NO: 667825 - DNA, 25 bp, Homo sapien
cgcccacgttgtgctctcctgttag

SEQ ID NO: 667826 - DNA, 25 bp, Homo sapien
cacgttgtgctctcctgttaggatg

SEQ ID NO: 667827 - DNA, 25 bp, Homo sapien
ttaccgcccacgttgtgctctcctg

SEQ ID NO: 667828 - DNA, 25 bp, Homo sapien
actcagtgggatccaccgcactcag

SEQ ID NO: 667829 - DNA, 25 bp, Homo sapien
ttctggactcagtgggatccaccgc

SEQ ID NO: 667830 - DNA, 25 bp, Homo sapien
cagtgggatccaccgcactcagcat

SEQ ID NO: 667831 - DNA, 25 bp, Homo sapien
gactcagtgggatccaccgcactca

SEQ ID NO: 667832 - DNA, 25 bp, Homo sapien
gcgcaatattggtttactgcaaact

SEQ ID NO: 667833 - DNA, 25 bp, Homo sapien
cgcaatattggtttactgcaaactc

SEQ ID NO: 667834 - DNA, 25 bp, Homo sapien
aaggttgctcttgagtttacactga

SEQ ID NO: 667835 - DNA, 25 bp, Homo sapien
cactgaagattttggccaggccaca

SEQ ID NO: 667836 - DNA, 25 bp, Homo sapien
catttgaaagcttgactaggactgc

SEQ ID NO: 667837 - DNA, 25 bp, Homo sapien
gagccacttggctcatacacatggc

SEQ ID NO: 667838 - DNA, 25 bp, Homo sapien
ccctcttgcttagcctatagaaaca

SEQ ID NO: 667839 - DNA, 25 bp, Homo sapien
atagaaacagggtttattagtggct

SEQ ID NO: 667840 - DNA, 25 bp, Homo sapien
agtcttgccctctttgccgttttgc

SEQ ID NO: 667841 - DNA, 25 bp, Homo sapien
gggaggacccagagaacagtcttgc

SEQ ID NO: 667842 - DNA, 25 bp, Homo sapien
ttataatcccagttgctagagaggc

SEQ ID NO: 667843 - DNA, 25 bp, Homo sapien
ggcgtggtagtgtgtacttataatc

SEQ ID NO: 667844 - DNA, 25 bp, Homo sapien
tattaacagagcattatgatgcctg

SEQ ID NO: 667845 - DNA, 25 bp, Homo sapien
ggtagtgtgtacttataatcccagt

SEQ ID NO: 667846 - DNA, 25 bp, Homo sapien
acctccttgttgtacctctcagcat

SEQ ID NO: 667847 - DNA, 25 bp, Homo sapien
ggcaccatccttagttccattttac

SEQ ID NO: 667848 - DNA, 25 bp, Homo sapien
gaatcactgtttattgggtgtccac

SEQ ID NO: 667849 - DNA, 25 bp, Homo sapien
taccaaagtgtgtcgctctctggcc

SEQ ID NO: 667850 - DNA, 25 bp, Homo sapien
agtgtttcagggtctgtttcctctt

SEQ ID NO: 667851 - DNA, 25 bp, Homo sapien
tggacaaatctttgaacctccccac

SEQ ID NO: 667852 - DNA, 25 bp, Homo sapien
atggacaaatctttgaacctcccca

SEQ ID NO: 667853 - DNA, 25 bp, Homo sapien
aggtgttgacccatggacaaatctt

SEQ ID NO: 667854 - DNA, 25 bp, Homo sapien
gacaaatctttgaacctccccacca

SEQ ID NO: 667855 - DNA, 25 bp, Homo sapien
cgcacccagccaggaaggcttgaat

SEQ ID NO: 667856 - DNA, 25 bp, Homo sapien
cacccagccaggaaggcttgaattt

SEQ ID NO: 667857 - DNA, 25 bp, Homo sapien
cccagccaggaaggcttgaattttg

SEQ ID NO: 667858 - DNA, 25 bp, Homo sapien
ccagccaggaaggcttgaattttgt

SEQ ID NO: 667859 - DNA, 25 bp, Homo sapien
tctcagcaatgttgacgtcaatagc

SEQ ID NO: 667860 - DNA, 25 bp, Homo sapien
ctcagcaatgttgacgtcaatagca

SEQ ID NO: 667861 - DNA, 25 bp, Homo sapien
ttaggtccccacctggtggctggct

SEQ ID NO: 667862 - DNA, 25 bp, Homo sapien
cttaggtccccacctggtggctggc

SEQ ID NO: 667863 - DNA, 25 bp, Homo sapien
cacctggtggctggctccgtgtcgc

SEQ ID NO: 667864 - DNA, 25 bp, Homo sapien
ccccacctggtggctggctccgtgt

SEQ ID NO: 667865 - DNA, 25 bp, Homo sapien
caggccacctgcaggcttgaacggg

SEQ ID NO: 667866 - DNA, 25 bp, Homo sapien
gccctggccactaggcgctcctgcc

SEQ ID NO: 667867 - DNA, 25 bp, Homo sapien
tgtggagggccctggccactaggcg

SEQ ID NO: 667868 - DNA, 25 bp, Homo sapien
gggcaggccacctgcaggcttgaac

SEQ ID NO: 667869 - DNA, 25 bp, Homo sapien
tggtgacgccgtagctgttgttatc

SEQ ID NO: 667870 - DNA, 25 bp, Homo sapien
tgtgtccaccccgtgatgagggcgt

SEQ ID NO: 667871 - DNA, 25 bp, Homo sapien
atgagggcgtggcaggaggacccct

SEQ ID NO: 667872 - DNA, 25 bp, Homo sapien
ttatcctctgaggaccaactgtccc

SEQ ID NO: 667873 - DNA, 25 bp, Homo sapien
gacggcagcaccaccagctgcaggg

SEQ ID NO: 667874 - DNA, 25 bp, Homo sapien
gcagcaccaccagctgcagggccat

SEQ ID NO: 667875 - DNA, 25 bp, Homo sapien
acggcagcaccaccagctgcagggc

SEQ ID NO: 667876 - DNA, 25 bp, Homo sapien
catgggagacggcagcaccaccagc

SEQ ID NO: 667877 - DNA, 25 bp, Homo sapien
cccaggtgatggctttaggcctcat

SEQ ID NO: 667878 - DNA, 25 bp, Homo sapien
gacccaggtgatggctttaggcctc

SEQ ID NO: 667879 - DNA, 25 bp, Homo sapien
gtggacccaggtgatggctttaggc

SEQ ID NO: 667880 - DNA, 25 bp, Homo sapien
tggacccaggtgatggctttaggcc

SEQ ID NO: 667881 - DNA, 25 bp, Homo sapien
tacacactgtgaagcgtccgcgccg

SEQ ID NO: 667882 - DNA, 25 bp, Homo sapien
gctggccggtcagtgcgcgggcggc

SEQ ID NO: 667883 - DNA, 25 bp, Homo sapien
aggcccttcctctcgccaggggtag

SEQ ID NO: 667884 - DNA, 25 bp, Homo sapien
ggcggccgtacacactgtgaagcgt

SEQ ID NO: 667885 - DNA, 25 bp, Homo sapien
tcagatgactatgcagaggcctggg

SEQ ID NO: 667886 - DNA, 25 bp, Homo sapien
tgcctaaggccctttgtgtaaggtg

SEQ ID NO: 667887 - DNA, 25 bp, Homo sapien
tgtgtgcgtgtctccatgtgcgtcc

SEQ ID NO: 667888 - DNA, 25 bp, Homo sapien
ggctccgaaattccaaggcccagac

SEQ ID NO: 667889 - DNA, 25 bp, Homo sapien
ctgtctgtgccgtggagctcccacc

SEQ ID NO: 667890 - DNA, 25 bp, Homo sapien
ctttcaaggtgtacctgagccctgc

SEQ ID NO: 667891 - DNA, 25 bp, Homo sapien
ccaccctcgcccctctggtggcctt

SEQ ID NO: 667892 - DNA, 25 bp, Homo sapien
ttcaaggtgtacctgagccctgcac

SEQ ID NO: 667893 - DNA, 25 bp, Homo sapien
tttctctgcaccttcgtgaactgcc

SEQ ID NO: 667894 - DNA, 25 bp, Homo sapien
tctctgcaccttcgtgaactgccat

SEQ ID NO: 667895 - DNA, 25 bp, Homo sapien
gggcggggtatccacacatctggct

SEQ ID NO: 667896 - DNA, 25 bp, Homo sapien
gggtatccacacatctggctccctg

SEQ ID NO: 667897 - DNA, 25 bp, Homo sapien
gatggcactacagtcattcttatca

SEQ ID NO: 667898 - DNA, 25 bp, Homo sapien
gttttctccgatggcactacagtca

SEQ ID NO: 667899 - DNA, 25 bp, Homo sapien
attcttatcactggcgatggcgccc

SEQ ID NO: 667900 - DNA, 25 bp, Homo sapien
agtgccaggaacgttttctccgatg

SEQ ID NO: 667901 - DNA, 25 bp, Homo sapien
ccgtgtccgttaacgaagctggtga

SEQ ID NO: 667902 - DNA, 25 bp, Homo sapien
tatctcgaggattaggcaaataccg

SEQ ID NO: 667903 - DNA, 25 bp, Homo sapien
ccgaaaagctgttgcggcagggcca

SEQ ID NO: 667904 - DNA, 25 bp, Homo sapien
catgttcctcatggagtatctcgag

SEQ ID NO: 667905 - DNA, 25 bp, Homo sapien
gaaaaacgcactgagcctgttccag

SEQ ID NO: 667906 - DNA, 25 bp, Homo sapien
attcagaaaaacgcactgagcctgt

SEQ ID NO: 667907 - DNA, 25 bp, Homo sapien
agaaaaacgcactgagcctgttcca

SEQ ID NO: 667908 - DNA, 25 bp, Homo sapien
cccattcagaaaaacgcactgagcc

SEQ ID NO: 667909 - DNA, 25 bp, Homo sapien
ttctcattggcactgagcttcacca

SEQ ID NO: 667910 - DNA, 25 bp, Homo sapien
tcattggcactgagcttcaccacca

SEQ ID NO: 667911 - DNA, 25 bp, Homo sapien
tcagttctcattggcactgagcttc

SEQ ID NO: 667912 - DNA, 25 bp, Homo sapien
cattggcactgagcttcaccaccac

SEQ ID NO: 667913 - DNA, 25 bp, Homo sapien
ttgcacacagtaaagtccagacgta

SEQ ID NO: 667914 - DNA, 25 bp, Homo sapien
tgggaaacagggtggcttactatcc

SEQ ID NO: 667915 - DNA, 25 bp, Homo sapien
ccaggcctgaacttcctgccgcttc

SEQ ID NO: 667916 - DNA, 25 bp, Homo sapien
taaagtccagacgtaagctcccatc

SEQ ID NO: 667917 - DNA, 25 bp, Homo sapien
ttagtggcaagttctttagcgttta

SEQ ID NO: 667918 - DNA, 25 bp, Homo sapien
tagtggcaagttctttagcgtttac

SEQ ID NO: 667919 - DNA, 25 bp, Homo sapien
cccagtttagtggcaagttctttag

SEQ ID NO: 667920 - DNA, 25 bp, Homo sapien
agtttagtggcaagttctttagcgt

SEQ ID NO: 667921 - DNA, 25 bp, Homo sapien
caaagcacttttgtcttcccagtta

SEQ ID NO: 667922 - DNA, 25 bp, Homo sapien
gatggtggatctcattgtatctctc

SEQ ID NO: 667923 - DNA, 25 bp, Homo sapien
gtgatggtggatctcattgtatctc

SEQ ID NO: 667924 - DNA, 25 bp, Homo sapien
tggtggatctcattgtatctctcat

SEQ ID NO: 667925 - DNA, 25 bp, Homo sapien
tgaaggcgacagtggcacaggtctt

SEQ ID NO: 667926 - DNA, 25 bp, Homo sapien
tgtgtgaaggcgacagtggcacagg

SEQ ID NO: 667927 - DNA, 25 bp, Homo sapien
tgtgaaggcgacagtggcacaggtc

SEQ ID NO: 667928 - DNA, 25 bp, Homo sapien
ctgtgtgaaggcgacagtggcacag

SEQ ID NO: 667929 - DNA, 25 bp, Homo sapien
ccagcttgatggaatccacatcgtg

SEQ ID NO: 667930 - DNA, 25 bp, Homo sapien
agcttgatggaatccacatcgtgtg

SEQ ID NO: 667931 - DNA, 25 bp, Homo sapien
ttgatggaatccacatcgtgtgcag

SEQ ID NO: 667932 - DNA, 25 bp, Homo sapien
cttgatggaatccacatcgtgtgca

SEQ ID NO: 667933 - DNA, 25 bp, Homo sapien
caccaaggtggtgactgggtgttaa

SEQ ID NO: 667934 - DNA, 25 bp, Homo sapien
gagctttcttattctccaccaaggt

SEQ ID NO: 667935 - DNA, 25 bp, Homo sapien
ctgagctttcttattctccaccaag

SEQ ID NO: 667936 - DNA, 25 bp, Homo sapien
tctccaccaaggtggtgactgggtg

SEQ ID NO: 667937 - DNA, 25 bp, Homo sapien
caggtagtctcttagtggagatgtc

SEQ ID NO: 667938 - DNA, 25 bp, Homo sapien
ctgatgctgcaacttgatatagcgg

SEQ ID NO: 667939 - DNA, 25 bp, Homo sapien
ttttctcctcggcctgggccaagag

SEQ ID NO: 667940 - DNA, 25 bp, Homo sapien
tttatagaggaaggctctctgatgc

SEQ ID NO: 667941 - DNA, 25 bp, Homo sapien
tgcaggggctgctaacacccatgga

SEQ ID NO: 667942 - DNA, 25 bp, Homo sapien
cctgcaggggctgctaacacccatg

SEQ ID NO: 667943 - DNA, 25 bp, Homo sapien
caggggctgctaacacccatggagg

SEQ ID NO: 667944 - DNA, 25 bp, Homo sapien
caggaggtgagatgaaactggggcc

SEQ ID NO: 667945 - DNA, 25 bp, Homo sapien
gggacccccttgaggaccttcatca

SEQ ID NO: 667946 - DNA, 25 bp, Homo sapien
aaagcttcccatcggccaagcccag

SEQ ID NO: 667947 - DNA, 25 bp, Homo sapien
cccatccaaactctctgctcacagc

SEQ ID NO: 667948 - DNA, 25 bp, Homo sapien
gctgctcccatgaaggtcctccaaa

SEQ ID NO: 667949 - DNA, 25 bp, Homo sapien
gcgggcttgtctttctgcatccagt

SEQ ID NO: 667950 - DNA, 25 bp, Homo sapien
ccttagcgggcttgtctttctgcat

SEQ ID NO: 667951 - DNA, 25 bp, Homo sapien
gggcttgtctttctgcatccagtgc

SEQ ID NO: 667952 - DNA, 25 bp, Homo sapien
ttagcgggcttgtctttctgcatcc

SEQ ID NO: 667953 - DNA, 25 bp, Homo sapien
tccccgaggatgtacctctgaaggc

SEQ ID NO: 667954 - DNA, 25 bp, Homo sapien
ggatgtacctctgaaggctcaggca

SEQ ID NO: 667955 - DNA, 25 bp, Homo sapien
ctggctccccgaggatgtacctctg

SEQ ID NO: 667956 - DNA, 25 bp, Homo sapien
aggatgtacctctgaaggctcaggc

SEQ ID NO: 667957 - DNA, 25 bp, Homo sapien
caaggctgctccgacaaggatcccc

SEQ ID NO: 667958 - DNA, 25 bp, Homo sapien
ggccagccagttcaccttttggaaa

SEQ ID NO: 667959 - DNA, 25 bp, Homo sapien
tgcctccctttttacggctcctctg

SEQ ID NO: 667960 - DNA, 25 bp, Homo sapien
tgtagctagagccttcactgcctcc

SEQ ID NO: 667961 - DNA, 25 bp, Homo sapien
caagagatgacggcttggactgagc

SEQ ID NO: 667962 - DNA, 25 bp, Homo sapien
gaccaagcaagagatgacggcttgg

SEQ ID NO: 667963 - DNA, 25 bp, Homo sapien
gcaagagatgacggcttggactgag

SEQ ID NO: 667964 - DNA, 25 bp, Homo sapien
aagagatgacggcttggactgagcc

SEQ ID NO: 667965 - DNA, 25 bp, Homo sapien
tatatcgcaggaaggcaagtattgg

SEQ ID NO: 667966 - DNA, 25 bp, Homo sapien
tggagactagctaccaaggtcactt

SEQ ID NO: 667967 - DNA, 25 bp, Homo sapien
gtggatttaccacaggacctgcact

SEQ ID NO: 667968 - DNA, 25 bp, Homo sapien
gagaccgttgactggagtgaccaca

SEQ ID NO: 667969 - DNA, 25 bp, Homo sapien
gaggtgaaccccaactcaactgggc

SEQ ID NO: 667970 - DNA, 25 bp, Homo sapien
caactgaacctagcttggcctgtgg

SEQ ID NO: 667971 - DNA, 25 bp, Homo sapien
tgatgcttaaccaagttcctgcgct

SEQ ID NO: 667972 - DNA, 25 bp, Homo sapien
agcacttagtgtccatccccgaggt

SEQ ID NO: 667973 - DNA, 25 bp, Homo sapien
cctagctgtaagctctcagcttgta

SEQ ID NO: 667974 - DNA, 25 bp, Homo sapien
gaacgtaatatatcacctaaaagtg

SEQ ID NO: 667975 - DNA, 25 bp, Homo sapien
gctcctggaggttgtctcctagctg

SEQ ID NO: 667976 - DNA, 25 bp, Homo sapien
gaagaatgctttcaccagaacgtaa

SEQ ID NO: 667977 - DNA, 25 bp, Homo sapien
agcagagggcaacctattcacagtt

SEQ ID NO: 667978 - DNA, 25 bp, Homo sapien
ttgagaatagagcaatgtgccgtgg

SEQ ID NO: 667979 - DNA, 25 bp, Homo sapien
tctggctgtgctcaaatttttgtgc

SEQ ID NO: 667980 - DNA, 25 bp, Homo sapien
cctgaaagatgtaaaagatgacctg

SEQ ID NO: 667981 - DNA, 25 bp, Homo sapien
aatcagttctggttgccagcggcca

SEQ ID NO: 667982 - DNA, 25 bp, Homo sapien
gacatgtttcaatgcgcataggaga

SEQ ID NO: 667983 - DNA, 25 bp, Homo sapien
tggacacacatactgctggcatgaa

SEQ ID NO: 667984 - DNA, 25 bp, Homo sapien
tgacacgcgacatgaggagagtccc

SEQ ID NO: 667985 - DNA, 25 bp, Homo sapien
tgccacaccggatggactgaggtct

SEQ ID NO: 667986 - DNA, 25 bp, Homo sapien
gaaaatactgattcggcacccaagg

SEQ ID NO: 667987 - DNA, 25 bp, Homo sapien
tttcatcagcagtgcggcaggacac

SEQ ID NO: 667988 - DNA, 25 bp, Homo sapien
tcaacagaaccggagtctagacagg

SEQ ID NO: 667989 - DNA, 25 bp, Homo sapien
cagtaaggcaaaccagaagctcagg

SEQ ID NO: 667990 - DNA, 25 bp, Homo sapien
ggtggcacacccttcagtactcagt

SEQ ID NO: 667991 - DNA, 25 bp, Homo sapien
tcgcctaaaaatgccccagaagcct

SEQ ID NO: 667992 - DNA, 25 bp, Homo sapien
gagtcccaggcagattacagcaaca

SEQ ID NO: 667993 - DNA, 25 bp, Homo sapien
taattagagctggagtcagtaccca

SEQ ID NO: 667994 - DNA, 25 bp, Homo sapien
cactcaagatacacgggactgggca

SEQ ID NO: 667995 - DNA, 25 bp, Homo sapien
tcacatggaagctatggaggcccct

SEQ ID NO: 667996 - DNA, 25 bp, Homo sapien
gaactgctactgagaccctgaatgt

SEQ ID NO: 667997 - DNA, 25 bp, Homo sapien
cagctgacacgttctgctagagcca

SEQ ID NO: 667998 - DNA, 25 bp, Homo sapien
tactacatccagtgggctctcggtc

SEQ ID NO: 667999 - DNA, 25 bp, Homo sapien
ggtttccatgccaacataggctaca

SEQ ID NO: 668000 - DNA, 25 bp, Homo sapien
tctcctgctggatctagaccctcta

SEQ ID NO: 668001 - DNA, 25 bp, Homo sapien
tctgagcttagctattcccggctga

SEQ ID NO: 668002 - DNA, 25 bp, Homo sapien
gagcacataccacctgaacaggaac

SEQ ID NO: 668003 - DNA, 25 bp, Homo sapien
tacaggaaggtatgattccaggcac

SEQ ID NO: 668004 - DNA, 25 bp, Homo sapien
gatggatcacctactttgccaatgt

SEQ ID NO: 668005 - DNA, 25 bp, Homo sapien
gccagcacatttcaccatcagcaga

SEQ ID NO: 668006 - DNA, 25 bp, Homo sapien
cagccatcatcacgattcctccatg

SEQ ID NO: 668007 - DNA, 25 bp, Homo sapien
tgcagccatcatcacgattcctcca

SEQ ID NO: 668008 - DNA, 25 bp, Homo sapien
gtatagactctgccagcacatttca

SEQ ID NO: 668009 - DNA, 25 bp, Homo sapien
cacttatccctgttcgctgttggcc

SEQ ID NO: 668010 - DNA, 25 bp, Homo sapien
tccagtcctatctgagcaccgggag

SEQ ID NO: 668011 - DNA, 25 bp, Homo sapien
tggcttgagaacagatgaggtcacc

SEQ ID NO: 668012 - DNA, 25 bp, Homo sapien
ggtcacctgccgagtgctaagcctc

SEQ ID NO: 668013 - DNA, 25 bp, Homo sapien
cctctaggcaatagggaaggacgaa

SEQ ID NO: 668014 - DNA, 25 bp, Homo sapien
ctggtactgctcaccactggaggct

SEQ ID NO: 668015 - DNA, 25 bp, Homo sapien
tcagggcctgatccagaaaagcaca

SEQ ID NO: 668016 - DNA, 25 bp, Homo sapien
gatggatgacaagacctcctaactg

SEQ ID NO: 668017 - DNA, 25 bp, Homo sapien
taaatcccggtgatgggctcatatg

SEQ ID NO: 668018 - DNA, 25 bp, Homo sapien
cccagactgttaggagggcacagct

SEQ ID NO: 668019 - DNA, 25 bp, Homo sapien
ggttttggacatcactcatactgca

SEQ ID NO: 668020 - DNA, 25 bp, Homo sapien
gactgaggacagtttttccctggaa

SEQ ID NO: 668021 - DNA, 25 bp, Homo sapien
aggagtccacctacatccagacctt

SEQ ID NO: 668022 - DNA, 25 bp, Homo sapien
tccagaccttacagggtgtctacca

SEQ ID NO: 668023 - DNA, 25 bp, Homo sapien
agaccttacagggtgtctaccacct

SEQ ID NO: 668024 - DNA, 25 bp, Homo sapien
cctacatccagaccttacagggtgt

SEQ ID NO: 668025 - DNA, 25 bp, Homo sapien
gaaatccccagcaagcctagtacag

SEQ ID NO: 668026 - DNA, 25 bp, Homo sapien
cagaggtgaatactcagcacaggac

SEQ ID NO: 668027 - DNA, 25 bp, Homo sapien
gggagcacgtgcatacctacaacat

SEQ ID NO: 668028 - DNA, 25 bp, Homo sapien
aataaaacctcacgacagccctgtg

SEQ ID NO: 668029 - DNA, 25 bp, Homo sapien
tgtcttgtctgaaccacctcggagt

SEQ ID NO: 668030 - DNA, 25 bp, Homo sapien
tcaaggccgttacgaaacacacagg

SEQ ID NO: 668031 - DNA, 25 bp, Homo sapien
gacgtttcacaagtatggcctcaca

SEQ ID NO: 668032 - DNA, 25 bp, Homo sapien
tgtacagtctatatgcgcaggaacg

SEQ ID NO: 668033 - DNA, 25 bp, Homo sapien
gaggctgcgggatttgaaactccaa

SEQ ID NO: 668034 - DNA, 25 bp, Homo sapien
caaaaaggcgccgtcaggaatgtga

SEQ ID NO: 668035 - DNA, 25 bp, Homo sapien
gaccacccacgactataggacttta

SEQ ID NO: 668036 - DNA, 25 bp, Homo sapien
tttacaataaaagcaccggtcagtg

SEQ ID NO: 668037 - DNA, 25 bp, Homo sapien
tagcagataaggaacagggctgcca

SEQ ID NO: 668038 - DNA, 25 bp, Homo sapien
ggaatcggagcagtggtacaggaaa

SEQ ID NO: 668039 - DNA, 25 bp, Homo sapien
agtttccccagcagctatagcagat

SEQ ID NO: 668040 - DNA, 25 bp, Homo sapien
aattgtgcaaggcttccgttccagg

SEQ ID NO: 668041 - DNA, 25 bp, Homo sapien
gctgccgggcaccgctgcaggaacc

SEQ ID NO: 668042 - DNA, 25 bp, Homo sapien
tgccgggcaccgctgcaggaaccga

SEQ ID NO: 668043 - DNA, 25 bp, Homo sapien
gccgggcaccgctgcaggaaccgac

SEQ ID NO: 668044 - DNA, 25 bp, Homo sapien
ctgccgggcaccgctgcaggaaccg

SEQ ID NO: 668045 - DNA, 25 bp, Homo sapien
ctaatgggagccagcgggcgcaggc

SEQ ID NO: 668046 - DNA, 25 bp, Homo sapien
taatgggagccagcgggcgcaggcg

SEQ ID NO: 668047 - DNA, 25 bp, Homo sapien
ctgtcagcccgggatcaccaaggca

SEQ ID NO: 668048 - DNA, 25 bp, Homo sapien
tgtcagcccgggatcaccaaggcag

SEQ ID NO: 668049 - DNA, 25 bp, Homo sapien
ggctgtcagcccgggatcaccaagg

SEQ ID NO: 668050 - DNA, 25 bp, Homo sapien
tcagcccgggatcaccaaggcagca

SEQ ID NO: 668051 - DNA, 25 bp, Homo sapien
gactccgagaccagcggatctcggc

SEQ ID NO: 668052 - DNA, 25 bp, Homo sapien
ggatctcggcaaaccctctttctcg

SEQ ID NO: 668053 - DNA, 25 bp, Homo sapien
ctgcggcagtgcgcccaacagcgga

SEQ ID NO: 668054 - DNA, 25 bp, Homo sapien
gtgcgcccaacagcggactccgaga

SEQ ID NO: 668055 - DNA, 25 bp, Homo sapien
attcttggaaccatggcggcagtgg

SEQ ID NO: 668056 - DNA, 25 bp, Homo sapien
ttcttggaaccatggcggcagtggc

SEQ ID NO: 668057 - DNA, 25 bp, Homo sapien
cattcttggaaccatggcggcagtg

SEQ ID NO: 668058 - DNA, 25 bp, Homo sapien
acatcttccgcgtgctgctgcaggt

SEQ ID NO: 668059 - DNA, 25 bp, Homo sapien
gaactgctcatcatcggctggtaca

SEQ ID NO: 668060 - DNA, 25 bp, Homo sapien
gcggcctcggctgaactgctcatca

SEQ ID NO: 668061 - DNA, 25 bp, Homo sapien
atcatcggctggtacatcttccgcg

SEQ ID NO: 668062 - DNA, 25 bp, Homo sapien
tgggagagggttcccaactcgcgcc

SEQ ID NO: 668063 - DNA, 25 bp, Homo sapien
ccttaaaaaattgcgcattgcggag

SEQ ID NO: 668064 - DNA, 25 bp, Homo sapien
caggcatttagcgacctacgcggta

SEQ ID NO: 668065 - DNA, 25 bp, Homo sapien
gaaagactttacagctcgcagagtg

SEQ ID NO: 668066 - DNA, 25 bp, Homo sapien
tagaacccgcaagactgcgtcgcga

SEQ ID NO: 668067 - DNA, 25 bp, Homo sapien
tagagaaaaagtagttcacaggaaa

SEQ ID NO: 668068 - DNA, 25 bp, Homo sapien
aaaacgcgcattgcaggaaaaataa

SEQ ID NO: 668069 - DNA, 25 bp, Homo sapien
ggaaaacagaaaaacgcgcattgca

SEQ ID NO: 668070 - DNA, 25 bp, Homo sapien
attagagaaaaagtagttcacagga

SEQ ID NO: 668071 - DNA, 25 bp, Homo sapien
ctgggtttctcgtcgcaggtgttca

SEQ ID NO: 668072 - DNA, 25 bp, Homo sapien
tcgtcgcaggtgttcaggtactccc

SEQ ID NO: 668073 - DNA, 25 bp, Homo sapien
gcagaagctggcatacacggtgtcg

SEQ ID NO: 668074 - DNA, 25 bp, Homo sapien
ggcggccgtatcatcaggtgctcct

SEQ ID NO: 668075 - DNA, 25 bp, Homo sapien
gccagtgccgcgcaggaatgtgggg

SEQ ID NO: 668076 - DNA, 25 bp, Homo sapien
ctcggccagcacgggagccagtgcc

SEQ ID NO: 668077 - DNA, 25 bp, Homo sapien
tcggccagcacgggagccagtgccg

SEQ ID NO: 668078 - DNA, 25 bp, Homo sapien
gtgccgcgcaggaatgtggggtccc

SEQ ID NO: 668079 - DNA, 25 bp, Homo sapien
ctgtgttccctcgccagaggagcac

SEQ ID NO: 668080 - DNA, 25 bp, Homo sapien
gaagcagtaccgacaatgacgaaga

SEQ ID NO: 668081 - DNA, 25 bp, Homo sapien
ccccggagaagcagtaccgacaatg

SEQ ID NO: 668082 - DNA, 25 bp, Homo sapien
tgacgaagataccagatcccttccc

SEQ ID NO: 668083 - DNA, 25 bp, Homo sapien
taccgacaatgacgaagataccaga

SEQ ID NO: 668084 - DNA, 25 bp, Homo sapien
gatctggacaaagtcgggacagcac

SEQ ID NO: 668085 - DNA, 25 bp, Homo sapien
ggacaaagtcgggacagcaccatcc

SEQ ID NO: 668086 - DNA, 25 bp, Homo sapien
tctggacaaagtcgggacagcacca

SEQ ID NO: 668087 - DNA, 25 bp, Homo sapien
caaagtcgggacagcaccatcccag

SEQ ID NO: 668088 - DNA, 25 bp, Homo sapien
cagccagcagaatggacattctgac

SEQ ID NO: 668089 - DNA, 25 bp, Homo sapien
tgagcttgggcaacggattactgtt

SEQ ID NO: 668090 - DNA, 25 bp, Homo sapien
tccagcaacaggtgagagacccttg

SEQ ID NO: 668091 - DNA, 25 bp, Homo sapien
taagtccagaggtgtttaggtacca

SEQ ID NO: 668092 - DNA, 25 bp, Homo sapien
tgactagtgttttactgcacagccc

SEQ ID NO: 668093 - DNA, 25 bp, Homo sapien
ttggtatatcgcacagggacaggct

SEQ ID NO: 668094 - DNA, 25 bp, Homo sapien
tggtgttgccgtccagaaggctgac

SEQ ID NO: 668095 - DNA, 25 bp, Homo sapien
taaagcaacgcaactaaactgatgg

SEQ ID NO: 668096 - DNA, 25 bp, Homo sapien
caggctaggtccaatcacggcaatc

SEQ ID NO: 668097 - DNA, 25 bp, Homo sapien
cccaagcaggttgacgccacggtac

SEQ ID NO: 668098 - DNA, 25 bp, Homo sapien
cctaaggtgacccagaagggacaat

SEQ ID NO: 668099 - DNA, 25 bp, Homo sapien
cggcgacgcctaaggtgacccagaa

SEQ ID NO: 668100 - DNA, 25 bp, Homo sapien
cccagaagggacaatatggcggcgc

SEQ ID NO: 668101 - DNA, 25 bp, Homo sapien
gccactgtcgccgtctgccgcagcc

SEQ ID NO: 668102 - DNA, 25 bp, Homo sapien
actgtcgccgtctgccgcagcctgc

SEQ ID NO: 668103 - DNA, 25 bp, Homo sapien
cgccgccactgtcgccgtctgccgc

SEQ ID NO: 668104 - DNA, 25 bp, Homo sapien
ctccacctcagctcgccaccgacgc

SEQ ID NO: 668105 - DNA, 25 bp, Homo sapien
ttctataacttgaagattccgaaag

SEQ ID NO: 668106 - DNA, 25 bp, Homo sapien
aacttgaagattccgaaagtcaata

SEQ ID NO: 668107 - DNA, 25 bp, Homo sapien
tataacttgaagattccgaaagtca

SEQ ID NO: 668108 - DNA, 25 bp, Homo sapien
gtttctataacttgaagattccgaa

SEQ ID NO: 668109 - DNA, 25 bp, Homo sapien
tgggtgcagacctaggagagggcca

SEQ ID NO: 668110 - DNA, 25 bp, Homo sapien
ctgggtgcagacctaggagagggcc

SEQ ID NO: 668111 - DNA, 25 bp, Homo sapien
gccttgaagagtggccccaaaagat

SEQ ID NO: 668112 - DNA, 25 bp, Homo sapien
ggccttgaagagtggccccaaaaga

SEQ ID NO: 668113 - DNA, 25 bp, Homo sapien
gctgggcagatccaccaatgtctgc

SEQ ID NO: 668114 - DNA, 25 bp, Homo sapien
agatccaccaatgtctgctggcttg

SEQ ID NO: 668115 - DNA, 25 bp, Homo sapien
gggacaggactgatagatgctgtcc

SEQ ID NO: 668116 - DNA, 25 bp, Homo sapien
gcagggatcctggaacaccagcact

SEQ ID NO: 668117 - DNA, 25 bp, Homo sapien
aataacttgatgagtgttgcccagc

SEQ ID NO: 668118 - DNA, 25 bp, Homo sapien
caaatcagtggctacttggagggca

SEQ ID NO: 668119 - DNA, 25 bp, Homo sapien
ttaacgctgtcccagtgatggctgc

SEQ ID NO: 668120 - DNA, 25 bp, Homo sapien
cagtggatttcctcgctggtcttga

SEQ ID NO: 668121 - DNA, 25 bp, Homo sapien
cctctacatggaagggtgagcccca

SEQ ID NO: 668122 - DNA, 25 bp, Homo sapien
taagacagcgtgtgatgccatgccg

SEQ ID NO: 668123 - DNA, 25 bp, Homo sapien
tgtctggtgaatttcccttttccaa

SEQ ID NO: 668124 - DNA, 25 bp, Homo sapien
ctctgtctggtgaatttcccttttc

SEQ ID NO: 668125 - DNA, 25 bp, Homo sapien
ttttccaaggccagcttccaattcc

SEQ ID NO: 668126 - DNA, 25 bp, Homo sapien
caaggccagcttccaattccctttt

SEQ ID NO: 668127 - DNA, 25 bp, Homo sapien
tgctctgttacatagtgactagatc

SEQ ID NO: 668128 - DNA, 25 bp, Homo sapien
tttagccacgtcagcagttccctgc

SEQ ID NO: 668129 - DNA, 25 bp, Homo sapien
tcttccagcagtatgggcaggtggg

SEQ ID NO: 668130 - DNA, 25 bp, Homo sapien
tgggtcttccagcagtatgggcagg

SEQ ID NO: 668131 - DNA, 25 bp, Homo sapien
gctgcttgttgtttaccacggggat

SEQ ID NO: 668132 - DNA, 25 bp, Homo sapien
tgctgcttgttgtttaccacgggga

SEQ ID NO: 668133 - DNA, 25 bp, Homo sapien
tgtgtagcactcatttctttgctcc

SEQ ID NO: 668134 - DNA, 25 bp, Homo sapien
ctgcttgttgtttaccacggggatt

SEQ ID NO: 668135 - DNA, 25 bp, Homo sapien
caaccaccgacacaaaaccatttgg

SEQ ID NO: 668136 - DNA, 25 bp, Homo sapien
actcattttaaacacaggcaactga

SEQ ID NO: 668137 - DNA, 25 bp, Homo sapien
cagacaggcgccacggctggaattt

SEQ ID NO: 668138 - DNA, 25 bp, Homo sapien
taccctggtgacagattagcactgc

SEQ ID NO: 668139 - DNA, 25 bp, Homo sapien
acaagttaccttccatatttttatg

SEQ ID NO: 668140 - DNA, 25 bp, Homo sapien
ttcaacatgaaaaactggtttggac

SEQ ID NO: 668141 - DNA, 25 bp, Homo sapien
gcttcttttactacactactcccca

SEQ ID NO: 668142 - DNA, 25 bp, Homo sapien
catatttttatggtcaaaggcttct

SEQ ID NO: 668143 - DNA, 25 bp, Homo sapien
cattatgggcttcataaacagactc

SEQ ID NO: 668144 - DNA, 25 bp, Homo sapien
aaataatatcccattagaggcgccg

SEQ ID NO: 668145 - DNA, 25 bp, Homo sapien
gacggagcaccattccgggtggtaa

SEQ ID NO: 668146 - DNA, 25 bp, Homo sapien
gtaatggctccagcgccaggaggaa

SEQ ID NO: 668147 - DNA, 25 bp, Homo sapien
tttttaggcaaatcaggcttggaaa

SEQ ID NO: 668148 - DNA, 25 bp, Homo sapien
ggcaaatcaggcttggaaatgctgt

SEQ ID NO: 668149 - DNA, 25 bp, Homo sapien
ttaggcaaatcaggcttggaaatgc

SEQ ID NO: 668150 - DNA, 25 bp, Homo sapien
tttaggcaaatcaggcttggaaatg

SEQ ID NO: 668151 - DNA, 25 bp, Homo sapien
ggtaatgtggcccaccactgtctcc

SEQ ID NO: 668152 - DNA, 25 bp, Homo sapien
ttggaagggtaatgtggcccaccac

SEQ ID NO: 668153 - DNA, 25 bp, Homo sapien
gtaatgtggcccaccactgtctcct

SEQ ID NO: 668154 - DNA, 25 bp, Homo sapien
gaagggtaatgtggcccaccactgt

SEQ ID NO: 668155 - DNA, 25 bp, Homo sapien
tttacattttctattgtatctgagg

SEQ ID NO: 668156 - DNA, 25 bp, Homo sapien
tacattttctattgtatctgagggt

SEQ ID NO: 668157 - DNA, 25 bp, Homo sapien
tttctattgtatctgagggttcaat

SEQ ID NO: 668158 - DNA, 25 bp, Homo sapien
cattttctattgtatctgagggttc

SEQ ID NO: 668159 - DNA, 25 bp, Homo sapien
aagaagcagcgctctccttgtgcca

SEQ ID NO: 668160 - DNA, 25 bp, Homo sapien
tcaagaagcagcgctctccttgtgc

SEQ ID NO: 668161 - DNA, 25 bp, Homo sapien
caagaagcagcgctctccttgtgcc

SEQ ID NO: 668162 - DNA, 25 bp, Homo sapien
gcatcgtgccttttgttgagcgccc

SEQ ID NO: 668163 - DNA, 25 bp, Homo sapien
tcagaaaatgtgggcatcgtgcctt

SEQ ID NO: 668164 - DNA, 25 bp, Homo sapien
tgtgggcatcgtgccttttgttgag

SEQ ID NO: 668165 - DNA, 25 bp, Homo sapien
tcgtgccttttgttgagcgccctgg

SEQ ID NO: 668166 - DNA, 25 bp, Homo sapien
taacttgtaggaagctttagaatct

SEQ ID NO: 668167 - DNA, 25 bp, Homo sapien
cagatctgctatggccattctctcc

SEQ ID NO: 668168 - DNA, 25 bp, Homo sapien
ttaaatatcactgccactttgccca

SEQ ID NO: 668169 - DNA, 25 bp, Homo sapien
gcacctggtaacttgtaggaagctt

SEQ ID NO: 668170 - DNA, 25 bp, Homo sapien
gcagaggcacctctgaccgtgtgaa

SEQ ID NO: 668171 - DNA, 25 bp, Homo sapien
tttctgattgctgaatgtactgagc

SEQ ID NO: 668172 - DNA, 25 bp, Homo sapien
acctctgaccgtgtgaactttctga

SEQ ID NO: 668173 - DNA, 25 bp, Homo sapien
gaatgtactgagcatagcttttctc

SEQ ID NO: 668174 - DNA, 25 bp, Homo sapien
gctgctgcagattattgacagagat

SEQ ID NO: 668175 - DNA, 25 bp, Homo sapien
gaggaagcggatgatgacaaaaaaa

SEQ ID NO: 668176 - DNA, 25 bp, Homo sapien
gctgcagattattgacagagatggg

SEQ ID NO: 668177 - DNA, 25 bp, Homo sapien
aggctgctgcagattattgacagag

SEQ ID NO: 668178 - DNA, 25 bp, Homo sapien
gaattgcggattaagtttccagaca

SEQ ID NO: 668179 - DNA, 25 bp, Homo sapien
tgcggattaagtttccagacaatcc

SEQ ID NO: 668180 - DNA, 25 bp, Homo sapien
ccaagaattgcggattaagtttcca

SEQ ID NO: 668181 - DNA, 25 bp, Homo sapien
caagaattgcggattaagtttccag

SEQ ID NO: 668182 - DNA, 25 bp, Homo sapien
tgcactgcctgatctttctcctaaa

SEQ ID NO: 668183 - DNA, 25 bp, Homo sapien
gcagggacagaattacttagtttac

SEQ ID NO: 668184 - DNA, 25 bp, Homo sapien
caattgtcattttgatcgcataccc

SEQ ID NO: 668185 - DNA, 25 bp, Homo sapien
ccatcagggcagtgatgtcatcatg

SEQ ID NO: 668186 - DNA, 25 bp, Homo sapien
tgatattcacccttgtggttgaagg

SEQ ID NO: 668187 - DNA, 25 bp, Homo sapien
catttgctgatattcacccttgtgg

SEQ ID NO: 668188 - DNA, 25 bp, Homo sapien
tattcacccttgtggttgaaggaga

SEQ ID NO: 668189 - DNA, 25 bp, Homo sapien
tgctgatattcacccttgtggttga

SEQ ID NO: 668190 - DNA, 25 bp, Homo sapien
ttagaacagggattgtagataagct

SEQ ID NO: 668191 - DNA, 25 bp, Homo sapien
tagataagcttaatcggccacaccc

SEQ ID NO: 668192 - DNA, 25 bp, Homo sapien
tcaggtattggcttctcctattgta

SEQ ID NO: 668193 - DNA, 25 bp, Homo sapien
gcctgtgattgattcatagtctctt

SEQ ID NO: 668194 - DNA, 25 bp, Homo sapien
tcatggaatccgagctggacctaaa

SEQ ID NO: 668195 - DNA, 25 bp, Homo sapien
cctgtaccaccttctggtggagctg

SEQ ID NO: 668196 - DNA, 25 bp, Homo sapien
aatgctgtacagtcgcttctcggct

SEQ ID NO: 668197 - DNA, 25 bp, Homo sapien
cattcaggagatgcacgtggtggcc

SEQ ID NO: 668198 - DNA, 25 bp, Homo sapien
agcagaagtgctcatcgatgctctg

SEQ ID NO: 668199 - DNA, 25 bp, Homo sapien
ggtcgatttgcttcaggaattaaca

SEQ ID NO: 668200 - DNA, 25 bp, Homo sapien
tgtccatagctgtggtcgatttgct

SEQ ID NO: 668201 - DNA, 25 bp, Homo sapien
gatatagacaccctccatgagagtg

SEQ ID NO: 668202 - DNA, 25 bp, Homo sapien
gcccgtcctgtgacagctgataaaa

SEQ ID NO: 668203 - DNA, 25 bp, Homo sapien
tctgccatcttttgaggagcctagg

SEQ ID NO: 668204 - DNA, 25 bp, Homo sapien
tattgatccacacagcagctaaccc

SEQ ID NO: 668205 - DNA, 25 bp, Homo sapien
ggcaaactgccttacatgtgaggaa

SEQ ID NO: 668206 - DNA, 25 bp, Homo sapien
tggtacagaatctggagcgcctgga

SEQ ID NO: 668207 - DNA, 25 bp, Homo sapien
actgctggtacagaatctggagcgc

SEQ ID NO: 668208 - DNA, 25 bp, Homo sapien
agcactgctggtacagaatctggag

SEQ ID NO: 668209 - DNA, 25 bp, Homo sapien
tgctggtacagaatctggagcgcct

SEQ ID NO: 668210 - DNA, 25 bp, Homo sapien
tggctgagttccggcctgagatgtg

SEQ ID NO: 668211 - DNA, 25 bp, Homo sapien
ctgagatgtgtacagagggtgccca

SEQ ID NO: 668212 - DNA, 25 bp, Homo sapien
agggtcttctacagtggctgttgaa

SEQ ID NO: 668213 - DNA, 25 bp, Homo sapien
gggtcttctacagtggctgttgaag

SEQ ID NO: 668214 - DNA, 25 bp, Homo sapien
gaagtgctggccatattgctccagg

SEQ ID NO: 668215 - DNA, 25 bp, Homo sapien
ttttgatgccaacaaactgtattgc

SEQ ID NO: 668216 - DNA, 25 bp, Homo sapien
actgtattgcagtgaagtgctggcc

SEQ ID NO: 668217 - DNA, 25 bp, Homo sapien
gctggccatattgctccaggacaat

SEQ ID NO: 668218 - DNA, 25 bp, Homo sapien
cgatgtgcttcttcagcagttatcc

SEQ ID NO: 668219 - DNA, 25 bp, Homo sapien
ttcagctgatgaatctcatgctcag

SEQ ID NO: 668220 - DNA, 25 bp, Homo sapien
aaagacacaatcccagcacggctga

SEQ ID NO: 668221 - DNA, 25 bp, Homo sapien
caatcgtgagcgcttcctgaagggc

SEQ ID NO: 668222 - DNA, 25 bp, Homo sapien
tgctcctgtctaatgcttagttcca

SEQ ID NO: 668223 - DNA, 25 bp, Homo sapien
tagcttaggaaatatgaaaacgtgc

SEQ ID NO: 668224 - DNA, 25 bp, Homo sapien
cattatgaattgtgccctacagagg

SEQ ID NO: 668225 - DNA, 25 bp, Homo sapien
tatgttgataactcttgagaccctg

SEQ ID NO: 668226 - DNA, 25 bp, Homo sapien
cagagtctgctgtcttaaaacttca

SEQ ID NO: 668227 - DNA, 25 bp, Homo sapien
ttcaaaatgttattagccctgttat

SEQ ID NO: 668228 - DNA, 25 bp, Homo sapien
tcaaaatgttattagccctgttata

SEQ ID NO: 668229 - DNA, 25 bp, Homo sapien
aaaagaagatctcccggagcagtgc

SEQ ID NO: 668230 - DNA, 25 bp, Homo sapien
cctctttatgaaatctcccaggaag

SEQ ID NO: 668231 - DNA, 25 bp, Homo sapien
gaccatgccatgattggccccgaag

SEQ ID NO: 668232 - DNA, 25 bp, Homo sapien
gaaggcacagacaactgccataagt

SEQ ID NO: 668233 - DNA, 25 bp, Homo sapien
ctatgtcagtgcagcgctgaaattc

SEQ ID NO: 668234 - DNA, 25 bp, Homo sapien
tgaaattcctcctgtcctctaactg

SEQ ID NO: 668235 - DNA, 25 bp, Homo sapien
tgtcctctaactgccgcctgactgg

SEQ ID NO: 668236 - DNA, 25 bp, Homo sapien
gaaagagctatgtcagtgcagcgct

SEQ ID NO: 668237 - DNA, 25 bp, Homo sapien
taaggccgccttgggtctgcagcaa

SEQ ID NO: 668238 - DNA, 25 bp, Homo sapien
gtgaacataaggccgccttgggtct

SEQ ID NO: 668239 - DNA, 25 bp, Homo sapien
agtgaacataaggccgccttgggtc

SEQ ID NO: 668240 - DNA, 25 bp, Homo sapien
gggtcaagaaatcagatttcaagaa

SEQ ID NO: 668241 - DNA, 25 bp, Homo sapien
ctttgtggaacgtagacctggtcat

SEQ ID NO: 668242 - DNA, 25 bp, Homo sapien
ggatggtctttgtggaacgtagacc

SEQ ID NO: 668243 - DNA, 25 bp, Homo sapien
tgcaggagattgtgcttgatgcctg

SEQ ID NO: 668244 - DNA, 25 bp, Homo sapien
ggagattgtgcttgatgcctgtgct

SEQ ID NO: 668245 - DNA, 25 bp, Homo sapien
tggtgcacactataaatggctggtt

SEQ ID NO: 668246 - DNA, 25 bp, Homo sapien
caaaggtactttggacctgaggcaa

SEQ ID NO: 668247 - DNA, 25 bp, Homo sapien
catgcctccgtgtgtatcagtctca

SEQ ID NO: 668248 - DNA, 25 bp, Homo sapien
gatttagattccagtggcccacaaa

SEQ ID NO: 668249 - DNA, 25 bp, Homo sapien
tggcttccctcctgcggaacctgag

SEQ ID NO: 668250 - DNA, 25 bp, Homo sapien
ttccctcctgcggaacctgagaggg

SEQ ID NO: 668251 - DNA, 25 bp, Homo sapien
catgtctgttcgatcctggcttccc

SEQ ID NO: 668252 - DNA, 25 bp, Homo sapien
ggcagcagcggacccggcttctgaa

SEQ ID NO: 668253 - DNA, 25 bp, Homo sapien
gggtgcaatgcaggtggcggacaag

SEQ ID NO: 668254 - DNA, 25 bp, Homo sapien
gttgacagactaatggagttgcatt

SEQ ID NO: 668255 - DNA, 25 bp, Homo sapien
gacagactaatggagttgcatttta

SEQ ID NO: 668256 - DNA, 25 bp, Homo sapien
caatgcaggtggcggacaagaagat

SEQ ID NO: 668257 - DNA, 25 bp, Homo sapien
ggagttctacctccggcgcctggat

SEQ ID NO: 668258 - DNA, 25 bp, Homo sapien
caatgacaccgaggaggagttctac

SEQ ID NO: 668259 - DNA, 25 bp, Homo sapien
gcacatctgctacatcatggccgag

SEQ ID NO: 668260 - DNA, 25 bp, Homo sapien
catggtccggcgaggagagatcatc

SEQ ID NO: 668261 - DNA, 25 bp, Homo sapien
catgcgaggaagctccatcaaaatt

SEQ ID NO: 668262 - DNA, 25 bp, Homo sapien
tcctaaacatgcgaggaagctccat

SEQ ID NO: 668263 - DNA, 25 bp, Homo sapien
gagggttcaccagatcctaaacatg

SEQ ID NO: 668264 - DNA, 25 bp, Homo sapien
aaaattgtcaggcatatcatcaagg

SEQ ID NO: 668265 - DNA, 25 bp, Homo sapien
gaacttacacccataaacaagaggc

SEQ ID NO: 668266 - DNA, 25 bp, Homo sapien
tgtccaggtcgtctttgtcagaata

SEQ ID NO: 668267 - DNA, 25 bp, Homo sapien
tcagaatacggaagactagccttgt

SEQ ID NO: 668268 - DNA, 25 bp, Homo sapien
cagttacacacagtcaactgtccag

SEQ ID NO: 668269 - DNA, 25 bp, Homo sapien
agtttctacacaactctgtgtggct

SEQ ID NO: 668270 - DNA, 25 bp, Homo sapien
ttggccctgcgcatcatggactctc

SEQ ID NO: 668271 - DNA, 25 bp, Homo sapien
gagaacgagcaaaagcgcatcctgg

SEQ ID NO: 668272 - DNA, 25 bp, Homo sapien
ggagaacttctagaggcaccttggc

SEQ ID NO: 668273 - DNA, 25 bp, Homo sapien
atccgggcagcaccgaggagccgta

SEQ ID NO: 668274 - DNA, 25 bp, Homo sapien
gagccgtaggaagtccacagcccct

SEQ ID NO: 668275 - DNA, 25 bp, Homo sapien
cactgcagggtgacaagcagggcca

SEQ ID NO: 668276 - DNA, 25 bp, Homo sapien
agattccactgcagggtgacaagca

SEQ ID NO: 668277 - DNA, 25 bp, Homo sapien
aatgacagcgagtgtccagcctggg

SEQ ID NO: 668278 - DNA, 25 bp, Homo sapien
tgctgtgagccacgagcatgaccct

SEQ ID NO: 668279 - DNA, 25 bp, Homo sapien
ctgtggctgggtcacggtacccagc

SEQ ID NO: 668280 - DNA, 25 bp, Homo sapien
ggagtcccacgtagaccagtacctg

SEQ ID NO: 668281 - DNA, 25 bp, Homo sapien
tcttgacgaccgaataggcctttcc

SEQ ID NO: 668282 - DNA, 25 bp, Homo sapien
tgcctcttgacgaccgaataggcct

SEQ ID NO: 668283 - DNA, 25 bp, Homo sapien
ccagctgcctcttgacgaccgaata

SEQ ID NO: 668284 - DNA, 25 bp, Homo sapien
gacgaccgaataggcctttccagcc

SEQ ID NO: 668285 - DNA, 25 bp, Homo sapien
tcctgctctggaaacaccagggacc

SEQ ID NO: 668286 - DNA, 25 bp, Homo sapien
tgactgaatagtggacgcaggacat

SEQ ID NO: 668287 - DNA, 25 bp, Homo sapien
cctgctctggaaacaccagggacca

SEQ ID NO: 668288 - DNA, 25 bp, Homo sapien
gtgactgaatagtggacgcaggaca

SEQ ID NO: 668289 - DNA, 25 bp, Homo sapien
cagctaaaaggctgggcttgggaga

SEQ ID NO: 668290 - DNA, 25 bp, Homo sapien
ggcagctaaaaggctgggcttggga

SEQ ID NO: 668291 - DNA, 25 bp, Homo sapien
gtgcaaacctcagtcagccttcagg

SEQ ID NO: 668292 - DNA, 25 bp, Homo sapien
agacccctctctggtatgccctttt

SEQ ID NO: 668293 - DNA, 25 bp, Homo sapien
tgggcagcactatgattcatggcca

SEQ ID NO: 668294 - DNA, 25 bp, Homo sapien
cattgttcctatagcagtctctggc

SEQ ID NO: 668295 - DNA, 25 bp, Homo sapien
tcatggccatatgaacagtgcacat

SEQ ID NO: 668296 - DNA, 25 bp, Homo sapien
tacatggcagtccaggttcaatccc

SEQ ID NO: 668297 - DNA, 25 bp, Homo sapien
gacttaagctcctactgcacgctga

SEQ ID NO: 668298 - DNA, 25 bp, Homo sapien
tcctactgcacgctgaggcagacac

SEQ ID NO: 668299 - DNA, 25 bp, Homo sapien
cttccattccttttgagggaggact

SEQ ID NO: 668300 - DNA, 25 bp, Homo sapien
caaggcatgctgcagttccctaagc

SEQ ID NO: 668301 - DNA, 25 bp, Homo sapien
gaagcaaccttcatgaactcacacc

SEQ ID NO: 668302 - DNA, 25 bp, Homo sapien
aagagaaccctcgggtgcctccctg

SEQ ID NO: 668303 - DNA, 25 bp, Homo sapien
cgtttgtttgcctgtcccaaggtga

SEQ ID NO: 668304 - DNA, 25 bp, Homo sapien
tcctgccgcaggcacctgtcagggg

SEQ ID NO: 668305 - DNA, 25 bp, Homo sapien
ccaagccaggcaaggagctgaggaa

SEQ ID NO: 668306 - DNA, 25 bp, Homo sapien
gccgccccccaagccaggcaaggag

SEQ ID NO: 668307 - DNA, 25 bp, Homo sapien
tccgtcctgcatctgcccgaagccc

SEQ ID NO: 668308 - DNA, 25 bp, Homo sapien
gctgaggaagcgctcggtggaccag

SEQ ID NO: 668309 - DNA, 25 bp, Homo sapien
tctgcagggtcactcatggaggcct

SEQ ID NO: 668310 - DNA, 25 bp, Homo sapien
ggacagtgacccctccctgaatatg

SEQ ID NO: 668311 - DNA, 25 bp, Homo sapien
tgccctgtcacacggcgagtcagaa

SEQ ID NO: 668312 - DNA, 25 bp, Homo sapien
gttttgcaccagcaggacccctttg

SEQ ID NO: 668313 - DNA, 25 bp, Homo sapien
gattcccgatcacgggcacacctgc

SEQ ID NO: 668314 - DNA, 25 bp, Homo sapien
ctcacgattcccgatcacgggcaca

SEQ ID NO: 668315 - DNA, 25 bp, Homo sapien
tatttctattggacccaattctcct

SEQ ID NO: 668316 - DNA, 25 bp, Homo sapien
aattctcctcggaattggctggcac

SEQ ID NO: 668317 - DNA, 25 bp, Homo sapien
gctgccgcagctcagtgatgacgtg

SEQ ID NO: 668318 - DNA, 25 bp, Homo sapien
cctgtatacatgatccagtctgtga

SEQ ID NO: 668319 - DNA, 25 bp, Homo sapien
gggtgggttgccctgtatacatgat

SEQ ID NO: 668320 - DNA, 25 bp, Homo sapien
atgatccagtctgtgactaccagcc

SEQ ID NO: 668321 - DNA, 25 bp, Homo sapien
taccacaggtagtgcctcatttgaa

SEQ ID NO: 668322 - DNA, 25 bp, Homo sapien
caaaggcagactaccacaggtagtg

SEQ ID NO: 668323 - DNA, 25 bp, Homo sapien
gcagactaccacaggtagtgcctca

SEQ ID NO: 668324 - DNA, 25 bp, Homo sapien
caggggggctcagctacttatatac

SEQ ID NO: 668325 - DNA, 25 bp, Homo sapien
tgaagcctctggaattgtacatgga

SEQ ID NO: 668326 - DNA, 25 bp, Homo sapien
catggaatcttgtgaggtcagtgaa

SEQ ID NO: 668327 - DNA, 25 bp, Homo sapien
tcagcagatgagatagtgcccactg

SEQ ID NO: 668328 - DNA, 25 bp, Homo sapien
tgaagcatcctcagcagatgagata

SEQ ID NO: 668329 - DNA, 25 bp, Homo sapien
gctaactaattcaccttctctgctg

SEQ ID NO: 668330 - DNA, 25 bp, Homo sapien
tctaagcagttgtgtgatcgatcaa

SEQ ID NO: 668331 - DNA, 25 bp, Homo sapien
tgtttcccaaagatcaggttaggta

SEQ ID NO: 668332 - DNA, 25 bp, Homo sapien
gttaaacccttagagccaccagaca

SEQ ID NO: 668333 - DNA, 25 bp, Homo sapien
ctgcacggggcagtaaagctcgttc

SEQ ID NO: 668334 - DNA, 25 bp, Homo sapien
tggccccgtgcagctgcacagggtg

SEQ ID NO: 668335 - DNA, 25 bp, Homo sapien
tcgtgtaggggttctgctgcccgct

SEQ ID NO: 668336 - DNA, 25 bp, Homo sapien
ggtccaccttcatcaagtggaggaa

SEQ ID NO: 668337 - DNA, 25 bp, Homo sapien
tgtgaacagacactcatggctcccg

SEQ ID NO: 668338 - DNA, 25 bp, Homo sapien
gatgtcctctgacgcatgacaggga

SEQ ID NO: 668339 - DNA, 25 bp, Homo sapien
taacctttggcagagatagagcact

SEQ ID NO: 668340 - DNA, 25 bp, Homo sapien
gatccacagaatatgccgcctttgg

SEQ ID NO: 668341 - DNA, 25 bp, Homo sapien
acttcatacatggtggcaattcagt

SEQ ID NO: 668342 - DNA, 25 bp, Homo sapien
catacatggtggcaattcagtccga

SEQ ID NO: 668343 - DNA, 25 bp, Homo sapien
tggtggcaattcagtccgacttggc

SEQ ID NO: 668344 - DNA, 25 bp, Homo sapien
tacatggtggcaattcagtccgact

SEQ ID NO: 668345 - DNA, 25 bp, Homo sapien
agccagtcttgatatcatccttagg

SEQ ID NO: 668346 - DNA, 25 bp, Homo sapien
tctttgataattagagtggcaaggg

SEQ ID NO: 668347 - DNA, 25 bp, Homo sapien
cacttcaccgcagaaagatgaggcc

SEQ ID NO: 668348 - DNA, 25 bp, Homo sapien
aggcctgcgtgggagacaatttttg

SEQ ID NO: 668349 - DNA, 25 bp, Homo sapien
gtgtttataacctccatagtggttg

SEQ ID NO: 668350 - DNA, 25 bp, Homo sapien
gagtctgaggcataattaacaccac

SEQ ID NO: 668351 - DNA, 25 bp, Homo sapien
gtgtagctgtgctctcactccgaga

SEQ ID NO: 668352 - DNA, 25 bp, Homo sapien
gggtatcccagttctcagccaatga

SEQ ID NO: 668353 - DNA, 25 bp, Homo sapien
tcttagcagcactaccatgccatgg

SEQ ID NO: 668354 - DNA, 25 bp, Homo sapien
gttcccgttgttccctctctggcag

SEQ ID NO: 668355 - DNA, 25 bp, Homo sapien
tggtgttcccgttgttccctctctg

SEQ ID NO: 668356 - DNA, 25 bp, Homo sapien
gtgttcccgttgttccctctctggc

SEQ ID NO: 668357 - DNA, 25 bp, Homo sapien
tcccgttgttccctctctggcagca

SEQ ID NO: 668358 - DNA, 25 bp, Homo sapien
caacatgggcaggacttaaaaccgt

SEQ ID NO: 668359 - DNA, 25 bp, Homo sapien
gaatctaggagggtttacatcccac

SEQ ID NO: 668360 - DNA, 25 bp, Homo sapien
tattgggcacagatttcaaagtggc

SEQ ID NO: 668361 - DNA, 25 bp, Homo sapien
gatgctaaccatacctctgaagtgc

SEQ ID NO: 668362 - DNA, 25 bp, Homo sapien
agcctccactcacggatgccttcag

SEQ ID NO: 668363 - DNA, 25 bp, Homo sapien
tccactcacggatgccttcagaaac

SEQ ID NO: 668364 - DNA, 25 bp, Homo sapien
agcagcctccactcacggatgcctt

SEQ ID NO: 668365 - DNA, 25 bp, Homo sapien
cctccactcacggatgccttcagaa

SEQ ID NO: 668366 - DNA, 25 bp, Homo sapien
aacatttacttccacgcctctgagg

SEQ ID NO: 668367 - DNA, 25 bp, Homo sapien
tatgcacagtgaacagctccagatc

SEQ ID NO: 668368 - DNA, 25 bp, Homo sapien
tagatttaagtagcccagaggtccc

SEQ ID NO: 668369 - DNA, 25 bp, Homo sapien
gatgggatcctactgctagaaagag

SEQ ID NO: 668370 - DNA, 25 bp, Homo sapien
gttccaggatgcaggctgctcccac

SEQ ID NO: 668371 - DNA, 25 bp, Homo sapien
agttccaggatgcaggctgctccca

SEQ ID NO: 668372 - DNA, 25 bp, Homo sapien
gggatggcagttccaggatgcaggc

SEQ ID NO: 668373 - DNA, 25 bp, Homo sapien
cctgggatggcagttccaggatgca

SEQ ID NO: 668374 - DNA, 25 bp, Homo sapien
ttcttgaccctctggaattgttgct

SEQ ID NO: 668375 - DNA, 25 bp, Homo sapien
tttctgcttcttgaccctctggaat

SEQ ID NO: 668376 - DNA, 25 bp, Homo sapien
cttgaccctctggaattgttgctga

SEQ ID NO: 668377 - DNA, 25 bp, Homo sapien
gcttcttgaccctctggaattgttg

SEQ ID NO: 668378 - DNA, 25 bp, Homo sapien
acaaacgtaaagggatgcgggtgat

SEQ ID NO: 668379 - DNA, 25 bp, Homo sapien
taaagggatgcgggtgatcaggcag

SEQ ID NO: 668380 - DNA, 25 bp, Homo sapien
caaacgtaaagggatgcgggtgatc

SEQ ID NO: 668381 - DNA, 25 bp, Homo sapien
gatgcgggtgatcaggcagacgtac

SEQ ID NO: 668382 - DNA, 25 bp, Homo sapien
tttcacgggctgtttgacactgagg

SEQ ID NO: 668383 - DNA, 25 bp, Homo sapien
tgaggtaaatcaagcaggcatcagc

SEQ ID NO: 668384 - DNA, 25 bp, Homo sapien
aggcatcagccactttattcaggtc

SEQ ID NO: 668385 - DNA, 25 bp, Homo sapien
gcctcttgtaatttcacgggctgtt

SEQ ID NO: 668386 - DNA, 25 bp, Homo sapien
ccctgtaagacagccagctgcaact

SEQ ID NO: 668387 - DNA, 25 bp, Homo sapien
ccagccctggcactgatgggggcct

SEQ ID NO: 668388 - DNA, 25 bp, Homo sapien
gggggcctgggtgactagggagcca

SEQ ID NO: 668389 - DNA, 25 bp, Homo sapien
tgtgcgagtaaactggtccagccct

SEQ ID NO: 668390 - DNA, 25 bp, Homo sapien
cgaagaaagtcaccacacttgcttc

SEQ ID NO: 668391 - DNA, 25 bp, Homo sapien
ccacacttgcttcccagggtacgta

SEQ ID NO: 668392 - DNA, 25 bp, Homo sapien
gaaagtcaccacacttgcttcccag

SEQ ID NO: 668393 - DNA, 25 bp, Homo sapien
gtcaccacacttgcttcccagggta

SEQ ID NO: 668394 - DNA, 25 bp, Homo sapien
gccctgcagtacatctggataagat

SEQ ID NO: 668395 - DNA, 25 bp, Homo sapien
aaaccccgccctgcagtacatctgg

SEQ ID NO: 668396 - DNA, 25 bp, Homo sapien
tctggataagatttagcaataccac

SEQ ID NO: 668397 - DNA, 25 bp, Homo sapien
gataagatttagcaataccacctcc

SEQ ID NO: 668398 - DNA, 25 bp, Homo sapien
tgagtcggtgaacgagcgagggcca

SEQ ID NO: 668399 - DNA, 25 bp, Homo sapien
ggactgaagaacaaccacacacaga

SEQ ID NO: 668400 - DNA, 25 bp, Homo sapien
cagctggtttttgtgggactgaaga

SEQ ID NO: 668401 - DNA, 25 bp, Homo sapien
ttgaaggctctaagcactgccaggg

SEQ ID NO: 668402 - DNA, 25 bp, Homo sapien
gactgcctgcatcagtgtcacaggc

SEQ ID NO: 668403 - DNA, 25 bp, Homo sapien
aagagactgcctgcatcagtgtcac

SEQ ID NO: 668404 - DNA, 25 bp, Homo sapien
tgaaaagagactgcctgcatcagtg

SEQ ID NO: 668405 - DNA, 25 bp, Homo sapien
acaggcagcggtcagtacgacggcc

SEQ ID NO: 668406 - DNA, 25 bp, Homo sapien
cttccctcccacatggacgcccaac

SEQ ID NO: 668407 - DNA, 25 bp, Homo sapien
cgcaggcttccctcccacatggacg

SEQ ID NO: 668408 - DNA, 25 bp, Homo sapien
aggcttccctcccacatggacgccc

SEQ ID NO: 668409 - DNA, 25 bp, Homo sapien
gcaggcttccctcccacatggacgc

SEQ ID NO: 668410 - DNA, 25 bp, Homo sapien
gataaggggagctacgtgctcatcc

SEQ ID NO: 668411 - DNA, 25 bp, Homo sapien
gggagctacgtgctcatccgtgtag

SEQ ID NO: 668412 - DNA, 25 bp, Homo sapien
atccgtgtagccactgccaaccagg

SEQ ID NO: 668413 - DNA, 25 bp, Homo sapien
gtgctcatccgtgtagccactgcca

SEQ ID NO: 668414 - DNA, 25 bp, Homo sapien
agtcctgctactctgggaatgcaga

SEQ ID NO: 668415 - DNA, 25 bp, Homo sapien
tagtcctgctactctgggaatgcag

SEQ ID NO: 668416 - DNA, 25 bp, Homo sapien
ttagtcctgctactctgggaatgca

SEQ ID NO: 668417 - DNA, 25 bp, Homo sapien
cgtccatggctatttggatctgcaa

SEQ ID NO: 668418 - DNA, 25 bp, Homo sapien
tccacatctggacgggtgtcattct

SEQ ID NO: 668419 - DNA, 25 bp, Homo sapien
tatctgacaacaagtggatgcagcg

SEQ ID NO: 668420 - DNA, 25 bp, Homo sapien
actttgggagggactgactgttcct

SEQ ID NO: 668421 - DNA, 25 bp, Homo sapien
ttcaacggcaataagcagagttgct

SEQ ID NO: 668422 - DNA, 25 bp, Homo sapien
gaatagctatgttagcctggtaagg

SEQ ID NO: 668423 - DNA, 25 bp, Homo sapien
tagagttattattaagccagaagca

SEQ ID NO: 668424 - DNA, 25 bp, Homo sapien
cacaaaaagggtacacagctgcaac

SEQ ID NO: 668425 - DNA, 25 bp, Homo sapien
tctctttgaggtagttcagcaaaaa

SEQ ID NO: 668426 - DNA, 25 bp, Homo sapien
ccttctctttgaggtagttcagcaa

SEQ ID NO: 668427 - DNA, 25 bp, Homo sapien
tctttgaggtagttcagcaaaaact

SEQ ID NO: 668428 - DNA, 25 bp, Homo sapien
tttgaggtagttcagcaaaaactgt

SEQ ID NO: 668429 - DNA, 25 bp, Homo sapien
tggaggtgcccaagattacctgtgt

SEQ ID NO: 668430 - DNA, 25 bp, Homo sapien
tggtgctcttctcaagagctgctgg

SEQ ID NO: 668431 - DNA, 25 bp, Homo sapien
tgcccaagattacctgtgtctggga

SEQ ID NO: 668432 - DNA, 25 bp, Homo sapien
cctcttctcctaaactttgctcttg

SEQ ID NO: 668433 - DNA, 25 bp, Homo sapien
ccttctcagaggctattagcagtac

SEQ ID NO: 668434 - DNA, 25 bp, Homo sapien
catgagaatgtttcttacaaggtct

SEQ ID NO: 668435 - DNA, 25 bp, Homo sapien
tctcattgaaagattgactatccag

SEQ ID NO: 668436 - DNA, 25 bp, Homo sapien
aatactggaaatatgctctttaaat

SEQ ID NO: 668437 - DNA, 25 bp, Homo sapien
cataacctatgggactggagagaaa

SEQ ID NO: 668438 - DNA, 25 bp, Homo sapien
gaccctggctaagtaggatgtcact

SEQ ID NO: 668439 - DNA, 25 bp, Homo sapien
gggtttataccctggcatagagcag

SEQ ID NO: 668440 - DNA, 25 bp, Homo sapien
tgcaaaaaacgaggctaagcaaact

SEQ ID NO: 668441 - DNA, 25 bp, Homo sapien
tcgtaaaattggtccagggtggcca

SEQ ID NO: 668442 - DNA, 25 bp, Homo sapien
tagcatctgagttccgcagcatgac

SEQ ID NO: 668443 - DNA, 25 bp, Homo sapien
caagcacggcaaacgtccatcatgg

SEQ ID NO: 668444 - DNA, 25 bp, Homo sapien
tgccatcagagcatgcagaacgctg

SEQ ID NO: 668445 - DNA, 25 bp, Homo sapien
aagatgtaacttggcaggtgtgttc

SEQ ID NO: 668446 - DNA, 25 bp, Homo sapien
gatgtaacttggcaggtgtgttcac

SEQ ID NO: 668447 - DNA, 25 bp, Homo sapien
gaaaagatgtaacttggcaggtgtg

SEQ ID NO: 668448 - DNA, 25 bp, Homo sapien
ctagaaaagatgtaacttggcaggt

SEQ ID NO: 668449 - DNA, 25 bp, Homo sapien
tcctcagtttcaagacaggtaacca

SEQ ID NO: 668450 - DNA, 25 bp, Homo sapien
ccaattttcttgacttgtgtattct

SEQ ID NO: 668451 - DNA, 25 bp, Homo sapien
ttcgtgaagatcctcaacctccagc

SEQ ID NO: 668452 - DNA, 25 bp, Homo sapien
gtatagatgtcacaatctctctcag

SEQ ID NO: 668453 - DNA, 25 bp, Homo sapien
tccggtaaaccacagattgatggta

SEQ ID NO: 668454 - DNA, 25 bp, Homo sapien
ggtaaagttccataaagtgatccac

SEQ ID NO: 668455 - DNA, 25 bp, Homo sapien
ccataaagtgatccacaagcaaata

SEQ ID NO: 668456 - DNA, 25 bp, Homo sapien
cccataataaccaagtagctgacaa

SEQ ID NO: 668457 - DNA, 25 bp, Homo sapien
cagatcatcagagttccaacgccgt

SEQ ID NO: 668458 - DNA, 25 bp, Homo sapien
acaatcttgatgtcagccacgtcta

SEQ ID NO: 668459 - DNA, 25 bp, Homo sapien
caacgccgttcctcaacaatcttga

SEQ ID NO: 668460 - DNA, 25 bp, Homo sapien
ctctcatcagtgaagaagcggaaat

SEQ ID NO: 668461 - DNA, 25 bp, Homo sapien
gacacagccgcaggtttttgggagc

SEQ ID NO: 668462 - DNA, 25 bp, Homo sapien
gcaaatcctaaacgtggcagaatgg

SEQ ID NO: 668463 - DNA, 25 bp, Homo sapien
taataaggatagtcaacttgtcgcc

SEQ ID NO: 668464 - DNA, 25 bp, Homo sapien
tagtcccactaaggccttcagaagg

SEQ ID NO: 668465 - DNA, 25 bp, Homo sapien
tgtagtcgtgtctgcagatgctcca

SEQ ID NO: 668466 - DNA, 25 bp, Homo sapien
agcttgtagtcgtgtctgcagatgc

SEQ ID NO: 668467 - DNA, 25 bp, Homo sapien
tggacgtaagacaccaaaggcctcc

SEQ ID NO: 668468 - DNA, 25 bp, Homo sapien
agctgaacacagactggacgtaaga

SEQ ID NO: 668469 - DNA, 25 bp, Homo sapien
agcagccttcccctcattgaggaaa

SEQ ID NO: 668470 - DNA, 25 bp, Homo sapien
gcagccttcccctcattgaggaaac

SEQ ID NO: 668471 - DNA, 25 bp, Homo sapien
cagccttcccctcattgaggaaaca

SEQ ID NO: 668472 - DNA, 25 bp, Homo sapien
ctgctagggaggctcagttggaagg

SEQ ID NO: 668473 - DNA, 25 bp, Homo sapien
tgtgcactaatagtcccagctgcta

SEQ ID NO: 668474 - DNA, 25 bp, Homo sapien
gaggctcagttggaaggatcgattg

SEQ ID NO: 668475 - DNA, 25 bp, Homo sapien
ctcagttggaaggatcgattgagcc

SEQ ID NO: 668476 - DNA, 25 bp, Homo sapien
tcttccagcctttctctcactctcc

SEQ ID NO: 668477 - DNA, 25 bp, Homo sapien
tctcccgcctcctctgcctcgccgg

SEQ ID NO: 668478 - DNA, 25 bp, Homo sapien
cgtcttccagcctttctctcactct

SEQ ID NO: 668479 - DNA, 25 bp, Homo sapien
ctcgtcttccagcctttctctcact

SEQ ID NO: 668480 - DNA, 25 bp, Homo sapien
taaaaagtcccgcagcctgtcaggt

SEQ ID NO: 668481 - DNA, 25 bp, Homo sapien
cagtctgtcagtcggtaaaaagtcc

SEQ ID NO: 668482 - DNA, 25 bp, Homo sapien
ggcggctgttactgcggagacccat

SEQ ID NO: 668483 - DNA, 25 bp, Homo sapien
tccttctctgagtcggcgctggaga

SEQ ID NO: 668484 - DNA, 25 bp, Homo sapien
cttttctgtatttagcgaatgatgt

SEQ ID NO: 668485 - DNA, 25 bp, Homo sapien
tttctgtatttagcgaatgatgtca

SEQ ID NO: 668486 - DNA, 25 bp, Homo sapien
ctgtatttagcgaatgatgtcatcc

SEQ ID NO: 668487 - DNA, 25 bp, Homo sapien
aaatagaaagcttacttttctgtat

SEQ ID NO: 668488 - DNA, 25 bp, Homo sapien
aaaacctgtaactgattgcgatcaa

SEQ ID NO: 668489 - DNA, 25 bp, Homo sapien
caaaaaaacctgtaactgattgcga

SEQ ID NO: 668490 - DNA, 25 bp, Homo sapien
aaaaaacctgtaactgattgcgatc

SEQ ID NO: 668491 - DNA, 25 bp, Homo sapien
acaaaaaaacctgtaactgattgcg

SEQ ID NO: 668492 - DNA, 25 bp, Homo sapien
tcactggcctctgttaccgcaagac

SEQ ID NO: 668493 - DNA, 25 bp, Homo sapien
tgcctgaaacgttcctcccagatag

SEQ ID NO: 668494 - DNA, 25 bp, Homo sapien
tcctcctagcgcctttgtacttgct

SEQ ID NO: 668495 - DNA, 25 bp, Homo sapien
cagatagttacatagctggttctca

SEQ ID NO: 668496 - DNA, 25 bp, Homo sapien
gagcctttgttcatcacttcttccc

SEQ ID NO: 668497 - DNA, 25 bp, Homo sapien
tcttaattatgagcctttgttcatc

SEQ ID NO: 668498 - DNA, 25 bp, Homo sapien
tgagttacaacccattaattggata

SEQ ID NO: 668499 - DNA, 25 bp, Homo sapien
gaaatcagtctggtagctaatgacc

SEQ ID NO: 668500 - DNA, 25 bp, Homo sapien
taccctgggttgaggacattagtct

SEQ ID NO: 668501 - DNA, 25 bp, Homo sapien
ttgggaactttgctgccccgggctg

SEQ ID NO: 668502 - DNA, 25 bp, Homo sapien
ctcccgtgggataacagagccagca

SEQ ID NO: 668503 - DNA, 25 bp, Homo sapien
gactttatccatgctgcggccaaga

SEQ ID NO: 668504 - DNA, 25 bp, Homo sapien
tctggccgcttcacaatataagatt

SEQ ID NO: 668505 - DNA, 25 bp, Homo sapien
gctaaaaatttaggcagtctgctct

SEQ ID NO: 668506 - DNA, 25 bp, Homo sapien
gtgatctggccgcttcacaatataa

SEQ ID NO: 668507 - DNA, 25 bp, Homo sapien
tttctttatccacgcttgctaaaaa

SEQ ID NO: 668508 - DNA, 25 bp, Homo sapien
catatacatttcacggtctctgcca

SEQ ID NO: 668509 - DNA, 25 bp, Homo sapien
gagctgcctgtttgacctagtgggt

SEQ ID NO: 668510 - DNA, 25 bp, Homo sapien
tgattgcttgaatacctgtggttgg

SEQ ID NO: 668511 - DNA, 25 bp, Homo sapien
tactactgttaaggtgggccttcta

SEQ ID NO: 668512 - DNA, 25 bp, Homo sapien
ggcagtgccatccatcaaaatcaga

SEQ ID NO: 668513 - DNA, 25 bp, Homo sapien
agtatggctgcgacagactgtctcc

SEQ ID NO: 668514 - DNA, 25 bp, Homo sapien
ggatccttgcagtagcctcatgact

SEQ ID NO: 668515 - DNA, 25 bp, Homo sapien
tagttcttcgaatatgggcccagtg

SEQ ID NO: 668516 - DNA, 25 bp, Homo sapien
tgttcaagttcggtgtgggcttcca

SEQ ID NO: 668517 - DNA, 25 bp, Homo sapien
gtagcgttgccataaagagtttgcc

SEQ ID NO: 668518 - DNA, 25 bp, Homo sapien
cataaaggcacagttcagagacaga

SEQ ID NO: 668519 - DNA, 25 bp, Homo sapien
taaggcacttgtcctggagacgttg

SEQ ID NO: 668520 - DNA, 25 bp, Homo sapien
cttggaccctttcttctgggagtag

SEQ ID NO: 668521 - DNA, 25 bp, Homo sapien
tcttggaccctttcttctgggagta

SEQ ID NO: 668522 - DNA, 25 bp, Homo sapien
tagtaaaggttcagcctgccaattg

SEQ ID NO: 668523 - DNA, 25 bp, Homo sapien
cagaaagcgatttgccccagtagtg

SEQ ID NO: 668524 - DNA, 25 bp, Homo sapien
aatttgtgttgctacttccaggatc

SEQ ID NO: 668525 - DNA, 25 bp, Homo sapien
taggagttatagaccagaggctgaa

SEQ ID NO: 668526 - DNA, 25 bp, Homo sapien
gcctgtcgttctgtcactgttaaat

SEQ ID NO: 668527 - DNA, 25 bp, Homo sapien
tgttgtttgcttatggacactgcct

SEQ ID NO: 668528 - DNA, 25 bp, Homo sapien
tccagaggccataggtgacatcact

SEQ ID NO: 668529 - DNA, 25 bp, Homo sapien
caagataaattgtaatctttgctgc

SEQ ID NO: 668530 - DNA, 25 bp, Homo sapien
gagtctctgaccagcaattggtgca

SEQ ID NO: 668531 - DNA, 25 bp, Homo sapien
ccaaggaagtgcgatctgagcagcc

SEQ ID NO: 668532 - DNA, 25 bp, Homo sapien
gcagccacaatccagccaaaagagg

SEQ ID NO: 668533 - DNA, 25 bp, Homo sapien
gaatgtgttggcctcttaatacctg

SEQ ID NO: 668534 - DNA, 25 bp, Homo sapien
tgattttggcagtacacggaaagcc

SEQ ID NO: 668535 - DNA, 25 bp, Homo sapien
ggcagtccacacagtacccatgaga

SEQ ID NO: 668536 - DNA, 25 bp, Homo sapien
gagaggtgccgccatagttttaccc

SEQ ID NO: 668537 - DNA, 25 bp, Homo sapien
tgttagcggcacataaatactcagc

SEQ ID NO: 668538 - DNA, 25 bp, Homo sapien
cactcccaagagtttgccgtattga

SEQ ID NO: 668539 - DNA, 25 bp, Homo sapien
gccaaacttattgcaggcacccaaa

SEQ ID NO: 668540 - DNA, 25 bp, Homo sapien
caagagtttgccgtattgatgccaa

SEQ ID NO: 668541 - DNA, 25 bp, Homo sapien
ttgcaggcacccaaacagcatagtg

SEQ ID NO: 668542 - DNA, 25 bp, Homo sapien
aatcatgctgcaagtttccgaagtg

SEQ ID NO: 668543 - DNA, 25 bp, Homo sapien
aacagtgccaggactcttcaatggg

SEQ ID NO: 668544 - DNA, 25 bp, Homo sapien
tcatgaccttggtttcggcaaagcc

SEQ ID NO: 668545 - DNA, 25 bp, Homo sapien
aagatgccaatacagccaggcgcag

SEQ ID NO: 668546 - DNA, 25 bp, Homo sapien
cacatccacggaatcgcagtctaga

SEQ ID NO: 668547 - DNA, 25 bp, Homo sapien
tatttaagagatacgtggtccctgc

SEQ ID NO: 668548 - DNA, 25 bp, Homo sapien
gacagataggccaacgtggaagtaa

SEQ ID NO: 668549 - DNA, 25 bp, Homo sapien
tagttcaaattgagacctgctgtca

SEQ ID NO: 668550 - DNA, 25 bp, Homo sapien
gaggcccagtcatgtagaaagagca

SEQ ID NO: 668551 - DNA, 25 bp, Homo sapien
tcaaagctgacaactcatgggttcc

SEQ ID NO: 668552 - DNA, 25 bp, Homo sapien
tccgacagtctcaggtcaggctggg

SEQ ID NO: 668553 - DNA, 25 bp, Homo sapien
gaagcacatctactgcctggttgga

SEQ ID NO: 668554 - DNA, 25 bp, Homo sapien
aacagtttcccatggtgattaaatg

SEQ ID NO: 668555 - DNA, 25 bp, Homo sapien
cttcacattacccagccttgctaat

SEQ ID NO: 668556 - DNA, 25 bp, Homo sapien
cttgctaataaccacgaggccactg

SEQ ID NO: 668557 - DNA, 25 bp, Homo sapien
ttatcctggaagcagcgcccacaac

SEQ ID NO: 668558 - DNA, 25 bp, Homo sapien
ttgggctgctgggatgtggagggga

SEQ ID NO: 668559 - DNA, 25 bp, Homo sapien
tgggctgctgggatgtggaggggac

SEQ ID NO: 668560 - DNA, 25 bp, Homo sapien
cttgggctgctgggatgtggagggg

SEQ ID NO: 668561 - DNA, 25 bp, Homo sapien
tctggcacagagcattcctcacagc

SEQ ID NO: 668562 - DNA, 25 bp, Homo sapien
gggcatattttgctcactagcttgg

SEQ ID NO: 668563 - DNA, 25 bp, Homo sapien
caaacaatatggtgggtggtcaatg

SEQ ID NO: 668564 - DNA, 25 bp, Homo sapien
gctccaaggagctatgaagtagatc

SEQ ID NO: 668565 - DNA, 25 bp, Homo sapien
gggccaatgatgacattccggaagc

SEQ ID NO: 668566 - DNA, 25 bp, Homo sapien
gatgacattccggaagcccttcaca

SEQ ID NO: 668567 - DNA, 25 bp, Homo sapien
tgtcgctctcgaagttcaccaccag

SEQ ID NO: 668568 - DNA, 25 bp, Homo sapien
ttgtggaggcccatgtggagcggca

SEQ ID NO: 668569 - DNA, 25 bp, Homo sapien
cccctccacagtgaaggtgcagcct

SEQ ID NO: 668570 - DNA, 25 bp, Homo sapien
tcagtcaggccggccccctccacag

SEQ ID NO: 668571 - DNA, 25 bp, Homo sapien
ctgctcctcagtcaggccggccccc

SEQ ID NO: 668572 - DNA, 25 bp, Homo sapien
ccctccacagtgaaggtgcagcctt

SEQ ID NO: 668573 - DNA, 25 bp, Homo sapien
ttggactccgtaaggcagtcacggt

SEQ ID NO: 668574 - DNA, 25 bp, Homo sapien
caggtagctgttgataactggctcc

SEQ ID NO: 668575 - DNA, 25 bp, Homo sapien
cagtcacggtatttctcatagagga

SEQ ID NO: 668576 - DNA, 25 bp, Homo sapien
ggcccgcaccttgatgaggttggac

SEQ ID NO: 668577 - DNA, 25 bp, Homo sapien
tctccagcaggtgaaataacgttgt

SEQ ID NO: 668578 - DNA, 25 bp, Homo sapien
ggtagaggacgcacttggactccca

SEQ ID NO: 668579 - DNA, 25 bp, Homo sapien
gaccaagggtcgttgcagagcaaaa

SEQ ID NO: 668580 - DNA, 25 bp, Homo sapien
cactgaagtgtggttcttagcccca

SEQ ID NO: 668581 - DNA, 25 bp, Homo sapien
ctttgaaagtctccgtccacaagcc

SEQ ID NO: 668582 - DNA, 25 bp, Homo sapien
aagccagtggccacggccttggtct

SEQ ID NO: 668583 - DNA, 25 bp, Homo sapien
aaagtctccgtccacaagccagtgg

SEQ ID NO: 668584 - DNA, 25 bp, Homo sapien
cggccttggtcttgggccagatgct

SEQ ID NO: 668585 - DNA, 25 bp, Homo sapien
gcctcttagcactcgcactcaggga

SEQ ID NO: 668586 - DNA, 25 bp, Homo sapien
agatacctcctgagcacgcatcctc

SEQ ID NO: 668587 - DNA, 25 bp, Homo sapien
tcaggaaaggtcccgggcttctcgc

SEQ ID NO: 668588 - DNA, 25 bp, Homo sapien
gagggccccaccgtgtgctggtgct

SEQ ID NO: 668589 - DNA, 25 bp, Homo sapien
actgtcaacactgcagacgccccgc

SEQ ID NO: 668590 - DNA, 25 bp, Homo sapien
cctggtaccaagaggatctgccctc

SEQ ID NO: 668591 - DNA, 25 bp, Homo sapien
gagtgcccacggtgggcccaagata

SEQ ID NO: 668592 - DNA, 25 bp, Homo sapien
gtgcagctccaggagtgcccacggt

SEQ ID NO: 668593 - DNA, 25 bp, Homo sapien
ggagggtgaaagctgtgccccagac

SEQ ID NO: 668594 - DNA, 25 bp, Homo sapien
cagacgccagcccatgggcaccaag

SEQ ID NO: 668595 - DNA, 25 bp, Homo sapien
ggtgaaagctgtgccccagacgcca

SEQ ID NO: 668596 - DNA, 25 bp, Homo sapien
agggtgaaagctgtgccccagacgc

SEQ ID NO: 668597 - DNA, 25 bp, Homo sapien
ccacccgagggctctccagcatctc

SEQ ID NO: 668598 - DNA, 25 bp, Homo sapien
tcatagaggagagggacgaccactg

SEQ ID NO: 668599 - DNA, 25 bp, Homo sapien
ctgtcatagaggagagggacgacca

SEQ ID NO: 668600 - DNA, 25 bp, Homo sapien
ggagagggacgaccactggtttgac

SEQ ID NO: 668601 - DNA, 25 bp, Homo sapien
tggtcctgcactgttggatcatgac

SEQ ID NO: 668602 - DNA, 25 bp, Homo sapien
ccccgatggtcctgcactgttggat

SEQ ID NO: 668603 - DNA, 25 bp, Homo sapien
ctgttggatcatgacccccaggagc

SEQ ID NO: 668604 - DNA, 25 bp, Homo sapien
tcctgcactgttggatcatgacccc

SEQ ID NO: 668605 - DNA, 25 bp, Homo sapien
tgcaacaggcactttccaaggcgct

SEQ ID NO: 668606 - DNA, 25 bp, Homo sapien
gagacttttctttgaggccgagagc

SEQ ID NO: 668607 - DNA, 25 bp, Homo sapien
tttcaagcgcttagcagccacgtgc

SEQ ID NO: 668608 - DNA, 25 bp, Homo sapien
tacctagcatgttgtcagttggcgg

SEQ ID NO: 668609 - DNA, 25 bp, Homo sapien
atgctccaggaacacagggctttac

SEQ ID NO: 668610 - DNA, 25 bp, Homo sapien
acaaatgctccaggaacacagggct

SEQ ID NO: 668611 - DNA, 25 bp, Homo sapien
tcaacaaatgctccaggaacacagg

SEQ ID NO: 668612 - DNA, 25 bp, Homo sapien
aatgctccaggaacacagggcttta

SEQ ID NO: 668613 - DNA, 25 bp, Homo sapien
gatcccattgtagctgacggtgcgg

SEQ ID NO: 668614 - DNA, 25 bp, Homo sapien
gcaaagacgtcaaagtcactgccca

SEQ ID NO: 668615 - DNA, 25 bp, Homo sapien
gccagtttgttcaggtggttcgccc

SEQ ID NO: 668616 - DNA, 25 bp, Homo sapien
ggcagacgtactcctcagcggtgtt

SEQ ID NO: 668617 - DNA, 25 bp, Homo sapien
ctgtaggggttgagaagagagcctc

SEQ ID NO: 668618 - DNA, 25 bp, Homo sapien
ggggttgagaagagagcctcaatca

SEQ ID NO: 668619 - DNA, 25 bp, Homo sapien
gttgagaagagagcctcaatcacag

SEQ ID NO: 668620 - DNA, 25 bp, Homo sapien
taggggttgagaagagagcctcaat

SEQ ID NO: 668621 - DNA, 25 bp, Homo sapien
ggccattgctgtacgtaggctacca

SEQ ID NO: 668622 - DNA, 25 bp, Homo sapien
caacagtgcttggtgcatactaggc

SEQ ID NO: 668623 - DNA, 25 bp, Homo sapien
tcttgagctgctcgagggctaaggc

SEQ ID NO: 668624 - DNA, 25 bp, Homo sapien
tcagctagagtatggccaggcaacc

SEQ ID NO: 668625 - DNA, 25 bp, Homo sapien
ttgatggcacgaactggaactgggc

SEQ ID NO: 668626 - DNA, 25 bp, Homo sapien
caaagggcgcatcgtacttggtgct

SEQ ID NO: 668627 - DNA, 25 bp, Homo sapien
tgacctccgcaaagacaaagggcgc

SEQ ID NO: 668628 - DNA, 25 bp, Homo sapien
ttcagcccaacgatcagggaacggt

SEQ ID NO: 668629 - DNA, 25 bp, Homo sapien
gaaaaaatgttccatgccgctggag

SEQ ID NO: 668630 - DNA, 25 bp, Homo sapien
taagtgtggttgataaccgccccac

SEQ ID NO: 668631 - DNA, 25 bp, Homo sapien
tctccaagtgaatacgggtgcctga

SEQ ID NO: 668632 - DNA, 25 bp, Homo sapien
gaaatgtatcccagacatcctgagg

SEQ ID NO: 668633 - DNA, 25 bp, Homo sapien
tccagggcctgccagccctcgtacc

SEQ ID NO: 668634 - DNA, 25 bp, Homo sapien
ctcgtaccccggctgcaggtccggc

SEQ ID NO: 668635 - DNA, 25 bp, Homo sapien
aggtccggcctggtcatccacgact

SEQ ID NO: 668636 - DNA, 25 bp, Homo sapien
cacgactccacccagcagtggaagt

SEQ ID NO: 668637 - DNA, 25 bp, Homo sapien
ccgagttgtagttggtcacgacgcg

SEQ ID NO: 668638 - DNA, 25 bp, Homo sapien
aaggttgctgttctggtcatgggcc

SEQ ID NO: 668639 - DNA, 25 bp, Homo sapien
cggaagtactcgatgagaaggttgc

SEQ ID NO: 668640 - DNA, 25 bp, Homo sapien
gatctccccaaactcattgcggaag

SEQ ID NO: 668641 - DNA, 25 bp, Homo sapien
gctggtgtcctaaccacaggtctta

SEQ ID NO: 668642 - DNA, 25 bp, Homo sapien
taagagcttactggttggccctgga

SEQ ID NO: 668643 - DNA, 25 bp, Homo sapien
tttccagggagccaagtgccactct

SEQ ID NO: 668644 - DNA, 25 bp, Homo sapien
ccaccatcgataggccagggtaaga

SEQ ID NO: 668645 - DNA, 25 bp, Homo sapien
taaccggagccagagactgtgctaa

SEQ ID NO: 668646 - DNA, 25 bp, Homo sapien
tccggctaagaaagctggaatgcca

SEQ ID NO: 668647 - DNA, 25 bp, Homo sapien
gaagtacagtgagggatccggctaa

SEQ ID NO: 668648 - DNA, 25 bp, Homo sapien
tgtgctaagtgatctctccctggta

SEQ ID NO: 668649 - DNA, 25 bp, Homo sapien
gacactgggctaggttctgtgctga

SEQ ID NO: 668650 - DNA, 25 bp, Homo sapien
tcagcctggcaacaatcatcgacat

SEQ ID NO: 668651 - DNA, 25 bp, Homo sapien
tgagtctacgttcttagccagcatg

SEQ ID NO: 668652 - DNA, 25 bp, Homo sapien
taatatttgccgagagtgacactgg

SEQ ID NO: 668653 - DNA, 25 bp, Homo sapien
agagggtggtcacaggctctaggcc

SEQ ID NO: 668654 - DNA, 25 bp, Homo sapien
ccactggagggatggctattggata

SEQ ID NO: 668655 - DNA, 25 bp, Homo sapien
tcatgacccacatcccagcgtgcag

SEQ ID NO: 668656 - DNA, 25 bp, Homo sapien
cacatagcgcattgagagtgttggt

SEQ ID NO: 668657 - DNA, 25 bp, Homo sapien
gtccacgctgccgatccaggacatg

SEQ ID NO: 668658 - DNA, 25 bp, Homo sapien
cagcactggccatacttgacgcgct

SEQ ID NO: 668659 - DNA, 25 bp, Homo sapien
cgtccccgtagttgttgtcccagcg

SEQ ID NO: 668660 - DNA, 25 bp, Homo sapien
tggcagccgtggttcttccagcgcc

SEQ ID NO: 668661 - DNA, 25 bp, Homo sapien
caaaggggccatcgtgtgacagact

SEQ ID NO: 668662 - DNA, 25 bp, Homo sapien
catcgtgtgacagactggtgtgcgg

SEQ ID NO: 668663 - DNA, 25 bp, Homo sapien
gcagggtcaaggacttgaacgcgat

SEQ ID NO: 668664 - DNA, 25 bp, Homo sapien
gaacgcgatactggggatgtgactc

SEQ ID NO: 668665 - DNA, 25 bp, Homo sapien
gaaggatcaggcagatgtctaggat

SEQ ID NO: 668666 - DNA, 25 bp, Homo sapien
gtcacggccggcgttcttcaggaac

SEQ ID NO: 668667 - DNA, 25 bp, Homo sapien
caggcagatgtctaggatcccatct

SEQ ID NO: 668668 - DNA, 25 bp, Homo sapien
ggagcagtcacggccggcgttcttc

SEQ ID NO: 668669 - DNA, 25 bp, Homo sapien
cagcttcacagttcccaaaggctct

SEQ ID NO: 668670 - DNA, 25 bp, Homo sapien
tcctagttctttctccaccttgaat

SEQ ID NO: 668671 - DNA, 25 bp, Homo sapien
aaggctgccgcctttgctgtgtgac

SEQ ID NO: 668672 - DNA, 25 bp, Homo sapien
gcagccttggccctctctgaacctt

SEQ ID NO: 668673 - DNA, 25 bp, Homo sapien
ttggccgagccctggtagataaagc

SEQ ID NO: 668674 - DNA, 25 bp, Homo sapien
cttggccgagccctggtagataaag

SEQ ID NO: 668675 - DNA, 25 bp, Homo sapien
gaacttggccgagccctggtagata

SEQ ID NO: 668676 - DNA, 25 bp, Homo sapien
ctcttccgagtccaggtacacagca

SEQ ID NO: 668677 - DNA, 25 bp, Homo sapien
caatgtggacagagcctcacggtgt

SEQ ID NO: 668678 - DNA, 25 bp, Homo sapien
tttctccaggcacatacagactgac

SEQ ID NO: 668679 - DNA, 25 bp, Homo sapien
cagactgacctaaggaggtgagccc

SEQ ID NO: 668680 - DNA, 25 bp, Homo sapien
taggttaatgtatacagtgggatcc

SEQ ID NO: 668681 - DNA, 25 bp, Homo sapien
aaagctggatccctggtagccagtg

SEQ ID NO: 668682 - DNA, 25 bp, Homo sapien
gtccaccacggtggctgtccagtca

SEQ ID NO: 668683 - DNA, 25 bp, Homo sapien
ggcaccaggcgttgaagagcaaaat

SEQ ID NO: 668684 - DNA, 25 bp, Homo sapien
ccaggctgaggcgatacaggccgat

SEQ ID NO: 668685 - DNA, 25 bp, Homo sapien
gcatctcttagtggaaaacgggcct

SEQ ID NO: 668686 - DNA, 25 bp, Homo sapien
catctcttagtggaaaacgggcctt

SEQ ID NO: 668687 - DNA, 25 bp, Homo sapien
atctcttagtggaaaacgggccttg

SEQ ID NO: 668688 - DNA, 25 bp, Homo sapien
cctaggagtttgtggcaaaggtcgc

SEQ ID NO: 668689 - DNA, 25 bp, Homo sapien
tgaggctcagagcaaagcggtctcc

SEQ ID NO: 668690 - DNA, 25 bp, Homo sapien
caaaggtcgcatctgaagtgggtct

SEQ ID NO: 668691 - DNA, 25 bp, Homo sapien
gcggtctcccaaggatatcctagga

SEQ ID NO: 668692 - DNA, 25 bp, Homo sapien
ctgtactcagagatctgggctcttc

SEQ ID NO: 668693 - DNA, 25 bp, Homo sapien
gaagctgtgtgcactctgtactcag

SEQ ID NO: 668694 - DNA, 25 bp, Homo sapien
tcctggtattgtccctcaggcttct

SEQ ID NO: 668695 - DNA, 25 bp, Homo sapien
ctggtttcctggtattgtccctcag

SEQ ID NO: 668696 - DNA, 25 bp, Homo sapien
tgcctggcttgtggataggaatttt

SEQ ID NO: 668697 - DNA, 25 bp, Homo sapien
ccatgcctggcttgtggataggaat

SEQ ID NO: 668698 - DNA, 25 bp, Homo sapien
catgcctggcttgtggataggaatt

SEQ ID NO: 668699 - DNA, 25 bp, Homo sapien
cctggcttgtggataggaatttttt

SEQ ID NO: 668700 - DNA, 25 bp, Homo sapien
ttctcccggcacaggtcggccgtgt

SEQ ID NO: 668701 - DNA, 25 bp, Homo sapien
agtgcagggtcagccagaagggctg

SEQ ID NO: 668702 - DNA, 25 bp, Homo sapien
ggcctcgtagttgcggccctcaaag

SEQ ID NO: 668703 - DNA, 25 bp, Homo sapien
ggtggtctcggccattggtctccag

SEQ ID NO: 668704 - DNA, 25 bp, Homo sapien
cacagccattgtttcgactgacctg

SEQ ID NO: 668705 - DNA, 25 bp, Homo sapien
aaagcacagccattgtttcgactga

SEQ ID NO: 668706 - DNA, 25 bp, Homo sapien
cattgtttcgactgacctgtctccc

SEQ ID NO: 668707 - DNA, 25 bp, Homo sapien
ctccctagacatgggggccttgtgc

SEQ ID NO: 668708 - DNA, 25 bp, Homo sapien
tggccaaggtctagggttgcagaac

SEQ ID NO: 668709 - DNA, 25 bp, Homo sapien
tggcggctgcggtgactctgatact

SEQ ID NO: 668710 - DNA, 25 bp, Homo sapien
taggatgccgaaagctcctctctgg

SEQ ID NO: 668711 - DNA, 25 bp, Homo sapien
ttagggattcagctcccaccgggtc

SEQ ID NO: 668712 - DNA, 25 bp, Homo sapien
gagaccctccaagtgcgaccactgg

SEQ ID NO: 668713 - DNA, 25 bp, Homo sapien
ggcggcgagaccctccaagtgcgac

SEQ ID NO: 668714 - DNA, 25 bp, Homo sapien
ctccaagtgcgaccactggcggctg

SEQ ID NO: 668715 - DNA, 25 bp, Homo sapien
cactggcggcgagaccctccaagtg

SEQ ID NO: 668716 - DNA, 25 bp, Homo sapien
tgccgaggcggagagcggcgctaac

SEQ ID NO: 668717 - DNA, 25 bp, Homo sapien
ctgccgaggcggagagcggcgctaa

SEQ ID NO: 668718 - DNA, 25 bp, Homo sapien
catagatacagcctgacacagccag

SEQ ID NO: 668719 - DNA, 25 bp, Homo sapien
cagccaggtagccttgaccgcgagc

SEQ ID NO: 668720 - DNA, 25 bp, Homo sapien
aggtagccttgaccgcgagccacac

SEQ ID NO: 668721 - DNA, 25 bp, Homo sapien
gccaggtagccttgaccgcgagcca

SEQ ID NO: 668722 - DNA, 25 bp, Homo sapien
tcatcctggtatctctggtctcttg

SEQ ID NO: 668723 - DNA, 25 bp, Homo sapien
cagggactcagcctaggacttctcg

SEQ ID NO: 668724 - DNA, 25 bp, Homo sapien
gggtcctatctctcatcctggtatc

SEQ ID NO: 668725 - DNA, 25 bp, Homo sapien
gacttctcgaacctggcaaccaggg

SEQ ID NO: 668726 - DNA, 25 bp, Homo sapien
agaaatcatcaattctatcagcagc

SEQ ID NO: 668727 - DNA, 25 bp, Homo sapien
gagaaatcatcaattctatcagcag

SEQ ID NO: 668728 - DNA, 25 bp, Homo sapien
gcccccaaaagtgtttgatttgaga

SEQ ID NO: 668729 - DNA, 25 bp, Homo sapien
cccctgagtcccagagagggtgatc

SEQ ID NO: 668730 - DNA, 25 bp, Homo sapien
tcaaaactcccctgagtcccagaga

SEQ ID NO: 668731 - DNA, 25 bp, Homo sapien
cctgagtcccagagagggtgatcat

SEQ ID NO: 668732 - DNA, 25 bp, Homo sapien
tttcaaaactcccctgagtcccaga

SEQ ID NO: 668733 - DNA, 25 bp, Homo sapien
ccttcttttcggatgaagaattcca

SEQ ID NO: 668734 - DNA, 25 bp, Homo sapien
ggccttcttttcggatgaagaattc

SEQ ID NO: 668735 - DNA, 25 bp, Homo sapien
cttcttttcggatgaagaattccag

SEQ ID NO: 668736 - DNA, 25 bp, Homo sapien
cagggccttcttttcggatgaagaa

SEQ ID NO: 668737 - DNA, 25 bp, Homo sapien
cctagaagagcaatttgcacttcct

SEQ ID NO: 668738 - DNA, 25 bp, Homo sapien
gtgcccagggctggttgacccctag

SEQ ID NO: 668739 - DNA, 25 bp, Homo sapien
cagggctggttgacccctagaagag

SEQ ID NO: 668740 - DNA, 25 bp, Homo sapien
gagcaatttgcacttcctgcctttc

SEQ ID NO: 668741 - DNA, 25 bp, Homo sapien
gatgctcctgtgatgccagggtcca

SEQ ID NO: 668742 - DNA, 25 bp, Homo sapien
acagatgctcctgtgatgccagggt

SEQ ID NO: 668743 - DNA, 25 bp, Homo sapien
gctcctgtgatgccagggtccacac

SEQ ID NO: 668744 - DNA, 25 bp, Homo sapien
tgctcctgtgatgccagggtccaca

SEQ ID NO: 668745 - DNA, 25 bp, Homo sapien
gcatcagccacaggttagggccaaa

SEQ ID NO: 668746 - DNA, 25 bp, Homo sapien
caggactggccaagacaagtaggga

SEQ ID NO: 668747 - DNA, 25 bp, Homo sapien
catcttggtcctaccatgtaagggc

SEQ ID NO: 668748 - DNA, 25 bp, Homo sapien
taactccaagtactagacgcaccaa

SEQ ID NO: 668749 - DNA, 25 bp, Homo sapien
gcatgaaggacacaccgagggttgt

SEQ ID NO: 668750 - DNA, 25 bp, Homo sapien
agtccaggctaagggactgagtgct

SEQ ID NO: 668751 - DNA, 25 bp, Homo sapien
ttgcggggaatgaagtccaggctaa

SEQ ID NO: 668752 - DNA, 25 bp, Homo sapien
gagatgtaggagaggcttgggtagg

SEQ ID NO: 668753 - DNA, 25 bp, Homo sapien
acctttctgttttctacggacatag

SEQ ID NO: 668754 - DNA, 25 bp, Homo sapien
tggagggaagggtctgagcccgagc

SEQ ID NO: 668755 - DNA, 25 bp, Homo sapien
tctacggacatagctggacacagtg

SEQ ID NO: 668756 - DNA, 25 bp, Homo sapien
tgttttctacggacatagctggaca

SEQ ID NO: 668757 - DNA, 25 bp, Homo sapien
ccacttcagagtggtcaggaaaggc

SEQ ID NO: 668758 - DNA, 25 bp, Homo sapien
ggtcaggaaaggctgaacctcttgc

SEQ ID NO: 668759 - DNA, 25 bp, Homo sapien
aggaaaggctgaacctcttgctggt

SEQ ID NO: 668760 - DNA, 25 bp, Homo sapien
caaaagaggattttgaccacttcag

SEQ ID NO: 668761 - DNA, 25 bp, Homo sapien
tcctagtagctatgagatggtatct

SEQ ID NO: 668762 - DNA, 25 bp, Homo sapien
gtttgtaactaggaatggaactgct

SEQ ID NO: 668763 - DNA, 25 bp, Homo sapien
taaacattggcatacaagaatctct

SEQ ID NO: 668764 - DNA, 25 bp, Homo sapien
ccctattgactggtgatgtatcttt

SEQ ID NO: 668765 - DNA, 25 bp, Homo sapien
ctgtggtacccactggctggatgct

SEQ ID NO: 668766 - DNA, 25 bp, Homo sapien
ttagattacctgtgcccgctttgcc

SEQ ID NO: 668767 - DNA, 25 bp, Homo sapien
gatgggctgatcaacgcctcttgca

SEQ ID NO: 668768 - DNA, 25 bp, Homo sapien
cccttccttctagcagtagctgtgg

SEQ ID NO: 668769 - DNA, 25 bp, Homo sapien
gataaatgctctggatgcctcacgc

SEQ ID NO: 668770 - DNA, 25 bp, Homo sapien
tgaaggtcccatgcctgctgaagag

SEQ ID NO: 668771 - DNA, 25 bp, Homo sapien
ttcagagctaggtgaccaagaggcc

SEQ ID NO: 668772 - DNA, 25 bp, Homo sapien
tctaagatccgacagataggcccct

SEQ ID NO: 668773 - DNA, 25 bp, Homo sapien
tctgcatgggtgaagatcgggtctt

SEQ ID NO: 668774 - DNA, 25 bp, Homo sapien
tccacaatgagagcctggagggatg

SEQ ID NO: 668775 - DNA, 25 bp, Homo sapien
tggagggatggagccaatcacacca

SEQ ID NO: 668776 - DNA, 25 bp, Homo sapien
catggtgacgtctcactgggactga

SEQ ID NO: 668777 - DNA, 25 bp, Homo sapien
tggggtgagtcctcaagggatgtct

SEQ ID NO: 668778 - DNA, 25 bp, Homo sapien
tgagtctgtcccctctgaggagaag

SEQ ID NO: 668779 - DNA, 25 bp, Homo sapien
gtctgtcccctctgaggagaagctg

SEQ ID NO: 668780 - DNA, 25 bp, Homo sapien
ctgtgagtctgtcccctctgaggag

SEQ ID NO: 668781 - DNA, 25 bp, Homo sapien
caagcaaatgctcgcgggcagggtc

SEQ ID NO: 668782 - DNA, 25 bp, Homo sapien
ggctgctgccggaagaaggtggtgg

SEQ ID NO: 668783 - DNA, 25 bp, Homo sapien
gtggtggcaagcaaatgctcgcggg

SEQ ID NO: 668784 - DNA, 25 bp, Homo sapien
gggctgctgccggaagaaggtggtg

SEQ ID NO: 668785 - DNA, 25 bp, Homo sapien
gagcctttgccgtcttcagcctctg

SEQ ID NO: 668786 - DNA, 25 bp, Homo sapien
gtgggagcctttgccgtcttcagcc

SEQ ID NO: 668787 - DNA, 25 bp, Homo sapien
cttgtgggagcctttgccgtcttca

SEQ ID NO: 668788 - DNA, 25 bp, Homo sapien
agcctttgccgtcttcagcctctgc

SEQ ID NO: 668789 - DNA, 25 bp, Homo sapien
gcctggaaagttctgttctgttccc

SEQ ID NO: 668790 - DNA, 25 bp, Homo sapien
ctggggtggagagcctgcctggaaa

SEQ ID NO: 668791 - DNA, 25 bp, Homo sapien
gggtggagagcctgcctggaaagtt

SEQ ID NO: 668792 - DNA, 25 bp, Homo sapien
gagcctgcctggaaagttctgttct

SEQ ID NO: 668793 - DNA, 25 bp, Homo sapien
tggtccatgcccagtgagtctagtg

SEQ ID NO: 668794 - DNA, 25 bp, Homo sapien
tggcaaatggtccatgcccagtgag

SEQ ID NO: 668795 - DNA, 25 bp, Homo sapien
catgcccagtgagtctagtggaggc

SEQ ID NO: 668796 - DNA, 25 bp, Homo sapien
tgagtctagtggaggctgatcccac

SEQ ID NO: 668797 - DNA, 25 bp, Homo sapien
ccttggaagtgacctctacactcac

SEQ ID NO: 668798 - DNA, 25 bp, Homo sapien
cccttggaagtgacctctacactca

SEQ ID NO: 668799 - DNA, 25 bp, Homo sapien
atccggatctcctcatgcctgatcc

SEQ ID NO: 668800 - DNA, 25 bp, Homo sapien
cctcttcgttctgggcgcgctgagt

SEQ ID NO: 668801 - DNA, 25 bp, Homo sapien
ggatctcctcatgcctgatccgggc

SEQ ID NO: 668802 - DNA, 25 bp, Homo sapien
cggatctcctcatgcctgatccggg

SEQ ID NO: 668803 - DNA, 25 bp, Homo sapien
ccaggcctgcccggctcagggaggc

SEQ ID NO: 668804 - DNA, 25 bp, Homo sapien
aggcctgcccggctcagggaggcca

SEQ ID NO: 668805 - DNA, 25 bp, Homo sapien
ctggcccaggcctgcccggctcagg

SEQ ID NO: 668806 - DNA, 25 bp, Homo sapien
gcccaggcctgcccggctcagggag

SEQ ID NO: 668807 - DNA, 25 bp, Homo sapien
agccccacggctgcgagcttctcag

SEQ ID NO: 668808 - DNA, 25 bp, Homo sapien
tggtccccaggactgacccttgagg

SEQ ID NO: 668809 - DNA, 25 bp, Homo sapien
tgacagtccatgtggaaccaggtca

SEQ ID NO: 668810 - DNA, 25 bp, Homo sapien
ggactgacccttgaggtcttgtcca

SEQ ID NO: 668811 - DNA, 25 bp, Homo sapien
catgaatttaggacaggtggcagct

SEQ ID NO: 668812 - DNA, 25 bp, Homo sapien
ttctaatagacctacgggccagcag

SEQ ID NO: 668813 - DNA, 25 bp, Homo sapien
tattgagcactgaccgtttgccagg

SEQ ID NO: 668814 - DNA, 25 bp, Homo sapien
cacgtttgatcgatccgggaaggcc

SEQ ID NO: 668815 - DNA, 25 bp, Homo sapien
ggaagcatataaggcatgtcacggg

SEQ ID NO: 668816 - DNA, 25 bp, Homo sapien
cggggtaccacagacacatctatgt

SEQ ID NO: 668817 - DNA, 25 bp, Homo sapien
gtgaagggatctgtcgtcatttctc

SEQ ID NO: 668818 - DNA, 25 bp, Homo sapien
tgtcacggggtaccacagacacatc

SEQ ID NO: 668819 - DNA, 25 bp, Homo sapien
gggtatctgtgcaggtgggccgcgg

SEQ ID NO: 668820 - DNA, 25 bp, Homo sapien
gcggtgtctatgcagtcaggccatg

SEQ ID NO: 668821 - DNA, 25 bp, Homo sapien
gatgagcctccgactgtgtctgggt

SEQ ID NO: 668822 - DNA, 25 bp, Homo sapien
tgtgtctaggtatccctgtccccac

SEQ ID NO: 668823 - DNA, 25 bp, Homo sapien
cagctgagcggcctgcttggacagc

SEQ ID NO: 668824 - DNA, 25 bp, Homo sapien
agcagcgtctcgaggtccgtgcgtt

SEQ ID NO: 668825 - DNA, 25 bp, Homo sapien
tgggaactctgcacgttctgcctcc

SEQ ID NO: 668826 - DNA, 25 bp, Homo sapien
cgctcggccgccatgtaaaagtggg

SEQ ID NO: 668827 - DNA, 25 bp, Homo sapien
aatcaccctgtggtccagagccttg

SEQ ID NO: 668828 - DNA, 25 bp, Homo sapien
taagagcagttatcacgcttctgga

SEQ ID NO: 668829 - DNA, 25 bp, Homo sapien
gcagttcactttgcctagccgggct

SEQ ID NO: 668830 - DNA, 25 bp, Homo sapien
aagctggttccctcactgtctctgg

SEQ ID NO: 668831 - DNA, 25 bp, Homo sapien
ttctgcgtgggctttctccactgtc

SEQ ID NO: 668832 - DNA, 25 bp, Homo sapien
gaggaagaagttctcaaattctgcg

SEQ ID NO: 668833 - DNA, 25 bp, Homo sapien
ttctcaaattctgcgtgggctttct

SEQ ID NO: 668834 - DNA, 25 bp, Homo sapien
tgcagcctggaggaagaagttctca

SEQ ID NO: 668835 - DNA, 25 bp, Homo sapien
ggagaggcagatttggacatgaggg

SEQ ID NO: 668836 - DNA, 25 bp, Homo sapien
gctaggcctgtgaccactggcttgg

SEQ ID NO: 668837 - DNA, 25 bp, Homo sapien
ttcactcattcagtggctaggcctg

SEQ ID NO: 668838 - DNA, 25 bp, Homo sapien
gggctgctaggagacctcccttgtc

SEQ ID NO: 668839 - DNA, 25 bp, Homo sapien
tcgtccacaaggctgtacaaggcag

SEQ ID NO: 668840 - DNA, 25 bp, Homo sapien
acatgaagctgctcgtccacaaggc

SEQ ID NO: 668841 - DNA, 25 bp, Homo sapien
ccaggaggctgttggaagcggtgac

SEQ ID NO: 668842 - DNA, 25 bp, Homo sapien
gctgctcgtccacaaggctgtacaa

SEQ ID NO: 668843 - DNA, 25 bp, Homo sapien
cagtgcccagcgcacgatgtttgtc

SEQ ID NO: 668844 - DNA, 25 bp, Homo sapien
tctaaagcacctcaggcggttccag

SEQ ID NO: 668845 - DNA, 25 bp, Homo sapien
gagaaccagcgctcatgcgtgcaaa

SEQ ID NO: 668846 - DNA, 25 bp, Homo sapien
tggtgggaagtagctgcaacatgcc

SEQ ID NO: 668847 - DNA, 25 bp, Homo sapien
acttgctcaggcacctggtagcctc

SEQ ID NO: 668848 - DNA, 25 bp, Homo sapien
ctccatcagctccttggacttgctc

SEQ ID NO: 668849 - DNA, 25 bp, Homo sapien
ggctgaagtccagcctgctggcatc

SEQ ID NO: 668850 - DNA, 25 bp, Homo sapien
ctgaagtccagcctgctggcatcat

SEQ ID NO: 668851 - DNA, 25 bp, Homo sapien
ctccccacacccagatcaagtccaa

SEQ ID NO: 668852 - DNA, 25 bp, Homo sapien
tgcaggcttcgaactgaatcccagc

SEQ ID NO: 668853 - DNA, 25 bp, Homo sapien
ctcagggccttcacatgtgtttgcc

SEQ ID NO: 668854 - DNA, 25 bp, Homo sapien
agtgcaaatctgataacccctggtt

SEQ ID NO: 668855 - DNA, 25 bp, Homo sapien
tccacatggcagttgaacggatctc

SEQ ID NO: 668856 - DNA, 25 bp, Homo sapien
ctcgatggaagcttgtagcagggaa

SEQ ID NO: 668857 - DNA, 25 bp, Homo sapien
gggtcggccttctcgaattcctcga

SEQ ID NO: 668858 - DNA, 25 bp, Homo sapien
ggtcagcaaggaaagggtccagctt

SEQ ID NO: 668859 - DNA, 25 bp, Homo sapien
gcctggtggaggtcagcaaggaaag

SEQ ID NO: 668860 - DNA, 25 bp, Homo sapien
gagtgaccgtttattttttagcata

SEQ ID NO: 668861 - DNA, 25 bp, Homo sapien
gcagggttgatggatccatgggaca

SEQ ID NO: 668862 - DNA, 25 bp, Homo sapien
ttgagtgaccgtttattttttagca

SEQ ID NO: 668863 - DNA, 25 bp, Homo sapien
gttgatggatccatgggacagaaga

SEQ ID NO: 668864 - DNA, 25 bp, Homo sapien
tcaggggctaaaggctgtgacggta

SEQ ID NO: 668865 - DNA, 25 bp, Homo sapien
caggggctaaaggctgtgacggtaa

SEQ ID NO: 668866 - DNA, 25 bp, Homo sapien
gggctaaaggctgtgacggtaaaca

SEQ ID NO: 668867 - DNA, 25 bp, Homo sapien
ggctaaaggctgtgacggtaaacac

SEQ ID NO: 668868 - DNA, 25 bp, Homo sapien
gaaatgaacccactcggtgtggcag

SEQ ID NO: 668869 - DNA, 25 bp, Homo sapien
tgaacccactcggtgtggcagtagg

SEQ ID NO: 668870 - DNA, 25 bp, Homo sapien
gaagaaatgaacccactcggtgtgg

SEQ ID NO: 668871 - DNA, 25 bp, Homo sapien
aatgaacccactcggtgtggcagta

SEQ ID NO: 668872 - DNA, 25 bp, Homo sapien
agagaatagcccggatagaggctgg

SEQ ID NO: 668873 - DNA, 25 bp, Homo sapien
gaagagaatagcccggatagaggct

SEQ ID NO: 668874 - DNA, 25 bp, Homo sapien
ctggacgtcaggtaatgtctgcagc

SEQ ID NO: 668875 - DNA, 25 bp, Homo sapien
aagagaatagcccggatagaggctg

SEQ ID NO: 668876 - DNA, 25 bp, Homo sapien
tcctggcgtcaatcaggaccgccag

SEQ ID NO: 668877 - DNA, 25 bp, Homo sapien
tgcagggcgctgaccagaccgggct

SEQ ID NO: 668878 - DNA, 25 bp, Homo sapien
tgggggctgtctcctggcgtcaatc

SEQ ID NO: 668879 - DNA, 25 bp, Homo sapien
tcaggaccgccagccccttggcttt

SEQ ID NO: 668880 - DNA, 25 bp, Homo sapien
taaacagaattgacagtcttgctgg

SEQ ID NO: 668881 - DNA, 25 bp, Homo sapien
gacagtcttgctggatggcctcgga

SEQ ID NO: 668882 - DNA, 25 bp, Homo sapien
gtcttgctggatggcctcggacagg

SEQ ID NO: 668883 - DNA, 25 bp, Homo sapien
cagtcttgctggatggcctcggaca

SEQ ID NO: 668884 - DNA, 25 bp, Homo sapien
gaaaagccactccaccttggacaag

SEQ ID NO: 668885 - DNA, 25 bp, Homo sapien
agagctctgtctaccacactagtca

SEQ ID NO: 668886 - DNA, 25 bp, Homo sapien
aaaatgttagtgaccagcaggtggc

SEQ ID NO: 668887 - DNA, 25 bp, Homo sapien
tattagccagtcctgagcagcatcc

SEQ ID NO: 668888 - DNA, 25 bp, Homo sapien
gatggtacacaggtaggacagtagc

SEQ ID NO: 668889 - DNA, 25 bp, Homo sapien
taggacagtagcttggtgacctctg

SEQ ID NO: 668890 - DNA, 25 bp, Homo sapien
acctctgaaactgtgcaccatggtg

SEQ ID NO: 668891 - DNA, 25 bp, Homo sapien
ttggtgacctctgaaactgtgcacc

SEQ ID NO: 668892 - DNA, 25 bp, Homo sapien
cacttcgtgagaaaagtcttccctg

SEQ ID NO: 668893 - DNA, 25 bp, Homo sapien
gggccctctagggacctctcctgtg

SEQ ID NO: 668894 - DNA, 25 bp, Homo sapien
tataagatacgtgggcaggcaaagc

SEQ ID NO: 668895 - DNA, 25 bp, Homo sapien
gtgcagagcactccctctgtataag

SEQ ID NO: 668896 - DNA, 25 bp, Homo sapien
tctgcaagggtagagaccatgcctg

SEQ ID NO: 668897 - DNA, 25 bp, Homo sapien
ttgtctgctacacacctgaggcctg

SEQ ID NO: 668898 - DNA, 25 bp, Homo sapien
tcaggtacccaaactctctgcaagg

SEQ ID NO: 668899 - DNA, 25 bp, Homo sapien
ccttgggtcaggaaatgctacatca

SEQ ID NO: 668900 - DNA, 25 bp, Homo sapien
caaggagacccttttgccccaaatg

SEQ ID NO: 668901 - DNA, 25 bp, Homo sapien
gattagttcacatgtctggttcccc

SEQ ID NO: 668902 - DNA, 25 bp, Homo sapien
tctcagaaccgtggcttgaagctgt

SEQ ID NO: 668903 - DNA, 25 bp, Homo sapien
cagcaaagggttcacacactcagga

SEQ ID NO: 668904 - DNA, 25 bp, Homo sapien
tcatcctgatgggaatggcccagag

SEQ ID NO: 668905 - DNA, 25 bp, Homo sapien
ctcatttcaagctgggcaatattgc

SEQ ID NO: 668906 - DNA, 25 bp, Homo sapien
ggcaatattgcagcgtgttctcatc

SEQ ID NO: 668907 - DNA, 25 bp, Homo sapien
gaacacgggggcctagaatagctca

SEQ ID NO: 668908 - DNA, 25 bp, Homo sapien
ccaaggaggcttggtctagaaccta

SEQ ID NO: 668909 - DNA, 25 bp, Homo sapien
caattctcccatgggaaagatgagg

SEQ ID NO: 668910 - DNA, 25 bp, Homo sapien
ttccaattctcccatgggaaagatg

SEQ ID NO: 668911 - DNA, 25 bp, Homo sapien
gaggcttggtctagaacctaggcct

SEQ ID NO: 668912 - DNA, 25 bp, Homo sapien
cacctcctgcttgaatcccctggaa

SEQ ID NO: 668913 - DNA, 25 bp, Homo sapien
acctcctgcttgaatcccctggaac

SEQ ID NO: 668914 - DNA, 25 bp, Homo sapien
ctggcaggcatgctatcctggagcg

SEQ ID NO: 668915 - DNA, 25 bp, Homo sapien
gagcggaaaaccttgacacctagag

SEQ ID NO: 668916 - DNA, 25 bp, Homo sapien
ttgacacctagagccccaatcctgg

SEQ ID NO: 668917 - DNA, 25 bp, Homo sapien
tgctatcctggagcggaaaaccttg

SEQ ID NO: 668918 - DNA, 25 bp, Homo sapien
gaggaggtgtttctgctagggcagg

SEQ ID NO: 668919 - DNA, 25 bp, Homo sapien
cattgtgctggagtgaggctttctc

SEQ ID NO: 668920 - DNA, 25 bp, Homo sapien
ctcaagaatgagaatttgagcccag

SEQ ID NO: 668921 - DNA, 25 bp, Homo sapien
gctcggttgggtttaggagagtaga

SEQ ID NO: 668922 - DNA, 25 bp, Homo sapien
tgtgcaagcccgatttcccaaggaa

SEQ ID NO: 668923 - DNA, 25 bp, Homo sapien
cctcaaggacattcatgtaggagcc

SEQ ID NO: 668924 - DNA, 25 bp, Homo sapien
ggaaaagcctaggagagccacatag

SEQ ID NO: 668925 - DNA, 25 bp, Homo sapien
gatgagtcctggatacttgctccca

SEQ ID NO: 668926 - DNA, 25 bp, Homo sapien
ttgagggctgctcaaatccagtgcc

SEQ ID NO: 668927 - DNA, 25 bp, Homo sapien
aactcttgagggctgctcaaatcca

SEQ ID NO: 668928 - DNA, 25 bp, Homo sapien
cagtgcctctaatggaaggggcccc

SEQ ID NO: 668929 - DNA, 25 bp, Homo sapien
gcctggtgcaactcttgagggctgc

SEQ ID NO: 668930 - DNA, 25 bp, Homo sapien
gagtggccagccctcgtgtaagaag

SEQ ID NO: 668931 - DNA, 25 bp, Homo sapien
gaaaagtatagggtaggctggctct

SEQ ID NO: 668932 - DNA, 25 bp, Homo sapien
tagaagtcaccctggcgcaataaga

SEQ ID NO: 668933 - DNA, 25 bp, Homo sapien
aacttcatccctcagacagagtggc

SEQ ID NO: 668934 - DNA, 25 bp, Homo sapien
gtccaggagacggaacacctgaccc

SEQ ID NO: 668935 - DNA, 25 bp, Homo sapien
ctggatggctgtgtcgagggatgga

SEQ ID NO: 668936 - DNA, 25 bp, Homo sapien
tgctgtggcctcgaaaggaggatag

SEQ ID NO: 668937 - DNA, 25 bp, Homo sapien
cacctgacccaggacggtgggtgct

SEQ ID NO: 668938 - DNA, 25 bp, Homo sapien
ctctctttggctgccaaattctcgt

SEQ ID NO: 668939 - DNA, 25 bp, Homo sapien
ggctgccaaattctcgtctgcctca

SEQ ID NO: 668940 - DNA, 25 bp, Homo sapien
tttggctgccaaattctcgtctgcc

SEQ ID NO: 668941 - DNA, 25 bp, Homo sapien
ctctttggctgccaaattctcgtct

SEQ ID NO: 668942 - DNA, 25 bp, Homo sapien
ctctgctccaaactcctcaaaggtt

SEQ ID NO: 668943 - DNA, 25 bp, Homo sapien
ggaccccagagcgacctttctcaaa

SEQ ID NO: 668944 - DNA, 25 bp, Homo sapien
caaacaccagacgtgggcccctcag

SEQ ID NO: 668945 - DNA, 25 bp, Homo sapien
gaaggaacgctagccactctcattc

SEQ ID NO: 668946 - DNA, 25 bp, Homo sapien
attcccaatccacccggcagcccag

SEQ ID NO: 668947 - DNA, 25 bp, Homo sapien
gctgcaggaaggaacgctagccact

SEQ ID NO: 668948 - DNA, 25 bp, Homo sapien
agagacataagggagccgcgggcgg

SEQ ID NO: 668949 - DNA, 25 bp, Homo sapien
ggactgaggctggagacggcgagag

SEQ ID NO: 668950 - DNA, 25 bp, Homo sapien
tgggtccgcgggtccgtctgtctgg

SEQ ID NO: 668951 - DNA, 25 bp, Homo sapien
tcggtcccgcctagccctggagcca

SEQ ID NO: 668952 - DNA, 25 bp, Homo sapien
aagatgtcctcagggagagagtaac

SEQ ID NO: 668953 - DNA, 25 bp, Homo sapien
cagggagagagtaactgtcttctcc

SEQ ID NO: 668954 - DNA, 25 bp, Homo sapien
ccttgcaaagatgtcctcagggaga

SEQ ID NO: 668955 - DNA, 25 bp, Homo sapien
cctcagggagagagtaactgtcttc

SEQ ID NO: 668956 - DNA, 25 bp, Homo sapien
ggaccctgagggcttgtacaatttg

SEQ ID NO: 668957 - DNA, 25 bp, Homo sapien
ggcttgtacaatttgcccacatccc

SEQ ID NO: 668958 - DNA, 25 bp, Homo sapien
gagggcttgtacaatttgcccacat

SEQ ID NO: 668959 - DNA, 25 bp, Homo sapien
cctgagggcttgtacaatttgccca

SEQ ID NO: 668960 - DNA, 25 bp, Homo sapien
tggaacatgccatagagacaaaggc

SEQ ID NO: 668961 - DNA, 25 bp, Homo sapien
cctgtggagtgtacacccttgggtg

SEQ ID NO: 668962 - DNA, 25 bp, Homo sapien
caggaagccgtgcagatgcctgcgt

SEQ ID NO: 668963 - DNA, 25 bp, Homo sapien
caataaatacccttgaactcaccaa

SEQ ID NO: 668964 - DNA, 25 bp, Homo sapien
gttaatggcgatctggtttctctcc

SEQ ID NO: 668965 - DNA, 25 bp, Homo sapien
agtatctccgtgtctgtggctgata

SEQ ID NO: 668966 - DNA, 25 bp, Homo sapien
ccaggtgcacaatgcttctttgagt

SEQ ID NO: 668967 - DNA, 25 bp, Homo sapien
tatccagatgcaaggcttcttccgg

SEQ ID NO: 668968 - DNA, 25 bp, Homo sapien
tccttttctcctggattcgcgatgc

SEQ ID NO: 668969 - DNA, 25 bp, Homo sapien
gagttattctggcaccatttcctgg

SEQ ID NO: 668970 - DNA, 25 bp, Homo sapien
gattcgcgatgcaggctgtgttatc

SEQ ID NO: 668971 - DNA, 25 bp, Homo sapien
tgggatgacatacggaatcattttc

SEQ ID NO: 668972 - DNA, 25 bp, Homo sapien
gaaccctggctgacgacctgtctat

SEQ ID NO: 668973 - DNA, 25 bp, Homo sapien
tcccacgacgtttcccacagtgtgt

SEQ ID NO: 668974 - DNA, 25 bp, Homo sapien
gttgcacaacgctgtaatacacaag

SEQ ID NO: 668975 - DNA, 25 bp, Homo sapien
taaacgccgcaaatggtgtccacag

SEQ ID NO: 668976 - DNA, 25 bp, Homo sapien
ttctagacgtctccccagagcaaag

SEQ ID NO: 668977 - DNA, 25 bp, Homo sapien
tcattctgcacccagaacccaagaa

SEQ ID NO: 668978 - DNA, 25 bp, Homo sapien
tcacaagtagattctagacgtctcc

SEQ ID NO: 668979 - DNA, 25 bp, Homo sapien
tagattctagacgtctccccagagc

SEQ ID NO: 668980 - DNA, 25 bp, Homo sapien
tgtacccagttggattggcagcagc

SEQ ID NO: 668981 - DNA, 25 bp, Homo sapien
gcctggaaaacagtaggagttcatc

SEQ ID NO: 668982 - DNA, 25 bp, Homo sapien
tatgggtgaatatcttgctgagccc

SEQ ID NO: 668983 - DNA, 25 bp, Homo sapien
gaggagcgactgttcactccttggg

SEQ ID NO: 668984 - DNA, 25 bp, Homo sapien
acagtggccgtttgatggtgacaga

SEQ ID NO: 668985 - DNA, 25 bp, Homo sapien
catccatttagcttagtcatcttcc

SEQ ID NO: 668986 - DNA, 25 bp, Homo sapien
tggtgacagacctaggcccaggttt

SEQ ID NO: 668987 - DNA, 25 bp, Homo sapien
tttgatggtgacagacctaggccca

SEQ ID NO: 668988 - DNA, 25 bp, Homo sapien
aatctgcgtggtcataagctcctgg

SEQ ID NO: 668989 - DNA, 25 bp, Homo sapien
cttgaaagtggcagtgcgagaacca

SEQ ID NO: 668990 - DNA, 25 bp, Homo sapien
agctcctgggtggttgtacttgaaa

SEQ ID NO: 668991 - DNA, 25 bp, Homo sapien
gaaagtggcagtgcgagaaccaatg

SEQ ID NO: 668992 - DNA, 25 bp, Homo sapien
gctttttgtcattgcctacaaagtg

SEQ ID NO: 668993 - DNA, 25 bp, Homo sapien
tgcctacaaagtgcccctcatgctt

SEQ ID NO: 668994 - DNA, 25 bp, Homo sapien
ttttgtcattgcctacaaagtgccc

SEQ ID NO: 668995 - DNA, 25 bp, Homo sapien
gtcattgcctacaaagtgcccctca

SEQ ID NO: 668996 - DNA, 25 bp, Homo sapien
tggcaacagccaactgccggtattg

SEQ ID NO: 668997 - DNA, 25 bp, Homo sapien
actgccggtattgcttttcttcccg

SEQ ID NO: 668998 - DNA, 25 bp, Homo sapien
ttcccgtgatcctccctcgggctgg

SEQ ID NO: 668999 - DNA, 25 bp, Homo sapien
cctaatgtggccgaggggaaacagc

SEQ ID NO: 669000 - DNA, 25 bp, Homo sapien
ctgcctcccgatggcagagagatga

SEQ ID NO: 669001 - DNA, 25 bp, Homo sapien
gatttgagctctggtcttgcctgat

SEQ ID NO: 669002 - DNA, 25 bp, Homo sapien
agctctggtcttgcctgatgcccca

SEQ ID NO: 669003 - DNA, 25 bp, Homo sapien
tgatgccccagcacggggttgctcg

SEQ ID NO: 669004 - DNA, 25 bp, Homo sapien
agactcaaaagttccatgttagaat

SEQ ID NO: 669005 - DNA, 25 bp, Homo sapien
accattgttaacattcatggattct

SEQ ID NO: 669006 - DNA, 25 bp, Homo sapien
ctcaaaagttccatgttagaattac

SEQ ID NO: 669007 - DNA, 25 bp, Homo sapien
gcatgacagggatggctaagctctc

SEQ ID NO: 669008 - DNA, 25 bp, Homo sapien
ggactattgacccaagccacttcca

SEQ ID NO: 669009 - DNA, 25 bp, Homo sapien
tctctggtgcctgggctaggaagac

SEQ ID NO: 669010 - DNA, 25 bp, Homo sapien
cagggcttgggcttctcgtagcatt

SEQ ID NO: 669011 - DNA, 25 bp, Homo sapien
tcgtagcattgagtgggttctgcac

SEQ ID NO: 669012 - DNA, 25 bp, Homo sapien
ccccgccacacctgtctgtgcagcc

SEQ ID NO: 669013 - DNA, 25 bp, Homo sapien
ggaggtattcattcacccagccatt

SEQ ID NO: 669014 - DNA, 25 bp, Homo sapien
gcttccctcttcctgattggcatgg

SEQ ID NO: 669015 - DNA, 25 bp, Homo sapien
tcaatggtgccgactcctggaggta

SEQ ID NO: 669016 - DNA, 25 bp, Homo sapien
tctaccctgccgtggatgtccaggc

SEQ ID NO: 669017 - DNA, 25 bp, Homo sapien
tgcatggtgtgtattttagggatta

SEQ ID NO: 669018 - DNA, 25 bp, Homo sapien
tttcctccaggaatcgtgtttcaat

SEQ ID NO: 669019 - DNA, 25 bp, Homo sapien
tttagggattatgagcttctttcaa

SEQ ID NO: 669020 - DNA, 25 bp, Homo sapien
ttctttcaagggctaaggctgcaga

SEQ ID NO: 669021 - DNA, 25 bp, Homo sapien
gtccgtcgccgcaagaaaaaggtca

SEQ ID NO: 669022 - DNA, 25 bp, Homo sapien
tcagcagggaccttagccagcagtg

SEQ ID NO: 669023 - DNA, 25 bp, Homo sapien
tctgctcgaccttaccagggaattg

SEQ ID NO: 669024 - DNA, 25 bp, Homo sapien
gacatccttaaactgctgccagagg

SEQ ID NO: 669025 - DNA, 25 bp, Homo sapien
gagtttcttggttcccttgcaatca

SEQ ID NO: 669026 - DNA, 25 bp, Homo sapien
cagtccttcgggtccctaaagactg

SEQ ID NO: 669027 - DNA, 25 bp, Homo sapien
acttgaccttgctttctggcagctc

SEQ ID NO: 669028 - DNA, 25 bp, Homo sapien
tgcaatcaaccacgaatgttcctca

SEQ ID NO: 669029 - DNA, 25 bp, Homo sapien
tggtgcctgcttacccttcagcaca

SEQ ID NO: 669030 - DNA, 25 bp, Homo sapien
ccagcgtcacccttccatcagcaac

SEQ ID NO: 669031 - DNA, 25 bp, Homo sapien
gatggtgcctgcttacccttcagca

SEQ ID NO: 669032 - DNA, 25 bp, Homo sapien
atcagcaacccagcgtctgatggat

SEQ ID NO: 669033 - DNA, 25 bp, Homo sapien
tagaaagaacccttatagctggggc

SEQ ID NO: 669034 - DNA, 25 bp, Homo sapien
tcacctttccagagtatttatctta

SEQ ID NO: 669035 - DNA, 25 bp, Homo sapien
cctttccagagtatttatcttaggt

SEQ ID NO: 669036 - DNA, 25 bp, Homo sapien
tccagagtatttatcttaggttttc

SEQ ID NO: 669037 - DNA, 25 bp, Homo sapien
agacgtagacatgggagacttctca

SEQ ID NO: 669038 - DNA, 25 bp, Homo sapien
aagacgtagacatgggagacttctc

SEQ ID NO: 669039 - DNA, 25 bp, Homo sapien
agaaagacgtagacatgggagactt

SEQ ID NO: 669040 - DNA, 25 bp, Homo sapien
attattctgccttgggatcctgttg

SEQ ID NO: 669041 - DNA, 25 bp, Homo sapien
cccctctgcgagaaacacccaagaa

SEQ ID NO: 669042 - DNA, 25 bp, Homo sapien
tccccctctgcgagaaacacccaag

SEQ ID NO: 669043 - DNA, 25 bp, Homo sapien
caaatccccctctgcgagaaacacc

SEQ ID NO: 669044 - DNA, 25 bp, Homo sapien
cctctgcgagaaacacccaagaatg

SEQ ID NO: 669045 - DNA, 25 bp, Homo sapien
gcaaaggtgacgtcagtgtgtggtc

SEQ ID NO: 669046 - DNA, 25 bp, Homo sapien
caaaggtgacgtcagtgtgtggtcc

SEQ ID NO: 669047 - DNA, 25 bp, Homo sapien
gtgcaaaggtgacgtcagtgtgtgg

SEQ ID NO: 669048 - DNA, 25 bp, Homo sapien
ttgtgcaaaggtgacgtcagtgtgt

SEQ ID NO: 669049 - DNA, 25 bp, Homo sapien
cacctctgccctaagttatcatatt

SEQ ID NO: 669050 - DNA, 25 bp, Homo sapien
ctgccctaagttatcatatttctgg

SEQ ID NO: 669051 - DNA, 25 bp, Homo sapien
cttcaggactctgccacttactttt

SEQ ID NO: 669052 - DNA, 25 bp, Homo sapien
tcactggatcctcttgacagcccag

SEQ ID NO: 669053 - DNA, 25 bp, Homo sapien
gatatgggtacaagtcagattgcac

SEQ ID NO: 669054 - DNA, 25 bp, Homo sapien
gggtacaagtcagattgcaccctac

SEQ ID NO: 669055 - DNA, 25 bp, Homo sapien
aagcctagagggcttaaatttatct

SEQ ID NO: 669056 - DNA, 25 bp, Homo sapien
ttgacttttgatatgggtacaagtc

SEQ ID NO: 669057 - DNA, 25 bp, Homo sapien
catacccagttgagcctttgcacta

SEQ ID NO: 669058 - DNA, 25 bp, Homo sapien
tcaggtacccagtctccttctagct

SEQ ID NO: 669059 - DNA, 25 bp, Homo sapien
taaaagcatatcagtcaagacagag

SEQ ID NO: 669060 - DNA, 25 bp, Homo sapien
tctgtttattggctgaagtgatctc

SEQ ID NO: 669061 - DNA, 25 bp, Homo sapien
agcagccgccctgtctgtgaagtga

SEQ ID NO: 669062 - DNA, 25 bp, Homo sapien
gagggaagtagacgtaggagactcc

SEQ ID NO: 669063 - DNA, 25 bp, Homo sapien
tgttgttaatgtataaccttaccca

SEQ ID NO: 669064 - DNA, 25 bp, Homo sapien
tctggatggtagggggcgcctctgc

SEQ ID NO: 669065 - DNA, 25 bp, Homo sapien
catggctgcagatcgaactctacaa

SEQ ID NO: 669066 - DNA, 25 bp, Homo sapien
tttaaaaagtccaagtagcagcaca

SEQ ID NO: 669067 - DNA, 25 bp, Homo sapien
cacctttctatggagcccttggagg

SEQ ID NO: 669068 - DNA, 25 bp, Homo sapien
cacaagcctcctgaaaaatagcgtt

SEQ ID NO: 669069 - DNA, 25 bp, Homo sapien
tgcaggctcctttaaacaaccggct

SEQ ID NO: 669070 - DNA, 25 bp, Homo sapien
caaccggctctctcgtgaactaaca

SEQ ID NO: 669071 - DNA, 25 bp, Homo sapien
cacaaagccaagtcagtagttccct

SEQ ID NO: 669072 - DNA, 25 bp, Homo sapien
gagcaggcgcatcatatagcaagag

SEQ ID NO: 669073 - DNA, 25 bp, Homo sapien
ggatgggagatgatcaagctccaga

SEQ ID NO: 669074 - DNA, 25 bp, Homo sapien
acattctcccagtggaacctgagag

SEQ ID NO: 669075 - DNA, 25 bp, Homo sapien
tacattctcccagtggaacctgaga

SEQ ID NO: 669076 - DNA, 25 bp, Homo sapien
gatcaagctccagaacactgttaca

SEQ ID NO: 669077 - DNA, 25 bp, Homo sapien
gatgagctaggagacatcttgatgg

SEQ ID NO: 669078 - DNA, 25 bp, Homo sapien
cttgatggccatctccggccatgac

SEQ ID NO: 669079 - DNA, 25 bp, Homo sapien
tctccggccatgacagcacgtattt

SEQ ID NO: 669080 - DNA, 25 bp, Homo sapien
ctgcctggatgagctaggagacatc

SEQ ID NO: 669081 - DNA, 25 bp, Homo sapien
gcccaagatggcgaagatacgtccc

SEQ ID NO: 669082 - DNA, 25 bp, Homo sapien
aagtgccagcaattctccagggtgc

SEQ ID NO: 669083 - DNA, 25 bp, Homo sapien
gccacctctgggttgacgtagacca

SEQ ID NO: 669084 - DNA, 25 bp, Homo sapien
gaggtggcctcttgcacagtgttaa

SEQ ID NO: 669085 - DNA, 25 bp, Homo sapien
tcaaaactcctgggcaataggagtt

SEQ ID NO: 669086 - DNA, 25 bp, Homo sapien
caaaactcctgggcaataggagttt

SEQ ID NO: 669087 - DNA, 25 bp, Homo sapien
tggctcccaagtaaatgcacaatgc

SEQ ID NO: 669088 - DNA, 25 bp, Homo sapien
tggatgcttctgcagggaactgact

SEQ ID NO: 669089 - DNA, 25 bp, Homo sapien
gaactgactgctggtatggtgcctt

SEQ ID NO: 669090 - DNA, 25 bp, Homo sapien
tggcgagaggcacccatgatgatct

SEQ ID NO: 669091 - DNA, 25 bp, Homo sapien
taacttcaagtggggagattaactg

SEQ ID NO: 669092 - DNA, 25 bp, Homo sapien
tccagccaaggtggttttaacttca

SEQ ID NO: 669093 - DNA, 25 bp, Homo sapien
cagccaaggtggttttaacttcaag

SEQ ID NO: 669094 - DNA, 25 bp, Homo sapien
cctgggacatgtgtagattcctccc

SEQ ID NO: 669095 - DNA, 25 bp, Homo sapien
ttatgagccgcgtcatccaggacac

SEQ ID NO: 669096 - DNA, 25 bp, Homo sapien
tctccctgggtttagcaatgaaaaa

SEQ ID NO: 669097 - DNA, 25 bp, Homo sapien
gagtacccctcagttccatcaatgg

SEQ ID NO: 669098 - DNA, 25 bp, Homo sapien
gggaagtccctcaatctcaggcaaa

SEQ ID NO: 669099 - DNA, 25 bp, Homo sapien
ttctgtaaggtttattgaatgggtg

SEQ ID NO: 669100 - DNA, 25 bp, Homo sapien
attctgtaaggtttattgaatgggt

SEQ ID NO: 669101 - DNA, 25 bp, Homo sapien
tctgtaaggtttattgaatgggtgg

SEQ ID NO: 669102 - DNA, 25 bp, Homo sapien
ctgtaaggtttattgaatgggtggg

SEQ ID NO: 669103 - DNA, 25 bp, Homo sapien
tattaaagtcattccaggcatggac

SEQ ID NO: 669104 - DNA, 25 bp, Homo sapien
tcccatgtctggaccccgaatcttg

SEQ ID NO: 669105 - DNA, 25 bp, Homo sapien
tgtgcagattgaacagtggatccgg

SEQ ID NO: 669106 - DNA, 25 bp, Homo sapien
ggatgcgaggctggccttccctgtc

SEQ ID NO: 669107 - DNA, 25 bp, Homo sapien
gagcagctctggtgacgcttcatgt

SEQ ID NO: 669108 - DNA, 25 bp, Homo sapien
gcagctctggtgacgcttcatgtgg

SEQ ID NO: 669109 - DNA, 25 bp, Homo sapien
cagggagcagctctggtgacgcttc

SEQ ID NO: 669110 - DNA, 25 bp, Homo sapien
tctggtgacgcttcatgtggtagcc

SEQ ID NO: 669111 - DNA, 25 bp, Homo sapien
tgcccctctcgtgcccacaaacacc

SEQ ID NO: 669112 - DNA, 25 bp, Homo sapien
gagaccagtgatttgaggttcccat

SEQ ID NO: 669113 - DNA, 25 bp, Homo sapien
tctgcataaacacggaccagctgag

SEQ ID NO: 669114 - DNA, 25 bp, Homo sapien
gaggttcccatctgcataaacacgg

SEQ ID NO: 669115 - DNA, 25 bp, Homo sapien
acggaccagctgagcctctggctgt

SEQ ID NO: 669116 - DNA, 25 bp, Homo sapien
gatcaccaactccatggtcttagga

SEQ ID NO: 669117 - DNA, 25 bp, Homo sapien
cacggtgagaaatatcagcaaaccc

SEQ ID NO: 669118 - DNA, 25 bp, Homo sapien
ctgtccttggatctaaggctgagac

SEQ ID NO: 669119 - DNA, 25 bp, Homo sapien
gagaaatatcagcaaacccagatcc

SEQ ID NO: 669120 - DNA, 25 bp, Homo sapien
gaaagcatacaagtatttagtctcc

SEQ ID NO: 669121 - DNA, 25 bp, Homo sapien
caagtatttagtctccagggccatc

SEQ ID NO: 669122 - DNA, 25 bp, Homo sapien
ctaagagggtaagaaagcatacaag

SEQ ID NO: 669123 - DNA, 25 bp, Homo sapien
gagggtaagaaagcatacaagtatt

SEQ ID NO: 669124 - DNA, 25 bp, Homo sapien
gaccagctagagtaatccacaggaa

SEQ ID NO: 669125 - DNA, 25 bp, Homo sapien
ttctttcaagcagttcacaatcggg

SEQ ID NO: 669126 - DNA, 25 bp, Homo sapien
gggcgaagctcctcattcacgcaca

SEQ ID NO: 669127 - DNA, 25 bp, Homo sapien
ggtcccattcaagcagggcgaagct

SEQ ID NO: 669128 - DNA, 25 bp, Homo sapien
tctccatttgttcgacattactgat

SEQ ID NO: 669129 - DNA, 25 bp, Homo sapien
atttgttcgacattactgatggtgc

SEQ ID NO: 669130 - DNA, 25 bp, Homo sapien
tttctccatttgttcgacattactg

SEQ ID NO: 669131 - DNA, 25 bp, Homo sapien
tccatttgttcgacattactgatgg

SEQ ID NO: 669132 - DNA, 25 bp, Homo sapien
ggtttctggcaggaggatccctaac

SEQ ID NO: 669133 - DNA, 25 bp, Homo sapien
tgggtctagtcaccacatcacatgg

SEQ ID NO: 669134 - DNA, 25 bp, Homo sapien
gattcgcagttctcacgtgtgccct

SEQ ID NO: 669135 - DNA, 25 bp, Homo sapien
ggcccaagctctgaaagcctagttg

SEQ ID NO: 669136 - DNA, 25 bp, Homo sapien
ctacccctgcactgttaatgatcgg

SEQ ID NO: 669137 - DNA, 25 bp, Homo sapien
ccatgatcacttttggatacaagag

SEQ ID NO: 669138 - DNA, 25 bp, Homo sapien
tggaccaacgcagggaagatgtctt

SEQ ID NO: 669139 - DNA, 25 bp, Homo sapien
ttaatgatcgggacacaggcaaccc

SEQ ID NO: 669140 - DNA, 25 bp, Homo sapien
actatggacacaccagcgctcaagg

SEQ ID NO: 669141 - DNA, 25 bp, Homo sapien
ggagttaagacacttccagcattaa

SEQ ID NO: 669142 - DNA, 25 bp, Homo sapien
gaaaaactcactgctaatccagatc

SEQ ID NO: 669143 - DNA, 25 bp, Homo sapien
aaaggtcaggagcatatggtcctaa

SEQ ID NO: 669144 - DNA, 25 bp, Homo sapien
gcagatttccagaggctcttcctct

SEQ ID NO: 669145 - DNA, 25 bp, Homo sapien
tccagaggctcttcctctgcaacag

SEQ ID NO: 669146 - DNA, 25 bp, Homo sapien
ttccagaggctcttcctctgcaaca

SEQ ID NO: 669147 - DNA, 25 bp, Homo sapien
agaggctcttcctctgcaacagcca

SEQ ID NO: 669148 - DNA, 25 bp, Homo sapien
aatgtggaaccacgggataccactt

SEQ ID NO: 669149 - DNA, 25 bp, Homo sapien
cgggataccactttcaccttgcttc

SEQ ID NO: 669150 - DNA, 25 bp, Homo sapien
accacgggataccactttcaccttg

SEQ ID NO: 669151 - DNA, 25 bp, Homo sapien
tggaaccacgggataccactttcac

SEQ ID NO: 669152 - DNA, 25 bp, Homo sapien
acatattccagacaacagtccaaaa

SEQ ID NO: 669153 - DNA, 25 bp, Homo sapien
tgcaggatgcaaagaaacatattcc

SEQ ID NO: 669154 - DNA, 25 bp, Homo sapien
ctgcaggatgcaaagaaacatattc

SEQ ID NO: 669155 - DNA, 25 bp, Homo sapien
ttccagacaacagtccaaaatccca

SEQ ID NO: 669156 - DNA, 25 bp, Homo sapien
actatgaagacaacacatcccatgg

SEQ ID NO: 669157 - DNA, 25 bp, Homo sapien
ttgcggacccatggtccagcgacct

SEQ ID NO: 669158 - DNA, 25 bp, Homo sapien
tatgaagacaacacatcccatggag

SEQ ID NO: 669159 - DNA, 25 bp, Homo sapien
atggtccagcgacctgctactatga

SEQ ID NO: 669160 - DNA, 25 bp, Homo sapien
gacacagagaacacttaacgcaggg

SEQ ID NO: 669161 - DNA, 25 bp, Homo sapien
gcttcttaggaaacgagggttgcca

SEQ ID NO: 669162 - DNA, 25 bp, Homo sapien
attttacaagtggatgaggtgcccc

SEQ ID NO: 669163 - DNA, 25 bp, Homo sapien
gagggctcacgcacaacataaggga

SEQ ID NO: 669164 - DNA, 25 bp, Homo sapien
ggataggagtggacccttcaaacac

SEQ ID NO: 669165 - DNA, 25 bp, Homo sapien
ttcaaacacggggaagcgctttcat

SEQ ID NO: 669166 - DNA, 25 bp, Homo sapien
ctgcactatcaatgaccagggcaaa

SEQ ID NO: 669167 - DNA, 25 bp, Homo sapien
ggaagcgctttcattgattcctctc

SEQ ID NO: 669168 - DNA, 25 bp, Homo sapien
tgacagcagcttaggaagggcccaa

SEQ ID NO: 669169 - DNA, 25 bp, Homo sapien
tttgcagcctagaattgcagcagct

SEQ ID NO: 669170 - DNA, 25 bp, Homo sapien
gtgatactatccacacgtcggccag

SEQ ID NO: 669171 - DNA, 25 bp, Homo sapien
aagtcagtgaccagatttgcagcct

SEQ ID NO: 669172 - DNA, 25 bp, Homo sapien
agttcgaggaaaagagggtgtcaca

SEQ ID NO: 669173 - DNA, 25 bp, Homo sapien
gagaaaaccactagctaactgcctg

SEQ ID NO: 669174 - DNA, 25 bp, Homo sapien
tcgccaccaagtccagagaaaacca

SEQ ID NO: 669175 - DNA, 25 bp, Homo sapien
ttcacacagtggagtcgcagagttc

SEQ ID NO: 669176 - DNA, 25 bp, Homo sapien
ttacaagcaccgcagctcagcctct

SEQ ID NO: 669177 - DNA, 25 bp, Homo sapien
cagcctcttcttgaagacacgtcac

SEQ ID NO: 669178 - DNA, 25 bp, Homo sapien
gctcagcctcttcttgaagacacgt

SEQ ID NO: 669179 - DNA, 25 bp, Homo sapien
cttacaagcaccgcagctcagcctc

SEQ ID NO: 669180 - DNA, 25 bp, Homo sapien
ggcacacaggacagaggtcagctga

SEQ ID NO: 669181 - DNA, 25 bp, Homo sapien
acaggacagaggtcagctgacaatc

SEQ ID NO: 669182 - DNA, 25 bp, Homo sapien
ctggggccactgggcacacaggaca

SEQ ID NO: 669183 - DNA, 25 bp, Homo sapien
cacacaggacagaggtcagctgaca

SEQ ID NO: 669184 - DNA, 25 bp, Homo sapien
ctatgatcactttcggatgcaggag

SEQ ID NO: 669185 - DNA, 25 bp, Homo sapien
aaagcttcagggttcggatgggata

SEQ ID NO: 669186 - DNA, 25 bp, Homo sapien
aggcagcctatgatcactttcggat

SEQ ID NO: 669187 - DNA, 25 bp, Homo sapien
gacaacctctttcagcgttcctctc

SEQ ID NO: 669188 - DNA, 25 bp, Homo sapien
tgttttctgtatcaggaaattgaga

SEQ ID NO: 669189 - DNA, 25 bp, Homo sapien
gaaattgagattcaaaacaggtcag

SEQ ID NO: 669190 - DNA, 25 bp, Homo sapien
tgggaacttggctctcgggatgttc

SEQ ID NO: 669191 - DNA, 25 bp, Homo sapien
ttcaaaacaggtcagatggcccttg

SEQ ID NO: 669192 - DNA, 25 bp, Homo sapien
gatatccgcttcatctgtcaggcca

SEQ ID NO: 669193 - DNA, 25 bp, Homo sapien
aatgaacccgatctccttacagtgg

SEQ ID NO: 669194 - DNA, 25 bp, Homo sapien
gctgctgccgtaaatccctcagtga

SEQ ID NO: 669195 - DNA, 25 bp, Homo sapien
ggaaatcctccccatacaaggctgg

SEQ ID NO: 669196 - DNA, 25 bp, Homo sapien
ctcatgatcactttcgaatgcaggg

SEQ ID NO: 669197 - DNA, 25 bp, Homo sapien
cggggaagtgctctcggcagttcct

SEQ ID NO: 669198 - DNA, 25 bp, Homo sapien
ccctccaaacacggggaagtgctct

SEQ ID NO: 669199 - DNA, 25 bp, Homo sapien
agtgctctcggcagttcctctccct

SEQ ID NO: 669200 - DNA, 25 bp, Homo sapien
tcagccgggcactgggtatgaatcc

SEQ ID NO: 669201 - DNA, 25 bp, Homo sapien
ttgaatctgaaacgcagcccctctg

SEQ ID NO: 669202 - DNA, 25 bp, Homo sapien
tctcagagccccaatcaagctcagg

SEQ ID NO: 669203 - DNA, 25 bp, Homo sapien
acaggttctttgtcagggactctca

SEQ ID NO: 669204 - DNA, 25 bp, Homo sapien
gagaacttgagctctagaggactga

SEQ ID NO: 669205 - DNA, 25 bp, Homo sapien
ttcaccggtgtcctcactccccact

SEQ ID NO: 669206 - DNA, 25 bp, Homo sapien
agaacttgagctctagaggactgag

SEQ ID NO: 669207 - DNA, 25 bp, Homo sapien
ggaagcagccttcaccggtgtcctc

SEQ ID NO: 669208 - DNA, 25 bp, Homo sapien
agaggacagacctcatagaacacca

SEQ ID NO: 669209 - DNA, 25 bp, Homo sapien
cccacgatcactttcgaatacaggt

SEQ ID NO: 669210 - DNA, 25 bp, Homo sapien
actttccgcgatttctttccctgca

SEQ ID NO: 669211 - DNA, 25 bp, Homo sapien
caaacacggggaagcactttccgcg

SEQ ID NO: 669212 - DNA, 25 bp, Homo sapien
ggaagcactttccgcgatttctttc

SEQ ID NO: 669213 - DNA, 25 bp, Homo sapien
attctcaccccgcggacagtggaag

SEQ ID NO: 669214 - DNA, 25 bp, Homo sapien
aagccgtccgaggtgcagcacagcc

SEQ ID NO: 669215 - DNA, 25 bp, Homo sapien
tgcagatcagagtgctgcaggagag

SEQ ID NO: 669216 - DNA, 25 bp, Homo sapien
gcgctggctggtgcgaagccgtccg

SEQ ID NO: 669217 - DNA, 25 bp, Homo sapien
tggagccgaccatgcgccctgctgt

SEQ ID NO: 669218 - DNA, 25 bp, Homo sapien
cagtttcccccgatggtgagagtgg

SEQ ID NO: 669219 - DNA, 25 bp, Homo sapien
tcactccggcaaagaggacgagaca

SEQ ID NO: 669220 - DNA, 25 bp, Homo sapien
ggacgagacactgcaccaaggacag

SEQ ID NO: 669221 - DNA, 25 bp, Homo sapien
gagacctgacagacagcgtgggaaa

SEQ ID NO: 669222 - DNA, 25 bp, Homo sapien
acggcgaaggactgaggccacacga

SEQ ID NO: 669223 - DNA, 25 bp, Homo sapien
gatgtctgcagatttcgagagatgg

SEQ ID NO: 669224 - DNA, 25 bp, Homo sapien
gtggcgtgcgatggcgaaggacggc

SEQ ID NO: 669225 - DNA, 25 bp, Homo sapien
ttgcaaaggattggactgtagctgg

SEQ ID NO: 669226 - DNA, 25 bp, Homo sapien
aggagtcctgctttcaacatactcg

SEQ ID NO: 669227 - DNA, 25 bp, Homo sapien
tctaagcagacatatcaggagtcct

SEQ ID NO: 669228 - DNA, 25 bp, Homo sapien
gagagacgctcccacttagcaagtc

SEQ ID NO: 669229 - DNA, 25 bp, Homo sapien
caagagtgaccaccgtgctgcagat

SEQ ID NO: 669230 - DNA, 25 bp, Homo sapien
accaagagtgaccaccgtgctgcag

SEQ ID NO: 669231 - DNA, 25 bp, Homo sapien
agtgaccaccgtgctgcagattttg

SEQ ID NO: 669232 - DNA, 25 bp, Homo sapien
cacaccaagagtgaccaccgtgctg

SEQ ID NO: 669233 - DNA, 25 bp, Homo sapien
gatttggtaaactaggaagcggtga

SEQ ID NO: 669234 - DNA, 25 bp, Homo sapien
tgagtgaactcatgaagggatgctc

SEQ ID NO: 669235 - DNA, 25 bp, Homo sapien
caaaggcaccagtagatttggtaaa

SEQ ID NO: 669236 - DNA, 25 bp, Homo sapien
tagatgaacgcttggataaagggcg

SEQ ID NO: 669237 - DNA, 25 bp, Homo sapien
aagctctgattaggcgcaccgcgca

SEQ ID NO: 669238 - DNA, 25 bp, Homo sapien
ccctggcagtcggaagttgcctgag

SEQ ID NO: 669239 - DNA, 25 bp, Homo sapien
gagcagatcccagccggctggctcg

SEQ ID NO: 669240 - DNA, 25 bp, Homo sapien
ttcgtcgtcccttggcgccctggga

SEQ ID NO: 669241 - DNA, 25 bp, Homo sapien
cttgtttctcggctctgggtgctcc

SEQ ID NO: 669242 - DNA, 25 bp, Homo sapien
gtcgcctcaggtaaccgggcagccg

SEQ ID NO: 669243 - DNA, 25 bp, Homo sapien
cccacctggcggtcaagggacggct

SEQ ID NO: 669244 - DNA, 25 bp, Homo sapien
tcgcgtgaggcggaaggccgaggac

SEQ ID NO: 669245 - DNA, 25 bp, Homo sapien
gggtaaaaaccagcataggcttgat

SEQ ID NO: 669246 - DNA, 25 bp, Homo sapien
tattttgcatatctaatctctatgg

SEQ ID NO: 669247 - DNA, 25 bp, Homo sapien
aatctgatatttacgttgagacgaa

SEQ ID NO: 669248 - DNA, 25 bp, Homo sapien
cacatacttaaacattaagtggaga

SEQ ID NO: 669249 - DNA, 25 bp, Homo sapien
tctcagacccttattgctgggaagg

SEQ ID NO: 669250 - DNA, 25 bp, Homo sapien
tactcccaagtcttttctacaggca

SEQ ID NO: 669251 - DNA, 25 bp, Homo sapien
gcatcagccagtatgtaaaagaagc

SEQ ID NO: 669252 - DNA, 25 bp, Homo sapien
tctaccctagacatggagcttgctt

SEQ ID NO: 669253 - DNA, 25 bp, Homo sapien
gattttaggttagcttccttccaca

SEQ ID NO: 669254 - DNA, 25 bp, Homo sapien
tcaggtcagaagtgtaggaagattg

SEQ ID NO: 669255 - DNA, 25 bp, Homo sapien
atgcttaaaagagaatacggggagg

SEQ ID NO: 669256 - DNA, 25 bp, Homo sapien
aaggtgttcctccattgtacaggat

SEQ ID NO: 669257 - DNA, 25 bp, Homo sapien
cagttaaacacgtgcattggtagta

SEQ ID NO: 669258 - DNA, 25 bp, Homo sapien
ttttgctcagataagaagcctgaca

SEQ ID NO: 669259 - DNA, 25 bp, Homo sapien
gagcatggccttgtcctttaatggg

SEQ ID NO: 669260 - DNA, 25 bp, Homo sapien
gttataagacagcagtgatacccca

SEQ ID NO: 669261 - DNA, 25 bp, Homo sapien
ggttcaggaatagcctctcaacgct

SEQ ID NO: 669262 - DNA, 25 bp, Homo sapien
gactttgccagccaacagatccctg

SEQ ID NO: 669263 - DNA, 25 bp, Homo sapien
tgtctcttatttcaggaccaagcag

SEQ ID NO: 669264 - DNA, 25 bp, Homo sapien
ggctactgttagaaatggctgttgt

SEQ ID NO: 669265 - DNA, 25 bp, Homo sapien
gaaatatgggcatagcagctcttgg

SEQ ID NO: 669266 - DNA, 25 bp, Homo sapien
aagctcaggtaaagataacctcctc

SEQ ID NO: 669267 - DNA, 25 bp, Homo sapien
tgtttccagatggtaacatgggaga

SEQ ID NO: 669268 - DNA, 25 bp, Homo sapien
agacctaattccctgtgcaaatgtc

SEQ ID NO: 669269 - DNA, 25 bp, Homo sapien
cactagggaagcatttgtcagactc

SEQ ID NO: 669270 - DNA, 25 bp, Homo sapien
tgaatacaagtacccacacctttgg

SEQ ID NO: 669271 - DNA, 25 bp, Homo sapien
tatccgtacgatgtggaatcaaacg

SEQ ID NO: 669272 - DNA, 25 bp, Homo sapien
cacctttggccagtaatgtcagtta

SEQ ID NO: 669273 - DNA, 25 bp, Homo sapien
tgtttcatcttcgtcggttagggaa

SEQ ID NO: 669274 - DNA, 25 bp, Homo sapien
taatttgggattccacagtgccttg

SEQ ID NO: 669275 - DNA, 25 bp, Homo sapien
aagggcttggcagttgtggctaaaa

SEQ ID NO: 669276 - DNA, 25 bp, Homo sapien
tgtaaatatgaaggcgtgcccgtgc

SEQ ID NO: 669277 - DNA, 25 bp, Homo sapien
caacaatgtcatgaatccattcctt

SEQ ID NO: 669278 - DNA, 25 bp, Homo sapien
ctccaacaatgtcatgaatccattc

SEQ ID NO: 669279 - DNA, 25 bp, Homo sapien
tttcatgcattcaaaagtgtctcta

SEQ ID NO: 669280 - DNA, 25 bp, Homo sapien
tgcattcaaaagtgtctctagagct

SEQ ID NO: 669281 - DNA, 25 bp, Homo sapien
actctccgaaggctggaggtttgtg

SEQ ID NO: 669282 - DNA, 25 bp, Homo sapien
ctctccgaaggctggaggtttgtgc

SEQ ID NO: 669283 - DNA, 25 bp, Homo sapien
tgcgagtttgtacgtgtggttgagc

SEQ ID NO: 669284 - DNA, 25 bp, Homo sapien
ggtttgtgcgagtttgtacgtgtgg

SEQ ID NO: 669285 - DNA, 25 bp, Homo sapien
atatccttgaccagggtccggattt

SEQ ID NO: 669286 - DNA, 25 bp, Homo sapien
ggagtttggctatacgagtgtccca

SEQ ID NO: 669287 - DNA, 25 bp, Homo sapien
aaagctgtcagcagacactcggagt

SEQ ID NO: 669288 - DNA, 25 bp, Homo sapien
agacactcggagtttggctatacga

SEQ ID NO: 669289 - DNA, 25 bp, Homo sapien
cttggtaagttccatgtagtaaagg

SEQ ID NO: 669290 - DNA, 25 bp, Homo sapien
tttcattcatgatccctcatcttct

SEQ ID NO: 669291 - DNA, 25 bp, Homo sapien
tcctttcattcatgatccctcatct

SEQ ID NO: 669292 - DNA, 25 bp, Homo sapien
ctggtgggcattgaggtaaaaaagt

SEQ ID NO: 669293 - DNA, 25 bp, Homo sapien
cttcctttcattcatgatccctcat

SEQ ID NO: 669294 - DNA, 25 bp, Homo sapien
cggagggagcagtcgacatttctgc

SEQ ID NO: 669295 - DNA, 25 bp, Homo sapien
gggagcagtcgacatttctgctttt

SEQ ID NO: 669296 - DNA, 25 bp, Homo sapien
tcatccactccggagggagcagtcg

SEQ ID NO: 669297 - DNA, 25 bp, Homo sapien
ttttctatgttcatccactccggag

SEQ ID NO: 669298 - DNA, 25 bp, Homo sapien
tgaagttggggataatggtaaccag

SEQ ID NO: 669299 - DNA, 25 bp, Homo sapien
gttggggataatggtaaccagctcc

SEQ ID NO: 669300 - DNA, 25 bp, Homo sapien
agttggggataatggtaaccagctc

SEQ ID NO: 669301 - DNA, 25 bp, Homo sapien
gaagttggggataatggtaaccagc

SEQ ID NO: 669302 - DNA, 25 bp, Homo sapien
ggcctcacagtctccttgggccctt

SEQ ID NO: 669303 - DNA, 25 bp, Homo sapien
gaggaggtgccgcagccactgtttt

SEQ ID NO: 669304 - DNA, 25 bp, Homo sapien
cagccactgttttccccgagattgc

SEQ ID NO: 669305 - DNA, 25 bp, Homo sapien
ccgagattgcctttcaatctctgct

SEQ ID NO: 669306 - DNA, 25 bp, Homo sapien
ctggtttggctgctggagaggaggc

SEQ ID NO: 669307 - DNA, 25 bp, Homo sapien
tggctgctggagaggaggctcagcc

SEQ ID NO: 669308 - DNA, 25 bp, Homo sapien
tgctggagaggaggctcagccacac

SEQ ID NO: 669309 - DNA, 25 bp, Homo sapien
gctgctggagaggaggctcagccac

SEQ ID NO: 669310 - DNA, 25 bp, Homo sapien
actcatcccgatggcccgcattctt

SEQ ID NO: 669311 - DNA, 25 bp, Homo sapien
ccgatggcccgcattcttgctccct

SEQ ID NO: 669312 - DNA, 25 bp, Homo sapien
tccaccgactcatcccgatggcccg

SEQ ID NO: 669313 - DNA, 25 bp, Homo sapien
cccgcattcttgctccctcggtcat

SEQ ID NO: 669314 - DNA, 25 bp, Homo sapien
tgaacaggctctcggcttcgctgag

SEQ ID NO: 669315 - DNA, 25 bp, Homo sapien
tttcggcttccctgaacaggctctc

SEQ ID NO: 669316 - DNA, 25 bp, Homo sapien
aggctctcggcttcgctgagcaggc

SEQ ID NO: 669317 - DNA, 25 bp, Homo sapien
gcttccctgaacaggctctcggctt

SEQ ID NO: 669318 - DNA, 25 bp, Homo sapien
gctgctcgcccagctgcggatcatt

SEQ ID NO: 669319 - DNA, 25 bp, Homo sapien
ggtgtctccgcaggccgaacacgct

SEQ ID NO: 669320 - DNA, 25 bp, Homo sapien
gcccttttgttctccgtcgcgcgct

SEQ ID NO: 669321 - DNA, 25 bp, Homo sapien
taggaatgcaaactgtaggcgccgc

SEQ ID NO: 669322 - DNA, 25 bp, Homo sapien
gctggccattctcagtgccagatgg

SEQ ID NO: 669323 - DNA, 25 bp, Homo sapien
caggctggccattctcagtgccaga

SEQ ID NO: 669324 - DNA, 25 bp, Homo sapien
tggccattctcagtgccagatggtg

SEQ ID NO: 669325 - DNA, 25 bp, Homo sapien
gccattctcagtgccagatggtggc

SEQ ID NO: 669326 - DNA, 25 bp, Homo sapien
agctcgccgttttgctagggaattg

SEQ ID NO: 669327 - DNA, 25 bp, Homo sapien
aaaattggcatttccgcagctcaga

SEQ ID NO: 669328 - DNA, 25 bp, Homo sapien
ttggcatttccgcagctcagattgg

SEQ ID NO: 669329 - DNA, 25 bp, Homo sapien
gctcagattggagctcgccgttttg

SEQ ID NO: 669330 - DNA, 25 bp, Homo sapien
tgggggcattcagagagagtcagtg

SEQ ID NO: 669331 - DNA, 25 bp, Homo sapien
cagagagtgtcgacatcaagggcag

SEQ ID NO: 669332 - DNA, 25 bp, Homo sapien
agagtgtcgacatcaagggcagagc

SEQ ID NO: 669333 - DNA, 25 bp, Homo sapien
agtgtcgacatcaagggcagagcat

SEQ ID NO: 669334 - DNA, 25 bp, Homo sapien
tttggatgggaatcagtccttggcc

SEQ ID NO: 669335 - DNA, 25 bp, Homo sapien
ttggatgggaatcagtccttggcct

SEQ ID NO: 669336 - DNA, 25 bp, Homo sapien
gtttctctaaattccacatctctct

SEQ ID NO: 669337 - DNA, 25 bp, Homo sapien
gcctcgagctttccgaagttgtttc

SEQ ID NO: 669338 - DNA, 25 bp, Homo sapien
tgatagccggtagcctctgaacgct

SEQ ID NO: 669339 - DNA, 25 bp, Homo sapien
ctgaacgctcccacgatggctgagg

SEQ ID NO: 669340 - DNA, 25 bp, Homo sapien
aagacctcatagaggggctggagac

SEQ ID NO: 669341 - DNA, 25 bp, Homo sapien
aaagacctcatagaggggctggaga

SEQ ID NO: 669342 - DNA, 25 bp, Homo sapien
gagacgttaggaaagacctcataga

SEQ ID NO: 669343 - DNA, 25 bp, Homo sapien
acgttaggaaagacctcatagaggg

SEQ ID NO: 669344 - DNA, 25 bp, Homo sapien
atcttgtagagagacttctataagc

SEQ ID NO: 669345 - DNA, 25 bp, Homo sapien
caatatcttgtagagagacttctat

SEQ ID NO: 669346 - DNA, 25 bp, Homo sapien
atccaatatcttgtagagagacttc

SEQ ID NO: 669347 - DNA, 25 bp, Homo sapien
tatcttgtagagagacttctataag

SEQ ID NO: 669348 - DNA, 25 bp, Homo sapien
ggcccagctcctctcagagctatta

SEQ ID NO: 669349 - DNA, 25 bp, Homo sapien
ccacggcccagctcctctcagagct

SEQ ID NO: 669350 - DNA, 25 bp, Homo sapien
gcccagctcctctcagagctattaa

SEQ ID NO: 669351 - DNA, 25 bp, Homo sapien
acggcccagctcctctcagagctat

SEQ ID NO: 669352 - DNA, 25 bp, Homo sapien
gcacgtcgtacaactgttcattacg

SEQ ID NO: 669353 - DNA, 25 bp, Homo sapien
tgtcccagtccaatagttcccttaa

SEQ ID NO: 669354 - DNA, 25 bp, Homo sapien
cccttaattgcctttttatagcacg

SEQ ID NO: 669355 - DNA, 25 bp, Homo sapien
tgttcattacgctgtcatatttccc

SEQ ID NO: 669356 - DNA, 25 bp, Homo sapien
gaagtccttgcttcacaaggcttgg

SEQ ID NO: 669357 - DNA, 25 bp, Homo sapien
ggtccttcctaatccaaactcctca

SEQ ID NO: 669358 - DNA, 25 bp, Homo sapien
caaactcctcatctggaagtccttg

SEQ ID NO: 669359 - DNA, 25 bp, Homo sapien
tcagggaatccgatccaggtccttc

SEQ ID NO: 669360 - DNA, 25 bp, Homo sapien
ggcgggagcgcattgggctgcgcac

SEQ ID NO: 669361 - DNA, 25 bp, Homo sapien
cgggagcgcattgggctgcgcacgg

SEQ ID NO: 669362 - DNA, 25 bp, Homo sapien
ggggcgggagcgcattgggctgcgc

SEQ ID NO: 669363 - DNA, 25 bp, Homo sapien
ggcgccgcgccagcttcgcgtagct

SEQ ID NO: 669364 - DNA, 25 bp, Homo sapien
gggtccttctgtcctttccgctgtc

SEQ ID NO: 669365 - DNA, 25 bp, Homo sapien
agccctcgccttcttgcatcgcgtt

SEQ ID NO: 669366 - DNA, 25 bp, Homo sapien
caagcggagatagcgactttgcgcc

SEQ ID NO: 669367 - DNA, 25 bp, Homo sapien
ccagctgcgagggtcatgagccaga

SEQ ID NO: 669368 - DNA, 25 bp, Homo sapien
tagcctactgtctatcgcgggcgcg

SEQ ID NO: 669369 - DNA, 25 bp, Homo sapien
tatttcacatccatccagagctcgg

SEQ ID NO: 669370 - DNA, 25 bp, Homo sapien
gagacgtttcaaccctgcagcggga

SEQ ID NO: 669371 - DNA, 25 bp, Homo sapien
tcaaggccgtgtccaagttcagtct

SEQ ID NO: 669372 - DNA, 25 bp, Homo sapien
gctgaagggtcctcagtttctcgtc

SEQ ID NO: 669373 - DNA, 25 bp, Homo sapien
ccatgaccactgacgtctcccaggc

SEQ ID NO: 669374 - DNA, 25 bp, Homo sapien
tcccatgaccactgacgtctcccag

SEQ ID NO: 669375 - DNA, 25 bp, Homo sapien
tcaggatccggcactggctgaaggg

SEQ ID NO: 669376 - DNA, 25 bp, Homo sapien
ggaacatgaaccactgccagtgcct

SEQ ID NO: 669377 - DNA, 25 bp, Homo sapien
tgtggaacatgaaccactgccagtg

SEQ ID NO: 669378 - DNA, 25 bp, Homo sapien
tgaagctgtggaacatgaaccactg

SEQ ID NO: 669379 - DNA, 25 bp, Homo sapien
agctgtggaacatgaaccactgcca

SEQ ID NO: 669380 - DNA, 25 bp, Homo sapien
tcactggcggcaacacgatgtatcc

SEQ ID NO: 669381 - DNA, 25 bp, Homo sapien
ctaggtacccaaaggacattcagga

SEQ ID NO: 669382 - DNA, 25 bp, Homo sapien
caggtactgattgttcgagtagtca

SEQ ID NO: 669383 - DNA, 25 bp, Homo sapien
gaaggaactgttggagatgagaccc

SEQ ID NO: 669384 - DNA, 25 bp, Homo sapien
tctgtggtagagactaactggcctt

SEQ ID NO: 669385 - DNA, 25 bp, Homo sapien
ccttgggccacgttggcagtgtgac

SEQ ID NO: 669386 - DNA, 25 bp, Homo sapien
gcccttcagaattcggttcacttgg

SEQ ID NO: 669387 - DNA, 25 bp, Homo sapien
tgctagatgtacctgcccaagtctg

SEQ ID NO: 669388 - DNA, 25 bp, Homo sapien
tccctgcatgatctttggaatcagc

SEQ ID NO: 669389 - DNA, 25 bp, Homo sapien
tcttttcaggcgactagccagttgc

SEQ ID NO: 669390 - DNA, 25 bp, Homo sapien
aaagatttgcagtaagtctccagct

SEQ ID NO: 669391 - DNA, 25 bp, Homo sapien
gatctggcagagtttgtctcccgca

SEQ ID NO: 669392 - DNA, 25 bp, Homo sapien
tcgcaattccttgacgaggccaggg

SEQ ID NO: 669393 - DNA, 25 bp, Homo sapien
tcctcggtctgttctggactcatgg

SEQ ID NO: 669394 - DNA, 25 bp, Homo sapien
ccggcctcgcaattccttgacgagg

SEQ ID NO: 669395 - DNA, 25 bp, Homo sapien
tgcggccgtcgtagaccgatcttgg

SEQ ID NO: 669396 - DNA, 25 bp, Homo sapien
gcttcatcagcgcttctaggaaccg

SEQ ID NO: 669397 - DNA, 25 bp, Homo sapien
tgattgcatttcacataaagggccc

SEQ ID NO: 669398 - DNA, 25 bp, Homo sapien
taggaaccgaaaaccgagctgcctg

SEQ ID NO: 669399 - DNA, 25 bp, Homo sapien
tgaagcaccggagaaaaaccgtcca

SEQ ID NO: 669400 - DNA, 25 bp, Homo sapien
atcccctttaagtcttgatgataac

SEQ ID NO: 669401 - DNA, 25 bp, Homo sapien
ggatcccctttaagtcttgatgata

SEQ ID NO: 669402 - DNA, 25 bp, Homo sapien
gggatcccctttaagtcttgatgat

SEQ ID NO: 669403 - DNA, 25 bp, Homo sapien
tggggatcccctttaagtcttgatg

SEQ ID NO: 669404 - DNA, 25 bp, Homo sapien
tgagacagccattgaccacgagcac

SEQ ID NO: 669405 - DNA, 25 bp, Homo sapien
ccagtgagtgacgaggaacttgcca

SEQ ID NO: 669406 - DNA, 25 bp, Homo sapien
tcctgagacagccattgaccacgag

SEQ ID NO: 669407 - DNA, 25 bp, Homo sapien
gtgagtgacgaggaacttgccacct

SEQ ID NO: 669408 - DNA, 25 bp, Homo sapien
gcttgttggacagctctagaggccg

SEQ ID NO: 669409 - DNA, 25 bp, Homo sapien
ctagaggccggtgtctgttcttggg

SEQ ID NO: 669410 - DNA, 25 bp, Homo sapien
gttggacagctctagaggccggtgt

SEQ ID NO: 669411 - DNA, 25 bp, Homo sapien
ttgttggacagctctagaggccggt

SEQ ID NO: 669412 - DNA, 25 bp, Homo sapien
cctttcttgttcagagtggagctct

SEQ ID NO: 669413 - DNA, 25 bp, Homo sapien
tcctttcttgttcagagtggagctc

SEQ ID NO: 669414 - DNA, 25 bp, Homo sapien
tttcttgttcagagtggagctctgg

SEQ ID NO: 669415 - DNA, 25 bp, Homo sapien
ttcctttcttgttcagagtggagct

SEQ ID NO: 669416 - DNA, 25 bp, Homo sapien
gaatccaggttctgtgcagtagacg

SEQ ID NO: 669417 - DNA, 25 bp, Homo sapien
tcctcttaggaagtggacgttccta

SEQ ID NO: 669418 - DNA, 25 bp, Homo sapien
tctgatcagggtttggaatccaggt

SEQ ID NO: 669419 - DNA, 25 bp, Homo sapien
taggaacttcgaatttatcttagac

SEQ ID NO: 669420 - DNA, 25 bp, Homo sapien
tattccctgcgttatcttacctcca

SEQ ID NO: 669421 - DNA, 25 bp, Homo sapien
tgtaaccctcagctttgagtccagc

SEQ ID NO: 669422 - DNA, 25 bp, Homo sapien
tgtatatgcaattccctctgtctgg

SEQ ID NO: 669423 - DNA, 25 bp, Homo sapien
ttagactagtgtccttgcccttgga

SEQ ID NO: 669424 - DNA, 25 bp, Homo sapien
tgtcaccagtgacaaaaactcaagc

SEQ ID NO: 669425 - DNA, 25 bp, Homo sapien
catgtgctgagcatacccatgtaac

SEQ ID NO: 669426 - DNA, 25 bp, Homo sapien
tttaacattgaggtcaagcgctgca

SEQ ID NO: 669427 - DNA, 25 bp, Homo sapien
cccatgtaactaatcagcactcaga

SEQ ID NO: 669428 - DNA, 25 bp, Homo sapien
ccttgaaggttaagaatatggagtc

SEQ ID NO: 669429 - DNA, 25 bp, Homo sapien
caaaatgtggatgacataggtgcaa

SEQ ID NO: 669430 - DNA, 25 bp, Homo sapien
aaagtctggattgatgttgtaacag

SEQ ID NO: 669431 - DNA, 25 bp, Homo sapien
atgcagtgtgctcagtaataaaatc

SEQ ID NO: 669432 - DNA, 25 bp, Homo sapien
ctgattggaagagctatggggtctt

SEQ ID NO: 669433 - DNA, 25 bp, Homo sapien
tggaagagctatggggtcttcagac

SEQ ID NO: 669434 - DNA, 25 bp, Homo sapien
aaggaaactttactgctgattggaa

SEQ ID NO: 669435 - DNA, 25 bp, Homo sapien
ggcctggctgcattgaaggaaactt

SEQ ID NO: 669436 - DNA, 25 bp, Homo sapien
tgtctttaaactgccatgggaggct

SEQ ID NO: 669437 - DNA, 25 bp, Homo sapien
aaactgccatgggaggctacctgct

SEQ ID NO: 669438 - DNA, 25 bp, Homo sapien
ttaaactgccatgggaggctacctg

SEQ ID NO: 669439 - DNA, 25 bp, Homo sapien
gggctgtctttaaactgccatggga

SEQ ID NO: 669440 - DNA, 25 bp, Homo sapien
tgaggcagcacatagctcagcctgg

SEQ ID NO: 669441 - DNA, 25 bp, Homo sapien
tgaaccccgtatgcaagaagaaaac

SEQ ID NO: 669442 - DNA, 25 bp, Homo sapien
gagagcttgaccctaaagccgcaag

SEQ ID NO: 669443 - DNA, 25 bp, Homo sapien
tgtgacggagacttatcaggaagca

SEQ ID NO: 669444 - DNA, 25 bp, Homo sapien
gctgctatagcttgccctgaaatgg

SEQ ID NO: 669445 - DNA, 25 bp, Homo sapien
aatgtgtgggctacctcctactgcg

SEQ ID NO: 669446 - DNA, 25 bp, Homo sapien
catgaaccctagagggcctgggact

SEQ ID NO: 669447 - DNA, 25 bp, Homo sapien
aactttaagcagcactcgatactgg

SEQ ID NO: 669448 - DNA, 25 bp, Homo sapien
taaatgtagattctcaggacccact

SEQ ID NO: 669449 - DNA, 25 bp, Homo sapien
cccactccagatgtggcgatactgc

SEQ ID NO: 669450 - DNA, 25 bp, Homo sapien
caaacttcgttcactatagcctctg

SEQ ID NO: 669451 - DNA, 25 bp, Homo sapien
tgccctgttagccttcagggatgac

SEQ ID NO: 669452 - DNA, 25 bp, Homo sapien
caccggtttgctggctttgtaataa

SEQ ID NO: 669453 - DNA, 25 bp, Homo sapien
cccagggcacataagagcaaaggct

SEQ ID NO: 669454 - DNA, 25 bp, Homo sapien
ccaatggtcagtggatgactctgca

SEQ ID NO: 669455 - DNA, 25 bp, Homo sapien
ggtgctccttttaagatgcccagaa

SEQ ID NO: 669456 - DNA, 25 bp, Homo sapien
ttagtatggcatggtcatgggtgca

SEQ ID NO: 669457 - DNA, 25 bp, Homo sapien
gcctcgataaagctgcagcagggtg

SEQ ID NO: 669458 - DNA, 25 bp, Homo sapien
tgtctgcttgccagcctcgataaag

SEQ ID NO: 669459 - DNA, 25 bp, Homo sapien
tcatgggtgcaatggaggtcttgtc

SEQ ID NO: 669460 - DNA, 25 bp, Homo sapien
gctggtaccaccacgaggttccaat

SEQ ID NO: 669461 - DNA, 25 bp, Homo sapien
caccactgtatctgttgatgacgca

SEQ ID NO: 669462 - DNA, 25 bp, Homo sapien
gagtcacgtttcttaccagtgccta

SEQ ID NO: 669463 - DNA, 25 bp, Homo sapien
tgtgcttatgaattggctgtccggc

SEQ ID NO: 669464 - DNA, 25 bp, Homo sapien
gatgtgagagtggacacacatgcag

SEQ ID NO: 669465 - DNA, 25 bp, Homo sapien
tgatgtgagagtggacacacatgca

SEQ ID NO: 669466 - DNA, 25 bp, Homo sapien
atgtgagagtggacacacatgcagc

SEQ ID NO: 669467 - DNA, 25 bp, Homo sapien
gctatgctgtcaaggagaacactct

SEQ ID NO: 669468 - DNA, 25 bp, Homo sapien
taactgctccgtgttcagactcctg

SEQ ID NO: 669469 - DNA, 25 bp, Homo sapien
ttcgctggtatcaggtcccggctca

SEQ ID NO: 669470 - DNA, 25 bp, Homo sapien
cttagaaacttgaacaaagagcggc

SEQ ID NO: 669471 - DNA, 25 bp, Homo sapien
cacaattttaatagtcatgcactac

SEQ ID NO: 669472 - DNA, 25 bp, Homo sapien
atatgttggcagtctcataagatta

SEQ ID NO: 669473 - DNA, 25 bp, Homo sapien
aatgacagaccacgtatatgttggc

SEQ ID NO: 669474 - DNA, 25 bp, Homo sapien
caggtttgtagcctgttttgcattt

SEQ ID NO: 669475 - DNA, 25 bp, Homo sapien
tcaggctatttgctgggttagtgct

SEQ ID NO: 669476 - DNA, 25 bp, Homo sapien
gctgggttagtgctgtaatctgtgg

SEQ ID NO: 669477 - DNA, 25 bp, Homo sapien
tgcgtgcaaggttccactctcgggc

SEQ ID NO: 669478 - DNA, 25 bp, Homo sapien
ccaaaatggctgagcagggtcacgt

SEQ ID NO: 669479 - DNA, 25 bp, Homo sapien
gccacgctcgtaaaaggtcacctga

SEQ ID NO: 669480 - DNA, 25 bp, Homo sapien
gttcttcctaagtgtgcggccgcca

SEQ ID NO: 669481 - DNA, 25 bp, Homo sapien
cttgaacctctgaaacacaactctg

SEQ ID NO: 669482 - DNA, 25 bp, Homo sapien
ttgaacctctgaaacacaactctgt

SEQ ID NO: 669483 - DNA, 25 bp, Homo sapien
tgaacctctgaaacacaactctgtt

SEQ ID NO: 669484 - DNA, 25 bp, Homo sapien
catatacactttgtccctgttggca

SEQ ID NO: 669485 - DNA, 25 bp, Homo sapien
gatggacacagttgacatatacact

SEQ ID NO: 669486 - DNA, 25 bp, Homo sapien
caggaagtacagagccaagacaggt

SEQ ID NO: 669487 - DNA, 25 bp, Homo sapien
tgcccttggaatgacccgagtaggt

SEQ ID NO: 669488 - DNA, 25 bp, Homo sapien
tcaaatctgggtcattatcatatcc

SEQ ID NO: 669489 - DNA, 25 bp, Homo sapien
gtggtgagaaccttcaaaatctccc

SEQ ID NO: 669490 - DNA, 25 bp, Homo sapien
gaagtctatggcacattattgttaa

SEQ ID NO: 669491 - DNA, 25 bp, Homo sapien
gttttgaattgacacataactgtgc

SEQ ID NO: 669492 - DNA, 25 bp, Homo sapien
tgacattccatacatacctaaaacc

SEQ ID NO: 669493 - DNA, 25 bp, Homo sapien
tgtctgaccaccactactattatgt

SEQ ID NO: 669494 - DNA, 25 bp, Homo sapien
gacaacgcagtcttggcaatggaac

SEQ ID NO: 669495 - DNA, 25 bp, Homo sapien
ctattatgtcctatcatgacattcc

SEQ ID NO: 669496 - DNA, 25 bp, Homo sapien
tgcatttttgctttagtgttttcta

SEQ ID NO: 669497 - DNA, 25 bp, Homo sapien
catttttgctttagtgttttctaca

SEQ ID NO: 669498 - DNA, 25 bp, Homo sapien
tttgctttagtgttttctacagaac

SEQ ID NO: 669499 - DNA, 25 bp, Homo sapien
tttttgctttagtgttttctacaga

SEQ ID NO: 669500 - DNA, 25 bp, Homo sapien
tgtatagctttctttactggggctt

SEQ ID NO: 669501 - DNA, 25 bp, Homo sapien
atcttgtatagctttctttactggg

SEQ ID NO: 669502 - DNA, 25 bp, Homo sapien
aaatcatcatcattagcagcagcag

SEQ ID NO: 669503 - DNA, 25 bp, Homo sapien
ggagtatcttgtatagctttcttta

SEQ ID NO: 669504 - DNA, 25 bp, Homo sapien
cttccagatatacttaagaatttca

SEQ ID NO: 669505 - DNA, 25 bp, Homo sapien
ttccagatatacttaagaatttcac

SEQ ID NO: 669506 - DNA, 25 bp, Homo sapien
ccctaagggaaatcattggctgtac

SEQ ID NO: 669507 - DNA, 25 bp, Homo sapien
ggcctcacagggctcatgtccgtgt

SEQ ID NO: 669508 - DNA, 25 bp, Homo sapien
caactgtaagaccaccggtggtatt

SEQ ID NO: 669509 - DNA, 25 bp, Homo sapien
tcacagggctcatgtccgtgtccat

SEQ ID NO: 669510 - DNA, 25 bp, Homo sapien
gaaacttagctttttgccttcgatg

SEQ ID NO: 669511 - DNA, 25 bp, Homo sapien
gaaactggcccagctttgaatatgg

SEQ ID NO: 669512 - DNA, 25 bp, Homo sapien
tgaatatggtaattcctgttctgcc

SEQ ID NO: 669513 - DNA, 25 bp, Homo sapien
taaacctgagtttgtctgtatttcc

SEQ ID NO: 669514 - DNA, 25 bp, Homo sapien
cctcgggttgctggcggctgaattc

SEQ ID NO: 669515 - DNA, 25 bp, Homo sapien
tccgcagagccctgtataaccagct

SEQ ID NO: 669516 - DNA, 25 bp, Homo sapien
cagcttcagccgctgtggcttgggc

SEQ ID NO: 669517 - DNA, 25 bp, Homo sapien
ggctgaattcaggtcggcttcttca

SEQ ID NO: 669518 - DNA, 25 bp, Homo sapien
ggcctgttcattagtcctttcttcc

SEQ ID NO: 669519 - DNA, 25 bp, Homo sapien
gctgcccacagcatttgcatccttg

SEQ ID NO: 669520 - DNA, 25 bp, Homo sapien
gtgggctgcggcctgttcattagtc

SEQ ID NO: 669521 - DNA, 25 bp, Homo sapien
cctgtggaatgtttggttgctctga

SEQ ID NO: 669522 - DNA, 25 bp, Homo sapien
tggacattgtcgtcacagggagccc

SEQ ID NO: 669523 - DNA, 25 bp, Homo sapien
gatgaggcggagacacttgacaaca

SEQ ID NO: 669524 - DNA, 25 bp, Homo sapien
gagcccctggttcagccagtgcgct

SEQ ID NO: 669525 - DNA, 25 bp, Homo sapien
tgacaacaagtaaccagatgagtgg

SEQ ID NO: 669526 - DNA, 25 bp, Homo sapien
ccaggttagtgaggcagcatgcaaa

SEQ ID NO: 669527 - DNA, 25 bp, Homo sapien
tgtacaatgtaagtcttactccaag

SEQ ID NO: 669528 - DNA, 25 bp, Homo sapien
cttcagttgcagactcagaaggagg

SEQ ID NO: 669529 - DNA, 25 bp, Homo sapien
agaccaccagggaacttgtacaatg

SEQ ID NO: 669530 - DNA, 25 bp, Homo sapien
cagattagtgacaccacaactgggc

SEQ ID NO: 669531 - DNA, 25 bp, Homo sapien
cccagattagtgacaccacaactgg

SEQ ID NO: 669532 - DNA, 25 bp, Homo sapien
gacccagattagtgacaccacaact

SEQ ID NO: 669533 - DNA, 25 bp, Homo sapien
gattagtgacaccacaactgggcat

SEQ ID NO: 669534 - DNA, 25 bp, Homo sapien
ccttgcccaaaacggatgcagcggg

SEQ ID NO: 669535 - DNA, 25 bp, Homo sapien
agacttccgggtcggcgttgcacac

SEQ ID NO: 669536 - DNA, 25 bp, Homo sapien
tcgtcctccgcaaagagtgactgag

SEQ ID NO: 669537 - DNA, 25 bp, Homo sapien
cgcaggcagagacggcgagacttcc

SEQ ID NO: 669538 - DNA, 25 bp, Homo sapien
gacactacagcagatatagcccagg

SEQ ID NO: 669539 - DNA, 25 bp, Homo sapien
cataatgtgaagaacgttgggaagc

SEQ ID NO: 669540 - DNA, 25 bp, Homo sapien
tcttggaccagcctctgtttgtgag

SEQ ID NO: 669541 - DNA, 25 bp, Homo sapien
gtagcactgtaaccaggacactaca

SEQ ID NO: 669542 - DNA, 25 bp, Homo sapien
ccaggcgggtgcctaaattggagtg

SEQ ID NO: 669543 - DNA, 25 bp, Homo sapien
tgccaggcgggtgcctaaattggag

SEQ ID NO: 669544 - DNA, 25 bp, Homo sapien
aagccaggaacatccccactttcct

SEQ ID NO: 669545 - DNA, 25 bp, Homo sapien
tcctctatgctcctccacatcgctc

SEQ ID NO: 669546 - DNA, 25 bp, Homo sapien
ttagaacagggtccctgggctcctg

SEQ ID NO: 669547 - DNA, 25 bp, Homo sapien
cttagaacagggtccctgggctcct

SEQ ID NO: 669548 - DNA, 25 bp, Homo sapien
ttacccaagctaggtagatttttgc

SEQ ID NO: 669549 - DNA, 25 bp, Homo sapien
aatgtgcttgcatcttattacccaa

SEQ ID NO: 669550 - DNA, 25 bp, Homo sapien
tatatagtctgcataaagggagaca

SEQ ID NO: 669551 - DNA, 25 bp, Homo sapien
atttttgcttggctgagctgagatc

SEQ ID NO: 669552 - DNA, 25 bp, Homo sapien
ctatcacggcatggggcttttcggt

SEQ ID NO: 669553 - DNA, 25 bp, Homo sapien
ggcatggggcttttcggtgtactta

SEQ ID NO: 669554 - DNA, 25 bp, Homo sapien
ggcttttcggtgtacttatcccagc

SEQ ID NO: 669555 - DNA, 25 bp, Homo sapien
cggtgtacttatcccagccctgatc

SEQ ID NO: 669556 - DNA, 25 bp, Homo sapien
ctcccatctgtgtgtgggggagagg

SEQ ID NO: 669557 - DNA, 25 bp, Homo sapien
tgggggagaggaggtgcttcaaggc

SEQ ID NO: 669558 - DNA, 25 bp, Homo sapien
gggagaggaggtgcttcaaggccat

SEQ ID NO: 669559 - DNA, 25 bp, Homo sapien
tcccatctgtgtgtgggggagagga

SEQ ID NO: 669560 - DNA, 25 bp, Homo sapien
gaggcttccttcctgcgcgttccag

SEQ ID NO: 669561 - DNA, 25 bp, Homo sapien
cttgttcgcaggtgatgagaggaag

SEQ ID NO: 669562 - DNA, 25 bp, Homo sapien
tgccctgacatcttgtacaggtgag

SEQ ID NO: 669563 - DNA, 25 bp, Homo sapien
ctggaggcttccttcctgcgcgttc

SEQ ID NO: 669564 - DNA, 25 bp, Homo sapien
cacagaaaaggctggcgtgaacttc

SEQ ID NO: 669565 - DNA, 25 bp, Homo sapien
tcctggaagcatgaggactggaggt

SEQ ID NO: 669566 - DNA, 25 bp, Homo sapien
aagcatgaggactggaggtgacaca

SEQ ID NO: 669567 - DNA, 25 bp, Homo sapien
aaggctggcgtgaacttccagacac

SEQ ID NO: 669568 - DNA, 25 bp, Homo sapien
tcagagttccagctggaggtggccc

SEQ ID NO: 669569 - DNA, 25 bp, Homo sapien
ccagctggaggtggcccggactgca

SEQ ID NO: 669570 - DNA, 25 bp, Homo sapien
ctgaggagcaagagctcagagttcc

SEQ ID NO: 669571 - DNA, 25 bp, Homo sapien
tggcccggactgcagacttggccat

SEQ ID NO: 669572 - DNA, 25 bp, Homo sapien
tagacatctgcagtgactgtggctg

SEQ ID NO: 669573 - DNA, 25 bp, Homo sapien
tgactgtggctggcagcgggtagga

SEQ ID NO: 669574 - DNA, 25 bp, Homo sapien
ctagacatctgcagtgactgtggct

SEQ ID NO: 669575 - DNA, 25 bp, Homo sapien
ctgtggctggcagcgggtaggaggt

SEQ ID NO: 669576 - DNA, 25 bp, Homo sapien
gcagaagcggtgtccaagagaagca

SEQ ID NO: 669577 - DNA, 25 bp, Homo sapien
aagcggtgtccaagagaagcaattg

SEQ ID NO: 669578 - DNA, 25 bp, Homo sapien
gtggtggcagaagcggtgtccaaga

SEQ ID NO: 669579 - DNA, 25 bp, Homo sapien
gaagcaattgtaccaggggaagcaa

SEQ ID NO: 669580 - DNA, 25 bp, Homo sapien
gggctccttgagttgtgggttgagc

SEQ ID NO: 669581 - DNA, 25 bp, Homo sapien
tccttgagttgtgggttgagctcca

SEQ ID NO: 669582 - DNA, 25 bp, Homo sapien
gctccttgagttgtgggttgagctc

SEQ ID NO: 669583 - DNA, 25 bp, Homo sapien
cagggctccttgagttgtgggttga

SEQ ID NO: 669584 - DNA, 25 bp, Homo sapien
gggctcaccaggcagctcagaaagc

SEQ ID NO: 669585 - DNA, 25 bp, Homo sapien
gtgggaggaaggtgtgggctcacca

SEQ ID NO: 669586 - DNA, 25 bp, Homo sapien
gaaggtgtgggctcaccaggcagct

SEQ ID NO: 669587 - DNA, 25 bp, Homo sapien
aggtgtgggctcaccaggcagctca

SEQ ID NO: 669588 - DNA, 25 bp, Homo sapien
catctttaataaagtccatcattgg

SEQ ID NO: 669589 - DNA, 25 bp, Homo sapien
agtccatcattggatatgaagatgc

SEQ ID NO: 669590 - DNA, 25 bp, Homo sapien
catcattggatatgaagatgctgtg

SEQ ID NO: 669591 - DNA, 25 bp, Homo sapien
cattggatatgaagatgctgtgcct

SEQ ID NO: 669592 - DNA, 25 bp, Homo sapien
tctgggtggatgtgccctgtagaca

SEQ ID NO: 669593 - DNA, 25 bp, Homo sapien
ttcacaaagtctgggtggatgtgcc

SEQ ID NO: 669594 - DNA, 25 bp, Homo sapien
tggatgtgccctgtagacacaatgt

SEQ ID NO: 669595 - DNA, 25 bp, Homo sapien
cctttggattcacaaagtctgggtg

SEQ ID NO: 669596 - DNA, 25 bp, Homo sapien
agcagaaatcttgatgggacgtgaa

SEQ ID NO: 669597 - DNA, 25 bp, Homo sapien
catctgtgtctatcttgacatccac

SEQ ID NO: 669598 - DNA, 25 bp, Homo sapien
gaagatttaatccagcagagggatg

SEQ ID NO: 669599 - DNA, 25 bp, Homo sapien
tcttgatgggacgtgaagaacacca

SEQ ID NO: 669600 - DNA, 25 bp, Homo sapien
tgattcagagatttgaccttctcca

SEQ ID NO: 669601 - DNA, 25 bp, Homo sapien
ttgattcagagatttgaccttctcc

SEQ ID NO: 669602 - DNA, 25 bp, Homo sapien
gattcagagatttgaccttctccag

SEQ ID NO: 669603 - DNA, 25 bp, Homo sapien
attcagagatttgaccttctccaga

SEQ ID NO: 669604 - DNA, 25 bp, Homo sapien
aaggacgttgccagttccatagagc

SEQ ID NO: 669605 - DNA, 25 bp, Homo sapien
ccacttgagtaaagtaaactgtaag

SEQ ID NO: 669606 - DNA, 25 bp, Homo sapien
gcggatactgggctttcactaacat

SEQ ID NO: 669607 - DNA, 25 bp, Homo sapien
taaacagctcgttaaaatgcaggct

SEQ ID NO: 669608 - DNA, 25 bp, Homo sapien
gaacgccagcgggccctgaactctg

SEQ ID NO: 669609 - DNA, 25 bp, Homo sapien
cgggagaacgccagcgggccctgaa

SEQ ID NO: 669610 - DNA, 25 bp, Homo sapien
cctgaactctggccgcctgttttta

SEQ ID NO: 669611 - DNA, 25 bp, Homo sapien
aggacctggcgccttggggagcagg

SEQ ID NO: 669612 - DNA, 25 bp, Homo sapien
agcggagtttaatggctgagagctg

SEQ ID NO: 669613 - DNA, 25 bp, Homo sapien
agctgggcagcaggcttatcctggg

SEQ ID NO: 669614 - DNA, 25 bp, Homo sapien
cggagtttaatggctgagagctggg

SEQ ID NO: 669615 - DNA, 25 bp, Homo sapien
gagctgggcagcaggcttatcctgg

SEQ ID NO: 669616 - DNA, 25 bp, Homo sapien
ggtgcctggctggatacttccaggg

SEQ ID NO: 669617 - DNA, 25 bp, Homo sapien
ggtggggtgcctggctggatacttc

SEQ ID NO: 669618 - DNA, 25 bp, Homo sapien
gggtgcctggctggatacttccagg

SEQ ID NO: 669619 - DNA, 25 bp, Homo sapien
tggggtgcctggctggatacttcca

SEQ ID NO: 669620 - DNA, 25 bp, Homo sapien
ctcagggccaacagagccgtgtgtg

SEQ ID NO: 669621 - DNA, 25 bp, Homo sapien
tgtgtactatagctgacatccaatc

SEQ ID NO: 669622 - DNA, 25 bp, Homo sapien
tgtgtgtgaccaagagagccgtcat

SEQ ID NO: 669623 - DNA, 25 bp, Homo sapien
tagtggaagtaggagtgtcccaata

SEQ ID NO: 669624 - DNA, 25 bp, Homo sapien
cactgggaacccaaggagggtggct

SEQ ID NO: 669625 - DNA, 25 bp, Homo sapien
tgaacagggggaacggacactggga

SEQ ID NO: 669626 - DNA, 25 bp, Homo sapien
ctagtctgcaaaggtgaccgtttgc

SEQ ID NO: 669627 - DNA, 25 bp, Homo sapien
cagagtggctggagttgaacagggg

SEQ ID NO: 669628 - DNA, 25 bp, Homo sapien
cctgggaccaatgcctgtaaggatg

SEQ ID NO: 669629 - DNA, 25 bp, Homo sapien
ggcccctgggaccaatgcctgtaag

SEQ ID NO: 669630 - DNA, 25 bp, Homo sapien
agaggcccctgggaccaatgcctgt

SEQ ID NO: 669631 - DNA, 25 bp, Homo sapien
cccctgggaccaatgcctgtaagga

SEQ ID NO: 669632 - DNA, 25 bp, Homo sapien
gccccagcctgctcctcttccccat

SEQ ID NO: 669633 - DNA, 25 bp, Homo sapien
cttggggccaggtccacagccaggt

SEQ ID NO: 669634 - DNA, 25 bp, Homo sapien
aggtggccagccccagcctgctcct

SEQ ID NO: 669635 - DNA, 25 bp, Homo sapien
gccaggtccacagccaggtggccag

SEQ ID NO: 669636 - DNA, 25 bp, Homo sapien
ttgggtcaagccagggaagatcctt

SEQ ID NO: 669637 - DNA, 25 bp, Homo sapien
tgctaatgttctgccggacatggct

SEQ ID NO: 669638 - DNA, 25 bp, Homo sapien
ctcaggagtccgaatttgggatgaa

SEQ ID NO: 669639 - DNA, 25 bp, Homo sapien
gggcaatgtgagctatgctccctag

SEQ ID NO: 669640 - DNA, 25 bp, Homo sapien
tccaccctctagtctgcatgtttgt

SEQ ID NO: 669641 - DNA, 25 bp, Homo sapien
catgtttgtgtagagttttaggata

SEQ ID NO: 669642 - DNA, 25 bp, Homo sapien
tttaggatagggctggagtgtctaa

SEQ ID NO: 669643 - DNA, 25 bp, Homo sapien
gagtgtctaagagagtgaggctcca

SEQ ID NO: 669644 - DNA, 25 bp, Homo sapien
tctgcttatatggtcctggtagtgg

SEQ ID NO: 669645 - DNA, 25 bp, Homo sapien
ttggtcttctgcttatatggtcctg

SEQ ID NO: 669646 - DNA, 25 bp, Homo sapien
gtcttctgcttatatggtcctggta

SEQ ID NO: 669647 - DNA, 25 bp, Homo sapien
tgcttatatggtcctggtagtggtg

SEQ ID NO: 669648 - DNA, 25 bp, Homo sapien
ttggagtctcaatcccaaacccaag

SEQ ID NO: 669649 - DNA, 25 bp, Homo sapien
ggcagcccagaattctcaatgtgga

SEQ ID NO: 669650 - DNA, 25 bp, Homo sapien
gggtacaaccttctatctcaaagtg

SEQ ID NO: 669651 - DNA, 25 bp, Homo sapien
tataggactcttggatgatttgctc

SEQ ID NO: 669652 - DNA, 25 bp, Homo sapien
cagccatgctgatcgggagtctgca

SEQ ID NO: 669653 - DNA, 25 bp, Homo sapien
cctgttccggcaagtgtgggttagt

SEQ ID NO: 669654 - DNA, 25 bp, Homo sapien
agtctgcactggcacagctggcggc

SEQ ID NO: 669655 - DNA, 25 bp, Homo sapien
tgcacagcaccctcatcggaaagtg

SEQ ID NO: 669656 - DNA, 25 bp, Homo sapien
tcgtgctgggcactatcattttccc

SEQ ID NO: 669657 - DNA, 25 bp, Homo sapien
cgtgctgggcactatcattttcccc

SEQ ID NO: 669658 - DNA, 25 bp, Homo sapien
tgggtcgtgctgggcactatcattt

SEQ ID NO: 669659 - DNA, 25 bp, Homo sapien
ggtcgtgctgggcactatcattttc

SEQ ID NO: 669660 - DNA, 25 bp, Homo sapien
tattagtgggttctttagactctca

SEQ ID NO: 669661 - DNA, 25 bp, Homo sapien
ctgagtattagtgggttctttagac

SEQ ID NO: 669662 - DNA, 25 bp, Homo sapien
tagtgggttctttagactctcattc

SEQ ID NO: 669663 - DNA, 25 bp, Homo sapien
tctctgagtattagtgggttcttta

SEQ ID NO: 669664 - DNA, 25 bp, Homo sapien
ggactggatggtaatgtcctctagc

SEQ ID NO: 669665 - DNA, 25 bp, Homo sapien
ctctggactggatggtaatgtcctc

SEQ ID NO: 669666 - DNA, 25 bp, Homo sapien
tcccagagactggaacctcacagag

SEQ ID NO: 669667 - DNA, 25 bp, Homo sapien
ttgagtttgcaatgaggttcccaga

SEQ ID NO: 669668 - DNA, 25 bp, Homo sapien
gaatttgcacctgtggatttaactc

SEQ ID NO: 669669 - DNA, 25 bp, Homo sapien
ggcaattttatcctgtatatcctgc

SEQ ID NO: 669670 - DNA, 25 bp, Homo sapien
cattatgagctactgaaggcaggtc

SEQ ID NO: 669671 - DNA, 25 bp, Homo sapien
aaactgtggctagtccagaccaggc

SEQ ID NO: 669672 - DNA, 25 bp, Homo sapien
tataactgcaagtagcccagtctgg

SEQ ID NO: 669673 - DNA, 25 bp, Homo sapien
gaccctctaatgacctgagcactgg

SEQ ID NO: 669674 - DNA, 25 bp, Homo sapien
gtttgctcaaatgtgtaatgaggcc

SEQ ID NO: 669675 - DNA, 25 bp, Homo sapien
ggaatatttgtggggacctccgtca

SEQ ID NO: 669676 - DNA, 25 bp, Homo sapien
tgctcaaatgtgtaatgaggcccac

SEQ ID NO: 669677 - DNA, 25 bp, Homo sapien
tgatgaggaattgatcagccaagca

SEQ ID NO: 669678 - DNA, 25 bp, Homo sapien
ctgcctccatgggtaaacagctgag

SEQ ID NO: 669679 - DNA, 25 bp, Homo sapien
ctgagtaagagaggctatgagtctc

SEQ ID NO: 669680 - DNA, 25 bp, Homo sapien
ggatagacggctgtgcagaactgtc

SEQ ID NO: 669681 - DNA, 25 bp, Homo sapien
agagaggctatgagtctcaattttc

SEQ ID NO: 669682 - DNA, 25 bp, Homo sapien
gcaagcattcttgggtcatctggga

SEQ ID NO: 669683 - DNA, 25 bp, Homo sapien
tcagaagcttaacgtttcctttaga

SEQ ID NO: 669684 - DNA, 25 bp, Homo sapien
tctgatttgagaacgttgctccgag

SEQ ID NO: 669685 - DNA, 25 bp, Homo sapien
tgctccgaggattagggagaaacat

SEQ ID NO: 669686 - DNA, 25 bp, Homo sapien
ttggtagaacacaggtcctttgtag

SEQ ID NO: 669687 - DNA, 25 bp, Homo sapien
ttccaggtactttaggccccagcta

SEQ ID NO: 669688 - DNA, 25 bp, Homo sapien
cttccaggtactttaggccccagct

SEQ ID NO: 669689 - DNA, 25 bp, Homo sapien
caggagttagttggtagaacacagg

SEQ ID NO: 669690 - DNA, 25 bp, Homo sapien
tggtggaatttagcagtctcaggac

SEQ ID NO: 669691 - DNA, 25 bp, Homo sapien
taactctttgttgtagagagctgtc

SEQ ID NO: 669692 - DNA, 25 bp, Homo sapien
agagacagtgattggatgcagtttt

SEQ ID NO: 669693 - DNA, 25 bp, Homo sapien
ttttagattggtacaagagacagtg

SEQ ID NO: 669694 - DNA, 25 bp, Homo sapien
cgagtgaatgctcagctggtaaaca

SEQ ID NO: 669695 - DNA, 25 bp, Homo sapien
ctgagtttctgccagtgcgagtgaa

SEQ ID NO: 669696 - DNA, 25 bp, Homo sapien
ttctgccagtgcgagtgaatgctca

SEQ ID NO: 669697 - DNA, 25 bp, Homo sapien
gagggcatagagtcccctgggtcct

SEQ ID NO: 669698 - DNA, 25 bp, Homo sapien
gcggcggccccgtcagagagtggca

SEQ ID NO: 669699 - DNA, 25 bp, Homo sapien
caaggagatggatctggtgtgaatg

SEQ ID NO: 669700 - DNA, 25 bp, Homo sapien
gagtggcagagtggtacaaggagat

SEQ ID NO: 669701 - DNA, 25 bp, Homo sapien
ctcctgaggagtgccagcaacacct

SEQ ID NO: 669702 - DNA, 25 bp, Homo sapien
cagtgtagattcagctgtggtgtac

SEQ ID NO: 669703 - DNA, 25 bp, Homo sapien
actcatggaggccactgcatcttct

SEQ ID NO: 669704 - DNA, 25 bp, Homo sapien
gattcagctgtggtgtactcatgga

SEQ ID NO: 669705 - DNA, 25 bp, Homo sapien
gagtctctttcaatctcgttttgca

SEQ ID NO: 669706 - DNA, 25 bp, Homo sapien
tcaggcttagttctcagaaaagcat

SEQ ID NO: 669707 - DNA, 25 bp, Homo sapien
gcattctagatgtttggtttgattc

SEQ ID NO: 669708 - DNA, 25 bp, Homo sapien
ctaattatacggacgaacaggctca

SEQ ID NO: 669709 - DNA, 25 bp, Homo sapien
atctgatccacttcaggcttagttc

SEQ ID NO: 669710 - DNA, 25 bp, Homo sapien
ggagcattctgcgttccaagtgcca

SEQ ID NO: 669711 - DNA, 25 bp, Homo sapien
gatggagcattctgcgttccaagtg

SEQ ID NO: 669712 - DNA, 25 bp, Homo sapien
agcattctgcgttccaagtgccagg

SEQ ID NO: 669713 - DNA, 25 bp, Homo sapien
tggatggagcattctgcgttccaag

SEQ ID NO: 669714 - DNA, 25 bp, Homo sapien
tgaagggaacaccaagcctttgatt

SEQ ID NO: 669715 - DNA, 25 bp, Homo sapien
ctgtactgaagggaacaccaagcct

SEQ ID NO: 669716 - DNA, 25 bp, Homo sapien
aagcctttgattccataaggtccct

SEQ ID NO: 669717 - DNA, 25 bp, Homo sapien
ttgattccataaggtccctccttca

SEQ ID NO: 669718 - DNA, 25 bp, Homo sapien
tggaggctcggccatattaattcct

SEQ ID NO: 669719 - DNA, 25 bp, Homo sapien
gctcggcaaggagtgggtcacttct

SEQ ID NO: 669720 - DNA, 25 bp, Homo sapien
attcctttcattacgcgggggtcag

SEQ ID NO: 669721 - DNA, 25 bp, Homo sapien
taatcaattagaggcctggccaagc

SEQ ID NO: 669722 - DNA, 25 bp, Homo sapien
gatggggatgggcacgtggcttccc

SEQ ID NO: 669723 - DNA, 25 bp, Homo sapien
ctatccgtagattccctgtatcatc

SEQ ID NO: 669724 - DNA, 25 bp, Homo sapien
atgagccgcatctgcgtctggatgg

SEQ ID NO: 669725 - DNA, 25 bp, Homo sapien
gattccctgtatcatcctagtctgg

SEQ ID NO: 669726 - DNA, 25 bp, Homo sapien
cattccaggatcctggatgtgggcg

SEQ ID NO: 669727 - DNA, 25 bp, Homo sapien
tgagccttgctggaacacttcgtcc

SEQ ID NO: 669728 - DNA, 25 bp, Homo sapien
ctctggaatcctggggccacgtata

SEQ ID NO: 669729 - DNA, 25 bp, Homo sapien
tgtctgcgtcctgtcgaggagctct

SEQ ID NO: 669730 - DNA, 25 bp, Homo sapien
aggggcaagttgatgtgggccagaa

SEQ ID NO: 669731 - DNA, 25 bp, Homo sapien
gtgggccagaaatgttccctgcact

SEQ ID NO: 669732 - DNA, 25 bp, Homo sapien
gggccagaaatgttccctgcactgc

SEQ ID NO: 669733 - DNA, 25 bp, Homo sapien
gcctggcttagcttccaggggcaag

SEQ ID NO: 669734 - DNA, 25 bp, Homo sapien
tcctggaatgctgagctagcaacca

SEQ ID NO: 669735 - DNA, 25 bp, Homo sapien
tcctctgacggtggggggtggctcc

SEQ ID NO: 669736 - DNA, 25 bp, Homo sapien
cctggaatgctgagctagcaaccat

SEQ ID NO: 669737 - DNA, 25 bp, Homo sapien
ggctcctggaatgctgagctagcaa

SEQ ID NO: 669738 - DNA, 25 bp, Homo sapien
taaaacaggtggtgaaggccaaagc

SEQ ID NO: 669739 - DNA, 25 bp, Homo sapien
ataaaacaggtggtgaaggccaaag

SEQ ID NO: 669740 - DNA, 25 bp, Homo sapien
gattgttatgtaatgttcggcagca

SEQ ID NO: 669741 - DNA, 25 bp, Homo sapien
tgttatgtaatgttcggcagcagga

SEQ ID NO: 669742 - DNA, 25 bp, Homo sapien
ttcccttgattgttatgtaatgttc

SEQ ID NO: 669743 - DNA, 25 bp, Homo sapien
tgtaatgttcggcagcaggaggtaa

SEQ ID NO: 669744 - DNA, 25 bp, Homo sapien
agccacagtgattgagctcagcagc

SEQ ID NO: 669745 - DNA, 25 bp, Homo sapien
gtgattgagctcagcagccaggtcc

SEQ ID NO: 669746 - DNA, 25 bp, Homo sapien
gggagccacagtgattgagctcagc

SEQ ID NO: 669747 - DNA, 25 bp, Homo sapien
cgtggggagccacagtgattgagct

SEQ ID NO: 669748 - DNA, 25 bp, Homo sapien
ctgagtgtcataaatcaggcctatt

SEQ ID NO: 669749 - DNA, 25 bp, Homo sapien
tgagtgtcataaatcaggcctatta

SEQ ID NO: 669750 - DNA, 25 bp, Homo sapien
gagtgtcataaatcaggcctattac

SEQ ID NO: 669751 - DNA, 25 bp, Homo sapien
gcatactgttaaaccagggctgaca

SEQ ID NO: 669752 - DNA, 25 bp, Homo sapien
tcatgacactctggctgggtgttgc

SEQ ID NO: 669753 - DNA, 25 bp, Homo sapien
ggcagatgccatagccaagaacctg

SEQ ID NO: 669754 - DNA, 25 bp, Homo sapien
tggctgggtgttgccaggaatctta

SEQ ID NO: 669755 - DNA, 25 bp, Homo sapien
gctccccagtggactaggcagaaga

SEQ ID NO: 669756 - DNA, 25 bp, Homo sapien
tattggctccccagtggactaggca

SEQ ID NO: 669757 - DNA, 25 bp, Homo sapien
gcacagtattggctccccagtggac

SEQ ID NO: 669758 - DNA, 25 bp, Homo sapien
caattagaccccagatggcagcact

SEQ ID NO: 669759 - DNA, 25 bp, Homo sapien
caggatccccctcaggtgtgggtgt

SEQ ID NO: 669760 - DNA, 25 bp, Homo sapien
ccaggatccccctcaggtgtgggtg

SEQ ID NO: 669761 - DNA, 25 bp, Homo sapien
tccaggatccccctcaggtgtgggt

SEQ ID NO: 669762 - DNA, 25 bp, Homo sapien
cactcatcttccttagggctcccct

SEQ ID NO: 669763 - DNA, 25 bp, Homo sapien
tcatcttccttagggctccccttgc

SEQ ID NO: 669764 - DNA, 25 bp, Homo sapien
ctcatcttccttagggctccccttg

SEQ ID NO: 669765 - DNA, 25 bp, Homo sapien
cccactcatcttccttagggctccc

SEQ ID NO: 669766 - DNA, 25 bp, Homo sapien
ccccatttggacctttacttctgtg

SEQ ID NO: 669767 - DNA, 25 bp, Homo sapien
cctttacttctgtgtgtcttccgga

SEQ ID NO: 669768 - DNA, 25 bp, Homo sapien
cacagatggcaggagcacggaatcg

SEQ ID NO: 669769 - DNA, 25 bp, Homo sapien
aatcggaagcacttggcaatgaagc

SEQ ID NO: 669770 - DNA, 25 bp, Homo sapien
aaattcacattcattgttggccgcc

SEQ ID NO: 669771 - DNA, 25 bp, Homo sapien
aattcacattcattgttggccgccc

SEQ ID NO: 669772 - DNA, 25 bp, Homo sapien
cacactcaggggcaaattcacattc

SEQ ID NO: 669773 - DNA, 25 bp, Homo sapien
tcacattcattgttggccgcccaca

SEQ ID NO: 669774 - DNA, 25 bp, Homo sapien
tcatctccatcgttacacacagact

SEQ ID NO: 669775 - DNA, 25 bp, Homo sapien
agactctcatctccatcgttacaca

SEQ ID NO: 669776 - DNA, 25 bp, Homo sapien
atcccggttcaagccttttctgtga

SEQ ID NO: 669777 - DNA, 25 bp, Homo sapien
ctttcagcctcatagacttgaagat

SEQ ID NO: 669778 - DNA, 25 bp, Homo sapien
tgagcttagcaatgatgccctcctg

SEQ ID NO: 669779 - DNA, 25 bp, Homo sapien
gatgccaggaaaggtccgctctgag

SEQ ID NO: 669780 - DNA, 25 bp, Homo sapien
gacgcaggacctgtcttatattttg

SEQ ID NO: 669781 - DNA, 25 bp, Homo sapien
tcatgagctcctgttctatgccggt

SEQ ID NO: 669782 - DNA, 25 bp, Homo sapien
cactgtgatgtacaccagctgctca

SEQ ID NO: 669783 - DNA, 25 bp, Homo sapien
cagctgctcatagaccacttttgcc

SEQ ID NO: 669784 - DNA, 25 bp, Homo sapien
tggtcatatgctgtggttggaatga

SEQ ID NO: 669785 - DNA, 25 bp, Homo sapien
ttagaagatacacgtgaacaccaaa

SEQ ID NO: 669786 - DNA, 25 bp, Homo sapien
cttttttctgcagtagtcttaatga

SEQ ID NO: 669787 - DNA, 25 bp, Homo sapien
aagtgtcttttatggtcatatgctg

SEQ ID NO: 669788 - DNA, 25 bp, Homo sapien
cttgaatgatgtctttatacatgtg

SEQ ID NO: 669789 - DNA, 25 bp, Homo sapien
ggagggattttcagtggtcactgtt

SEQ ID NO: 669790 - DNA, 25 bp, Homo sapien
ggtcttgaatgatgtctttatacat

SEQ ID NO: 669791 - DNA, 25 bp, Homo sapien
gggagattggtggagggattttcag

SEQ ID NO: 669792 - DNA, 25 bp, Homo sapien
cgggcagtggacagctaagtgatct

SEQ ID NO: 669793 - DNA, 25 bp, Homo sapien
tgcctgttggtagctatgcctctct

SEQ ID NO: 669794 - DNA, 25 bp, Homo sapien
tgtgatgtgtatctacccaggccct

SEQ ID NO: 669795 - DNA, 25 bp, Homo sapien
ttttgactggatgtagcatgccaca

SEQ ID NO: 669796 - DNA, 25 bp, Homo sapien
ggagctaaagaattccagttttgga

SEQ ID NO: 669797 - DNA, 25 bp, Homo sapien
ggtgtattcagtattgattcctgcc

SEQ ID NO: 669798 - DNA, 25 bp, Homo sapien
ttttggagcaacatcagggcagatg

SEQ ID NO: 669799 - DNA, 25 bp, Homo sapien
agggttgagcctgccactggagcta

SEQ ID NO: 669800 - DNA, 25 bp, Homo sapien
ttcttcagtaggattgaaatccccc

SEQ ID NO: 669801 - DNA, 25 bp, Homo sapien
atcccccctattgtgttcttcttca

SEQ ID NO: 669802 - DNA, 25 bp, Homo sapien
taggattgaaatcccccctattgtg

SEQ ID NO: 669803 - DNA, 25 bp, Homo sapien
tgaaatcccccctattgtgttcttc

SEQ ID NO: 669804 - DNA, 25 bp, Homo sapien
agatggattcttgttaggttgctca

SEQ ID NO: 669805 - DNA, 25 bp, Homo sapien
gttaggttgctcatgctggaatgca

SEQ ID NO: 669806 - DNA, 25 bp, Homo sapien
gcagacacctaattggcatatcata

SEQ ID NO: 669807 - DNA, 25 bp, Homo sapien
ggcatatcatataacaccccagaac

SEQ ID NO: 669808 - DNA, 25 bp, Homo sapien
gtctacagttatacagattataagg

SEQ ID NO: 669809 - DNA, 25 bp, Homo sapien
taatttccagaatcaaggctcctat

SEQ ID NO: 669810 - DNA, 25 bp, Homo sapien
gatgtcatcaagtcataatttccag

SEQ ID NO: 669811 - DNA, 25 bp, Homo sapien
tctataattaaggtcgtgtctacag

SEQ ID NO: 669812 - DNA, 25 bp, Homo sapien
gagccatggtggaaacaagatgcta

SEQ ID NO: 669813 - DNA, 25 bp, Homo sapien
caagatgctattgacctccagtggt

SEQ ID NO: 669814 - DNA, 25 bp, Homo sapien
tgtagaggaccaccaagagccatgg

SEQ ID NO: 669815 - DNA, 25 bp, Homo sapien
taggtcctttatctgcccttggtgg

SEQ ID NO: 669816 - DNA, 25 bp, Homo sapien
tttgtacttttcacaatgattaaca

SEQ ID NO: 669817 - DNA, 25 bp, Homo sapien
ctttgtacttttcacaatgattaac

SEQ ID NO: 669818 - DNA, 25 bp, Homo sapien
ttgtacttttcacaatgattaacat

SEQ ID NO: 669819 - DNA, 25 bp, Homo sapien
ttaacccatagctggttcctgttca

SEQ ID NO: 669820 - DNA, 25 bp, Homo sapien
ttcacagtcaaaggccaatgaatgg

SEQ ID NO: 669821 - DNA, 25 bp, Homo sapien
caatgaatggtcaataaaagctgca

SEQ ID NO: 669822 - DNA, 25 bp, Homo sapien
aacagctttccgttattcctgatgg

SEQ ID NO: 669823 - DNA, 25 bp, Homo sapien
caatgatcaatagtggaacaaccat

SEQ ID NO: 669824 - DNA, 25 bp, Homo sapien
gagtgtaacaatgatcaatagtgga

SEQ ID NO: 669825 - DNA, 25 bp, Homo sapien
agatgacagagtgtaacaatgatca

SEQ ID NO: 669826 - DNA, 25 bp, Homo sapien
tgacagagtgtaacaatgatcaata

SEQ ID NO: 669827 - DNA, 25 bp, Homo sapien
catgatggtcacaccagcagtagca

SEQ ID NO: 669828 - DNA, 25 bp, Homo sapien
tgtcatgatggtcacaccagcagta

SEQ ID NO: 669829 - DNA, 25 bp, Homo sapien
agccgtggaggccggagcttctctg

SEQ ID NO: 669830 - DNA, 25 bp, Homo sapien
gccgtggaggccggagcttctctgg

SEQ ID NO: 669831 - DNA, 25 bp, Homo sapien
ttgaggtggtgacatgccttcaaat

SEQ ID NO: 669832 - DNA, 25 bp, Homo sapien
tcttcccttgaagtaaagccaaaga

SEQ ID NO: 669833 - DNA, 25 bp, Homo sapien
tctataaccacaggcttgaggtggt

SEQ ID NO: 669834 - DNA, 25 bp, Homo sapien
catcttatgcagtctataaccacag

SEQ ID NO: 669835 - DNA, 25 bp, Homo sapien
cccttgacattcccccttggatttg

SEQ ID NO: 669836 - DNA, 25 bp, Homo sapien
atttgtccatgcacagctgatccat

SEQ ID NO: 669837 - DNA, 25 bp, Homo sapien
acattcccccttggatttgtccatg

SEQ ID NO: 669838 - DNA, 25 bp, Homo sapien
cccccttggatttgtccatgcacag

SEQ ID NO: 669839 - DNA, 25 bp, Homo sapien
ggaagacgcacacataagcaaaatc

SEQ ID NO: 669840 - DNA, 25 bp, Homo sapien
tgcacttgcaccttgcatcctgagg

SEQ ID NO: 669841 - DNA, 25 bp, Homo sapien
tcaaacaactggaagacgcacacat

SEQ ID NO: 669842 - DNA, 25 bp, Homo sapien
gaggctgacatctgcttattgtcaa

SEQ ID NO: 669843 - DNA, 25 bp, Homo sapien
ggtggtcaatgaatttctctagctt

SEQ ID NO: 669844 - DNA, 25 bp, Homo sapien
tccccttggtggtcaatgaatttct

SEQ ID NO: 669845 - DNA, 25 bp, Homo sapien
tgctccccttggtggtcaatgaatt

SEQ ID NO: 669846 - DNA, 25 bp, Homo sapien
cccttggtggtcaatgaatttctct

SEQ ID NO: 669847 - DNA, 25 bp, Homo sapien
gctgcccacgtccttaatgctgtaa

SEQ ID NO: 669848 - DNA, 25 bp, Homo sapien
caactgtttgtgcatacaattttgc

SEQ ID NO: 669849 - DNA, 25 bp, Homo sapien
gctcacagtcagtaaattgctgctg

SEQ ID NO: 669850 - DNA, 25 bp, Homo sapien
ttgtgctcacaattggctgattgag

SEQ ID NO: 669851 - DNA, 25 bp, Homo sapien
gcagggagcagctaattgtgctcac

SEQ ID NO: 669852 - DNA, 25 bp, Homo sapien
tttcatgaggaaccgtctgttgaga

SEQ ID NO: 669853 - DNA, 25 bp, Homo sapien
catgaggaaccgtctgttgagacac

SEQ ID NO: 669854 - DNA, 25 bp, Homo sapien
gaggaaccgtctgttgagacacggc

SEQ ID NO: 669855 - DNA, 25 bp, Homo sapien
tcatgaggaaccgtctgttgagaca

SEQ ID NO: 669856 - DNA, 25 bp, Homo sapien
ctcaggtaaacattggattcaaaga

SEQ ID NO: 669857 - DNA, 25 bp, Homo sapien
attggattcaaagaaactataaggc

SEQ ID NO: 669858 - DNA, 25 bp, Homo sapien
caggtaaacattggattcaaagaaa

SEQ ID NO: 669859 - DNA, 25 bp, Homo sapien
tggattcaaagaaactataaggcat

SEQ ID NO: 669860 - DNA, 25 bp, Homo sapien
aagttgagcttttccgtggataact

SEQ ID NO: 669861 - DNA, 25 bp, Homo sapien
tatgaaggtgtgataatcttggacc

SEQ ID NO: 669862 - DNA, 25 bp, Homo sapien
tcttggaccgctcacaagttgagct

SEQ ID NO: 669863 - DNA, 25 bp, Homo sapien
ttttccgtggataactggattctgc

SEQ ID NO: 669864 - DNA, 25 bp, Homo sapien
gctgtgatgatctgtggtagctgat

SEQ ID NO: 669865 - DNA, 25 bp, Homo sapien
ctggaccacggaaaagctgccgatg

SEQ ID NO: 669866 - DNA, 25 bp, Homo sapien
tagggttcaggaaccctgacatgac

SEQ ID NO: 669867 - DNA, 25 bp, Homo sapien
tcttggtattctccaaagtctgtgg

SEQ ID NO: 669868 - DNA, 25 bp, Homo sapien
cactgtcttgtggcagagctgcatg

SEQ ID NO: 669869 - DNA, 25 bp, Homo sapien
tgtcttgtggcagagctgcatgaga

SEQ ID NO: 669870 - DNA, 25 bp, Homo sapien
gtcttgtggcagagctgcatgagac

SEQ ID NO: 669871 - DNA, 25 bp, Homo sapien
actgtcttgtggcagagctgcatga

SEQ ID NO: 669872 - DNA, 25 bp, Homo sapien
gtcatgagcatccagttgtccttca

SEQ ID NO: 669873 - DNA, 25 bp, Homo sapien
aggtcatgagcatccagttgtcctt

SEQ ID NO: 669874 - DNA, 25 bp, Homo sapien
ggtcatgagcatccagttgtccttc

SEQ ID NO: 669875 - DNA, 25 bp, Homo sapien
tcatgagcatccagttgtccttcaa

SEQ ID NO: 669876 - DNA, 25 bp, Homo sapien
tcctcactgtctgcacattctcgga

SEQ ID NO: 669877 - DNA, 25 bp, Homo sapien
cttggatcctggtgctcctcactgt

SEQ ID NO: 669878 - DNA, 25 bp, Homo sapien
cactgtctgcacattctcggagcat

SEQ ID NO: 669879 - DNA, 25 bp, Homo sapien
gatcctggtgctcctcactgtctgc

SEQ ID NO: 669880 - DNA, 25 bp, Homo sapien
cgcttgccttttggcttgagggtag

SEQ ID NO: 669881 - DNA, 25 bp, Homo sapien
tgactctgagtcattgatgaacgct

SEQ ID NO: 669882 - DNA, 25 bp, Homo sapien
gaactggggcaccttaactcctctg

SEQ ID NO: 669883 - DNA, 25 bp, Homo sapien
tgccttgatcctgtgactctgagtc

SEQ ID NO: 669884 - DNA, 25 bp, Homo sapien
cacaaaatggagaagccgaggctta

SEQ ID NO: 669885 - DNA, 25 bp, Homo sapien
gagcccagcctgaagtagcatatat

SEQ ID NO: 669886 - DNA, 25 bp, Homo sapien
gatcacacagtcagtaaggagccca

SEQ ID NO: 669887 - DNA, 25 bp, Homo sapien
gccctgggttcttaaatgctctgtt

SEQ ID NO: 669888 - DNA, 25 bp, Homo sapien
cctgctggttccctacaggatctga

SEQ ID NO: 669889 - DNA, 25 bp, Homo sapien
ggttccctacaggatctgaatgcat

SEQ ID NO: 669890 - DNA, 25 bp, Homo sapien
tgtctccggggaccatagcctgctg

SEQ ID NO: 669891 - DNA, 25 bp, Homo sapien
catagcctgctggttccctacagga

SEQ ID NO: 669892 - DNA, 25 bp, Homo sapien
cagagatgtttaccagctttgtcaa

SEQ ID NO: 669893 - DNA, 25 bp, Homo sapien
caagagatgttattgctaactgcaa

SEQ ID NO: 669894 - DNA, 25 bp, Homo sapien
tgtcaagatattcatcccttttgga

SEQ ID NO: 669895 - DNA, 25 bp, Homo sapien
ggatttttgctcatgtcaagagatg

SEQ ID NO: 669896 - DNA, 25 bp, Homo sapien
cttcctctttctcttgcacctgctt

SEQ ID NO: 669897 - DNA, 25 bp, Homo sapien
cctctttctcttgcacctgcttctt

SEQ ID NO: 669898 - DNA, 25 bp, Homo sapien
ttcctctttctcttgcacctgcttc

SEQ ID NO: 669899 - DNA, 25 bp, Homo sapien
tctttctcttgcacctgcttcttcc

SEQ ID NO: 669900 - DNA, 25 bp, Homo sapien
gattaggcccgacagcatcagtttc

SEQ ID NO: 669901 - DNA, 25 bp, Homo sapien
catcagtttcggtgggacagtcgca

SEQ ID NO: 669902 - DNA, 25 bp, Homo sapien
tctagattgagcgtttccgtgggac

SEQ ID NO: 669903 - DNA, 25 bp, Homo sapien
ccagccggtgttccctgaattaaca

SEQ ID NO: 669904 - DNA, 25 bp, Homo sapien
tccttgggaaactgggtagccatca

SEQ ID NO: 669905 - DNA, 25 bp, Homo sapien
ccttgggaaactgggtagccatcac

SEQ ID NO: 669906 - DNA, 25 bp, Homo sapien
atccttgggaaactgggtagccatc

SEQ ID NO: 669907 - DNA, 25 bp, Homo sapien
aatccttgggaaactgggtagccat

SEQ ID NO: 669908 - DNA, 25 bp, Homo sapien
tttttcaattcatctctcctgggca

SEQ ID NO: 669909 - DNA, 25 bp, Homo sapien
ccattgatgtcagccaagccttttg

SEQ ID NO: 669910 - DNA, 25 bp, Homo sapien
ttttcaattcatctctcctgggcat

SEQ ID NO: 669911 - DNA, 25 bp, Homo sapien
tattcagaactcttcttcatcaact

SEQ ID NO: 669912 - DNA, 25 bp, Homo sapien
catattcagaactcttcttcatcaa

SEQ ID NO: 669913 - DNA, 25 bp, Homo sapien
tcatattcagaactcttcttcatca

SEQ ID NO: 669914 - DNA, 25 bp, Homo sapien
cttcatattcagaactcttcttcat

SEQ ID NO: 669915 - DNA, 25 bp, Homo sapien
gttaccctatgtggctgtttgttca

SEQ ID NO: 669916 - DNA, 25 bp, Homo sapien
ggttaccctatgtggctgtttgttc

SEQ ID NO: 669917 - DNA, 25 bp, Homo sapien
taccctatgtggctgtttgttcacc

SEQ ID NO: 669918 - DNA, 25 bp, Homo sapien
ccctatgtggctgtttgttcaccat

SEQ ID NO: 669919 - DNA, 25 bp, Homo sapien
ttgtgaacagcaaggtaaagcaaag

SEQ ID NO: 669920 - DNA, 25 bp, Homo sapien
aattttaatacgagcttgggaatag

SEQ ID NO: 669921 - DNA, 25 bp, Homo sapien
gcaaagcccatgaaatattgattct

SEQ ID NO: 669922 - DNA, 25 bp, Homo sapien
aacccagggcttgaacttgtcgcat

SEQ ID NO: 669923 - DNA, 25 bp, Homo sapien
ctgtttgcatgacgagaggtggaca

SEQ ID NO: 669924 - DNA, 25 bp, Homo sapien
taattgtcgctaaagctgtttgcat

SEQ ID NO: 669925 - DNA, 25 bp, Homo sapien
ggcctgctccttgtgagcactgact

SEQ ID NO: 669926 - DNA, 25 bp, Homo sapien
taaaggttggctatgaagtcgttac

SEQ ID NO: 669927 - DNA, 25 bp, Homo sapien
gatagcgcttcatgaatattaacaa

SEQ ID NO: 669928 - DNA, 25 bp, Homo sapien
aatctcctccctcttgatagcgctt

SEQ ID NO: 669929 - DNA, 25 bp, Homo sapien
tcctccctcttgatagcgcttcatg

SEQ ID NO: 669930 - DNA, 25 bp, Homo sapien
ttaacaaggttaagatcaataatga

SEQ ID NO: 669931 - DNA, 25 bp, Homo sapien
tgtcactgttactgatcctggcgca

SEQ ID NO: 669932 - DNA, 25 bp, Homo sapien
gcattttgctccagtacttatacgg

SEQ ID NO: 669933 - DNA, 25 bp, Homo sapien
tgatctgatctgaagaatttcttcc

SEQ ID NO: 669934 - DNA, 25 bp, Homo sapien
ccacagctaaatcagtaaattccac

SEQ ID NO: 669935 - DNA, 25 bp, Homo sapien
atttccatgattggagatacttcag

SEQ ID NO: 669936 - DNA, 25 bp, Homo sapien
tggagaatttccatgattggagata

SEQ ID NO: 669937 - DNA, 25 bp, Homo sapien
gagaatttccatgattggagatact

SEQ ID NO: 669938 - DNA, 25 bp, Homo sapien
tggagatacttcagacatgtaccta

SEQ ID NO: 669939 - DNA, 25 bp, Homo sapien
ttgcaataatggcatttctctctgg

SEQ ID NO: 669940 - DNA, 25 bp, Homo sapien
taatggcatttctctctggagctga

SEQ ID NO: 669941 - DNA, 25 bp, Homo sapien
aataatggcatttctctctggagct

SEQ ID NO: 669942 - DNA, 25 bp, Homo sapien
atggcatttctctctggagctgatc

SEQ ID NO: 669943 - DNA, 25 bp, Homo sapien
tgtttgtgcatgcagtgtcaatgaa

SEQ ID NO: 669944 - DNA, 25 bp, Homo sapien
aatgttgtttgtgcatgcagtgtca

SEQ ID NO: 669945 - DNA, 25 bp, Homo sapien
tcaggaggccagcaatgaatattgt

SEQ ID NO: 669946 - DNA, 25 bp, Homo sapien
tctcaggaggccagcaatgaatatt

SEQ ID NO: 669947 - DNA, 25 bp, Homo sapien
caaatgcagagcccaacgcagggac

SEQ ID NO: 669948 - DNA, 25 bp, Homo sapien
tcgcttcgaggacttgccaacacat

SEQ ID NO: 669949 - DNA, 25 bp, Homo sapien
cccaacgcagggacacagatttcgc

SEQ ID NO: 669950 - DNA, 25 bp, Homo sapien
cagggacacagatttcgcttcgagg

SEQ ID NO: 669951 - DNA, 25 bp, Homo sapien
gcggtaccggtcagccctgtttgct

SEQ ID NO: 669952 - DNA, 25 bp, Homo sapien
ctcagcggtaccggtcagccctgtt

SEQ ID NO: 669953 - DNA, 25 bp, Homo sapien
agcggtaccggtcagccctgtttgc

SEQ ID NO: 669954 - DNA, 25 bp, Homo sapien
gtttcctcagcggtaccggtcagcc

SEQ ID NO: 669955 - DNA, 25 bp, Homo sapien
aaacacttcataaaaggcgataact

SEQ ID NO: 669956 - DNA, 25 bp, Homo sapien
aggcgataactttctttgaccaaag

SEQ ID NO: 669957 - DNA, 25 bp, Homo sapien
tatgcaagacgacttccaaacactt

SEQ ID NO: 669958 - DNA, 25 bp, Homo sapien
tatttataagtgattccaatgcctt

SEQ ID NO: 669959 - DNA, 25 bp, Homo sapien
ccttcgtgaggaacatgctgcaact

SEQ ID NO: 669960 - DNA, 25 bp, Homo sapien
gacagcaattataaagacatccagg

SEQ ID NO: 669961 - DNA, 25 bp, Homo sapien
catttttcacgcaggctctgacaga

SEQ ID NO: 669962 - DNA, 25 bp, Homo sapien
tcaggagctggaaacgttctcaaaa

SEQ ID NO: 669963 - DNA, 25 bp, Homo sapien
catgtctcctcaaagcatatgtaga

SEQ ID NO: 669964 - DNA, 25 bp, Homo sapien
ttcactaggtttggcgtggaacaag

SEQ ID NO: 669965 - DNA, 25 bp, Homo sapien
gactctatgacacctatccttgcct

SEQ ID NO: 669966 - DNA, 25 bp, Homo sapien
gggaccccattgtgagaatgactct

SEQ ID NO: 669967 - DNA, 25 bp, Homo sapien
cttttgctccagtagaaaactcaga

SEQ ID NO: 669968 - DNA, 25 bp, Homo sapien
gcttttgctccagtagaaaactcag

SEQ ID NO: 669969 - DNA, 25 bp, Homo sapien
agcttttgctccagtagaaaactca

SEQ ID NO: 669970 - DNA, 25 bp, Homo sapien
tctctacagccttgtaaatgttgaa

SEQ ID NO: 669971 - DNA, 25 bp, Homo sapien
gttctttacaatcccgcagagctcc

SEQ ID NO: 669972 - DNA, 25 bp, Homo sapien
tttccctggctctctacagccttgt

SEQ ID NO: 669973 - DNA, 25 bp, Homo sapien
agtttgctcgttctttacaatcccg

SEQ ID NO: 669974 - DNA, 25 bp, Homo sapien
aggttatgtcccaggtgctgaccat

SEQ ID NO: 669975 - DNA, 25 bp, Homo sapien
gaaatacccacgttggccctcttgc

SEQ ID NO: 669976 - DNA, 25 bp, Homo sapien
gccctcttgcttgtagcaccaggtt

SEQ ID NO: 669977 - DNA, 25 bp, Homo sapien
ccatgattatactgctttgggagat

SEQ ID NO: 669978 - DNA, 25 bp, Homo sapien
catgtagtacacagctgtgctgaga

SEQ ID NO: 669979 - DNA, 25 bp, Homo sapien
ttacatgtagtacacagctgtgctg

SEQ ID NO: 669980 - DNA, 25 bp, Homo sapien
cacagctgtgctgagaacatttttc

SEQ ID NO: 669981 - DNA, 25 bp, Homo sapien
tagtacacagctgtgctgagaacat

SEQ ID NO: 669982 - DNA, 25 bp, Homo sapien
caaggatctctaccatctggctcta

SEQ ID NO: 669983 - DNA, 25 bp, Homo sapien
aaggatctctaccatctggctctac

SEQ ID NO: 669984 - DNA, 25 bp, Homo sapien
tatcttgaattcctctttgctctta

SEQ ID NO: 669985 - DNA, 25 bp, Homo sapien
ttccttggcatctctaggcactgca

SEQ ID NO: 669986 - DNA, 25 bp, Homo sapien
tacatgtgccaaattccaggacgga

SEQ ID NO: 669987 - DNA, 25 bp, Homo sapien
taacctcatcaaattctggaaagac

SEQ ID NO: 669988 - DNA, 25 bp, Homo sapien
ggctgctggggatgctagaacagca

SEQ ID NO: 669989 - DNA, 25 bp, Homo sapien
gcaccatgtctgtgttccacatctg

SEQ ID NO: 669990 - DNA, 25 bp, Homo sapien
ctgctggggatgctagaacagcaat

SEQ ID NO: 669991 - DNA, 25 bp, Homo sapien
tggcaccatgtctgtgttccacatc

SEQ ID NO: 669992 - DNA, 25 bp, Homo sapien
caattactacctcacatactggttc

SEQ ID NO: 669993 - DNA, 25 bp, Homo sapien
gcaaccccaattactacctcacata

SEQ ID NO: 669994 - DNA, 25 bp, Homo sapien
ttcggcaaccccaattactacctca

SEQ ID NO: 669995 - DNA, 25 bp, Homo sapien
ctacctcacatactggttcttccat

SEQ ID NO: 669996 - DNA, 25 bp, Homo sapien
tggtaagatgtcagattgccctccc

SEQ ID NO: 669997 - DNA, 25 bp, Homo sapien
tatgctccccactaacactgaagtc

SEQ ID NO: 669998 - DNA, 25 bp, Homo sapien
tcttaagtttgcagtagatgaacca

SEQ ID NO: 669999 - DNA, 25 bp, Homo sapien
gaaccagaaactagtcaccatatgc

SEQ ID NO: 670000 - DNA, 25 bp, Homo sapien
gttctccaacgatcaaagccccatt

SEQ ID NO: 670001 - DNA, 25 bp, Homo sapien
tgttgacaaaagttctccaacgatc

SEQ ID NO: 670002 - DNA, 25 bp, Homo sapien
gacaaaagttctccaacgatcaaag

SEQ ID NO: 670003 - DNA, 25 bp, Homo sapien
tgactgccttatttgttgacaaaag

SEQ ID NO: 670004 - DNA, 25 bp, Homo sapien
tctttaaaggcacatcgtgggtagt

SEQ ID NO: 670005 - DNA, 25 bp, Homo sapien
aaagagtgaattcccagtcagcatg

SEQ ID NO: 670006 - DNA, 25 bp, Homo sapien
gtgaattgacatagtttctttaaag

SEQ ID NO: 670007 - DNA, 25 bp, Homo sapien
tcattgtgaattgacatagtttctt

SEQ ID NO: 670008 - DNA, 25 bp, Homo sapien
gaacatctaagtctgtaaccaggca

SEQ ID NO: 670009 - DNA, 25 bp, Homo sapien
caaccattgggaagagggccttcct

SEQ ID NO: 670010 - DNA, 25 bp, Homo sapien
ctttattccagatgttaccctggcg

SEQ ID NO: 670011 - DNA, 25 bp, Homo sapien
taaccaggcaaccattgggaagagg

SEQ ID NO: 670012 - DNA, 25 bp, Homo sapien
cattagatcaagctctgtctctggg

SEQ ID NO: 670013 - DNA, 25 bp, Homo sapien
gaacccctacgacacggtctgtgga

SEQ ID NO: 670014 - DNA, 25 bp, Homo sapien
taatggcatgccaagggctgctgag

SEQ ID NO: 670015 - DNA, 25 bp, Homo sapien
ttgactaatagagggaacggctccc

SEQ ID NO: 670016 - DNA, 25 bp, Homo sapien
actttctaatttgaggtcctgaaca

SEQ ID NO: 670017 - DNA, 25 bp, Homo sapien
catcccttctgattcaatgagggaa

SEQ ID NO: 670018 - DNA, 25 bp, Homo sapien
aggcatcccttctgattcaatgagg

SEQ ID NO: 670019 - DNA, 25 bp, Homo sapien
ctttctaatttgaggtcctgaacat

SEQ ID NO: 670020 - DNA, 25 bp, Homo sapien
tcttggtcctgacaggacagatgag

SEQ ID NO: 670021 - DNA, 25 bp, Homo sapien
aggccctttgttcctgcaaatgggc

SEQ ID NO: 670022 - DNA, 25 bp, Homo sapien
atgagtgagttcttggtcctgacag

SEQ ID NO: 670023 - DNA, 25 bp, Homo sapien
gttcctgcaaatgggcctttcctgg

SEQ ID NO: 670024 - DNA, 25 bp, Homo sapien
aaatatagatgctatgaaagttcag

SEQ ID NO: 670025 - DNA, 25 bp, Homo sapien
tcagtttcaaagtttgcaccttggc

SEQ ID NO: 670026 - DNA, 25 bp, Homo sapien
gatgtaggaaatatagatgctatga

SEQ ID NO: 670027 - DNA, 25 bp, Homo sapien
gatgctatgaaagttcagtttcaaa

SEQ ID NO: 670028 - DNA, 25 bp, Homo sapien
cccatgatcgtcatactatgagcat

SEQ ID NO: 670029 - DNA, 25 bp, Homo sapien
tggcccatgatcgtcatactatgag

SEQ ID NO: 670030 - DNA, 25 bp, Homo sapien
ggcccatgatcgtcatactatgagc

SEQ ID NO: 670031 - DNA, 25 bp, Homo sapien
gcccatgatcgtcatactatgagca

SEQ ID NO: 670032 - DNA, 25 bp, Homo sapien
gaatttttaactgagatgtccccat

SEQ ID NO: 670033 - DNA, 25 bp, Homo sapien
ctagcctggaataggcccctctgcc

SEQ ID NO: 670034 - DNA, 25 bp, Homo sapien
tagcctggaataggcccctctgcca

SEQ ID NO: 670035 - DNA, 25 bp, Homo sapien
gaataggcccctctgccacagtcag

SEQ ID NO: 670036 - DNA, 25 bp, Homo sapien
ctggaataggcccctctgccacagt

SEQ ID NO: 670037 - DNA, 25 bp, Homo sapien
cttagtgaccccgaattcctcaggg

SEQ ID NO: 670038 - DNA, 25 bp, Homo sapien
tgaccccgaattcctcagggtggag

SEQ ID NO: 670039 - DNA, 25 bp, Homo sapien
tagtgaccccgaattcctcagggtg

SEQ ID NO: 670040 - DNA, 25 bp, Homo sapien
ccccgaattcctcagggtggagcaa

SEQ ID NO: 670041 - DNA, 25 bp, Homo sapien
gctgtaaagttggagtccttttagc

SEQ ID NO: 670042 - DNA, 25 bp, Homo sapien
ttccctgcaataaatgttgttggct

SEQ ID NO: 670043 - DNA, 25 bp, Homo sapien
gcaataaatgttgttggctgtaaag

SEQ ID NO: 670044 - DNA, 25 bp, Homo sapien
tgtaaagttggagtccttttagcac

SEQ ID NO: 670045 - DNA, 25 bp, Homo sapien
catttcctttataactgaagagaaa

SEQ ID NO: 670046 - DNA, 25 bp, Homo sapien
gaagagaaatggccgtatcttatca

SEQ ID NO: 670047 - DNA, 25 bp, Homo sapien
aagagaaatggccgtatcttatcac

SEQ ID NO: 670048 - DNA, 25 bp, Homo sapien
agagaaatggccgtatcttatcact

SEQ ID NO: 670049 - DNA, 25 bp, Homo sapien
taaatgcaggttctcaggttatctg

SEQ ID NO: 670050 - DNA, 25 bp, Homo sapien
cttcgtataaatgcaggttctcagg

SEQ ID NO: 670051 - DNA, 25 bp, Homo sapien
gtataaatgcaggttctcaggttat

SEQ ID NO: 670052 - DNA, 25 bp, Homo sapien
ttcgtataaatgcaggttctcaggt

SEQ ID NO: 670053 - DNA, 25 bp, Homo sapien
ccctcctgagttgatggtctggtgg

SEQ ID NO: 670054 - DNA, 25 bp, Homo sapien
ttgttattgtttgtaacctgaagac

SEQ ID NO: 670055 - DNA, 25 bp, Homo sapien
tttgttattgtttgtaacctgaaga

SEQ ID NO: 670056 - DNA, 25 bp, Homo sapien
tctactctgtaaaccctaaaggcca

SEQ ID NO: 670057 - DNA, 25 bp, Homo sapien
gtaaaccctaaaggccatatagcag

SEQ ID NO: 670058 - DNA, 25 bp, Homo sapien
tcagcttctactctgtaaaccctaa

SEQ ID NO: 670059 - DNA, 25 bp, Homo sapien
gccatatagcagttaactgaatgtt

SEQ ID NO: 670060 - DNA, 25 bp, Homo sapien
cccagggcctggtgtatgcgtctcc

SEQ ID NO: 670061 - DNA, 25 bp, Homo sapien
cagggcctggtgtatgcgtctcctt

SEQ ID NO: 670062 - DNA, 25 bp, Homo sapien
ggtgtatgcgtctcctttagaagga

SEQ ID NO: 670063 - DNA, 25 bp, Homo sapien
cctggtgtatgcgtctcctttagaa

SEQ ID NO: 670064 - DNA, 25 bp, Homo sapien
gaaaatgtcctgattcattttccct

SEQ ID NO: 670065 - DNA, 25 bp, Homo sapien
gaggaaaatgtcctgattcattttc

SEQ ID NO: 670066 - DNA, 25 bp, Homo sapien
tccagaggaaaatgtcctgattcat

SEQ ID NO: 670067 - DNA, 25 bp, Homo sapien
cagaggaaaatgtcctgattcattt

SEQ ID NO: 670068 - DNA, 25 bp, Homo sapien
tttatattttcaagaacgaggatga

SEQ ID NO: 670069 - DNA, 25 bp, Homo sapien
agtcaagtacctgcccatgaactct

SEQ ID NO: 670070 - DNA, 25 bp, Homo sapien
acgaggatgattggctcctcttgag

SEQ ID NO: 670071 - DNA, 25 bp, Homo sapien
ctcttcaggtaggaccaaggagcag

SEQ ID NO: 670072 - DNA, 25 bp, Homo sapien
atacttttggtcataagctgtctcc

SEQ ID NO: 670073 - DNA, 25 bp, Homo sapien
tacttttggtcataagctgtctcca

SEQ ID NO: 670074 - DNA, 25 bp, Homo sapien
cttttggtcataagctgtctccatc

SEQ ID NO: 670075 - DNA, 25 bp, Homo sapien
ttttggtcataagctgtctccatct

SEQ ID NO: 670076 - DNA, 25 bp, Homo sapien
gggcagcttgctcggccacatctgc

SEQ ID NO: 670077 - DNA, 25 bp, Homo sapien
aagcctgagagctgtcagcacagat

SEQ ID NO: 670078 - DNA, 25 bp, Homo sapien
agggagccagcaacgcccctcactt

SEQ ID NO: 670079 - DNA, 25 bp, Homo sapien
gctgtgcaccaggaacccgccgaag

SEQ ID NO: 670080 - DNA, 25 bp, Homo sapien
aggccagagttgtccggtggagact

SEQ ID NO: 670081 - DNA, 25 bp, Homo sapien
gagacttggctcctgaagccagcgg

SEQ ID NO: 670082 - DNA, 25 bp, Homo sapien
agttgtccggtggagacttggctcc

SEQ ID NO: 670083 - DNA, 25 bp, Homo sapien
aagccagcggggcacccctgagcag

SEQ ID NO: 670084 - DNA, 25 bp, Homo sapien
taattaaccagaaggaattgtgata

SEQ ID NO: 670085 - DNA, 25 bp, Homo sapien
catgggacagttaacctagaaacgg

SEQ ID NO: 670086 - DNA, 25 bp, Homo sapien
cggaactgtctattgcctgcaaata

SEQ ID NO: 670087 - DNA, 25 bp, Homo sapien
gcctgcaaatatttggcttttcctc

SEQ ID NO: 670088 - DNA, 25 bp, Homo sapien
ccatgacagagagtcaatgagtcaa

SEQ ID NO: 670089 - DNA, 25 bp, Homo sapien
gaagaaccaagtcaggctaaaaatc

SEQ ID NO: 670090 - DNA, 25 bp, Homo sapien
gaaagtctggaagtgtctatacaat

SEQ ID NO: 670091 - DNA, 25 bp, Homo sapien
aattgatgataatatgaaagtctgg

SEQ ID NO: 670092 - DNA, 25 bp, Homo sapien
tcacttgtagtacccaagtactcat

SEQ ID NO: 670093 - DNA, 25 bp, Homo sapien
tgattccagggctgatataaaccat

SEQ ID NO: 670094 - DNA, 25 bp, Homo sapien
agtactcatccaggacaatgattcc

SEQ ID NO: 670095 - DNA, 25 bp, Homo sapien
cttctgctcatcacttgtagtaccc

SEQ ID NO: 670096 - DNA, 25 bp, Homo sapien
gctccgatgatgtagatcttcacca

SEQ ID NO: 670097 - DNA, 25 bp, Homo sapien
cgatgatgtagatcttcaccaccat

SEQ ID NO: 670098 - DNA, 25 bp, Homo sapien
cagctccgatgatgtagatcttcac

SEQ ID NO: 670099 - DNA, 25 bp, Homo sapien
tccgatgatgtagatcttcaccacc

SEQ ID NO: 670100 - DNA, 25 bp, Homo sapien
gctctaaacctactccatagcttgt

SEQ ID NO: 670101 - DNA, 25 bp, Homo sapien
gcaacgccctgacattagctctaaa

SEQ ID NO: 670102 - DNA, 25 bp, Homo sapien
gctgagcagcaacgccctgacatta

SEQ ID NO: 670103 - DNA, 25 bp, Homo sapien
ttcccagagtcgctgagcagcaacg

SEQ ID NO: 670104 - DNA, 25 bp, Homo sapien
agttgaaagtccgatttcttgtaat

SEQ ID NO: 670105 - DNA, 25 bp, Homo sapien
tgaaagtccgatttcttgtaatatt

SEQ ID NO: 670106 - DNA, 25 bp, Homo sapien
ttgaaagtccgatttcttgtaatat

SEQ ID NO: 670107 - DNA, 25 bp, Homo sapien
gttgaaagtccgatttcttgtaata

SEQ ID NO: 670108 - DNA, 25 bp, Homo sapien
tactctgctcgtaagaataggtcat

SEQ ID NO: 670109 - DNA, 25 bp, Homo sapien
cattactctgctcgtaagaataggt

SEQ ID NO: 670110 - DNA, 25 bp, Homo sapien
gaagacattactctgctcgtaagaa

SEQ ID NO: 670111 - DNA, 25 bp, Homo sapien
atgaagacattactctgctcgtaag

SEQ ID NO: 670112 - DNA, 25 bp, Homo sapien
ttatccttgagattttttgggaagc

SEQ ID NO: 670113 - DNA, 25 bp, Homo sapien
gttttgactgcgatactttcaacca

SEQ ID NO: 670114 - DNA, 25 bp, Homo sapien
gacgtaactaccactactgttgctt

SEQ ID NO: 670115 - DNA, 25 bp, Homo sapien
gactaattggttgtatctctccacg

SEQ ID NO: 670116 - DNA, 25 bp, Homo sapien
gactttttccgctgcatcgtccttt

SEQ ID NO: 670117 - DNA, 25 bp, Homo sapien
ttttccgctgcatcgtccttttgtc

SEQ ID NO: 670118 - DNA, 25 bp, Homo sapien
ctgcatcgtccttttgtcttttcaa

SEQ ID NO: 670119 - DNA, 25 bp, Homo sapien
tctctggactttttccgctgcatcg

SEQ ID NO: 670120 - DNA, 25 bp, Homo sapien
ccttttcttccagtatggtcagtgt

SEQ ID NO: 670121 - DNA, 25 bp, Homo sapien
ttcttccagtatggtcagtgtcttc

SEQ ID NO: 670122 - DNA, 25 bp, Homo sapien
ttttcttccagtatggtcagtgtct

SEQ ID NO: 670123 - DNA, 25 bp, Homo sapien
tcttccagtatggtcagtgtcttca

SEQ ID NO: 670124 - DNA, 25 bp, Homo sapien
tgaatgcttggtccacctgtaccca

SEQ ID NO: 670125 - DNA, 25 bp, Homo sapien
tgtacccactgagctgtcacatttc

SEQ ID NO: 670126 - DNA, 25 bp, Homo sapien
cctacattcccagtagatgggcagc

SEQ ID NO: 670127 - DNA, 25 bp, Homo sapien
tctaaacctcttgagttgaagctcc

SEQ ID NO: 670128 - DNA, 25 bp, Homo sapien
ttgttaacagcaaaaccagactcct

SEQ ID NO: 670129 - DNA, 25 bp, Homo sapien
tactgatcttcatgagtaacaaggg

SEQ ID NO: 670130 - DNA, 25 bp, Homo sapien
tcacccctgactgtaggtactaagt

SEQ ID NO: 670131 - DNA, 25 bp, Homo sapien
cctgaatgtccagaaagcggagcca

SEQ ID NO: 670132 - DNA, 25 bp, Homo sapien
tcttgacagaatccctcatacctgg

SEQ ID NO: 670133 - DNA, 25 bp, Homo sapien
tttgtaaactgaagactggctgggt

SEQ ID NO: 670134 - DNA, 25 bp, Homo sapien
caaatggtaaggcagaagcaaaata

SEQ ID NO: 670135 - DNA, 25 bp, Homo sapien
aagactggctgggttatagtcaaat

SEQ ID NO: 670136 - DNA, 25 bp, Homo sapien
tcttctgtgtacctaagtcattcac

SEQ ID NO: 670137 - DNA, 25 bp, Homo sapien
ttcttctgtgtacctaagtcattca

SEQ ID NO: 670138 - DNA, 25 bp, Homo sapien
tagtactctaacattggaatatggg

SEQ ID NO: 670139 - DNA, 25 bp, Homo sapien
ttcctctatggcctaaatctgatca

SEQ ID NO: 670140 - DNA, 25 bp, Homo sapien
caacttctgatgaggatggcaagcc

SEQ ID NO: 670141 - DNA, 25 bp, Homo sapien
tgggaccactcatatattgctgcaa

SEQ ID NO: 670142 - DNA, 25 bp, Homo sapien
ttaagaaggtctagtatgtttactc

SEQ ID NO: 670143 - DNA, 25 bp, Homo sapien
caaatgacgattttcaatactcgga

SEQ ID NO: 670144 - DNA, 25 bp, Homo sapien
aatactcggagtatactggcagagg

SEQ ID NO: 670145 - DNA, 25 bp, Homo sapien
tgtttactcttaagcatcaagaaac

SEQ ID NO: 670146 - DNA, 25 bp, Homo sapien
caatgcaatccaccttcttcttaat

SEQ ID NO: 670147 - DNA, 25 bp, Homo sapien
atgcaatccaccttcttcttaatcc

SEQ ID NO: 670148 - DNA, 25 bp, Homo sapien
gcaatgcaatccaccttcttcttaa

SEQ ID NO: 670149 - DNA, 25 bp, Homo sapien
cagcaatgcaatccaccttcttctt

SEQ ID NO: 670150 - DNA, 25 bp, Homo sapien
gaagctattattaaggtttcaacaa

SEQ ID NO: 670151 - DNA, 25 bp, Homo sapien
gaaaagttagagtatatcatgagtg

SEQ ID NO: 670152 - DNA, 25 bp, Homo sapien
ggaaaatgtctcgatagttgaaaag

SEQ ID NO: 670153 - DNA, 25 bp, Homo sapien
aaagatgagtatgaaccatatacag

SEQ ID NO: 670154 - DNA, 25 bp, Homo sapien
ctgagatgaagtaccggccaatctg

SEQ ID NO: 670155 - DNA, 25 bp, Homo sapien
gagatgaagtaccggccaatctgag

SEQ ID NO: 670156 - DNA, 25 bp, Homo sapien
tgagatgaagtaccggccaatctga

SEQ ID NO: 670157 - DNA, 25 bp, Homo sapien
agaaacagtgtattagaaccctgca

SEQ ID NO: 670158 - DNA, 25 bp, Homo sapien
tccattccagatagacaggtgaggt

SEQ ID NO: 670159 - DNA, 25 bp, Homo sapien
cattccagatagacaggtgaggtca

SEQ ID NO: 670160 - DNA, 25 bp, Homo sapien
gttccattccagatagacaggtgag

SEQ ID NO: 670161 - DNA, 25 bp, Homo sapien
aacacctcttagatctgccactggg

SEQ ID NO: 670162 - DNA, 25 bp, Homo sapien
ttctggagagccagatattatcaag

SEQ ID NO: 670163 - DNA, 25 bp, Homo sapien
atgtaaacacctcttagatctgcca

SEQ ID NO: 670164 - DNA, 25 bp, Homo sapien
tttcatagcgtggtttctggagagc

SEQ ID NO: 670165 - DNA, 25 bp, Homo sapien
ccataatgataacttatagctgatg

SEQ ID NO: 670166 - DNA, 25 bp, Homo sapien
ttggtcgttgtctagtaagttacca

SEQ ID NO: 670167 - DNA, 25 bp, Homo sapien
tctagtaagttaccataatgataac

SEQ ID NO: 670168 - DNA, 25 bp, Homo sapien
tcactgcaaacattctctggaccac

SEQ ID NO: 670169 - DNA, 25 bp, Homo sapien
ttgatttgcagaatactgtcaaatt

SEQ ID NO: 670170 - DNA, 25 bp, Homo sapien
tctggctttgaaggatagagagctg

SEQ ID NO: 670171 - DNA, 25 bp, Homo sapien
gagagctggagtgagttcccaacta

SEQ ID NO: 670172 - DNA, 25 bp, Homo sapien
ttccatgtcttcattgtgccttctg

SEQ ID NO: 670173 - DNA, 25 bp, Homo sapien
aagcagcacaggatctggaacagtc

SEQ ID NO: 670174 - DNA, 25 bp, Homo sapien
agcagcacaggatctggaacagtca

SEQ ID NO: 670175 - DNA, 25 bp, Homo sapien
caagcagcacaggatctggaacagt

SEQ ID NO: 670176 - DNA, 25 bp, Homo sapien
cagtcaatggtcttgtaaataaatg

SEQ ID NO: 670177 - DNA, 25 bp, Homo sapien
tttttctagctccaaaggcacagtt

SEQ ID NO: 670178 - DNA, 25 bp, Homo sapien
cactggaatgagctgggatggggcc

SEQ ID NO: 670179 - DNA, 25 bp, Homo sapien
aaaggcacagttgtctacagattcc

SEQ ID NO: 670180 - DNA, 25 bp, Homo sapien
ggcatccagaaaccacttctgagaa

SEQ ID NO: 670181 - DNA, 25 bp, Homo sapien
tggcatccagaaaccacttctgaga

SEQ ID NO: 670182 - DNA, 25 bp, Homo sapien
taaaattgtactcactttcggctgg

SEQ ID NO: 670183 - DNA, 25 bp, Homo sapien
tctcctgggcagctgaagggatatt

SEQ ID NO: 670184 - DNA, 25 bp, Homo sapien
gtggccctagccctgttgagaacct

SEQ ID NO: 670185 - DNA, 25 bp, Homo sapien
gcccagacgctgtgtattaatttga

SEQ ID NO: 670186 - DNA, 25 bp, Homo sapien
cctcattatcaagaagtggcttctc

SEQ ID NO: 670187 - DNA, 25 bp, Homo sapien
gggcatgtccccatggaagccagtg

SEQ ID NO: 670188 - DNA, 25 bp, Homo sapien
gcccctctcagaagtgttaattcca

SEQ ID NO: 670189 - DNA, 25 bp, Homo sapien
tcaaggacaaagaatgagcgggcat

SEQ ID NO: 670190 - DNA, 25 bp, Homo sapien
tgctcaggctctttgacaggtcatt

SEQ ID NO: 670191 - DNA, 25 bp, Homo sapien
taaactgaagcttcagttcctccca

SEQ ID NO: 670192 - DNA, 25 bp, Homo sapien
aagcttcagttcctcccatcctcac

SEQ ID NO: 670193 - DNA, 25 bp, Homo sapien
tgaagcttcagttcctcccatcctc

SEQ ID NO: 670194 - DNA, 25 bp, Homo sapien
actgaagcttcagttcctcccatcc

SEQ ID NO: 670195 - DNA, 25 bp, Homo sapien
tccttccctttgagacaatccaaaa

SEQ ID NO: 670196 - DNA, 25 bp, Homo sapien
aaacaatctcctcaagtaaacctga

SEQ ID NO: 670197 - DNA, 25 bp, Homo sapien
gaagcacgaactctgcttatttcct

SEQ ID NO: 670198 - DNA, 25 bp, Homo sapien
cctttgagacaatccaaaacaatct

SEQ ID NO: 670199 - DNA, 25 bp, Homo sapien
gacacctacatagtgcctcctatag

SEQ ID NO: 670200 - DNA, 25 bp, Homo sapien
cacctacatagtgcctcctatagtc

SEQ ID NO: 670201 - DNA, 25 bp, Homo sapien
agcttgcccagacttgtgcagaagg

SEQ ID NO: 670202 - DNA, 25 bp, Homo sapien
aataaagtcctgcatcagcttgccc

SEQ ID NO: 670203 - DNA, 25 bp, Homo sapien
gcattatctgaatccgcttagtgga

SEQ ID NO: 670204 - DNA, 25 bp, Homo sapien
tagtggatactctaaatgagagtct

SEQ ID NO: 670205 - DNA, 25 bp, Homo sapien
gcttttgcattgacaaaccgcatta

SEQ ID NO: 670206 - DNA, 25 bp, Homo sapien
tcatcccttcgcttttgcattgaca

SEQ ID NO: 670207 - DNA, 25 bp, Homo sapien
gccttcttattttccctggatggag

SEQ ID NO: 670208 - DNA, 25 bp, Homo sapien
tgcctcttctcccaaggtttctttg

SEQ ID NO: 670209 - DNA, 25 bp, Homo sapien
ttgccttcttattttccctggatgg

SEQ ID NO: 670210 - DNA, 25 bp, Homo sapien
tcttattttccctggatggagttgg

SEQ ID NO: 670211 - DNA, 25 bp, Homo sapien
ttgagaccgacatacggaagtccat

SEQ ID NO: 670212 - DNA, 25 bp, Homo sapien
gggcttgagaccgacatacggaagt

SEQ ID NO: 670213 - DNA, 25 bp, Homo sapien
aaggggcttgagaccgacatacgga

SEQ ID NO: 670214 - DNA, 25 bp, Homo sapien
gcttgagaccgacatacggaagtcc

SEQ ID NO: 670215 - DNA, 25 bp, Homo sapien
tgaactctgaatccacagggtaagg

SEQ ID NO: 670216 - DNA, 25 bp, Homo sapien
ctcataacaggctctagagtatcca

SEQ ID NO: 670217 - DNA, 25 bp, Homo sapien
taacaggctctagagtatccaaagc

SEQ ID NO: 670218 - DNA, 25 bp, Homo sapien
cataacaggctctagagtatccaaa

SEQ ID NO: 670219 - DNA, 25 bp, Homo sapien
aatgtttgctttccgatacattgga

SEQ ID NO: 670220 - DNA, 25 bp, Homo sapien
ttagcctcaatgtttgctttccgat

SEQ ID NO: 670221 - DNA, 25 bp, Homo sapien
ccgatacattggatttatagagtgt

SEQ ID NO: 670222 - DNA, 25 bp, Homo sapien
gctttccgatacattggatttatag

SEQ ID NO: 670223 - DNA, 25 bp, Homo sapien
taactgatgaggatgagttaaaggc

SEQ ID NO: 670224 - DNA, 25 bp, Homo sapien
gctggtgcttgcataactgatgagg

SEQ ID NO: 670225 - DNA, 25 bp, Homo sapien
acaccagtctcttcgcagggctcca

SEQ ID NO: 670226 - DNA, 25 bp, Homo sapien
atgaggatgagttaaaggcagcttc

SEQ ID NO: 670227 - DNA, 25 bp, Homo sapien
ggaacttagagccaaactggtggtc

SEQ ID NO: 670228 - DNA, 25 bp, Homo sapien
tagagccaaactggtggtcataaag

SEQ ID NO: 670229 - DNA, 25 bp, Homo sapien
gccaaactggtggtcataaagtcag

SEQ ID NO: 670230 - DNA, 25 bp, Homo sapien
actggtggtcataaagtcagcttca

SEQ ID NO: 670231 - DNA, 25 bp, Homo sapien
aacctgaggagcttatgatcacaat

SEQ ID NO: 670232 - DNA, 25 bp, Homo sapien
aagcgttagaaagattaaacctgag

SEQ ID NO: 670233 - DNA, 25 bp, Homo sapien
tagaaagattaaacctgaggagctt

SEQ ID NO: 670234 - DNA, 25 bp, Homo sapien
gattaaacctgaggagcttatgatc

SEQ ID NO: 670235 - DNA, 25 bp, Homo sapien
aaagcgagggcaaacttcttagcct

SEQ ID NO: 670236 - DNA, 25 bp, Homo sapien
taaaaatcagcaacacgaaccatca

SEQ ID NO: 670237 - DNA, 25 bp, Homo sapien
agttacgctcggcaggagatccagg

SEQ ID NO: 670238 - DNA, 25 bp, Homo sapien
gagatccaggcaaagcgagggcaaa

SEQ ID NO: 670239 - DNA, 25 bp, Homo sapien
tgccaacagcgattttccataattt

SEQ ID NO: 670240 - DNA, 25 bp, Homo sapien
gacatccagtgagaggatgactgac

SEQ ID NO: 670241 - DNA, 25 bp, Homo sapien
cagtgagaggatgactgacagcaga

SEQ ID NO: 670242 - DNA, 25 bp, Homo sapien
aagggaagaaagtggctggcctagc

SEQ ID NO: 670243 - DNA, 25 bp, Homo sapien
ttagtgaacatgacatccagtgaga

SEQ ID NO: 670244 - DNA, 25 bp, Homo sapien
gtccctctagcacattgcgacttac

SEQ ID NO: 670245 - DNA, 25 bp, Homo sapien
tgtccctctagcacattgcgactta

SEQ ID NO: 670246 - DNA, 25 bp, Homo sapien
acctgtccctctagcacattgcgac

SEQ ID NO: 670247 - DNA, 25 bp, Homo sapien
ctgtccctctagcacattgcgactt

SEQ ID NO: 670248 - DNA, 25 bp, Homo sapien
gagatgccacgggaagctgtgtttt

SEQ ID NO: 670249 - DNA, 25 bp, Homo sapien
gatgccacgggaagctgtgttttgc

SEQ ID NO: 670250 - DNA, 25 bp, Homo sapien
ccacgggaagctgtgttttgcaaag

SEQ ID NO: 670251 - DNA, 25 bp, Homo sapien
tgccacgggaagctgtgttttgcaa

SEQ ID NO: 670252 - DNA, 25 bp, Homo sapien
tgataagcgaactaatatcaaagtg

SEQ ID NO: 670253 - DNA, 25 bp, Homo sapien
tgtctgataagcgaactaatatcaa

SEQ ID NO: 670254 - DNA, 25 bp, Homo sapien
gatgtctgataagcgaactaatatc

SEQ ID NO: 670255 - DNA, 25 bp, Homo sapien
caaagatgtctgataagcgaactaa

SEQ ID NO: 670256 - DNA, 25 bp, Homo sapien
ctacatagacatgccagctgaggga

SEQ ID NO: 670257 - DNA, 25 bp, Homo sapien
tgagaccccattccaacagaacctt

SEQ ID NO: 670258 - DNA, 25 bp, Homo sapien
ttggccacaaccccgactacataga

SEQ ID NO: 670259 - DNA, 25 bp, Homo sapien
ctgagggaaagcctgccagtcagag

SEQ ID NO: 670260 - DNA, 25 bp, Homo sapien
tagagtgacatgtcaacattccaaa

SEQ ID NO: 670261 - DNA, 25 bp, Homo sapien
cagagcacacttagagtgacatgtc

SEQ ID NO: 670262 - DNA, 25 bp, Homo sapien
gcacacttagagtgacatgtcaaca

SEQ ID NO: 670263 - DNA, 25 bp, Homo sapien
acatgtcaacattccaaaccgcctg

SEQ ID NO: 670264 - DNA, 25 bp, Homo sapien
gacttgggctgacgtttctcaatta

SEQ ID NO: 670265 - DNA, 25 bp, Homo sapien
gctgacgtttctcaattagggcccc

SEQ ID NO: 670266 - DNA, 25 bp, Homo sapien
tgggctgacgtttctcaattagggc

SEQ ID NO: 670267 - DNA, 25 bp, Homo sapien
ctcagacttgggctgacgtttctca

SEQ ID NO: 670268 - DNA, 25 bp, Homo sapien
gataaaatacagcttggtttccagg

SEQ ID NO: 670269 - DNA, 25 bp, Homo sapien
tccagttgtgcttggcgctggctcc

SEQ ID NO: 670270 - DNA, 25 bp, Homo sapien
tattacagagataaaatacagcttg

SEQ ID NO: 670271 - DNA, 25 bp, Homo sapien
tggtgcacatgaaccgggattttcc

SEQ ID NO: 670272 - DNA, 25 bp, Homo sapien
ttctgtaagctgtcgaaacccaggg

SEQ ID NO: 670273 - DNA, 25 bp, Homo sapien
acagccctgttaagctgaagcatga

SEQ ID NO: 670274 - DNA, 25 bp, Homo sapien
tgaagcatgaaaccttgcacctctg

SEQ ID NO: 670275 - DNA, 25 bp, Homo sapien
cacctctgtgatacaaaccatgaaa

SEQ ID NO: 670276 - DNA, 25 bp, Homo sapien
cttcaatgtaaagattttcctcctc

SEQ ID NO: 670277 - DNA, 25 bp, Homo sapien
agattttcctcctctaaattctcca

SEQ ID NO: 670278 - DNA, 25 bp, Homo sapien
ttcctcctctaaattctccatgagc

SEQ ID NO: 670279 - DNA, 25 bp, Homo sapien
attttcctcctctaaattctccatg

SEQ ID NO: 670280 - DNA, 25 bp, Homo sapien
ctggactgtccctagagcatggcct

SEQ ID NO: 670281 - DNA, 25 bp, Homo sapien
ggcttgtgcttctggtcttcaccag

SEQ ID NO: 670282 - DNA, 25 bp, Homo sapien
ctgacctctggcttaaccttgatga

SEQ ID NO: 670283 - DNA, 25 bp, Homo sapien
atgacttcaatgtgtggcagcttgc

SEQ ID NO: 670284 - DNA, 25 bp, Homo sapien
ttaatggtaatctttcctccaagcc

SEQ ID NO: 670285 - DNA, 25 bp, Homo sapien
gctgcagcatgttgcatataatcag

SEQ ID NO: 670286 - DNA, 25 bp, Homo sapien
tcagttggtgtcttaacatggctgc

SEQ ID NO: 670287 - DNA, 25 bp, Homo sapien
gcagcatgttgcatataatcagata

SEQ ID NO: 670288 - DNA, 25 bp, Homo sapien
gttcttttacatagtgtggctgagg

SEQ ID NO: 670289 - DNA, 25 bp, Homo sapien
gatggaacaggcaataagtagttct

SEQ ID NO: 670290 - DNA, 25 bp, Homo sapien
gtcagtgagatggaacaggcaataa

SEQ ID NO: 670291 - DNA, 25 bp, Homo sapien
ttttacatagtgtggctgaggctgg

SEQ ID NO: 670292 - DNA, 25 bp, Homo sapien
aacatctgtgaggacgaggccccct

SEQ ID NO: 670293 - DNA, 25 bp, Homo sapien
tctaactccgtgtgccacactttgc

SEQ ID NO: 670294 - DNA, 25 bp, Homo sapien
aacggctctggaataaaatgctggg

SEQ ID NO: 670295 - DNA, 25 bp, Homo sapien
gggtgggcgctccttaacgtcaaca

SEQ ID NO: 670296 - DNA, 25 bp, Homo sapien
cataacaccgttatagataaaaggg

SEQ ID NO: 670297 - DNA, 25 bp, Homo sapien
ctcaaataactttcagacaatggca

SEQ ID NO: 670298 - DNA, 25 bp, Homo sapien
gcaaagaacatgaatggaggactat

SEQ ID NO: 670299 - DNA, 25 bp, Homo sapien
gtgaaagccaaaactgagcatctgc

SEQ ID NO: 670300 - DNA, 25 bp, Homo sapien
cctttcaatcagctgtttaaaggaa

SEQ ID NO: 670301 - DNA, 25 bp, Homo sapien
ttcaatcagctgtttaaaggaaaaa

SEQ ID NO: 670302 - DNA, 25 bp, Homo sapien
tttcaatcagctgtttaaaggaaaa

SEQ ID NO: 670303 - DNA, 25 bp, Homo sapien
ctttcaatcagctgtttaaaggaaa

SEQ ID NO: 670304 - DNA, 25 bp, Homo sapien
cctggactatattggggacatatca

SEQ ID NO: 670305 - DNA, 25 bp, Homo sapien
gcatcctggactatattggggacat

SEQ ID NO: 670306 - DNA, 25 bp, Homo sapien
tccttgcatcctggactatattggg

SEQ ID NO: 670307 - DNA, 25 bp, Homo sapien
atttctcattagtagcctccttgca

SEQ ID NO: 670308 - DNA, 25 bp, Homo sapien
gaggagccggcccttgatatggaca

SEQ ID NO: 670309 - DNA, 25 bp, Homo sapien
gaaaagagagatagactctccagga

SEQ ID NO: 670310 - DNA, 25 bp, Homo sapien
gagaacgtgatcttttctaatgatg

SEQ ID NO: 670311 - DNA, 25 bp, Homo sapien
tgggcttctaatgagaacgtgatct

SEQ ID NO: 670312 - DNA, 25 bp, Homo sapien
tctttccacagtaggaggtctttgt

SEQ ID NO: 670313 - DNA, 25 bp, Homo sapien
tctagacgtgcgatgtggattctga

SEQ ID NO: 670314 - DNA, 25 bp, Homo sapien
ttgtggttttgagcaggacgatgct

SEQ ID NO: 670315 - DNA, 25 bp, Homo sapien
tagtaaaagctaagacagtggaggt

SEQ ID NO: 670316 - DNA, 25 bp, Homo sapien
tcggagagatcatggagggcaacac

SEQ ID NO: 670317 - DNA, 25 bp, Homo sapien
ccagaaggcagggagttaagtcagc

SEQ ID NO: 670318 - DNA, 25 bp, Homo sapien
tattaacgagatgaggaaggccaga

SEQ ID NO: 670319 - DNA, 25 bp, Homo sapien
ggcttaccccttcttacatttcaga

SEQ ID NO: 670320 - DNA, 25 bp, Homo sapien
ctgggcaatgctctgatcccgcagc

SEQ ID NO: 670321 - DNA, 25 bp, Homo sapien
taaccccatcactcatcaaaagtgc

SEQ ID NO: 670322 - DNA, 25 bp, Homo sapien
cagcgtcctcgcatagcattcataa

SEQ ID NO: 670323 - DNA, 25 bp, Homo sapien
catcaaaagtgctctgcaggccagg

SEQ ID NO: 670324 - DNA, 25 bp, Homo sapien
gagaaaatgaagcgtcttccccgtg

SEQ ID NO: 670325 - DNA, 25 bp, Homo sapien
aagagaaaatgaagcgtcttccccg

SEQ ID NO: 670326 - DNA, 25 bp, Homo sapien
gcgtcttccccgtgcggctctgcag

SEQ ID NO: 670327 - DNA, 25 bp, Homo sapien
gtcttccccgtgcggctctgcagca

SEQ ID NO: 670328 - DNA, 25 bp, Homo sapien
tcaaacctcagcaattccgcttagg

SEQ ID NO: 670329 - DNA, 25 bp, Homo sapien
tccgcttaggtgcaacttcaaccaa

SEQ ID NO: 670330 - DNA, 25 bp, Homo sapien
aaatcatggtctcttaacccatggg

SEQ ID NO: 670331 - DNA, 25 bp, Homo sapien
tatttagggagggagtatagcttac

SEQ ID NO: 670332 - DNA, 25 bp, Homo sapien
agcaacacccataaatctgtctgta

SEQ ID NO: 670333 - DNA, 25 bp, Homo sapien
ggattaagaacctcagttgggcaca

SEQ ID NO: 670334 - DNA, 25 bp, Homo sapien
ttgttccagatgccaatcaaaggcg

SEQ ID NO: 670335 - DNA, 25 bp, Homo sapien
agtgattgctccattgttccagatg

SEQ ID NO: 670336 - DNA, 25 bp, Homo sapien
ccacgctgagcaggtgtctgagaag

SEQ ID NO: 670337 - DNA, 25 bp, Homo sapien
tgagaagtgggccagaccacacttg

SEQ ID NO: 670338 - DNA, 25 bp, Homo sapien
gcgtacaaaatcagatctgatcggc

SEQ ID NO: 670339 - DNA, 25 bp, Homo sapien
cttgagcatccagccgtcagcgtac

SEQ ID NO: 670340 - DNA, 25 bp, Homo sapien
tggtcatctctttatgagctctgaa

SEQ ID NO: 670341 - DNA, 25 bp, Homo sapien
ggaagataaatgagctggagtcccc

SEQ ID NO: 670342 - DNA, 25 bp, Homo sapien
gaagggcctattagcagatctgatg

SEQ ID NO: 670343 - DNA, 25 bp, Homo sapien
cccagccccagatttggtcatctct

SEQ ID NO: 670344 - DNA, 25 bp, Homo sapien
ttggcccgtgctcataaaatttcgc

SEQ ID NO: 670345 - DNA, 25 bp, Homo sapien
ctttccctgttggcccgtgctcata

SEQ ID NO: 670346 - DNA, 25 bp, Homo sapien
cgtgctcataaaatttcgccttgga

SEQ ID NO: 670347 - DNA, 25 bp, Homo sapien
ataaaatttcgccttggacaggagc

SEQ ID NO: 670348 - DNA, 25 bp, Homo sapien
cctttacccacactccatttcttgg

SEQ ID NO: 670349 - DNA, 25 bp, Homo sapien
ccctttacccacactccatttcttg

SEQ ID NO: 670350 - DNA, 25 bp, Homo sapien
ctgggcaagaggaccgcttctgagt

SEQ ID NO: 670351 - DNA, 25 bp, Homo sapien
ggcaagaggaccgcttctgagtgag

SEQ ID NO: 670352 - DNA, 25 bp, Homo sapien
caagaggaccgcttctgagtgagtg

SEQ ID NO: 670353 - DNA, 25 bp, Homo sapien
tgggcaagaggaccgcttctgagtg

SEQ ID NO: 670354 - DNA, 25 bp, Homo sapien
ccagggtttactcttcaatgcagga

SEQ ID NO: 670355 - DNA, 25 bp, Homo sapien
taaagatctgcgagtgaatccaggg

SEQ ID NO: 670356 - DNA, 25 bp, Homo sapien
gcctcatgcaaactgctcccttagt

SEQ ID NO: 670357 - DNA, 25 bp, Homo sapien
ttatgtccagagagaccccgatgtc

SEQ ID NO: 670358 - DNA, 25 bp, Homo sapien
aaatgtgttgactgattctaacttc

SEQ ID NO: 670359 - DNA, 25 bp, Homo sapien
tgttgactgattctaacttccatcc

SEQ ID NO: 670360 - DNA, 25 bp, Homo sapien
gactgattctaacttccatcctgtc

SEQ ID NO: 670361 - DNA, 25 bp, Homo sapien
tgtgttgactgattctaacttccat

SEQ ID NO: 670362 - DNA, 25 bp, Homo sapien
tcttctgcagaagtgtgtgcctgaa

SEQ ID NO: 670363 - DNA, 25 bp, Homo sapien
gagaggatttactcggatgaaattc

SEQ ID NO: 670364 - DNA, 25 bp, Homo sapien
gatttactcggatgaaattcaggcc

SEQ ID NO: 670365 - DNA, 25 bp, Homo sapien
gaagatcactctccctgacacaatc

SEQ ID NO: 670366 - DNA, 25 bp, Homo sapien
acaattagaagtgacatgtgaccca

SEQ ID NO: 670367 - DNA, 25 bp, Homo sapien
caattagaagtgacatgtgacccag

SEQ ID NO: 670368 - DNA, 25 bp, Homo sapien
cacaattagaagtgacatgtgaccc

SEQ ID NO: 670369 - DNA, 25 bp, Homo sapien
aaactacttgcacctagtctcagag

SEQ ID NO: 670370 - DNA, 25 bp, Homo sapien
aaagtaagacagctattatctttat

SEQ ID NO: 670371 - DNA, 25 bp, Homo sapien
tcctattagtacttcctagatttaa

SEQ ID NO: 670372 - DNA, 25 bp, Homo sapien
taaaaatcaccttgtaagccacagt

SEQ ID NO: 670373 - DNA, 25 bp, Homo sapien
tctgtattacgcagtcccatggcag

SEQ ID NO: 670374 - DNA, 25 bp, Homo sapien
gaagaatgaacatcaggaccagagc

SEQ ID NO: 670375 - DNA, 25 bp, Homo sapien
tagaatttgccgtggaccaacaggc

SEQ ID NO: 670376 - DNA, 25 bp, Homo sapien
caacaggcagtcgtattctccacaa

SEQ ID NO: 670377 - DNA, 25 bp, Homo sapien
tatctgagtcagtatgcaaaagcca

SEQ ID NO: 670378 - DNA, 25 bp, Homo sapien
gaatagatctttctcaccccagtca

SEQ ID NO: 670379 - DNA, 25 bp, Homo sapien
tactgggttgaacagcgattccgtt

SEQ ID NO: 670380 - DNA, 25 bp, Homo sapien
gtgtcaagtggccaataagaatacc

SEQ ID NO: 670381 - DNA, 25 bp, Homo sapien
gcattaaaagccaagaccaaagacg

SEQ ID NO: 670382 - DNA, 25 bp, Homo sapien
tggatatgctgaaagctccttggca

SEQ ID NO: 670383 - DNA, 25 bp, Homo sapien
gatgtttaatgaggccaaaactcag

SEQ ID NO: 670384 - DNA, 25 bp, Homo sapien
tcagtatttggatccctttgatgct

SEQ ID NO: 670385 - DNA, 25 bp, Homo sapien
gattttgcccagtgatcatcccaag

SEQ ID NO: 670386 - DNA, 25 bp, Homo sapien
acttgtgacctgtaaccctgtggca

SEQ ID NO: 670387 - DNA, 25 bp, Homo sapien
acctgggctaggatggacttgtgac

SEQ ID NO: 670388 - DNA, 25 bp, Homo sapien
cttgtgcgcagaatcaggtggccct

SEQ ID NO: 670389 - DNA, 25 bp, Homo sapien
cgaggaccaagtattcagaaagggc

SEQ ID NO: 670390 - DNA, 25 bp, Homo sapien
gggcaccataaccataaagtacttg

SEQ ID NO: 670391 - DNA, 25 bp, Homo sapien
ttctgtcatttcatcgaggaccaag

SEQ ID NO: 670392 - DNA, 25 bp, Homo sapien
agtgtacctatttggttcctcctca

SEQ ID NO: 670393 - DNA, 25 bp, Homo sapien
ggcccatatggatcagaatccatga

SEQ ID NO: 670394 - DNA, 25 bp, Homo sapien
aattcctatgaagtattctgtccat

SEQ ID NO: 670395 - DNA, 25 bp, Homo sapien
tgaagtattctgtccatctcctgtg

SEQ ID NO: 670396 - DNA, 25 bp, Homo sapien
atgccaaaggcccatatggatcaga

SEQ ID NO: 670397 - DNA, 25 bp, Homo sapien
ccttgcccagactagtggcagttgg

SEQ ID NO: 670398 - DNA, 25 bp, Homo sapien
tccaccttgcccagactagtggcag

SEQ ID NO: 670399 - DNA, 25 bp, Homo sapien
aaaaaaccagaagagcggctcaggg

SEQ ID NO: 670400 - DNA, 25 bp, Homo sapien
ttgcccagactagtggcagttggag

SEQ ID NO: 670401 - DNA, 25 bp, Homo sapien
ggaagcagggtctgcccaagatggg

SEQ ID NO: 670402 - DNA, 25 bp, Homo sapien
tctgcccaagatggggcacagaatc

SEQ ID NO: 670403 - DNA, 25 bp, Homo sapien
cacagaatcacacagaattcgcctt

SEQ ID NO: 670404 - DNA, 25 bp, Homo sapien
tcacacagaattcgcctttcaagat

SEQ ID NO: 670405 - DNA, 25 bp, Homo sapien
aagaagtatcaaaacattgctcctg

SEQ ID NO: 670406 - DNA, 25 bp, Homo sapien
gccgcagagttggactcacagaata

SEQ ID NO: 670407 - DNA, 25 bp, Homo sapien
tctttatgaagcatgagccgcagag

SEQ ID NO: 670408 - DNA, 25 bp, Homo sapien
aacattgctcctgtttccaggaacc

SEQ ID NO: 670409 - DNA, 25 bp, Homo sapien
tgacagcaggtaggcaaaggctcag

SEQ ID NO: 670410 - DNA, 25 bp, Homo sapien
ctctgacagcaggtaggcaaaggct

SEQ ID NO: 670411 - DNA, 25 bp, Homo sapien
gtaggcaaaggctcagggcctgaca

SEQ ID NO: 670412 - DNA, 25 bp, Homo sapien
ctgagaggaagccacacagggctct

SEQ ID NO: 670413 - DNA, 25 bp, Homo sapien
ggaccatgcacatcccgcagaaatg

SEQ ID NO: 670414 - DNA, 25 bp, Homo sapien
tctgtgggaccatgcacatcccgca

SEQ ID NO: 670415 - DNA, 25 bp, Homo sapien
gggctctgtgggaccatgcacatcc

SEQ ID NO: 670416 - DNA, 25 bp, Homo sapien
atgcacatcccgcagaaatgcctgt

SEQ ID NO: 670417 - DNA, 25 bp, Homo sapien
ttttgcagaccaaaagggcctgtgt

SEQ ID NO: 670418 - DNA, 25 bp, Homo sapien
ttgcttcactttcttcgcatgcaac

SEQ ID NO: 670419 - DNA, 25 bp, Homo sapien
tgccttttgcagaccaaaagggcct

SEQ ID NO: 670420 - DNA, 25 bp, Homo sapien
tgcaacaggttgaagaaactcagcc

SEQ ID NO: 670421 - DNA, 25 bp, Homo sapien
tggactcagaagaaggtgttttgca

SEQ ID NO: 670422 - DNA, 25 bp, Homo sapien
gactcagaagaaggtgttttgcagt

SEQ ID NO: 670423 - DNA, 25 bp, Homo sapien
gtctctggactcagaagaaggtgtt

SEQ ID NO: 670424 - DNA, 25 bp, Homo sapien
tctggactcagaagaaggtgttttg

SEQ ID NO: 670425 - DNA, 25 bp, Homo sapien
ttcttgcggaaagccagattcagtc

SEQ ID NO: 670426 - DNA, 25 bp, Homo sapien
taagaacagagtgcactgggaacgg

SEQ ID NO: 670427 - DNA, 25 bp, Homo sapien
catgtgagtagttggcacagtgcca

SEQ ID NO: 670428 - DNA, 25 bp, Homo sapien
tgaagtcattgctgcccgaaagtgc

SEQ ID NO: 670429 - DNA, 25 bp, Homo sapien
agcacgttcagagccaagtcacagg

SEQ ID NO: 670430 - DNA, 25 bp, Homo sapien
gaaatttctcgaagtggatcctgga

SEQ ID NO: 670431 - DNA, 25 bp, Homo sapien
ggatcctggagtgtcacaagagccc

SEQ ID NO: 670432 - DNA, 25 bp, Homo sapien
ttcctacaacaaaacgtggcctggc

SEQ ID NO: 670433 - DNA, 25 bp, Homo sapien
gacccagatggaactgatttgttca

SEQ ID NO: 670434 - DNA, 25 bp, Homo sapien
tataccaagtgatataaccccttct

SEQ ID NO: 670435 - DNA, 25 bp, Homo sapien
gatataaccccttctaatgatatta

SEQ ID NO: 670436 - DNA, 25 bp, Homo sapien
gctacaatgtgtctgacattatacc

SEQ ID NO: 670437 - DNA, 25 bp, Homo sapien
cctcctgttgttctatccctgagac

SEQ ID NO: 670438 - DNA, 25 bp, Homo sapien
gggccggactctgattggaacagca

SEQ ID NO: 670439 - DNA, 25 bp, Homo sapien
acaaggggccggactctgattggaa

SEQ ID NO: 670440 - DNA, 25 bp, Homo sapien
ctgttgttctatccctgagacttga

SEQ ID NO: 670441 - DNA, 25 bp, Homo sapien
ttagaagccagagatatcttgggcc

SEQ ID NO: 670442 - DNA, 25 bp, Homo sapien
cagagtgtgcttgtcgaagtctaca

SEQ ID NO: 670443 - DNA, 25 bp, Homo sapien
tccctcctgaccaaaggaagttgag

SEQ ID NO: 670444 - DNA, 25 bp, Homo sapien
catgtcaacagatgacctgagtgag

SEQ ID NO: 670445 - DNA, 25 bp, Homo sapien
acttcacaaggcaatcacaagtatc

SEQ ID NO: 670446 - DNA, 25 bp, Homo sapien
caatagccaaatagaccaaggggag

SEQ ID NO: 670447 - DNA, 25 bp, Homo sapien
tgaactttgttgagctaaaggagta

SEQ ID NO: 670448 - DNA, 25 bp, Homo sapien
ggaaaacacaacctgagaacttcac

SEQ ID NO: 670449 - DNA, 25 bp, Homo sapien
agcaggaggggctcatggtgaggaa

SEQ ID NO: 670450 - DNA, 25 bp, Homo sapien
agagcttcagaagggagcagcagga

SEQ ID NO: 670451 - DNA, 25 bp, Homo sapien
cagaatgttctggagagcttcagaa

SEQ ID NO: 670452 - DNA, 25 bp, Homo sapien
catggtgaggaagggagccaggtcc

SEQ ID NO: 670453 - DNA, 25 bp, Homo sapien
ggaacgcttgtgcagctataatctc

SEQ ID NO: 670454 - DNA, 25 bp, Homo sapien
aaatgctcccaagattgaacgtgcg

SEQ ID NO: 670455 - DNA, 25 bp, Homo sapien
tccacactgtaggtaccagaagctt

SEQ ID NO: 670456 - DNA, 25 bp, Homo sapien
tgaacgtgcggaacgcttgtgcagc

SEQ ID NO: 670457 - DNA, 25 bp, Homo sapien
ttccgactaatccatctgtggagcc

SEQ ID NO: 670458 - DNA, 25 bp, Homo sapien
aagactatgacccacttcccacagt

SEQ ID NO: 670459 - DNA, 25 bp, Homo sapien
cctgtggacggtcttgtgccctagt

SEQ ID NO: 670460 - DNA, 25 bp, Homo sapien
tcttgtgccctagtgttcctgcagc

SEQ ID NO: 670461 - DNA, 25 bp, Homo sapien
gaagacccatgaacatcaggcagtg

SEQ ID NO: 670462 - DNA, 25 bp, Homo sapien
ctctcaggatcagtggagaccagaa

SEQ ID NO: 670463 - DNA, 25 bp, Homo sapien
ggtcctgaaggtctagtgaagccat

SEQ ID NO: 670464 - DNA, 25 bp, Homo sapien
cagcacatacaggtgtgtggaccag

SEQ ID NO: 670465 - DNA, 25 bp, Homo sapien
ttaggtgcttgtaattacagcccat

SEQ ID NO: 670466 - DNA, 25 bp, Homo sapien
tcttaggtgcttgtaattacagccc

SEQ ID NO: 670467 - DNA, 25 bp, Homo sapien
ttgcaggtcttaggtgcttgtaatt

SEQ ID NO: 670468 - DNA, 25 bp, Homo sapien
caggtcttaggtgcttgtaattaca

SEQ ID NO: 670469 - DNA, 25 bp, Homo sapien
ctgacccacgtttctgcagattgtt

SEQ ID NO: 670470 - DNA, 25 bp, Homo sapien
ctcctggaactgtcagctccagcaa

SEQ ID NO: 670471 - DNA, 25 bp, Homo sapien
caaggctggtgggaaatctgtgctc

SEQ ID NO: 670472 - DNA, 25 bp, Homo sapien
gggccccagagaaagtcagcagcat

SEQ ID NO: 670473 - DNA, 25 bp, Homo sapien
gcatctaaagccaaaacacgggatg

SEQ ID NO: 670474 - DNA, 25 bp, Homo sapien
aggtctgcctggagagtcgctgctt

SEQ ID NO: 670475 - DNA, 25 bp, Homo sapien
taaaatggaaacagcgatctcctga

SEQ ID NO: 670476 - DNA, 25 bp, Homo sapien
tctgctgcaagtgctgaccaggcac

SEQ ID NO: 670477 - DNA, 25 bp, Homo sapien
tccaaattaacagtgcccagcagat

SEQ ID NO: 670478 - DNA, 25 bp, Homo sapien
ggaataacattttggcagtagcctg

SEQ ID NO: 670479 - DNA, 25 bp, Homo sapien
tatacctgtccatgaccttcttgga

SEQ ID NO: 670480 - DNA, 25 bp, Homo sapien
ggcagtggcccatatacctgtccat

SEQ ID NO: 670481 - DNA, 25 bp, Homo sapien
ggcccatatacctgtccatgacctt

SEQ ID NO: 670482 - DNA, 25 bp, Homo sapien
actcttgggcagtggcccatatacc

SEQ ID NO: 670483 - DNA, 25 bp, Homo sapien
cacacttgtccctgcttttagggga

SEQ ID NO: 670484 - DNA, 25 bp, Homo sapien
aatctcaccctcagaggaacccaca

SEQ ID NO: 670485 - DNA, 25 bp, Homo sapien
gggagcatgtcttagcccccttgtc

SEQ ID NO: 670486 - DNA, 25 bp, Homo sapien
accatctcctgtcccatggaactcc

SEQ ID NO: 670487 - DNA, 25 bp, Homo sapien
cagctgtagctgactgcactttgtg

SEQ ID NO: 670488 - DNA, 25 bp, Homo sapien
gtgccttgagaaggacagctgtagc

SEQ ID NO: 670489 - DNA, 25 bp, Homo sapien
ctgtagctgactgcactttgtgcaa

SEQ ID NO: 670490 - DNA, 25 bp, Homo sapien
cagagtgccttgagaaggacagctg

SEQ ID NO: 670491 - DNA, 25 bp, Homo sapien
atgaacttaacccacacagactcac

SEQ ID NO: 670492 - DNA, 25 bp, Homo sapien
aggatgaacttaacccacacagact

SEQ ID NO: 670493 - DNA, 25 bp, Homo sapien
caggatgaacttaacccacacagac

SEQ ID NO: 670494 - DNA, 25 bp, Homo sapien
ggatgaacttaacccacacagactc

SEQ ID NO: 670495 - DNA, 25 bp, Homo sapien
ataagttagggatccaggcctttgg

SEQ ID NO: 670496 - DNA, 25 bp, Homo sapien
actatgcaaatcttcgttccccagc

SEQ ID NO: 670497 - DNA, 25 bp, Homo sapien
tgtgtcatcaataagttagggatcc

SEQ ID NO: 670498 - DNA, 25 bp, Homo sapien
caacatggacaccaaaagctggctg

SEQ ID NO: 670499 - DNA, 25 bp, Homo sapien
ggttctgcaacctgaatttcttcca

SEQ ID NO: 670500 - DNA, 25 bp, Homo sapien
acctggttctgcaacctgaatttct

SEQ ID NO: 670501 - DNA, 25 bp, Homo sapien
tggttctgcaacctgaatttcttcc

SEQ ID NO: 670502 - DNA, 25 bp, Homo sapien
cctggttctgcaacctgaatttctt

SEQ ID NO: 670503 - DNA, 25 bp, Homo sapien
tctgctgctcgcgaatccgaggagt

SEQ ID NO: 670504 - DNA, 25 bp, Homo sapien
tgtgctccagcacgtatgtggccgc

SEQ ID NO: 670505 - DNA, 25 bp, Homo sapien
gagcaaatgctggactgcacagccc

SEQ ID NO: 670506 - DNA, 25 bp, Homo sapien
tgtggccgccctcatggagcaaatg

SEQ ID NO: 670507 - DNA, 25 bp, Homo sapien
gacaggtaacacgcagcagctgcat

SEQ ID NO: 670508 - DNA, 25 bp, Homo sapien
tgacaggtaacacgcagcagctgca

SEQ ID NO: 670509 - DNA, 25 bp, Homo sapien
ctgacaggtaacacgcagcagctgc

SEQ ID NO: 670510 - DNA, 25 bp, Homo sapien
aaatgagcaacaaagctgcagtttc

SEQ ID NO: 670511 - DNA, 25 bp, Homo sapien
gtacttgtgcatctccaaattccca

SEQ ID NO: 670512 - DNA, 25 bp, Homo sapien
catcatgtttgtacttgtgcatctc

SEQ ID NO: 670513 - DNA, 25 bp, Homo sapien
ctctgccagagattgaaatgagcaa

SEQ ID NO: 670514 - DNA, 25 bp, Homo sapien
gaggatgggtgtcaagccctgcaat

SEQ ID NO: 670515 - DNA, 25 bp, Homo sapien
catgatctctctagagtaaagctca

SEQ ID NO: 670516 - DNA, 25 bp, Homo sapien
cccaggccagtccaggtccatgatc

SEQ ID NO: 670517 - DNA, 25 bp, Homo sapien
tgcaatgggaagcacatcccttctc

SEQ ID NO: 670518 - DNA, 25 bp, Homo sapien
gcaggggcgttgtcctgccacagaa

SEQ ID NO: 670519 - DNA, 25 bp, Homo sapien
tcctgccacagaaatgcccagagac

SEQ ID NO: 670520 - DNA, 25 bp, Homo sapien
aggcaggggcgttgtcctgccacag

SEQ ID NO: 670521 - DNA, 25 bp, Homo sapien
aggggcgttgtcctgccacagaaat

SEQ ID NO: 670522 - DNA, 25 bp, Homo sapien
ctgagggaagcctgcctggttcact

SEQ ID NO: 670523 - DNA, 25 bp, Homo sapien
ccgggactgagggaagcctgcctgg

SEQ ID NO: 670524 - DNA, 25 bp, Homo sapien
gctcagcttccccggagatcccttc

SEQ ID NO: 670525 - DNA, 25 bp, Homo sapien
gatccccagcgaacctcgccactgg

SEQ ID NO: 670526 - DNA, 25 bp, Homo sapien
cttctatcagctttggggtgaggga

SEQ ID NO: 670527 - DNA, 25 bp, Homo sapien
ccccattcagagaaggtatctggct

SEQ ID NO: 670528 - DNA, 25 bp, Homo sapien
cagagaaggtatctggctctgggca

SEQ ID NO: 670529 - DNA, 25 bp, Homo sapien
gtgagggagacaggccccattcaga

SEQ ID NO: 670530 - DNA, 25 bp, Homo sapien
tctaaataaacaccatttccatggt

SEQ ID NO: 670531 - DNA, 25 bp, Homo sapien
cagggaaagaaacgcaatgcattgg

SEQ ID NO: 670532 - DNA, 25 bp, Homo sapien
tctaaagaacgcacttgaaagttgc

SEQ ID NO: 670533 - DNA, 25 bp, Homo sapien
taaaactgcaagcaccatgcggttc

SEQ ID NO: 670534 - DNA, 25 bp, Homo sapien
caaagctcgtttctgatgcaggaca

SEQ ID NO: 670535 - DNA, 25 bp, Homo sapien
tctcaccctaggagcgctgtggctc

SEQ ID NO: 670536 - DNA, 25 bp, Homo sapien
agggatggctaagcctctcacccta

SEQ ID NO: 670537 - DNA, 25 bp, Homo sapien
aagcctctcaccctaggagcgctgt

SEQ ID NO: 670538 - DNA, 25 bp, Homo sapien
gcctctcaccctaggagcgctgtgg

SEQ ID NO: 670539 - DNA, 25 bp, Homo sapien
acaaggctgtagtccagaacactcc

SEQ ID NO: 670540 - DNA, 25 bp, Homo sapien
aaaacatgcaacttccaagtgtgcc

SEQ ID NO: 670541 - DNA, 25 bp, Homo sapien
tgcccttgtactgggacctctcggt

SEQ ID NO: 670542 - DNA, 25 bp, Homo sapien
ttttctgatgcaaaatgcccggaac

SEQ ID NO: 670543 - DNA, 25 bp, Homo sapien
cacgttctctatgcggtttggcggg

SEQ ID NO: 670544 - DNA, 25 bp, Homo sapien
gggtatttacaagcctacagctggg

SEQ ID NO: 670545 - DNA, 25 bp, Homo sapien
gggagtatgatccatgatcaacaac

SEQ ID NO: 670546 - DNA, 25 bp, Homo sapien
acgcagccgccggagtttccaaact

SEQ ID NO: 670547 - DNA, 25 bp, Homo sapien
tataatcgagcaggcaataaaactg

SEQ ID NO: 670548 - DNA, 25 bp, Homo sapien
aggcaataaaactgatgagatttgg

SEQ ID NO: 670549 - DNA, 25 bp, Homo sapien
gatgagatttgggcgccgagcgtcc

SEQ ID NO: 670550 - DNA, 25 bp, Homo sapien
atttttctatataatcgagcaggca

SEQ ID NO: 670551 - DNA, 25 bp, Homo sapien
gttgctctcttcctggcgcggacta

SEQ ID NO: 670552 - DNA, 25 bp, Homo sapien
gagccagtgttctccgaactctgac

SEQ ID NO: 670553 - DNA, 25 bp, Homo sapien
gcctgtgtctcagggctgagagcca

SEQ ID NO: 670554 - DNA, 25 bp, Homo sapien
gaactctgacagacaggtccgtctg

SEQ ID NO: 670555 - DNA, 25 bp, Homo sapien
gtgacttctcgggactatgcctcgc

SEQ ID NO: 670556 - DNA, 25 bp, Homo sapien
tagtctgggactagggacgtgggac

SEQ ID NO: 670557 - DNA, 25 bp, Homo sapien
ctccctctcgctcaagtcaaacagg

SEQ ID NO: 670558 - DNA, 25 bp, Homo sapien
tctccggctctgctcgagtctagga

SEQ ID NO: 670559 - DNA, 25 bp, Homo sapien
gccggagttggcgagtttctcgcac

SEQ ID NO: 670560 - DNA, 25 bp, Homo sapien
agttggcgagtttctcgcacttgac

SEQ ID NO: 670561 - DNA, 25 bp, Homo sapien
ccctgaagccggagttggcgagttt

SEQ ID NO: 670562 - DNA, 25 bp, Homo sapien
tgaagccggagttggcgagtttctc

SEQ ID NO: 670563 - DNA, 25 bp, Homo sapien
tgctgaatgagctgcgtcttctcat

SEQ ID NO: 670564 - DNA, 25 bp, Homo sapien
ggtgcttctgctggacgcgtttata

SEQ ID NO: 670565 - DNA, 25 bp, Homo sapien
gctggacgcgtttatacctgcaaga

SEQ ID NO: 670566 - DNA, 25 bp, Homo sapien
caagactgggcgtagccccggttct

SEQ ID NO: 670567 - DNA, 25 bp, Homo sapien
tgagcgccgcgaaagctgtcgaagc

SEQ ID NO: 670568 - DNA, 25 bp, Homo sapien
gtcggagaagcggtcctccacgctg

SEQ ID NO: 670569 - DNA, 25 bp, Homo sapien
tagtgggcagctgttgcgccgggct

SEQ ID NO: 670570 - DNA, 25 bp, Homo sapien
cgaagctttgcagcggctgtggcac

SEQ ID NO: 670571 - DNA, 25 bp, Homo sapien
ggtgcgagccgatgagcgcttccac

SEQ ID NO: 670572 - DNA, 25 bp, Homo sapien
tgggtgcgagccgatgagcgcttcc

SEQ ID NO: 670573 - DNA, 25 bp, Homo sapien
gggtgcgagccgatgagcgcttcca

SEQ ID NO: 670574 - DNA, 25 bp, Homo sapien
cacggagctacacggagtgctgagc

SEQ ID NO: 670575 - DNA, 25 bp, Homo sapien
gttcatctgctggtagttgctcgcc

SEQ ID NO: 670576 - DNA, 25 bp, Homo sapien
tcttctgttcggtcgggctgaagct

SEQ ID NO: 670577 - DNA, 25 bp, Homo sapien
ccagtacagatcctcgaggtgtgtc

SEQ ID NO: 670578 - DNA, 25 bp, Homo sapien
aaactttgcggccggccggagcgcg

SEQ ID NO: 670579 - DNA, 25 bp, Homo sapien
caagcgcgggggggaagagcggaga

SEQ ID NO: 670580 - DNA, 25 bp, Homo sapien
ccggagcgcgccgagccaagcgcgg

SEQ ID NO: 670581 - DNA, 25 bp, Homo sapien
gctgccgcccgggaaactttgcggc

SEQ ID NO: 670582 - DNA, 25 bp, Homo sapien
gcgcgccggagagtcccgaggctgc

SEQ ID NO: 670583 - DNA, 25 bp, Homo sapien
gggccgccggccaagcctttgtctg

SEQ ID NO: 670584 - DNA, 25 bp, Homo sapien
gccgccggccaagcctttgtctggg

SEQ ID NO: 670585 - DNA, 25 bp, Homo sapien
cggcgcgccggagagtcccgaggct

SEQ ID NO: 670586 - DNA, 25 bp, Homo sapien
gtggagaggcaagcggagcgcgcgg

SEQ ID NO: 670587 - DNA, 25 bp, Homo sapien
agtgcccgttgctcgctctctagct

SEQ ID NO: 670588 - DNA, 25 bp, Homo sapien
tctagctctcttgctcttacgctct

SEQ ID NO: 670589 - DNA, 25 bp, Homo sapien
tcttacgctctctcgctcgcagccg

SEQ ID NO: 670590 - DNA, 25 bp, Homo sapien
gcccgccgcggagaggctcaaacag

SEQ ID NO: 670591 - DNA, 25 bp, Homo sapien
ggctcaaacaggcataaagtgcgac

SEQ ID NO: 670592 - DNA, 25 bp, Homo sapien
aagtggccactgtgcgcaaaggcgc

SEQ ID NO: 670593 - DNA, 25 bp, Homo sapien
ggaaggcttggacggcgcctcgtac

SEQ ID NO: 670594 - DNA, 25 bp, Homo sapien
tggtcgccccgttgaaattccgtgc

SEQ ID NO: 670595 - DNA, 25 bp, Homo sapien
ggacaggttcccctcgagcgatgta

SEQ ID NO: 670596 - DNA, 25 bp, Homo sapien
catactatgtgtgcaccagagccca

SEQ ID NO: 670597 - DNA, 25 bp, Homo sapien
gagcgatgtacaggtcctcgggtcc

SEQ ID NO: 670598 - DNA, 25 bp, Homo sapien
cagtgagagcacactcgtttccaga

SEQ ID NO: 670599 - DNA, 25 bp, Homo sapien
aaatgtcctcgtcttgtttgaacgc

SEQ ID NO: 670600 - DNA, 25 bp, Homo sapien
actcgggaccgggtgtctcggatct

SEQ ID NO: 670601 - DNA, 25 bp, Homo sapien
tttccagatcactcgggaccgggtg

SEQ ID NO: 670602 - DNA, 25 bp, Homo sapien
cactgtggacttctgcgcgggcacc

SEQ ID NO: 670603 - DNA, 25 bp, Homo sapien
ctgtggacttctgcgcgggcaccaa

SEQ ID NO: 670604 - DNA, 25 bp, Homo sapien
tctgcgcgggcaccaagatggacag

SEQ ID NO: 670605 - DNA, 25 bp, Homo sapien
cttctgcgcgggcaccaagatggac

SEQ ID NO: 670606 - DNA, 25 bp, Homo sapien
gacactggccgtcgaagacttccgt

SEQ ID NO: 670607 - DNA, 25 bp, Homo sapien
aggtctgcggttccgaacctcctct

SEQ ID NO: 670608 - DNA, 25 bp, Homo sapien
ggctctgcctgacactggccgtcga

SEQ ID NO: 670609 - DNA, 25 bp, Homo sapien
cttccgtggcccattaaggccctgg

SEQ ID NO: 670610 - DNA, 25 bp, Homo sapien
cctcgggattctttagctacaaatg

SEQ ID NO: 670611 - DNA, 25 bp, Homo sapien
taggagtaagagaagaggttattcc

SEQ ID NO: 670612 - DNA, 25 bp, Homo sapien
cgcctcgggattctttagctacaaa

SEQ ID NO: 670613 - DNA, 25 bp, Homo sapien
gagcattcggggtaggagtaagaga

SEQ ID NO: 670614 - DNA, 25 bp, Homo sapien
ctggcatcctcattcagcccgaagg

SEQ ID NO: 670615 - DNA, 25 bp, Homo sapien
attcagcccgaaggtgcgccgttca

SEQ ID NO: 670616 - DNA, 25 bp, Homo sapien
ctcattcagcccgaaggtgcgccgt

SEQ ID NO: 670617 - DNA, 25 bp, Homo sapien
catcctcattcagcccgaaggtgcg

SEQ ID NO: 670618 - DNA, 25 bp, Homo sapien
cggcgttatttccctgagggttgca

SEQ ID NO: 670619 - DNA, 25 bp, Homo sapien
caggtggttggtgagcgaggaggcg

SEQ ID NO: 670620 - DNA, 25 bp, Homo sapien
tcggcgttatttccctgagggttgc

SEQ ID NO: 670621 - DNA, 25 bp, Homo sapien
gtggttggtgagcgaggaggcgtct

SEQ ID NO: 670622 - DNA, 25 bp, Homo sapien
cggtgggctccggatcgtactatgc

SEQ ID NO: 670623 - DNA, 25 bp, Homo sapien
tatgcggagtcgctaagcagaggcc

SEQ ID NO: 670624 - DNA, 25 bp, Homo sapien
tgcgggagcgggaaacttccagctt

SEQ ID NO: 670625 - DNA, 25 bp, Homo sapien
ttccagcttcaaagctcggtgggct

SEQ ID NO: 670626 - DNA, 25 bp, Homo sapien
ccatacaaccgctgtcagattccaa

SEQ ID NO: 670627 - DNA, 25 bp, Homo sapien
aaggcagctatcacttccactttcc

SEQ ID NO: 670628 - DNA, 25 bp, Homo sapien
caacccagtgcttctaaaaaggtat

SEQ ID NO: 670629 - DNA, 25 bp, Homo sapien
tccactttcccttgccccatacaac

SEQ ID NO: 670630 - DNA, 25 bp, Homo sapien
ggctcgagaggctaaatgatttctt

SEQ ID NO: 670631 - DNA, 25 bp, Homo sapien
tcacacaaagaatgaggctcgagag

SEQ ID NO: 670632 - DNA, 25 bp, Homo sapien
cagagataggtaagcagggagataa

SEQ ID NO: 670633 - DNA, 25 bp, Homo sapien
ttacagttatacagcagtgatgagc

SEQ ID NO: 670634 - DNA, 25 bp, Homo sapien
agagtcctctcatcctgtcctttac

SEQ ID NO: 670635 - DNA, 25 bp, Homo sapien
tgcagagtcctctcatcctgtcctt

SEQ ID NO: 670636 - DNA, 25 bp, Homo sapien
aattttgcagagtcctctcatcctg

SEQ ID NO: 670637 - DNA, 25 bp, Homo sapien
agaacaattttgcagagtcctctca

SEQ ID NO: 670638 - DNA, 25 bp, Homo sapien
tctggtctgagtttgaccttcagtc

SEQ ID NO: 670639 - DNA, 25 bp, Homo sapien
cctctggtctgagtttgaccttcag

SEQ ID NO: 670640 - DNA, 25 bp, Homo sapien
ctctggtctgagtttgaccttcagt

SEQ ID NO: 670641 - DNA, 25 bp, Homo sapien
gcacatgggcaaacattcctctaga

SEQ ID NO: 670642 - DNA, 25 bp, Homo sapien
tagcctctaacaagatggtgcctat

SEQ ID NO: 670643 - DNA, 25 bp, Homo sapien
ttttatccaggccatattgaccgac

SEQ ID NO: 670644 - DNA, 25 bp, Homo sapien
gcttggtcaatacatggaaatctac

SEQ ID NO: 670645 - DNA, 25 bp, Homo sapien
atccctggttctattggaagaaatg

SEQ ID NO: 670646 - DNA, 25 bp, Homo sapien
ccctggttctattggaagaaatggg

SEQ ID NO: 670647 - DNA, 25 bp, Homo sapien
ttgtgacatgaaaggtgttgtgatg

SEQ ID NO: 670648 - DNA, 25 bp, Homo sapien
catgaaaggtgttgtgatggcaata

SEQ ID NO: 670649 - DNA, 25 bp, Homo sapien
gcatggagcaaaggtactgcctcgt

SEQ ID NO: 670650 - DNA, 25 bp, Homo sapien
tgaatgccatgtcaaagggtcagag

SEQ ID NO: 670651 - DNA, 25 bp, Homo sapien
gagccaacactcgaaggaccttgaa

SEQ ID NO: 670652 - DNA, 25 bp, Homo sapien
cagagttctgtcctgagggctagaa

SEQ ID NO: 670653 - DNA, 25 bp, Homo sapien
atagtgggtgctcggtaaacatgta

SEQ ID NO: 670654 - DNA, 25 bp, Homo sapien
gggtgctcggtaaacatgtatggaa

SEQ ID NO: 670655 - DNA, 25 bp, Homo sapien
agtgggtgctcggtaaacatgtatg

SEQ ID NO: 670656 - DNA, 25 bp, Homo sapien
acatagtgggtgctcggtaaacatg

SEQ ID NO: 670657 - DNA, 25 bp, Homo sapien
ccagcatacagcaaggatgcacagt

SEQ ID NO: 670658 - DNA, 25 bp, Homo sapien
cctgtttctgtgttcggagcggctg

SEQ ID NO: 670659 - DNA, 25 bp, Homo sapien
gatttaatatcagcgccagcataca

SEQ ID NO: 670660 - DNA, 25 bp, Homo sapien
tctgcccgttagagattgcttttgg

SEQ ID NO: 670661 - DNA, 25 bp, Homo sapien
gcagagggatcagctaagacacggc

SEQ ID NO: 670662 - DNA, 25 bp, Homo sapien
gaagattcatctagtccagctgagc

SEQ ID NO: 670663 - DNA, 25 bp, Homo sapien
gacacggcaggctgaagggtttcct

SEQ ID NO: 670664 - DNA, 25 bp, Homo sapien
gagaagacgaccctgagaagattca

SEQ ID NO: 670665 - DNA, 25 bp, Homo sapien
cttctccaagaccttctatgtcatt

SEQ ID NO: 670666 - DNA, 25 bp, Homo sapien
gactcttctccaagaccttctatgt

SEQ ID NO: 670667 - DNA, 25 bp, Homo sapien
accttctatgtcatttggggtcttc

SEQ ID NO: 670668 - DNA, 25 bp, Homo sapien
ctcttctccaagaccttctatgtca

SEQ ID NO: 670669 - DNA, 25 bp, Homo sapien
tgaaataggcactttccagcagcca

SEQ ID NO: 670670 - DNA, 25 bp, Homo sapien
ctgaaataggcactttccagcagcc

SEQ ID NO: 670671 - DNA, 25 bp, Homo sapien
ccagcagccacacatgtgcttttct

SEQ ID NO: 670672 - DNA, 25 bp, Homo sapien
gttttcatagcaccttatatagaca

SEQ ID NO: 670673 - DNA, 25 bp, Homo sapien
tttcatagcaccttatatagacact

SEQ ID NO: 670674 - DNA, 25 bp, Homo sapien
ttttcatagcaccttatatagacac

SEQ ID NO: 670675 - DNA, 25 bp, Homo sapien
tattctaccccagtgtttgggaaga

SEQ ID NO: 670676 - DNA, 25 bp, Homo sapien
cagtgtttgggaagagagggatcat

SEQ ID NO: 670677 - DNA, 25 bp, Homo sapien
ctcgtattctaccccagtgtttggg

SEQ ID NO: 670678 - DNA, 25 bp, Homo sapien
cccagtgtttgggaagagagggatc

SEQ ID NO: 670679 - DNA, 25 bp, Homo sapien
tctgctcaatatgatcaatgttctc

SEQ ID NO: 670680 - DNA, 25 bp, Homo sapien
cttctgctcaatatgatcaatgttc

SEQ ID NO: 670681 - DNA, 25 bp, Homo sapien
caatatgatcaatgttctccactga

SEQ ID NO: 670682 - DNA, 25 bp, Homo sapien
gctcaatatgatcaatgttctccac

SEQ ID NO: 670683 - DNA, 25 bp, Homo sapien
taaagtttagggtgctgtctgcctc

SEQ ID NO: 670684 - DNA, 25 bp, Homo sapien
atattaacagtcctatcactgtgca

SEQ ID NO: 670685 - DNA, 25 bp, Homo sapien
cctttagcattggagatatcgcagc

SEQ ID NO: 670686 - DNA, 25 bp, Homo sapien
cactgtgcagttggcttatgtgtag

SEQ ID NO: 670687 - DNA, 25 bp, Homo sapien
catctcgtacacaaggtgggccctt

SEQ ID NO: 670688 - DNA, 25 bp, Homo sapien
tttggtccagaagcagtagattgcg

SEQ ID NO: 670689 - DNA, 25 bp, Homo sapien
gtagattgcggcagcaagtcagcag

SEQ ID NO: 670690 - DNA, 25 bp, Homo sapien
cacgactcctttctccgtaagcaag

SEQ ID NO: 670691 - DNA, 25 bp, Homo sapien
gatgaggtaagaattgatggggttt

SEQ ID NO: 670692 - DNA, 25 bp, Homo sapien
aggtaagaattgatggggtttgtcg

SEQ ID NO: 670693 - DNA, 25 bp, Homo sapien
gtaagaattgatggggtttgtcgta

SEQ ID NO: 670694 - DNA, 25 bp, Homo sapien
tgaggtaagaattgatggggtttgt

SEQ ID NO: 670695 - DNA, 25 bp, Homo sapien
cacgaagcacttcgtgtcagggaaa

SEQ ID NO: 670696 - DNA, 25 bp, Homo sapien
gatgcacggagaacgttgccacggc

SEQ ID NO: 670697 - DNA, 25 bp, Homo sapien
gcattagagctttctcgagcccact

SEQ ID NO: 670698 - DNA, 25 bp, Homo sapien
acggctccgacatgttgatgccaaa

SEQ ID NO: 670699 - DNA, 25 bp, Homo sapien
gagaaaatatgctttccagacaggg

SEQ ID NO: 670700 - DNA, 25 bp, Homo sapien
tccttgggaagtcggaacgagctgc

SEQ ID NO: 670701 - DNA, 25 bp, Homo sapien
gagctgtaaaaccgattaggagaaa

SEQ ID NO: 670702 - DNA, 25 bp, Homo sapien
aacgagctgccgagatagcccgatt

SEQ ID NO: 670703 - DNA, 25 bp, Homo sapien
ggggatggccgcctgaagccattct

SEQ ID NO: 670704 - DNA, 25 bp, Homo sapien
tgggcctcgcctggggaagtcagcg

SEQ ID NO: 670705 - DNA, 25 bp, Homo sapien
gccgcctgaagccattctctgggct

SEQ ID NO: 670706 - DNA, 25 bp, Homo sapien
gaagtcagcggggatggccgcctga

SEQ ID NO: 670707 - DNA, 25 bp, Homo sapien
ccccaccaaagaaggtgccataaga

SEQ ID NO: 670708 - DNA, 25 bp, Homo sapien
gcagcagtagccagatgctgacgcc

SEQ ID NO: 670709 - DNA, 25 bp, Homo sapien
ggtgccataagaatccacttccagg

SEQ ID NO: 670710 - DNA, 25 bp, Homo sapien
tagccagatgctgacgcccttcctt

SEQ ID NO: 670711 - DNA, 25 bp, Homo sapien
cggagtctgccggtcagaaggcacc

SEQ ID NO: 670712 - DNA, 25 bp, Homo sapien
tgccggtcagaaggcaccggcccgt

SEQ ID NO: 670713 - DNA, 25 bp, Homo sapien
acaggaaggcccatggacggagtct

SEQ ID NO: 670714 - DNA, 25 bp, Homo sapien
gcccatggacggagtctgccggtca

SEQ ID NO: 670715 - DNA, 25 bp, Homo sapien
aatttgttgcgggtgacataacatt

SEQ ID NO: 670716 - DNA, 25 bp, Homo sapien
taaagcaataaatttgtcttggtgc

SEQ ID NO: 670717 - DNA, 25 bp, Homo sapien
caataaatttgtcttggtgctagca

SEQ ID NO: 670718 - DNA, 25 bp, Homo sapien
taacattgcaaattgattaatcgct

SEQ ID NO: 670719 - DNA, 25 bp, Homo sapien
gcccctagctgttcccgcataggta

SEQ ID NO: 670720 - DNA, 25 bp, Homo sapien
tctacttgtcccgttaccaaggaca

SEQ ID NO: 670721 - DNA, 25 bp, Homo sapien
taggtagagccctcatctgtctctg

SEQ ID NO: 670722 - DNA, 25 bp, Homo sapien
ggtctggagatttcacggccttccc

SEQ ID NO: 670723 - DNA, 25 bp, Homo sapien
aagctgacacctcagcatgagaggg

SEQ ID NO: 670724 - DNA, 25 bp, Homo sapien
agggatcagggcagacaccgctgcc

SEQ ID NO: 670725 - DNA, 25 bp, Homo sapien
gcaggtcctggcttgatacctgatc

SEQ ID NO: 670726 - DNA, 25 bp, Homo sapien
aggtcctggcttgatacctgatccc

SEQ ID NO: 670727 - DNA, 25 bp, Homo sapien
tatgagtgaaggtgtttgtgcacga

SEQ ID NO: 670728 - DNA, 25 bp, Homo sapien
gcacgagtatacatgccggattgca

SEQ ID NO: 670729 - DNA, 25 bp, Homo sapien
tgtttgtgcacgagtatacatgccg

SEQ ID NO: 670730 - DNA, 25 bp, Homo sapien
ccggattgcatgtaatgtggatgtc

SEQ ID NO: 670731 - DNA, 25 bp, Homo sapien
cttttctgtcttggttgagaaatcc

SEQ ID NO: 670732 - DNA, 25 bp, Homo sapien
gtagctccaataggagacattctgc

SEQ ID NO: 670733 - DNA, 25 bp, Homo sapien
ctggtgtagctccaataggagacat

SEQ ID NO: 670734 - DNA, 25 bp, Homo sapien
aatccagcttgttgtcctggccagc

SEQ ID NO: 670735 - DNA, 25 bp, Homo sapien
tggtgagcaattgaaacggagaagc

SEQ ID NO: 670736 - DNA, 25 bp, Homo sapien
tctcgatgagcaactgataaattag

SEQ ID NO: 670737 - DNA, 25 bp, Homo sapien
ttagttgttgggtttcctcgacagc

SEQ ID NO: 670738 - DNA, 25 bp, Homo sapien
tccttgttatctacatggtgagcaa

SEQ ID NO: 670739 - DNA, 25 bp, Homo sapien
tcagaaagtggtcccccgttctcag

SEQ ID NO: 670740 - DNA, 25 bp, Homo sapien
aggaagtagggtgtaaacccagcag

SEQ ID NO: 670741 - DNA, 25 bp, Homo sapien
tactggtacccactggagggcaaac

SEQ ID NO: 670742 - DNA, 25 bp, Homo sapien
tcagggactgatagctctgtctgct

SEQ ID NO: 670743 - DNA, 25 bp, Homo sapien
ttcatctctaagaagctcgaatttg

SEQ ID NO: 670744 - DNA, 25 bp, Homo sapien
tttcatctctaagaagctcgaattt

SEQ ID NO: 670745 - DNA, 25 bp, Homo sapien
attagtgtcctggagcagagtgtct

SEQ ID NO: 670746 - DNA, 25 bp, Homo sapien
ttattagtgtcctggagcagagtgt

SEQ ID NO: 670747 - DNA, 25 bp, Homo sapien
ctttattagtgtcctggagcagagt

SEQ ID NO: 670748 - DNA, 25 bp, Homo sapien
tagtgtcctggagcagagtgtctgc

SEQ ID NO: 670749 - DNA, 25 bp, Homo sapien
agcaaagaccttttctctccaggcc

SEQ ID NO: 670750 - DNA, 25 bp, Homo sapien
cttaatatgatcaatcttgccggat

SEQ ID NO: 670751 - DNA, 25 bp, Homo sapien
caaacattatatatgcgcaagtcat

SEQ ID NO: 670752 - DNA, 25 bp, Homo sapien
caaggcttgtctctgcaattagatg

SEQ ID NO: 670753 - DNA, 25 bp, Homo sapien
tgccggatgtgaattgtgcagctgt

SEQ ID NO: 670754 - DNA, 25 bp, Homo sapien
tcagactccagggatgagcaggggt

SEQ ID NO: 670755 - DNA, 25 bp, Homo sapien
ctctcagactccagggatgagcagg

SEQ ID NO: 670756 - DNA, 25 bp, Homo sapien
gactccagggatgagcaggggtcca

SEQ ID NO: 670757 - DNA, 25 bp, Homo sapien
actccagggatgagcaggggtccat

SEQ ID NO: 670758 - DNA, 25 bp, Homo sapien
gaggtagcggtaatttatctccaag

SEQ ID NO: 670759 - DNA, 25 bp, Homo sapien
gcatcttgtgctgagtaactggaga

SEQ ID NO: 670760 - DNA, 25 bp, Homo sapien
ctccagtgacagatgcggcatcttg

SEQ ID NO: 670761 - DNA, 25 bp, Homo sapien
taactggagagtgaatggctggcag

SEQ ID NO: 670762 - DNA, 25 bp, Homo sapien
aggccagcgtggcaatcagagccat

SEQ ID NO: 670763 - DNA, 25 bp, Homo sapien
ctgcaggccagcgtggcaatcagag

SEQ ID NO: 670764 - DNA, 25 bp, Homo sapien
cacgttctgggtacaaaaggcatgc

SEQ ID NO: 670765 - DNA, 25 bp, Homo sapien
taatccggagtaaaagatagatgag

SEQ ID NO: 670766 - DNA, 25 bp, Homo sapien
aagtgtaatgatgtgttagcctggg

SEQ ID NO: 670767 - DNA, 25 bp, Homo sapien
taacaaatttaccaggcacgttctg

SEQ ID NO: 670768 - DNA, 25 bp, Homo sapien
cctcaccagcttgcctgatagtctg

SEQ ID NO: 670769 - DNA, 25 bp, Homo sapien
ggtgaagccgccgacagtgaaggac

SEQ ID NO: 670770 - DNA, 25 bp, Homo sapien
tgaagccgccgacagtgaaggactc

SEQ ID NO: 670771 - DNA, 25 bp, Homo sapien
caccagcttgcctgatagtctgagt

SEQ ID NO: 670772 - DNA, 25 bp, Homo sapien
ctggaatagccagaccgagtactaa

SEQ ID NO: 670773 - DNA, 25 bp, Homo sapien
gtactaacacacactgaacagctaa

SEQ ID NO: 670774 - DNA, 25 bp, Homo sapien
gcatataaataagcatgatcattca

SEQ ID NO: 670775 - DNA, 25 bp, Homo sapien
ttattgatttgtcaaacgtatttgc

SEQ ID NO: 670776 - DNA, 25 bp, Homo sapien
aagatcaggtgtgttcagggcggta

SEQ ID NO: 670777 - DNA, 25 bp, Homo sapien
cctgcctagcttccaaaatcagaca

SEQ ID NO: 670778 - DNA, 25 bp, Homo sapien
tctcccatccaagtattaaatcagg

SEQ ID NO: 670779 - DNA, 25 bp, Homo sapien
ccatccaagtattaaatcaggcctg

SEQ ID NO: 670780 - DNA, 25 bp, Homo sapien
taggctggggctaccttgcggggtc

SEQ ID NO: 670781 - DNA, 25 bp, Homo sapien
aacaccagcaattccttcagcatct

SEQ ID NO: 670782 - DNA, 25 bp, Homo sapien
atgtggagaacaggatacagctcca

SEQ ID NO: 670783 - DNA, 25 bp, Homo sapien
tctgtgcactgatgtggagaacagg

SEQ ID NO: 670784 - DNA, 25 bp, Homo sapien
aggccctgacctgccatcacagagg

SEQ ID NO: 670785 - DNA, 25 bp, Homo sapien
gtattaaatgatcccaagtccagaa

SEQ ID NO: 670786 - DNA, 25 bp, Homo sapien
ggaacttgtgctgctagatcacggg

SEQ ID NO: 670787 - DNA, 25 bp, Homo sapien
tggaaagaggaggattaagaattaa

SEQ ID NO: 670788 - DNA, 25 bp, Homo sapien
cctcctcggctgatgaagtttctga

SEQ ID NO: 670789 - DNA, 25 bp, Homo sapien
cctgaagtcggatcttgtgttcttg

SEQ ID NO: 670790 - DNA, 25 bp, Homo sapien
caaaggtatggcttaggctgaaagg

SEQ ID NO: 670791 - DNA, 25 bp, Homo sapien
ggctgaaaggcaccagcacatcaaa

SEQ ID NO: 670792 - DNA, 25 bp, Homo sapien
ccagtggccacccataaagccattg

SEQ ID NO: 670793 - DNA, 25 bp, Homo sapien
gcactcttccctcccgccgatcgct

SEQ ID NO: 670794 - DNA, 25 bp, Homo sapien
tggccacccataaagccattgctga

SEQ ID NO: 670795 - DNA, 25 bp, Homo sapien
gatggtgatgggaccactgggatag

SEQ ID NO: 670796 - DNA, 25 bp, Homo sapien
taaaaatgtggactctgctgctggc

SEQ ID NO: 670797 - DNA, 25 bp, Homo sapien
ctaaaaatgtggactctgctgctgg

SEQ ID NO: 670798 - DNA, 25 bp, Homo sapien
tctaaaaatgtggactctgctgctg

SEQ ID NO: 670799 - DNA, 25 bp, Homo sapien
cctggatgagccatcctctcagcag

SEQ ID NO: 670800 - DNA, 25 bp, Homo sapien
gcagctcatccttcagccttccagg

SEQ ID NO: 670801 - DNA, 25 bp, Homo sapien
cagcagcagctcatccttcagcctt

SEQ ID NO: 670802 - DNA, 25 bp, Homo sapien
ggatgagccatcctctcagcagcag

SEQ ID NO: 670803 - DNA, 25 bp, Homo sapien
ttttctgcgatggcccttaatttca

SEQ ID NO: 670804 - DNA, 25 bp, Homo sapien
ttctgcgatggcccttaatttcagg

SEQ ID NO: 670805 - DNA, 25 bp, Homo sapien
tgcgatggcccttaatttcaggtat

SEQ ID NO: 670806 - DNA, 25 bp, Homo sapien
tctgcgatggcccttaatttcaggt

SEQ ID NO: 670807 - DNA, 25 bp, Homo sapien
tgaagtccaggctccatatccctac

SEQ ID NO: 670808 - DNA, 25 bp, Homo sapien
aggccaggcctttctggtgaagtcc

SEQ ID NO: 670809 - DNA, 25 bp, Homo sapien
gtgaagtccaggctccatatcccta

SEQ ID NO: 670810 - DNA, 25 bp, Homo sapien
caggcctttctggtgaagtccaggc

SEQ ID NO: 670811 - DNA, 25 bp, Homo sapien
agaaacagaaatctgcacgtccatc

SEQ ID NO: 670812 - DNA, 25 bp, Homo sapien
catcagcactgacagaaacagaaat

SEQ ID NO: 670813 - DNA, 25 bp, Homo sapien
acagaaacagaaatctgcacgtcca

SEQ ID NO: 670814 - DNA, 25 bp, Homo sapien
gcactgacagaaacagaaatctgca

SEQ ID NO: 670815 - DNA, 25 bp, Homo sapien
ggacttggagacaggccctgtctca

SEQ ID NO: 670816 - DNA, 25 bp, Homo sapien
cctctgtgcaccagagagaccaagg

SEQ ID NO: 670817 - DNA, 25 bp, Homo sapien
aggacttggagacaggccctgtctc

SEQ ID NO: 670818 - DNA, 25 bp, Homo sapien
ccattcagggcatgataaatgactg

SEQ ID NO: 670819 - DNA, 25 bp, Homo sapien
ccccatgcccaggaacatcctggcc

SEQ ID NO: 670820 - DNA, 25 bp, Homo sapien
gacgcctccgcaccctcggaagggc

SEQ ID NO: 670821 - DNA, 25 bp, Homo sapien
gggccgctgtttggccaggccccag

SEQ ID NO: 670822 - DNA, 25 bp, Homo sapien
ctgtcaccgtgacatgaatgctcat

SEQ ID NO: 670823 - DNA, 25 bp, Homo sapien
ccatgctagagttgccttggcactg

SEQ ID NO: 670824 - DNA, 25 bp, Homo sapien
tctccatgctagagttgccttggca

SEQ ID NO: 670825 - DNA, 25 bp, Homo sapien
cactctccatgctagagttgccttg

SEQ ID NO: 670826 - DNA, 25 bp, Homo sapien
catcactctccatgctagagttgcc

SEQ ID NO: 670827 - DNA, 25 bp, Homo sapien
agagtttcgacacacaggttctcca

SEQ ID NO: 670828 - DNA, 25 bp, Homo sapien
aggccccaccagagcagctagatac

SEQ ID NO: 670829 - DNA, 25 bp, Homo sapien
ggccccaccagagcagctagataca

SEQ ID NO: 670830 - DNA, 25 bp, Homo sapien
acagagtttcgacacacaggttctc

SEQ ID NO: 670831 - DNA, 25 bp, Homo sapien
cgaccttagcatcggccctaggagt

SEQ ID NO: 670832 - DNA, 25 bp, Homo sapien
ccagcgaggcgcatcttagaagcac

SEQ ID NO: 670833 - DNA, 25 bp, Homo sapien
aacgctgagaaagtcgtccctgggc

SEQ ID NO: 670834 - DNA, 25 bp, Homo sapien
aagtccatgccaccagtccagaagt

SEQ ID NO: 670835 - DNA, 25 bp, Homo sapien
ttttcctgctctgcctggattgggc

SEQ ID NO: 670836 - DNA, 25 bp, Homo sapien
tcctcgggctcttttcctgctctgc

SEQ ID NO: 670837 - DNA, 25 bp, Homo sapien
tcgggctcttttcctgctctgcctg

SEQ ID NO: 670838 - DNA, 25 bp, Homo sapien
gctcttttcctgctctgcctggatt

SEQ ID NO: 670839 - DNA, 25 bp, Homo sapien
gctcggtccccggcgcagacagatg

SEQ ID NO: 670840 - DNA, 25 bp, Homo sapien
cctgcagcatgatggattgcctggt

SEQ ID NO: 670841 - DNA, 25 bp, Homo sapien
gtgagcaagctctgctcggtccccg

SEQ ID NO: 670842 - DNA, 25 bp, Homo sapien
cagccggggagtgagcaagctctgc

SEQ ID NO: 670843 - DNA, 25 bp, Homo sapien
taccatcccctctgccgacatagga

SEQ ID NO: 670844 - DNA, 25 bp, Homo sapien
cagcaaaagcctctacgacctcctc

SEQ ID NO: 670845 - DNA, 25 bp, Homo sapien
aaagcctctacgacctcctccaaat

SEQ ID NO: 670846 - DNA, 25 bp, Homo sapien
aggaagccctgtctgataccatccc

SEQ ID NO: 670847 - DNA, 25 bp, Homo sapien
tggtgccccagtgttttggttggaa

SEQ ID NO: 670848 - DNA, 25 bp, Homo sapien
tcatgggaagggacttggtgcccca

SEQ ID NO: 670849 - DNA, 25 bp, Homo sapien
caaactgaatccaacttgaagaggc

SEQ ID NO: 670850 - DNA, 25 bp, Homo sapien
tgatctgttccaagtgtctccctgc

SEQ ID NO: 670851 - DNA, 25 bp, Homo sapien
tttgataactctggggaaatgcccc

SEQ ID NO: 670852 - DNA, 25 bp, Homo sapien
gaaatgccccacttggcccagccat

SEQ ID NO: 670853 - DNA, 25 bp, Homo sapien
ccaagccccctttttgataactctg

SEQ ID NO: 670854 - DNA, 25 bp, Homo sapien
agccatccaggcatacagctcctca

SEQ ID NO: 670855 - DNA, 25 bp, Homo sapien
ctactgtgtgcacccctgcaactgg

SEQ ID NO: 670856 - DNA, 25 bp, Homo sapien
ctgcaactgggctaaccatcaagag

SEQ ID NO: 670857 - DNA, 25 bp, Homo sapien
cccagacaggggagatccagccaga

SEQ ID NO: 670858 - DNA, 25 bp, Homo sapien
gatccagccagaaaagttgttacca

SEQ ID NO: 670859 - DNA, 25 bp, Homo sapien
cactacctccatagagggtgtgtgg

SEQ ID NO: 670860 - DNA, 25 bp, Homo sapien
ggacaggattcagcgtctccagaag

SEQ ID NO: 670861 - DNA, 25 bp, Homo sapien
taactgcatattggaatgagaccgg

SEQ ID NO: 670862 - DNA, 25 bp, Homo sapien
taagacctagcaagacataggccag

SEQ ID NO: 670863 - DNA, 25 bp, Homo sapien
tgctctcgaatatggatgttcagac

SEQ ID NO: 670864 - DNA, 25 bp, Homo sapien
ttcacatgtaggcaagaacatgctc

SEQ ID NO: 670865 - DNA, 25 bp, Homo sapien
taattacacttgcagtggccgctgg

SEQ ID NO: 670866 - DNA, 25 bp, Homo sapien
tggccgctggctctaagtatggacg

SEQ ID NO: 670867 - DNA, 25 bp, Homo sapien
cctggtagagtattgagctgatgtc

SEQ ID NO: 670868 - DNA, 25 bp, Homo sapien
gtgtccataaccatagcccagtctc

SEQ ID NO: 670869 - DNA, 25 bp, Homo sapien
ctatgagaagttccagtgtccataa

SEQ ID NO: 670870 - DNA, 25 bp, Homo sapien
gccatgagggacctggtagagtatt

SEQ ID NO: 670871 - DNA, 25 bp, Homo sapien
aagatgtgacttctcggagctggtg

SEQ ID NO: 670872 - DNA, 25 bp, Homo sapien
ttgccagctacatggtggagggcct

SEQ ID NO: 670873 - DNA, 25 bp, Homo sapien
cacagccttgctgagccttatctgc

SEQ ID NO: 670874 - DNA, 25 bp, Homo sapien
tctcggagctggtgggcaaatcaca

SEQ ID NO: 670875 - DNA, 25 bp, Homo sapien
tgtcaggtctagaggagacatcgtc

SEQ ID NO: 670876 - DNA, 25 bp, Homo sapien
gacatcgtcagcactgaccttgagg

SEQ ID NO: 670877 - DNA, 25 bp, Homo sapien
ctgcaggtgcccgagtaaactgaag

SEQ ID NO: 670878 - DNA, 25 bp, Homo sapien
aaactgaaggtttccagggtgtcag

SEQ ID NO: 670879 - DNA, 25 bp, Homo sapien
ttcaaatggaagtacccaaatgctc

SEQ ID NO: 670880 - DNA, 25 bp, Homo sapien
ccacttctaggtacagagatgccta

SEQ ID NO: 670881 - DNA, 25 bp, Homo sapien
tgcaggcccatccaagagtgatatc

SEQ ID NO: 670882 - DNA, 25 bp, Homo sapien
gagatgcctaagctctgttcaccaa

SEQ ID NO: 670883 - DNA, 25 bp, Homo sapien
tacaggcgtgacctgccatacctga

SEQ ID NO: 670884 - DNA, 25 bp, Homo sapien
aggcctagaaacaattaccactgca

SEQ ID NO: 670885 - DNA, 25 bp, Homo sapien
caggatatacccaaaggacaagagg

SEQ ID NO: 670886 - DNA, 25 bp, Homo sapien
gcaataactatgagcacccctagag

SEQ ID NO: 670887 - DNA, 25 bp, Homo sapien
tcccagagaagcttgagaggtatcc

SEQ ID NO: 670888 - DNA, 25 bp, Homo sapien
caggagaacgcagacttcaaaggct

SEQ ID NO: 670889 - DNA, 25 bp, Homo sapien
caaagagatgcaatcagcgggacta

SEQ ID NO: 670890 - DNA, 25 bp, Homo sapien
caattcctgggctcatagcggatgc

SEQ ID NO: 670891 - DNA, 25 bp, Homo sapien
agccctggtccggaggcggtgcccg

SEQ ID NO: 670892 - DNA, 25 bp, Homo sapien
gccagccctggtccggaggcggtgc

SEQ ID NO: 670893 - DNA, 25 bp, Homo sapien
gcggccagccctggtccggaggcgg

SEQ ID NO: 670894 - DNA, 25 bp, Homo sapien
tccggaggcggtgcccgggtggcgc

SEQ ID NO: 670895 - DNA, 25 bp, Homo sapien
catggcgtcccagagactaagtccc

SEQ ID NO: 670896 - DNA, 25 bp, Homo sapien
attgttcccatcgggccgcctcttg

SEQ ID NO: 670897 - DNA, 25 bp, Homo sapien
ggcagaggacagacatggcgtccca

SEQ ID NO: 670898 - DNA, 25 bp, Homo sapien
agtcgccttgtcgacggtcgggact

SEQ ID NO: 670899 - DNA, 25 bp, Homo sapien
cagttacccagggaagagtcctcca

SEQ ID NO: 670900 - DNA, 25 bp, Homo sapien
tctgtagtgtgctgggaattcccac

SEQ ID NO: 670901 - DNA, 25 bp, Homo sapien
ccaataaaaagctcatccttgcagg

SEQ ID NO: 670902 - DNA, 25 bp, Homo sapien
tccttgcaggctttcgaacaaccct

SEQ ID NO: 670903 - DNA, 25 bp, Homo sapien
acttgacccttttcgatgcatttaa

SEQ ID NO: 670904 - DNA, 25 bp, Homo sapien
ggtcattgccaaaggaacttgtagc

SEQ ID NO: 670905 - DNA, 25 bp, Homo sapien
tgtttacagcaaagtggtcattgcc

SEQ ID NO: 670906 - DNA, 25 bp, Homo sapien
aaaattcaatatgtcttgtgtcagc

SEQ ID NO: 670907 - DNA, 25 bp, Homo sapien
gtaccaaatgccgtgttaacagtta

SEQ ID NO: 670908 - DNA, 25 bp, Homo sapien
gagtataggcatttgggagattcca

SEQ ID NO: 670909 - DNA, 25 bp, Homo sapien
tagttgcttaaagtgaccaacttgg

SEQ ID NO: 670910 - DNA, 25 bp, Homo sapien
gcttatgtgtgagaatttagtacca

SEQ ID NO: 670911 - DNA, 25 bp, Homo sapien
tacagaatgcgaatagtctcccggc

SEQ ID NO: 670912 - DNA, 25 bp, Homo sapien
gatcttacgccattcagcaaaagga

SEQ ID NO: 670913 - DNA, 25 bp, Homo sapien
caacaggcgcagacttaaattcaat

SEQ ID NO: 670914 - DNA, 25 bp, Homo sapien
tcagtatacaaggaatgtgcccaca

SEQ ID NO: 670915 - DNA, 25 bp, Homo sapien
tgatttgcatttttagacagcagtt

SEQ ID NO: 670916 - DNA, 25 bp, Homo sapien
tttagacagcagttgctttaaaaaa

SEQ ID NO: 670917 - DNA, 25 bp, Homo sapien
gacctggcttaaaatcaattttgaa

SEQ ID NO: 670918 - DNA, 25 bp, Homo sapien
ctgtgatcccagcaccagactttgg

SEQ ID NO: 670919 - DNA, 25 bp, Homo sapien
ggcactgcctttatctctctttgtc

SEQ ID NO: 670920 - DNA, 25 bp, Homo sapien
aatgtcatcaaattctgaacctatg

SEQ ID NO: 670921 - DNA, 25 bp, Homo sapien
actgaaagtattaatgtcatcaaat

SEQ ID NO: 670922 - DNA, 25 bp, Homo sapien
atatgctggccaaatcctgtttctg

SEQ ID NO: 670923 - DNA, 25 bp, Homo sapien
tatatgctggccaaatcctgtttct

SEQ ID NO: 670924 - DNA, 25 bp, Homo sapien
cattttatatgctggccaaatcctg

SEQ ID NO: 670925 - DNA, 25 bp, Homo sapien
tttatatgctggccaaatcctgttt

SEQ ID NO: 670926 - DNA, 25 bp, Homo sapien
tactactctagcaggaactttgaat

SEQ ID NO: 670927 - DNA, 25 bp, Homo sapien
tgtacagcaaagctgaaaaccgcag

SEQ ID NO: 670928 - DNA, 25 bp, Homo sapien
gaaatatcgttgacttttggcttcc

SEQ ID NO: 670929 - DNA, 25 bp, Homo sapien
tatacatctctttctggttagcagg

SEQ ID NO: 670930 - DNA, 25 bp, Homo sapien
cagtagcgattatggagttttctga

SEQ ID NO: 670931 - DNA, 25 bp, Homo sapien
tataaaagatcatttgacctacatg

SEQ ID NO: 670932 - DNA, 25 bp, Homo sapien
caaggtattgcagcctcttcactaa

SEQ ID NO: 670933 - DNA, 25 bp, Homo sapien
gacctacatgttagggatgagtgta

SEQ ID NO: 670934 - DNA, 25 bp, Homo sapien
tgttcccactgagctttagattcac

SEQ ID NO: 670935 - DNA, 25 bp, Homo sapien
cactgagctttagattcacttatca

SEQ ID NO: 670936 - DNA, 25 bp, Homo sapien
attacaggcgtatatggtgtttatt

SEQ ID NO: 670937 - DNA, 25 bp, Homo sapien
tacaggcgtatatggtgtttattgt

SEQ ID NO: 670938 - DNA, 25 bp, Homo sapien
tccagagcactaatcagttgagcgg

SEQ ID NO: 670939 - DNA, 25 bp, Homo sapien
tgatccccatgttagacaaggcgat

SEQ ID NO: 670940 - DNA, 25 bp, Homo sapien
gaggcccagaagtcattccagagca

SEQ ID NO: 670941 - DNA, 25 bp, Homo sapien
gaagaagagcgctatcctgaaggca

SEQ ID NO: 670942 - DNA, 25 bp, Homo sapien
cccagacggaagctcggaaacagat

SEQ ID NO: 670943 - DNA, 25 bp, Homo sapien
caggaatcttggtgcttcagtgacc

SEQ ID NO: 670944 - DNA, 25 bp, Homo sapien
gtgattttacccagatgagccagta

SEQ ID NO: 670945 - DNA, 25 bp, Homo sapien
tcatattggccatgtacctccctgc

SEQ ID NO: 670946 - DNA, 25 bp, Homo sapien
ttagatcttagcaacttcaccatac

SEQ ID NO: 670947 - DNA, 25 bp, Homo sapien
gcagcttctgtatggcatatccaaa

SEQ ID NO: 670948 - DNA, 25 bp, Homo sapien
tttcatttaaagcactctgtgcagc

SEQ ID NO: 670949 - DNA, 25 bp, Homo sapien
aacatcaccactttcacactttggg

SEQ ID NO: 670950 - DNA, 25 bp, Homo sapien
aaagaagtccggcatgataacaagg

SEQ ID NO: 670951 - DNA, 25 bp, Homo sapien
catgataacaaggttacttggctgg

SEQ ID NO: 670952 - DNA, 25 bp, Homo sapien
atcctcgtgctctgttatttccaga

SEQ ID NO: 670953 - DNA, 25 bp, Homo sapien
cttatttcactatcctcgtgctctg

SEQ ID NO: 670954 - DNA, 25 bp, Homo sapien
tctccagtcaaggaagtgtcttata

SEQ ID NO: 670955 - DNA, 25 bp, Homo sapien
taaccctttccctagtcaacagcag

SEQ ID NO: 670956 - DNA, 25 bp, Homo sapien
tcttatagggaagattctggtttca

SEQ ID NO: 670957 - DNA, 25 bp, Homo sapien
tttctttagtgaagacccaacagtg

SEQ ID NO: 670958 - DNA, 25 bp, Homo sapien
tcccatccgcataataaaaagagca

SEQ ID NO: 670959 - DNA, 25 bp, Homo sapien
caaagaattcctgtagctccataat

SEQ ID NO: 670960 - DNA, 25 bp, Homo sapien
gcaaatgaaagagtgctcgacatca

SEQ ID NO: 670961 - DNA, 25 bp, Homo sapien
gaaagggcttatatccagactatac

SEQ ID NO: 670962 - DNA, 25 bp, Homo sapien
gctataatcattagttttagaggca

SEQ ID NO: 670963 - DNA, 25 bp, Homo sapien
tgagcattcgctgtaccctttaaga

SEQ ID NO: 670964 - DNA, 25 bp, Homo sapien
tgtgtgcagagtccatttcccacat

SEQ ID NO: 670965 - DNA, 25 bp, Homo sapien
tttcacaggtcaataaacttagagg

SEQ ID NO: 670966 - DNA, 25 bp, Homo sapien
cactggacactgttgaccactcctt

SEQ ID NO: 670967 - DNA, 25 bp, Homo sapien
tagataaccaaaccaatacatgggc

SEQ ID NO: 670968 - DNA, 25 bp, Homo sapien
caatgtcgccaatgactagataacc

SEQ ID NO: 670969 - DNA, 25 bp, Homo sapien
ttagagtctttgtggcactggacac

SEQ ID NO: 670970 - DNA, 25 bp, Homo sapien
agagtccacatccaaagaacccaac

SEQ ID NO: 670971 - DNA, 25 bp, Homo sapien
agcaccaaatcaaaagagactcagg

SEQ ID NO: 670972 - DNA, 25 bp, Homo sapien
agtccacatccaaagaacccaacct

SEQ ID NO: 670973 - DNA, 25 bp, Homo sapien
gagtccacatccaaagaacccaacc

SEQ ID NO: 670974 - DNA, 25 bp, Homo sapien
ctagttcccacctagtcatgttatg

SEQ ID NO: 670975 - DNA, 25 bp, Homo sapien
ttgggttctagttcccacctagtca

SEQ ID NO: 670976 - DNA, 25 bp, Homo sapien
cagaaaactcatggagtcaggccga

SEQ ID NO: 670977 - DNA, 25 bp, Homo sapien
gagtcaggccgacttgggttctagt

SEQ ID NO: 670978 - DNA, 25 bp, Homo sapien
ctgcctggctcaacatgtcagacag

SEQ ID NO: 670979 - DNA, 25 bp, Homo sapien
agacaggctccaccgcgaccgtggg

SEQ ID NO: 670980 - DNA, 25 bp, Homo sapien
cgaccgtgggtgtcctcaattttgg

SEQ ID NO: 670981 - DNA, 25 bp, Homo sapien
ctggctcaacatgtcagacaggctc

SEQ ID NO: 670982 - DNA, 25 bp, Homo sapien
cagcgacttgggcaaactttcgggc

SEQ ID NO: 670983 - DNA, 25 bp, Homo sapien
tccaggtcaagctggagacgcgcca

SEQ ID NO: 670984 - DNA, 25 bp, Homo sapien
tctactccaagaagtcgcagcgacc

SEQ ID NO: 670985 - DNA, 25 bp, Homo sapien
ggtgggcaccgtcatgactttgttc

SEQ ID NO: 670986 - DNA, 25 bp, Homo sapien
actctagactgggttgcttcttgca

SEQ ID NO: 670987 - DNA, 25 bp, Homo sapien
cttagcgcgtgcctgtgctgtggtc

SEQ ID NO: 670988 - DNA, 25 bp, Homo sapien
ccccagatctttgagagttgttcca

SEQ ID NO: 670989 - DNA, 25 bp, Homo sapien
ctcagtgtgaagagatggtgtgtct

SEQ ID NO: 670990 - DNA, 25 bp, Homo sapien
ttgcagttgtgcacatttgactcct

SEQ ID NO: 670991 - DNA, 25 bp, Homo sapien
gagaaagtgtttgcagttgtgcaca

SEQ ID NO: 670992 - DNA, 25 bp, Homo sapien
gtgtttgcagttgtgcacatttgac

SEQ ID NO: 670993 - DNA, 25 bp, Homo sapien
tttctgtagagaaagtgtttgcagt

SEQ ID NO: 670994 - DNA, 25 bp, Homo sapien
caggcttgccccgatgtgtgggttt

SEQ ID NO: 670995 - DNA, 25 bp, Homo sapien
actggctgttactcccagtgggaga

SEQ ID NO: 670996 - DNA, 25 bp, Homo sapien
cagaccttttagtgtttcctcagca

SEQ ID NO: 670997 - DNA, 25 bp, Homo sapien
caggccggtgtcatcaagggttttc

SEQ ID NO: 670998 - DNA, 25 bp, Homo sapien
caccactaagctcggccacaagtgg

SEQ ID NO: 670999 - DNA, 25 bp, Homo sapien
tttgttaaccacagagctccaatct

SEQ ID NO: 671000 - DNA, 25 bp, Homo sapien
gtggctgctccaacaacctgggcta

SEQ ID NO: 671001 - DNA, 25 bp, Homo sapien
taaccacagagctccaatcttttcc

SEQ ID NO: 671002 - DNA, 25 bp, Homo sapien
acacagaggactggggcatcaaaaa

SEQ ID NO: 671003 - DNA, 25 bp, Homo sapien
cacagaggactggggcatcaaaaaa

SEQ ID NO: 671004 - DNA, 25 bp, Homo sapien
cagaggactggggcatcaaaaaact

SEQ ID NO: 671005 - DNA, 25 bp, Homo sapien
acagaggactggggcatcaaaaaac

SEQ ID NO: 671006 - DNA, 25 bp, Homo sapien
aaagcatctgtacaaaggctgtgag

SEQ ID NO: 671007 - DNA, 25 bp, Homo sapien
cctgggcgcaaggcagcaaggcttg

SEQ ID NO: 671008 - DNA, 25 bp, Homo sapien
caaggcttgggtacggaggagagtg

SEQ ID NO: 671009 - DNA, 25 bp, Homo sapien
gggtaaagcatctgtacaaaggctg

SEQ ID NO: 671010 - DNA, 25 bp, Homo sapien
agttcactttggggttggcttcctg

SEQ ID NO: 671011 - DNA, 25 bp, Homo sapien
ttttcttggacacctggggatatgg

SEQ ID NO: 671012 - DNA, 25 bp, Homo sapien
actggtgaggagttgggccatggcg

SEQ ID NO: 671013 - DNA, 25 bp, Homo sapien
catggcgagtttggccacttgtttg

SEQ ID NO: 671014 - DNA, 25 bp, Homo sapien
ccctgttgctctgacgcttccccca

SEQ ID NO: 671015 - DNA, 25 bp, Homo sapien
ctatgagtcctaggcccctgttgtt

SEQ ID NO: 671016 - DNA, 25 bp, Homo sapien
cctgttgtttccttgtaggagggag

SEQ ID NO: 671017 - DNA, 25 bp, Homo sapien
gctctgacgcttcccccaccactat

SEQ ID NO: 671018 - DNA, 25 bp, Homo sapien
acttggagatatgctgggctgtggt

SEQ ID NO: 671019 - DNA, 25 bp, Homo sapien
gaccatcctgtgacctggctactat

SEQ ID NO: 671020 - DNA, 25 bp, Homo sapien
tggctactattgcatcaggcttcct

SEQ ID NO: 671021 - DNA, 25 bp, Homo sapien
catatgcagccagcttggaaatgct

SEQ ID NO: 671022 - DNA, 25 bp, Homo sapien
tccacaggctttgggcatatgcagc

SEQ ID NO: 671023 - DNA, 25 bp, Homo sapien
gggccagaagtggcccagatgatac

SEQ ID NO: 671024 - DNA, 25 bp, Homo sapien
cagaagtggcccagatgatactcac

SEQ ID NO: 671025 - DNA, 25 bp, Homo sapien
gtagggggccagaagtggcccagat

SEQ ID NO: 671026 - DNA, 25 bp, Homo sapien
ggtgactgaggtagggggccagaag

SEQ ID NO: 671027 - DNA, 25 bp, Homo sapien
gctccattaatgctctcctaggtcc

SEQ ID NO: 671028 - DNA, 25 bp, Homo sapien
gtggagaaggcttagctccattaat

SEQ ID NO: 671029 - DNA, 25 bp, Homo sapien
tggtggagaaggcttagctccatta

SEQ ID NO: 671030 - DNA, 25 bp, Homo sapien
gggaactgggagggactcatctgtt

SEQ ID NO: 671031 - DNA, 25 bp, Homo sapien
tggtgagaggtcattttggagatct

SEQ ID NO: 671032 - DNA, 25 bp, Homo sapien
ggtgagaggtcattttggagatcta

SEQ ID NO: 671033 - DNA, 25 bp, Homo sapien
agctctgttagcttcccgtggttcc

SEQ ID NO: 671034 - DNA, 25 bp, Homo sapien
ccgtggttcccactggctataggaa

SEQ ID NO: 671035 - DNA, 25 bp, Homo sapien
tgggtgctcggcatcctgctgcttt

SEQ ID NO: 671036 - DNA, 25 bp, Homo sapien
tgggaccactctcctgaatctcctc

SEQ ID NO: 671037 - DNA, 25 bp, Homo sapien
tgcttgggcatagggtggctcagat

SEQ ID NO: 671038 - DNA, 25 bp, Homo sapien
ctccgctctgagtaactgctggtct

SEQ ID NO: 671039 - DNA, 25 bp, Homo sapien
tactggcatgtccaaaagggggatg

SEQ ID NO: 671040 - DNA, 25 bp, Homo sapien
tgtccaggactgcatggcccagaag

SEQ ID NO: 671041 - DNA, 25 bp, Homo sapien
atttggaatggtaatgcccaggcca

SEQ ID NO: 671042 - DNA, 25 bp, Homo sapien
tgccccaagcagcttatcttgtcac

SEQ ID NO: 671043 - DNA, 25 bp, Homo sapien
aatggtaatgcccaggccattcctg

SEQ ID NO: 671044 - DNA, 25 bp, Homo sapien
actgtctaccatagccacatttgga

SEQ ID NO: 671045 - DNA, 25 bp, Homo sapien
ctgtgccagactggatcattcgctc

SEQ ID NO: 671046 - DNA, 25 bp, Homo sapien
gaaagaggatgctgccatatttgtt

SEQ ID NO: 671047 - DNA, 25 bp, Homo sapien
tgccaccagggcagaggccattcct

SEQ ID NO: 671048 - DNA, 25 bp, Homo sapien
tctggctctctcaagaaagaggatg

SEQ ID NO: 671049 - DNA, 25 bp, Homo sapien
gggagtctccttgtgaatttctggg

SEQ ID NO: 671050 - DNA, 25 bp, Homo sapien
tccacaccggaagagcagactggtt

SEQ ID NO: 671051 - DNA, 25 bp, Homo sapien
tgttctgcagtttctgatctagcca

SEQ ID NO: 671052 - DNA, 25 bp, Homo sapien
ctttgcaagaaggtgtgggaggggg

SEQ ID NO: 671053 - DNA, 25 bp, Homo sapien
gactggtttctgtttcaaaaggcag

SEQ ID NO: 671054 - DNA, 25 bp, Homo sapien
tcgcattaagcacacacatctggcc

SEQ ID NO: 671055 - DNA, 25 bp, Homo sapien
aggacacagcacaagggcacattgc

SEQ ID NO: 671056 - DNA, 25 bp, Homo sapien
gccagggcagaggaatgtagggcct

SEQ ID NO: 671057 - DNA, 25 bp, Homo sapien
gagaagctagatgcccctgcagttt

SEQ ID NO: 671058 - DNA, 25 bp, Homo sapien
cagttaggtgctgaatgaagctgcc

SEQ ID NO: 671059 - DNA, 25 bp, Homo sapien
caaaggtgcctcatagcatagccag

SEQ ID NO: 671060 - DNA, 25 bp, Homo sapien
aagactcagtatgctttccctgagg

SEQ ID NO: 671061 - DNA, 25 bp, Homo sapien
gaaaggcagccctcacctctgagga

SEQ ID NO: 671062 - DNA, 25 bp, Homo sapien
catgggacatgctcactagaaacag

SEQ ID NO: 671063 - DNA, 25 bp, Homo sapien
caggaaagcctgttgcatgggacat

SEQ ID NO: 671064 - DNA, 25 bp, Homo sapien
gaaatttctcaggttaagcagcaag

SEQ ID NO: 671065 - DNA, 25 bp, Homo sapien
tctaggacttggcagctgaaatctc

SEQ ID NO: 671066 - DNA, 25 bp, Homo sapien
caagcaatttgtccgtgttcccctc

SEQ ID NO: 671067 - DNA, 25 bp, Homo sapien
tgcaagaacgagaccaaacagtatg

SEQ ID NO: 671068 - DNA, 25 bp, Homo sapien
ggtttgaagtaccattgaggcccat

SEQ ID NO: 671069 - DNA, 25 bp, Homo sapien
caaccggattgctgtgctgggtccc

SEQ ID NO: 671070 - DNA, 25 bp, Homo sapien
agcagggaaggtgcctagagtcccc

SEQ ID NO: 671071 - DNA, 25 bp, Homo sapien
cagggaaggtgcctagagtccccac

SEQ ID NO: 671072 - DNA, 25 bp, Homo sapien
gcagggaaggtgcctagagtcccca

SEQ ID NO: 671073 - DNA, 25 bp, Homo sapien
agcagccacgaaagccaaattctca

SEQ ID NO: 671074 - DNA, 25 bp, Homo sapien
caacaagctagtacctatatgttct

SEQ ID NO: 671075 - DNA, 25 bp, Homo sapien
ccagagcagccacgaaagccaaatt

SEQ ID NO: 671076 - DNA, 25 bp, Homo sapien
ctgtggaagctttggaccagcaaca

SEQ ID NO: 671077 - DNA, 25 bp, Homo sapien
tgttggttccatttgcactcagagc

SEQ ID NO: 671078 - DNA, 25 bp, Homo sapien
ttcacaaccaagtgcagacgctcgg

SEQ ID NO: 671079 - DNA, 25 bp, Homo sapien
ttctctgttgaaggactgcgtcccc

SEQ ID NO: 671080 - DNA, 25 bp, Homo sapien
tgggaacacacagattgcagcagaa

SEQ ID NO: 671081 - DNA, 25 bp, Homo sapien
tcaaaatcaaaactggttgcctcac

SEQ ID NO: 671082 - DNA, 25 bp, Homo sapien
caaaatcaaaactggttgcctcacc

SEQ ID NO: 671083 - DNA, 25 bp, Homo sapien
aaatcaaaactggttgcctcaccag

SEQ ID NO: 671084 - DNA, 25 bp, Homo sapien
atcaaaactggttgcctcaccagcc

SEQ ID NO: 671085 - DNA, 25 bp, Homo sapien
ggagcttttctgagatcaagtgctc

SEQ ID NO: 671086 - DNA, 25 bp, Homo sapien
gccagagaaaactacatggtgggta

SEQ ID NO: 671087 - DNA, 25 bp, Homo sapien
caactgcccatttgctcagacaatg

SEQ ID NO: 671088 - DNA, 25 bp, Homo sapien
aggagaaaggcttgagctccacaac

SEQ ID NO: 671089 - DNA, 25 bp, Homo sapien
ctggaagacttgactatgtgggcct

SEQ ID NO: 671090 - DNA, 25 bp, Homo sapien
tggaagacttgactatgtgggcctt

SEQ ID NO: 671091 - DNA, 25 bp, Homo sapien
tctgcaaatggtgagtcaaactggt

SEQ ID NO: 671092 - DNA, 25 bp, Homo sapien
ccttgagaatggatgtgatatgtga

SEQ ID NO: 671093 - DNA, 25 bp, Homo sapien
gaaatctcccaggtaaactctgagc

SEQ ID NO: 671094 - DNA, 25 bp, Homo sapien
tcttctccagcatataactaccttg

SEQ ID NO: 671095 - DNA, 25 bp, Homo sapien
acaagggcacatctcaggctacgga

SEQ ID NO: 671096 - DNA, 25 bp, Homo sapien
ctgaaaaagctgcaccaatctgagg

SEQ ID NO: 671097 - DNA, 25 bp, Homo sapien
caaggctagctggagatgagaccac

SEQ ID NO: 671098 - DNA, 25 bp, Homo sapien
cactagtacatgtgtgagcccgcaa

SEQ ID NO: 671099 - DNA, 25 bp, Homo sapien
taagcacctgcgtgatgactgcctc

SEQ ID NO: 671100 - DNA, 25 bp, Homo sapien
tgagaactcgatctacaaccccatg

SEQ ID NO: 671101 - DNA, 25 bp, Homo sapien
tgggcagggctaacatctataagaa

SEQ ID NO: 671102 - DNA, 25 bp, Homo sapien
tgaaagatgagctagtgcccatggc

SEQ ID NO: 671103 - DNA, 25 bp, Homo sapien
tacttgtggcttggcactctgggaa

SEQ ID NO: 671104 - DNA, 25 bp, Homo sapien
tccttggagccacatgagcacggtg

SEQ ID NO: 671105 - DNA, 25 bp, Homo sapien
caagcctgacatgaaacgtagccgg

SEQ ID NO: 671106 - DNA, 25 bp, Homo sapien
tactctcagagcaaccggtcttggg

SEQ ID NO: 671107 - DNA, 25 bp, Homo sapien
ctatgaatatgactatgaactctga

SEQ ID NO: 671108 - DNA, 25 bp, Homo sapien
gaatatgactatgaactctgaacta

SEQ ID NO: 671109 - DNA, 25 bp, Homo sapien
tttatttaacatatagaggtggatg

SEQ ID NO: 671110 - DNA, 25 bp, Homo sapien
tgtatatgttaaaagcttgattctg

SEQ ID NO: 671111 - DNA, 25 bp, Homo sapien
agaaccccatcttgcttgctgcttg

SEQ ID NO: 671112 - DNA, 25 bp, Homo sapien
ctctgggctgtctgcgaggattctg

SEQ ID NO: 671113 - DNA, 25 bp, Homo sapien
acgtggcaggcggtttcccagactg

SEQ ID NO: 671114 - DNA, 25 bp, Homo sapien
cagagagtcgggtttggctcttcca

SEQ ID NO: 671115 - DNA, 25 bp, Homo sapien
gaaaacacatgcctgtcactctacg

SEQ ID NO: 671116 - DNA, 25 bp, Homo sapien
tggtccttgctataccagggtggca

SEQ ID NO: 671117 - DNA, 25 bp, Homo sapien
gctttgaggacctcttaattccatg

SEQ ID NO: 671118 - DNA, 25 bp, Homo sapien
ggatgctggctcaaccttgtaaggc

SEQ ID NO: 671119 - DNA, 25 bp, Homo sapien
ttttgcctgtcttggaaatacttta

SEQ ID NO: 671120 - DNA, 25 bp, Homo sapien
tctgtagtggtagcatttgagtctt

SEQ ID NO: 671121 - DNA, 25 bp, Homo sapien
gctagacatagtatccttggcttac

SEQ ID NO: 671122 - DNA, 25 bp, Homo sapien
tcatgttttcacttccatgtttagg

SEQ ID NO: 671123 - DNA, 25 bp, Homo sapien
gctttgggtcacgtctacatcttaa

SEQ ID NO: 671124 - DNA, 25 bp, Homo sapien
gttttcaagatacacttctttggcc

SEQ ID NO: 671125 - DNA, 25 bp, Homo sapien
gccattttggttgggtcttcctgga

SEQ ID NO: 671126 - DNA, 25 bp, Homo sapien
tttctgtaaaaatgcgactatgctt

SEQ ID NO: 671127 - DNA, 25 bp, Homo sapien
tagggcatgtctactaataatgatc

SEQ ID NO: 671128 - DNA, 25 bp, Homo sapien
gcatgtctactaataatgatctcct

SEQ ID NO: 671129 - DNA, 25 bp, Homo sapien
ttctgttcagtatcctttcatttca

SEQ ID NO: 671130 - DNA, 25 bp, Homo sapien
tttctggtagggcatgtctactaat

SEQ ID NO: 671131 - DNA, 25 bp, Homo sapien
tctgcgattcctatatgagtatatg

SEQ ID NO: 671132 - DNA, 25 bp, Homo sapien
acattagtatgcttgatgatgtctc

SEQ ID NO: 671133 - DNA, 25 bp, Homo sapien
catcctgcttggattttattgagct

SEQ ID NO: 671134 - DNA, 25 bp, Homo sapien
tggatctgagttcatcctgcttgga

SEQ ID NO: 671135 - DNA, 25 bp, Homo sapien
ggggtctctaatgagaacacaaatg

SEQ ID NO: 671136 - DNA, 25 bp, Homo sapien
gatggggtctctaatgagaacacaa

SEQ ID NO: 671137 - DNA, 25 bp, Homo sapien
tctgatggggtctctaatgagaaca

SEQ ID NO: 671138 - DNA, 25 bp, Homo sapien
ctgatggggtctctaatgagaacac

SEQ ID NO: 671139 - DNA, 25 bp, Homo sapien
gggagaggctgggaactcagtgacc

SEQ ID NO: 671140 - DNA, 25 bp, Homo sapien
agaggctgggaactcagtgaccagg

SEQ ID NO: 671141 - DNA, 25 bp, Homo sapien
aggctgggaactcagtgaccaggaa

SEQ ID NO: 671142 - DNA, 25 bp, Homo sapien
ggctgggaactcagtgaccaggaac

SEQ ID NO: 671143 - DNA, 25 bp, Homo sapien
cagccaggcggttaatgctgctgcc

SEQ ID NO: 671144 - DNA, 25 bp, Homo sapien
gatgcccctgtgcagtaaattcagt

SEQ ID NO: 671145 - DNA, 25 bp, Homo sapien
ttacccacacaggatagccatggcc

SEQ ID NO: 671146 - DNA, 25 bp, Homo sapien
ttcagtgcccaaccataagtgcctc

SEQ ID NO: 671147 - DNA, 25 bp, Homo sapien
gactcgatgtgtcaaagggctctga

SEQ ID NO: 671148 - DNA, 25 bp, Homo sapien
tctcagacacctctgaataggtgtc

SEQ ID NO: 671149 - DNA, 25 bp, Homo sapien
tgctgtgagctcaccagtaccaggg

SEQ ID NO: 671150 - DNA, 25 bp, Homo sapien
taggtgtcacccatccctttgtgaa

SEQ ID NO: 671151 - DNA, 25 bp, Homo sapien
caagttccggcagtggtatctacga

SEQ ID NO: 671152 - DNA, 25 bp, Homo sapien
gaactggttccgacagaagctccct

SEQ ID NO: 671153 - DNA, 25 bp, Homo sapien
caatggctgagtgaccagaagtccc

SEQ ID NO: 671154 - DNA, 25 bp, Homo sapien
gagttggccgttcttcagtgcgtac

SEQ ID NO: 671155 - DNA, 25 bp, Homo sapien
gagggagaggaactgtgctatgcca

SEQ ID NO: 671156 - DNA, 25 bp, Homo sapien
tgactggaactgccccattgatgaa

SEQ ID NO: 671157 - DNA, 25 bp, Homo sapien
gatgaaggaatggtccccctctctc

SEQ ID NO: 671158 - DNA, 25 bp, Homo sapien
gcactgttcctatcaggggcccgtt

SEQ ID NO: 671159 - DNA, 25 bp, Homo sapien
gacagctttggtaaggcctcaccca

SEQ ID NO: 671160 - DNA, 25 bp, Homo sapien
ccacaggctggctagggacattctc

SEQ ID NO: 671161 - DNA, 25 bp, Homo sapien
ggcattgtgcaaggaaagcccctca

SEQ ID NO: 671162 - DNA, 25 bp, Homo sapien
tggcttccccggagtgacatgtggc

SEQ ID NO: 671163 - DNA, 25 bp, Homo sapien
atcagcagttgagagcttgtcccat

SEQ ID NO: 671164 - DNA, 25 bp, Homo sapien
cagttgagagcttgtcccataaggg

SEQ ID NO: 671165 - DNA, 25 bp, Homo sapien
ggtgacaatcactgggtgatcagca

SEQ ID NO: 671166 - DNA, 25 bp, Homo sapien
cataaggggcctaacaatacaagtt

SEQ ID NO: 671167 - DNA, 25 bp, Homo sapien
ccttctaccatctaggtcttttcac

SEQ ID NO: 671168 - DNA, 25 bp, Homo sapien
atttctcggatacccagacacattc

SEQ ID NO: 671169 - DNA, 25 bp, Homo sapien
tcggatacccagacacattccactg

SEQ ID NO: 671170 - DNA, 25 bp, Homo sapien
tgccttctaccatctaggtcttttc

SEQ ID NO: 671171 - DNA, 25 bp, Homo sapien
tggcaatagtcccaatgtcattcaa

SEQ ID NO: 671172 - DNA, 25 bp, Homo sapien
attcaaaattaagtcttggccaggc

SEQ ID NO: 671173 - DNA, 25 bp, Homo sapien
gtggacaacatgaagatggatttga

SEQ ID NO: 671174 - DNA, 25 bp, Homo sapien
ctgagaagtggacaacatgaagatg

SEQ ID NO: 671175 - DNA, 25 bp, Homo sapien
tcccaagtagccagtattacagatg

SEQ ID NO: 671176 - DNA, 25 bp, Homo sapien
agtagccagtattacagatgcgtgc

SEQ ID NO: 671177 - DNA, 25 bp, Homo sapien
cagctattttttttttgtagagatg

SEQ ID NO: 671178 - DNA, 25 bp, Homo sapien
caccatgcccagctatttttttttt

SEQ ID NO: 671179 - DNA, 25 bp, Homo sapien
tctaggttcctcatccagagaaggg

SEQ ID NO: 671180 - DNA, 25 bp, Homo sapien
cacaatcctatgatgctggcagagc

SEQ ID NO: 671181 - DNA, 25 bp, Homo sapien
cctggaacaatagagggctatggct

SEQ ID NO: 671182 - DNA, 25 bp, Homo sapien
cttagtcggcccaggacagtttcta

SEQ ID NO: 671183 - DNA, 25 bp, Homo sapien
ttgctcaataaagttctgtattttc

SEQ ID NO: 671184 - DNA, 25 bp, Homo sapien
gccttatcattacagccaggatatt

SEQ ID NO: 671185 - DNA, 25 bp, Homo sapien
caatcttatgctgcccaactaatgg

SEQ ID NO: 671186 - DNA, 25 bp, Homo sapien
ctattcactgggttgatcagcctta

SEQ ID NO: 671187 - DNA, 25 bp, Homo sapien
gaagatgcattgggaggcttctgaa

SEQ ID NO: 671188 - DNA, 25 bp, Homo sapien
ggaagatgcattgggaggcttctga

SEQ ID NO: 671189 - DNA, 25 bp, Homo sapien
aagatgcattgggaggcttctgaag

SEQ ID NO: 671190 - DNA, 25 bp, Homo sapien
tggaagatgcattgggaggcttctg

SEQ ID NO: 671191 - DNA, 25 bp, Homo sapien
aggtttcaagacctgccctgtccaa

SEQ ID NO: 671192 - DNA, 25 bp, Homo sapien
tagtacttagggagcaggatatcac

SEQ ID NO: 671193 - DNA, 25 bp, Homo sapien
tctgagtcaggcaagtccaggtttc

SEQ ID NO: 671194 - DNA, 25 bp, Homo sapien
gccactagccataggtactcatgta

SEQ ID NO: 671195 - DNA, 25 bp, Homo sapien
ccttgcagattgtacatagcacaga

SEQ ID NO: 671196 - DNA, 25 bp, Homo sapien
cttgcagattgtacatagcacagac

SEQ ID NO: 671197 - DNA, 25 bp, Homo sapien
cacataaataatccattctttgcca

SEQ ID NO: 671198 - DNA, 25 bp, Homo sapien
ggtcttggtccatgggttagaatca

SEQ ID NO: 671199 - DNA, 25 bp, Homo sapien
tccattctttgccaaaatagagccc

SEQ ID NO: 671200 - DNA, 25 bp, Homo sapien
ttgcggaaatatgctcacataaata

SEQ ID NO: 671201 - DNA, 25 bp, Homo sapien
ttcatgtcccaaacatccagaagga

SEQ ID NO: 671202 - DNA, 25 bp, Homo sapien
ctcgtgacagcaaggtaactccagc

SEQ ID NO: 671203 - DNA, 25 bp, Homo sapien
ctacttcgtcaaccacatcctaggg

SEQ ID NO: 671204 - DNA, 25 bp, Homo sapien
gactgccactgggttaatcactgtg

SEQ ID NO: 671205 - DNA, 25 bp, Homo sapien
tgggcttaaacaatcaagatccatc

SEQ ID NO: 671206 - DNA, 25 bp, Homo sapien
ggtgggaccaatccttctcctacca

SEQ ID NO: 671207 - DNA, 25 bp, Homo sapien
acattccctgtttcctatggaaggg

SEQ ID NO: 671208 - DNA, 25 bp, Homo sapien
ggaccaatccttctcctaccagaag

SEQ ID NO: 671209 - DNA, 25 bp, Homo sapien
tatcaaggtaataagaaacagttcc

SEQ ID NO: 671210 - DNA, 25 bp, Homo sapien
tggctgcctggaattaagattgccg

SEQ ID NO: 671211 - DNA, 25 bp, Homo sapien
gattgccgctatcaaggtaataaga

SEQ ID NO: 671212 - DNA, 25 bp, Homo sapien
ggaattaagattgccgctatcaagg

SEQ ID NO: 671213 - DNA, 25 bp, Homo sapien
ctttgtagctttgggcaaaattctt

SEQ ID NO: 671214 - DNA, 25 bp, Homo sapien
aaaattcttaagctgtgtctcagtt

SEQ ID NO: 671215 - DNA, 25 bp, Homo sapien
gcaaaattcttaagctgtgtctcag

SEQ ID NO: 671216 - DNA, 25 bp, Homo sapien
ttgggcaaaattcttaagctgtgtc

SEQ ID NO: 671217 - DNA, 25 bp, Homo sapien
tggagtcagataccatgagcttaaa

SEQ ID NO: 671218 - DNA, 25 bp, Homo sapien
caccttcagagattagcactataga

SEQ ID NO: 671219 - DNA, 25 bp, Homo sapien
gggcaagttgcctaattttgtgtgc

SEQ ID NO: 671220 - DNA, 25 bp, Homo sapien
taattgtggagctctcataacccca

SEQ ID NO: 671221 - DNA, 25 bp, Homo sapien
cagagggagctgacttaggttgtgt

SEQ ID NO: 671222 - DNA, 25 bp, Homo sapien
agagtggtagtcaaactgcatttcc

SEQ ID NO: 671223 - DNA, 25 bp, Homo sapien
tgaagactaagccagccatctgaaa

SEQ ID NO: 671224 - DNA, 25 bp, Homo sapien
catttgggcctgttgtgaagactaa

SEQ ID NO: 671225 - DNA, 25 bp, Homo sapien
gtcaagatggctcagtgtcaccagg

SEQ ID NO: 671226 - DNA, 25 bp, Homo sapien
cagtgattccagttcgcctttgacc

SEQ ID NO: 671227 - DNA, 25 bp, Homo sapien
caggcattgctagggcccacctgtt

SEQ ID NO: 671228 - DNA, 25 bp, Homo sapien
cagttatctaactccacaggcattg

SEQ ID NO: 671229 - DNA, 25 bp, Homo sapien
cctcccaatttattaccatccaaag

SEQ ID NO: 671230 - DNA, 25 bp, Homo sapien
tcccaatttattaccatccaaagct

SEQ ID NO: 671231 - DNA, 25 bp, Homo sapien
cggcacctggcctaaccctcccaat

SEQ ID NO: 671232 - DNA, 25 bp, Homo sapien
ccaatttattaccatccaaagcttt

SEQ ID NO: 671233 - DNA, 25 bp, Homo sapien
agccaatcaaatttatctacagtgg

SEQ ID NO: 671234 - DNA, 25 bp, Homo sapien
ttgtccagcactggtttagatcctg

SEQ ID NO: 671235 - DNA, 25 bp, Homo sapien
aaatttatctacagtggctggatgg

SEQ ID NO: 671236 - DNA, 25 bp, Homo sapien
gtccagcactggtttagatcctggg

SEQ ID NO: 671237 - DNA, 25 bp, Homo sapien
ctcttcactttatgcagtcccacaa

SEQ ID NO: 671238 - DNA, 25 bp, Homo sapien
tgcagtcccacaagcatctctaaaa

SEQ ID NO: 671239 - DNA, 25 bp, Homo sapien
tttatgcagtcccacaagcatctct

SEQ ID NO: 671240 - DNA, 25 bp, Homo sapien
ttcactttatgcagtcccacaagca

SEQ ID NO: 671241 - DNA, 25 bp, Homo sapien
ctgtccagagctggaaagaacttcc

SEQ ID NO: 671242 - DNA, 25 bp, Homo sapien
ccttgggatcatctgttttcatgtt

SEQ ID NO: 671243 - DNA, 25 bp, Homo sapien
ttttcatgttttcctgtccagagct

SEQ ID NO: 671244 - DNA, 25 bp, Homo sapien
ctccttgggatcatctgttttcatg

SEQ ID NO: 671245 - DNA, 25 bp, Homo sapien
caatgtggtagtagctctctgggtc

SEQ ID NO: 671246 - DNA, 25 bp, Homo sapien
agagctgaactcttgaggcgtccgc

SEQ ID NO: 671247 - DNA, 25 bp, Homo sapien
tctcagtatagtcaaggctcagcgt

SEQ ID NO: 671248 - DNA, 25 bp, Homo sapien
tctaattgggttccccgagctctct

SEQ ID NO: 671249 - DNA, 25 bp, Homo sapien
gataaacaggaaagacaccatcaga

SEQ ID NO: 671250 - DNA, 25 bp, Homo sapien
aatttcaatttgaaccaagcaaaag

SEQ ID NO: 671251 - DNA, 25 bp, Homo sapien
gacagcaatactaagacgtaaagga

SEQ ID NO: 671252 - DNA, 25 bp, Homo sapien
aatagcatgaggacttctgggccaa

SEQ ID NO: 671253 - DNA, 25 bp, Homo sapien
aagtccataatgcagggtttcagct

SEQ ID NO: 671254 - DNA, 25 bp, Homo sapien
cactaactatgcagttgaatgactt

SEQ ID NO: 671255 - DNA, 25 bp, Homo sapien
tctgtccagctgtggtagagcttcc

SEQ ID NO: 671256 - DNA, 25 bp, Homo sapien
tttcagctctccactaactatgcag

SEQ ID NO: 671257 - DNA, 25 bp, Homo sapien
ctacagttacatattttctcaaagg

SEQ ID NO: 671258 - DNA, 25 bp, Homo sapien
tctgtctgttggtccctacagttac

SEQ ID NO: 671259 - DNA, 25 bp, Homo sapien
agtatccaacaatggccagttctcc

SEQ ID NO: 671260 - DNA, 25 bp, Homo sapien
aaggactagcctttctcatcaagac

SEQ ID NO: 671261 - DNA, 25 bp, Homo sapien
aataggcacatgttactgcatctgg

SEQ ID NO: 671262 - DNA, 25 bp, Homo sapien
ggacacccgactggcatagcgtact

SEQ ID NO: 671263 - DNA, 25 bp, Homo sapien
atagcgtactacagccctaactcct

SEQ ID NO: 671264 - DNA, 25 bp, Homo sapien
tctttgtttctgacctagacaggtt

SEQ ID NO: 671265 - DNA, 25 bp, Homo sapien
gctcatctacgattcaaaagctgcc

SEQ ID NO: 671266 - DNA, 25 bp, Homo sapien
tgtttctacagaactcacttgctca

SEQ ID NO: 671267 - DNA, 25 bp, Homo sapien
tgccctttgcatgagtacctttcag

SEQ ID NO: 671268 - DNA, 25 bp, Homo sapien
ggtgatcacgaactctctactctgt

SEQ ID NO: 671269 - DNA, 25 bp, Homo sapien
tatttgctgcctttgacggctatca

SEQ ID NO: 671270 - DNA, 25 bp, Homo sapien
ttttccttcaccacaatgagttggg

SEQ ID NO: 671271 - DNA, 25 bp, Homo sapien
taagcatatagtgcagtctccaccc

SEQ ID NO: 671272 - DNA, 25 bp, Homo sapien
ctttcattcagtctatttgctgcct

SEQ ID NO: 671273 - DNA, 25 bp, Homo sapien
gcagaggactaacatgatctgaatt

SEQ ID NO: 671274 - DNA, 25 bp, Homo sapien
gacaaaaagctattggagggctcta

SEQ ID NO: 671275 - DNA, 25 bp, Homo sapien
tggcaggccacagcaaggccttcag

SEQ ID NO: 671276 - DNA, 25 bp, Homo sapien
agcaaagagatctgtctggcaaggc

SEQ ID NO: 671277 - DNA, 25 bp, Homo sapien
ggacgcagctgcaccaaccgactcc

SEQ ID NO: 671278 - DNA, 25 bp, Homo sapien
gccgctcttcccgcgctgcgggcct

SEQ ID NO: 671279 - DNA, 25 bp, Homo sapien
gagccgcggactgctgagcggcggg

SEQ ID NO: 671280 - DNA, 25 bp, Homo sapien
gcggcgacgccggagccgcggactg

SEQ ID NO: 671281 - DNA, 25 bp, Homo sapien
agtggctcccacctttagaatccag

SEQ ID NO: 671282 - DNA, 25 bp, Homo sapien
tagttatggaaccaagtctgcagca

SEQ ID NO: 671283 - DNA, 25 bp, Homo sapien
cagcaggagctctacggtcttgaca

SEQ ID NO: 671284 - DNA, 25 bp, Homo sapien
tcttgacacacctggatgggaatcc

SEQ ID NO: 671285 - DNA, 25 bp, Homo sapien
ggtcagtgttttaagctgcaaggaa

SEQ ID NO: 671286 - DNA, 25 bp, Homo sapien
gactcagctagtcgttcagggacac

SEQ ID NO: 671287 - DNA, 25 bp, Homo sapien
gagaaactgccttgggtcagtgttt

SEQ ID NO: 671288 - DNA, 25 bp, Homo sapien
gcaaggaatgttgtgactcagctag

SEQ ID NO: 671289 - DNA, 25 bp, Homo sapien
gctccggatatgtggtgcgcagccc

SEQ ID NO: 671290 - DNA, 25 bp, Homo sapien
gccgctctgagctgcttggaaagtt

SEQ ID NO: 671291 - DNA, 25 bp, Homo sapien
atgactcaacgggacagcttctgcc

SEQ ID NO: 671292 - DNA, 25 bp, Homo sapien
tctagagcagtgcagcagtacatcc

SEQ ID NO: 671293 - DNA, 25 bp, Homo sapien
ctggccacccagtgggccagaaaca

SEQ ID NO: 671294 - DNA, 25 bp, Homo sapien
cacccagtgggccagaaacagccat

SEQ ID NO: 671295 - DNA, 25 bp, Homo sapien
tggccacccagtgggccagaaacag

SEQ ID NO: 671296 - DNA, 25 bp, Homo sapien
cccctggccacccagtgggccagaa

SEQ ID NO: 671297 - DNA, 25 bp, Homo sapien
tcaataatcattgatagctccccag

SEQ ID NO: 671298 - DNA, 25 bp, Homo sapien
tgctcaataatcattgatagctccc

SEQ ID NO: 671299 - DNA, 25 bp, Homo sapien
tctcctgctcaataatcattgatag

SEQ ID NO: 671300 - DNA, 25 bp, Homo sapien
taatcattgatagctccccagtgcc

SEQ ID NO: 671301 - DNA, 25 bp, Homo sapien
tgagatagcagccagacactacctg

SEQ ID NO: 671302 - DNA, 25 bp, Homo sapien
tctttggtccaggaaagccgcgagc

SEQ ID NO: 671303 - DNA, 25 bp, Homo sapien
tgaggccagtcacttccaaacaggt

SEQ ID NO: 671304 - DNA, 25 bp, Homo sapien
aatggtatgtatgacgctgccctcc

SEQ ID NO: 671305 - DNA, 25 bp, Homo sapien
tatctgtctccctgtcaacctggga

SEQ ID NO: 671306 - DNA, 25 bp, Homo sapien
cagacctcgcttaaggacagtccca

SEQ ID NO: 671307 - DNA, 25 bp, Homo sapien
taccgaggctcgaggcttcagtgaa

SEQ ID NO: 671308 - DNA, 25 bp, Homo sapien
ggtgccctggcatctcagcacatga

SEQ ID NO: 671309 - DNA, 25 bp, Homo sapien
tctgggaactgcataggcctgagga

SEQ ID NO: 671310 - DNA, 25 bp, Homo sapien
tctaaacagattgcctggattccgt

SEQ ID NO: 671311 - DNA, 25 bp, Homo sapien
gctaaaagctttaatccagagcctg

SEQ ID NO: 671312 - DNA, 25 bp, Homo sapien
aaatgtccaggaaccaaaggcaggg

SEQ ID NO: 671313 - DNA, 25 bp, Homo sapien
tgtgggcctgtaggtctctgcacag

SEQ ID NO: 671314 - DNA, 25 bp, Homo sapien
ggcacagggcaatgcggacaggcca

SEQ ID NO: 671315 - DNA, 25 bp, Homo sapien
cctgatggctgcgaagagaagccga

SEQ ID NO: 671316 - DNA, 25 bp, Homo sapien
ctgtggactgttgcttgtgggcaca

SEQ ID NO: 671317 - DNA, 25 bp, Homo sapien
ttagtgccatttgggctagccaggg

SEQ ID NO: 671318 - DNA, 25 bp, Homo sapien
atcaaggccagtttgccacagcagc

SEQ ID NO: 671319 - DNA, 25 bp, Homo sapien
tgctgacagtggaatgtgaactctc

SEQ ID NO: 671320 - DNA, 25 bp, Homo sapien
gaccgctgtccggaactgtccagtt

SEQ ID NO: 671321 - DNA, 25 bp, Homo sapien
ggatctaggggttgggtcctggcca

SEQ ID NO: 671322 - DNA, 25 bp, Homo sapien
cgagttggtgggatctaggggttgg

SEQ ID NO: 671323 - DNA, 25 bp, Homo sapien
tgggatctaggggttgggtcctggc

SEQ ID NO: 671324 - DNA, 25 bp, Homo sapien
tgttccccgagttggtgggatctag

SEQ ID NO: 671325 - DNA, 25 bp, Homo sapien
tcctgttgggatcctcgtggctagc

SEQ ID NO: 671326 - DNA, 25 bp, Homo sapien
taccatatgtttgagccaggcgctg

SEQ ID NO: 671327 - DNA, 25 bp, Homo sapien
gatcaaggctagttgcccacagcag

SEQ ID NO: 671328 - DNA, 25 bp, Homo sapien
gcaatgtcctgcgtgtgctgggcca

SEQ ID NO: 671329 - DNA, 25 bp, Homo sapien
tatttgggtctgagtactgtgcggt

SEQ ID NO: 671330 - DNA, 25 bp, Homo sapien
gtcactgtcttgtagccaaccttgt

SEQ ID NO: 671331 - DNA, 25 bp, Homo sapien
agtgaagccgggacagcaacgccag

SEQ ID NO: 671332 - DNA, 25 bp, Homo sapien
tcagggcagcgtttcccagtgaagc

SEQ ID NO: 671333 - DNA, 25 bp, Homo sapien
gggccactcttggctcctacctgct

SEQ ID NO: 671334 - DNA, 25 bp, Homo sapien
gggggccactcttggctcctacctg

SEQ ID NO: 671335 - DNA, 25 bp, Homo sapien
ggccactcttggctcctacctgctc

SEQ ID NO: 671336 - DNA, 25 bp, Homo sapien
ggggccactcttggctcctacctgc

SEQ ID NO: 671337 - DNA, 25 bp, Homo sapien
ctgacacaccggagacaacaggttt

SEQ ID NO: 671338 - DNA, 25 bp, Homo sapien
acacacacgtgaacctctccaggta

SEQ ID NO: 671339 - DNA, 25 bp, Homo sapien
atggcctgcctccttgtggtcacca

SEQ ID NO: 671340 - DNA, 25 bp, Homo sapien
tacagagctgtgcatcccatgtgcg

SEQ ID NO: 671341 - DNA, 25 bp, Homo sapien
ctcctgtaggatgcaggtcacattc

SEQ ID NO: 671342 - DNA, 25 bp, Homo sapien
tattcagcctttacgtagctctccg

SEQ ID NO: 671343 - DNA, 25 bp, Homo sapien
ccccatctacactgccggtattcag

SEQ ID NO: 671344 - DNA, 25 bp, Homo sapien
tccgctccctcctgtaggatgcagg

SEQ ID NO: 671345 - DNA, 25 bp, Homo sapien
ctgtgcaccacataggcacagaggg

SEQ ID NO: 671346 - DNA, 25 bp, Homo sapien
gtgcaccacataggcacagagggcc

SEQ ID NO: 671347 - DNA, 25 bp, Homo sapien
tgtgcaccacataggcacagagggc

SEQ ID NO: 671348 - DNA, 25 bp, Homo sapien
tctcctcgtagttttgcagcccctg

SEQ ID NO: 671349 - DNA, 25 bp, Homo sapien
agtgtcggtactcttcctcctacaa

SEQ ID NO: 671350 - DNA, 25 bp, Homo sapien
gaggctcgctgtgatgtacccaggc

SEQ ID NO: 671351 - DNA, 25 bp, Homo sapien
tcagagcagttcttgtaccacctcc

SEQ ID NO: 671352 - DNA, 25 bp, Homo sapien
gggcgccatcccgtcgtgtagagac

SEQ ID NO: 671353 - DNA, 25 bp, Homo sapien
catcccgtcgtgtagagactgtagc

SEQ ID NO: 671354 - DNA, 25 bp, Homo sapien
gccatcccgtcgtgtagagactgta

SEQ ID NO: 671355 - DNA, 25 bp, Homo sapien
tcccgtcgtgtagagactgtagcgg

SEQ ID NO: 671356 - DNA, 25 bp, Homo sapien
gagagcagcgccgcgacggcgcaca

SEQ ID NO: 671357 - DNA, 25 bp, Homo sapien
gtgcccctggcctgcgcccccgaga

SEQ ID NO: 671358 - DNA, 25 bp, Homo sapien
cccgagagcagcgccgcgacggcgc

SEQ ID NO: 671359 - DNA, 25 bp, Homo sapien
caggccgcgccaggagcggggtgcc

SEQ ID NO: 671360 - DNA, 25 bp, Homo sapien
gctggcccggccgcctggcgcttcg

SEQ ID NO: 671361 - DNA, 25 bp, Homo sapien
gcggagtggccggcgctgctagcgg

SEQ ID NO: 671362 - DNA, 25 bp, Homo sapien
ttcgcggcggctgcgtcccgcggag

SEQ ID NO: 671363 - DNA, 25 bp, Homo sapien
cccgccgggtgtccgcctgcagcgc

SEQ ID NO: 671364 - DNA, 25 bp, Homo sapien
tcataggggctaaaaggatagctgg

SEQ ID NO: 671365 - DNA, 25 bp, Homo sapien
accctgtttgagcttggaaatatcc

SEQ ID NO: 671366 - DNA, 25 bp, Homo sapien
tggaaatatccacgtcataggggct

SEQ ID NO: 671367 - DNA, 25 bp, Homo sapien
ctggaccctgtttgagcttggaaat

SEQ ID NO: 671368 - DNA, 25 bp, Homo sapien
ggtccccccatagacgatgaggcca

SEQ ID NO: 671369 - DNA, 25 bp, Homo sapien
gccactttgcatctgccagacagga

SEQ ID NO: 671370 - DNA, 25 bp, Homo sapien
agatgctcagggtcttggctggatc

SEQ ID NO: 671371 - DNA, 25 bp, Homo sapien
atgctcagggtcttggctggatcag

SEQ ID NO: 671372 - DNA, 25 bp, Homo sapien
ttacagctggaaacgatgcatgcag

SEQ ID NO: 671373 - DNA, 25 bp, Homo sapien
gaaacgatgcatgcagaactgtcgg

SEQ ID NO: 671374 - DNA, 25 bp, Homo sapien
ggaaaaacatcctgtggctgcagct

SEQ ID NO: 671375 - DNA, 25 bp, Homo sapien
gaactgtcgggaaaaacatcctgtg

SEQ ID NO: 671376 - DNA, 25 bp, Homo sapien
tccggacactgaccagagtatgtgg

SEQ ID NO: 671377 - DNA, 25 bp, Homo sapien
gcctccagttggaaggtccggacac

SEQ ID NO: 671378 - DNA, 25 bp, Homo sapien
agagtatgtggcacagctggcctga

SEQ ID NO: 671379 - DNA, 25 bp, Homo sapien
gaaggtccggacactgaccagagta

SEQ ID NO: 671380 - DNA, 25 bp, Homo sapien
tcagccccttgaatccactccagac

SEQ ID NO: 671381 - DNA, 25 bp, Homo sapien
tatttctgagtcgagctccaatcca

SEQ ID NO: 671382 - DNA, 25 bp, Homo sapien
tagatgggtcattctgtagccatga

SEQ ID NO: 671383 - DNA, 25 bp, Homo sapien
tcgagctccaatccagactggcagt

SEQ ID NO: 671384 - DNA, 25 bp, Homo sapien
atgaggagatggcactaggcaggct

SEQ ID NO: 671385 - DNA, 25 bp, Homo sapien
cacattcctggctatgctggtgttg

SEQ ID NO: 671386 - DNA, 25 bp, Homo sapien
ccacattcctggctatgctggtgtt

SEQ ID NO: 671387 - DNA, 25 bp, Homo sapien
cccacattcctggctatgctggtgt

SEQ ID NO: 671388 - DNA, 25 bp, Homo sapien
cagagcatactgtagtgcaaggtca

SEQ ID NO: 671389 - DNA, 25 bp, Homo sapien
gccagagcatactgtagtgcaaggt

SEQ ID NO: 671390 - DNA, 25 bp, Homo sapien
tgttaaggtgtcccatttgttggct

SEQ ID NO: 671391 - DNA, 25 bp, Homo sapien
tgttggctgcccctttgaagctggg

SEQ ID NO: 671392 - DNA, 25 bp, Homo sapien
cccagatagctgatgaaggcacttg

SEQ ID NO: 671393 - DNA, 25 bp, Homo sapien
tcctgttagagccacagggaagtcg

SEQ ID NO: 671394 - DNA, 25 bp, Homo sapien
acttggtcagaaggcacggctggct

SEQ ID NO: 671395 - DNA, 25 bp, Homo sapien
ccttccagctttgggtccctcgtgg

SEQ ID NO: 671396 - DNA, 25 bp, Homo sapien
tggaatcaagaagcccattggcccc

SEQ ID NO: 671397 - DNA, 25 bp, Homo sapien
tagcgtcaacttccagatgtgcagc

SEQ ID NO: 671398 - DNA, 25 bp, Homo sapien
gagagacatggacgtgcagaaccag

SEQ ID NO: 671399 - DNA, 25 bp, Homo sapien
agaggagccagggtgccttcttgct

SEQ ID NO: 671400 - DNA, 25 bp, Homo sapien
tatctaatgaagtggtgagaccctg

SEQ ID NO: 671401 - DNA, 25 bp, Homo sapien
gaagcagcgtgtagctctacggagc

SEQ ID NO: 671402 - DNA, 25 bp, Homo sapien
attgaaccctgtgacctaccggagg

SEQ ID NO: 671403 - DNA, 25 bp, Homo sapien
ggtaaagctttctcgcagcaagagg

SEQ ID NO: 671404 - DNA, 25 bp, Homo sapien
ttgtgcttgatagagacgccggagc

SEQ ID NO: 671405 - DNA, 25 bp, Homo sapien
tctgccacaatggaaggagccttca

SEQ ID NO: 671406 - DNA, 25 bp, Homo sapien
tcagaaaatggacctggaccaggct

SEQ ID NO: 671407 - DNA, 25 bp, Homo sapien
catgttctctctctgcgggcaaagg

SEQ ID NO: 671408 - DNA, 25 bp, Homo sapien
cttctccctcagcagctgagaacat

SEQ ID NO: 671409 - DNA, 25 bp, Homo sapien
ggcttctccctcagcagctgagaac

SEQ ID NO: 671410 - DNA, 25 bp, Homo sapien
ctgacaggcttctccctcagcagct

SEQ ID NO: 671411 - DNA, 25 bp, Homo sapien
caggcttctccctcagcagctgaga

SEQ ID NO: 671412 - DNA, 25 bp, Homo sapien
gtgggaatcagaggcagggatctgg

SEQ ID NO: 671413 - DNA, 25 bp, Homo sapien
ccttccactagagtctgcagagtgg

SEQ ID NO: 671414 - DNA, 25 bp, Homo sapien
gaataccttcccttccactagagtc

SEQ ID NO: 671415 - DNA, 25 bp, Homo sapien
gcggccttttcaggattctcctttg

SEQ ID NO: 671416 - DNA, 25 bp, Homo sapien
tttgcagcagagcaagagcgctggc

SEQ ID NO: 671417 - DNA, 25 bp, Homo sapien
agctttaaccatgtcctgtggagga

SEQ ID NO: 671418 - DNA, 25 bp, Homo sapien
tgccccgaggataaagagaacgctc

SEQ ID NO: 671419 - DNA, 25 bp, Homo sapien
gagcgctggcaaaggaagtcagctt

SEQ ID NO: 671420 - DNA, 25 bp, Homo sapien
gcaaacctgcttccccttccaggaa

SEQ ID NO: 671421 - DNA, 25 bp, Homo sapien
gggagcaaacctgcttccccttcca

SEQ ID NO: 671422 - DNA, 25 bp, Homo sapien
gagcaaacctgcttccccttccagg

SEQ ID NO: 671423 - DNA, 25 bp, Homo sapien
ggagcaaacctgcttccccttccag

SEQ ID NO: 671424 - DNA, 25 bp, Homo sapien
cttggggatggcaggaactctctct

SEQ ID NO: 671425 - DNA, 25 bp, Homo sapien
ctcagggagctgacatctaattttc

SEQ ID NO: 671426 - DNA, 25 bp, Homo sapien
ttctttacagcgtggcctcctctgc

SEQ ID NO: 671427 - DNA, 25 bp, Homo sapien
ttccaggttctttacagcgtggcct

SEQ ID NO: 671428 - DNA, 25 bp, Homo sapien
tctaaggagtagtcagcctgctgcc

SEQ ID NO: 671429 - DNA, 25 bp, Homo sapien
ctggctgccgtagctggctcaggag

SEQ ID NO: 671430 - DNA, 25 bp, Homo sapien
gtgtgtggtgctcaaggtggcctgc

SEQ ID NO: 671431 - DNA, 25 bp, Homo sapien
gaatggatttctcggcttggctgct

SEQ ID NO: 671432 - DNA, 25 bp, Homo sapien
caatatcacccagtaagtcaagcag

SEQ ID NO: 671433 - DNA, 25 bp, Homo sapien
aaagtgagtctcagttgtagcccaa

SEQ ID NO: 671434 - DNA, 25 bp, Homo sapien
tctcagcccctagagaaaaaggtcc

SEQ ID NO: 671435 - DNA, 25 bp, Homo sapien
cctccgtggtagatgctgttgcccc

SEQ ID NO: 671436 - DNA, 25 bp, Homo sapien
ttttaatctaatgacctcaataccc

SEQ ID NO: 671437 - DNA, 25 bp, Homo sapien
ttaatctaatgacctcaatacccac

SEQ ID NO: 671438 - DNA, 25 bp, Homo sapien
tttaatctaatgacctcaataccca

SEQ ID NO: 671439 - DNA, 25 bp, Homo sapien
cccatgccagccattgaggatgata

SEQ ID NO: 671440 - DNA, 25 bp, Homo sapien
caagattcccgcctgaagtgtctgc

SEQ ID NO: 671441 - DNA, 25 bp, Homo sapien
aggccagcttgcagaatcccagaca

SEQ ID NO: 671442 - DNA, 25 bp, Homo sapien
cctcaaactcatagggacgcctgtg

SEQ ID NO: 671443 - DNA, 25 bp, Homo sapien
caatgctgcgccgttgctgaagctg

SEQ ID NO: 671444 - DNA, 25 bp, Homo sapien
tgtgcctgagggctcatactgctgg

SEQ ID NO: 671445 - DNA, 25 bp, Homo sapien
tctaggcggttaattatcacgcggt

SEQ ID NO: 671446 - DNA, 25 bp, Homo sapien
caccacgtggcagatattatctagg

SEQ ID NO: 671447 - DNA, 25 bp, Homo sapien
tagaaaaaaggataaagctctgatg

SEQ ID NO: 671448 - DNA, 25 bp, Homo sapien
ctagaaaaaaggataaagctctgat

SEQ ID NO: 671449 - DNA, 25 bp, Homo sapien
aaaaaaggataaagctctgatgaat

SEQ ID NO: 671450 - DNA, 25 bp, Homo sapien
gaaaaaaggataaagctctgatgaa

SEQ ID NO: 671451 - DNA, 25 bp, Homo sapien
gggagctcgagcctcctgtagctca

SEQ ID NO: 671452 - DNA, 25 bp, Homo sapien
tgtgatgcccgatgttgagctcttg

SEQ ID NO: 671453 - DNA, 25 bp, Homo sapien
ttggccactcagagaaggaatagag

SEQ ID NO: 671454 - DNA, 25 bp, Homo sapien
tcctgtagcagctgagcaatagtgg

SEQ ID NO: 671455 - DNA, 25 bp, Homo sapien
tgccatcaaaggacaccagttcagg

SEQ ID NO: 671456 - DNA, 25 bp, Homo sapien
tccagggtctgcaaaagcactttta

SEQ ID NO: 671457 - DNA, 25 bp, Homo sapien
tctgacttagcaaggctgacgctgc

SEQ ID NO: 671458 - DNA, 25 bp, Homo sapien
ctcatatgtgtggaggatcccttcc

SEQ ID NO: 671459 - DNA, 25 bp, Homo sapien
gatttgagctcacttccttcaagag

SEQ ID NO: 671460 - DNA, 25 bp, Homo sapien
aaattcatcattctcgaggccatgc

SEQ ID NO: 671461 - DNA, 25 bp, Homo sapien
tttaaacggctgtgatggaatagca

SEQ ID NO: 671462 - DNA, 25 bp, Homo sapien
tgggttcaccctccatggcgatagt

SEQ ID NO: 671463 - DNA, 25 bp, Homo sapien
ccaggagtctggtttgccacctcta

SEQ ID NO: 671464 - DNA, 25 bp, Homo sapien
gatgcaatacctctggcctttcccc

SEQ ID NO: 671465 - DNA, 25 bp, Homo sapien
tggagcggggaaagccctctgtagc

SEQ ID NO: 671466 - DNA, 25 bp, Homo sapien
ccttgagatgttagtagtgggctcc

SEQ ID NO: 671467 - DNA, 25 bp, Homo sapien
atcactgtggttctgactcaaaatc

SEQ ID NO: 671468 - DNA, 25 bp, Homo sapien
catcactgtggttctgactcaaaat

SEQ ID NO: 671469 - DNA, 25 bp, Homo sapien
tcactgtggttctgactcaaaatca

SEQ ID NO: 671470 - DNA, 25 bp, Homo sapien
ggtttcttttggagtcacagacact

SEQ ID NO: 671471 - DNA, 25 bp, Homo sapien
gatctgatgacaggtttcttttgga

SEQ ID NO: 671472 - DNA, 25 bp, Homo sapien
gagtcacagacactaagactgcaca

SEQ ID NO: 671473 - DNA, 25 bp, Homo sapien
aataaatcaattaattgctgatctg

SEQ ID NO: 671474 - DNA, 25 bp, Homo sapien
tgtaacagtcagtgcggttcagccc

SEQ ID NO: 671475 - DNA, 25 bp, Homo sapien
tttggcagtgccgatgagcaggtct

SEQ ID NO: 671476 - DNA, 25 bp, Homo sapien
tcacatgtcacatcaggcaggctga

SEQ ID NO: 671477 - DNA, 25 bp, Homo sapien
tacagagttcttgcagcacgttcct

SEQ ID NO: 671478 - DNA, 25 bp, Homo sapien
tgatcgtaaacaacaccaaaggaag

SEQ ID NO: 671479 - DNA, 25 bp, Homo sapien
ttgtccaaacgggaaatgatgcgga

SEQ ID NO: 671480 - DNA, 25 bp, Homo sapien
tgcggaactgtgtccagtcaaaggt

SEQ ID NO: 671481 - DNA, 25 bp, Homo sapien
tgtgggtagacgacagacattccgg

SEQ ID NO: 671482 - DNA, 25 bp, Homo sapien
gagagcctactatgagagcccataa

SEQ ID NO: 671483 - DNA, 25 bp, Homo sapien
ttttaaagccaataactgcttattg

SEQ ID NO: 671484 - DNA, 25 bp, Homo sapien
ctatgagagcccataaagtcaagaa

SEQ ID NO: 671485 - DNA, 25 bp, Homo sapien
agccaataactgcttattgagagcc

SEQ ID NO: 671486 - DNA, 25 bp, Homo sapien
ggtccatttctgaggttctcctgaa

SEQ ID NO: 671487 - DNA, 25 bp, Homo sapien
cccagaatttcaggccggcacagtt

SEQ ID NO: 671488 - DNA, 25 bp, Homo sapien
taaacagtgaccagacgtctgagac

SEQ ID NO: 671489 - DNA, 25 bp, Homo sapien
gcacagttccttgcggttgcagcgc

SEQ ID NO: 671490 - DNA, 25 bp, Homo sapien
tgtgagggcggaggaaactggccag

SEQ ID NO: 671491 - DNA, 25 bp, Homo sapien
ggaaactggccagggcgatttgtct

SEQ ID NO: 671492 - DNA, 25 bp, Homo sapien
gcgatttgtctgggtcggagccatc

SEQ ID NO: 671493 - DNA, 25 bp, Homo sapien
ccagggcgatttgtctgggtcggag

SEQ ID NO: 671494 - DNA, 25 bp, Homo sapien
cttcttttcgctaaaaacgccatca

SEQ ID NO: 671495 - DNA, 25 bp, Homo sapien
tcatccttcttttcgctaaaaacgc

SEQ ID NO: 671496 - DNA, 25 bp, Homo sapien
ccggctgtcatccttcttttcgcta

SEQ ID NO: 671497 - DNA, 25 bp, Homo sapien
ttttcgctaaaaacgccatcacctc

SEQ ID NO: 671498 - DNA, 25 bp, Homo sapien
tctactttgtcctcagcattgtctt

SEQ ID NO: 671499 - DNA, 25 bp, Homo sapien
catctactttgtcctcagcattgtc

SEQ ID NO: 671500 - DNA, 25 bp, Homo sapien
ctactttgtcctcagcattgtcttc

SEQ ID NO: 671501 - DNA, 25 bp, Homo sapien
tactttgtcctcagcattgtcttct

SEQ ID NO: 671502 - DNA, 25 bp, Homo sapien
caagataagctccttgctttaccac

SEQ ID NO: 671503 - DNA, 25 bp, Homo sapien
gcctttgaaatatttgcgtcccaaa

SEQ ID NO: 671504 - DNA, 25 bp, Homo sapien
tgtccttgatgctcaagtcctagag

SEQ ID NO: 671505 - DNA, 25 bp, Homo sapien
tttatgccacattcaggcgcccatt

SEQ ID NO: 671506 - DNA, 25 bp, Homo sapien
cgcatggcattgtacctttcataac

SEQ ID NO: 671507 - DNA, 25 bp, Homo sapien
gaggtcccatctgtaacaccctgtt

SEQ ID NO: 671508 - DNA, 25 bp, Homo sapien
tcgggcatcccaactttctccagga

SEQ ID NO: 671509 - DNA, 25 bp, Homo sapien
agtgctgggtctgctcgcatggcat

SEQ ID NO: 671510 - DNA, 25 bp, Homo sapien
catgcttgaacacgccaatgagaag

SEQ ID NO: 671511 - DNA, 25 bp, Homo sapien
tccactgggatctccatgtagtcga

SEQ ID NO: 671512 - DNA, 25 bp, Homo sapien
tgacttatcggcttcagcatcccac

SEQ ID NO: 671513 - DNA, 25 bp, Homo sapien
caatgagaagtgacttatcggcttc

SEQ ID NO: 671514 - DNA, 25 bp, Homo sapien
cacactggaacaagtcggtatatca

SEQ ID NO: 671515 - DNA, 25 bp, Homo sapien
catttaagaccaagagtccacactg

SEQ ID NO: 671516 - DNA, 25 bp, Homo sapien
tggaacaagtcggtatatcaggagg

SEQ ID NO: 671517 - DNA, 25 bp, Homo sapien
caagagtccacactggaacaagtcg

SEQ ID NO: 671518 - DNA, 25 bp, Homo sapien
cagcatccggactcgcaaaagtact

SEQ ID NO: 671519 - DNA, 25 bp, Homo sapien
agtatttcagcttttaggtagtaca

SEQ ID NO: 671520 - DNA, 25 bp, Homo sapien
tatttcagcttttaggtagtacagc

SEQ ID NO: 671521 - DNA, 25 bp, Homo sapien
ggtagtacagcatccggactcgcaa

SEQ ID NO: 671522 - DNA, 25 bp, Homo sapien
gttgcagtgctgtttgaggtgtttc

SEQ ID NO: 671523 - DNA, 25 bp, Homo sapien
tcatgcaagaccacctcggggttgc

SEQ ID NO: 671524 - DNA, 25 bp, Homo sapien
tagctctgggattagcaactggttc

SEQ ID NO: 671525 - DNA, 25 bp, Homo sapien
gaggtgtttcttatagccatcatca

SEQ ID NO: 671526 - DNA, 25 bp, Homo sapien
atgccacttgaatcggccatgagtc

SEQ ID NO: 671527 - DNA, 25 bp, Homo sapien
taatgcttgacacagtacaccagga

SEQ ID NO: 671528 - DNA, 25 bp, Homo sapien
accaggagggcacggcaaatcatct

SEQ ID NO: 671529 - DNA, 25 bp, Homo sapien
ggtaggtgtgatcagttcccaaatg

SEQ ID NO: 671530 - DNA, 25 bp, Homo sapien
tgtagcacaccgaatatcactaaag

SEQ ID NO: 671531 - DNA, 25 bp, Homo sapien
taggtctgttaatcatcccaagggc

SEQ ID NO: 671532 - DNA, 25 bp, Homo sapien
tcactaaagtgacctggacgttgga

SEQ ID NO: 671533 - DNA, 25 bp, Homo sapien
ggacgttggacactgagagcttcat

SEQ ID NO: 671534 - DNA, 25 bp, Homo sapien
tcattgaggcgcctggatctcgtgg

SEQ ID NO: 671535 - DNA, 25 bp, Homo sapien
gaggtcggtcgatcactaagctttc

SEQ ID NO: 671536 - DNA, 25 bp, Homo sapien
tctgctttctcacgcgaggtcggtc

SEQ ID NO: 671537 - DNA, 25 bp, Homo sapien
tcgtgggcctttcgtctgagtcgct

SEQ ID NO: 671538 - DNA, 25 bp, Homo sapien
atttctgccaaaagttaggatcatc

SEQ ID NO: 671539 - DNA, 25 bp, Homo sapien
tttgcttcagtgtctagttcagcta

SEQ ID NO: 671540 - DNA, 25 bp, Homo sapien
tcagctattttagcccatttctgcc

SEQ ID NO: 671541 - DNA, 25 bp, Homo sapien
tgcttcagtgtctagttcagctatt

SEQ ID NO: 671542 - DNA, 25 bp, Homo sapien
cactggaaggtttcagagcagtcct

SEQ ID NO: 671543 - DNA, 25 bp, Homo sapien
tagagacaagggatggttcacccat

SEQ ID NO: 671544 - DNA, 25 bp, Homo sapien
gctcacacaggaatcagcagtggtt

SEQ ID NO: 671545 - DNA, 25 bp, Homo sapien
tctacaagggaatcaagatgtccac

SEQ ID NO: 671546 - DNA, 25 bp, Homo sapien
taaggctccataagcacctttccgg

SEQ ID NO: 671547 - DNA, 25 bp, Homo sapien
cttcttcatccattaaggctccata

SEQ ID NO: 671548 - DNA, 25 bp, Homo sapien
tctgcagaatctggtctatgtcttc

SEQ ID NO: 671549 - DNA, 25 bp, Homo sapien
gatggtgtgcgttcgcctctgcaga

SEQ ID NO: 671550 - DNA, 25 bp, Homo sapien
cataactgcttctacggatttcctt

SEQ ID NO: 671551 - DNA, 25 bp, Homo sapien
ctcataactgcttctacggatttcc

SEQ ID NO: 671552 - DNA, 25 bp, Homo sapien
taactgcttctacggatttccttta

SEQ ID NO: 671553 - DNA, 25 bp, Homo sapien
tgcttctacggatttcctttaacca

SEQ ID NO: 671554 - DNA, 25 bp, Homo sapien
tgctctggcctatgcggtgacatcg

SEQ ID NO: 671555 - DNA, 25 bp, Homo sapien
gccgccctttcggttgatgtcctga

SEQ ID NO: 671556 - DNA, 25 bp, Homo sapien
gatgtcctgaagaacagccttgtcc

SEQ ID NO: 671557 - DNA, 25 bp, Homo sapien
ttgtcaaacatctcgcgctcgtagg

SEQ ID NO: 671558 - DNA, 25 bp, Homo sapien
ctgttcacatttggctcatgggagc

SEQ ID NO: 671559 - DNA, 25 bp, Homo sapien
catgacctagtcaaatgtggaaaaa

SEQ ID NO: 671560 - DNA, 25 bp, Homo sapien
gactggtagtctttcaatagttccc

SEQ ID NO: 671561 - DNA, 25 bp, Homo sapien
ggaagacgagaatcaactctgcagt

SEQ ID NO: 671562 - DNA, 25 bp, Homo sapien
attcttcccctaacctcatggctga

SEQ ID NO: 671563 - DNA, 25 bp, Homo sapien
tatacttagtactaaagcggcccaa

SEQ ID NO: 671564 - DNA, 25 bp, Homo sapien
ccagaattcctatacttagtactaa

SEQ ID NO: 671565 - DNA, 25 bp, Homo sapien
taaagcggcccaaacactaagaagc

SEQ ID NO: 671566 - DNA, 25 bp, Homo sapien
gaggagactataatgaaccctgtga

SEQ ID NO: 671567 - DNA, 25 bp, Homo sapien
ggagaatggtcaattccaacgtggg

SEQ ID NO: 671568 - DNA, 25 bp, Homo sapien
gctccatgtgcacagagggtctaga

SEQ ID NO: 671569 - DNA, 25 bp, Homo sapien
tagcagtgggcatacctagtagcca

SEQ ID NO: 671570 - DNA, 25 bp, Homo sapien
ttctttgcagtaaatactgcttatc

SEQ ID NO: 671571 - DNA, 25 bp, Homo sapien
tctttgcagtaaatactgcttatct

SEQ ID NO: 671572 - DNA, 25 bp, Homo sapien
tttgcagtaaatactgcttatctgt

SEQ ID NO: 671573 - DNA, 25 bp, Homo sapien
ctttgcagtaaatactgcttatctg

SEQ ID NO: 671574 - DNA, 25 bp, Homo sapien
gtcctgcttctggcgattgtggaaa

SEQ ID NO: 671575 - DNA, 25 bp, Homo sapien
tgcagcagctgcattatcttgtggc

SEQ ID NO: 671576 - DNA, 25 bp, Homo sapien
cttctggcgattgtggaaagggcct

SEQ ID NO: 671577 - DNA, 25 bp, Homo sapien
catgcagcagctgcattatcttgtg

SEQ ID NO: 671578 - DNA, 25 bp, Homo sapien
tgaccatcttaaccaacaaactgag

SEQ ID NO: 671579 - DNA, 25 bp, Homo sapien
tcttaaccaacaaactgagtgaaaa

SEQ ID NO: 671580 - DNA, 25 bp, Homo sapien
ttaaccaacaaactgagtgaaaatg

SEQ ID NO: 671581 - DNA, 25 bp, Homo sapien
ccatcttaaccaacaaactgagtga

SEQ ID NO: 671582 - DNA, 25 bp, Homo sapien
tctctaattagttggaagggtcgac

SEQ ID NO: 671583 - DNA, 25 bp, Homo sapien
tgatttaacggaaagaaccacactc

SEQ ID NO: 671584 - DNA, 25 bp, Homo sapien
tatcatgatgttctgggatccaggg

SEQ ID NO: 671585 - DNA, 25 bp, Homo sapien
ggtaaacagcaatcatcctagtggt

SEQ ID NO: 671586 - DNA, 25 bp, Homo sapien
gacaaagcggtctgaatctggctta

SEQ ID NO: 671587 - DNA, 25 bp, Homo sapien
ttacagaaccggtcgatggctgcct

SEQ ID NO: 671588 - DNA, 25 bp, Homo sapien
tggcgcaggtttccccgtactcgcc

SEQ ID NO: 671589 - DNA, 25 bp, Homo sapien
gtgagattgatccccaggcctcccg

SEQ ID NO: 671590 - DNA, 25 bp, Homo sapien
caaatgaacgaaagcccaggcgtta

SEQ ID NO: 671591 - DNA, 25 bp, Homo sapien
gacccaaatgaacgaaagcccaggc

SEQ ID NO: 671592 - DNA, 25 bp, Homo sapien
tgaggggacccaaatgaacgaaagc

SEQ ID NO: 671593 - DNA, 25 bp, Homo sapien
gaacgaaagcccaggcgttaatcat

SEQ ID NO: 671594 - DNA, 25 bp, Homo sapien
ggaagctgtcgactgatggccttaa

SEQ ID NO: 671595 - DNA, 25 bp, Homo sapien
aggaagctgtcgactgatggcctta

SEQ ID NO: 671596 - DNA, 25 bp, Homo sapien
actgatggccttaaatccctcactt

SEQ ID NO: 671597 - DNA, 25 bp, Homo sapien
gatggccttaaatccctcacttcta

SEQ ID NO: 671598 - DNA, 25 bp, Homo sapien
ccctgtggtacatgcttggtacaca

SEQ ID NO: 671599 - DNA, 25 bp, Homo sapien
gaggtagtttctattatcatcctca

SEQ ID NO: 671600 - DNA, 25 bp, Homo sapien
caaaggctaaggattagatgtctga

SEQ ID NO: 671601 - DNA, 25 bp, Homo sapien
gcagcaaattcttaagtgtcagttc

SEQ ID NO: 671602 - DNA, 25 bp, Homo sapien
gacacccgagatttgctatgaaaac

SEQ ID NO: 671603 - DNA, 25 bp, Homo sapien
aagaacatctgttaagacacccgag

SEQ ID NO: 671604 - DNA, 25 bp, Homo sapien
aaatctctcctatagagctctgagg

SEQ ID NO: 671605 - DNA, 25 bp, Homo sapien
cattaagtgtcagcatacccatagt

SEQ ID NO: 671606 - DNA, 25 bp, Homo sapien
ggtaatcttctaggatgtcgaggca

SEQ ID NO: 671607 - DNA, 25 bp, Homo sapien
cacctgcaatcagcttagggagtag

SEQ ID NO: 671608 - DNA, 25 bp, Homo sapien
aatcaacacaagctttcctgctgcc

SEQ ID NO: 671609 - DNA, 25 bp, Homo sapien
tagggagtagtttatcaatcaacac

SEQ ID NO: 671610 - DNA, 25 bp, Homo sapien
ctgaaaaggaatggaacaaaactat

SEQ ID NO: 671611 - DNA, 25 bp, Homo sapien
tagggatggttacagcacttcctca

SEQ ID NO: 671612 - DNA, 25 bp, Homo sapien
tctcgaggatggcacggtagtactt

SEQ ID NO: 671613 - DNA, 25 bp, Homo sapien
tcagccgccgaagcatcattggttt

SEQ ID NO: 671614 - DNA, 25 bp, Homo sapien
gatcgtctcttgtttgggagcaagg

SEQ ID NO: 671615 - DNA, 25 bp, Homo sapien
gcagagattagagtagtggttacca

SEQ ID NO: 671616 - DNA, 25 bp, Homo sapien
aagagaaaagacacagctagctgat

SEQ ID NO: 671617 - DNA, 25 bp, Homo sapien
ccccatatgggtaaggaattactat

SEQ ID NO: 671618 - DNA, 25 bp, Homo sapien
aaatgtcaatctgccacatgctggg

SEQ ID NO: 671619 - DNA, 25 bp, Homo sapien
catttagagtttactatatgccaga

SEQ ID NO: 671620 - DNA, 25 bp, Homo sapien
acacaacttgggagaagatgtgggc

SEQ ID NO: 671621 - DNA, 25 bp, Homo sapien
cagacattgtgctggtcaatacaac

SEQ ID NO: 671622 - DNA, 25 bp, Homo sapien
gaatcatttagagtttactatatgc

SEQ ID NO: 671623 - DNA, 25 bp, Homo sapien
gttttcagatctccaaattcctcca

SEQ ID NO: 671624 - DNA, 25 bp, Homo sapien
ttttcagatctccaaattcctccaa

SEQ ID NO: 671625 - DNA, 25 bp, Homo sapien
tcctccaagaaagcggtctctgaag

SEQ ID NO: 671626 - DNA, 25 bp, Homo sapien
aaattcctccaagaaagcggtctct

SEQ ID NO: 671627 - DNA, 25 bp, Homo sapien
ggtgttccagtgagaagcactttat

SEQ ID NO: 671628 - DNA, 25 bp, Homo sapien
gggtgttccagtgagaagcacttta

SEQ ID NO: 671629 - DNA, 25 bp, Homo sapien
tgttccagtgagaagcactttatgt

SEQ ID NO: 671630 - DNA, 25 bp, Homo sapien
agggtgttccagtgagaagcacttt

SEQ ID NO: 671631 - DNA, 25 bp, Homo sapien
gctttagaccctccagaagtttgca

SEQ ID NO: 671632 - DNA, 25 bp, Homo sapien
cataagctttagaccctccagaagt

SEQ ID NO: 671633 - DNA, 25 bp, Homo sapien
cagggccataagctttagaccctcc

SEQ ID NO: 671634 - DNA, 25 bp, Homo sapien
ggccataagctttagaccctccaga

SEQ ID NO: 671635 - DNA, 25 bp, Homo sapien
tgatgacgacgtggaacttgaagac

SEQ ID NO: 671636 - DNA, 25 bp, Homo sapien
ttcttcaactctgggcagtctgcta

SEQ ID NO: 671637 - DNA, 25 bp, Homo sapien
caactctgggcagtctgctaggatc

SEQ ID NO: 671638 - DNA, 25 bp, Homo sapien
catttcaaatgttgtgatgacgacg

SEQ ID NO: 671639 - DNA, 25 bp, Homo sapien
cgataatgagaaaagggccgtggat

SEQ ID NO: 671640 - DNA, 25 bp, Homo sapien
gcattcatctctgtccatgtccgga

SEQ ID NO: 671641 - DNA, 25 bp, Homo sapien
tggactggatggttttccctaggcc

SEQ ID NO: 671642 - DNA, 25 bp, Homo sapien
tctggctgccgtggtacacaatggc

SEQ ID NO: 671643 - DNA, 25 bp, Homo sapien
tgcgtgactgtttcattgtgggaac

SEQ ID NO: 671644 - DNA, 25 bp, Homo sapien
gggtcacactccgagaaacgcatca

SEQ ID NO: 671645 - DNA, 25 bp, Homo sapien
aaaacagaaccatgctaatttggga

SEQ ID NO: 671646 - DNA, 25 bp, Homo sapien
tataggaaacttatagaggctggtt

SEQ ID NO: 671647 - DNA, 25 bp, Homo sapien
tactcccggagctggttactgttct

SEQ ID NO: 671648 - DNA, 25 bp, Homo sapien
gaagccagttcatcccttccagctg

SEQ ID NO: 671649 - DNA, 25 bp, Homo sapien
tgttataccagttaaaaagaagcca

SEQ ID NO: 671650 - DNA, 25 bp, Homo sapien
tcttatactcgcgagacttctcaag

SEQ ID NO: 671651 - DNA, 25 bp, Homo sapien
tcctctagctcccacgtgctttctt

SEQ ID NO: 671652 - DNA, 25 bp, Homo sapien
cttcatatggtagtgagcaccactt

SEQ ID NO: 671653 - DNA, 25 bp, Homo sapien
acttttgcaggatctacatcttcct

SEQ ID NO: 671654 - DNA, 25 bp, Homo sapien
ctttcttcatatggtagtgagcacc

SEQ ID NO: 671655 - DNA, 25 bp, Homo sapien
gccacctccaagatgcgatcaactt

SEQ ID NO: 671656 - DNA, 25 bp, Homo sapien
gcgatcaacttctacatagtctgga

SEQ ID NO: 671657 - DNA, 25 bp, Homo sapien
tccaagatgcgatcaacttctacat

SEQ ID NO: 671658 - DNA, 25 bp, Homo sapien
catagtctggattgaacaagtcttc

SEQ ID NO: 671659 - DNA, 25 bp, Homo sapien
caaaagaattgtgtgcgtattcctc

SEQ ID NO: 671660 - DNA, 25 bp, Homo sapien
gcagcagtcaaatgagtcagtaaat

SEQ ID NO: 671661 - DNA, 25 bp, Homo sapien
ttattagtattcagaccaagatgca

SEQ ID NO: 671662 - DNA, 25 bp, Homo sapien
gatgcacgccgttatgagttgtcag

SEQ ID NO: 671663 - DNA, 25 bp, Homo sapien
aatgtgcttcatctgggcttgttta

SEQ ID NO: 671664 - DNA, 25 bp, Homo sapien
gaggatccttttcgagctcttccat

SEQ ID NO: 671665 - DNA, 25 bp, Homo sapien
tcttctgtgcgatgcgaggatcctt

SEQ ID NO: 671666 - DNA, 25 bp, Homo sapien
tgtttattcctaaatcgcttgatct

SEQ ID NO: 671667 - DNA, 25 bp, Homo sapien
ggcccatttacaatgtaagtaggaa

SEQ ID NO: 671668 - DNA, 25 bp, Homo sapien
atacaaattgtcaggcaagcacata

SEQ ID NO: 671669 - DNA, 25 bp, Homo sapien
gacatacaaattgtcaggcaagcac

SEQ ID NO: 671670 - DNA, 25 bp, Homo sapien
ctatccaaagacatacaaattgtca

SEQ ID NO: 671671 - DNA, 25 bp, Homo sapien
ccaaagacatacaaattgtcaggca

SEQ ID NO: 671672 - DNA, 25 bp, Homo sapien
gctacaggagagtggttctctaccc

SEQ ID NO: 671673 - DNA, 25 bp, Homo sapien
taccctggttgcatatgagaattgc

SEQ ID NO: 671674 - DNA, 25 bp, Homo sapien
taaacttgagtcagccaagacctgt

SEQ ID NO: 671675 - DNA, 25 bp, Homo sapien
cattagtgaaagtgggtctgtagca

SEQ ID NO: 671676 - DNA, 25 bp, Homo sapien
cagagaatactttaaatagacgtac

SEQ ID NO: 671677 - DNA, 25 bp, Homo sapien
ccaagtcgaacggaggttctcctgg

SEQ ID NO: 671678 - DNA, 25 bp, Homo sapien
tacttaacgtagaacagctccaagt

SEQ ID NO: 671679 - DNA, 25 bp, Homo sapien
aatttctatacttaacgtagaacag

SEQ ID NO: 671680 - DNA, 25 bp, Homo sapien
gctccaagtcgaacggaggttctcc

SEQ ID NO: 671681 - DNA, 25 bp, Homo sapien
catactctagcactccaagaatttc

SEQ ID NO: 671682 - DNA, 25 bp, Homo sapien
tcacttctgaaacaccaatggtagt

SEQ ID NO: 671683 - DNA, 25 bp, Homo sapien
gaagtaaagatgaagccgtgctctc

SEQ ID NO: 671684 - DNA, 25 bp, Homo sapien
ggtagtcactctccaagtaaggaag

SEQ ID NO: 671685 - DNA, 25 bp, Homo sapien
cttctcaatgatgtttgcatcatct

SEQ ID NO: 671686 - DNA, 25 bp, Homo sapien
ctcctggacagtcttagatgccagg

SEQ ID NO: 671687 - DNA, 25 bp, Homo sapien
tggacagtcttagatgccaggatct

SEQ ID NO: 671688 - DNA, 25 bp, Homo sapien
tctcaatgatgtttgcatcatcttc

SEQ ID NO: 671689 - DNA, 25 bp, Homo sapien
gaaatacacatcgaagtaggaaggg

SEQ ID NO: 671690 - DNA, 25 bp, Homo sapien
taatgaaacgaaaagggagcagcct

SEQ ID NO: 671691 - DNA, 25 bp, Homo sapien
cagagattgtgcgtaagtacgatca

SEQ ID NO: 671692 - DNA, 25 bp, Homo sapien
gatataaactaaatctgcttgccag

SEQ ID NO: 671693 - DNA, 25 bp, Homo sapien
cacttggtaaccaatcctgaggttg

SEQ ID NO: 671694 - DNA, 25 bp, Homo sapien
gcagagctgtgataacatgccagtc

SEQ ID NO: 671695 - DNA, 25 bp, Homo sapien
cagtcacagaattgcgttgagcaca

SEQ ID NO: 671696 - DNA, 25 bp, Homo sapien
gatgttttcgcaactcaccacttgg

SEQ ID NO: 671697 - DNA, 25 bp, Homo sapien
gtggggccattctggtgctgactcc

SEQ ID NO: 671698 - DNA, 25 bp, Homo sapien
tggggccattctggtgctgactcca

SEQ ID NO: 671699 - DNA, 25 bp, Homo sapien
ggaagtcaatcgaaggccacaagca

SEQ ID NO: 671700 - DNA, 25 bp, Homo sapien
caaaacaaggcgagagtgtgatcgt

SEQ ID NO: 671701 - DNA, 25 bp, Homo sapien
gaaacacgtctgtcatctaggtcaa

SEQ ID NO: 671702 - DNA, 25 bp, Homo sapien
cacgtaaagcatcccaagcagaagg

SEQ ID NO: 671703 - DNA, 25 bp, Homo sapien
cctgccaggccagtgtagaggctga

SEQ ID NO: 671704 - DNA, 25 bp, Homo sapien
cattgtattttctgcgctttacttg

SEQ ID NO: 671705 - DNA, 25 bp, Homo sapien
tgagagtgcagatgttcgaccagct

SEQ ID NO: 671706 - DNA, 25 bp, Homo sapien
ctttacttgccttcccgagcgtcgt

SEQ ID NO: 671707 - DNA, 25 bp, Homo sapien
gcaaacacacccgtcagagaagctc

SEQ ID NO: 671708 - DNA, 25 bp, Homo sapien
ctgtagggcaaacacacccgtcaga

SEQ ID NO: 671709 - DNA, 25 bp, Homo sapien
tgtagggcaaacacacccgtcagag

SEQ ID NO: 671710 - DNA, 25 bp, Homo sapien
agggcaaacacacccgtcagagaag

SEQ ID NO: 671711 - DNA, 25 bp, Homo sapien
tgatccagctctaaactctccactg

SEQ ID NO: 671712 - DNA, 25 bp, Homo sapien
gtggactcctcaggactccgcagag

SEQ ID NO: 671713 - DNA, 25 bp, Homo sapien
cgtcaggccctgatccagctctaaa

SEQ ID NO: 671714 - DNA, 25 bp, Homo sapien
cagagatgggttcgtcaggccctga

SEQ ID NO: 671715 - DNA, 25 bp, Homo sapien
gaatgcgttactactacagccaccg

SEQ ID NO: 671716 - DNA, 25 bp, Homo sapien
gaaagatatgggtacatgtcacgac

SEQ ID NO: 671717 - DNA, 25 bp, Homo sapien
tgatcccaatgactgcctccaaaga

SEQ ID NO: 671718 - DNA, 25 bp, Homo sapien
cgtggactccaggtattgaaagctc

SEQ ID NO: 671719 - DNA, 25 bp, Homo sapien
ggcaaactgcccaatatccttagag

SEQ ID NO: 671720 - DNA, 25 bp, Homo sapien
gtttgctgcaaacacagcgcctgcc

SEQ ID NO: 671721 - DNA, 25 bp, Homo sapien
gacccattcttgtgttgcagacaaa

SEQ ID NO: 671722 - DNA, 25 bp, Homo sapien
taggacaccgtacacatggcaagac

SEQ ID NO: 671723 - DNA, 25 bp, Homo sapien
tggccaggtatagcgccagagatgg

SEQ ID NO: 671724 - DNA, 25 bp, Homo sapien
gaaagagagggagatgtcagacccc

SEQ ID NO: 671725 - DNA, 25 bp, Homo sapien
caggtatagcgccagagatggaaag

SEQ ID NO: 671726 - DNA, 25 bp, Homo sapien
ccccagagggtctgaataacagagg

SEQ ID NO: 671727 - DNA, 25 bp, Homo sapien
tctctcttggccgtctgtaaggtat

SEQ ID NO: 671728 - DNA, 25 bp, Homo sapien
acccaagtttctgtggtagatgaaa

SEQ ID NO: 671729 - DNA, 25 bp, Homo sapien
tgtaaggtattttatgggcattttc

SEQ ID NO: 671730 - DNA, 25 bp, Homo sapien
ctgtaacctacattcctgagatccc

SEQ ID NO: 671731 - DNA, 25 bp, Homo sapien
gacagtgactagcaacatcttcaat

SEQ ID NO: 671732 - DNA, 25 bp, Homo sapien
catctttttgcttcggctccttgtg

SEQ ID NO: 671733 - DNA, 25 bp, Homo sapien
tcctggacttcgtcctggctgcaga

SEQ ID NO: 671734 - DNA, 25 bp, Homo sapien
tcctcttcagcagtatacaggtcct

SEQ ID NO: 671735 - DNA, 25 bp, Homo sapien
atggagatttgtagtcaaaattgac

SEQ ID NO: 671736 - DNA, 25 bp, Homo sapien
cattggggagtgattcaaaactttt

SEQ ID NO: 671737 - DNA, 25 bp, Homo sapien
gggatggagatttgtagtcaaaatt

SEQ ID NO: 671738 - DNA, 25 bp, Homo sapien
cagaggcatcagacattggggagtg

SEQ ID NO: 671739 - DNA, 25 bp, Homo sapien
cattctttcaggtctggtgttgcaa

SEQ ID NO: 671740 - DNA, 25 bp, Homo sapien
caatgtgggtgttagtttcaaggaa

SEQ ID NO: 671741 - DNA, 25 bp, Homo sapien
caggtggcatggtttcccttcagta

SEQ ID NO: 671742 - DNA, 25 bp, Homo sapien
gctggttacccaatctgtgctcaga

SEQ ID NO: 671743 - DNA, 25 bp, Homo sapien
cagctgcatattcccccttctgttt

SEQ ID NO: 671744 - DNA, 25 bp, Homo sapien
ttccctagtccaatgctcccaaaca

SEQ ID NO: 671745 - DNA, 25 bp, Homo sapien
cctggtagttacagagactgtaaca

SEQ ID NO: 671746 - DNA, 25 bp, Homo sapien
ctggtagttacagagactgtaacat

SEQ ID NO: 671747 - DNA, 25 bp, Homo sapien
gaacaatgtctgtccgattgtgcat

SEQ ID NO: 671748 - DNA, 25 bp, Homo sapien
ggaacaatgtctgtccgattgtgca

SEQ ID NO: 671749 - DNA, 25 bp, Homo sapien
gggcaggaacaatgtctgtccgatt

SEQ ID NO: 671750 - DNA, 25 bp, Homo sapien
caggaacaatgtctgtccgattgtg

SEQ ID NO: 671751 - DNA, 25 bp, Homo sapien
gcttctcttttttctgtattttcat

SEQ ID NO: 671752 - DNA, 25 bp, Homo sapien
ctgcttctcttttttctgtattttc

SEQ ID NO: 671753 - DNA, 25 bp, Homo sapien
tgcttctcttttttctgtattttca

SEQ ID NO: 671754 - DNA, 25 bp, Homo sapien
ggcaaagattatgacaaaacccaaa

SEQ ID NO: 671755 - DNA, 25 bp, Homo sapien
ttaaaaaggcaaagattatgacaaa

SEQ ID NO: 671756 - DNA, 25 bp, Homo sapien
gattactgtaacacacaaggaaaac

SEQ ID NO: 671757 - DNA, 25 bp, Homo sapien
tcaacatctccagattactgtaaca

SEQ ID NO: 671758 - DNA, 25 bp, Homo sapien
cgtggggagacgggagagggagagg

SEQ ID NO: 671759 - DNA, 25 bp, Homo sapien
ccgtggggagacgggagagggagag

SEQ ID NO: 671760 - DNA, 25 bp, Homo sapien
tggggagacgggagagggagagggc

SEQ ID NO: 671761 - DNA, 25 bp, Homo sapien
cagataactccgtgtgggcaaacca

SEQ ID NO: 671762 - DNA, 25 bp, Homo sapien
tcaactgaacacaataacgatggag

SEQ ID NO: 671763 - DNA, 25 bp, Homo sapien
tatgtatgagtgcttccgtaggagc

SEQ ID NO: 671764 - DNA, 25 bp, Homo sapien
tccaagggtcgactgcattacaaga

SEQ ID NO: 671765 - DNA, 25 bp, Homo sapien
gacagggaccgtatctattttgact

SEQ ID NO: 671766 - DNA, 25 bp, Homo sapien
tacaggctagagaaaacctatcacc

SEQ ID NO: 671767 - DNA, 25 bp, Homo sapien
tggccggtctgaaaggatgcattac

SEQ ID NO: 671768 - DNA, 25 bp, Homo sapien
cttgtgagaaggcactagtactgtc

SEQ ID NO: 671769 - DNA, 25 bp, Homo sapien
aacttatttgatctccctgggtctc

SEQ ID NO: 671770 - DNA, 25 bp, Homo sapien
gtgaagatatctgggttctgaacac

SEQ ID NO: 671771 - DNA, 25 bp, Homo sapien
cacaagcgttgtgggatttgggcaa

SEQ ID NO: 671772 - DNA, 25 bp, Homo sapien
tgggcaacttatttgatctccctgg

SEQ ID NO: 671773 - DNA, 25 bp, Homo sapien
tcagtgtgcacgtccatggtggctt

SEQ ID NO: 671774 - DNA, 25 bp, Homo sapien
tctcctgatccccaagtaggtatca

SEQ ID NO: 671775 - DNA, 25 bp, Homo sapien
tgttgtcatgtacactctcctgatc

SEQ ID NO: 671776 - DNA, 25 bp, Homo sapien
ggctccttggttgtgtagttccagc

SEQ ID NO: 671777 - DNA, 25 bp, Homo sapien
atgctgcaccctgatggcttccaca

SEQ ID NO: 671778 - DNA, 25 bp, Homo sapien
aagaaggatgctgcaccctgatggc

SEQ ID NO: 671779 - DNA, 25 bp, Homo sapien
ctttgcaaaccaagaaggatgctgc

SEQ ID NO: 671780 - DNA, 25 bp, Homo sapien
caaaccaagaaggatgctgcaccct

SEQ ID NO: 671781 - DNA, 25 bp, Homo sapien
gatgctaaacctggtcagcagaggc

SEQ ID NO: 671782 - DNA, 25 bp, Homo sapien
ggacatatggtagtgttctgcctac

SEQ ID NO: 671783 - DNA, 25 bp, Homo sapien
tgctccaaggtctagtgtaagtatg

SEQ ID NO: 671784 - DNA, 25 bp, Homo sapien
ttttgggttcaaaagcgctgtgctt

SEQ ID NO: 671785 - DNA, 25 bp, Homo sapien
gaattgtgctaatatgtccaacata

SEQ ID NO: 671786 - DNA, 25 bp, Homo sapien
tttccactacaccaaatccaatcat

SEQ ID NO: 671787 - DNA, 25 bp, Homo sapien
tgctaatatgtccaacataatattc

SEQ ID NO: 671788 - DNA, 25 bp, Homo sapien
aatttccactacaccaaatccaatc

SEQ ID NO: 671789 - DNA, 25 bp, Homo sapien
gcgaatcaatcccttgaggccttta

SEQ ID NO: 671790 - DNA, 25 bp, Homo sapien
tactgttaagttttaccactggcac

SEQ ID NO: 671791 - DNA, 25 bp, Homo sapien
tgtctttaagctcatccccactata

SEQ ID NO: 671792 - DNA, 25 bp, Homo sapien
gaaaagctgcacagaagtcaggaaa

SEQ ID NO: 671793 - DNA, 25 bp, Homo sapien
tcacatgtgtaatccaggtactttg

SEQ ID NO: 671794 - DNA, 25 bp, Homo sapien
cacatgtgtaatccaggtactttgg

SEQ ID NO: 671795 - DNA, 25 bp, Homo sapien
tgaagcacaagacggtcaagtaact

SEQ ID NO: 671796 - DNA, 25 bp, Homo sapien
taaggtagaatgcagcagctaacat

SEQ ID NO: 671797 - DNA, 25 bp, Homo sapien
ttagctgcacatgataggcctgcca

SEQ ID NO: 671798 - DNA, 25 bp, Homo sapien
tcatcccatgagataggtacggtac

SEQ ID NO: 671799 - DNA, 25 bp, Homo sapien
aatagtaaagcactgttggaacctt

SEQ ID NO: 671800 - DNA, 25 bp, Homo sapien
caatagtaaagcactgttggaacct

SEQ ID NO: 671801 - DNA, 25 bp, Homo sapien
atagtaaagcactgttggaaccttt

SEQ ID NO: 671802 - DNA, 25 bp, Homo sapien
tcaatagtaaagcactgttggaacc

SEQ ID NO: 671803 - DNA, 25 bp, Homo sapien
ctagctgcagctcacttccactctt

SEQ ID NO: 671804 - DNA, 25 bp, Homo sapien
ggtattttcaggaccatatgctaaa

SEQ ID NO: 671805 - DNA, 25 bp, Homo sapien
ttcaggaccatatgctaaagtggtc

SEQ ID NO: 671806 - DNA, 25 bp, Homo sapien
gccttctccactatggtattttcag

SEQ ID NO: 671807 - DNA, 25 bp, Homo sapien
agtactggtactgcaggtctctgaa

SEQ ID NO: 671808 - DNA, 25 bp, Homo sapien
tcaaagtactggtactgcaggtctc

SEQ ID NO: 671809 - DNA, 25 bp, Homo sapien
aaaatcaaagtactggtactgcagg

SEQ ID NO: 671810 - DNA, 25 bp, Homo sapien
gacattgtgctccacttcacacctc

SEQ ID NO: 671811 - DNA, 25 bp, Homo sapien
gtggcacgaccttggctcgctgcaa

SEQ ID NO: 671812 - DNA, 25 bp, Homo sapien
ctcactctgccaccaaggctggagg

SEQ ID NO: 671813 - DNA, 25 bp, Homo sapien
ccttggctcgctgcaacctccgcct

SEQ ID NO: 671814 - DNA, 25 bp, Homo sapien
actctgccaccaaggctggagggca

SEQ ID NO: 671815 - DNA, 25 bp, Homo sapien
aaagggtgtcctcactgtattccaa

SEQ ID NO: 671816 - DNA, 25 bp, Homo sapien
tcctactccatggagacaaaagtgg

SEQ ID NO: 671817 - DNA, 25 bp, Homo sapien
tgaactcctaagtgccccaggaaga

SEQ ID NO: 671818 - DNA, 25 bp, Homo sapien
gggtatcaacgcctccacaacatga

SEQ ID NO: 671819 - DNA, 25 bp, Homo sapien
tgaagtttagctcagacaccctgca

SEQ ID NO: 671820 - DNA, 25 bp, Homo sapien
ggcttcgccggtccaaaacacagac

SEQ ID NO: 671821 - DNA, 25 bp, Homo sapien
aaatacaaacagctattatttggtg

SEQ ID NO: 671822 - DNA, 25 bp, Homo sapien
tgtcgcgccattgggcttcgccggt

SEQ ID NO: 671823 - DNA, 25 bp, Homo sapien
cagagtcctcacgtgcatgatttag

SEQ ID NO: 671824 - DNA, 25 bp, Homo sapien
tagaagacaatgcacaggaaaccct

SEQ ID NO: 671825 - DNA, 25 bp, Homo sapien
taaattcaacacagccgcaatgaag

SEQ ID NO: 671826 - DNA, 25 bp, Homo sapien
aggaggtccctgtgtgttatccaca

SEQ ID NO: 671827 - DNA, 25 bp, Homo sapien
ggtggctctagacctatagtcctca

SEQ ID NO: 671828 - DNA, 25 bp, Homo sapien
gagtgggctccattcgctctgtgtt

SEQ ID NO: 671829 - DNA, 25 bp, Homo sapien
gatgacatgcttaggtttgcccaag

SEQ ID NO: 671830 - DNA, 25 bp, Homo sapien
acatccttagtctttctgaggaagg

SEQ ID NO: 671831 - DNA, 25 bp, Homo sapien
aagaacttggtgatttgagttcgta

SEQ ID NO: 671832 - DNA, 25 bp, Homo sapien
tttgagttcgtaagtcaccaagtgg

SEQ ID NO: 671833 - DNA, 25 bp, Homo sapien
caagtggtaactgccctgtttcttc

SEQ ID NO: 671834 - DNA, 25 bp, Homo sapien
tcttctctcgtgtctctggggcctg

SEQ ID NO: 671835 - DNA, 25 bp, Homo sapien
ggccagggagcctggctttgaactt

SEQ ID NO: 671836 - DNA, 25 bp, Homo sapien
gggagcctggctttgaacttggaaa

SEQ ID NO: 671837 - DNA, 25 bp, Homo sapien
ctggctttgaacttggaaactccca

SEQ ID NO: 671838 - DNA, 25 bp, Homo sapien
gcctggctttgaacttggaaactcc

SEQ ID NO: 671839 - DNA, 25 bp, Homo sapien
gcccagctcttgataaatgttagcc

SEQ ID NO: 671840 - DNA, 25 bp, Homo sapien
cttgatacgtgttagcaatgttacc

SEQ ID NO: 671841 - DNA, 25 bp, Homo sapien
gcccagctcttgatacgtgttagca

SEQ ID NO: 671842 - DNA, 25 bp, Homo sapien
cagctcttgatacgtgttagcaatg

SEQ ID NO: 671843 - DNA, 25 bp, Homo sapien
cgtgttagcaatgttaccaaatttc

SEQ ID NO: 671844 - DNA, 25 bp, Homo sapien
ggcccagttctctgccttgaattta

SEQ ID NO: 671845 - DNA, 25 bp, Homo sapien
ggttcccttcagaggcccagttctc

SEQ ID NO: 671846 - DNA, 25 bp, Homo sapien
caggttcccttcagaggcccagttc

SEQ ID NO: 671847 - DNA, 25 bp, Homo sapien
aggcccagttctctgccttgaattt

SEQ ID NO: 671848 - DNA, 25 bp, Homo sapien
atctttgtacaggagccatgtgcta

SEQ ID NO: 671849 - DNA, 25 bp, Homo sapien
ccatgtgctaatctctgcactgttc

SEQ ID NO: 671850 - DNA, 25 bp, Homo sapien
tcatctttgtacaggagccatgtgc

SEQ ID NO: 671851 - DNA, 25 bp, Homo sapien
tgtcatctttgtacaggagccatgt

SEQ ID NO: 671852 - DNA, 25 bp, Homo sapien
tagagcctaccaacccaagtcaagg

SEQ ID NO: 671853 - DNA, 25 bp, Homo sapien
gaatggatcattttggctgctgcag

SEQ ID NO: 671854 - DNA, 25 bp, Homo sapien
tctcggaacagttggctgcacaggt

SEQ ID NO: 671855 - DNA, 25 bp, Homo sapien
cagtccagaagtcgagtccaggcga

SEQ ID NO: 671856 - DNA, 25 bp, Homo sapien
gcggggctgcgcggatcttccacac

SEQ ID NO: 671857 - DNA, 25 bp, Homo sapien
ggggctgcgcggatcttccacacca

SEQ ID NO: 671858 - DNA, 25 bp, Homo sapien
ggcggggctgcgcggatcttccaca

SEQ ID NO: 671859 - DNA, 25 bp, Homo sapien
ggctgcgcggatcttccacaccagc

SEQ ID NO: 671860 - DNA, 25 bp, Homo sapien
tattggccctaaattatcctccagc

SEQ ID NO: 671861 - DNA, 25 bp, Homo sapien
gcatccctcaagctgatatttcaat

SEQ ID NO: 671862 - DNA, 25 bp, Homo sapien
cctgctgctcatcggacactttatg

SEQ ID NO: 671863 - DNA, 25 bp, Homo sapien
cactttatgaggttacaaaggacca

SEQ ID NO: 671864 - DNA, 25 bp, Homo sapien
gatgacgtactacccttggaccagc

SEQ ID NO: 671865 - DNA, 25 bp, Homo sapien
tcaaatttcacagtggggcgttgca

SEQ ID NO: 671866 - DNA, 25 bp, Homo sapien
gttgcatagcaatcttagtgacact

SEQ ID NO: 671867 - DNA, 25 bp, Homo sapien
ataaatttggatgacgtactaccct

SEQ ID NO: 671868 - DNA, 25 bp, Homo sapien
tcatggatgtatccaggtggaattg

SEQ ID NO: 671869 - DNA, 25 bp, Homo sapien
ggatgtatccaggtggaattgttac

SEQ ID NO: 671870 - DNA, 25 bp, Homo sapien
atccaggtggaattgttacttccag

SEQ ID NO: 671871 - DNA, 25 bp, Homo sapien
tccaggtggaattgttacttccaga

SEQ ID NO: 671872 - DNA, 25 bp, Homo sapien
ttaagtaggcctctgggccaaagct

SEQ ID NO: 671873 - DNA, 25 bp, Homo sapien
aaagctgaaatgctcatgcagggca

SEQ ID NO: 671874 - DNA, 25 bp, Homo sapien
tgggccaaagctgaaatgctcatgc

SEQ ID NO: 671875 - DNA, 25 bp, Homo sapien
gctcatgcagggcagcgtgggtgca

SEQ ID NO: 671876 - DNA, 25 bp, Homo sapien
tgagcatgcgccttgatgaacactg

SEQ ID NO: 671877 - DNA, 25 bp, Homo sapien
actctgagcatgcgccttgatgaac

SEQ ID NO: 671878 - DNA, 25 bp, Homo sapien
cctactctgggaattgccacgggga

SEQ ID NO: 671879 - DNA, 25 bp, Homo sapien
ctactctgggaattgccacggggac

SEQ ID NO: 671880 - DNA, 25 bp, Homo sapien
gtcatcacaattataatcactgctg

SEQ ID NO: 671881 - DNA, 25 bp, Homo sapien
tgtaattatgtccaaactcgtagcc

SEQ ID NO: 671882 - DNA, 25 bp, Homo sapien
ctctgtccaaaggtcatcacaatta

SEQ ID NO: 671883 - DNA, 25 bp, Homo sapien
agcctcatcaacaccttattataaa

SEQ ID NO: 671884 - DNA, 25 bp, Homo sapien
aaagtactccaagttgctaagatct

SEQ ID NO: 671885 - DNA, 25 bp, Homo sapien
taggtctggaaggacaaagtggatc

SEQ ID NO: 671886 - DNA, 25 bp, Homo sapien
gtgtcccctggaattgttcaaagta

SEQ ID NO: 671887 - DNA, 25 bp, Homo sapien
taaatgctaagtggcatcatttcca

SEQ ID NO: 671888 - DNA, 25 bp, Homo sapien
cattgtccaagaccttccctttctg

SEQ ID NO: 671889 - DNA, 25 bp, Homo sapien
tccaagaccttccctttctgggtca

SEQ ID NO: 671890 - DNA, 25 bp, Homo sapien
ccaagaccttccctttctgggtcat

SEQ ID NO: 671891 - DNA, 25 bp, Homo sapien
attgtccaagaccttccctttctgg

SEQ ID NO: 671892 - DNA, 25 bp, Homo sapien
ctagaatgaatccttgatgtcttca

SEQ ID NO: 671893 - DNA, 25 bp, Homo sapien
cacaaaatcctccacatgagttgct

SEQ ID NO: 671894 - DNA, 25 bp, Homo sapien
gttcagaccttgcaggacccacaaa

SEQ ID NO: 671895 - DNA, 25 bp, Homo sapien
gagttgctgaagtatctggtacttt

SEQ ID NO: 671896 - DNA, 25 bp, Homo sapien
atactgcagccatgatcaagttaaa

SEQ ID NO: 671897 - DNA, 25 bp, Homo sapien
catactgcagccatgatcaagttaa

SEQ ID NO: 671898 - DNA, 25 bp, Homo sapien
gcatactgcagccatgatcaagtta

SEQ ID NO: 671899 - DNA, 25 bp, Homo sapien
acagctggctggcgattgtggagta

SEQ ID NO: 671900 - DNA, 25 bp, Homo sapien
cagctggctggcgattgtggagtag

SEQ ID NO: 671901 - DNA, 25 bp, Homo sapien
tggctggcgattgtggagtaggcat

SEQ ID NO: 671902 - DNA, 25 bp, Homo sapien
gctggctggcgattgtggagtaggc

SEQ ID NO: 671903 - DNA, 25 bp, Homo sapien
cttagggccacgttatctctctcat

SEQ ID NO: 671904 - DNA, 25 bp, Homo sapien
gccacgttatctctctcatcaacca

SEQ ID NO: 671905 - DNA, 25 bp, Homo sapien
gggccacgttatctctctcatcaac

SEQ ID NO: 671906 - DNA, 25 bp, Homo sapien
tagggccacgttatctctctcatca

SEQ ID NO: 671907 - DNA, 25 bp, Homo sapien
ggcagcctgtgagagtactccttca

SEQ ID NO: 671908 - DNA, 25 bp, Homo sapien
tgtgagagtactccttcatagctac

SEQ ID NO: 671909 - DNA, 25 bp, Homo sapien
gcctgtgagagtactccttcatagc

SEQ ID NO: 671910 - DNA, 25 bp, Homo sapien
agggaggaaatctggcagcctgtga

SEQ ID NO: 671911 - DNA, 25 bp, Homo sapien
tgaaggtgggagacattgtctccat

SEQ ID NO: 671912 - DNA, 25 bp, Homo sapien
gggagacattgtctccattcttgct

SEQ ID NO: 671913 - DNA, 25 bp, Homo sapien
cctagtcgcatgaagccgtttcttc

SEQ ID NO: 671914 - DNA, 25 bp, Homo sapien
tcataaattgatcaagctctcctag

SEQ ID NO: 671915 - DNA, 25 bp, Homo sapien
acagctactgggctttcgttagcaa

SEQ ID NO: 671916 - DNA, 25 bp, Homo sapien
gggctttcgttagcaatcttgtcca

SEQ ID NO: 671917 - DNA, 25 bp, Homo sapien
tactgggctttcgttagcaatcttg

SEQ ID NO: 671918 - DNA, 25 bp, Homo sapien
ctgattacagctactgggctttcgt

SEQ ID NO: 671919 - DNA, 25 bp, Homo sapien
tgaactgtcaaaaacgaatataaga

SEQ ID NO: 671920 - DNA, 25 bp, Homo sapien
cacatataaacatgatcgaaaattc

SEQ ID NO: 671921 - DNA, 25 bp, Homo sapien
tcatgactcaaaagtaattaccaag

SEQ ID NO: 671922 - DNA, 25 bp, Homo sapien
catgactcaaaagtaattaccaagt

SEQ ID NO: 671923 - DNA, 25 bp, Homo sapien
taaacatgatcgaaaattcacacag

SEQ ID NO: 671924 - DNA, 25 bp, Homo sapien
gttgattgtgcttcatgccacagca

SEQ ID NO: 671925 - DNA, 25 bp, Homo sapien
ttgattgtgcttcatgccacagcac

SEQ ID NO: 671926 - DNA, 25 bp, Homo sapien
ctggttgattgtgcttcatgccaca

SEQ ID NO: 671927 - DNA, 25 bp, Homo sapien
ggttgattgtgcttcatgccacagc

SEQ ID NO: 671928 - DNA, 25 bp, Homo sapien
agttgtgtgctcagtccttcatcca

SEQ ID NO: 671929 - DNA, 25 bp, Homo sapien
atgtgacttcagttgtgtgctcagt

SEQ ID NO: 671930 - DNA, 25 bp, Homo sapien
cttcagttgtgtgctcagtccttca

SEQ ID NO: 671931 - DNA, 25 bp, Homo sapien
cagtccttcatccaggtaggtccca

SEQ ID NO: 671932 - DNA, 25 bp, Homo sapien
tggcctgacctgatgtttgagccct

SEQ ID NO: 671933 - DNA, 25 bp, Homo sapien
ttgcctccaaagcctatcctggctg

SEQ ID NO: 671934 - DNA, 25 bp, Homo sapien
cctgacctgatgtttgagccctgat

SEQ ID NO: 671935 - DNA, 25 bp, Homo sapien
gacctgatgtttgagccctgatcat

SEQ ID NO: 671936 - DNA, 25 bp, Homo sapien
tgacagggttctcagtggaacagaa

SEQ ID NO: 671937 - DNA, 25 bp, Homo sapien
agcagccaaaggagcccgataccac

SEQ ID NO: 671938 - DNA, 25 bp, Homo sapien
tttggttggcatcccggaaggttgc

SEQ ID NO: 671939 - DNA, 25 bp, Homo sapien
cctgtgattccctttgacagggttc

SEQ ID NO: 671940 - DNA, 25 bp, Homo sapien
tctgttgtgcacgaaatcgtaaggg

SEQ ID NO: 671941 - DNA, 25 bp, Homo sapien
tgtaggcaggcctacgataaagatg

SEQ ID NO: 671942 - DNA, 25 bp, Homo sapien
ggcctacgataaagatgcaggtgtg

SEQ ID NO: 671943 - DNA, 25 bp, Homo sapien
gtgtcctctgttgtgcacgaaatcg

SEQ ID NO: 671944 - DNA, 25 bp, Homo sapien
agttgcagagcaggagcgcagcctc

SEQ ID NO: 671945 - DNA, 25 bp, Homo sapien
gagcaccgagtgaaggcatcacagg

SEQ ID NO: 671946 - DNA, 25 bp, Homo sapien
aaggcatcacaggatccagttgcag

SEQ ID NO: 671947 - DNA, 25 bp, Homo sapien
tcctttctgagcaccgagtgaaggc

SEQ ID NO: 671948 - DNA, 25 bp, Homo sapien
tgtctctcctccttgtctgcttccc

SEQ ID NO: 671949 - DNA, 25 bp, Homo sapien
cttggagctggatcctgtgtctctc

SEQ ID NO: 671950 - DNA, 25 bp, Homo sapien
ttggagctggatcctgtgtctctcc

SEQ ID NO: 671951 - DNA, 25 bp, Homo sapien
tcctccttgtctgcttcccccgtaa

SEQ ID NO: 671952 - DNA, 25 bp, Homo sapien
caaattaaccttgtagcctgacttg

SEQ ID NO: 671953 - DNA, 25 bp, Homo sapien
gccactgacagttatactgagctga

SEQ ID NO: 671954 - DNA, 25 bp, Homo sapien
ctgtgcagacaaagcgtcagacaaa

SEQ ID NO: 671955 - DNA, 25 bp, Homo sapien
tgtagcctgacttgaaattgccttg

SEQ ID NO: 671956 - DNA, 25 bp, Homo sapien
ttgccatggataccacaatcccgct

SEQ ID NO: 671957 - DNA, 25 bp, Homo sapien
tcccgctatccctctgactctctgg

SEQ ID NO: 671958 - DNA, 25 bp, Homo sapien
taggaagtatccattgggagtagag

SEQ ID NO: 671959 - DNA, 25 bp, Homo sapien
gactctctggggttaggaagtatcc

SEQ ID NO: 671960 - DNA, 25 bp, Homo sapien
aggcatgagagtccatgcctgcata

SEQ ID NO: 671961 - DNA, 25 bp, Homo sapien
ccaggcatgagagtccatgcctgca

SEQ ID NO: 671962 - DNA, 25 bp, Homo sapien
caggcatgagagtccatgcctgcat

SEQ ID NO: 671963 - DNA, 25 bp, Homo sapien
ggcatgagagtccatgcctgcatac

SEQ ID NO: 671964 - DNA, 25 bp, Homo sapien
catcagctctgggtttaacggcagg

SEQ ID NO: 671965 - DNA, 25 bp, Homo sapien
caggctgaatttataagcttagttt

SEQ ID NO: 671966 - DNA, 25 bp, Homo sapien
gattagcttggtggttaatgcacga

SEQ ID NO: 671967 - DNA, 25 bp, Homo sapien
ataactgccatgatccagggccact

SEQ ID NO: 671968 - DNA, 25 bp, Homo sapien
ggcttaattcaaaggcagcacttag

SEQ ID NO: 671969 - DNA, 25 bp, Homo sapien
aattcaaaggcagcacttagagtac

SEQ ID NO: 671970 - DNA, 25 bp, Homo sapien
tatggcttaattcaaaggcagcact

SEQ ID NO: 671971 - DNA, 25 bp, Homo sapien
tattctctgatggtatggcttaatt

SEQ ID NO: 671972 - DNA, 25 bp, Homo sapien
aatggatggtctgacgctttcagac

SEQ ID NO: 671973 - DNA, 25 bp, Homo sapien
tggtctgacgctttcagacactcct

SEQ ID NO: 671974 - DNA, 25 bp, Homo sapien
tggatggtctgacgctttcagacac

SEQ ID NO: 671975 - DNA, 25 bp, Homo sapien
aggaatggatggtctgacgctttca

SEQ ID NO: 671976 - DNA, 25 bp, Homo sapien
tgtgatcccatctctgatgatgccc

SEQ ID NO: 671977 - DNA, 25 bp, Homo sapien
gctgaagtgttgttgatgcctaaac

SEQ ID NO: 671978 - DNA, 25 bp, Homo sapien
catcaaaaccctgcatgctgattcc

SEQ ID NO: 671979 - DNA, 25 bp, Homo sapien
caaagagcattgacatcactgcatc

SEQ ID NO: 671980 - DNA, 25 bp, Homo sapien
aagcagctgacaacttgtctctcca

SEQ ID NO: 671981 - DNA, 25 bp, Homo sapien
ttcccctaggccgtcaaagcagctg

SEQ ID NO: 671982 - DNA, 25 bp, Homo sapien
ccctaggccgtcaaagcagctgaca

SEQ ID NO: 671983 - DNA, 25 bp, Homo sapien
ctaggccgtcaaagcagctgacaac

SEQ ID NO: 671984 - DNA, 25 bp, Homo sapien
actgtgccttggaaccggaattggg

SEQ ID NO: 671985 - DNA, 25 bp, Homo sapien
tgtgccttggaaccggaattgggca

SEQ ID NO: 671986 - DNA, 25 bp, Homo sapien
ccttggaaccggaattgggcaccag

SEQ ID NO: 671987 - DNA, 25 bp, Homo sapien
gtgactgtgccttggaaccggaatt

SEQ ID NO: 671988 - DNA, 25 bp, Homo sapien
agcctcatgcgccattcagcaatat

SEQ ID NO: 671989 - DNA, 25 bp, Homo sapien
ctgcagcctcatgcgccattcagca

SEQ ID NO: 671990 - DNA, 25 bp, Homo sapien
ccactgcagcctcatgcgccattca

SEQ ID NO: 671991 - DNA, 25 bp, Homo sapien
tcatgcgccattcagcaatatcatt

SEQ ID NO: 671992 - DNA, 25 bp, Homo sapien
gctcccataagccatctgtggtact

SEQ ID NO: 671993 - DNA, 25 bp, Homo sapien
tcccataagccatctgtggtactga

SEQ ID NO: 671994 - DNA, 25 bp, Homo sapien
gtgagctcccataagccatctgtgg

SEQ ID NO: 671995 - DNA, 25 bp, Homo sapien
gagctcccataagccatctgtggta

SEQ ID NO: 671996 - DNA, 25 bp, Homo sapien
ctcagcaatactgcaaacattagtt

SEQ ID NO: 671997 - DNA, 25 bp, Homo sapien
acaaggcactcagcaatactgcaaa

SEQ ID NO: 671998 - DNA, 25 bp, Homo sapien
aaggcactcagcaatactgcaaaca

SEQ ID NO: 671999 - DNA, 25 bp, Homo sapien
ggcactcagcaatactgcaaacatt

SEQ ID NO: 672000 - DNA, 25 bp, Homo sapien
gattagggaatagcaaactgacaac

SEQ ID NO: 672001 - DNA, 25 bp, Homo sapien
ctgacaacctggcttattctgaggg

SEQ ID NO: 672002 - DNA, 25 bp, Homo sapien
gggtgagaagggattagggaatagc

SEQ ID NO: 672003 - DNA, 25 bp, Homo sapien
ggaatagcaaactgacaacctggct

SEQ ID NO: 672004 - DNA, 25 bp, Homo sapien
tgtgtggcaggaataaccctgcagg

SEQ ID NO: 672005 - DNA, 25 bp, Homo sapien
tgctggagtgataggatgtgtggca

SEQ ID NO: 672006 - DNA, 25 bp, Homo sapien
gataggatgtgtggcaggaataacc

SEQ ID NO: 672007 - DNA, 25 bp, Homo sapien
gatgtgtggcaggaataaccctgca

SEQ ID NO: 672008 - DNA, 25 bp, Homo sapien
ctggcactgtgccataatgatctaa

SEQ ID NO: 672009 - DNA, 25 bp, Homo sapien
gcactgtgccataatgatctaagga

SEQ ID NO: 672010 - DNA, 25 bp, Homo sapien
aggctcaaccccctcaatcctttca

SEQ ID NO: 672011 - DNA, 25 bp, Homo sapien
atctggcactgtgccataatgatct

SEQ ID NO: 672012 - DNA, 25 bp, Homo sapien
ctaaggggcatcatcttgccttgat

SEQ ID NO: 672013 - DNA, 25 bp, Homo sapien
ttccatctatgatgtagatacacat

SEQ ID NO: 672014 - DNA, 25 bp, Homo sapien
tacagttccatctatgatgtagata

SEQ ID NO: 672015 - DNA, 25 bp, Homo sapien
cagttccatctatgatgtagataca

SEQ ID NO: 672016 - DNA, 25 bp, Homo sapien
tgtacagttccatctatgatgtaga

SEQ ID NO: 672017 - DNA, 25 bp, Homo sapien
gttgctccgctttgttgcttggatc

SEQ ID NO: 672018 - DNA, 25 bp, Homo sapien
gagtgccctgtgatctgaggtttat

SEQ ID NO: 672019 - DNA, 25 bp, Homo sapien
tggcttgttgctccgctttgttgct

SEQ ID NO: 672020 - DNA, 25 bp, Homo sapien
ttgttgcttggatctgagtgccctg

SEQ ID NO: 672021 - DNA, 25 bp, Homo sapien
tcttattctcattcagtagcttgtc

SEQ ID NO: 672022 - DNA, 25 bp, Homo sapien
tctaattttgaaccattggtggtcc

SEQ ID NO: 672023 - DNA, 25 bp, Homo sapien
tgggtcttcttattctcattcagta

SEQ ID NO: 672024 - DNA, 25 bp, Homo sapien
cagtagcttgtctaattttgaacca

SEQ ID NO: 672025 - DNA, 25 bp, Homo sapien
aattagaacttcatgactcccgtgc

SEQ ID NO: 672026 - DNA, 25 bp, Homo sapien
aaaattagaacttcatgactcccgt

SEQ ID NO: 672027 - DNA, 25 bp, Homo sapien
tagaacttcatgactcccgtgcaag

SEQ ID NO: 672028 - DNA, 25 bp, Homo sapien
cagatgaggttgtgtaatgagaaaa

SEQ ID NO: 672029 - DNA, 25 bp, Homo sapien
tccatcgtaatagcttggagcttgc

SEQ ID NO: 672030 - DNA, 25 bp, Homo sapien
gagtccatcgtaatagcttggagct

SEQ ID NO: 672031 - DNA, 25 bp, Homo sapien
ttagagtccatcgtaatagcttgga

SEQ ID NO: 672032 - DNA, 25 bp, Homo sapien
cgtaatagcttggagcttgcagcag

SEQ ID NO: 672033 - DNA, 25 bp, Homo sapien
gcctctttgaacgtgttatataaat

SEQ ID NO: 672034 - DNA, 25 bp, Homo sapien
cattagctcatagatactagggtta

SEQ ID NO: 672035 - DNA, 25 bp, Homo sapien
taatcttaccagcattatatgaggg

SEQ ID NO: 672036 - DNA, 25 bp, Homo sapien
gaagctttaaccatgttgtagtgta

SEQ ID NO: 672037 - DNA, 25 bp, Homo sapien
gatggtctttgtggcagtccaagta

SEQ ID NO: 672038 - DNA, 25 bp, Homo sapien
gggcatcagaagtggtcctggcaag

SEQ ID NO: 672039 - DNA, 25 bp, Homo sapien
agttctcgttgagaaaggccttctc

SEQ ID NO: 672040 - DNA, 25 bp, Homo sapien
ccaagtatgttaggtgggcatcaga

SEQ ID NO: 672041 - DNA, 25 bp, Homo sapien
catgattgtgggtacctagccagag

SEQ ID NO: 672042 - DNA, 25 bp, Homo sapien
gcaagtttcattccagcttatcaga

SEQ ID NO: 672043 - DNA, 25 bp, Homo sapien
tcagcagggctattgctagctcccc

SEQ ID NO: 672044 - DNA, 25 bp, Homo sapien
cagccccagactgagtaattcagag

SEQ ID NO: 672045 - DNA, 25 bp, Homo sapien
gatattccgtgtagcatattccgat

SEQ ID NO: 672046 - DNA, 25 bp, Homo sapien
gctgctctttcacaaacagtcagca

SEQ ID NO: 672047 - DNA, 25 bp, Homo sapien
catattccgatgacagggaaacaca

SEQ ID NO: 672048 - DNA, 25 bp, Homo sapien
catgtctgtgatattccgtgtagca

SEQ ID NO: 672049 - DNA, 25 bp, Homo sapien
gtaagtggaggtgtttgaaatagaa

SEQ ID NO: 672050 - DNA, 25 bp, Homo sapien
aagatgagcagcaagtggtaagtgg

SEQ ID NO: 672051 - DNA, 25 bp, Homo sapien
ctgaaagatgagcagcaagtggtaa

SEQ ID NO: 672052 - DNA, 25 bp, Homo sapien
gatgagcagcaagtggtaagtggag

SEQ ID NO: 672053 - DNA, 25 bp, Homo sapien
tctctgtatctccagtagtctggga

SEQ ID NO: 672054 - DNA, 25 bp, Homo sapien
gtctgggatgtcattgattctcgcc

SEQ ID NO: 672055 - DNA, 25 bp, Homo sapien
ccagtagtctgggatgtcattgatt

SEQ ID NO: 672056 - DNA, 25 bp, Homo sapien
tgtcattgattctcgccagtgtttg

SEQ ID NO: 672057 - DNA, 25 bp, Homo sapien
tgtccggcccagtacagtgcagttt

SEQ ID NO: 672058 - DNA, 25 bp, Homo sapien
gtacagtgcagtttctggaccgttt

SEQ ID NO: 672059 - DNA, 25 bp, Homo sapien
tgcagtttctggaccgtttttctcc

SEQ ID NO: 672060 - DNA, 25 bp, Homo sapien
ggttctactgagctgtgtccggccc

SEQ ID NO: 672061 - DNA, 25 bp, Homo sapien
gcccccatattattctgcattttca

SEQ ID NO: 672062 - DNA, 25 bp, Homo sapien
tgcccccatattattctgcattttc

SEQ ID NO: 672063 - DNA, 25 bp, Homo sapien
ctgcccccatattattctgcatttt

SEQ ID NO: 672064 - DNA, 25 bp, Homo sapien
cccccatattattctgcattttcat

SEQ ID NO: 672065 - DNA, 25 bp, Homo sapien
tcaatggtggaaattcgatttgcac

SEQ ID NO: 672066 - DNA, 25 bp, Homo sapien
taaagtaggatgtgtctcaatggtg

SEQ ID NO: 672067 - DNA, 25 bp, Homo sapien
ttgcacgctgctcaaccagaatcag

SEQ ID NO: 672068 - DNA, 25 bp, Homo sapien
gaatcagcataaactctgagccttg

SEQ ID NO: 672069 - DNA, 25 bp, Homo sapien
ttgcttgggtcccttgagagggtct

SEQ ID NO: 672070 - DNA, 25 bp, Homo sapien
tgcttgggtcccttgagagggtctt

SEQ ID NO: 672071 - DNA, 25 bp, Homo sapien
ggtaggtcccttggctttggcatca

SEQ ID NO: 672072 - DNA, 25 bp, Homo sapien
tttggtaggtcccttggctttggca

SEQ ID NO: 672073 - DNA, 25 bp, Homo sapien
gtaggtcccttggctttggcatcat

SEQ ID NO: 672074 - DNA, 25 bp, Homo sapien
tggtaggtcccttggctttggcatc

SEQ ID NO: 672075 - DNA, 25 bp, Homo sapien
ttgggcttttcgagcccaaacttga

SEQ ID NO: 672076 - DNA, 25 bp, Homo sapien
tccttctcagaggacttcgcttcct

SEQ ID NO: 672077 - DNA, 25 bp, Homo sapien
ttttcgagcccaaacttgacttcag

SEQ ID NO: 672078 - DNA, 25 bp, Homo sapien
gcttttcgagcccaaacttgacttc

SEQ ID NO: 672079 - DNA, 25 bp, Homo sapien
cagctggagactttgcttcttcctt

SEQ ID NO: 672080 - DNA, 25 bp, Homo sapien
tttcaggggacttgacctcagctgg

SEQ ID NO: 672081 - DNA, 25 bp, Homo sapien
gggacttggcctcagctggtgactt

SEQ ID NO: 672082 - DNA, 25 bp, Homo sapien
ttcactggggacttggcctcagctg

SEQ ID NO: 672083 - DNA, 25 bp, Homo sapien
tgccttttcctttgctggggacttg

SEQ ID NO: 672084 - DNA, 25 bp, Homo sapien
gacttggccttctcggggaacttga

SEQ ID NO: 672085 - DNA, 25 bp, Homo sapien
tggagacttggcctcagctggtgat

SEQ ID NO: 672086 - DNA, 25 bp, Homo sapien
ctcagctggtgattttgccttttcc

SEQ ID NO: 672087 - DNA, 25 bp, Homo sapien
gctggtgactttgcctcttcattca

SEQ ID NO: 672088 - DNA, 25 bp, Homo sapien
tcattcactggggacttggcttcct

SEQ ID NO: 672089 - DNA, 25 bp, Homo sapien
ccttttctggggatgtggcctcttc

SEQ ID NO: 672090 - DNA, 25 bp, Homo sapien
ctcggctggggattttgcttcctct

SEQ ID NO: 672091 - DNA, 25 bp, Homo sapien
tcacttcttcagtcacttgggtctc

SEQ ID NO: 672092 - DNA, 25 bp, Homo sapien
ttcttcagtcacttgggtctcctcc

SEQ ID NO: 672093 - DNA, 25 bp, Homo sapien
cttcagtcacttgggtctcctccat

SEQ ID NO: 672094 - DNA, 25 bp, Homo sapien
acttcttcagtcacttgggtctcct

SEQ ID NO: 672095 - DNA, 25 bp, Homo sapien
cccccacaatcacagtttctctgac

SEQ ID NO: 672096 - DNA, 25 bp, Homo sapien
ttcccccacaatcacagtttctctg

SEQ ID NO: 672097 - DNA, 25 bp, Homo sapien
ctgttcccccacaatcacagtttct

SEQ ID NO: 672098 - DNA, 25 bp, Homo sapien
tgttcccccacaatcacagtttctc

SEQ ID NO: 672099 - DNA, 25 bp, Homo sapien
ttgctgaatgacttcctcgtaggag

SEQ ID NO: 672100 - DNA, 25 bp, Homo sapien
gaagctagtccgacactcttcgcct

SEQ ID NO: 672101 - DNA, 25 bp, Homo sapien
caaagccatctcgacattaagcagg

SEQ ID NO: 672102 - DNA, 25 bp, Homo sapien
ggaattgggccgaagctagtccgac

SEQ ID NO: 672103 - DNA, 25 bp, Homo sapien
tctaacgtcagtccagccttactca

SEQ ID NO: 672104 - DNA, 25 bp, Homo sapien
ctacgctgagcacatggcatctatg

SEQ ID NO: 672105 - DNA, 25 bp, Homo sapien
tgttcaccttcgctgcctctaacgt

SEQ ID NO: 672106 - DNA, 25 bp, Homo sapien
cgatctcgctcagcgccgatgtcac

SEQ ID NO: 672107 - DNA, 25 bp, Homo sapien
gcccttgagagcgttgcgcaactca

SEQ ID NO: 672108 - DNA, 25 bp, Homo sapien
cttgagagcgttgcgcaactcagcc

SEQ ID NO: 672109 - DNA, 25 bp, Homo sapien
ttcgcccttgagagcgttgcgcaac

SEQ ID NO: 672110 - DNA, 25 bp, Homo sapien
agagcgttgcgcaactcagcctgca

SEQ ID NO: 672111 - DNA, 25 bp, Homo sapien
ctgggtctggccgagcagctcgacc

SEQ ID NO: 672112 - DNA, 25 bp, Homo sapien
tgcgcggcgccgcagccctgggtct

SEQ ID NO: 672113 - DNA, 25 bp, Homo sapien
cagccctgggtctggccgagcagct

SEQ ID NO: 672114 - DNA, 25 bp, Homo sapien
gggtctggccgagcagctcgaccac

SEQ ID NO: 672115 - DNA, 25 bp, Homo sapien
cctcctgcgtgcagcgcgtgagtgc

SEQ ID NO: 672116 - DNA, 25 bp, Homo sapien
tcctcgcgctgccagagctcgttgt

SEQ ID NO: 672117 - DNA, 25 bp, Homo sapien
tcctcctggtagtggcgcgacaggt

SEQ ID NO: 672118 - DNA, 25 bp, Homo sapien
agctcgttgtcgaggcgctggcaca

SEQ ID NO: 672119 - DNA, 25 bp, Homo sapien
caggcgcagcatcgcaccgcgcgtc

SEQ ID NO: 672120 - DNA, 25 bp, Homo sapien
gcatcgcaccgcgcgtctcacggac

SEQ ID NO: 672121 - DNA, 25 bp, Homo sapien
ggcgcagcatcgcaccgcgcgtctc

SEQ ID NO: 672122 - DNA, 25 bp, Homo sapien
cgcagcatcgcaccgcgcgtctcac

SEQ ID NO: 672123 - DNA, 25 bp, Homo sapien
gatgtagcccgcaaagcggtccgtc

SEQ ID NO: 672124 - DNA, 25 bp, Homo sapien
aaagcggtccgtcggcgcctgcagc

SEQ ID NO: 672125 - DNA, 25 bp, Homo sapien
cttgtcgatgtagcccgcaaagcgg

SEQ ID NO: 672126 - DNA, 25 bp, Homo sapien
tgccgctccttgtcgatgtagcccg

SEQ ID NO: 672127 - DNA, 25 bp, Homo sapien
accacgcatccctctggctggttgc

SEQ ID NO: 672128 - DNA, 25 bp, Homo sapien
gctggttgctcagcgtgtccagcga

SEQ ID NO: 672129 - DNA, 25 bp, Homo sapien
tgctcgttgtagcagccgccaccac

SEQ ID NO: 672130 - DNA, 25 bp, Homo sapien
cgtgtccagcgagtcggtgctcgag

SEQ ID NO: 672131 - DNA, 25 bp, Homo sapien
tttggggccagagcgtagtggaggc

SEQ ID NO: 672132 - DNA, 25 bp, Homo sapien
cgtcccgcctgtgccgctctttggg

SEQ ID NO: 672133 - DNA, 25 bp, Homo sapien
tgccaccgccgtgcaacggcaggaa

SEQ ID NO: 672134 - DNA, 25 bp, Homo sapien
aggaacagggcgcccagcaacgcgt

SEQ ID NO: 672135 - DNA, 25 bp, Homo sapien
gacaatgtgattagacaacacccgg

SEQ ID NO: 672136 - DNA, 25 bp, Homo sapien
ttcactcaggcgtaagatcacctga

SEQ ID NO: 672137 - DNA, 25 bp, Homo sapien
gtccagcattattaggaacctcttg

SEQ ID NO: 672138 - DNA, 25 bp, Homo sapien
ttctcaagaagttgttgtcgtagca

SEQ ID NO: 672139 - DNA, 25 bp, Homo sapien
tttagccatgtaaatttcttccgct

SEQ ID NO: 672140 - DNA, 25 bp, Homo sapien
aatttcatcgttggtcctctttagc

SEQ ID NO: 672141 - DNA, 25 bp, Homo sapien
cgttggtcctctttagccatgtaaa

SEQ ID NO: 672142 - DNA, 25 bp, Homo sapien
aaagtaatttcatcgttggtcctct

SEQ ID NO: 672143 - DNA, 25 bp, Homo sapien
caggttgactgggtctaagatgagt

SEQ ID NO: 672144 - DNA, 25 bp, Homo sapien
ctcaggttgactgggtctaagatga

SEQ ID NO: 672145 - DNA, 25 bp, Homo sapien
gactgggtctaagatgagtctcacc

SEQ ID NO: 672146 - DNA, 25 bp, Homo sapien
ttgactgggtctaagatgagtctca

SEQ ID NO: 672147 - DNA, 25 bp, Homo sapien
cattctcatgctcatagcaaactca

SEQ ID NO: 672148 - DNA, 25 bp, Homo sapien
tttggagctatttggtgtaagcgca

SEQ ID NO: 672149 - DNA, 25 bp, Homo sapien
gcaaatagttctccaccttattgga

SEQ ID NO: 672150 - DNA, 25 bp, Homo sapien
tgagggtattgctgtaactgaccac

SEQ ID NO: 672151 - DNA, 25 bp, Homo sapien
cttcaagaagatggttcctccattc

SEQ ID NO: 672152 - DNA, 25 bp, Homo sapien
ttcaagaagatggttcctccattca

SEQ ID NO: 672153 - DNA, 25 bp, Homo sapien
gagggttctttgtggagctgccata

SEQ ID NO: 672154 - DNA, 25 bp, Homo sapien
tgtgctccacccacagtctcaggat

SEQ ID NO: 672155 - DNA, 25 bp, Homo sapien
tctttgtggagctgccatacttcat

SEQ ID NO: 672156 - DNA, 25 bp, Homo sapien
cagtctcaggatctggagggttctt

SEQ ID NO: 672157 - DNA, 25 bp, Homo sapien
gatggtggactactgggtggagagg

SEQ ID NO: 672158 - DNA, 25 bp, Homo sapien
atggtggactactgggtggagagga

SEQ ID NO: 672159 - DNA, 25 bp, Homo sapien
cagcccaaacttctccccgatactt

SEQ ID NO: 672160 - DNA, 25 bp, Homo sapien
cccacagatatctgaatgtacaaaa

SEQ ID NO: 672161 - DNA, 25 bp, Homo sapien
ccgatacttcctattcttgcttctt

SEQ ID NO: 672162 - DNA, 25 bp, Homo sapien
ttattaggaaggcacttcccacaga

SEQ ID NO: 672163 - DNA, 25 bp, Homo sapien
ggagtcatgtcctccgcctctgcgt

SEQ ID NO: 672164 - DNA, 25 bp, Homo sapien
gtatagttgctggactggccttttc

SEQ ID NO: 672165 - DNA, 25 bp, Homo sapien
cctctgcgttggtctggtctgtata

SEQ ID NO: 672166 - DNA, 25 bp, Homo sapien
ggaagtgggcaagtgccctggagtc

SEQ ID NO: 672167 - DNA, 25 bp, Homo sapien
ctagtcttggtctcccaatgcagac

SEQ ID NO: 672168 - DNA, 25 bp, Homo sapien
gcagacatctggtagcctaggctct

SEQ ID NO: 672169 - DNA, 25 bp, Homo sapien
tcccaatgcagacatctggtagcct

SEQ ID NO: 672170 - DNA, 25 bp, Homo sapien
tggtctcccaatgcagacatctggt

SEQ ID NO: 672171 - DNA, 25 bp, Homo sapien
gaaaggaaagaaccgagatggctcc

SEQ ID NO: 672172 - DNA, 25 bp, Homo sapien
ctccaagaggggctgagatcagcat

SEQ ID NO: 672173 - DNA, 25 bp, Homo sapien
catacagaaaggaaagaaccgagat

SEQ ID NO: 672174 - DNA, 25 bp, Homo sapien
aaccgagatggctccaagaggggct

SEQ ID NO: 672175 - DNA, 25 bp, Homo sapien
taagcccagtgacaggaatattaac

SEQ ID NO: 672176 - DNA, 25 bp, Homo sapien
aattgcctgttatttagctcaggag

SEQ ID NO: 672177 - DNA, 25 bp, Homo sapien
tggccactgcacagttaagcccagt

SEQ ID NO: 672178 - DNA, 25 bp, Homo sapien
ggaatattaacaagatgcatggagg

SEQ ID NO: 672179 - DNA, 25 bp, Homo sapien
gactgagggacctcataggaaatgt

SEQ ID NO: 672180 - DNA, 25 bp, Homo sapien
tgagggacctcataggaaatgttct

SEQ ID NO: 672181 - DNA, 25 bp, Homo sapien
gcagactgagggacctcataggaaa

SEQ ID NO: 672182 - DNA, 25 bp, Homo sapien
agggacctcataggaaatgttctgc

SEQ ID NO: 672183 - DNA, 25 bp, Homo sapien
gcttttgaactcctgcatcttttca

SEQ ID NO: 672184 - DNA, 25 bp, Homo sapien
atcttttcatgtgtctggtgatgtt

SEQ ID NO: 672185 - DNA, 25 bp, Homo sapien
tcaaagtgaacctctgcttttgaac

SEQ ID NO: 672186 - DNA, 25 bp, Homo sapien
tttcatgtgtctggtgatgttttcc

SEQ ID NO: 672187 - DNA, 25 bp, Homo sapien
tttagcaggccagaaatttgacagc

SEQ ID NO: 672188 - DNA, 25 bp, Homo sapien
agggaagggatagttgagatgtgct

SEQ ID NO: 672189 - DNA, 25 bp, Homo sapien
aagcgaaggtgtgagcttgctcaga

SEQ ID NO: 672190 - DNA, 25 bp, Homo sapien
agagcatcatggaggggccagaaaa

SEQ ID NO: 672191 - DNA, 25 bp, Homo sapien
aaagtctgtactcgcgatgggcatc

SEQ ID NO: 672192 - DNA, 25 bp, Homo sapien
tgttggaccatcatagagaaggccc

SEQ ID NO: 672193 - DNA, 25 bp, Homo sapien
taagcactggctagagatcaaggtc

SEQ ID NO: 672194 - DNA, 25 bp, Homo sapien
tcttggccaacacgaagctgagtgc

SEQ ID NO: 672195 - DNA, 25 bp, Homo sapien
tacagaatggttgtgggcgaagccc

SEQ ID NO: 672196 - DNA, 25 bp, Homo sapien
cagtgaatgctggacggtcaaggcc

SEQ ID NO: 672197 - DNA, 25 bp, Homo sapien
gtggcctagggaacatcgtaaggtc

SEQ ID NO: 672198 - DNA, 25 bp, Homo sapien
aagccccatgcaggttaggtgtgag

SEQ ID NO: 672199 - DNA, 25 bp, Homo sapien
tccatgacgtagaggagcagaacac

SEQ ID NO: 672200 - DNA, 25 bp, Homo sapien
tcttttccatgacgtagaggagcag

SEQ ID NO: 672201 - DNA, 25 bp, Homo sapien
tcaatcttttccatgacgtagagga

SEQ ID NO: 672202 - DNA, 25 bp, Homo sapien
gcagagcagtgacccccaagagcct

SEQ ID NO: 672203 - DNA, 25 bp, Homo sapien
cagcatctcccacggcaacaggaga

SEQ ID NO: 672204 - DNA, 25 bp, Homo sapien
gaaatccaaggccttgcttgtgggt

SEQ ID NO: 672205 - DNA, 25 bp, Homo sapien
ctggttaggttgaaaaggaagcctg

SEQ ID NO: 672206 - DNA, 25 bp, Homo sapien
gagatccacaaactcagaacaaaag

SEQ ID NO: 672207 - DNA, 25 bp, Homo sapien
tccagtgccacctcgtatacaaatt

SEQ ID NO: 672208 - DNA, 25 bp, Homo sapien
cttaaatattccagtgccacctcgt

SEQ ID NO: 672209 - DNA, 25 bp, Homo sapien
tattccagtgccacctcgtatacaa

SEQ ID NO: 672210 - DNA, 25 bp, Homo sapien
gtgccacctcgtatacaaatttata

SEQ ID NO: 672211 - DNA, 25 bp, Homo sapien
agaaagtgaagcaaagtaggtgtac

SEQ ID NO: 672212 - DNA, 25 bp, Homo sapien
tttctccaggtcaagggaactagtc

SEQ ID NO: 672213 - DNA, 25 bp, Homo sapien
cacagaatgcaggtatacaattagc

SEQ ID NO: 672214 - DNA, 25 bp, Homo sapien
aagggaactagtcagccctggctgt

SEQ ID NO: 672215 - DNA, 25 bp, Homo sapien
ccaggtgttgagtgatgttactatt

SEQ ID NO: 672216 - DNA, 25 bp, Homo sapien
tttgttgttacgcagtgttttcacg

SEQ ID NO: 672217 - DNA, 25 bp, Homo sapien
gaacacgtcaatgatgttttgctgc

SEQ ID NO: 672218 - DNA, 25 bp, Homo sapien
ctccaccatgttggatttgttgtta

SEQ ID NO: 672219 - DNA, 25 bp, Homo sapien
tcacgatgtggaacacgtcaatgat

SEQ ID NO: 672220 - DNA, 25 bp, Homo sapien
cagatggcacagaaggttccactac

SEQ ID NO: 672221 - DNA, 25 bp, Homo sapien
gcacagaaggttccactacggcctc

SEQ ID NO: 672222 - DNA, 25 bp, Homo sapien
ctgcagatggcacagaaggttccac

SEQ ID NO: 672223 - DNA, 25 bp, Homo sapien
gatggcacagaaggttccactacgg

SEQ ID NO: 672224 - DNA, 25 bp, Homo sapien
ctggaggtgctggactatacgataa

SEQ ID NO: 672225 - DNA, 25 bp, Homo sapien
ttctccagtcgtcggaccactttga

SEQ ID NO: 672226 - DNA, 25 bp, Homo sapien
aggcagtggaccacagtacgtccct

SEQ ID NO: 672227 - DNA, 25 bp, Homo sapien
cactttgagcagagagcgcttggag

SEQ ID NO: 672228 - DNA, 25 bp, Homo sapien
catagcacccggaggtcttctcagg

SEQ ID NO: 672229 - DNA, 25 bp, Homo sapien
ccatgttacagatgcggaatattct

SEQ ID NO: 672230 - DNA, 25 bp, Homo sapien
tgcggagacgaactccacctggatg

SEQ ID NO: 672231 - DNA, 25 bp, Homo sapien
tgtggatgatgtcctcgtcgatgtc

SEQ ID NO: 672232 - DNA, 25 bp, Homo sapien
tggctgatccaagaatagattcaaa

SEQ ID NO: 672233 - DNA, 25 bp, Homo sapien
ttcagccaagagtctagaccaactg

SEQ ID NO: 672234 - DNA, 25 bp, Homo sapien
aaacttttgaagttggctgatccaa

SEQ ID NO: 672235 - DNA, 25 bp, Homo sapien
ttcattgcctagtaagtactctctc

SEQ ID NO: 672236 - DNA, 25 bp, Homo sapien
aggtgatactgcctgaagggagggc

SEQ ID NO: 672237 - DNA, 25 bp, Homo sapien
tatgtcccgaagtgaagttctttga

SEQ ID NO: 672238 - DNA, 25 bp, Homo sapien
tagccaatgaccttgacctttgttt

SEQ ID NO: 672239 - DNA, 25 bp, Homo sapien
gaaagggggagctatagccaatgac

SEQ ID NO: 672240 - DNA, 25 bp, Homo sapien
caaaggttttatatgtcccgaagtg

SEQ ID NO: 672241 - DNA, 25 bp, Homo sapien
tccaaactccagtggtcccacaaag

SEQ ID NO: 672242 - DNA, 25 bp, Homo sapien
cacagaaagtatttctaactgtgct

SEQ ID NO: 672243 - DNA, 25 bp, Homo sapien
aactccagtggtcccacaaaggact

SEQ ID NO: 672244 - DNA, 25 bp, Homo sapien
tttctaactgtgctcctccaaactc

SEQ ID NO: 672245 - DNA, 25 bp, Homo sapien
agaagtctgccacggtgttgggtag

SEQ ID NO: 672246 - DNA, 25 bp, Homo sapien
accacgaaggcggcaggctgcttgt

SEQ ID NO: 672247 - DNA, 25 bp, Homo sapien
gaggagcagttgtaatcgaacacca

SEQ ID NO: 672248 - DNA, 25 bp, Homo sapien
agagggtgctgggtgaccacgaagg

SEQ ID NO: 672249 - DNA, 25 bp, Homo sapien
gtccagaggcagcacgtccatactt

SEQ ID NO: 672250 - DNA, 25 bp, Homo sapien
cgtccatacttcgattcttatcatg

SEQ ID NO: 672251 - DNA, 25 bp, Homo sapien
tcagtgctgcgttgatgtaattgct

SEQ ID NO: 672252 - DNA, 25 bp, Homo sapien
aattgctggattctccgtccactga

SEQ ID NO: 672253 - DNA, 25 bp, Homo sapien
tcctcgggccgcacacggggtgtca

SEQ ID NO: 672254 - DNA, 25 bp, Homo sapien
gccgcacacggggtgtcacaatgtt

SEQ ID NO: 672255 - DNA, 25 bp, Homo sapien
cacacggggtgtcacaatgttgagg

SEQ ID NO: 672256 - DNA, 25 bp, Homo sapien
ctgcagtcctcgggccgcacacggg

SEQ ID NO: 672257 - DNA, 25 bp, Homo sapien
aaggtgaatagataggccctgctca

SEQ ID NO: 672258 - DNA, 25 bp, Homo sapien
ggtgaatagataggccctgctcatt

SEQ ID NO: 672259 - DNA, 25 bp, Homo sapien
aggtgaatagataggccctgctcat

SEQ ID NO: 672260 - DNA, 25 bp, Homo sapien
cagaggcacgcttccaggatggcat

SEQ ID NO: 672261 - DNA, 25 bp, Homo sapien
ttgccacagaggcacgcttccagga

SEQ ID NO: 672262 - DNA, 25 bp, Homo sapien
tagagagaacggaactcacacacag

SEQ ID NO: 672263 - DNA, 25 bp, Homo sapien
ggtccagcctgctgatattgtagta

SEQ ID NO: 672264 - DNA, 25 bp, Homo sapien
ttcattctcggccatgtcaagcatg

SEQ ID NO: 672265 - DNA, 25 bp, Homo sapien
tctgtaccaggttgaccctttgggc

SEQ ID NO: 672266 - DNA, 25 bp, Homo sapien
tttgggcccggagctcacgcacgca

SEQ ID NO: 672267 - DNA, 25 bp, Homo sapien
agttgaagatgtccaccaccccttc

SEQ ID NO: 672268 - DNA, 25 bp, Homo sapien
aggaacttgacctggcggacgaagc

SEQ ID NO: 672269 - DNA, 25 bp, Homo sapien
ccagtggcatagcagggaacgccgt

SEQ ID NO: 672270 - DNA, 25 bp, Homo sapien
gaacgccgtggtcaggccagctggt

SEQ ID NO: 672271 - DNA, 25 bp, Homo sapien
tggaagaggcggagctcccggatct

SEQ ID NO: 672272 - DNA, 25 bp, Homo sapien
acccagcccagcaacacgtggagcc

SEQ ID NO: 672273 - DNA, 25 bp, Homo sapien
tgctgccctcgcatacccagcccag

SEQ ID NO: 672274 - DNA, 25 bp, Homo sapien
agcccagcaacacgtggagccatag

SEQ ID NO: 672275 - DNA, 25 bp, Homo sapien
ccagctgctgccctcgcatacccag

SEQ ID NO: 672276 - DNA, 25 bp, Homo sapien
tttaatgtctccgtagacctccgtg

SEQ ID NO: 672277 - DNA, 25 bp, Homo sapien
gactgtgaaggtgcgtatgacgtat

SEQ ID NO: 672278 - DNA, 25 bp, Homo sapien
gtgcgtatgacgtattctgccaggg

SEQ ID NO: 672279 - DNA, 25 bp, Homo sapien
tcatctggccagtatcgcacacatt

SEQ ID NO: 672280 - DNA, 25 bp, Homo sapien
tttcccacagtgtgttccgctgggt

SEQ ID NO: 672281 - DNA, 25 bp, Homo sapien
acgccgcacggcctagagtggcatt

SEQ ID NO: 672282 - DNA, 25 bp, Homo sapien
atttcccacagtgtgttccgctggg

SEQ ID NO: 672283 - DNA, 25 bp, Homo sapien
ggcctagagtggcatttcccacagt

SEQ ID NO: 672284 - DNA, 25 bp, Homo sapien
gtttgtgaccatgacgatgctggcg

SEQ ID NO: 672285 - DNA, 25 bp, Homo sapien
ttgtgaccatgacgatgctggcgga

SEQ ID NO: 672286 - DNA, 25 bp, Homo sapien
ccacttccaccaggtttgtgaccat

SEQ ID NO: 672287 - DNA, 25 bp, Homo sapien
cgatgctggcggagttctcctgcca

SEQ ID NO: 672288 - DNA, 25 bp, Homo sapien
ctttgctggtggaaactcattcctc

SEQ ID NO: 672289 - DNA, 25 bp, Homo sapien
ctggtggaaactcattcctctcctc

SEQ ID NO: 672290 - DNA, 25 bp, Homo sapien
ccctccgtggcttctttgctggtgg

SEQ ID NO: 672291 - DNA, 25 bp, Homo sapien
tgctggtggaaactcattcctctcc

SEQ ID NO: 672292 - DNA, 25 bp, Homo sapien
tgtagtgccgaggtcgatggtatcc

SEQ ID NO: 672293 - DNA, 25 bp, Homo sapien
agtcgcaatgtagtgccgaggtcga

SEQ ID NO: 672294 - DNA, 25 bp, Homo sapien
caatgtagtgccgaggtcgatggta

SEQ ID NO: 672295 - DNA, 25 bp, Homo sapien
cttgagtcgcaatgtagtgccgagg

SEQ ID NO: 672296 - DNA, 25 bp, Homo sapien
tgtagtcagagtgcgggtctccatc

SEQ ID NO: 672297 - DNA, 25 bp, Homo sapien
tcagagtgcgggtctccatccagca

SEQ ID NO: 672298 - DNA, 25 bp, Homo sapien
tgatgtagtcagagtgcgggtctcc

SEQ ID NO: 672299 - DNA, 25 bp, Homo sapien
gtcagagtgcgggtctccatccagc

SEQ ID NO: 672300 - DNA, 25 bp, Homo sapien
gaggagctgctccagtagatgcaac

SEQ ID NO: 672301 - DNA, 25 bp, Homo sapien
tccttgtcctgccagatccatgctg

SEQ ID NO: 672302 - DNA, 25 bp, Homo sapien
ctggctgaaattggaaaacgcccct

SEQ ID NO: 672303 - DNA, 25 bp, Homo sapien
atgctggctgaaattggaaaacgcc

SEQ ID NO: 672304 - DNA, 25 bp, Homo sapien
cctaaggatgccatccaggcactgc

SEQ ID NO: 672305 - DNA, 25 bp, Homo sapien
gagaggaccacctgtgtcctaagga

SEQ ID NO: 672306 - DNA, 25 bp, Homo sapien
ctggagttgagaggggcaagcacca

SEQ ID NO: 672307 - DNA, 25 bp, Homo sapien
aggggcaagcaccaagagaggacca

SEQ ID NO: 672308 - DNA, 25 bp, Homo sapien
cttaagatgctaatcacagccagtt

SEQ ID NO: 672309 - DNA, 25 bp, Homo sapien
ccagttttcttcttgcgccaagaat

SEQ ID NO: 672310 - DNA, 25 bp, Homo sapien
tcttgcgccaagaatatttctattt

SEQ ID NO: 672311 - DNA, 25 bp, Homo sapien
atttctatttatcaagcctcggcag

SEQ ID NO: 672312 - DNA, 25 bp, Homo sapien
atgtcagcccttttggctgggcttc

SEQ ID NO: 672313 - DNA, 25 bp, Homo sapien
gtcttccgcatgtcagcccttttgg

SEQ ID NO: 672314 - DNA, 25 bp, Homo sapien
ctcctttgaattagaggagcttctg

SEQ ID NO: 672315 - DNA, 25 bp, Homo sapien
acagagctcatctctttatccagct

SEQ ID NO: 672316 - DNA, 25 bp, Homo sapien
ggatatgatgttcccatatcgattc

SEQ ID NO: 672317 - DNA, 25 bp, Homo sapien
ttggctgtgtcccacgaagctgtct

SEQ ID NO: 672318 - DNA, 25 bp, Homo sapien
acgaagctgtctgcccctctggtaa

SEQ ID NO: 672319 - DNA, 25 bp, Homo sapien
attcttattgcggttttcatcctcc

SEQ ID NO: 672320 - DNA, 25 bp, Homo sapien
gcagcagttacatgggacacagata

SEQ ID NO: 672321 - DNA, 25 bp, Homo sapien
tcttctgactaccatggcagcagtt

SEQ ID NO: 672322 - DNA, 25 bp, Homo sapien
tgctgtgatgcttagggttttgctg

SEQ ID NO: 672323 - DNA, 25 bp, Homo sapien
gacacagataactcggctctccagc

SEQ ID NO: 672324 - DNA, 25 bp, Homo sapien
caccacacagggatgaatgctttaa

SEQ ID NO: 672325 - DNA, 25 bp, Homo sapien
gatctgtgactcctatgctcaggag

SEQ ID NO: 672326 - DNA, 25 bp, Homo sapien
tattctgggctggacattgcgggct

SEQ ID NO: 672327 - DNA, 25 bp, Homo sapien
gaggattaccgagatatcacaggag

SEQ ID NO: 672328 - DNA, 25 bp, Homo sapien
gtcctttactgcagtccttctctat

SEQ ID NO: 672329 - DNA, 25 bp, Homo sapien
gcaaatcctttgtgttagggatgct

SEQ ID NO: 672330 - DNA, 25 bp, Homo sapien
gaagaacaacgttgtattgagctgc

SEQ ID NO: 672331 - DNA, 25 bp, Homo sapien
tcggtaacaaccactacctgcaaat

SEQ ID NO: 672332 - DNA, 25 bp, Homo sapien
gcctctcttcatctgcgtgatgtgc

SEQ ID NO: 672333 - DNA, 25 bp, Homo sapien
cagcaagtcagccacccggatggcg

SEQ ID NO: 672334 - DNA, 25 bp, Homo sapien
tggtcccgggggtagctcatctcca

SEQ ID NO: 672335 - DNA, 25 bp, Homo sapien
tcacaggtgcggtagggatgagtct

SEQ ID NO: 672336 - DNA, 25 bp, Homo sapien
aggcagaacagatcatcacctatag

SEQ ID NO: 672337 - DNA, 25 bp, Homo sapien
agctttgccctttgtcctccctgtc

SEQ ID NO: 672338 - DNA, 25 bp, Homo sapien
tcatcacctatagaagctttgccct

SEQ ID NO: 672339 - DNA, 25 bp, Homo sapien
gaacagatcatcacctatagaagct

SEQ ID NO: 672340 - DNA, 25 bp, Homo sapien
gctgtgttggtagatctaagtatca

SEQ ID NO: 672341 - DNA, 25 bp, Homo sapien
tagggaaactgcaaaaggattggag

SEQ ID NO: 672342 - DNA, 25 bp, Homo sapien
aaggattggagatacactccttccc

SEQ ID NO: 672343 - DNA, 25 bp, Homo sapien
ctggcctggctgtgttggtagatct

SEQ ID NO: 672344 - DNA, 25 bp, Homo sapien
ccacaacacatttcaagggcacaga

SEQ ID NO: 672345 - DNA, 25 bp, Homo sapien
accacaacacatttcaagggcacag

SEQ ID NO: 672346 - DNA, 25 bp, Homo sapien
gaccacaacacatttcaagggcaca

SEQ ID NO: 672347 - DNA, 25 bp, Homo sapien
cccttgaagccagtgtgaacctgct

SEQ ID NO: 672348 - DNA, 25 bp, Homo sapien
gaggaatctccttctttaaagactc

SEQ ID NO: 672349 - DNA, 25 bp, Homo sapien
taacagatggtgcaaggcagatcca

SEQ ID NO: 672350 - DNA, 25 bp, Homo sapien
cagatccagagactgtgaatgtgca

SEQ ID NO: 672351 - DNA, 25 bp, Homo sapien
catgaatagctctcatcgaaggcat

SEQ ID NO: 672352 - DNA, 25 bp, Homo sapien
tcatgaatagctctcatcgaaggca

SEQ ID NO: 672353 - DNA, 25 bp, Homo sapien
gtcatgaatagctctcatcgaaggc

SEQ ID NO: 672354 - DNA, 25 bp, Homo sapien
tcctgtgatggtgtgattggaaatg

SEQ ID NO: 672355 - DNA, 25 bp, Homo sapien
cactcctgtgatggtgtgattggaa

SEQ ID NO: 672356 - DNA, 25 bp, Homo sapien
gaatatcactcctgtgatggtgtga

SEQ ID NO: 672357 - DNA, 25 bp, Homo sapien
ccttccagcgaatatcactcctgtg

SEQ ID NO: 672358 - DNA, 25 bp, Homo sapien
cactggatgaccatttgggtctcca

SEQ ID NO: 672359 - DNA, 25 bp, Homo sapien
tcactggatgaccatttgggtctcc

SEQ ID NO: 672360 - DNA, 25 bp, Homo sapien
cctgtctgtgcgtacatccacttgg

SEQ ID NO: 672361 - DNA, 25 bp, Homo sapien
gatgattccggcagaacctgtctgt

SEQ ID NO: 672362 - DNA, 25 bp, Homo sapien
tgtgcgtacatccacttggcagctg

SEQ ID NO: 672363 - DNA, 25 bp, Homo sapien
atgattccggcagaacctgtctgtg

SEQ ID NO: 672364 - DNA, 25 bp, Homo sapien
ggtggtgggtttgtcggcagaggcc

SEQ ID NO: 672365 - DNA, 25 bp, Homo sapien
catcattgcggctggcgctgagctt

SEQ ID NO: 672366 - DNA, 25 bp, Homo sapien
aagagaagccttcatcattgcggct

SEQ ID NO: 672367 - DNA, 25 bp, Homo sapien
aatccgttgacgtcctgagaactag

SEQ ID NO: 672368 - DNA, 25 bp, Homo sapien
tttttccctgaatgtgggagccatg

SEQ ID NO: 672369 - DNA, 25 bp, Homo sapien
agtttttccctgaatgtgggagcca

SEQ ID NO: 672370 - DNA, 25 bp, Homo sapien
ctagagtttttccctgaatgtggga

SEQ ID NO: 672371 - DNA, 25 bp, Homo sapien
ttccctgaatgtgggagccatgccc

SEQ ID NO: 672372 - DNA, 25 bp, Homo sapien
ctcctctgggccatcctccattgca

SEQ ID NO: 672373 - DNA, 25 bp, Homo sapien
catcctccattgcaatctccagata

SEQ ID NO: 672374 - DNA, 25 bp, Homo sapien
cattgcaatctccagataaactttc

SEQ ID NO: 672375 - DNA, 25 bp, Homo sapien
gggagacactgatcaggcactcttc

SEQ ID NO: 672376 - DNA, 25 bp, Homo sapien
cttttcttcatcagtcacctcaaac

SEQ ID NO: 672377 - DNA, 25 bp, Homo sapien
tttcttcatcagtcacctcaaacat

SEQ ID NO: 672378 - DNA, 25 bp, Homo sapien
tccaacttttcttcatcagtcacct

SEQ ID NO: 672379 - DNA, 25 bp, Homo sapien
aacttttcttcatcagtcacctcaa

SEQ ID NO: 672380 - DNA, 25 bp, Homo sapien
cagacggcgtttgcaatggagattc

SEQ ID NO: 672381 - DNA, 25 bp, Homo sapien
tgttctccagcccaagacagacggc

SEQ ID NO: 672382 - DNA, 25 bp, Homo sapien
tgcaatggagattcatggtctttat

SEQ ID NO: 672383 - DNA, 25 bp, Homo sapien
caagacaacagacagccggtgggct

SEQ ID NO: 672384 - DNA, 25 bp, Homo sapien
tcagaaggctatagaaaagcccagg

SEQ ID NO: 672385 - DNA, 25 bp, Homo sapien
cagaaggctatagaaaagcccagga

SEQ ID NO: 672386 - DNA, 25 bp, Homo sapien
gcactgcttggaagaccagccacat

SEQ ID NO: 672387 - DNA, 25 bp, Homo sapien
agctctgactcctctcaacatgttg

SEQ ID NO: 672388 - DNA, 25 bp, Homo sapien
gctctgactcctctcaacatgttgc

SEQ ID NO: 672389 - DNA, 25 bp, Homo sapien
acagcactgcttggaagaccagcca

SEQ ID NO: 672390 - DNA, 25 bp, Homo sapien
ctctctcaatcctatcatctccaag

SEQ ID NO: 672391 - DNA, 25 bp, Homo sapien
tctctcaatcctatcatctccaagg

SEQ ID NO: 672392 - DNA, 25 bp, Homo sapien
tctcaatcctatcatctccaaggcc

SEQ ID NO: 672393 - DNA, 25 bp, Homo sapien
ctctctctcaatcctatcatctcca

SEQ ID NO: 672394 - DNA, 25 bp, Homo sapien
gcccaggctcctccactataactaa

SEQ ID NO: 672395 - DNA, 25 bp, Homo sapien
ctttcaggtagccagtatcatgttt

SEQ ID NO: 672396 - DNA, 25 bp, Homo sapien
ataactaaatctttgcccaggactt

SEQ ID NO: 672397 - DNA, 25 bp, Homo sapien
ttcaggtagccagtatcatgtttct

SEQ ID NO: 672398 - DNA, 25 bp, Homo sapien
ctgtctgtctgctttgccagttcct

SEQ ID NO: 672399 - DNA, 25 bp, Homo sapien
tgtctgctttgccagttcctctcct

SEQ ID NO: 672400 - DNA, 25 bp, Homo sapien
tctgtctgctttgccagttcctctc

SEQ ID NO: 672401 - DNA, 25 bp, Homo sapien
tctcctcttctgattctttaatcat

SEQ ID NO: 672402 - DNA, 25 bp, Homo sapien
aataggagtaggaataagcatttct

SEQ ID NO: 672403 - DNA, 25 bp, Homo sapien
taataggagtaggaataagcatttc

SEQ ID NO: 672404 - DNA, 25 bp, Homo sapien
aagtaataggagtaggaataagcat

SEQ ID NO: 672405 - DNA, 25 bp, Homo sapien
gtaataggagtaggaataagcattt

SEQ ID NO: 672406 - DNA, 25 bp, Homo sapien
gcaggtccagtgcctggaaggtgat

SEQ ID NO: 672407 - DNA, 25 bp, Homo sapien
gtccagtgcctggaaggtgattccc

SEQ ID NO: 672408 - DNA, 25 bp, Homo sapien
caggtccagtgcctggaaggtgatt

SEQ ID NO: 672409 - DNA, 25 bp, Homo sapien
ctcactgctggcaggtccagtgcct

SEQ ID NO: 672410 - DNA, 25 bp, Homo sapien
tggaggggttgtagcagtgttggcc

SEQ ID NO: 672411 - DNA, 25 bp, Homo sapien
gttgtagcagtgttggcctctgtga

SEQ ID NO: 672412 - DNA, 25 bp, Homo sapien
gcagtgttggcctctgtgaacttct

SEQ ID NO: 672413 - DNA, 25 bp, Homo sapien
ctctgtgaacttctgagtccaagca

SEQ ID NO: 672414 - DNA, 25 bp, Homo sapien
gcctcttaaacagaggatgctggtg

SEQ ID NO: 672415 - DNA, 25 bp, Homo sapien
tcaagccttgtgaatgcctcttaaa

SEQ ID NO: 672416 - DNA, 25 bp, Homo sapien
atctgtgtgcatgctttcgtgagaa

SEQ ID NO: 672417 - DNA, 25 bp, Homo sapien
tcttggaaataagggaggaatctgt

SEQ ID NO: 672418 - DNA, 25 bp, Homo sapien
acatgaggaggccagcgatcacgcc

SEQ ID NO: 672419 - DNA, 25 bp, Homo sapien
gctccacagtgttagaattctgggt

SEQ ID NO: 672420 - DNA, 25 bp, Homo sapien
gccagccatcttcacggtgttgtcc

SEQ ID NO: 672421 - DNA, 25 bp, Homo sapien
tgatggtgagcatcacgcccaggag

SEQ ID NO: 672422 - DNA, 25 bp, Homo sapien
tctctgacgtcatcttttacctcaa

SEQ ID NO: 672423 - DNA, 25 bp, Homo sapien
ttccccttaattccagtaatactca

SEQ ID NO: 672424 - DNA, 25 bp, Homo sapien
tccccttaattccagtaatactcat

SEQ ID NO: 672425 - DNA, 25 bp, Homo sapien
tctgacgtcatcttttacctcaact

SEQ ID NO: 672426 - DNA, 25 bp, Homo sapien
actcttggtgagagaaattatccct

SEQ ID NO: 672427 - DNA, 25 bp, Homo sapien
cttggtgagagaaattatccctatt

SEQ ID NO: 672428 - DNA, 25 bp, Homo sapien
ttatccctattatctttagagccat

SEQ ID NO: 672429 - DNA, 25 bp, Homo sapien
ggtgagagaaattatccctattatc

SEQ ID NO: 672430 - DNA, 25 bp, Homo sapien
gcaacatgccgcttgcagctagcat

SEQ ID NO: 672431 - DNA, 25 bp, Homo sapien
ccgcttgcagctagcatcagagtgc

SEQ ID NO: 672432 - DNA, 25 bp, Homo sapien
catgccgcttgcagctagcatcaga

SEQ ID NO: 672433 - DNA, 25 bp, Homo sapien
gaagcaaagatctgcccatctgggg

SEQ ID NO: 672434 - DNA, 25 bp, Homo sapien
ccagttgactatctctgcatgcaat

SEQ ID NO: 672435 - DNA, 25 bp, Homo sapien
ctgcatgcaatctggagataatggg

SEQ ID NO: 672436 - DNA, 25 bp, Homo sapien
tgcagagatcaaactgtctgaactt

SEQ ID NO: 672437 - DNA, 25 bp, Homo sapien
gactatctctgcatgcaatctggag

SEQ ID NO: 672438 - DNA, 25 bp, Homo sapien
atcttgtttagtctcagaggcctct

SEQ ID NO: 672439 - DNA, 25 bp, Homo sapien
ttatcttgtttagtctcagaggcct

SEQ ID NO: 672440 - DNA, 25 bp, Homo sapien
tatcttgtttagtctcagaggcctc

SEQ ID NO: 672441 - DNA, 25 bp, Homo sapien
tcttgtttagtctcagaggcctctg

SEQ ID NO: 672442 - DNA, 25 bp, Homo sapien
ggtctacaacgtaaatggtgcccca

SEQ ID NO: 672443 - DNA, 25 bp, Homo sapien
tctacaacgtaaatggtgccccata

SEQ ID NO: 672444 - DNA, 25 bp, Homo sapien
caacgtaaatggtgccccataaggg

SEQ ID NO: 672445 - DNA, 25 bp, Homo sapien
tgtacggtctacaacgtaaatggtg

SEQ ID NO: 672446 - DNA, 25 bp, Homo sapien
ccggggtcacctgggcgctgcccat

SEQ ID NO: 672447 - DNA, 25 bp, Homo sapien
gtgaacaaaactgcaattcttgtgg

SEQ ID NO: 672448 - DNA, 25 bp, Homo sapien
tgaaaacgtgcagcacggtgaacaa

SEQ ID NO: 672449 - DNA, 25 bp, Homo sapien
cacacatgaaaacgtgcagcacggt

SEQ ID NO: 672450 - DNA, 25 bp, Homo sapien
aaacacacatgaaaacgtgcagcac

SEQ ID NO: 672451 - DNA, 25 bp, Homo sapien
ttctgctccaggacttagcttgaat

SEQ ID NO: 672452 - DNA, 25 bp, Homo sapien
gctccaggacttagcttgaatactc

SEQ ID NO: 672453 - DNA, 25 bp, Homo sapien
tctgctccaggacttagcttgaata

SEQ ID NO: 672454 - DNA, 25 bp, Homo sapien
tgctccaggacttagcttgaatact

SEQ ID NO: 672455 - DNA, 25 bp, Homo sapien
ctaactgccactcgggcgcacccag

SEQ ID NO: 672456 - DNA, 25 bp, Homo sapien
ttttctaactgccactcgggcgcac

SEQ ID NO: 672457 - DNA, 25 bp, Homo sapien
agctgtgttcccttgacggctggcg

SEQ ID NO: 672458 - DNA, 25 bp, Homo sapien
cagctgtgttcccttgacggctggc

SEQ ID NO: 672459 - DNA, 25 bp, Homo sapien
gcaagttgcttcatcaccagagtac

SEQ ID NO: 672460 - DNA, 25 bp, Homo sapien
tcagggaccagacagcggcaagttg

SEQ ID NO: 672461 - DNA, 25 bp, Homo sapien
agtctgacatatggacttcagggtc

SEQ ID NO: 672462 - DNA, 25 bp, Homo sapien
gagtactggccttgagtctgacata

SEQ ID NO: 672463 - DNA, 25 bp, Homo sapien
agccagacgaacacagttgattttg

SEQ ID NO: 672464 - DNA, 25 bp, Homo sapien
gtagccagacgaacacagttgattt

SEQ ID NO: 672465 - DNA, 25 bp, Homo sapien
tagccagacgaacacagttgatttt

SEQ ID NO: 672466 - DNA, 25 bp, Homo sapien
gttgatgttaatggcagggccagca

SEQ ID NO: 672467 - DNA, 25 bp, Homo sapien
ttgttgatgttaatggcagggccag

SEQ ID NO: 672468 - DNA, 25 bp, Homo sapien
ggtgtttcaagattgactgagggac

SEQ ID NO: 672469 - DNA, 25 bp, Homo sapien
tgactgagggacttaggctggccat

SEQ ID NO: 672470 - DNA, 25 bp, Homo sapien
gagtggatgtttacccgattgagat

SEQ ID NO: 672471 - DNA, 25 bp, Homo sapien
agagctgtgagtggatgtttacccg

SEQ ID NO: 672472 - DNA, 25 bp, Homo sapien
ggatgtttacccgattgagattttc

SEQ ID NO: 672473 - DNA, 25 bp, Homo sapien
aggctctggtgacagacaagagctg

SEQ ID NO: 672474 - DNA, 25 bp, Homo sapien
cacttcaccaaatcttgcttctgtc

SEQ ID NO: 672475 - DNA, 25 bp, Homo sapien
acacacttcaccaaatcttgcttct

SEQ ID NO: 672476 - DNA, 25 bp, Homo sapien
caggctgttccccacacacttcacc

SEQ ID NO: 672477 - DNA, 25 bp, Homo sapien
gcttctcagttctccatgttataca

SEQ ID NO: 672478 - DNA, 25 bp, Homo sapien
gaagtcgctcctccttgacaaccag

SEQ ID NO: 672479 - DNA, 25 bp, Homo sapien
gaggcattccgatagctcacgggca

SEQ ID NO: 672480 - DNA, 25 bp, Homo sapien
tattgtcacccactgtaaatggctg

SEQ ID NO: 672481 - DNA, 25 bp, Homo sapien
tcaataatgtcagctgccctccgtg

SEQ ID NO: 672482 - DNA, 25 bp, Homo sapien
ttgttagctctaatggtgtcaaccc

SEQ ID NO: 672483 - DNA, 25 bp, Homo sapien
taatggtgtcaacccaacttctcct

SEQ ID NO: 672484 - DNA, 25 bp, Homo sapien
acccaacttctcctatgtggaagca

SEQ ID NO: 672485 - DNA, 25 bp, Homo sapien
tctggaagaatgagcttgttagctc

SEQ ID NO: 672486 - DNA, 25 bp, Homo sapien
ctctccataggctttggaaaagcct

SEQ ID NO: 672487 - DNA, 25 bp, Homo sapien
ctttggaaaagcctgctgcttgacc

SEQ ID NO: 672488 - DNA, 25 bp, Homo sapien
ttggaaaagcctgctgcttgaccat

SEQ ID NO: 672489 - DNA, 25 bp, Homo sapien
aggctttggaaaagcctgctgcttg

SEQ ID NO: 672490 - DNA, 25 bp, Homo sapien
gcagataacatgactagacctaata

SEQ ID NO: 672491 - DNA, 25 bp, Homo sapien
gaaaaagcggctggatcaatatggg

SEQ ID NO: 672492 - DNA, 25 bp, Homo sapien
ttagtactggcttcacactcgctgc

SEQ ID NO: 672493 - DNA, 25 bp, Homo sapien
ccatggaaaacaagctagaagatgt

SEQ ID NO: 672494 - DNA, 25 bp, Homo sapien
attctgctgcaagagtggagatggt

SEQ ID NO: 672495 - DNA, 25 bp, Homo sapien
atgtggccagtgtgaaccggatgtt

SEQ ID NO: 672496 - DNA, 25 bp, Homo sapien
ggagctggtgcattctgctgcaaga

SEQ ID NO: 672497 - DNA, 25 bp, Homo sapien
ctgctgcaagagtggagatggtcct

SEQ ID NO: 672498 - DNA, 25 bp, Homo sapien
gaacaaagtctaaatccagagtgaa

SEQ ID NO: 672499 - DNA, 25 bp, Homo sapien
caatgttccacactcccttctgaac

SEQ ID NO: 672500 - DNA, 25 bp, Homo sapien
aaagtctaaatccagagtgaagacc

SEQ ID NO: 672501 - DNA, 25 bp, Homo sapien
tctaaatccagagtgaagaccttct

SEQ ID NO: 672502 - DNA, 25 bp, Homo sapien
gggactgagcgggtttcagcatcac

SEQ ID NO: 672503 - DNA, 25 bp, Homo sapien
caatggggtgtctgtgtcgtactca

SEQ ID NO: 672504 - DNA, 25 bp, Homo sapien
cactgtgatggtcgtgtctgtctca

SEQ ID NO: 672505 - DNA, 25 bp, Homo sapien
ctgacaggagctccccgggactgag

SEQ ID NO: 672506 - DNA, 25 bp, Homo sapien
tttcctttttcctttctagcagaga

SEQ ID NO: 672507 - DNA, 25 bp, Homo sapien
tcctttttcctttctagcagagata

SEQ ID NO: 672508 - DNA, 25 bp, Homo sapien
caaggaaaatcaggaagtgggggtg

SEQ ID NO: 672509 - DNA, 25 bp, Homo sapien
cctttttcctttctagcagagatac

SEQ ID NO: 672510 - DNA, 25 bp, Homo sapien
tcattccggagcttgaacactttcc

SEQ ID NO: 672511 - DNA, 25 bp, Homo sapien
ttttggtggcaatccgagtggtgac

SEQ ID NO: 672512 - DNA, 25 bp, Homo sapien
ctcgagaggtcagcacttgggtcca

SEQ ID NO: 672513 - DNA, 25 bp, Homo sapien
taggtggtccctgggtacagaccca

SEQ ID NO: 672514 - DNA, 25 bp, Homo sapien
aggttgagaggcccttctaaggaga

SEQ ID NO: 672515 - DNA, 25 bp, Homo sapien
gaggccaagtcagggatcaggttga

SEQ ID NO: 672516 - DNA, 25 bp, Homo sapien
ggttgagaggcccttctaaggagaa

SEQ ID NO: 672517 - DNA, 25 bp, Homo sapien
caagtcagggatcaggttgagaggc

SEQ ID NO: 672518 - DNA, 25 bp, Homo sapien
cagttcttcttctgtcccgttcttc

SEQ ID NO: 672519 - DNA, 25 bp, Homo sapien
tatgggtatctggtgctccccaagg

SEQ ID NO: 672520 - DNA, 25 bp, Homo sapien
gaagtggaactgaatgtcaatgcct

SEQ ID NO: 672521 - DNA, 25 bp, Homo sapien
taacccgtgtgttatgagccatgga

SEQ ID NO: 672522 - DNA, 25 bp, Homo sapien
ctgtgtgggctgataagggcttctc

SEQ ID NO: 672523 - DNA, 25 bp, Homo sapien
cccttgagctacacaaactctcagg

SEQ ID NO: 672524 - DNA, 25 bp, Homo sapien
aggtgtcaagccttccccttgagct

SEQ ID NO: 672525 - DNA, 25 bp, Homo sapien
tgtgccaggtgtcaagccttcccct

SEQ ID NO: 672526 - DNA, 25 bp, Homo sapien
gctacacaaactctcaggtatacca

SEQ ID NO: 672527 - DNA, 25 bp, Homo sapien
aaaagctcagacttgggtgttgggc

SEQ ID NO: 672528 - DNA, 25 bp, Homo sapien
ggtgttgggcggatatcagcagtgt

SEQ ID NO: 672529 - DNA, 25 bp, Homo sapien
gattcaggaggtacaatggtgaaaa

SEQ ID NO: 672530 - DNA, 25 bp, Homo sapien
ccatggccccttctgaaagggaaga

SEQ ID NO: 672531 - DNA, 25 bp, Homo sapien
tcctgtagtgatagggtacgccaca

SEQ ID NO: 672532 - DNA, 25 bp, Homo sapien
ggcacggacactaccagcaaaggtt

SEQ ID NO: 672533 - DNA, 25 bp, Homo sapien
ctggacgactcccatcacagaggca

SEQ ID NO: 672534 - DNA, 25 bp, Homo sapien
ggagggaccaaagaccagcgattct

SEQ ID NO: 672535 - DNA, 25 bp, Homo sapien
ttgtttcctccctctattctgtaag

SEQ ID NO: 672536 - DNA, 25 bp, Homo sapien
ttcctccctctattctgtaagtcaa

SEQ ID NO: 672537 - DNA, 25 bp, Homo sapien
tctattctgtaagtcaactaagaac

SEQ ID NO: 672538 - DNA, 25 bp, Homo sapien
ccctctattctgtaagtcaactaag

SEQ ID NO: 672539 - DNA, 25 bp, Homo sapien
tcccaggctctcaggtatgtactgc

SEQ ID NO: 672540 - DNA, 25 bp, Homo sapien
ctggacacaaagatgggttcccagg

SEQ ID NO: 672541 - DNA, 25 bp, Homo sapien
ggctctcaggtatgtactgccgctc

SEQ ID NO: 672542 - DNA, 25 bp, Homo sapien
ctctcaggtatgtactgccgctcag

SEQ ID NO: 672543 - DNA, 25 bp, Homo sapien
ccctgtgagccggttgagagaatcg

SEQ ID NO: 672544 - DNA, 25 bp, Homo sapien
gaaggcaaggcaacacagtgatgtc

SEQ ID NO: 672545 - DNA, 25 bp, Homo sapien
tgagactcaatctcctgtgccaggg

SEQ ID NO: 672546 - DNA, 25 bp, Homo sapien
cctatgccaggaagtctaagaattc

SEQ ID NO: 672547 - DNA, 25 bp, Homo sapien
gccgagggtcaaaatatgccccaaa

SEQ ID NO: 672548 - DNA, 25 bp, Homo sapien
gagggtcaaaatatgccccaaagaa

SEQ ID NO: 672549 - DNA, 25 bp, Homo sapien
atccaggtgccgagggtcaaaatat

SEQ ID NO: 672550 - DNA, 25 bp, Homo sapien
caggtgccgagggtcaaaatatgcc

SEQ ID NO: 672551 - DNA, 25 bp, Homo sapien
gaaaagatagcaaggggagtgtagt

SEQ ID NO: 672552 - DNA, 25 bp, Homo sapien
tagtgtggctgtaatgtaaagtctg

SEQ ID NO: 672553 - DNA, 25 bp, Homo sapien
agtgtagtgtggctgtaatgtaaag

SEQ ID NO: 672554 - DNA, 25 bp, Homo sapien
gggagtgtagtgtggctgtaatgta

SEQ ID NO: 672555 - DNA, 25 bp, Homo sapien
tgcaacacagtccactaggattaca

SEQ ID NO: 672556 - DNA, 25 bp, Homo sapien
ttcttgttggcccataatgctgacg

SEQ ID NO: 672557 - DNA, 25 bp, Homo sapien
atgctgacgtccctgcagatactgc

SEQ ID NO: 672558 - DNA, 25 bp, Homo sapien
tgttgtgaaaaggattggaaactgc

SEQ ID NO: 672559 - DNA, 25 bp, Homo sapien
tagggaaccctgatgccttaatcaa

SEQ ID NO: 672560 - DNA, 25 bp, Homo sapien
tataagtgcctgtccgcaattgcga

SEQ ID NO: 672561 - DNA, 25 bp, Homo sapien
ttccatgaactctgaacagcttgtc

SEQ ID NO: 672562 - DNA, 25 bp, Homo sapien
caaaagcagggttctggaagagtct

SEQ ID NO: 672563 - DNA, 25 bp, Homo sapien
atagttgtctcccatagaatccatg

SEQ ID NO: 672564 - DNA, 25 bp, Homo sapien
tcatagttgtctcccatagaatcca

SEQ ID NO: 672565 - DNA, 25 bp, Homo sapien
catcatagttgtctcccatagaatc

SEQ ID NO: 672566 - DNA, 25 bp, Homo sapien
agttgtctcccatagaatccatggg

SEQ ID NO: 672567 - DNA, 25 bp, Homo sapien
ctcgtagagcgtgatgaccccattg

SEQ ID NO: 672568 - DNA, 25 bp, Homo sapien
agggccccccttggatggattctag

SEQ ID NO: 672569 - DNA, 25 bp, Homo sapien
tggatggattctagaggaacagctc

SEQ ID NO: 672570 - DNA, 25 bp, Homo sapien
gtgatgaccccattggtctcattgg

SEQ ID NO: 672571 - DNA, 25 bp, Homo sapien
actaataagtgcaacctttcctggg

SEQ ID NO: 672572 - DNA, 25 bp, Homo sapien
gccagcattttgaactaataagtgc

SEQ ID NO: 672573 - DNA, 25 bp, Homo sapien
tctataagccggtcagtcttcctgc

SEQ ID NO: 672574 - DNA, 25 bp, Homo sapien
cctgctggatttcactattcttaca

SEQ ID NO: 672575 - DNA, 25 bp, Homo sapien
gaactggaagttttacagagtctac

SEQ ID NO: 672576 - DNA, 25 bp, Homo sapien
actggaagttttacagagtctactc

SEQ ID NO: 672577 - DNA, 25 bp, Homo sapien
ggaagttttacagagtctactccaa

SEQ ID NO: 672578 - DNA, 25 bp, Homo sapien
gaagttttacagagtctactccaag

SEQ ID NO: 672579 - DNA, 25 bp, Homo sapien
ggctctgatgtctacgatttccacg

SEQ ID NO: 672580 - DNA, 25 bp, Homo sapien
ttgtagctatggcagcgggtcaccg

SEQ ID NO: 672581 - DNA, 25 bp, Homo sapien
catactggtactgcacggtgaggtt

SEQ ID NO: 672582 - DNA, 25 bp, Homo sapien
gctgctggttgaacacatactggta

SEQ ID NO: 672583 - DNA, 25 bp, Homo sapien
acacccagtttatccatgcgttcat

SEQ ID NO: 672584 - DNA, 25 bp, Homo sapien
tcctttccttgactacacagttcat

SEQ ID NO: 672585 - DNA, 25 bp, Homo sapien
tcatcatgacccattaaccctgctt

SEQ ID NO: 672586 - DNA, 25 bp, Homo sapien
catgacccattaaccctgctttagg

SEQ ID NO: 672587 - DNA, 25 bp, Homo sapien
cgtgtaaatacagccaagcctagag

SEQ ID NO: 672588 - DNA, 25 bp, Homo sapien
gaccttcttgagtaatagcccacag

SEQ ID NO: 672589 - DNA, 25 bp, Homo sapien
gataaagccctgtccgtatgacctt

SEQ ID NO: 672590 - DNA, 25 bp, Homo sapien
tacattcgggttggtgcaaacaagt

SEQ ID NO: 672591 - DNA, 25 bp, Homo sapien
tctacatcagctcttattaaagcac

SEQ ID NO: 672592 - DNA, 25 bp, Homo sapien
cctctttctacatcagctcttatta

SEQ ID NO: 672593 - DNA, 25 bp, Homo sapien
ctcttattaaagcaccatgtccatc

SEQ ID NO: 672594 - DNA, 25 bp, Homo sapien
tcagctcttattaaagcaccatgtc

SEQ ID NO: 672595 - DNA, 25 bp, Homo sapien
agaggctatgaaagagagtctcttc

SEQ ID NO: 672596 - DNA, 25 bp, Homo sapien
gaataatgaagtagaggctatgaaa

SEQ ID NO: 672597 - DNA, 25 bp, Homo sapien
gcggaggacggtgggtgagaacata

SEQ ID NO: 672598 - DNA, 25 bp, Homo sapien
ataaggcatggatttagcggaggac

SEQ ID NO: 672599 - DNA, 25 bp, Homo sapien
tagtccttgtcataaacctgagtgc

SEQ ID NO: 672600 - DNA, 25 bp, Homo sapien
gaaacttaaagatcctcatgacccc

SEQ ID NO: 672601 - DNA, 25 bp, Homo sapien
aaggtacttcctgacccagagaacg

SEQ ID NO: 672602 - DNA, 25 bp, Homo sapien
tataggcacccaacattgtaccagg

SEQ ID NO: 672603 - DNA, 25 bp, Homo sapien
ggtgtccagtaagcaggcttcctct

SEQ ID NO: 672604 - DNA, 25 bp, Homo sapien
tcatacacgctaccactctggaatg

SEQ ID NO: 672605 - DNA, 25 bp, Homo sapien
tctctctgtccagatggacagtttc

SEQ ID NO: 672606 - DNA, 25 bp, Homo sapien
tgaagggtgcataaagtgtggcatt

SEQ ID NO: 672607 - DNA, 25 bp, Homo sapien
tccgtagtaccggtcaagccacaca

SEQ ID NO: 672608 - DNA, 25 bp, Homo sapien
tggaattccgtagtaccggtcaagc

SEQ ID NO: 672609 - DNA, 25 bp, Homo sapien
agtaccggtcaagccacacaccttt

SEQ ID NO: 672610 - DNA, 25 bp, Homo sapien
gaattccgtagtaccggtcaagcca

SEQ ID NO: 672611 - DNA, 25 bp, Homo sapien
ttttcctctcatgcatgctgtcttc

SEQ ID NO: 672612 - DNA, 25 bp, Homo sapien
cttttcctctcatgcatgctgtctt

SEQ ID NO: 672613 - DNA, 25 bp, Homo sapien
tctgagaccaccaccagccaaatgt

SEQ ID NO: 672614 - DNA, 25 bp, Homo sapien
ccgcaccagggtctgagaccaccac

SEQ ID NO: 672615 - DNA, 25 bp, Homo sapien
ctccgcaccagggtctgagaccacc

SEQ ID NO: 672616 - DNA, 25 bp, Homo sapien
ctactccgcaccagggtctgagacc

SEQ ID NO: 672617 - DNA, 25 bp, Homo sapien
ctctgaattggcaccagcgccctgt

SEQ ID NO: 672618 - DNA, 25 bp, Homo sapien
accagcgccctgtggttaacttgtg

SEQ ID NO: 672619 - DNA, 25 bp, Homo sapien
cttcctgtctgtgggctacttcctc

SEQ ID NO: 672620 - DNA, 25 bp, Homo sapien
gtggttaacttgtgtctggcagcaa

SEQ ID NO: 672621 - DNA, 25 bp, Homo sapien
cattcactataccaaccagaataaa

SEQ ID NO: 672622 - DNA, 25 bp, Homo sapien
taaaactgcttcattaactctgaag

SEQ ID NO: 672623 - DNA, 25 bp, Homo sapien
gtgaacattcactataccaaccaga

SEQ ID NO: 672624 - DNA, 25 bp, Homo sapien
aacattcactataccaaccagaata

SEQ ID NO: 672625 - DNA, 25 bp, Homo sapien
tctctcaggtagtgaaaaccactta

SEQ ID NO: 672626 - DNA, 25 bp, Homo sapien
gctctcctcggcacataaggatatt

SEQ ID NO: 672627 - DNA, 25 bp, Homo sapien
gggagctccaggtgattaatgcatc

SEQ ID NO: 672628 - DNA, 25 bp, Homo sapien
taaggatattcctcactttaatgtg

SEQ ID NO: 672629 - DNA, 25 bp, Homo sapien
ggcaattccctgcaaagggctctgc

SEQ ID NO: 672630 - DNA, 25 bp, Homo sapien
attggagacgtaactgtacattatc

SEQ ID NO: 672631 - DNA, 25 bp, Homo sapien
tgttcaatcaaaagggtattggaga

SEQ ID NO: 672632 - DNA, 25 bp, Homo sapien
tctttaactggcaattccctgcaaa

SEQ ID NO: 672633 - DNA, 25 bp, Homo sapien
tcagggagaagcagtctaaccaaac

SEQ ID NO: 672634 - DNA, 25 bp, Homo sapien
gaaaaaccttcagacctgagcgagg

SEQ ID NO: 672635 - DNA, 25 bp, Homo sapien
tgtacaggcatacccagtctaacca

SEQ ID NO: 672636 - DNA, 25 bp, Homo sapien
ccattaggaggtgggacgctagcaa

SEQ ID NO: 672637 - DNA, 25 bp, Homo sapien
cttaaactctcatcgaagagtggga

SEQ ID NO: 672638 - DNA, 25 bp, Homo sapien
cagtcccgattgcacaaagaatcca

SEQ ID NO: 672639 - DNA, 25 bp, Homo sapien
gaggacctcaatatttccacatttg

SEQ ID NO: 672640 - DNA, 25 bp, Homo sapien
cacattttaagctatcttggaactg

SEQ ID NO: 672641 - DNA, 25 bp, Homo sapien
ttattaggagtaagatattgaggac

SEQ ID NO: 672642 - DNA, 25 bp, Homo sapien
gaaggatggagttgagggagcaaac

SEQ ID NO: 672643 - DNA, 25 bp, Homo sapien
atcttatttgcaatggtgaaggatg

SEQ ID NO: 672644 - DNA, 25 bp, Homo sapien
gcagggagacaagatgccctggttt

SEQ ID NO: 672645 - DNA, 25 bp, Homo sapien
cagatgcaccggaagtggaaaggac

SEQ ID NO: 672646 - DNA, 25 bp, Homo sapien
cagccaagcattgagggtaatgccc

SEQ ID NO: 672647 - DNA, 25 bp, Homo sapien
gcttggacaactgggtggtgacatt

SEQ ID NO: 672648 - DNA, 25 bp, Homo sapien
tcagggaataatgggagtaagtgtc

SEQ ID NO: 672649 - DNA, 25 bp, Homo sapien
gtcaggcggaggtctgtgccgggca

SEQ ID NO: 672650 - DNA, 25 bp, Homo sapien
caggcggaggtctgtgccgggcagg

SEQ ID NO: 672651 - DNA, 25 bp, Homo sapien
tgtcaggcggaggtctgtgccgggc

SEQ ID NO: 672652 - DNA, 25 bp, Homo sapien
tgcaggcatggtgaacaccaggtgc

SEQ ID NO: 672653 - DNA, 25 bp, Homo sapien
gccatcccaatgtcgttcattccca

SEQ ID NO: 672654 - DNA, 25 bp, Homo sapien
catcccaatgtcgttcattcccact

SEQ ID NO: 672655 - DNA, 25 bp, Homo sapien
tttgccatcccaatgtcgttcattc

SEQ ID NO: 672656 - DNA, 25 bp, Homo sapien
tcccaatgtcgttcattcccacttt

SEQ ID NO: 672657 - DNA, 25 bp, Homo sapien
aatgattgatttaagtggttgtggc

SEQ ID NO: 672658 - DNA, 25 bp, Homo sapien
gcaaagaccgatctgcacaggaacc

SEQ ID NO: 672659 - DNA, 25 bp, Homo sapien
tggttgtggctttcagaaactggca

SEQ ID NO: 672660 - DNA, 25 bp, Homo sapien
aatgtgagcaaagaccgatctgcac

SEQ ID NO: 672661 - DNA, 25 bp, Homo sapien
agcagatctgggacctcagcaaagc

SEQ ID NO: 672662 - DNA, 25 bp, Homo sapien
ggccagcccagcagatctgggacct

SEQ ID NO: 672663 - DNA, 25 bp, Homo sapien
caaggctgatgtggtagggccagcc

SEQ ID NO: 672664 - DNA, 25 bp, Homo sapien
aggctgatgtggtagggccagccca

SEQ ID NO: 672665 - DNA, 25 bp, Homo sapien
cctggtccatcaatggcttcaggga

SEQ ID NO: 672666 - DNA, 25 bp, Homo sapien
tggtccatcaatggcttcagggatc

SEQ ID NO: 672667 - DNA, 25 bp, Homo sapien
ggagcacatgaggctcttgcctggt

SEQ ID NO: 672668 - DNA, 25 bp, Homo sapien
gagcacatgaggctcttgcctggtc

SEQ ID NO: 672669 - DNA, 25 bp, Homo sapien
tgtgctttcaaaacgtttgctttca

SEQ ID NO: 672670 - DNA, 25 bp, Homo sapien
gtgctttcaaaacgtttgctttcag

SEQ ID NO: 672671 - DNA, 25 bp, Homo sapien
gctttcaaaacgtttgctttcagtc

SEQ ID NO: 672672 - DNA, 25 bp, Homo sapien
aatgtgctttcaaaacgtttgcttt

SEQ ID NO: 672673 - DNA, 25 bp, Homo sapien
ttatttataataattggcttgccat

SEQ ID NO: 672674 - DNA, 25 bp, Homo sapien
tatttataataattggcttgccatt

SEQ ID NO: 672675 - DNA, 25 bp, Homo sapien
tttataataattggcttgccattat

SEQ ID NO: 672676 - DNA, 25 bp, Homo sapien
atttataataattggcttgccatta

SEQ ID NO: 672677 - DNA, 25 bp, Homo sapien
gaagatcaaatccagaaccaggcag

SEQ ID NO: 672678 - DNA, 25 bp, Homo sapien
cagggagaagatcaaatccagaacc

SEQ ID NO: 672679 - DNA, 25 bp, Homo sapien
aataggccaaggatccaaacgacat

SEQ ID NO: 672680 - DNA, 25 bp, Homo sapien
taataagggaactgacctggcaata

SEQ ID NO: 672681 - DNA, 25 bp, Homo sapien
cttgatgtccctgtctgttatattg

SEQ ID NO: 672682 - DNA, 25 bp, Homo sapien
tctgggctttccaagctttcccact

SEQ ID NO: 672683 - DNA, 25 bp, Homo sapien
gtccctgtctgttatattgctccta

SEQ ID NO: 672684 - DNA, 25 bp, Homo sapien
tatattgctcctaaatttcaggaca

SEQ ID NO: 672685 - DNA, 25 bp, Homo sapien
caatttatcagtacagccttccagg

SEQ ID NO: 672686 - DNA, 25 bp, Homo sapien
atttatcagtacagccttccaggtc

SEQ ID NO: 672687 - DNA, 25 bp, Homo sapien
caagtcccctcccaatttatcagta

SEQ ID NO: 672688 - DNA, 25 bp, Homo sapien
cctcccaatttatcagtacagcctt

SEQ ID NO: 672689 - DNA, 25 bp, Homo sapien
tgtatttgggcacagatacagggga

SEQ ID NO: 672690 - DNA, 25 bp, Homo sapien
tgcatcttgtatttgggcacagata

SEQ ID NO: 672691 - DNA, 25 bp, Homo sapien
gtatttgggcacagatacaggggac

SEQ ID NO: 672692 - DNA, 25 bp, Homo sapien
atcttgtatttgggcacagatacag

SEQ ID NO: 672693 - DNA, 25 bp, Homo sapien
gctcaggataactctcccattcttc

SEQ ID NO: 672694 - DNA, 25 bp, Homo sapien
tccataaccgagtatgatcagagca

SEQ ID NO: 672695 - DNA, 25 bp, Homo sapien
aggctccataaccgagtatgatcag

SEQ ID NO: 672696 - DNA, 25 bp, Homo sapien
gctccataaccgagtatgatcagag

SEQ ID NO: 672697 - DNA, 25 bp, Homo sapien
ggctccataaccgagtatgatcaga

SEQ ID NO: 672698 - DNA, 25 bp, Homo sapien
tagctttcatctctcttccgtggtc

SEQ ID NO: 672699 - DNA, 25 bp, Homo sapien
ttagctttcatctctcttccgtggt

SEQ ID NO: 672700 - DNA, 25 bp, Homo sapien
ttaagacaccaacaagctggtaccc

SEQ ID NO: 672701 - DNA, 25 bp, Homo sapien
aagacaccaacaagctggtacccaa

SEQ ID NO: 672702 - DNA, 25 bp, Homo sapien
taagacaccaacaagctggtaccca

SEQ ID NO: 672703 - DNA, 25 bp, Homo sapien
actcacaggctgcaagtcactcaca

SEQ ID NO: 672704 - DNA, 25 bp, Homo sapien
tcacaggctgcaagtcactcacagg

SEQ ID NO: 672705 - DNA, 25 bp, Homo sapien
cactcacaggctgcaagtcactcac

SEQ ID NO: 672706 - DNA, 25 bp, Homo sapien
acaggctgcaagtcactcacaggct

SEQ ID NO: 672707 - DNA, 25 bp, Homo sapien
tggtggtgaggggaggccctggcgg

SEQ ID NO: 672708 - DNA, 25 bp, Homo sapien
gcacacttggtcctggtggtgaggg

SEQ ID NO: 672709 - DNA, 25 bp, Homo sapien
tggtgaggggaggccctggcggtcc

SEQ ID NO: 672710 - DNA, 25 bp, Homo sapien
ctgcacacttggtcctggtggtgag

SEQ ID NO: 672711 - DNA, 25 bp, Homo sapien
gggtccagatgccacagcttatagt

SEQ ID NO: 672712 - DNA, 25 bp, Homo sapien
gtcgtgtgaggagcactcggatctc

SEQ ID NO: 672713 - DNA, 25 bp, Homo sapien
ggcatttggcttgatccacaggtat

SEQ ID NO: 672714 - DNA, 25 bp, Homo sapien
gagtcgactatgtgggtctctgccc

SEQ ID NO: 672715 - DNA, 25 bp, Homo sapien
ctgtaagacaagcaatcaaaaagga

SEQ ID NO: 672716 - DNA, 25 bp, Homo sapien
aaggagacatcctggctacctctgg

SEQ ID NO: 672717 - DNA, 25 bp, Homo sapien
cacacagtagtttacctgtttcctc

SEQ ID NO: 672718 - DNA, 25 bp, Homo sapien
ttcagataatcctctaatcattgca

SEQ ID NO: 672719 - DNA, 25 bp, Homo sapien
tgtgagttttgacacttgactttca

SEQ ID NO: 672720 - DNA, 25 bp, Homo sapien
ccagatggacgctgggctccaagaa

SEQ ID NO: 672721 - DNA, 25 bp, Homo sapien
cgctgggctccaagaatagaattag

SEQ ID NO: 672722 - DNA, 25 bp, Homo sapien
ttagtggcttcatgctgttgtctac

SEQ ID NO: 672723 - DNA, 25 bp, Homo sapien
aagccatgattctgactaagccaga

SEQ ID NO: 672724 - DNA, 25 bp, Homo sapien
cacaggtcactgcctctaggtgctt

SEQ ID NO: 672725 - DNA, 25 bp, Homo sapien
tgacaactcagtttagtcgaatgaa

SEQ ID NO: 672726 - DNA, 25 bp, Homo sapien
acatttccacgggattttagggcag

SEQ ID NO: 672727 - DNA, 25 bp, Homo sapien
tattttaaaccaccgcagagtcatg

SEQ ID NO: 672728 - DNA, 25 bp, Homo sapien
ggccatccgtaagttataatcaaat

SEQ ID NO: 672729 - DNA, 25 bp, Homo sapien
aatcaggcgaccaatcagacaaggg

SEQ ID NO: 672730 - DNA, 25 bp, Homo sapien
gtgtaatgctgttgtaatcaggcga

SEQ ID NO: 672731 - DNA, 25 bp, Homo sapien
tgctgttgtaatcaggcgaccaatc

SEQ ID NO: 672732 - DNA, 25 bp, Homo sapien
gtgggcagcgaatatgtgtaatgct

SEQ ID NO: 672733 - DNA, 25 bp, Homo sapien
cttctggttggacaagtggatacac

SEQ ID NO: 672734 - DNA, 25 bp, Homo sapien
caggcttctggttggacaagtggat

SEQ ID NO: 672735 - DNA, 25 bp, Homo sapien
ggagggagcagtcgggctggccctc

SEQ ID NO: 672736 - DNA, 25 bp, Homo sapien
ctggttggacaagtggatacacagc

SEQ ID NO: 672737 - DNA, 25 bp, Homo sapien
ggatgtcccattcgaagctgcagtg

SEQ ID NO: 672738 - DNA, 25 bp, Homo sapien
gaacacacagaaaacgagggcttga

SEQ ID NO: 672739 - DNA, 25 bp, Homo sapien
gaaaacgagggcttgaatatggtcc

SEQ ID NO: 672740 - DNA, 25 bp, Homo sapien
tatggtcctgcccagctcggaagca

SEQ ID NO: 672741 - DNA, 25 bp, Homo sapien
cagatgtagcaatgcgggcacctgc

SEQ ID NO: 672742 - DNA, 25 bp, Homo sapien
ctggtgggccagatgtagcaatgcg

SEQ ID NO: 672743 - DNA, 25 bp, Homo sapien
ggccagatgtagcaatgcgggcacc

SEQ ID NO: 672744 - DNA, 25 bp, Homo sapien
agatgtagcaatgcgggcacctgcc

SEQ ID NO: 672745 - DNA, 25 bp, Homo sapien
ctccagtggagatggtagtatttct

SEQ ID NO: 672746 - DNA, 25 bp, Homo sapien
ccttgtgctaaatgcttccagaatc

SEQ ID NO: 672747 - DNA, 25 bp, Homo sapien
taattaccgagcaggcaagatcaga

SEQ ID NO: 672748 - DNA, 25 bp, Homo sapien
gatccacttgtcattacagcaattc

SEQ ID NO: 672749 - DNA, 25 bp, Homo sapien
gtgcagaagagattaaaagaacaaa

SEQ ID NO: 672750 - DNA, 25 bp, Homo sapien
tgcagaagagattaaaagaacaaac

SEQ ID NO: 672751 - DNA, 25 bp, Homo sapien
cagagcacattttgccgctgattaa

SEQ ID NO: 672752 - DNA, 25 bp, Homo sapien
caggccgcattccatcaaaaaggca

SEQ ID NO: 672753 - DNA, 25 bp, Homo sapien
tctgccaataactgcctgctccgta

SEQ ID NO: 672754 - DNA, 25 bp, Homo sapien
gctgattaactcaaagaggaggctt

SEQ ID NO: 672755 - DNA, 25 bp, Homo sapien
cacatatgttcaagtgaagtttccc

SEQ ID NO: 672756 - DNA, 25 bp, Homo sapien
ggagaagcacaaacataggcacgca

SEQ ID NO: 672757 - DNA, 25 bp, Homo sapien
taaaaataagctggtctttgtgccc

SEQ ID NO: 672758 - DNA, 25 bp, Homo sapien
taggcacgcactttgtttaggaaca

SEQ ID NO: 672759 - DNA, 25 bp, Homo sapien
cagtctgtgccagtgaccatagcca

SEQ ID NO: 672760 - DNA, 25 bp, Homo sapien
tctgtgccagtgaccatagccagct

SEQ ID NO: 672761 - DNA, 25 bp, Homo sapien
agtctgtgccagtgaccatagccag

SEQ ID NO: 672762 - DNA, 25 bp, Homo sapien
ctgtgccagtgaccatagccagctg

SEQ ID NO: 672763 - DNA, 25 bp, Homo sapien
aagttgagccttgtgaaatgactga

SEQ ID NO: 672764 - DNA, 25 bp, Homo sapien
gatctttggcttaagtgttcatggc

SEQ ID NO: 672765 - DNA, 25 bp, Homo sapien
tgattgtgcaagtcaaaacaggcga

SEQ ID NO: 672766 - DNA, 25 bp, Homo sapien
gaaataataaactcctgctgaggcc

SEQ ID NO: 672767 - DNA, 25 bp, Homo sapien
gatcagctccgcgtagttggacaca

SEQ ID NO: 672768 - DNA, 25 bp, Homo sapien
ttgaccacacgggtgaccatcaggg

SEQ ID NO: 672769 - DNA, 25 bp, Homo sapien
ctgagaagcgcctgtggttgaccac

SEQ ID NO: 672770 - DNA, 25 bp, Homo sapien
atcagagcggatcacacagcggtac

SEQ ID NO: 672771 - DNA, 25 bp, Homo sapien
gacgtggaggtttcttatgctctcc

SEQ ID NO: 672772 - DNA, 25 bp, Homo sapien
ctaccgaatactgaggtgacgtgga

SEQ ID NO: 672773 - DNA, 25 bp, Homo sapien
gtttcttatgctctcctgtggtctg

SEQ ID NO: 672774 - DNA, 25 bp, Homo sapien
aggtgacgtggaggtttcttatgct

SEQ ID NO: 672775 - DNA, 25 bp, Homo sapien
tgtcatgctgagaccacttcccacc

SEQ ID NO: 672776 - DNA, 25 bp, Homo sapien
acctccacgttttggagtcgcagaa

SEQ ID NO: 672777 - DNA, 25 bp, Homo sapien
ttggagtcgcagaaaatgaggtgct

SEQ ID NO: 672778 - DNA, 25 bp, Homo sapien
tgaaatgtggcattctgccccacat

SEQ ID NO: 672779 - DNA, 25 bp, Homo sapien
gacccttcaatgagacggattcaaa

SEQ ID NO: 672780 - DNA, 25 bp, Homo sapien
ttcaatgagacggattcaaatatca

SEQ ID NO: 672781 - DNA, 25 bp, Homo sapien
ccggacctcgtccacggcgatgtag

SEQ ID NO: 672782 - DNA, 25 bp, Homo sapien
ccaggatgacccttcaatgagacgg

SEQ ID NO: 672783 - DNA, 25 bp, Homo sapien
ttgacccggactcttgctatatttt

SEQ ID NO: 672784 - DNA, 25 bp, Homo sapien
ctttgcaaggaacatcagcgctctt

SEQ ID NO: 672785 - DNA, 25 bp, Homo sapien
atcagcgctcttgacccggactctt

SEQ ID NO: 672786 - DNA, 25 bp, Homo sapien
ttgatatccatccacaccatcccct

SEQ ID NO: 672787 - DNA, 25 bp, Homo sapien
gaagtagtaatggaagtcgatgcag

SEQ ID NO: 672788 - DNA, 25 bp, Homo sapien
ttcacgtagacgttcaaggcccctg

SEQ ID NO: 672789 - DNA, 25 bp, Homo sapien
gtgacgaccccggacacattccaca

SEQ ID NO: 672790 - DNA, 25 bp, Homo sapien
gccaccattcaccttcacgtagacg

SEQ ID NO: 672791 - DNA, 25 bp, Homo sapien
taatgccttgataagcgcctcgtta

SEQ ID NO: 672792 - DNA, 25 bp, Homo sapien
gcatttttccccttcgtgcataata

SEQ ID NO: 672793 - DNA, 25 bp, Homo sapien
caggaagtactctctggctggccat

SEQ ID NO: 672794 - DNA, 25 bp, Homo sapien
tctggctggccataaattttgcatt

SEQ ID NO: 672795 - DNA, 25 bp, Homo sapien
catccaataaaacagtactcagcac

SEQ ID NO: 672796 - DNA, 25 bp, Homo sapien
tccaataaaacagtactcagcacca

SEQ ID NO: 672797 - DNA, 25 bp, Homo sapien
ccaataaaacagtactcagcaccat

SEQ ID NO: 672798 - DNA, 25 bp, Homo sapien
atccaataaaacagtactcagcacc

SEQ ID NO: 672799 - DNA, 25 bp, Homo sapien
cctcatgcttagacttaaatttgta

SEQ ID NO: 672800 - DNA, 25 bp, Homo sapien
ggagctctggaaagttgagataagg

SEQ ID NO: 672801 - DNA, 25 bp, Homo sapien
gagctctggaaagttgagataagga

SEQ ID NO: 672802 - DNA, 25 bp, Homo sapien
tagttcaagtcctaaagcctgagaa

SEQ ID NO: 672803 - DNA, 25 bp, Homo sapien
tctgaggccaaagtcctgagaaccc

SEQ ID NO: 672804 - DNA, 25 bp, Homo sapien
tgcccagcaaagatgttcaagtgaa

SEQ ID NO: 672805 - DNA, 25 bp, Homo sapien
tgtcagtgccttttagctcatgtgg

SEQ ID NO: 672806 - DNA, 25 bp, Homo sapien
gctccaggaaattgggtctattgtg

SEQ ID NO: 672807 - DNA, 25 bp, Homo sapien
ttggggtccacctgctgagtctccc

SEQ ID NO: 672808 - DNA, 25 bp, Homo sapien
ggaaattgggtctattgtgtgtcct

SEQ ID NO: 672809 - DNA, 25 bp, Homo sapien
caagcaagagaggaagttggggtcc

SEQ ID NO: 672810 - DNA, 25 bp, Homo sapien
tcaattaccaaatgtctcactgatt

SEQ ID NO: 672811 - DNA, 25 bp, Homo sapien
taaggaaaagacagatcacacattt

SEQ ID NO: 672812 - DNA, 25 bp, Homo sapien
ggaaaagacagatcacacatttaaa

SEQ ID NO: 672813 - DNA, 25 bp, Homo sapien
aggaaaagacagatcacacatttaa

SEQ ID NO: 672814 - DNA, 25 bp, Homo sapien
actaaggaaaagacagatcacacat

SEQ ID NO: 672815 - DNA, 25 bp, Homo sapien
gaatttactccgaacaacatgcagg

SEQ ID NO: 672816 - DNA, 25 bp, Homo sapien
ggaatcttgaagaacgtcatctctg

SEQ ID NO: 672817 - DNA, 25 bp, Homo sapien
gcccaatcggttgaatggtccacga

SEQ ID NO: 672818 - DNA, 25 bp, Homo sapien
cgaagacatcgcctagcatcagcat

SEQ ID NO: 672819 - DNA, 25 bp, Homo sapien
gatgattgaattaggcaaaagtcca

SEQ ID NO: 672820 - DNA, 25 bp, Homo sapien
aaaaatagagagtggttcagggcac

SEQ ID NO: 672821 - DNA, 25 bp, Homo sapien
ttcagggcacagattctggatccag

SEQ ID NO: 672822 - DNA, 25 bp, Homo sapien
tagacaattcaacaaactgacagga

SEQ ID NO: 672823 - DNA, 25 bp, Homo sapien
aactgagtgtcaaggcaagcatcta

SEQ ID NO: 672824 - DNA, 25 bp, Homo sapien
ttttagttgaacgatgccagtctcc

SEQ ID NO: 672825 - DNA, 25 bp, Homo sapien
gatattagcacagacaggttttccc

SEQ ID NO: 672826 - DNA, 25 bp, Homo sapien
tattctaactcgtcaaatgcagcag

SEQ ID NO: 672827 - DNA, 25 bp, Homo sapien
gtgaacccattggtccctagagcca

SEQ ID NO: 672828 - DNA, 25 bp, Homo sapien
tgttaatctgctcccaggtgaaccc

SEQ ID NO: 672829 - DNA, 25 bp, Homo sapien
tgtagtgctcatcaaaggaacagcc

SEQ ID NO: 672830 - DNA, 25 bp, Homo sapien
tagagccacactataaccacagttg

SEQ ID NO: 672831 - DNA, 25 bp, Homo sapien
tgagcagacactgtgagatgcactg

SEQ ID NO: 672832 - DNA, 25 bp, Homo sapien
cttcccaggcaccagtttgtgagca

SEQ ID NO: 672833 - DNA, 25 bp, Homo sapien
tctgttgggtcagcgccagcctcaa

SEQ ID NO: 672834 - DNA, 25 bp, Homo sapien
gtgcgatgaaagaaggaggccctct

SEQ ID NO: 672835 - DNA, 25 bp, Homo sapien
aagtggtaatgccacccagagccca

SEQ ID NO: 672836 - DNA, 25 bp, Homo sapien
cattcccgtagcatcaaaagtggta

SEQ ID NO: 672837 - DNA, 25 bp, Homo sapien
catccttgagttctgactggctaaa

SEQ ID NO: 672838 - DNA, 25 bp, Homo sapien
ccagagcccatatcacatagaagac

SEQ ID NO: 672839 - DNA, 25 bp, Homo sapien
tctctgtggaagctcctggcacgtc

SEQ ID NO: 672840 - DNA, 25 bp, Homo sapien
tctggcttgccacgattgctagaat

SEQ ID NO: 672841 - DNA, 25 bp, Homo sapien
ctgtcttgtttagggaaccagtttg

SEQ ID NO: 672842 - DNA, 25 bp, Homo sapien
gaatacatcgacttgaccacagtgg

SEQ ID NO: 672843 - DNA, 25 bp, Homo sapien
cttcattagtttcagactccacagg

SEQ ID NO: 672844 - DNA, 25 bp, Homo sapien
cccttcattagtttcagactccaca

SEQ ID NO: 672845 - DNA, 25 bp, Homo sapien
tccccttcattagtttcagactcca

SEQ ID NO: 672846 - DNA, 25 bp, Homo sapien
catccccttcattagtttcagactc

SEQ ID NO: 672847 - DNA, 25 bp, Homo sapien
tcttatagcccatctttgtagacac

SEQ ID NO: 672848 - DNA, 25 bp, Homo sapien
tggttcccaacacttcactcatggc

SEQ ID NO: 672849 - DNA, 25 bp, Homo sapien
tctttgtagacacatgaagctccat

SEQ ID NO: 672850 - DNA, 25 bp, Homo sapien
actcatggctactttgcgaatggtc

SEQ ID NO: 672851 - DNA, 25 bp, Homo sapien
gggactctgtggcagcaaagcggta

SEQ ID NO: 672852 - DNA, 25 bp, Homo sapien
tttgggactctgtggcagcaaagcg

SEQ ID NO: 672853 - DNA, 25 bp, Homo sapien
gtctttgggactctgtggcagcaaa

SEQ ID NO: 672854 - DNA, 25 bp, Homo sapien
cgtgtctttgggactctgtggcagc

SEQ ID NO: 672855 - DNA, 25 bp, Homo sapien
ttaacgaggctggtaatatttcata

SEQ ID NO: 672856 - DNA, 25 bp, Homo sapien
tgcctgatgtttaacgaggctggta

SEQ ID NO: 672857 - DNA, 25 bp, Homo sapien
ttcctctgtgttccctcagtccctc

SEQ ID NO: 672858 - DNA, 25 bp, Homo sapien
aacttatcggttatttctatgtcta

SEQ ID NO: 672859 - DNA, 25 bp, Homo sapien
gaatattgtgttgatttccgctaga

SEQ ID NO: 672860 - DNA, 25 bp, Homo sapien
agtcatcatccgcttcgggcaccag

SEQ ID NO: 672861 - DNA, 25 bp, Homo sapien
aatgactgataggatggaaactgac

SEQ ID NO: 672862 - DNA, 25 bp, Homo sapien
tccgctagatagaagaagatgtcac

SEQ ID NO: 672863 - DNA, 25 bp, Homo sapien
gcctcttctggtggacacttggtca

SEQ ID NO: 672864 - DNA, 25 bp, Homo sapien
tcccagcctcttctggtggacactt

SEQ ID NO: 672865 - DNA, 25 bp, Homo sapien
cagcctcttctggtggacacttggt

SEQ ID NO: 672866 - DNA, 25 bp, Homo sapien
cctcttctggtggacacttggtcat

SEQ ID NO: 672867 - DNA, 25 bp, Homo sapien
cttttctaccgtaagggcttctcag

SEQ ID NO: 672868 - DNA, 25 bp, Homo sapien
ttctcagtttgttgatgtggcacat

SEQ ID NO: 672869 - DNA, 25 bp, Homo sapien
gcttttctaccgtaagggcttctca

SEQ ID NO: 672870 - DNA, 25 bp, Homo sapien
aagggcttctcagtttgttgatgtg

SEQ ID NO: 672871 - DNA, 25 bp, Homo sapien
gaaacattcggaaggcttcatgaga

SEQ ID NO: 672872 - DNA, 25 bp, Homo sapien
aacaaggtggcccatgagttcttgt

SEQ ID NO: 672873 - DNA, 25 bp, Homo sapien
tggaaacattcggaaggcttcatga

SEQ ID NO: 672874 - DNA, 25 bp, Homo sapien
acattcggaaggcttcatgagaaca

SEQ ID NO: 672875 - DNA, 25 bp, Homo sapien
gcgacgatggctacatttacataaa

SEQ ID NO: 672876 - DNA, 25 bp, Homo sapien
ttgactgggcatctgcgacgatggc

SEQ ID NO: 672877 - DNA, 25 bp, Homo sapien
cttccattgactgggcatctgcgac

SEQ ID NO: 672878 - DNA, 25 bp, Homo sapien
tgggcatctgcgacgatggctacat

SEQ ID NO: 672879 - DNA, 25 bp, Homo sapien
tgatcctcacactcaccttgctgat

SEQ ID NO: 672880 - DNA, 25 bp, Homo sapien
tcctcacactcaccttgctgatcct

SEQ ID NO: 672881 - DNA, 25 bp, Homo sapien
acactcaccttgctgatcctcccca

SEQ ID NO: 672882 - DNA, 25 bp, Homo sapien
cttgctgatcctcacactcaccttg

SEQ ID NO: 672883 - DNA, 25 bp, Homo sapien
cagatccactgttctggatgccagc

SEQ ID NO: 672884 - DNA, 25 bp, Homo sapien
ccatcctctgtgatctcacatccac

SEQ ID NO: 672885 - DNA, 25 bp, Homo sapien
tctggatgccagcatcagtgctcat

SEQ ID NO: 672886 - DNA, 25 bp, Homo sapien
catcctctgtgatctcacatccacc

SEQ ID NO: 672887 - DNA, 25 bp, Homo sapien
tggggagatctctgcatggatgcag

SEQ ID NO: 672888 - DNA, 25 bp, Homo sapien
ggggagatctctgcatggatgcaga

SEQ ID NO: 672889 - DNA, 25 bp, Homo sapien
tcattccccggacagagcctctggg

SEQ ID NO: 672890 - DNA, 25 bp, Homo sapien
gatgcacacccagccgtcgagagct

SEQ ID NO: 672891 - DNA, 25 bp, Homo sapien
acggtgaagagtcctctcctgcgga

SEQ ID NO: 672892 - DNA, 25 bp, Homo sapien
cgagagctccgcagagcgctggaat

SEQ ID NO: 672893 - DNA, 25 bp, Homo sapien
tccgcagagcgctggaatgaggcat

SEQ ID NO: 672894 - DNA, 25 bp, Homo sapien
ttgtgggctaaatctgcatggaccg

SEQ ID NO: 672895 - DNA, 25 bp, Homo sapien
gcatggaccgatggaagaactaaca

SEQ ID NO: 672896 - DNA, 25 bp, Homo sapien
taaagaacccctggtcagaggctta

SEQ ID NO: 672897 - DNA, 25 bp, Homo sapien
taaactgctaacagaacaggtgtgc

SEQ ID NO: 672898 - DNA, 25 bp, Homo sapien
cagtctccttgaagctgaccactca

SEQ ID NO: 672899 - DNA, 25 bp, Homo sapien
tcagccagccctgaatgaatgagtc

SEQ ID NO: 672900 - DNA, 25 bp, Homo sapien
acttggtcagggaagcagtctcctt

SEQ ID NO: 672901 - DNA, 25 bp, Homo sapien
gttttggcaccagtgtcttgtgaac

SEQ ID NO: 672902 - DNA, 25 bp, Homo sapien
tgatagctcctgtttcacgcacact

SEQ ID NO: 672903 - DNA, 25 bp, Homo sapien
tacttatagacattactaggcacat

SEQ ID NO: 672904 - DNA, 25 bp, Homo sapien
gaaaactgtgtccaggagtggtcac

SEQ ID NO: 672905 - DNA, 25 bp, Homo sapien
gagtggtcactgcattacttataga

SEQ ID NO: 672906 - DNA, 25 bp, Homo sapien
catggcagcatacactgtcagcagg

SEQ ID NO: 672907 - DNA, 25 bp, Homo sapien
catttcccaataaagtttgagtggc

SEQ ID NO: 672908 - DNA, 25 bp, Homo sapien
gaaacaacaaatgccatagggaaag

SEQ ID NO: 672909 - DNA, 25 bp, Homo sapien
ttgttaagcccacaaccagttgcaa

SEQ ID NO: 672910 - DNA, 25 bp, Homo sapien
tgctagcaccagacacacataaata

SEQ ID NO: 672911 - DNA, 25 bp, Homo sapien
gctgctagcaccagacacacataaa

SEQ ID NO: 672912 - DNA, 25 bp, Homo sapien
ctgctagcaccagacacacataaat

SEQ ID NO: 672913 - DNA, 25 bp, Homo sapien
gccatttttgtatactttgaaccca

SEQ ID NO: 672914 - DNA, 25 bp, Homo sapien
tccatcattgcagagtgctctacag

SEQ ID NO: 672915 - DNA, 25 bp, Homo sapien
taagagtcactttttaagcacgacc

SEQ ID NO: 672916 - DNA, 25 bp, Homo sapien
aagcacgaccaccacctctatttag

SEQ ID NO: 672917 - DNA, 25 bp, Homo sapien
ttagaagagagagcctttcaccatg

SEQ ID NO: 672918 - DNA, 25 bp, Homo sapien
ttctccgaaacagggtcgcccaggc

SEQ ID NO: 672919 - DNA, 25 bp, Homo sapien
tgaaccgagacttcaaaatggtgct

SEQ ID NO: 672920 - DNA, 25 bp, Homo sapien
ggttcttcgtcactgttcacactgt

SEQ ID NO: 672921 - DNA, 25 bp, Homo sapien
gcacaggctggagtgtaatagcatg

SEQ ID NO: 672922 - DNA, 25 bp, Homo sapien
gctggggctacaggcctgcaccatc

SEQ ID NO: 672923 - DNA, 25 bp, Homo sapien
ggggctacaggcctgcaccatcacg

SEQ ID NO: 672924 - DNA, 25 bp, Homo sapien
agcagagatgaggtttctccatgtt

SEQ ID NO: 672925 - DNA, 25 bp, Homo sapien
tttgtgccatgtctacctcgggtga

SEQ ID NO: 672926 - DNA, 25 bp, Homo sapien
gacacacagcaaattaggaggagga

SEQ ID NO: 672927 - DNA, 25 bp, Homo sapien
tcagccctgcagtataccacattgg

SEQ ID NO: 672928 - DNA, 25 bp, Homo sapien
tatgcaggatttatgccaggcttgc

SEQ ID NO: 672929 - DNA, 25 bp, Homo sapien
cacctttacaaatggcacgtcccag

SEQ ID NO: 672930 - DNA, 25 bp, Homo sapien
cctttacaaatggcacgtcccagcc

SEQ ID NO: 672931 - DNA, 25 bp, Homo sapien
tccacctttacaaatggcacgtccc

SEQ ID NO: 672932 - DNA, 25 bp, Homo sapien
acctttacaaatggcacgtcccagc

SEQ ID NO: 672933 - DNA, 25 bp, Homo sapien
tttatccaggacactctctgatgct

SEQ ID NO: 672934 - DNA, 25 bp, Homo sapien
ccaggacactctctgatgctgccat

SEQ ID NO: 672935 - DNA, 25 bp, Homo sapien
cagtctttcaggcccatctttaaca

SEQ ID NO: 672936 - DNA, 25 bp, Homo sapien
agctctttatccaggacactctctg

SEQ ID NO: 672937 - DNA, 25 bp, Homo sapien
gctccccaaagcctagcgcctgcag

SEQ ID NO: 672938 - DNA, 25 bp, Homo sapien
tagcgcctgcagaaagctcctgcca

SEQ ID NO: 672939 - DNA, 25 bp, Homo sapien
aaagcctagcgcctgcagaaagctc

SEQ ID NO: 672940 - DNA, 25 bp, Homo sapien
accaccaggggcgacctgcatctcc

SEQ ID NO: 672941 - DNA, 25 bp, Homo sapien
actatgaccccaggcaagctattta

SEQ ID NO: 672942 - DNA, 25 bp, Homo sapien
gacaaaagtataatcccagctccat

SEQ ID NO: 672943 - DNA, 25 bp, Homo sapien
gaagactaacatggcagacagactg

SEQ ID NO: 672944 - DNA, 25 bp, Homo sapien
gaactttccatgattgctcctgtca

SEQ ID NO: 672945 - DNA, 25 bp, Homo sapien
tttagcaggaactagagccacactt

SEQ ID NO: 672946 - DNA, 25 bp, Homo sapien
gggtgctatccgaggaacagtgcat

SEQ ID NO: 672947 - DNA, 25 bp, Homo sapien
gccacacttagcagggtgctatccg

SEQ ID NO: 672948 - DNA, 25 bp, Homo sapien
ctctattggtttagcaggaactaga

SEQ ID NO: 672949 - DNA, 25 bp, Homo sapien
ttatcccatgtagccagtactctga

SEQ ID NO: 672950 - DNA, 25 bp, Homo sapien
gaaaagatgcccaattccaatattc

SEQ ID NO: 672951 - DNA, 25 bp, Homo sapien
agtgtgctcagtgggttacatgcgc

SEQ ID NO: 672952 - DNA, 25 bp, Homo sapien
ttccaatattcctgccctagaaggc

SEQ ID NO: 672953 - DNA, 25 bp, Homo sapien
gcatgctttagaatccccgggagga

SEQ ID NO: 672954 - DNA, 25 bp, Homo sapien
cattataggattctagtccccggct

SEQ ID NO: 672955 - DNA, 25 bp, Homo sapien
gaaagctgtcatttaccgagtcatc

SEQ ID NO: 672956 - DNA, 25 bp, Homo sapien
gagtgaaacccctctcagtcctaga

SEQ ID NO: 672957 - DNA, 25 bp, Homo sapien
ggactatacagatccttgcgtgcta

SEQ ID NO: 672958 - DNA, 25 bp, Homo sapien
cacagatatagcagaggattcggca

SEQ ID NO: 672959 - DNA, 25 bp, Homo sapien
gagagggagatatgaacacatccgt

SEQ ID NO: 672960 - DNA, 25 bp, Homo sapien
ggtatacatgggaggacgacttcta

SEQ ID NO: 672961 - DNA, 25 bp, Homo sapien
ttctgcacagcccttccgtgtggat

SEQ ID NO: 672962 - DNA, 25 bp, Homo sapien
ctgcacagcccttccgtgtggatat

SEQ ID NO: 672963 - DNA, 25 bp, Homo sapien
tgaaggtgcatctgatggggtttct

SEQ ID NO: 672964 - DNA, 25 bp, Homo sapien
cagtctgaaggtgcatctgatgggg

SEQ ID NO: 672965 - DNA, 25 bp, Homo sapien
agtatcctgtgcttgaaagagtgat

SEQ ID NO: 672966 - DNA, 25 bp, Homo sapien
acggagtcaggggagtatcctgtgc

SEQ ID NO: 672967 - DNA, 25 bp, Homo sapien
atcctgtgcttgaaagagtgatgct

SEQ ID NO: 672968 - DNA, 25 bp, Homo sapien
atgctgtcatgtcctctgatcgtgg

SEQ ID NO: 672969 - DNA, 25 bp, Homo sapien
tcaggagcaggctgagggcgagcgc

SEQ ID NO: 672970 - DNA, 25 bp, Homo sapien
gcctcaggagcaggctgagggcgag

SEQ ID NO: 672971 - DNA, 25 bp, Homo sapien
tgcggcgctctgagcccgggcgccg

SEQ ID NO: 672972 - DNA, 25 bp, Homo sapien
ggagcaggctgagggcgagcgcggc

SEQ ID NO: 672973 - DNA, 25 bp, Homo sapien
tcctgcgttccaagccgaggcgcgg

SEQ ID NO: 672974 - DNA, 25 bp, Homo sapien
atcgccggcgcggccgctggctgtg

SEQ ID NO: 672975 - DNA, 25 bp, Homo sapien
ctggctccgctcgggctcccggagc

SEQ ID NO: 672976 - DNA, 25 bp, Homo sapien
tggctgtgcgcgcggctggctccgc

SEQ ID NO: 672977 - DNA, 25 bp, Homo sapien
atagatgtcagacacattggcaatg

SEQ ID NO: 672978 - DNA, 25 bp, Homo sapien
gtcagacacattggcaatgatctct

SEQ ID NO: 672979 - DNA, 25 bp, Homo sapien
ttaatagatgtcagacacattggca

SEQ ID NO: 672980 - DNA, 25 bp, Homo sapien
ttggcaatgatctcttcattaataa

SEQ ID NO: 672981 - DNA, 25 bp, Homo sapien
ggtgcgctctctgtataattcctgt

SEQ ID NO: 672982 - DNA, 25 bp, Homo sapien
gcgctctctgtataattcctgtttc

SEQ ID NO: 672983 - DNA, 25 bp, Homo sapien
tcaggtgcgctctctgtataattcc

SEQ ID NO: 672984 - DNA, 25 bp, Homo sapien
gtgcgctctctgtataattcctgtt

SEQ ID NO: 672985 - DNA, 25 bp, Homo sapien
ggttctcaggccatcaaccattctt

SEQ ID NO: 672986 - DNA, 25 bp, Homo sapien
gtttcgtgtccggatgagtaatttc

SEQ ID NO: 672987 - DNA, 25 bp, Homo sapien
tgaggttggtgaagtctgagcttcc

SEQ ID NO: 672988 - DNA, 25 bp, Homo sapien
ttcaattttgtttcgtgtccggatg

SEQ ID NO: 672989 - DNA, 25 bp, Homo sapien
catgcttcttgttattctttcccag

SEQ ID NO: 672990 - DNA, 25 bp, Homo sapien
gagaaacatctctaaggacctgatt

SEQ ID NO: 672991 - DNA, 25 bp, Homo sapien
cacccttcatgcttcttgttattct

SEQ ID NO: 672992 - DNA, 25 bp, Homo sapien
agagaaacatctctaaggacctgat

SEQ ID NO: 672993 - DNA, 25 bp, Homo sapien
tcccaccagtcacatagaatgccat

SEQ ID NO: 672994 - DNA, 25 bp, Homo sapien
tagccgactgttgcccagcatcaac

SEQ ID NO: 672995 - DNA, 25 bp, Homo sapien
cagcatcaaccactcgcgcttccca

SEQ ID NO: 672996 - DNA, 25 bp, Homo sapien
gcgcttcccaccagtcacatagaat

SEQ ID NO: 672997 - DNA, 25 bp, Homo sapien
atctcatggcaggtgcaactgcatg

SEQ ID NO: 672998 - DNA, 25 bp, Homo sapien
catctcatggcaggtgcaactgcat

SEQ ID NO: 672999 - DNA, 25 bp, Homo sapien
ttacatctcatggcaggtgcaactg

SEQ ID NO: 673000 - DNA, 25 bp, Homo sapien
tacatctcatggcaggtgcaactgc

SEQ ID NO: 673001 - DNA, 25 bp, Homo sapien
aagataatgttccagagggttcgcg

SEQ ID NO: 673002 - DNA, 25 bp, Homo sapien
agacacagctcagctactgcgaggt

SEQ ID NO: 673003 - DNA, 25 bp, Homo sapien
tcagctactgcgaggtcataaagat

SEQ ID NO: 673004 - DNA, 25 bp, Homo sapien
tgttccagagggttcgcgtggtccc

SEQ ID NO: 673005 - DNA, 25 bp, Homo sapien
tgcccttgccaactgttcagtcttc

SEQ ID NO: 673006 - DNA, 25 bp, Homo sapien
ctgtgcactgcccttgccaactgtt

SEQ ID NO: 673007 - DNA, 25 bp, Homo sapien
tcctctattagaccaggaagctctc

SEQ ID NO: 673008 - DNA, 25 bp, Homo sapien
cctctattagaccaggaagctctct

SEQ ID NO: 673009 - DNA, 25 bp, Homo sapien
tacagacggcctatagtgggatttc

SEQ ID NO: 673010 - DNA, 25 bp, Homo sapien
gaaccctgactaacactgaggtgga

SEQ ID NO: 673011 - DNA, 25 bp, Homo sapien
cttggtgctattctcagggtagtga

SEQ ID NO: 673012 - DNA, 25 bp, Homo sapien
cctgtggctaaaacctacttttgag

SEQ ID NO: 673013 - DNA, 25 bp, Homo sapien
catagcagctctcataagctctaac

SEQ ID NO: 673014 - DNA, 25 bp, Homo sapien
tagcagctctcataagctctaactg

SEQ ID NO: 673015 - DNA, 25 bp, Homo sapien
agcagctctcataagctctaactgt

SEQ ID NO: 673016 - DNA, 25 bp, Homo sapien
ctgagtcatctctattgcagcctcc

SEQ ID NO: 673017 - DNA, 25 bp, Homo sapien
gcagctgcattccttaatcaggtat

SEQ ID NO: 673018 - DNA, 25 bp, Homo sapien
tatggtgccatttgatgagcaacaa

SEQ ID NO: 673019 - DNA, 25 bp, Homo sapien
tttccacagggattggagcattgtc

SEQ ID NO: 673020 - DNA, 25 bp, Homo sapien
gaatttaaggagctgagtgcaatca

SEQ ID NO: 673021 - DNA, 25 bp, Homo sapien
tgcacccaacagtcaatgtctgcct

SEQ ID NO: 673022 - DNA, 25 bp, Homo sapien
gggacgcattccaagagcctgttgc

SEQ ID NO: 673023 - DNA, 25 bp, Homo sapien
agcactggcatgcacccaacagtca

SEQ ID NO: 673024 - DNA, 25 bp, Homo sapien
cagggaacactccactctgacagca

SEQ ID NO: 673025 - DNA, 25 bp, Homo sapien
gccagtgggtggaccaattctcaaa

SEQ ID NO: 673026 - DNA, 25 bp, Homo sapien
tgccagtgggtggaccaattctcaa

SEQ ID NO: 673027 - DNA, 25 bp, Homo sapien
cttggtcctcgcagttgcactgatg

SEQ ID NO: 673028 - DNA, 25 bp, Homo sapien
cgcagttgcactgatgtatgtctgg

SEQ ID NO: 673029 - DNA, 25 bp, Homo sapien
cctcgcagttgcactgatgtatgtc

SEQ ID NO: 673030 - DNA, 25 bp, Homo sapien
gttgcactgatgtatgtctggcctt

SEQ ID NO: 673031 - DNA, 25 bp, Homo sapien
gggaagagggagtgagaagacgctg

SEQ ID NO: 673032 - DNA, 25 bp, Homo sapien
ctagggaagagggagtgagaagacg

SEQ ID NO: 673033 - DNA, 25 bp, Homo sapien
gaagagggagtgagaagacgctgca

SEQ ID NO: 673034 - DNA, 25 bp, Homo sapien
tagggaagagggagtgagaagacgc

SEQ ID NO: 673035 - DNA, 25 bp, Homo sapien
gccagcatccgtcatccggctgttt

SEQ ID NO: 673036 - DNA, 25 bp, Homo sapien
ggctgtttctcagctccggctccaa

SEQ ID NO: 673037 - DNA, 25 bp, Homo sapien
cagacagatagtccacgatgccaaa

SEQ ID NO: 673038 - DNA, 25 bp, Homo sapien
cctgagaaccggtggtttctcgcca

SEQ ID NO: 673039 - DNA, 25 bp, Homo sapien
gcctgtggatgcttcccaagaagga

SEQ ID NO: 673040 - DNA, 25 bp, Homo sapien
ctggagaccgagccatgcctgtgga

SEQ ID NO: 673041 - DNA, 25 bp, Homo sapien
gagaccgagccatgcctgtggatgc

SEQ ID NO: 673042 - DNA, 25 bp, Homo sapien
cctgtggatgcttcccaagaaggat

SEQ ID NO: 673043 - DNA, 25 bp, Homo sapien
tccactttcaggaacaagcctttcc

SEQ ID NO: 673044 - DNA, 25 bp, Homo sapien
ccatagcctccactttcaggaacaa

SEQ ID NO: 673045 - DNA, 25 bp, Homo sapien
ttcctccctgagatcctcgctgagg

SEQ ID NO: 673046 - DNA, 25 bp, Homo sapien
ctccctgagatcctcgctgaggcac

SEQ ID NO: 673047 - DNA, 25 bp, Homo sapien
tctcaggcgttcgatgaaactattc

SEQ ID NO: 673048 - DNA, 25 bp, Homo sapien
caagggagcctatagttgattggac

SEQ ID NO: 673049 - DNA, 25 bp, Homo sapien
ctgacaaaagagctgattgcgctgc

SEQ ID NO: 673050 - DNA, 25 bp, Homo sapien
tggacaattactccagtgctggaac

SEQ ID NO: 673051 - DNA, 25 bp, Homo sapien
ctgttatttgctgaatctttgccag

SEQ ID NO: 673052 - DNA, 25 bp, Homo sapien
tgttatttgctgaatctttgccagg

SEQ ID NO: 673053 - DNA, 25 bp, Homo sapien
tatgcgttctacctccattaaagct

SEQ ID NO: 673054 - DNA, 25 bp, Homo sapien
cgctgttatgcgttctacctccatt

SEQ ID NO: 673055 - DNA, 25 bp, Homo sapien
aagctccagtagcaatgcagcagca

SEQ ID NO: 673056 - DNA, 25 bp, Homo sapien
ctccattaaagctccagtagcaatg

SEQ ID NO: 673057 - DNA, 25 bp, Homo sapien
tgagggtttagttccctctggaatc

SEQ ID NO: 673058 - DNA, 25 bp, Homo sapien
catgagggtttagttccctctggaa

SEQ ID NO: 673059 - DNA, 25 bp, Homo sapien
aatccatgagggtttagttccctct

SEQ ID NO: 673060 - DNA, 25 bp, Homo sapien
aaatccatgaccctcccaaaatcca

SEQ ID NO: 673061 - DNA, 25 bp, Homo sapien
tgtttccgaaggagtagtgactcgc

SEQ ID NO: 673062 - DNA, 25 bp, Homo sapien
tctgggagtcctctctaaagggctg

SEQ ID NO: 673063 - DNA, 25 bp, Homo sapien
gaagctactcgtgttctcagcaaca

SEQ ID NO: 673064 - DNA, 25 bp, Homo sapien
gataaatgctcatgcaacgcgccag

SEQ ID NO: 673065 - DNA, 25 bp, Homo sapien
taaactgcgtgttccctgtcatgat

SEQ ID NO: 673066 - DNA, 25 bp, Homo sapien
tgtggtgaagagcatcctccgggca

SEQ ID NO: 673067 - DNA, 25 bp, Homo sapien
tcataaatgattcaagatccctggg

SEQ ID NO: 673068 - DNA, 25 bp, Homo sapien
cacatgtcgctgatgggcacagtgt

SEQ ID NO: 673069 - DNA, 25 bp, Homo sapien
caattagttgcaaacatcattgcac

SEQ ID NO: 673070 - DNA, 25 bp, Homo sapien
aattagttgcaaacatcattgcact

SEQ ID NO: 673071 - DNA, 25 bp, Homo sapien
ttagttgcaaacatcattgcacttg

SEQ ID NO: 673072 - DNA, 25 bp, Homo sapien
agttgcaaacatcattgcacttgga

SEQ ID NO: 673073 - DNA, 25 bp, Homo sapien
cctcaaaaatgggtgagtcgggcct

SEQ ID NO: 673074 - DNA, 25 bp, Homo sapien
tctccaaggaaagaagcggccaagg

SEQ ID NO: 673075 - DNA, 25 bp, Homo sapien
tcctagaagctagcaagaccgcact

SEQ ID NO: 673076 - DNA, 25 bp, Homo sapien
tacaacgtccgggagaaggacatcc

SEQ ID NO: 673077 - DNA, 25 bp, Homo sapien
cggtaaataacgttgtgttgagtca

SEQ ID NO: 673078 - DNA, 25 bp, Homo sapien
ttctcctaataggtctcgatctaga

SEQ ID NO: 673079 - DNA, 25 bp, Homo sapien
tagatcaaagagcaaatctaagccc

SEQ ID NO: 673080 - DNA, 25 bp, Homo sapien
aaatctaagcccaagtctgatcggg

SEQ ID NO: 673081 - DNA, 25 bp, Homo sapien
gttccaggtcgcggagcaaaggtcg

SEQ ID NO: 673082 - DNA, 25 bp, Homo sapien
aatctagatcaaagagcaaatctaa

SEQ ID NO: 673083 - DNA, 25 bp, Homo sapien
ctacttcaagatcccgttctagatc

SEQ ID NO: 673084 - DNA, 25 bp, Homo sapien
aagagctacttcaagatcccgttct

SEQ ID NO: 673085 - DNA, 25 bp, Homo sapien
gagctacttcaagatcccgttctag

SEQ ID NO: 673086 - DNA, 25 bp, Homo sapien
gctacttcaagatcccgttctagat

SEQ ID NO: 673087 - DNA, 25 bp, Homo sapien
ccaaccttaggaatatagtgcccca

SEQ ID NO: 673088 - DNA, 25 bp, Homo sapien
tagtgccccaaaaggcggatgcttc

SEQ ID NO: 673089 - DNA, 25 bp, Homo sapien
gagtcaaatatctagggcattcaca

SEQ ID NO: 673090 - DNA, 25 bp, Homo sapien
tcatgtggaaatggaagtagcctct

SEQ ID NO: 673091 - DNA, 25 bp, Homo sapien
gttgatgacatgctccataccagtg

SEQ ID NO: 673092 - DNA, 25 bp, Homo sapien
aacatgccgtagtgcctttatggcc

SEQ ID NO: 673093 - DNA, 25 bp, Homo sapien
caactgggctctcttgttaatagga

SEQ ID NO: 673094 - DNA, 25 bp, Homo sapien
cattgtataggtaaatgcctgcacc

SEQ ID NO: 673095 - DNA, 25 bp, Homo sapien
ggtcagtggaactcaactcaatttg

SEQ ID NO: 673096 - DNA, 25 bp, Homo sapien
cctaattctgtcttcggtcagtgga

SEQ ID NO: 673097 - DNA, 25 bp, Homo sapien
tgcctggccttctaatcaatgatac

SEQ ID NO: 673098 - DNA, 25 bp, Homo sapien
cataggccttttcggtggacagagc

SEQ ID NO: 673099 - DNA, 25 bp, Homo sapien
ccagtgtaatcacaaagggaggctt

SEQ ID NO: 673100 - DNA, 25 bp, Homo sapien
ctctgaagatggacggagccacgga

SEQ ID NO: 673101 - DNA, 25 bp, Homo sapien
aaaaaatgccttaccagatgtgtgg

SEQ ID NO: 673102 - DNA, 25 bp, Homo sapien
gatgtaattatctggctaggcccag

SEQ ID NO: 673103 - DNA, 25 bp, Homo sapien
ggctttgctgtactgagccgtggct

SEQ ID NO: 673104 - DNA, 25 bp, Homo sapien
aaagggctttgctgtactgagccgt

SEQ ID NO: 673105 - DNA, 25 bp, Homo sapien
tttgctgtactgagccgtggctgtc

SEQ ID NO: 673106 - DNA, 25 bp, Homo sapien
gtttctttgattcctctgttcctca

SEQ ID NO: 673107 - DNA, 25 bp, Homo sapien
cctgttatgtaaaagttgagggagt

SEQ ID NO: 673108 - DNA, 25 bp, Homo sapien
gagggagttacacagtccttttatg

SEQ ID NO: 673109 - DNA, 25 bp, Homo sapien
ggccctggctgccacgagattcacc

SEQ ID NO: 673110 - DNA, 25 bp, Homo sapien
tcatagatccaatcctgttatgtaa

SEQ ID NO: 673111 - DNA, 25 bp, Homo sapien
agcttctggggcacacacttcagaa

SEQ ID NO: 673112 - DNA, 25 bp, Homo sapien
tcctgagctgccacgagcttctggg

SEQ ID NO: 673113 - DNA, 25 bp, Homo sapien
tgagctgagcctcctgagctgccac

SEQ ID NO: 673114 - DNA, 25 bp, Homo sapien
gagcctcctgagctgccacgagctt

SEQ ID NO: 673115 - DNA, 25 bp, Homo sapien
gctcttgcgaatatcaccagtaggg

SEQ ID NO: 673116 - DNA, 25 bp, Homo sapien
gcctgacctaatggaagctctggaa

SEQ ID NO: 673117 - DNA, 25 bp, Homo sapien
tagcaactcgtcattggctggcggc

SEQ ID NO: 673118 - DNA, 25 bp, Homo sapien
tcaagtgaggtagctccctaggctc

SEQ ID NO: 673119 - DNA, 25 bp, Homo sapien
actagtggaccagtatcctgcggca

SEQ ID NO: 673120 - DNA, 25 bp, Homo sapien
gatcctgagagctgataagcaccca

SEQ ID NO: 673121 - DNA, 25 bp, Homo sapien
tctcagacgtagcaaggaaaaccca

SEQ ID NO: 673122 - DNA, 25 bp, Homo sapien
caacgtactgattccaagcttggcg

SEQ ID NO: 673123 - DNA, 25 bp, Homo sapien
catcagaagggagctcatgtgctgg

SEQ ID NO: 673124 - DNA, 25 bp, Homo sapien
cccaagcacctgtttgtgagccaga

SEQ ID NO: 673125 - DNA, 25 bp, Homo sapien
agtggatgtcactcccatgtgccag

SEQ ID NO: 673126 - DNA, 25 bp, Homo sapien
tacctgcgcagcacaagagctcagg

SEQ ID NO: 673127 - DNA, 25 bp, Homo sapien
ccaaagggaggtgtactggtagact

SEQ ID NO: 673128 - DNA, 25 bp, Homo sapien
tatggttgttctgtactggtggccc

SEQ ID NO: 673129 - DNA, 25 bp, Homo sapien
cacgtggcacgctgtttcaaacctt

SEQ ID NO: 673130 - DNA, 25 bp, Homo sapien
ggtggccctaaaagtagtctgtcca

SEQ ID NO: 673131 - DNA, 25 bp, Homo sapien
acataggaacccagcttccactgag

SEQ ID NO: 673132 - DNA, 25 bp, Homo sapien
tatctgaattctccgggtccctgaa

SEQ ID NO: 673133 - DNA, 25 bp, Homo sapien
cagtccacataggaacccagcttcc

SEQ ID NO: 673134 - DNA, 25 bp, Homo sapien
cttttctatctgaattctccgggtc

SEQ ID NO: 673135 - DNA, 25 bp, Homo sapien
gcactttcattcacatgcactttgg

SEQ ID NO: 673136 - DNA, 25 bp, Homo sapien
cttctggcttaagctaaggtgactc

SEQ ID NO: 673137 - DNA, 25 bp, Homo sapien
cctagggcagttaggacctttctgt

SEQ ID NO: 673138 - DNA, 25 bp, Homo sapien
cacttatattttggcccctggcagc

SEQ ID NO: 673139 - DNA, 25 bp, Homo sapien
ggagttttcaggtgagaggctcacc

SEQ ID NO: 673140 - DNA, 25 bp, Homo sapien
catctttcctagtacctgtttactt

SEQ ID NO: 673141 - DNA, 25 bp, Homo sapien
gatacctgcctgctcgcctattggt

SEQ ID NO: 673142 - DNA, 25 bp, Homo sapien
tctccagattgactagttacctagc

SEQ ID NO: 673143 - DNA, 25 bp, Homo sapien
gaacttttgagtaggcggtagtgcc

SEQ ID NO: 673144 - DNA, 25 bp, Homo sapien
ttaacttcgagataccagccaggcg

SEQ ID NO: 673145 - DNA, 25 bp, Homo sapien
gactcaccgtggcttttcatagaga

SEQ ID NO: 673146 - DNA, 25 bp, Homo sapien
gagtgagggtgcaagctttctagaa

SEQ ID NO: 673147 - DNA, 25 bp, Homo sapien
cacccagccaagattagtcatttct

SEQ ID NO: 673148 - DNA, 25 bp, Homo sapien
cccagccaagattagtcatttctaa

SEQ ID NO: 673149 - DNA, 25 bp, Homo sapien
cagccaagattagtcatttctaaag

SEQ ID NO: 673150 - DNA, 25 bp, Homo sapien
gccaagattagtcatttctaaagat

SEQ ID NO: 673151 - DNA, 25 bp, Homo sapien
tctgggtgtgaattggcactcttca

SEQ ID NO: 673152 - DNA, 25 bp, Homo sapien
tcggatttgagtatctgaccctgct

SEQ ID NO: 673153 - DNA, 25 bp, Homo sapien
tgtcatcaatagaaccaaggtggga

SEQ ID NO: 673154 - DNA, 25 bp, Homo sapien
ggtactaggatacatgagatgcact

SEQ ID NO: 673155 - DNA, 25 bp, Homo sapien
cctccatctccccagttgaggtgat

SEQ ID NO: 673156 - DNA, 25 bp, Homo sapien
tccatctccccagttgaggtgattc

SEQ ID NO: 673157 - DNA, 25 bp, Homo sapien
ggagtctgttctgttgcccggggtg

SEQ ID NO: 673158 - DNA, 25 bp, Homo sapien
agtctgttctgttgcccggggtgga

SEQ ID NO: 673159 - DNA, 25 bp, Homo sapien
acgcgctggtgagacgagccgggag

SEQ ID NO: 673160 - DNA, 25 bp, Homo sapien
gccggggggatgtctcggcggacgc

SEQ ID NO: 673161 - DNA, 25 bp, Homo sapien
cgcgctggtgagacgagccgggagg

SEQ ID NO: 673162 - DNA, 25 bp, Homo sapien
atgtctcggcggacgcgctggtgag

SEQ ID NO: 673163 - DNA, 25 bp, Homo sapien
accgcgcccggctgatttccatttt

SEQ ID NO: 673164 - DNA, 25 bp, Homo sapien
cgacctcaggtgatctgcctgcctt

SEQ ID NO: 673165 - DNA, 25 bp, Homo sapien
ccgcgcccggctgatttccattttt

SEQ ID NO: 673166 - DNA, 25 bp, Homo sapien
ggcggctcctggtgctaacaacaaa

SEQ ID NO: 673167 - DNA, 25 bp, Homo sapien
tacttacagttgaggaagcccacag

SEQ ID NO: 673168 - DNA, 25 bp, Homo sapien
ccctgcctggatggtaaccctcttg

SEQ ID NO: 673169 - DNA, 25 bp, Homo sapien
caccagggtctgttgggaacacata

SEQ ID NO: 673170 - DNA, 25 bp, Homo sapien
tcctgtgctcaccctctcttggtgc

SEQ ID NO: 673171 - DNA, 25 bp, Homo sapien
ctcagaccctgcttaggatggggga

SEQ ID NO: 673172 - DNA, 25 bp, Homo sapien
atctcagaccctgcttaggatgggg

SEQ ID NO: 673173 - DNA, 25 bp, Homo sapien
ctcctgtgctcaccctctcttggtg

SEQ ID NO: 673174 - DNA, 25 bp, Homo sapien
tgtgacttccacaatttacccatta

SEQ ID NO: 673175 - DNA, 25 bp, Homo sapien
tacacatagtgctgttagcacctct

SEQ ID NO: 673176 - DNA, 25 bp, Homo sapien
cccattatctcaaaggatgtgtgga

SEQ ID NO: 673177 - DNA, 25 bp, Homo sapien
gatgtgtggattgcttccagactga

SEQ ID NO: 673178 - DNA, 25 bp, Homo sapien
tcttccatgcattgatgaggcgtgt

SEQ ID NO: 673179 - DNA, 25 bp, Homo sapien
gcattgcacgttcttccatgcattg

SEQ ID NO: 673180 - DNA, 25 bp, Homo sapien
catgcattgatgaggcgtgtgctcc

SEQ ID NO: 673181 - DNA, 25 bp, Homo sapien
tgcacgttcttccatgcattgatga

SEQ ID NO: 673182 - DNA, 25 bp, Homo sapien
ctcttgctgactctttcgtgtcatt

SEQ ID NO: 673183 - DNA, 25 bp, Homo sapien
cttgctgactctttcgtgtcatttt

SEQ ID NO: 673184 - DNA, 25 bp, Homo sapien
tctcttgctgactctttcgtgtcat

SEQ ID NO: 673185 - DNA, 25 bp, Homo sapien
ctctcttgctgactctttcgtgtca

SEQ ID NO: 673186 - DNA, 25 bp, Homo sapien
cgccatcgacattccagatatcggg

SEQ ID NO: 673187 - DNA, 25 bp, Homo sapien
ttagcgccatcgacattccagatat

SEQ ID NO: 673188 - DNA, 25 bp, Homo sapien
caattagcgccatcgacattccaga

SEQ ID NO: 673189 - DNA, 25 bp, Homo sapien
gctggcaattagcgccatcgacatt

SEQ ID NO: 673190 - DNA, 25 bp, Homo sapien
tctgctctgaactaggaggactgac

SEQ ID NO: 673191 - DNA, 25 bp, Homo sapien
catcgttctgctctgaactaggagg

SEQ ID NO: 673192 - DNA, 25 bp, Homo sapien
tcgttctgctctgaactaggaggac

SEQ ID NO: 673193 - DNA, 25 bp, Homo sapien
gtgtcatcgttctgctctgaactag

SEQ ID NO: 673194 - DNA, 25 bp, Homo sapien
tgaggatcataagggcaaatttcaa

SEQ ID NO: 673195 - DNA, 25 bp, Homo sapien
gggttctttctcctgcacgatgcca

SEQ ID NO: 673196 - DNA, 25 bp, Homo sapien
cacgtggcaggcgttgtatttgcag

SEQ ID NO: 673197 - DNA, 25 bp, Homo sapien
tccacagcgctcctgttgacacaaa

SEQ ID NO: 673198 - DNA, 25 bp, Homo sapien
gaacagagttagcaaatggcacccg

SEQ ID NO: 673199 - DNA, 25 bp, Homo sapien
tggcacccgagacagaactatagca

SEQ ID NO: 673200 - DNA, 25 bp, Homo sapien
tgctagagtctaacggaaatgcttc

SEQ ID NO: 673201 - DNA, 25 bp, Homo sapien
tagcagatgcaagagccaaaaaccc

SEQ ID NO: 673202 - DNA, 25 bp, Homo sapien
taaagaacagtggagtgaagtggct

SEQ ID NO: 673203 - DNA, 25 bp, Homo sapien
ctaaagaacagtggagtgaagtggc

SEQ ID NO: 673204 - DNA, 25 bp, Homo sapien
gtggagtgaagtggctgctgtactt

SEQ ID NO: 673205 - DNA, 25 bp, Homo sapien
gagtgaagtggctgctgtacttcat

SEQ ID NO: 673206 - DNA, 25 bp, Homo sapien
tggggcactgctacacactcttttt

SEQ ID NO: 673207 - DNA, 25 bp, Homo sapien
gattctgcaggcaatacagatgctg

SEQ ID NO: 673208 - DNA, 25 bp, Homo sapien
tggccagagtaggagtgagtggaaa

SEQ ID NO: 673209 - DNA, 25 bp, Homo sapien
gaaggagaagcacacgcatcgcatg

SEQ ID NO: 673210 - DNA, 25 bp, Homo sapien
tcttctgtcccatcaccaacatgag

SEQ ID NO: 673211 - DNA, 25 bp, Homo sapien
tgtcccatcaccaacatgagcagtt

SEQ ID NO: 673212 - DNA, 25 bp, Homo sapien
tctgtcccatcaccaacatgagcag

SEQ ID NO: 673213 - DNA, 25 bp, Homo sapien
cttctgtcccatcaccaacatgagc

SEQ ID NO: 673214 - DNA, 25 bp, Homo sapien
cagaaggcattagatgcggagagca

SEQ ID NO: 673215 - DNA, 25 bp, Homo sapien
tgcagcgcacgcttttaaggaaaga

SEQ ID NO: 673216 - DNA, 25 bp, Homo sapien
tgagctcctattcccctttgatgtg

SEQ ID NO: 673217 - DNA, 25 bp, Homo sapien
cacagccagcgtgagagaggaaaac

SEQ ID NO: 673218 - DNA, 25 bp, Homo sapien
ttctctgctgcgagagagcttctgg

SEQ ID NO: 673219 - DNA, 25 bp, Homo sapien
ggctgctgcatttgtcaggtagagg

SEQ ID NO: 673220 - DNA, 25 bp, Homo sapien
cctgttgaagtaaatgggctgtatt

SEQ ID NO: 673221 - DNA, 25 bp, Homo sapien
gaagagcagtggatacattcctggc

SEQ ID NO: 673222 - DNA, 25 bp, Homo sapien
tttctagtttctggcattctgcatc

SEQ ID NO: 673223 - DNA, 25 bp, Homo sapien
gttgtacttcccaaggtatgttcca

SEQ ID NO: 673224 - DNA, 25 bp, Homo sapien
acactggtttctagtttctggcatt

SEQ ID NO: 673225 - DNA, 25 bp, Homo sapien
ttgtacttcccaaggtatgttccat

SEQ ID NO: 673226 - DNA, 25 bp, Homo sapien
ctgtggatgctggaagttaataaag

SEQ ID NO: 673227 - DNA, 25 bp, Homo sapien
ttgaagaagtcatgcctgtggatgc

SEQ ID NO: 673228 - DNA, 25 bp, Homo sapien
caactcccttgaagaagtcatgcct

SEQ ID NO: 673229 - DNA, 25 bp, Homo sapien
gaagttaataaagggcccatgtcca

SEQ ID NO: 673230 - DNA, 25 bp, Homo sapien
tttagtatatgtgctgccaaagcaa

SEQ ID NO: 673231 - DNA, 25 bp, Homo sapien
gcatgtcatcattgtgtaggggccg

SEQ ID NO: 673232 - DNA, 25 bp, Homo sapien
gtatatgtgctgccaaagcaagcac

SEQ ID NO: 673233 - DNA, 25 bp, Homo sapien
ctaatcttctctgtattgttctaat

SEQ ID NO: 673234 - DNA, 25 bp, Homo sapien
aggtgagtgtagccagccaggcctt

SEQ ID NO: 673235 - DNA, 25 bp, Homo sapien
cttgtgatgcctgtttctccttcac

SEQ ID NO: 673236 - DNA, 25 bp, Homo sapien
tgttccattgtcagaagggagaggt

SEQ ID NO: 673237 - DNA, 25 bp, Homo sapien
cagttcagccccaaggaaaggcctc

SEQ ID NO: 673238 - DNA, 25 bp, Homo sapien
caactcaaatatgctgccgtaagct

SEQ ID NO: 673239 - DNA, 25 bp, Homo sapien
gccgtaagctttgctgagctccctt

SEQ ID NO: 673240 - DNA, 25 bp, Homo sapien
ggtagcaggtatagcacaactcaaa

SEQ ID NO: 673241 - DNA, 25 bp, Homo sapien
tagcaggtatagcacaactcaaata

SEQ ID NO: 673242 - DNA, 25 bp, Homo sapien
tcatcctgtgttgactggataaagc

SEQ ID NO: 673243 - DNA, 25 bp, Homo sapien
cctgtgttgactggataaagcattc

SEQ ID NO: 673244 - DNA, 25 bp, Homo sapien
tgttgactggataaagcattctgtc

SEQ ID NO: 673245 - DNA, 25 bp, Homo sapien
tgactggataaagcattctgtcagc

SEQ ID NO: 673246 - DNA, 25 bp, Homo sapien
catcactcagcctcaacactgcttc

SEQ ID NO: 673247 - DNA, 25 bp, Homo sapien
tcatcactcagcctcaacactgctt

SEQ ID NO: 673248 - DNA, 25 bp, Homo sapien
tcactcagcctcaacactgcttccc

SEQ ID NO: 673249 - DNA, 25 bp, Homo sapien
ctcagcctcaacactgcttccctca

SEQ ID NO: 673250 - DNA, 25 bp, Homo sapien
tgcaagagtagtcagctgccctcct

SEQ ID NO: 673251 - DNA, 25 bp, Homo sapien
gggaaatgcaagagtagtcagctgc

SEQ ID NO: 673252 - DNA, 25 bp, Homo sapien
cccttgttgctgctgggctcccaaa

SEQ ID NO: 673253 - DNA, 25 bp, Homo sapien
gggagagcacagttcggcacccccc

SEQ ID NO: 673254 - DNA, 25 bp, Homo sapien
aagttaccacgtgccatggctgtga

SEQ ID NO: 673255 - DNA, 25 bp, Homo sapien
tggaaggaaaagtgtcaggcccatt

SEQ ID NO: 673256 - DNA, 25 bp, Homo sapien
agaacaaccactcagagcatctggg

SEQ ID NO: 673257 - DNA, 25 bp, Homo sapien
gagtgccttcactacttggagtagg

SEQ ID NO: 673258 - DNA, 25 bp, Homo sapien
ctgttagggtaagtgcagttcagga

SEQ ID NO: 673259 - DNA, 25 bp, Homo sapien
tgagtaagtgggctgttgtctactt

SEQ ID NO: 673260 - DNA, 25 bp, Homo sapien
ggatcaattatggatgaggctccac

SEQ ID NO: 673261 - DNA, 25 bp, Homo sapien
gaggctccacagcagatgagtaagt

SEQ ID NO: 673262 - DNA, 25 bp, Homo sapien
tgagtacactcccattgtgcaacca

SEQ ID NO: 673263 - DNA, 25 bp, Homo sapien
ctggagtgggcaacaacccatccac

SEQ ID NO: 673264 - DNA, 25 bp, Homo sapien
cagcctcttatgaatactgttctac

SEQ ID NO: 673265 - DNA, 25 bp, Homo sapien
agattcatccacatactgtagccca

SEQ ID NO: 673266 - DNA, 25 bp, Homo sapien
catccttcctggtgcgctatctcca

SEQ ID NO: 673267 - DNA, 25 bp, Homo sapien
tccttcctggtgcgctatctccagc

SEQ ID NO: 673268 - DNA, 25 bp, Homo sapien
cttcctggtgcgctatctccagccg

SEQ ID NO: 673269 - DNA, 25 bp, Homo sapien
ttcctggtgcgctatctccagccgt

SEQ ID NO: 673270 - DNA, 25 bp, Homo sapien
gacacccgcagaaacttggtaattg

SEQ ID NO: 673271 - DNA, 25 bp, Homo sapien
taatgttcctgaaaatagtctgggc

SEQ ID NO: 673272 - DNA, 25 bp, Homo sapien
aattaagactcttgatgtccccgag

SEQ ID NO: 673273 - DNA, 25 bp, Homo sapien
taattggttccgaataccaagagac

SEQ ID NO: 673274 - DNA, 25 bp, Homo sapien
agcgccttgtggctccagtgtggac

SEQ ID NO: 673275 - DNA, 25 bp, Homo sapien
ttaggatgtgtaagcgccttgtggc

SEQ ID NO: 673276 - DNA, 25 bp, Homo sapien
taggatgtgtaagcgccttgtggct

SEQ ID NO: 673277 - DNA, 25 bp, Homo sapien
tcctgatcccatttccaggaagtaa

SEQ ID NO: 673278 - DNA, 25 bp, Homo sapien
ttccaggaagtaactagcaggaaaa

SEQ ID NO: 673279 - DNA, 25 bp, Homo sapien
ttcccagcctctaagaagcccacga

SEQ ID NO: 673280 - DNA, 25 bp, Homo sapien
ccagcctctaagaagcccacgagca

SEQ ID NO: 673281 - DNA, 25 bp, Homo sapien
agaagcccacgagcaggtgtgggct

SEQ ID NO: 673282 - DNA, 25 bp, Homo sapien
agcctctaagaagcccacgagcagg

SEQ ID NO: 673283 - DNA, 25 bp, Homo sapien
gagtcacaaaacgtcctttctcagg

SEQ ID NO: 673284 - DNA, 25 bp, Homo sapien
tggtgagtcacaaaacgtcctttct

SEQ ID NO: 673285 - DNA, 25 bp, Homo sapien
ccctgcggccctggtgagtcacaaa

SEQ ID NO: 673286 - DNA, 25 bp, Homo sapien
gccctggtgagtcacaaaacgtcct

SEQ ID NO: 673287 - DNA, 25 bp, Homo sapien
ctgtgactgtcagcccacacacctc

SEQ ID NO: 673288 - DNA, 25 bp, Homo sapien
ctgcatctgcggctgctgtgactgt

SEQ ID NO: 673289 - DNA, 25 bp, Homo sapien
cgtcctgcatctgcggctgctgtga

SEQ ID NO: 673290 - DNA, 25 bp, Homo sapien
tgactgtcagcccacacacctccac

SEQ ID NO: 673291 - DNA, 25 bp, Homo sapien
ccattctgaacccacttgggcctcg

SEQ ID NO: 673292 - DNA, 25 bp, Homo sapien
cattctgaacccacttgggcctcgc

SEQ ID NO: 673293 - DNA, 25 bp, Homo sapien
tctgaacccacttgggcctcgccat

SEQ ID NO: 673294 - DNA, 25 bp, Homo sapien
ttctgaacccacttgggcctcgcca

SEQ ID NO: 673295 - DNA, 25 bp, Homo sapien
tctctttgggaactttcaagttgga

SEQ ID NO: 673296 - DNA, 25 bp, Homo sapien
gaattaaagaaggatcgcctcttta

SEQ ID NO: 673297 - DNA, 25 bp, Homo sapien
agaaggatcgcctctttaggatgga

SEQ ID NO: 673298 - DNA, 25 bp, Homo sapien
gggtggccagtcattgccactttta

SEQ ID NO: 673299 - DNA, 25 bp, Homo sapien
aagaaatcgatgtggcatgagcaga

SEQ ID NO: 673300 - DNA, 25 bp, Homo sapien
tgttgctattcgctggatgggatga

SEQ ID NO: 673301 - DNA, 25 bp, Homo sapien
ggaatagtggaacttggatttgctg

SEQ ID NO: 673302 - DNA, 25 bp, Homo sapien
tgctgccaacccagtgttgaccctt

SEQ ID NO: 673303 - DNA, 25 bp, Homo sapien
gagcaaaaataacgttcttgtgttg

SEQ ID NO: 673304 - DNA, 25 bp, Homo sapien
aaataacgttcttgtgttgctttct

SEQ ID NO: 673305 - DNA, 25 bp, Homo sapien
ttagagcaaaaataacgttcttgtg

SEQ ID NO: 673306 - DNA, 25 bp, Homo sapien
aacgttcttgtgttgctttctagtc

SEQ ID NO: 673307 - DNA, 25 bp, Homo sapien
cgaagagtggcggtggttctctttt

SEQ ID NO: 673308 - DNA, 25 bp, Homo sapien
gcttctggcaaagcctccctgcagt

SEQ ID NO: 673309 - DNA, 25 bp, Homo sapien
gccactagggcctgcgcgatgtggg

SEQ ID NO: 673310 - DNA, 25 bp, Homo sapien
cgacaagtgaggtctcgcgaagagt

SEQ ID NO: 673311 - DNA, 25 bp, Homo sapien
gaggcttagcatctccgttccagca

SEQ ID NO: 673312 - DNA, 25 bp, Homo sapien
caagaactgatactgcataggatgt

SEQ ID NO: 673313 - DNA, 25 bp, Homo sapien
ttccccatgtggtgcttcacagcca

SEQ ID NO: 673314 - DNA, 25 bp, Homo sapien
ctggactgaagggatgaaggccttc

SEQ ID NO: 673315 - DNA, 25 bp, Homo sapien
ctttgtctcatgaagtgagagagat

SEQ ID NO: 673316 - DNA, 25 bp, Homo sapien
gtctcatgaagtgagagagatgtgt

SEQ ID NO: 673317 - DNA, 25 bp, Homo sapien
catgaagtgagagagatgtgtcatc

SEQ ID NO: 673318 - DNA, 25 bp, Homo sapien
tctttgtctcatgaagtgagagaga

SEQ ID NO: 673319 - DNA, 25 bp, Homo sapien
cagtcacagtatctttgcctgagga

SEQ ID NO: 673320 - DNA, 25 bp, Homo sapien
cgtgtgctgcaggttcacaaggtga

SEQ ID NO: 673321 - DNA, 25 bp, Homo sapien
cacaaggtgatggtttggttggtcc

SEQ ID NO: 673322 - DNA, 25 bp, Homo sapien
caggactcgggctccgatgtggact

SEQ ID NO: 673323 - DNA, 25 bp, Homo sapien
gtcaaagctgggaacatccaactct

SEQ ID NO: 673324 - DNA, 25 bp, Homo sapien
tctgtggcctgagttttctctccca

SEQ ID NO: 673325 - DNA, 25 bp, Homo sapien
tgtggcctgagttttctctcccagt

SEQ ID NO: 673326 - DNA, 25 bp, Homo sapien
tcccagtcaaagctgggaacatcca

SEQ ID NO: 673327 - DNA, 25 bp, Homo sapien
cacagccttggatttgccttgctaa

SEQ ID NO: 673328 - DNA, 25 bp, Homo sapien
tattgcaacggcaagagcactgcac

SEQ ID NO: 673329 - DNA, 25 bp, Homo sapien
cgtaaccatcacgttgcctcagaat

SEQ ID NO: 673330 - DNA, 25 bp, Homo sapien
gctgcctccatggataagaagagag

SEQ ID NO: 673331 - DNA, 25 bp, Homo sapien
ggccagggatagtgggagggcccca

SEQ ID NO: 673332 - DNA, 25 bp, Homo sapien
tggccagggatagtgggagggcccc

SEQ ID NO: 673333 - DNA, 25 bp, Homo sapien
taccaggggcacctccgagttgggc

SEQ ID NO: 673334 - DNA, 25 bp, Homo sapien
tgccatgcttttgtctaacgtccct

SEQ ID NO: 673335 - DNA, 25 bp, Homo sapien
ggcacctccgagttgggcttttcca

SEQ ID NO: 673336 - DNA, 25 bp, Homo sapien
tttccaaggtgccatgcttttgtct

SEQ ID NO: 673337 - DNA, 25 bp, Homo sapien
gaggatggttgcagactttttcccc

SEQ ID NO: 673338 - DNA, 25 bp, Homo sapien
aagcggaccctctggcatgatgaca

SEQ ID NO: 673339 - DNA, 25 bp, Homo sapien
ttgggacaggccttgaagcggaccc

SEQ ID NO: 673340 - DNA, 25 bp, Homo sapien
ccttgaggatttcatcacactgagg

SEQ ID NO: 673341 - DNA, 25 bp, Homo sapien
taactctagccagtacattggctgt

SEQ ID NO: 673342 - DNA, 25 bp, Homo sapien
aagcagattaactctagccagtaca

SEQ ID NO: 673343 - DNA, 25 bp, Homo sapien
tagccagtacattggctgtgccctg

SEQ ID NO: 673344 - DNA, 25 bp, Homo sapien
ttctgcttctgtatccctcctctga

SEQ ID NO: 673345 - DNA, 25 bp, Homo sapien
ccacagcacaagtgagcaatggccg

SEQ ID NO: 673346 - DNA, 25 bp, Homo sapien
gatgacgctggagacaaaactgtcc

SEQ ID NO: 673347 - DNA, 25 bp, Homo sapien
cactttgcccttagcacgtggcgga

SEQ ID NO: 673348 - DNA, 25 bp, Homo sapien
tagcacgtggcggaaggcccgtcac

SEQ ID NO: 673349 - DNA, 25 bp, Homo sapien
ttaaaaagcaacgtgtattcacaat

SEQ ID NO: 673350 - DNA, 25 bp, Homo sapien
aaagcaacgtgtattcacaatatta

SEQ ID NO: 673351 - DNA, 25 bp, Homo sapien
caatattacaattttgaatgggaac

SEQ ID NO: 673352 - DNA, 25 bp, Homo sapien
gcaacgtgtattcacaatattacaa

SEQ ID NO: 673353 - DNA, 25 bp, Homo sapien
gactccactgaattcaaggcaaaaa

SEQ ID NO: 673354 - DNA, 25 bp, Homo sapien
taaaaaccaatatcagggccaggtg

SEQ ID NO: 673355 - DNA, 25 bp, Homo sapien
tatgttatctatactgttccagggc

SEQ ID NO: 673356 - DNA, 25 bp, Homo sapien
gcattattcatatcagactccactg

SEQ ID NO: 673357 - DNA, 25 bp, Homo sapien
ccctccctgtgtctaagcgttcaca

SEQ ID NO: 673358 - DNA, 25 bp, Homo sapien
atttaagctccagggtatatatgca

SEQ ID NO: 673359 - DNA, 25 bp, Homo sapien
tcaacgcgccccagtgtgtagttcc

SEQ ID NO: 673360 - DNA, 25 bp, Homo sapien
tcacctaggtgctaaacccagtatg

SEQ ID NO: 673361 - DNA, 25 bp, Homo sapien
tttatcttaagggagacgcgcacaa

SEQ ID NO: 673362 - DNA, 25 bp, Homo sapien
aaaccgtttcgtcatcctcacagca

SEQ ID NO: 673363 - DNA, 25 bp, Homo sapien
gaaaccttgagaacgaagttacagc

SEQ ID NO: 673364 - DNA, 25 bp, Homo sapien
taaattgccggcgacgacttttgtc

SEQ ID NO: 673365 - DNA, 25 bp, Homo sapien
actatacctccaacaaaagtctaat

SEQ ID NO: 673366 - DNA, 25 bp, Homo sapien
tgctcaccattactaatcactagag

SEQ ID NO: 673367 - DNA, 25 bp, Homo sapien
ctattattggatacatacccaaagg

SEQ ID NO: 673368 - DNA, 25 bp, Homo sapien
ctgcaaactatacctccaacaaaag

SEQ ID NO: 673369 - DNA, 25 bp, Homo sapien
tcagacttcctagagctgcctgtgg

SEQ ID NO: 673370 - DNA, 25 bp, Homo sapien
aaatctgactcccacggttcctagg

SEQ ID NO: 673371 - DNA, 25 bp, Homo sapien
ccttaaatgcattccgggcatggca

SEQ ID NO: 673372 - DNA, 25 bp, Homo sapien
gacctcaaggcagtgggccagcatt

SEQ ID NO: 673373 - DNA, 25 bp, Homo sapien
taagtgaggtacatccaagtagcca

SEQ ID NO: 673374 - DNA, 25 bp, Homo sapien
aacaggacaagaatctccgagacgg

SEQ ID NO: 673375 - DNA, 25 bp, Homo sapien
tcaggaagctcaagagaccagggcg

SEQ ID NO: 673376 - DNA, 25 bp, Homo sapien
gcctggcactgcaaaaagacgggtc

SEQ ID NO: 673377 - DNA, 25 bp, Homo sapien
tcatgtcctcagcaggaacttctgg

SEQ ID NO: 673378 - DNA, 25 bp, Homo sapien
catgtcctcagcaggaacttctggc

SEQ ID NO: 673379 - DNA, 25 bp, Homo sapien
atgtcctcagcaggaacttctggct

SEQ ID NO: 673380 - DNA, 25 bp, Homo sapien
gaaacatggaacctgcagagctcaa

SEQ ID NO: 673381 - DNA, 25 bp, Homo sapien
agagctcaagtgttcacccctacgg

SEQ ID NO: 673382 - DNA, 25 bp, Homo sapien
tacggcagcacttaccaggctggta

SEQ ID NO: 673383 - DNA, 25 bp, Homo sapien
gatactcggcaggtcacaaacgggt

SEQ ID NO: 673384 - DNA, 25 bp, Homo sapien
gcccccagctccatcatggggaaaa

SEQ ID NO: 673385 - DNA, 25 bp, Homo sapien
ccccagctccatcatggggaaaaaa

SEQ ID NO: 673386 - DNA, 25 bp, Homo sapien
agcccccagctccatcatggggaaa

SEQ ID NO: 673387 - DNA, 25 bp, Homo sapien
ccagcccccagctccatcatgggga

SEQ ID NO: 673388 - DNA, 25 bp, Homo sapien
atggccaggccgatgttcagcagga

SEQ ID NO: 673389 - DNA, 25 bp, Homo sapien
ggccaggccgatgttcagcaggatc

SEQ ID NO: 673390 - DNA, 25 bp, Homo sapien
tggccaggccgatgttcagcaggat

SEQ ID NO: 673391 - DNA, 25 bp, Homo sapien
gagggcgcggactcggacccggaga

SEQ ID NO: 673392 - DNA, 25 bp, Homo sapien
agcctcagtcttgcgggccttggcc

SEQ ID NO: 673393 - DNA, 25 bp, Homo sapien
cccgccttggtcagccctcgagcct

SEQ ID NO: 673394 - DNA, 25 bp, Homo sapien
gtgcggcctccttccgcgccttctt

SEQ ID NO: 673395 - DNA, 25 bp, Homo sapien
gctggtcctcaaagggtgggggctc

SEQ ID NO: 673396 - DNA, 25 bp, Homo sapien
ggctcgggctggtcctcaaagggtg

SEQ ID NO: 673397 - DNA, 25 bp, Homo sapien
ctggtcctcaaagggtgggggctcg

SEQ ID NO: 673398 - DNA, 25 bp, Homo sapien
ctcgggctcgggctggtcctcaaag

SEQ ID NO: 673399 - DNA, 25 bp, Homo sapien
ctcgatggccatgcgctcggtggct

SEQ ID NO: 673400 - DNA, 25 bp, Homo sapien
agcaggctctccgagttctccagga

SEQ ID NO: 673401 - DNA, 25 bp, Homo sapien
agcagccggcgcttctgatattccg

SEQ ID NO: 673402 - DNA, 25 bp, Homo sapien
gtggtagccctggtaaagcgccacc

SEQ ID NO: 673403 - DNA, 25 bp, Homo sapien
agggcggcctgttccgctgcctcag

SEQ ID NO: 673404 - DNA, 25 bp, Homo sapien
tgcgagcaatgttggactcctggtt

SEQ ID NO: 673405 - DNA, 25 bp, Homo sapien
gctggtagaagtccggagccagctc

SEQ ID NO: 673406 - DNA, 25 bp, Homo sapien
gcaatgttggactcctggttggcag

SEQ ID NO: 673407 - DNA, 25 bp, Homo sapien
ctggatccatgcctctgggtgaggg

SEQ ID NO: 673408 - DNA, 25 bp, Homo sapien
gatccatgcctctgggtgagggtct

SEQ ID NO: 673409 - DNA, 25 bp, Homo sapien
catctctggatccatgcctctgggt

SEQ ID NO: 673410 - DNA, 25 bp, Homo sapien
atccatgcctctgggtgagggtctg

SEQ ID NO: 673411 - DNA, 25 bp, Homo sapien
tggtaccacttctgagccaggtccg

SEQ ID NO: 673412 - DNA, 25 bp, Homo sapien
tgctgccttcctggtaccacttctg

SEQ ID NO: 673413 - DNA, 25 bp, Homo sapien
taccacttctgagccaggtccgtca

SEQ ID NO: 673414 - DNA, 25 bp, Homo sapien
catgacaccaagctgctgccttcct

SEQ ID NO: 673415 - DNA, 25 bp, Homo sapien
tggggagctcgcagcccaatgcagc

SEQ ID NO: 673416 - DNA, 25 bp, Homo sapien
gaaatgaataggacccagcagccgc

SEQ ID NO: 673417 - DNA, 25 bp, Homo sapien
ggggagctcgcagcccaatgcagcc

SEQ ID NO: 673418 - DNA, 25 bp, Homo sapien
cctggggagctcgcagcccaatgca

SEQ ID NO: 673419 - DNA, 25 bp, Homo sapien
tgtctatccagatccgttgccagat

SEQ ID NO: 673420 - DNA, 25 bp, Homo sapien
tgagcatctatgtgcttcacggctg

SEQ ID NO: 673421 - DNA, 25 bp, Homo sapien
ggcccctgctcttgaaggttgtaga

SEQ ID NO: 673422 - DNA, 25 bp, Homo sapien
ggaaataacctaagggctcatccca

SEQ ID NO: 673423 - DNA, 25 bp, Homo sapien
gtctctgccctttggtaggcctcag

SEQ ID NO: 673424 - DNA, 25 bp, Homo sapien
tattaattgtgacccagaagccaac

SEQ ID NO: 673425 - DNA, 25 bp, Homo sapien
tgcaataagtcgagattccaccact

SEQ ID NO: 673426 - DNA, 25 bp, Homo sapien
cctaagcaccgtttatagaggtgga

SEQ ID NO: 673427 - DNA, 25 bp, Homo sapien
caccctcctgccagaccacactgct

SEQ ID NO: 673428 - DNA, 25 bp, Homo sapien
tgtccctgctcctgtaccccacttt

SEQ ID NO: 673429 - DNA, 25 bp, Homo sapien
gccagaccacactgctgctgtccct

SEQ ID NO: 673430 - DNA, 25 bp, Homo sapien
tccctgctcctgtaccccacttttg

SEQ ID NO: 673431 - DNA, 25 bp, Homo sapien
ccagcacgttgtggcggtacttgcc

SEQ ID NO: 673432 - DNA, 25 bp, Homo sapien
tgctcttgagctgcagcatgcggcg

SEQ ID NO: 673433 - DNA, 25 bp, Homo sapien
aatctcggccttctggcgcgcgata

SEQ ID NO: 673434 - DNA, 25 bp, Homo sapien
tcttaaggaagctgacacggctgcg

SEQ ID NO: 673435 - DNA, 25 bp, Homo sapien
ccgcgcggccgcctcggcattggcc

SEQ ID NO: 673436 - DNA, 25 bp, Homo sapien
tgagcgcgaagccgccacgcgggat

SEQ ID NO: 673437 - DNA, 25 bp, Homo sapien
gcgaagccgccacgcgggatggcgg

SEQ ID NO: 673438 - DNA, 25 bp, Homo sapien
cggccgcctcggcattggccaggag

SEQ ID NO: 673439 - DNA, 25 bp, Homo sapien
gctctggcgtactccgtagccatgg

SEQ ID NO: 673440 - DNA, 25 bp, Homo sapien
tagccatggcgcatgccgttggtga

SEQ ID NO: 673441 - DNA, 25 bp, Homo sapien
cgttggtgaactggccttggtacgt

SEQ ID NO: 673442 - DNA, 25 bp, Homo sapien
tgcgcagggacgacagcgacgtgcg

SEQ ID NO: 673443 - DNA, 25 bp, Homo sapien
gccttcgtctttgtacctccaccat

SEQ ID NO: 673444 - DNA, 25 bp, Homo sapien
tgccttcgtctttgtacctccacca

SEQ ID NO: 673445 - DNA, 25 bp, Homo sapien
tcgtctttgtacctccaccatgtag

SEQ ID NO: 673446 - DNA, 25 bp, Homo sapien
cttcgtctttgtacctccaccatgt

SEQ ID NO: 673447 - DNA, 25 bp, Homo sapien
taacgttcactgcaccgaaggcaga

SEQ ID NO: 673448 - DNA, 25 bp, Homo sapien
gttcactgcaccgaaggcagaaatt

SEQ ID NO: 673449 - DNA, 25 bp, Homo sapien
ctgatacataacgttcactgcaccg

SEQ ID NO: 673450 - DNA, 25 bp, Homo sapien
tacataacgttcactgcaccgaagg

SEQ ID NO: 673451 - DNA, 25 bp, Homo sapien
gcatgagatgggctgatgtagtccc

SEQ ID NO: 673452 - DNA, 25 bp, Homo sapien
ggctgatgtagtccctttaagccca

SEQ ID NO: 673453 - DNA, 25 bp, Homo sapien
gatgggctgatgtagtccctttaag

SEQ ID NO: 673454 - DNA, 25 bp, Homo sapien
gatgtagtccctttaagcccaagaa

SEQ ID NO: 673455 - DNA, 25 bp, Homo sapien
aacacaatgtggcagttgttggcaa

SEQ ID NO: 673456 - DNA, 25 bp, Homo sapien
cctctaagaatatgagaacttccct

SEQ ID NO: 673457 - DNA, 25 bp, Homo sapien
caagcgtcctgactagtgctttcac

SEQ ID NO: 673458 - DNA, 25 bp, Homo sapien
gacctgcagacaaaagagtatctta

SEQ ID NO: 673459 - DNA, 25 bp, Homo sapien
cttgcctgttttgtctaccagccat

SEQ ID NO: 673460 - DNA, 25 bp, Homo sapien
ctttatcttgcctgttttgtctacc

SEQ ID NO: 673461 - DNA, 25 bp, Homo sapien
tcctctcacatagtaccagatgttg

SEQ ID NO: 673462 - DNA, 25 bp, Homo sapien
cacatagtaccagatgttggcataa

SEQ ID NO: 673463 - DNA, 25 bp, Homo sapien
tctcacatagtaccagatgttggca

SEQ ID NO: 673464 - DNA, 25 bp, Homo sapien
caagtcctctcacatagtaccagat

SEQ ID NO: 673465 - DNA, 25 bp, Homo sapien
gatctcgggctctcaacaaaggttg

SEQ ID NO: 673466 - DNA, 25 bp, Homo sapien
taataccgggcagtttcaggcaaat

SEQ ID NO: 673467 - DNA, 25 bp, Homo sapien
gcaaattgagatggctgatcaccct

SEQ ID NO: 673468 - DNA, 25 bp, Homo sapien
tgcagggactcacacatggaagaca

SEQ ID NO: 673469 - DNA, 25 bp, Homo sapien
gataagatcttctagtccaagccca

SEQ ID NO: 673470 - DNA, 25 bp, Homo sapien
gagaaaatctgcttaccttcatggg

SEQ ID NO: 673471 - DNA, 25 bp, Homo sapien
ttgcattgaaaagctgagtacccag

SEQ ID NO: 673472 - DNA, 25 bp, Homo sapien
gactgaagaacaggtcccttgcctc

SEQ ID NO: 673473 - DNA, 25 bp, Homo sapien
tagactgcgttacatttttcccgta

SEQ ID NO: 673474 - DNA, 25 bp, Homo sapien
tccaaatgccgctgtccatcaaatc

SEQ ID NO: 673475 - DNA, 25 bp, Homo sapien
ctctggctcgcctgcaaggctggca

SEQ ID NO: 673476 - DNA, 25 bp, Homo sapien
cgtaacaatcccaaggccttgctct

SEQ ID NO: 673477 - DNA, 25 bp, Homo sapien
ctgtaggtttgtctgtcactgatga

SEQ ID NO: 673478 - DNA, 25 bp, Homo sapien
aaaaggtagccataggccgggcaca

SEQ ID NO: 673479 - DNA, 25 bp, Homo sapien
cactttgttaaaaggtagccatagg

SEQ ID NO: 673480 - DNA, 25 bp, Homo sapien
agggtacatactgtaggtttgtctg

SEQ ID NO: 673481 - DNA, 25 bp, Homo sapien
tggagttcctagcacacctgggctg

SEQ ID NO: 673482 - DNA, 25 bp, Homo sapien
gaagtctatggcaggaagcaaccct

SEQ ID NO: 673483 - DNA, 25 bp, Homo sapien
aacaagcaagctcgatgaatcccag

SEQ ID NO: 673484 - DNA, 25 bp, Homo sapien
gacagtgacagctatggttcaggcc

SEQ ID NO: 673485 - DNA, 25 bp, Homo sapien
caagcttatctctgcaaggaacatg

SEQ ID NO: 673486 - DNA, 25 bp, Homo sapien
catgttcacgggttggaagcctcac

SEQ ID NO: 673487 - DNA, 25 bp, Homo sapien
tctctaaaacattgctgcgtgaaat

SEQ ID NO: 673488 - DNA, 25 bp, Homo sapien
gcctcactgctaataagatgtccat

SEQ ID NO: 673489 - DNA, 25 bp, Homo sapien
cgagagctggagagcttatcctcag

SEQ ID NO: 673490 - DNA, 25 bp, Homo sapien
tccccttcccatgcgagagctggag

SEQ ID NO: 673491 - DNA, 25 bp, Homo sapien
ccccttcccatgcgagagctggaga

SEQ ID NO: 673492 - DNA, 25 bp, Homo sapien
ttccccttcccatgcgagagctgga

SEQ ID NO: 673493 - DNA, 25 bp, Homo sapien
cgaagcagtggccacgtctaatttt

SEQ ID NO: 673494 - DNA, 25 bp, Homo sapien
aattttggagagttacacctcgtgt

SEQ ID NO: 673495 - DNA, 25 bp, Homo sapien
cacctcgtgtgtggcttgggaaaga

SEQ ID NO: 673496 - DNA, 25 bp, Homo sapien
gatgacaggttgattaaagagattt

SEQ ID NO: 673497 - DNA, 25 bp, Homo sapien
ccatggaattatcctgcgtcagaaa

SEQ ID NO: 673498 - DNA, 25 bp, Homo sapien
aagagtttgagtgatgattcaaaac

SEQ ID NO: 673499 - DNA, 25 bp, Homo sapien
atgcagctcattaggaagactccat

SEQ ID NO: 673500 - DNA, 25 bp, Homo sapien
gaagactccatggaattatcctgcg

SEQ ID NO: 673501 - DNA, 25 bp, Homo sapien
gtgagccacggagtccaagaattgc

SEQ ID NO: 673502 - DNA, 25 bp, Homo sapien
tgatatgtccatgtacaccctgtgg

SEQ ID NO: 673503 - DNA, 25 bp, Homo sapien
caaacgtaactgtcctgtcgagacc

SEQ ID NO: 673504 - DNA, 25 bp, Homo sapien
ccctgtggactaggtaatgacatct

SEQ ID NO: 673505 - DNA, 25 bp, Homo sapien
tctgcgggcccccagctggcctcac

SEQ ID NO: 673506 - DNA, 25 bp, Homo sapien
ctctgcgggcccccagctggcctca

SEQ ID NO: 673507 - DNA, 25 bp, Homo sapien
tggctccagtatccctcaaaggtgt

SEQ ID NO: 673508 - DNA, 25 bp, Homo sapien
gattccgtagcgtcccttgaagcca

SEQ ID NO: 673509 - DNA, 25 bp, Homo sapien
cataggtctcggtgccatagccgtc

SEQ ID NO: 673510 - DNA, 25 bp, Homo sapien
tacttggcaccgctgcttgagctct

SEQ ID NO: 673511 - DNA, 25 bp, Homo sapien
tcatagcccctgacaacctccccgt

SEQ ID NO: 673512 - DNA, 25 bp, Homo sapien
tcatcatagcccctgacaacctccc

SEQ ID NO: 673513 - DNA, 25 bp, Homo sapien
catagcccctgacaacctccccgtc

SEQ ID NO: 673514 - DNA, 25 bp, Homo sapien
atcatagcccctgacaacctccccg

SEQ ID NO: 673515 - DNA, 25 bp, Homo sapien
tcctcccgggaatgagagctccctt

SEQ ID NO: 673516 - DNA, 25 bp, Homo sapien
tccaagggaaaacggtgtgatctct

SEQ ID NO: 673517 - DNA, 25 bp, Homo sapien
cattggatctcagaagctgctccca

SEQ ID NO: 673518 - DNA, 25 bp, Homo sapien
gggtatttcaaatcgcgcccgtgcc

SEQ ID NO: 673519 - DNA, 25 bp, Homo sapien
tattgctaacatggctagacactgt

SEQ ID NO: 673520 - DNA, 25 bp, Homo sapien
tgtcttaggatgaatagcaccagca

SEQ ID NO: 673521 - DNA, 25 bp, Homo sapien
gatggtgaagacacacactcgtttc

SEQ ID NO: 673522 - DNA, 25 bp, Homo sapien
tcatccagctgaaaccgaagacaga

SEQ ID NO: 673523 - DNA, 25 bp, Homo sapien
ggcttttaccatatacccactgctg

SEQ ID NO: 673524 - DNA, 25 bp, Homo sapien
gaaaaatgcactgttttacaaaggc

SEQ ID NO: 673525 - DNA, 25 bp, Homo sapien
tgggctggcaactacagcatgacaa

SEQ ID NO: 673526 - DNA, 25 bp, Homo sapien
tccttggctagcaaaccttaaacaa

SEQ ID NO: 673527 - DNA, 25 bp, Homo sapien
gtgtatgtaagaactcaagagagta

SEQ ID NO: 673528 - DNA, 25 bp, Homo sapien
gatctgctcgccttgaagtgtatgt

SEQ ID NO: 673529 - DNA, 25 bp, Homo sapien
gtaagttgaaagaatgaagattaac

SEQ ID NO: 673530 - DNA, 25 bp, Homo sapien
ctcaagagagtaagttgaaagaatg

SEQ ID NO: 673531 - DNA, 25 bp, Homo sapien
aagaaaagtttttattgcaagcaca

SEQ ID NO: 673532 - DNA, 25 bp, Homo sapien
ccaagaaaagtttttattgcaagca

SEQ ID NO: 673533 - DNA, 25 bp, Homo sapien
caagaaaagtttttattgcaagcac

SEQ ID NO: 673534 - DNA, 25 bp, Homo sapien
ggtctgccattaactaaatctcttt

SEQ ID NO: 673535 - DNA, 25 bp, Homo sapien
aagcatatgaattagcttcttgcta

SEQ ID NO: 673536 - DNA, 25 bp, Homo sapien
agccttcattggtttaaagcatatg

SEQ ID NO: 673537 - DNA, 25 bp, Homo sapien
ctaaatctctttgacaagccttcat

SEQ ID NO: 673538 - DNA, 25 bp, Homo sapien
ggagacttagaacgtcgacgacgct

SEQ ID NO: 673539 - DNA, 25 bp, Homo sapien
gaagttctcaaaggctcaacgactg

SEQ ID NO: 673540 - DNA, 25 bp, Homo sapien
caacgactgcccctgtgtgattagc

SEQ ID NO: 673541 - DNA, 25 bp, Homo sapien
caagtgtggatcttcgttctggagc

SEQ ID NO: 673542 - DNA, 25 bp, Homo sapien
tagcaagctatagaacgaggtgaga

SEQ ID NO: 673543 - DNA, 25 bp, Homo sapien
aactctaagcttgggagcctttgac

SEQ ID NO: 673544 - DNA, 25 bp, Homo sapien
tgtgaggctaacgttacaaatgacc

SEQ ID NO: 673545 - DNA, 25 bp, Homo sapien
taactgaatcacctgggccaaacat

SEQ ID NO: 673546 - DNA, 25 bp, Homo sapien
tgttgctgttctgactggtgctctg

SEQ ID NO: 673547 - DNA, 25 bp, Homo sapien
atctgttgctgttctgactggtgct

SEQ ID NO: 673548 - DNA, 25 bp, Homo sapien
tctgttgctgttctgactggtgctc

SEQ ID NO: 673549 - DNA, 25 bp, Homo sapien
ctgttgctgttctgactggtgctct

SEQ ID NO: 673550 - DNA, 25 bp, Homo sapien
aatgaggagaacatattgttctcac

SEQ ID NO: 673551 - DNA, 25 bp, Homo sapien
tttttgaaagcagtctgtagactct

SEQ ID NO: 673552 - DNA, 25 bp, Homo sapien
agcagtctgtagactctcctcctct

SEQ ID NO: 673553 - DNA, 25 bp, Homo sapien
ctccatccttggcttcggatttcat

SEQ ID NO: 673554 - DNA, 25 bp, Homo sapien
cctgatgcatccactcttaattttt

SEQ ID NO: 673555 - DNA, 25 bp, Homo sapien
tgtgcaagtttttacactacttatc

SEQ ID NO: 673556 - DNA, 25 bp, Homo sapien
tttacactacttatcgatgttcctg

SEQ ID NO: 673557 - DNA, 25 bp, Homo sapien
actacttatcgatgttcctgtttac

SEQ ID NO: 673558 - DNA, 25 bp, Homo sapien
caagtttttacactacttatcgatg

SEQ ID NO: 673559 - DNA, 25 bp, Homo sapien
tatacctgttaccattactgttaga

SEQ ID NO: 673560 - DNA, 25 bp, Homo sapien
aacaggtgggatcaaaagtatacct

SEQ ID NO: 673561 - DNA, 25 bp, Homo sapien
taaactgttcacatacttgatgcca

SEQ ID NO: 673562 - DNA, 25 bp, Homo sapien
tgtagataactggagactataggtt

SEQ ID NO: 673563 - DNA, 25 bp, Homo sapien
gggaatctccccagttggtctagaa

SEQ ID NO: 673564 - DNA, 25 bp, Homo sapien
ggaatctccccagttggtctagaaa

SEQ ID NO: 673565 - DNA, 25 bp, Homo sapien
acgggaatctccccagttggtctag

SEQ ID NO: 673566 - DNA, 25 bp, Homo sapien
gaatctccccagttggtctagaaac

SEQ ID NO: 673567 - DNA, 25 bp, Homo sapien
ggaagacacgttttagagaacaaga

SEQ ID NO: 673568 - DNA, 25 bp, Homo sapien
gcatttctctagagcagtcctgacc

SEQ ID NO: 673569 - DNA, 25 bp, Homo sapien
gagtatttgtctggcctaaccctag

SEQ ID NO: 673570 - DNA, 25 bp, Homo sapien
gacagctatgttcacaggaagacac

SEQ ID NO: 673571 - DNA, 25 bp, Homo sapien
cagtaaggttgatacttccatttgt

SEQ ID NO: 673572 - DNA, 25 bp, Homo sapien
cttccatttgtgtttttcttcatag

SEQ ID NO: 673573 - DNA, 25 bp, Homo sapien
taaggttgatacttccatttgtgtt

SEQ ID NO: 673574 - DNA, 25 bp, Homo sapien
ttccatttgtgtttttcttcatagc

SEQ ID NO: 673575 - DNA, 25 bp, Homo sapien
tagtcaatgttcagctcttaccgag

SEQ ID NO: 673576 - DNA, 25 bp, Homo sapien
tagtaccagcgcaaaataaagaggc

SEQ ID NO: 673577 - DNA, 25 bp, Homo sapien
cgtttctcaaggtggctccgaagtt

SEQ ID NO: 673578 - DNA, 25 bp, Homo sapien
gaaatgactattgtgtagacgcacc

SEQ ID NO: 673579 - DNA, 25 bp, Homo sapien
aacatgaacggaggaaaattcctag

SEQ ID NO: 673580 - DNA, 25 bp, Homo sapien
cagagtctgtgcctgtcgcggttaa

SEQ ID NO: 673581 - DNA, 25 bp, Homo sapien
tcatccctttatactcgcagcgctg

SEQ ID NO: 673582 - DNA, 25 bp, Homo sapien
tccctttatactcgcagcgctgcag

SEQ ID NO: 673583 - DNA, 25 bp, Homo sapien
tgaagttgcgctcctcgggagattc

SEQ ID NO: 673584 - DNA, 25 bp, Homo sapien
agctgtgaagttgcgctcctcggga

SEQ ID NO: 673585 - DNA, 25 bp, Homo sapien
ctccagctgtgaagttgcgctcctc

SEQ ID NO: 673586 - DNA, 25 bp, Homo sapien
tggggacaacgccaagcagggagct

SEQ ID NO: 673587 - DNA, 25 bp, Homo sapien
agcgaggcacaagggatgcgggaga

SEQ ID NO: 673588 - DNA, 25 bp, Homo sapien
gagtggggccgaagaggtagccaaa

SEQ ID NO: 673589 - DNA, 25 bp, Homo sapien
gcaaagggcggccaaggagggcgaa

SEQ ID NO: 673590 - DNA, 25 bp, Homo sapien
cacaggccgcggcagataagggggc

SEQ ID NO: 673591 - DNA, 25 bp, Homo sapien
agctgggacgctccggtgatgcggg

SEQ ID NO: 673592 - DNA, 25 bp, Homo sapien
tcgggagtcgcgttgcgcctgcgca

SEQ ID NO: 673593 - DNA, 25 bp, Homo sapien
actgacccggatccaaaccagccaa

SEQ ID NO: 673594 - DNA, 25 bp, Homo sapien
gggcagtcagttcagagcgtctctc

SEQ ID NO: 673595 - DNA, 25 bp, Homo sapien
ttcgcatgcagtccaccagaatagg

SEQ ID NO: 673596 - DNA, 25 bp, Homo sapien
tcccatgggacttcgcatgcagtcc

SEQ ID NO: 673597 - DNA, 25 bp, Homo sapien
cccgttgtcccatgggacttcgcat

SEQ ID NO: 673598 - DNA, 25 bp, Homo sapien
cagtccaccagaataggagctgtac

SEQ ID NO: 673599 - DNA, 25 bp, Homo sapien
aactgtggaagacccgggatttgtg

SEQ ID NO: 673600 - DNA, 25 bp, Homo sapien
tacataggtacagtgtgggctgctg

SEQ ID NO: 673601 - DNA, 25 bp, Homo sapien
cgaatgaattagtcaccccagtggt

SEQ ID NO: 673602 - DNA, 25 bp, Homo sapien
tagtgcccgataagtggttttttca

SEQ ID NO: 673603 - DNA, 25 bp, Homo sapien
ccccagtggtgagcatagtgcccga

SEQ ID NO: 673604 - DNA, 25 bp, Homo sapien
cttgagaatccatccgtgcttcagg

SEQ ID NO: 673605 - DNA, 25 bp, Homo sapien
gaagtcctcagtgcgggccttgaga

SEQ ID NO: 673606 - DNA, 25 bp, Homo sapien
tccatccgtgcttcaggttccagtc

SEQ ID NO: 673607 - DNA, 25 bp, Homo sapien
ttttccttgatgaggtatagaagga

SEQ ID NO: 673608 - DNA, 25 bp, Homo sapien
ctggagagcgatgcggccaagccag

SEQ ID NO: 673609 - DNA, 25 bp, Homo sapien
tcagctcgcagaaggtagagccggg

SEQ ID NO: 673610 - DNA, 25 bp, Homo sapien
tggtggcccatctccgcgctggaga

SEQ ID NO: 673611 - DNA, 25 bp, Homo sapien
tggttctgtaccactggacccagtc

SEQ ID NO: 673612 - DNA, 25 bp, Homo sapien
caactgctgcgtgaaaatggatttc

SEQ ID NO: 673613 - DNA, 25 bp, Homo sapien
tgagtcttagatggcaggagcagca

SEQ ID NO: 673614 - DNA, 25 bp, Homo sapien
gatgtcattcttgctctcacggagt

SEQ ID NO: 673615 - DNA, 25 bp, Homo sapien
gaactcatggccctgtttgcagtct

SEQ ID NO: 673616 - DNA, 25 bp, Homo sapien
gaagccattagatattccagactga

SEQ ID NO: 673617 - DNA, 25 bp, Homo sapien
atcaggacctgctgtattagttatc

SEQ ID NO: 673618 - DNA, 25 bp, Homo sapien
tgttttcatcgaggaagagagcaga

SEQ ID NO: 673619 - DNA, 25 bp, Homo sapien
ggagttctcagccaatacatggtgt

SEQ ID NO: 673620 - DNA, 25 bp, Homo sapien
ctctagtagaggacagcagacaata

SEQ ID NO: 673621 - DNA, 25 bp, Homo sapien
caatgtggcgctgtgttctatggag

SEQ ID NO: 673622 - DNA, 25 bp, Homo sapien
tgccctcgtggcgtttccactctag

SEQ ID NO: 673623 - DNA, 25 bp, Homo sapien
tgcagaggatgtagccacagacaag

SEQ ID NO: 673624 - DNA, 25 bp, Homo sapien
taagccctgcttgtgattatagtag

SEQ ID NO: 673625 - DNA, 25 bp, Homo sapien
tgggtccccagggaatagcttcaaa

SEQ ID NO: 673626 - DNA, 25 bp, Homo sapien
cctacatttcatgggccccagggca

SEQ ID NO: 673627 - DNA, 25 bp, Homo sapien
caggtaagtgttaggctcctctgaa

SEQ ID NO: 673628 - DNA, 25 bp, Homo sapien
tgctgcagtgcaagtgaggcataca

SEQ ID NO: 673629 - DNA, 25 bp, Homo sapien
gaatatgagtgttctgtcccaccgg

SEQ ID NO: 673630 - DNA, 25 bp, Homo sapien
gaagggactagccagaacttcctgg

SEQ ID NO: 673631 - DNA, 25 bp, Homo sapien
gaggcatacacagtcaaggcattat

SEQ ID NO: 673632 - DNA, 25 bp, Homo sapien
tttccgagtcaaaccatgaactgag

SEQ ID NO: 673633 - DNA, 25 bp, Homo sapien
ggtgttcagattcttggagccaggg

SEQ ID NO: 673634 - DNA, 25 bp, Homo sapien
gagccagggactgcatgacccctga

SEQ ID NO: 673635 - DNA, 25 bp, Homo sapien
tctttttgggaaacggctattatca

SEQ ID NO: 673636 - DNA, 25 bp, Homo sapien
taagcatggacaagtggcggaagcc

SEQ ID NO: 673637 - DNA, 25 bp, Homo sapien
ggcggaagcctcatcgatacagaag

SEQ ID NO: 673638 - DNA, 25 bp, Homo sapien
tatgggcataggcaacagagggtca

SEQ ID NO: 673639 - DNA, 25 bp, Homo sapien
cagttaatttagtgctgagcccgca

SEQ ID NO: 673640 - DNA, 25 bp, Homo sapien
tagatgcctatgcaaaactgaccag

SEQ ID NO: 673641 - DNA, 25 bp, Homo sapien
gatgcctatgcaaaactgaccagtg

SEQ ID NO: 673642 - DNA, 25 bp, Homo sapien
cctgaaatagatgcctatgcaaaac

SEQ ID NO: 673643 - DNA, 25 bp, Homo sapien
gaaatagatgcctatgcaaaactga

SEQ ID NO: 673644 - DNA, 25 bp, Homo sapien
acagcagtaagagccgtgaaaatct

SEQ ID NO: 673645 - DNA, 25 bp, Homo sapien
gcagtaagagccgtgaaaatctaaa

SEQ ID NO: 673646 - DNA, 25 bp, Homo sapien
tttagccacaccataaaggctttcc

SEQ ID NO: 673647 - DNA, 25 bp, Homo sapien
gagccgtgaaaatctaaagacaact

SEQ ID NO: 673648 - DNA, 25 bp, Homo sapien
tgatgtcgccaagaatagtctgaag

SEQ ID NO: 673649 - DNA, 25 bp, Homo sapien
tgcttgcaacactggtgatgtcgcc

SEQ ID NO: 673650 - DNA, 25 bp, Homo sapien
taaaggtcaagtcttaccagggaca

SEQ ID NO: 673651 - DNA, 25 bp, Homo sapien
gacaaaaagtgcctaactgggaatg

SEQ ID NO: 673652 - DNA, 25 bp, Homo sapien
tagcagctgcccgtgtagtgttcga

SEQ ID NO: 673653 - DNA, 25 bp, Homo sapien
gtatgtcccgtaccagctcagcaaa

SEQ ID NO: 673654 - DNA, 25 bp, Homo sapien
ggcccaggccactttgacaaaatac

SEQ ID NO: 673655 - DNA, 25 bp, Homo sapien
tctacaatcatgagggcgcagaagg

SEQ ID NO: 673656 - DNA, 25 bp, Homo sapien
ttgctgaggtagctctcgggcaacg

SEQ ID NO: 673657 - DNA, 25 bp, Homo sapien
acgttgcgcttgttgctgaggtagc

SEQ ID NO: 673658 - DNA, 25 bp, Homo sapien
gcaacggggacaactccttgaggag

SEQ ID NO: 673659 - DNA, 25 bp, Homo sapien
aacaaccactcgcagcgctccagat

SEQ ID NO: 673660 - DNA, 25 bp, Homo sapien
aactcgctcgtctcctctgcgctct

SEQ ID NO: 673661 - DNA, 25 bp, Homo sapien
acctcccttcgagcgcatgcgcact

SEQ ID NO: 673662 - DNA, 25 bp, Homo sapien
tctggcgcgtgacggtccccgaact

SEQ ID NO: 673663 - DNA, 25 bp, Homo sapien
acagcttgaggcgtgcttgggctcc

SEQ ID NO: 673664 - DNA, 25 bp, Homo sapien
tgggaaaaagcgcttgtgaaagtat

SEQ ID NO: 673665 - DNA, 25 bp, Homo sapien
gaaaaagcgcttgtgaaagtatttg

SEQ ID NO: 673666 - DNA, 25 bp, Homo sapien
gtctgggaaaaagcgcttgtgaaag

SEQ ID NO: 673667 - DNA, 25 bp, Homo sapien
ctggtctgggaaaaagcgcttgtga

SEQ ID NO: 673668 - DNA, 25 bp, Homo sapien
ccacgctctgcagttattaaattaa

SEQ ID NO: 673669 - DNA, 25 bp, Homo sapien
gccaccacgctctgcagttattaaa

SEQ ID NO: 673670 - DNA, 25 bp, Homo sapien
gccatctcacctggtgcaattatta

SEQ ID NO: 673671 - DNA, 25 bp, Homo sapien
tctcacctggtgcaattattacatt

SEQ ID NO: 673672 - DNA, 25 bp, Homo sapien
cagctgtcccgggacgaggatttcc

SEQ ID NO: 673673 - DNA, 25 bp, Homo sapien
ctgtcccgggacgaggatttcccag

SEQ ID NO: 673674 - DNA, 25 bp, Homo sapien
tgcagctgtcccgggacgaggattt

SEQ ID NO: 673675 - DNA, 25 bp, Homo sapien
atttcccagtcctccggtcgccagc

SEQ ID NO: 673676 - DNA, 25 bp, Homo sapien
catgtacccagagtggaaaagcatc

SEQ ID NO: 673677 - DNA, 25 bp, Homo sapien
gactggctctggtcctatggtaagg

SEQ ID NO: 673678 - DNA, 25 bp, Homo sapien
cacctatgtctgtttggctcaagaa

SEQ ID NO: 673679 - DNA, 25 bp, Homo sapien
tctatttgcgttggtgtcaaggtca

SEQ ID NO: 673680 - DNA, 25 bp, Homo sapien
gtgctttggcagccgcactgtctgg

SEQ ID NO: 673681 - DNA, 25 bp, Homo sapien
ggtgtgtgctttggcagccgcactg

SEQ ID NO: 673682 - DNA, 25 bp, Homo sapien
tgtgtgctttggcagccgcactgtc

SEQ ID NO: 673683 - DNA, 25 bp, Homo sapien
tgtgctttggcagccgcactgtctg

SEQ ID NO: 673684 - DNA, 25 bp, Homo sapien
cctctgagagccgtgaatggtcact

SEQ ID NO: 673685 - DNA, 25 bp, Homo sapien
cagtgttagacacgaagctgtgctg

SEQ ID NO: 673686 - DNA, 25 bp, Homo sapien
cagtcccttcaagtgagctcagtgg

SEQ ID NO: 673687 - DNA, 25 bp, Homo sapien
tgtgtaatagaaaaagccctcagag

SEQ ID NO: 673688 - DNA, 25 bp, Homo sapien
caagtagtagagctggttcagaaga

SEQ ID NO: 673689 - DNA, 25 bp, Homo sapien
cagaagaatcagtcttttgattcca

SEQ ID NO: 673690 - DNA, 25 bp, Homo sapien
cactatctcattgaagagatgaaag

SEQ ID NO: 673691 - DNA, 25 bp, Homo sapien
ggctcaggcaggttgagtaatttac

SEQ ID NO: 673692 - DNA, 25 bp, Homo sapien
gtgttacctaggctcggaagtacag

SEQ ID NO: 673693 - DNA, 25 bp, Homo sapien
gacaatgtgtcacgttacagcccag

SEQ ID NO: 673694 - DNA, 25 bp, Homo sapien
tacagcccagctttatcagagacag

SEQ ID NO: 673695 - DNA, 25 bp, Homo sapien
tactattgttattaccaggcctagg

SEQ ID NO: 673696 - DNA, 25 bp, Homo sapien
aaaatagcctctgtggtgccttgcc

SEQ ID NO: 673697 - DNA, 25 bp, Homo sapien
caccttttgagaactgtggactgac

SEQ ID NO: 673698 - DNA, 25 bp, Homo sapien
tgatgttcaataggtgctccagaag

SEQ ID NO: 673699 - DNA, 25 bp, Homo sapien
aactcttgggcatgggaaatcgacc

SEQ ID NO: 673700 - DNA, 25 bp, Homo sapien
ggcaactggattggcgagtccccgt

SEQ ID NO: 673701 - DNA, 25 bp, Homo sapien
tctgggctttggtgcgcctccagct

SEQ ID NO: 673702 - DNA, 25 bp, Homo sapien
gctgaaatccaacaagttcacgtgg

SEQ ID NO: 673703 - DNA, 25 bp, Homo sapien
gcgagtccccgtacaagatgggaaa

SEQ ID NO: 673704 - DNA, 25 bp, Homo sapien
tgatggccaaggttagagctcagtc

SEQ ID NO: 673705 - DNA, 25 bp, Homo sapien
aaggttagagctcagtctctcacag

SEQ ID NO: 673706 - DNA, 25 bp, Homo sapien
agctgcacagcttgtctttgatggc

SEQ ID NO: 673707 - DNA, 25 bp, Homo sapien
cttcctgcttcctcggctctcagaa

SEQ ID NO: 673708 - DNA, 25 bp, Homo sapien
tctctctcttttgtctactgtccgt

SEQ ID NO: 673709 - DNA, 25 bp, Homo sapien
tgtctactgtccgttctatctctgc

SEQ ID NO: 673710 - DNA, 25 bp, Homo sapien
agtgaaaaccaaagttggcctgagg

SEQ ID NO: 673711 - DNA, 25 bp, Homo sapien
tccgttctatctctgcctgtttttg

SEQ ID NO: 673712 - DNA, 25 bp, Homo sapien
acgatctgattaaggtccgtctcct

SEQ ID NO: 673713 - DNA, 25 bp, Homo sapien
tccccagagtctagcacaaggcctg

SEQ ID NO: 673714 - DNA, 25 bp, Homo sapien
tgaaaggaagataacacctctatgt

SEQ ID NO: 673715 - DNA, 25 bp, Homo sapien
tatgtactagcagtgagactccagg

SEQ ID NO: 673716 - DNA, 25 bp, Homo sapien
ttagaagaatcaataagataaccgg

SEQ ID NO: 673717 - DNA, 25 bp, Homo sapien
aataagataaccgggcggtggcagc

SEQ ID NO: 673718 - DNA, 25 bp, Homo sapien
cccagctctccggctgggtgggctt

SEQ ID NO: 673719 - DNA, 25 bp, Homo sapien
tcaccgccttcctggtggacgggct

SEQ ID NO: 673720 - DNA, 25 bp, Homo sapien
caggacctatctcccagagagcggg

SEQ ID NO: 673721 - DNA, 25 bp, Homo sapien
ccagggaatgacagaatcagggcct

SEQ ID NO: 673722 - DNA, 25 bp, Homo sapien
tgtaaagcccttgataccacgtgca

SEQ ID NO: 673723 - DNA, 25 bp, Homo sapien
tgtgacagggaagaacctctcagtt

SEQ ID NO: 673724 - DNA, 25 bp, Homo sapien
gaatggttgcttctatcgacaggta

SEQ ID NO: 673725 - DNA, 25 bp, Homo sapien
gagacttgacacaatccagctgttg

SEQ ID NO: 673726 - DNA, 25 bp, Homo sapien
tgtgagagtggctgaaagaccctga

SEQ ID NO: 673727 - DNA, 25 bp, Homo sapien
tctaggccacagatatggctggaca

SEQ ID NO: 673728 - DNA, 25 bp, Homo sapien
gacctgggtagtttgttcagccttg

SEQ ID NO: 673729 - DNA, 25 bp, Homo sapien
gaaatgatgggcttaaaacagcgct

SEQ ID NO: 673730 - DNA, 25 bp, Homo sapien
taaactccgtgagttctgggacctg

SEQ ID NO: 673731 - DNA, 25 bp, Homo sapien
ggtccagagcaagcacgcaagaaat

SEQ ID NO: 673732 - DNA, 25 bp, Homo sapien
tgtgtgctaacctgactcctggcct

SEQ ID NO: 673733 - DNA, 25 bp, Homo sapien
tctgaggatgagatgctaaacatgc

SEQ ID NO: 673734 - DNA, 25 bp, Homo sapien
agtgccaatctggtactaccctgag

SEQ ID NO: 673735 - DNA, 25 bp, Homo sapien
gggagtgtctaccacaatggagtag

SEQ ID NO: 673736 - DNA, 25 bp, Homo sapien
tgtaggtgcatgtgataaatggatg

SEQ ID NO: 673737 - DNA, 25 bp, Homo sapien
gagaaatagctggatggatgagaca

SEQ ID NO: 673738 - DNA, 25 bp, Homo sapien
ggaaagatatgtaggtgcatgtgat

SEQ ID NO: 673739 - DNA, 25 bp, Homo sapien
gaggatgatgcatggatgggtaagt

SEQ ID NO: 673740 - DNA, 25 bp, Homo sapien
catcttcaagtgctctaaacaggac

SEQ ID NO: 673741 - DNA, 25 bp, Homo sapien
agcatcttcaagtgctctaaacagg

SEQ ID NO: 673742 - DNA, 25 bp, Homo sapien
ttcaagtgctctaaacaggacaagt

SEQ ID NO: 673743 - DNA, 25 bp, Homo sapien
caagtgctctaaacaggacaagtga

SEQ ID NO: 673744 - DNA, 25 bp, Homo sapien
tgccccttgaagctctatgatgatg

SEQ ID NO: 673745 - DNA, 25 bp, Homo sapien
gataggcccaaaatcgagtaggacc

SEQ ID NO: 673746 - DNA, 25 bp, Homo sapien
tagaagctataacaaacatgccgtg

SEQ ID NO: 673747 - DNA, 25 bp, Homo sapien
tatgtaggcctagtccctttgacca

SEQ ID NO: 673748 - DNA, 25 bp, Homo sapien
ggtacacagttgatcgtctgtgcag

SEQ ID NO: 673749 - DNA, 25 bp, Homo sapien
ctgtggcatagtcatccagggaccc

SEQ ID NO: 673750 - DNA, 25 bp, Homo sapien
gcgggactagctgtaaagtttgtaa

SEQ ID NO: 673751 - DNA, 25 bp, Homo sapien
tgcagtagggtcatgctcacacgtc

SEQ ID NO: 673752 - DNA, 25 bp, Homo sapien
tgtcttctagaattctccacatggg

SEQ ID NO: 673753 - DNA, 25 bp, Homo sapien
cagagttcatttatttgcacgagca

SEQ ID NO: 673754 - DNA, 25 bp, Homo sapien
cattcttgcgtagaccaatcccagt

SEQ ID NO: 673755 - DNA, 25 bp, Homo sapien
tggccgggtccctcagattctatag

SEQ ID NO: 673756 - DNA, 25 bp, Homo sapien
aatttgtgctgcagtcgggagggct

SEQ ID NO: 673757 - DNA, 25 bp, Homo sapien
gagggcttgggttagagctacatcc

SEQ ID NO: 673758 - DNA, 25 bp, Homo sapien
gctaatagggtagtggctgagaatt

SEQ ID NO: 673759 - DNA, 25 bp, Homo sapien
acatccacagtatgaccttggacag

SEQ ID NO: 673760 - DNA, 25 bp, Homo sapien
gattcggccaaagtcatacagtaag

SEQ ID NO: 673761 - DNA, 25 bp, Homo sapien
ttaacaaactgagaccccaagagga

SEQ ID NO: 673762 - DNA, 25 bp, Homo sapien
gcgaggcccctcagacaagaaggat

SEQ ID NO: 673763 - DNA, 25 bp, Homo sapien
gaaatgcctgcagtgtatagggccc

SEQ ID NO: 673764 - DNA, 25 bp, Homo sapien
tcttggctcactatctcagatgatg

SEQ ID NO: 673765 - DNA, 25 bp, Homo sapien
tctgtaaatatcctgagtatattta

SEQ ID NO: 673766 - DNA, 25 bp, Homo sapien
cagatgatgctccaaagactattct

SEQ ID NO: 673767 - DNA, 25 bp, Homo sapien
gatgctccaaagactattcttatac

SEQ ID NO: 673768 - DNA, 25 bp, Homo sapien
gaattgagtaaataacgcaactata

SEQ ID NO: 673769 - DNA, 25 bp, Homo sapien
gccagtgggcactcttttccaaagg

SEQ ID NO: 673770 - DNA, 25 bp, Homo sapien
ctatatgctgggcagctacctgcca

SEQ ID NO: 673771 - DNA, 25 bp, Homo sapien
gcacccggcaggaaagtactttgaa

SEQ ID NO: 673772 - DNA, 25 bp, Homo sapien
tagatgaagcaaataaggcttgaag

SEQ ID NO: 673773 - DNA, 25 bp, Homo sapien
aaggtccaacagctatgtaaatggc

SEQ ID NO: 673774 - DNA, 25 bp, Homo sapien
ggcttgaagagcttatgattttagc

SEQ ID NO: 673775 - DNA, 25 bp, Homo sapien
agcccaaaactcttttggatctttg

SEQ ID NO: 673776 - DNA, 25 bp, Homo sapien
tctatacttgcttccccaacaaggg

SEQ ID NO: 673777 - DNA, 25 bp, Homo sapien
tagtacacgcccagcatgggtcggc

SEQ ID NO: 673778 - DNA, 25 bp, Homo sapien
ctttaaagcttctgcccaggtgtga

SEQ ID NO: 673779 - DNA, 25 bp, Homo sapien
gctccgcgttgtggaacgattcata

SEQ ID NO: 673780 - DNA, 25 bp, Homo sapien
gaggaggcacacaaccagtctaatt

SEQ ID NO: 673781 - DNA, 25 bp, Homo sapien
caaagaaggaagtgcgacagctctc

SEQ ID NO: 673782 - DNA, 25 bp, Homo sapien
tatttatatcaagtgggtcctggga

SEQ ID NO: 673783 - DNA, 25 bp, Homo sapien
tgtttcccggaggaagatgactaag

SEQ ID NO: 673784 - DNA, 25 bp, Homo sapien
ctttctgggccgggcttcatggaag

SEQ ID NO: 673785 - DNA, 25 bp, Homo sapien
gcttcatggaaggccgtatcggtgc

SEQ ID NO: 673786 - DNA, 25 bp, Homo sapien
gagatgtaaccagactccaaagctt

SEQ ID NO: 673787 - DNA, 25 bp, Homo sapien
gcatggcagagatgtaaccagactc

SEQ ID NO: 673788 - DNA, 25 bp, Homo sapien
taatatgaccggtgtgcagtcaaga

SEQ ID NO: 673789 - DNA, 25 bp, Homo sapien
ctcaataatatgaccggtgtgcagt

SEQ ID NO: 673790 - DNA, 25 bp, Homo sapien
aggcctgtcttcaagtcaccgaatc

SEQ ID NO: 673791 - DNA, 25 bp, Homo sapien
tgtcttcaagtcaccgaatccttga

SEQ ID NO: 673792 - DNA, 25 bp, Homo sapien
tggaccttggaagccgctaaaggaa

SEQ ID NO: 673793 - DNA, 25 bp, Homo sapien
ggtatctgccgttggtatcagcaag

SEQ ID NO: 673794 - DNA, 25 bp, Homo sapien
gggacctatattgtgagatagttag

SEQ ID NO: 673795 - DNA, 25 bp, Homo sapien
ctgtccctggaccttggaagccgct

SEQ ID NO: 673796 - DNA, 25 bp, Homo sapien
ggaacatgttgtaagcactgactgg

SEQ ID NO: 673797 - DNA, 25 bp, Homo sapien
gtgaggatccctgaaggccttcaac

SEQ ID NO: 673798 - DNA, 25 bp, Homo sapien
tggcgactgcaacaggaacttggag

SEQ ID NO: 673799 - DNA, 25 bp, Homo sapien
tccaccaggcctttgagaaagggta

SEQ ID NO: 673800 - DNA, 25 bp, Homo sapien
tcagaacaggagctcttaactacag

SEQ ID NO: 673801 - DNA, 25 bp, Homo sapien
gaaaccagactcgttcttctgggaa

SEQ ID NO: 673802 - DNA, 25 bp, Homo sapien
tgtgttctcaccgtgatcaagttga

SEQ ID NO: 673803 - DNA, 25 bp, Homo sapien
gaagctgaaattgcgttctaagagg

SEQ ID NO: 673804 - DNA, 25 bp, Homo sapien
ggagcttctaaaaatccgcatggct

SEQ ID NO: 673805 - DNA, 25 bp, Homo sapien
atcttcaggcgggtctcaggagctt

SEQ ID NO: 673806 - DNA, 25 bp, Homo sapien
tacatcaagcaattatcaaagcggg

SEQ ID NO: 673807 - DNA, 25 bp, Homo sapien
gacaagcgtgggcacaatttcccca

SEQ ID NO: 673808 - DNA, 25 bp, Homo sapien
gggcagcgattgtcgttataaactt

SEQ ID NO: 673809 - DNA, 25 bp, Homo sapien
tcacgtctgcaaggggcagcgattg

SEQ ID NO: 673810 - DNA, 25 bp, Homo sapien
ctgcaaggggcagcgattgtcgtta

SEQ ID NO: 673811 - DNA, 25 bp, Homo sapien
caaggggcagcgattgtcgttataa

SEQ ID NO: 673812 - DNA, 25 bp, Homo sapien
tgttcaatgatatcaccatatgtgt

SEQ ID NO: 673813 - DNA, 25 bp, Homo sapien
catatgtgtaggatgcccaacctta

SEQ ID NO: 673814 - DNA, 25 bp, Homo sapien
ctgtgttcaacactccatcattctt

SEQ ID NO: 673815 - DNA, 25 bp, Homo sapien
tgattctgtgttcaacactccatca

SEQ ID NO: 673816 - DNA, 25 bp, Homo sapien
ccttgtttacaaagtgaggatcatt

SEQ ID NO: 673817 - DNA, 25 bp, Homo sapien
tctgcacagaaatgtggtccatcat

SEQ ID NO: 673818 - DNA, 25 bp, Homo sapien
gatcattaacactgtccttgcaaag

SEQ ID NO: 673819 - DNA, 25 bp, Homo sapien
tgtggtccatcatggcaggcgtgtt

SEQ ID NO: 673820 - DNA, 25 bp, Homo sapien
gggttgggcttagggtgtgaggcca

SEQ ID NO: 673821 - DNA, 25 bp, Homo sapien
atgggaggccagcagtggtgggcct

SEQ ID NO: 673822 - DNA, 25 bp, Homo sapien
gatcagggttgggcttagggtgtga

SEQ ID NO: 673823 - DNA, 25 bp, Homo sapien
ccgttgcttggagaaagagatggga

SEQ ID NO: 673824 - DNA, 25 bp, Homo sapien
cacttacagtgttacctagggcata

SEQ ID NO: 673825 - DNA, 25 bp, Homo sapien
tacctggaggaaatgatggggcagc

SEQ ID NO: 673826 - DNA, 25 bp, Homo sapien
acagtatccaccagctacctggagg

SEQ ID NO: 673827 - DNA, 25 bp, Homo sapien
agataaacagtatccaccagctacc

SEQ ID NO: 673828 - DNA, 25 bp, Homo sapien
ctagggaagagctctgccgctaata

SEQ ID NO: 673829 - DNA, 25 bp, Homo sapien
gagctctgccgctaatattggactg

SEQ ID NO: 673830 - DNA, 25 bp, Homo sapien
tattggactggtttgcacccctggg

SEQ ID NO: 673831 - DNA, 25 bp, Homo sapien
tggtttgcacccctgggcctcactt

SEQ ID NO: 673832 - DNA, 25 bp, Homo sapien
gaggcaatcccaaggtagcttctat

SEQ ID NO: 673833 - DNA, 25 bp, Homo sapien
gaactctctcgcatttgatccttga

SEQ ID NO: 673834 - DNA, 25 bp, Homo sapien
caaaggaacgcagtcaaggtcagac

SEQ ID NO: 673835 - DNA, 25 bp, Homo sapien
gaaaaggatccactagcaaaggctg

SEQ ID NO: 673836 - DNA, 25 bp, Homo sapien
catacgtccagtgagacatacgtgg

SEQ ID NO: 673837 - DNA, 25 bp, Homo sapien
tgggcatacgtccagtgagacatac

SEQ ID NO: 673838 - DNA, 25 bp, Homo sapien
ccagtgagacatacgtgggttcaaa

SEQ ID NO: 673839 - DNA, 25 bp, Homo sapien
gttcctgggcatacgtccagtgaga

SEQ ID NO: 673840 - DNA, 25 bp, Homo sapien
ccagggtgaggtgattcctgagatg

SEQ ID NO: 673841 - DNA, 25 bp, Homo sapien
aatagtaagccattcgaagccaaca

SEQ ID NO: 673842 - DNA, 25 bp, Homo sapien
ctgagatggcagttctccgtagaaa

SEQ ID NO: 673843 - DNA, 25 bp, Homo sapien
gttctccgtagaaatggaaatagta

SEQ ID NO: 673844 - DNA, 25 bp, Homo sapien
ggatggtgttggtgtgctagcccat

SEQ ID NO: 673845 - DNA, 25 bp, Homo sapien
atggtgttggtgtgctagcccatga

SEQ ID NO: 673846 - DNA, 25 bp, Homo sapien
gatggtgttggtgtgctagcccatg

SEQ ID NO: 673847 - DNA, 25 bp, Homo sapien
gggatggtgttggtgtgctagccca

SEQ ID NO: 673848 - DNA, 25 bp, Homo sapien
tttattacaggccagtgatgtctca

SEQ ID NO: 673849 - DNA, 25 bp, Homo sapien
ccatttattacaggccagtgatgtc

SEQ ID NO: 673850 - DNA, 25 bp, Homo sapien
attaacccatttattacaggccagt

SEQ ID NO: 673851 - DNA, 25 bp, Homo sapien
gatgtctcaaagagtagaggagcgt

SEQ ID NO: 673852 - DNA, 25 bp, Homo sapien
agccactgtcttcacgcgggaacca

SEQ ID NO: 673853 - DNA, 25 bp, Homo sapien
atagcggaggtggtattgtatgtcc

SEQ ID NO: 673854 - DNA, 25 bp, Homo sapien
tcaggcttctgatggcggactttac

SEQ ID NO: 673855 - DNA, 25 bp, Homo sapien
ggtattgtatgtccaggcaccgcca

SEQ ID NO: 673856 - DNA, 25 bp, Homo sapien
tttgccacagaaagagcaagtgtac

SEQ ID NO: 673857 - DNA, 25 bp, Homo sapien
gttttgccacagaaagagcaagtgt

SEQ ID NO: 673858 - DNA, 25 bp, Homo sapien
catctcttcatcttggttttgccac

SEQ ID NO: 673859 - DNA, 25 bp, Homo sapien
tggttttgccacagaaagagcaagt

SEQ ID NO: 673860 - DNA, 25 bp, Homo sapien
caccattttccagagggaggcccca

SEQ ID NO: 673861 - DNA, 25 bp, Homo sapien
gcctgctggctgatttcaactttct

SEQ ID NO: 673862 - DNA, 25 bp, Homo sapien
tttccagagggaggccccatagcgg

SEQ ID NO: 673863 - DNA, 25 bp, Homo sapien
cgacgatcccgactttcttggtagg

SEQ ID NO: 673864 - DNA, 25 bp, Homo sapien
gtcaccgcgaactaggtccgagccc

SEQ ID NO: 673865 - DNA, 25 bp, Homo sapien
aactaggtccgagcccagagagttg

SEQ ID NO: 673866 - DNA, 25 bp, Homo sapien
cgaactaggtccgagcccagagagt

SEQ ID NO: 673867 - DNA, 25 bp, Homo sapien
accgcgaactaggtccgagcccaga

SEQ ID NO: 673868 - DNA, 25 bp, Homo sapien
gttttcccaacaacacgtgaataca

SEQ ID NO: 673869 - DNA, 25 bp, Homo sapien
actactggagttggcaaacgctttc

SEQ ID NO: 673870 - DNA, 25 bp, Homo sapien
tgttttcccaacaacacgtgaatac

SEQ ID NO: 673871 - DNA, 25 bp, Homo sapien
actcgcccactactggagttggcaa

SEQ ID NO: 673872 - DNA, 25 bp, Homo sapien
cagggagtgcgggtcggttctgcgt

SEQ ID NO: 673873 - DNA, 25 bp, Homo sapien
cgagcccatccgtgtgccctgggag

SEQ ID NO: 673874 - DNA, 25 bp, Homo sapien
gctccgcccgtagtcgggccggtga

SEQ ID NO: 673875 - DNA, 25 bp, Homo sapien
acttccggcgcgagaggccgggcag

SEQ ID NO: 673876 - DNA, 25 bp, Homo sapien
aagccatagttgttccattcctcac

SEQ ID NO: 673877 - DNA, 25 bp, Homo sapien
tagaaacaaagccatagttgttcca

SEQ ID NO: 673878 - DNA, 25 bp, Homo sapien
ttggttacttccatagaaacaaagc

SEQ ID NO: 673879 - DNA, 25 bp, Homo sapien
ggattgcaggcatctcttggttact

SEQ ID NO: 673880 - DNA, 25 bp, Homo sapien
caagtgtcaggatcaagagtgtgga

SEQ ID NO: 673881 - DNA, 25 bp, Homo sapien
tgtggatcagtgttagtaccgtaag

SEQ ID NO: 673882 - DNA, 25 bp, Homo sapien
tccttcgctggcactccttttgatg

SEQ ID NO: 673883 - DNA, 25 bp, Homo sapien
gattctggctttgagccaaccctgg

SEQ ID NO: 673884 - DNA, 25 bp, Homo sapien
cacagtgtgacgactccttgcgagc

SEQ ID NO: 673885 - DNA, 25 bp, Homo sapien
acctggaacgcggtactgctggctt

SEQ ID NO: 673886 - DNA, 25 bp, Homo sapien
tgagcacctaccatggaggagattt

SEQ ID NO: 673887 - DNA, 25 bp, Homo sapien
catgggtctgacttgaactctctcc

SEQ ID NO: 673888 - DNA, 25 bp, Homo sapien
taaaatgctggatcccaggcccgtg

SEQ ID NO: 673889 - DNA, 25 bp, Homo sapien
gaaaaaccacctgtttggccagtga

SEQ ID NO: 673890 - DNA, 25 bp, Homo sapien
atgaaggccccagctgttgtcaccg

SEQ ID NO: 673891 - DNA, 25 bp, Homo sapien
caggcccgtgtagctataagaattc

SEQ ID NO: 673892 - DNA, 25 bp, Homo sapien
tgtgaagattttagccttagcccaa

SEQ ID NO: 673893 - DNA, 25 bp, Homo sapien
aaagtactgtgttgtgtgtgcacct

SEQ ID NO: 673894 - DNA, 25 bp, Homo sapien
taaccagtcaagcagacagctcagt

SEQ ID NO: 673895 - DNA, 25 bp, Homo sapien
caaattagacggttcacatgatggt

SEQ ID NO: 673896 - DNA, 25 bp, Homo sapien
taagtcaggttacaaggccgggagc

SEQ ID NO: 673897 - DNA, 25 bp, Homo sapien
gtcacttatcttaggaggtctgtaa

SEQ ID NO: 673898 - DNA, 25 bp, Homo sapien
gcaaaagtagctttcgatctttcat

SEQ ID NO: 673899 - DNA, 25 bp, Homo sapien
tcatcctggtttcacaaggagtcac

SEQ ID NO: 673900 - DNA, 25 bp, Homo sapien
tggattcttgtagctatgcctcggc

SEQ ID NO: 673901 - DNA, 25 bp, Homo sapien
gagctaattctctgaccagcttggg

SEQ ID NO: 673902 - DNA, 25 bp, Homo sapien
catgagaggtgtggctataccgaac

SEQ ID NO: 673903 - DNA, 25 bp, Homo sapien
caacaggagcttgcttcatgcgaag

SEQ ID NO: 673904 - DNA, 25 bp, Homo sapien
gaatgcagctagctacacagagcag

SEQ ID NO: 673905 - DNA, 25 bp, Homo sapien
gctatacttcttggactggccttga

SEQ ID NO: 673906 - DNA, 25 bp, Homo sapien
tagccagcgatttcctcaatgtgcg

SEQ ID NO: 673907 - DNA, 25 bp, Homo sapien
cattctgtagatgcgctggctgcct

SEQ ID NO: 673908 - DNA, 25 bp, Homo sapien
cagtactggtttggtacccatacac

SEQ ID NO: 673909 - DNA, 25 bp, Homo sapien
taagtacttatattgcagcataacc

SEQ ID NO: 673910 - DNA, 25 bp, Homo sapien
cacattatcgcatttaaagggtaag

SEQ ID NO: 673911 - DNA, 25 bp, Homo sapien
cagcagtcttatgaggcccttttcc

SEQ ID NO: 673912 - DNA, 25 bp, Homo sapien
gtagaggagcaaacactctgtgcct

SEQ ID NO: 673913 - DNA, 25 bp, Homo sapien
ttgtcagtgatgggtagaggagcaa

SEQ ID NO: 673914 - DNA, 25 bp, Homo sapien
tagaggagcaaacactctgtgcctg

SEQ ID NO: 673915 - DNA, 25 bp, Homo sapien
ggtacacctacccatctatgtggtt

SEQ ID NO: 673916 - DNA, 25 bp, Homo sapien
gtctgtttaatgcttggtacaccta

SEQ ID NO: 673917 - DNA, 25 bp, Homo sapien
taattaggacatcactgagttgggt

SEQ ID NO: 673918 - DNA, 25 bp, Homo sapien
catggtgtggcttgagtcatccagc

SEQ ID NO: 673919 - DNA, 25 bp, Homo sapien
tggttttcctactaagaggcagact

SEQ ID NO: 673920 - DNA, 25 bp, Homo sapien
cactgcctcccgacttttaaagagc

SEQ ID NO: 673921 - DNA, 25 bp, Homo sapien
gatctgatgactcaaaatactcccc

SEQ ID NO: 673922 - DNA, 25 bp, Homo sapien
gaggcagacttcactacttcttaag

SEQ ID NO: 673923 - DNA, 25 bp, Homo sapien
gctgactccgctactgtaaagaaaa

SEQ ID NO: 673924 - DNA, 25 bp, Homo sapien
tgaattacattaaggcggaggatgg

SEQ ID NO: 673925 - DNA, 25 bp, Homo sapien
aatcccttgaaacgctataccctga

SEQ ID NO: 673926 - DNA, 25 bp, Homo sapien
gattctggctagatatctctgacct

SEQ ID NO: 673927 - DNA, 25 bp, Homo sapien
cagctgcctgtggtcataaatcaaa

SEQ ID NO: 673928 - DNA, 25 bp, Homo sapien
tattaaagtccaagacggcagagcc

SEQ ID NO: 673929 - DNA, 25 bp, Homo sapien
ttaaaattctaattgctggccaggc

SEQ ID NO: 673930 - DNA, 25 bp, Homo sapien
tgtacactaggcaccaacactgagg

SEQ ID NO: 673931 - DNA, 25 bp, Homo sapien
taccccgctgaagagtttaagcaca

SEQ ID NO: 673932 - DNA, 25 bp, Homo sapien
tcagcaaccattcttctagggaagg

SEQ ID NO: 673933 - DNA, 25 bp, Homo sapien
caagaactttgatgctaccccgctg

SEQ ID NO: 673934 - DNA, 25 bp, Homo sapien
tgactagaagcgtgataaaacctgg

SEQ ID NO: 673935 - DNA, 25 bp, Homo sapien
tatatgggttttcggtgaaggagac

SEQ ID NO: 673936 - DNA, 25 bp, Homo sapien
gtatatgggttttcggtgaaggaga

SEQ ID NO: 673937 - DNA, 25 bp, Homo sapien
gttccagtggtgtccttggcactca

SEQ ID NO: 673938 - DNA, 25 bp, Homo sapien
cagtggtgtccttggcactcagagg

SEQ ID NO: 673939 - DNA, 25 bp, Homo sapien
gagttccagtggtgtccttggcact

SEQ ID NO: 673940 - DNA, 25 bp, Homo sapien
tccagtggtgtccttggcactcaga

SEQ ID NO: 673941 - DNA, 25 bp, Homo sapien
caagggtccagacgtaaagcaggag

SEQ ID NO: 673942 - DNA, 25 bp, Homo sapien
gctgaagtcccgactggtgaggaca

SEQ ID NO: 673943 - DNA, 25 bp, Homo sapien
tgaggacaagtggagccacaagggt

SEQ ID NO: 673944 - DNA, 25 bp, Homo sapien
tggagctgatcttgacccacacagc

SEQ ID NO: 673945 - DNA, 25 bp, Homo sapien
caaggatgacgctgtcactccctga

SEQ ID NO: 673946 - DNA, 25 bp, Homo sapien
gccaagcagagcatgaggtggaata

SEQ ID NO: 673947 - DNA, 25 bp, Homo sapien
cagctggtcagggtcatcatgatgt

SEQ ID NO: 673948 - DNA, 25 bp, Homo sapien
gcaccactggtagttgtatcaccaa

SEQ ID NO: 673949 - DNA, 25 bp, Homo sapien
gctgccactggcctgtatacaagac

SEQ ID NO: 673950 - DNA, 25 bp, Homo sapien
gccatgacaatgaactgctgccact

SEQ ID NO: 673951 - DNA, 25 bp, Homo sapien
gacacttactgctgagctgttccta

SEQ ID NO: 673952 - DNA, 25 bp, Homo sapien
cgtgacttcacaagtgccgcttcta

SEQ ID NO: 673953 - DNA, 25 bp, Homo sapien
gacaaggatcctactctcaccattt

SEQ ID NO: 673954 - DNA, 25 bp, Homo sapien
agacaaggatcctactctcaccatt

SEQ ID NO: 673955 - DNA, 25 bp, Homo sapien
aagacaaggatcctactctcaccat

SEQ ID NO: 673956 - DNA, 25 bp, Homo sapien
caaggatcctactctcaccatttct

SEQ ID NO: 673957 - DNA, 25 bp, Homo sapien
acttcagtaaggtatcttcatggtc

SEQ ID NO: 673958 - DNA, 25 bp, Homo sapien
atggtttaagtaaagaagacttcag

SEQ ID NO: 673959 - DNA, 25 bp, Homo sapien
gaagccttaatattgctgagatgac

SEQ ID NO: 673960 - DNA, 25 bp, Homo sapien
ggtatcttcatggtcacagactgga

SEQ ID NO: 673961 - DNA, 25 bp, Homo sapien
ggttggtgcagttatgcgtgtaata

SEQ ID NO: 673962 - DNA, 25 bp, Homo sapien
gaacaaagacaaacagtccaataaa

SEQ ID NO: 673963 - DNA, 25 bp, Homo sapien
gacaaacagtccaataaaattatct

SEQ ID NO: 673964 - DNA, 25 bp, Homo sapien
tgtaataaagctcatcaggttggga

SEQ ID NO: 673965 - DNA, 25 bp, Homo sapien
cattggacatggctgaccaggtgag

SEQ ID NO: 673966 - DNA, 25 bp, Homo sapien
gacatggctgaccaggtgaggtaca

SEQ ID NO: 673967 - DNA, 25 bp, Homo sapien
caggttcattggacatggctgacca

SEQ ID NO: 673968 - DNA, 25 bp, Homo sapien
gaccaggtgaggtacatagtgtaga

SEQ ID NO: 673969 - DNA, 25 bp, Homo sapien
tagagcagcccgacacagatgattg

SEQ ID NO: 673970 - DNA, 25 bp, Homo sapien
tgattgacaggatataaaaggcgct

SEQ ID NO: 673971 - DNA, 25 bp, Homo sapien
ttgggtggatcgatataatagaagc

SEQ ID NO: 673972 - DNA, 25 bp, Homo sapien
gccacaacgcaaaggatcaggttaa

SEQ ID NO: 673973 - DNA, 25 bp, Homo sapien
cagcataccacaaccttgggtttcc

SEQ ID NO: 673974 - DNA, 25 bp, Homo sapien
cattccaagaatgagcaaaatctac

SEQ ID NO: 673975 - DNA, 25 bp, Homo sapien
gatttacccatgattcattccaaga

SEQ ID NO: 673976 - DNA, 25 bp, Homo sapien
gagcaaaatctaccagcagcaccag

SEQ ID NO: 673977 - DNA, 25 bp, Homo sapien
gagccaaccatgattccaataaggg

SEQ ID NO: 673978 - DNA, 25 bp, Homo sapien
tgagctgaaatagcccccagggatg

SEQ ID NO: 673979 - DNA, 25 bp, Homo sapien
ccagggatgtagaaagagccaacca

SEQ ID NO: 673980 - DNA, 25 bp, Homo sapien
tccaataagggcagcaattttgaag

SEQ ID NO: 673981 - DNA, 25 bp, Homo sapien
tataaccaaccagcacatcacaatc

SEQ ID NO: 673982 - DNA, 25 bp, Homo sapien
ccattgtgtactgccgctcggagat

SEQ ID NO: 673983 - DNA, 25 bp, Homo sapien
gatggccatggcaaagctgatccga

SEQ ID NO: 673984 - DNA, 25 bp, Homo sapien
gctgatccgatacacagctttataa

SEQ ID NO: 673985 - DNA, 25 bp, Homo sapien
atcagcctcatggattttaaatccc

SEQ ID NO: 673986 - DNA, 25 bp, Homo sapien
tatcagcctcatggattttaaatcc

SEQ ID NO: 673987 - DNA, 25 bp, Homo sapien
tttatatcagcctcatggattttaa

SEQ ID NO: 673988 - DNA, 25 bp, Homo sapien
tatatcagcctcatggattttaaat

SEQ ID NO: 673989 - DNA, 25 bp, Homo sapien
tgaggcgagtcaccgtggaattctt

SEQ ID NO: 673990 - DNA, 25 bp, Homo sapien
tctctgcatgatataggatacgaca

SEQ ID NO: 673991 - DNA, 25 bp, Homo sapien
gatacgacagtgctcaggaggagaa

SEQ ID NO: 673992 - DNA, 25 bp, Homo sapien
gaaagcataaatgaggcgagtcacc

SEQ ID NO: 673993 - DNA, 25 bp, Homo sapien
tacacagcaaacatgaggcaccgct

SEQ ID NO: 673994 - DNA, 25 bp, Homo sapien
ctacacagcaaacatgaggcaccgc

SEQ ID NO: 673995 - DNA, 25 bp, Homo sapien
acagcaaacatgaggcaccgctgca

SEQ ID NO: 673996 - DNA, 25 bp, Homo sapien
cacagcaaacatgaggcaccgctgc

SEQ ID NO: 673997 - DNA, 25 bp, Homo sapien
gtcacctgagaccgccttcagtata

SEQ ID NO: 673998 - DNA, 25 bp, Homo sapien
cacctgagaccgccttcagtatact

SEQ ID NO: 673999 - DNA, 25 bp, Homo sapien
ggtcacctgagaccgccttcagtat

SEQ ID NO: 674000 - DNA, 25 bp, Homo sapien
acctgagaccgccttcagtatactc

SEQ ID NO: 674001 - DNA, 25 bp, Homo sapien
tgagaccatcctggcgtgagccacc

SEQ ID NO: 674002 - DNA, 25 bp, Homo sapien
atgcctggccttcaactcaccagga

SEQ ID NO: 674003 - DNA, 25 bp, Homo sapien
gcctggccttcaactcaccaggatt

SEQ ID NO: 674004 - DNA, 25 bp, Homo sapien
ctggccttcaactcaccaggatttt

SEQ ID NO: 674005 - DNA, 25 bp, Homo sapien
tggtctcgaggcctttccccgcaaa

SEQ ID NO: 674006 - DNA, 25 bp, Homo sapien
tgctgacatcccgagagcctctgga

SEQ ID NO: 674007 - DNA, 25 bp, Homo sapien
gcaaaccgcaggtccggcgaggact

SEQ ID NO: 674008 - DNA, 25 bp, Homo sapien
aaggcccgtgcagctctggtctcga

SEQ ID NO: 674009 - DNA, 25 bp, Homo sapien
ggagaagacacccagcacagccccc

SEQ ID NO: 674010 - DNA, 25 bp, Homo sapien
ctggcgagggagaagacacccagca

SEQ ID NO: 674011 - DNA, 25 bp, Homo sapien
agaagacacccagcacagcccccat

SEQ ID NO: 674012 - DNA, 25 bp, Homo sapien
ggcgagggagaagacacccagcaca

SEQ ID NO: 674013 - DNA, 25 bp, Homo sapien
aggccggaaacgcagccttccacag

SEQ ID NO: 674014 - DNA, 25 bp, Homo sapien
gaggctgctttctaacacggtggta

SEQ ID NO: 674015 - DNA, 25 bp, Homo sapien
cacggtggtaactgccagctgaggt

SEQ ID NO: 674016 - DNA, 25 bp, Homo sapien
gccttccacagacgcacggatgcgt

SEQ ID NO: 674017 - DNA, 25 bp, Homo sapien
atcatttgtattcattgtgcaaaga

SEQ ID NO: 674018 - DNA, 25 bp, Homo sapien
tcatttgtattcattgtgcaaagat

SEQ ID NO: 674019 - DNA, 25 bp, Homo sapien
tgcagagttattccaagaagtgtag

SEQ ID NO: 674020 - DNA, 25 bp, Homo sapien
gcagagttattccaagaagtgtagt

SEQ ID NO: 674021 - DNA, 25 bp, Homo sapien
cagagttattccaagaagtgtagtt

SEQ ID NO: 674022 - DNA, 25 bp, Homo sapien
ctgcagagttattccaagaagtgta

SEQ ID NO: 674023 - DNA, 25 bp, Homo sapien
cttcgcagctcagccctcgactccc

SEQ ID NO: 674024 - DNA, 25 bp, Homo sapien
ccttcgcagctcagccctcgactcc

SEQ ID NO: 674025 - DNA, 25 bp, Homo sapien
ctccgcggctgcggaaggggacgcg

SEQ ID NO: 674026 - DNA, 25 bp, Homo sapien
ccgcggctgcggaaggggacgcgaa

SEQ ID NO: 674027 - DNA, 25 bp, Homo sapien
tccgcggctgcggaaggggacgcga

SEQ ID NO: 674028 - DNA, 25 bp, Homo sapien
cctccgcggctgcggaaggggacgc

SEQ ID NO: 674029 - DNA, 25 bp, Homo sapien
cagggagagtccgttttcggctgtt

SEQ ID NO: 674030 - DNA, 25 bp, Homo sapien
cgtagcgcgagtgccgcgggagttc

SEQ ID NO: 674031 - DNA, 25 bp, Homo sapien
aggctgcggcccgatctttgtccct

SEQ ID NO: 674032 - DNA, 25 bp, Homo sapien
gtcgccaaggcaacgggctccgctg

SEQ ID NO: 674033 - DNA, 25 bp, Homo sapien
acttctttgtgcgtcagttttatcg

SEQ ID NO: 674034 - DNA, 25 bp, Homo sapien
gtgcgtcagttttatcgtctgcaaa

SEQ ID NO: 674035 - DNA, 25 bp, Homo sapien
gccagagaggattgacttctttgtg

SEQ ID NO: 674036 - DNA, 25 bp, Homo sapien
taactcaaaactgtgcagaaaattt

SEQ ID NO: 674037 - DNA, 25 bp, Homo sapien
taacttgtttttagcagaggacaaa

SEQ ID NO: 674038 - DNA, 25 bp, Homo sapien
ctaacttgtttttagcagaggacaa

SEQ ID NO: 674039 - DNA, 25 bp, Homo sapien
tgcagaagacaacagactgtgtttt

SEQ ID NO: 674040 - DNA, 25 bp, Homo sapien
ccaggctacctgcagtttgaagaaa

SEQ ID NO: 674041 - DNA, 25 bp, Homo sapien
tccaaagtgtctatgcagaagacaa

SEQ ID NO: 674042 - DNA, 25 bp, Homo sapien
caggctacctgcagtttgaagaaag

SEQ ID NO: 674043 - DNA, 25 bp, Homo sapien
tctgaaaagcatcctgttcatactc

SEQ ID NO: 674044 - DNA, 25 bp, Homo sapien
aaaagcatcctgttcatactctgaa

SEQ ID NO: 674045 - DNA, 25 bp, Homo sapien
tctttgttgatacttgaggatttca

SEQ ID NO: 674046 - DNA, 25 bp, Homo sapien
tgatacttgaggatttcatctgaaa

SEQ ID NO: 674047 - DNA, 25 bp, Homo sapien
ggaggccagtctcttactagaagcc

SEQ ID NO: 674048 - DNA, 25 bp, Homo sapien
cagcagttagactgagggcccttca

SEQ ID NO: 674049 - DNA, 25 bp, Homo sapien
tcacgtgttagcataaggaggccag

SEQ ID NO: 674050 - DNA, 25 bp, Homo sapien
tagaagccctcgatcaatcctaggc

SEQ ID NO: 674051 - DNA, 25 bp, Homo sapien
cctaagagattggaggagcagtagc

SEQ ID NO: 674052 - DNA, 25 bp, Homo sapien
gacagagtcctgtagaaagcctaag

SEQ ID NO: 674053 - DNA, 25 bp, Homo sapien
gactttgaggttgctcatggccgga

SEQ ID NO: 674054 - DNA, 25 bp, Homo sapien
tgttgagaacctaatatccgccagg

SEQ ID NO: 674055 - DNA, 25 bp, Homo sapien
tactgggtccacagagatcttttca

SEQ ID NO: 674056 - DNA, 25 bp, Homo sapien
ggaccttctccatagctggaatttt

SEQ ID NO: 674057 - DNA, 25 bp, Homo sapien
aattgaaggctattctagattggcc

SEQ ID NO: 674058 - DNA, 25 bp, Homo sapien
tgagcgcatcgctctgaagagcttg

SEQ ID NO: 674059 - DNA, 25 bp, Homo sapien
ctaaggatggtgtgaggactgaaag

SEQ ID NO: 674060 - DNA, 25 bp, Homo sapien
ggagagagaaggtcttgtgattttc

SEQ ID NO: 674061 - DNA, 25 bp, Homo sapien
tgggagagagaaggtcttgtgattt

SEQ ID NO: 674062 - DNA, 25 bp, Homo sapien
agagagaaggtcttgtgattttctc

SEQ ID NO: 674063 - DNA, 25 bp, Homo sapien
agaaggtcttgtgattttctctctc

SEQ ID NO: 674064 - DNA, 25 bp, Homo sapien
ttccttatcgtaggaattgtcagca

SEQ ID NO: 674065 - DNA, 25 bp, Homo sapien
aggagtgaacctccgtgacctgtag

SEQ ID NO: 674066 - DNA, 25 bp, Homo sapien
tgacctgtagaaggagccacctctg

SEQ ID NO: 674067 - DNA, 25 bp, Homo sapien
aagcattgagcggtttccccagagg

SEQ ID NO: 674068 - DNA, 25 bp, Homo sapien
ctgagctaggtgttgtggggggatg

SEQ ID NO: 674069 - DNA, 25 bp, Homo sapien
gtctgatctttgagggcccctaatt

SEQ ID NO: 674070 - DNA, 25 bp, Homo sapien
tgagggcccctaattcattctttag

SEQ ID NO: 674071 - DNA, 25 bp, Homo sapien
ctttgagggcccctaattcattctt

SEQ ID NO: 674072 - DNA, 25 bp, Homo sapien
tctaattgtaactatgtacccgttg

SEQ ID NO: 674073 - DNA, 25 bp, Homo sapien
cacccggcctagaatgccttattgt

SEQ ID NO: 674074 - DNA, 25 bp, Homo sapien
ttcagttgccagtttatctcagaca

SEQ ID NO: 674075 - DNA, 25 bp, Homo sapien
tcagtacaggcccatctggcacatt

SEQ ID NO: 674076 - DNA, 25 bp, Homo sapien
gcagcccacacaggaacgctcctct

SEQ ID NO: 674077 - DNA, 25 bp, Homo sapien
gagagctgacaatcaattcacattt

SEQ ID NO: 674078 - DNA, 25 bp, Homo sapien
acaggaacgctcctctcgcgagcgg

SEQ ID NO: 674079 - DNA, 25 bp, Homo sapien
aaaccttttttcagcagatatggag

SEQ ID NO: 674080 - DNA, 25 bp, Homo sapien
ttttggctcaaaacgatctgaccac

SEQ ID NO: 674081 - DNA, 25 bp, Homo sapien
aagggattttggctcaaaacgatct

SEQ ID NO: 674082 - DNA, 25 bp, Homo sapien
cattttagctaaactgtcattgtgc

SEQ ID NO: 674083 - DNA, 25 bp, Homo sapien
gccctgtccaccaggataagtgaca

SEQ ID NO: 674084 - DNA, 25 bp, Homo sapien
agttcagggaatgtttgagcaacaa

SEQ ID NO: 674085 - DNA, 25 bp, Homo sapien
agaccaccaaattacatgccacctg

SEQ ID NO: 674086 - DNA, 25 bp, Homo sapien
ttcacagccacccttaggctcaggc

SEQ ID NO: 674087 - DNA, 25 bp, Homo sapien
ccagagaagccttatttcttctgga

SEQ ID NO: 674088 - DNA, 25 bp, Homo sapien
aaatggacacatagggttcaggagc

SEQ ID NO: 674089 - DNA, 25 bp, Homo sapien
gtaaaaatgttgctcagccccacag

SEQ ID NO: 674090 - DNA, 25 bp, Homo sapien
ccatgccgaggtatacgtgtgtgca

SEQ ID NO: 674091 - DNA, 25 bp, Homo sapien
taatcagagaagtgacgcggccatg

SEQ ID NO: 674092 - DNA, 25 bp, Homo sapien
ctgctcgttggttcagagaagcaaa

SEQ ID NO: 674093 - DNA, 25 bp, Homo sapien
ggaactccttcctatgatggcaaga

SEQ ID NO: 674094 - DNA, 25 bp, Homo sapien
gatcaggcaacttgtagtacccagg

SEQ ID NO: 674095 - DNA, 25 bp, Homo sapien
ggatgttgtaaaaatcatagaacac

SEQ ID NO: 674096 - DNA, 25 bp, Homo sapien
ccagaaaccagggagtcatcacaca

SEQ ID NO: 674097 - DNA, 25 bp, Homo sapien
cgatctaatgagacgctgctcccag

SEQ ID NO: 674098 - DNA, 25 bp, Homo sapien
tagaagtcccacagaaagccacact

SEQ ID NO: 674099 - DNA, 25 bp, Homo sapien
tcacacattcatggcgctgcccaag

SEQ ID NO: 674100 - DNA, 25 bp, Homo sapien
ggctgaaggtggcatcccataggct

SEQ ID NO: 674101 - DNA, 25 bp, Homo sapien
ccataggctttatagagcaggtcga

SEQ ID NO: 674102 - DNA, 25 bp, Homo sapien
caggtcgagaagctccctcttttca

SEQ ID NO: 674103 - DNA, 25 bp, Homo sapien
gaaactagatttggccgcattgatg

SEQ ID NO: 674104 - DNA, 25 bp, Homo sapien
gcagacacgtgcaggaatggactta

SEQ ID NO: 674105 - DNA, 25 bp, Homo sapien
ttcactcaacatgggcagatacgct

SEQ ID NO: 674106 - DNA, 25 bp, Homo sapien
aaacccgagtcaaggccagtatggc

SEQ ID NO: 674107 - DNA, 25 bp, Homo sapien
ggtcaggacgtcaacacaaagatgt

SEQ ID NO: 674108 - DNA, 25 bp, Homo sapien
ggtcatctgtgttgagcgagtagtt

SEQ ID NO: 674109 - DNA, 25 bp, Homo sapien
gtaaagcccatgtcccgtttggtca

SEQ ID NO: 674110 - DNA, 25 bp, Homo sapien
gtagttagcctggtcatttttgagc

SEQ ID NO: 674111 - DNA, 25 bp, Homo sapien
tggacttgaagatgagcgggtcatc

SEQ ID NO: 674112 - DNA, 25 bp, Homo sapien
gcatgctccgtgtccggcttccagg

SEQ ID NO: 674113 - DNA, 25 bp, Homo sapien
cgtgtccggcttccaggcaccagtg

SEQ ID NO: 674114 - DNA, 25 bp, Homo sapien
tgtccggcttccaggcaccagtgag

SEQ ID NO: 674115 - DNA, 25 bp, Homo sapien
cgaatgactgcatgctccgtgtccg

SEQ ID NO: 674116 - DNA, 25 bp, Homo sapien
gtggtagccgtgtcccagccgctct

SEQ ID NO: 674117 - DNA, 25 bp, Homo sapien
gcagcctgttataaagggcctggtc

SEQ ID NO: 674118 - DNA, 25 bp, Homo sapien
ctgccgcagcctgttataaagggcc

SEQ ID NO: 674119 - DNA, 25 bp, Homo sapien
tcttccagggtgtggtagccgtgtc

SEQ ID NO: 674120 - DNA, 25 bp, Homo sapien
agcagaatagagccaagtatgggag

SEQ ID NO: 674121 - DNA, 25 bp, Homo sapien
gcagaatagagccaagtatgggagg

SEQ ID NO: 674122 - DNA, 25 bp, Homo sapien
tcttttactacttcggccgagccca

SEQ ID NO: 674123 - DNA, 25 bp, Homo sapien
ggtgaatgccgctcttcacagcctc

SEQ ID NO: 674124 - DNA, 25 bp, Homo sapien
tggacagtacggtgaatgccgctct

SEQ ID NO: 674125 - DNA, 25 bp, Homo sapien
cctccccggcgtggacagtacggtg

SEQ ID NO: 674126 - DNA, 25 bp, Homo sapien
gacccaacaaagacacacttcagaa

SEQ ID NO: 674127 - DNA, 25 bp, Homo sapien
ttccagttccaagccttaagaccca

SEQ ID NO: 674128 - DNA, 25 bp, Homo sapien
ccatggtccctggttcttgtgattt

SEQ ID NO: 674129 - DNA, 25 bp, Homo sapien
gaactcaggagacaccatggtccct

SEQ ID NO: 674130 - DNA, 25 bp, Homo sapien
gctaccacggtctgctgctggtact

SEQ ID NO: 674131 - DNA, 25 bp, Homo sapien
atggctaccacggtctgctgctggt

SEQ ID NO: 674132 - DNA, 25 bp, Homo sapien
tcaatggctaccacggtctgctgct

SEQ ID NO: 674133 - DNA, 25 bp, Homo sapien
ggtcaatggctaccacggtctgctg

SEQ ID NO: 674134 - DNA, 25 bp, Homo sapien
gtggcgcatgcagcacaggatggac

SEQ ID NO: 674135 - DNA, 25 bp, Homo sapien
cgggccttgaccccgaagtctcgct

SEQ ID NO: 674136 - DNA, 25 bp, Homo sapien
tggcgcatgcagcacaggatggacc

SEQ ID NO: 674137 - DNA, 25 bp, Homo sapien
ggcgcatgcagcacaggatggaccg

SEQ ID NO: 674138 - DNA, 25 bp, Homo sapien
cgatccttttgatagcctcccggca

SEQ ID NO: 674139 - DNA, 25 bp, Homo sapien
ccagcaggtgcggactgtaccgcac

SEQ ID NO: 674140 - DNA, 25 bp, Homo sapien
tctacaaactcataggcgatccttt

SEQ ID NO: 674141 - DNA, 25 bp, Homo sapien
tccacatacaccacgccctctttgg

SEQ ID NO: 674142 - DNA, 25 bp, Homo sapien
gcgatagcaggcatgtagtagtcaa

SEQ ID NO: 674143 - DNA, 25 bp, Homo sapien
gcccctctgctgtgttagctgggag

SEQ ID NO: 674144 - DNA, 25 bp, Homo sapien
tgttagctgggagggcgatccctct

SEQ ID NO: 674145 - DNA, 25 bp, Homo sapien
tgtccatgccaatgacgttcagcag

SEQ ID NO: 674146 - DNA, 25 bp, Homo sapien
ggtggagatgctcccgagagttggg

SEQ ID NO: 674147 - DNA, 25 bp, Homo sapien
atgctcccgagagttgggggcaacc

SEQ ID NO: 674148 - DNA, 25 bp, Homo sapien
gatgctcccgagagttgggggcaac

SEQ ID NO: 674149 - DNA, 25 bp, Homo sapien
ggagatgctcccgagagttgggggc

SEQ ID NO: 674150 - DNA, 25 bp, Homo sapien
gattctggcttatggagcagaaatg

SEQ ID NO: 674151 - DNA, 25 bp, Homo sapien
gagggcaggcctctgaataacagga

SEQ ID NO: 674152 - DNA, 25 bp, Homo sapien
tgttgtgcaaacatccgaggaacac

SEQ ID NO: 674153 - DNA, 25 bp, Homo sapien
gtgcaaacatccgaggaacacaggt

SEQ ID NO: 674154 - DNA, 25 bp, Homo sapien
ctttcagctccaaacaaaatgagtg

SEQ ID NO: 674155 - DNA, 25 bp, Homo sapien
ttgtgcaaacatccgaggaacacag

SEQ ID NO: 674156 - DNA, 25 bp, Homo sapien
tgccatagtataagatggtttcagg

SEQ ID NO: 674157 - DNA, 25 bp, Homo sapien
gatccgtctaggtggacatgcagtt

SEQ ID NO: 674158 - DNA, 25 bp, Homo sapien
ttcaggcttgatggatccgtctagg

SEQ ID NO: 674159 - DNA, 25 bp, Homo sapien
tataagatggtttcaggcttgatgg

SEQ ID NO: 674160 - DNA, 25 bp, Homo sapien
aactgtgataagaagcagaccaagt

SEQ ID NO: 674161 - DNA, 25 bp, Homo sapien
actgtgataagaagcagaccaagtg

SEQ ID NO: 674162 - DNA, 25 bp, Homo sapien
cctgcttggcagactcctgggcccc

SEQ ID NO: 674163 - DNA, 25 bp, Homo sapien
agactcctgggcccctcctctcgga

SEQ ID NO: 674164 - DNA, 25 bp, Homo sapien
actcctgggcccctcctctcggact

SEQ ID NO: 674165 - DNA, 25 bp, Homo sapien
tgcttggcagactcctgggcccctc

SEQ ID NO: 674166 - DNA, 25 bp, Homo sapien
ttgtcgaaggcgggcgtctgggcca

SEQ ID NO: 674167 - DNA, 25 bp, Homo sapien
tgtcgaaggcgggcgtctgggccat

SEQ ID NO: 674168 - DNA, 25 bp, Homo sapien
tgccggctcggtggccgctcggctt

SEQ ID NO: 674169 - DNA, 25 bp, Homo sapien
ctcggctttccctggggccagcggt

SEQ ID NO: 674170 - DNA, 25 bp, Homo sapien
ggtgccctcgtgcgccccggcgctg

SEQ ID NO: 674171 - DNA, 25 bp, Homo sapien
ggtgggtctctgccggctcggtggc

SEQ ID NO: 674172 - DNA, 25 bp, Homo sapien
ggggccagccgtggcctgcagaacc

SEQ ID NO: 674173 - DNA, 25 bp, Homo sapien
ggcctgcagaacctgcaggagttca

SEQ ID NO: 674174 - DNA, 25 bp, Homo sapien
ttcgaggggggccagccgtggcctg

SEQ ID NO: 674175 - DNA, 25 bp, Homo sapien
tggcctgcagaacctgcaggagttc

SEQ ID NO: 674176 - DNA, 25 bp, Homo sapien
gagcaagcttcctggatttccgagc

SEQ ID NO: 674177 - DNA, 25 bp, Homo sapien
tgaaatgccaatcaacctagatgag

SEQ ID NO: 674178 - DNA, 25 bp, Homo sapien
taatagagcgtgatgggagcaagct

SEQ ID NO: 674179 - DNA, 25 bp, Homo sapien
gagagtccacatatggccattccag

SEQ ID NO: 674180 - DNA, 25 bp, Homo sapien
gtttgttcaacatgaccggctgagt

SEQ ID NO: 674181 - DNA, 25 bp, Homo sapien
ttgagggcatatgggcagctacacc

SEQ ID NO: 674182 - DNA, 25 bp, Homo sapien
ggaccagtgactacagaaagcttga

SEQ ID NO: 674183 - DNA, 25 bp, Homo sapien
tcttcatagcaatacagagtggacc

SEQ ID NO: 674184 - DNA, 25 bp, Homo sapien
cttgtgccaacattgttttagtcca

SEQ ID NO: 674185 - DNA, 25 bp, Homo sapien
gagtcttgtgccaacattgttttag

SEQ ID NO: 674186 - DNA, 25 bp, Homo sapien
cagcactgagtcttgtgccaacatt

SEQ ID NO: 674187 - DNA, 25 bp, Homo sapien
cactgagtcttgtgccaacattgtt

SEQ ID NO: 674188 - DNA, 25 bp, Homo sapien
aatatcaaggtgctggcatcattca

SEQ ID NO: 674189 - DNA, 25 bp, Homo sapien
gtgctggcatcattcaagggccttc

SEQ ID NO: 674190 - DNA, 25 bp, Homo sapien
ttatggaacagaaatgtattggctc

SEQ ID NO: 674191 - DNA, 25 bp, Homo sapien
caaggtgctggcatcattcaagggc

SEQ ID NO: 674192 - DNA, 25 bp, Homo sapien
ttccagcttccggaatttggttgat

SEQ ID NO: 674193 - DNA, 25 bp, Homo sapien
ctttgtcccagtagatagatgtgca

SEQ ID NO: 674194 - DNA, 25 bp, Homo sapien
catgtttaaacagcagtctccagcc

SEQ ID NO: 674195 - DNA, 25 bp, Homo sapien
agaaataagtgtgttcaacctgcca

SEQ ID NO: 674196 - DNA, 25 bp, Homo sapien
gttcaacctgccatgtttaaacagc

SEQ ID NO: 674197 - DNA, 25 bp, Homo sapien
tgtggtcaccctacagaacaaccgt

SEQ ID NO: 674198 - DNA, 25 bp, Homo sapien
cctgcacaggcaagataatggagtc

SEQ ID NO: 674199 - DNA, 25 bp, Homo sapien
tcatggaggaagctacacaggtcac

SEQ ID NO: 674200 - DNA, 25 bp, Homo sapien
tgctgtcatagaacccatgggactg

SEQ ID NO: 674201 - DNA, 25 bp, Homo sapien
gagaggagggtaaagctcctgcaga

SEQ ID NO: 674202 - DNA, 25 bp, Homo sapien
gccttgaggtgaccccaaaagactg

SEQ ID NO: 674203 - DNA, 25 bp, Homo sapien
caaaagactggggtgcaggttaggg

SEQ ID NO: 674204 - DNA, 25 bp, Homo sapien
tagggggttgagacaggctcagcat

SEQ ID NO: 674205 - DNA, 25 bp, Homo sapien
tgtgtggggcgcagtcattagaccc

SEQ ID NO: 674206 - DNA, 25 bp, Homo sapien
tcttcctctcatcccgcactatctg

SEQ ID NO: 674207 - DNA, 25 bp, Homo sapien
ccagggccagagatcttcctctcat

SEQ ID NO: 674208 - DNA, 25 bp, Homo sapien
ctatctgcagtcctctctggtgtgt

SEQ ID NO: 674209 - DNA, 25 bp, Homo sapien
cctcctggggtttcagatcagtctt

SEQ ID NO: 674210 - DNA, 25 bp, Homo sapien
tcagggctcagaggacctcctcctg

SEQ ID NO: 674211 - DNA, 25 bp, Homo sapien
ctcctcctggggtttcagatcagtc

SEQ ID NO: 674212 - DNA, 25 bp, Homo sapien
agggctcagaggacctcctcctggg

SEQ ID NO: 674213 - DNA, 25 bp, Homo sapien
gttacagaccagccagggcaacata

SEQ ID NO: 674214 - DNA, 25 bp, Homo sapien
agcactttggaaagctgagataaga

SEQ ID NO: 674215 - DNA, 25 bp, Homo sapien
cagcactttggaaagctgagataag

SEQ ID NO: 674216 - DNA, 25 bp, Homo sapien
ggactgcttgaggccaggagttaca

SEQ ID NO: 674217 - DNA, 25 bp, Homo sapien
ctcttcacacagatgcgtgtgacat

SEQ ID NO: 674218 - DNA, 25 bp, Homo sapien
tgctgaagacccgggtcagagggac

SEQ ID NO: 674219 - DNA, 25 bp, Homo sapien
cttcacacagatgcgtgtgacattt

SEQ ID NO: 674220 - DNA, 25 bp, Homo sapien
tgaagacccgggtcagagggactcc

SEQ ID NO: 674221 - DNA, 25 bp, Homo sapien
ttgtttctgccccaccctaactgat

SEQ ID NO: 674222 - DNA, 25 bp, Homo sapien
tagccttaactgatgactttccacc

SEQ ID NO: 674223 - DNA, 25 bp, Homo sapien
tatcccctgtgacctgcctgtatac

SEQ ID NO: 674224 - DNA, 25 bp, Homo sapien
gaagacaggaatgtcaggcctctga

SEQ ID NO: 674225 - DNA, 25 bp, Homo sapien
attctccccacccttgagaatgtac

SEQ ID NO: 674226 - DNA, 25 bp, Homo sapien
tctccccacccttgagaatgtactt

SEQ ID NO: 674227 - DNA, 25 bp, Homo sapien
ccccacccttgagaatgtactttgt

SEQ ID NO: 674228 - DNA, 25 bp, Homo sapien
tccccacccttgagaatgtactttg

SEQ ID NO: 674229 - DNA, 25 bp, Homo sapien
caccgcctatcccaaaacctataag

SEQ ID NO: 674230 - DNA, 25 bp, Homo sapien
taataaacccaccaccctttgctga

SEQ ID NO: 674231 - DNA, 25 bp, Homo sapien
acattgctcctaactccaccgccta

SEQ ID NO: 674232 - DNA, 25 bp, Homo sapien
ttgctcctaactccaccgcctatcc

SEQ ID NO: 674233 - DNA, 25 bp, Homo sapien
aaatgggctacagcgactaaggggc

SEQ ID NO: 674234 - DNA, 25 bp, Homo sapien
tgggctacagcgactaaggggcctc

SEQ ID NO: 674235 - DNA, 25 bp, Homo sapien
ggctacagcgactaaggggcctcac

SEQ ID NO: 674236 - DNA, 25 bp, Homo sapien
caaatgggctacagcgactaagggg

SEQ ID NO: 674237 - DNA, 25 bp, Homo sapien
ctgggcaaatcccccagctggaggg

SEQ ID NO: 674238 - DNA, 25 bp, Homo sapien
ggtccccagggggttgagaagatga

SEQ ID NO: 674239 - DNA, 25 bp, Homo sapien
tgggcaaatcccccagctggagggt

SEQ ID NO: 674240 - DNA, 25 bp, Homo sapien
ccccagggggttgagaagatgaggg

SEQ ID NO: 674241 - DNA, 25 bp, Homo sapien
cagtccagcctgtcaccaaggttgt

SEQ ID NO: 674242 - DNA, 25 bp, Homo sapien
gcctacaggccaggtcaagatgcag

SEQ ID NO: 674243 - DNA, 25 bp, Homo sapien
cagtacttgaacctaggctgagtcc

SEQ ID NO: 674244 - DNA, 25 bp, Homo sapien
catactagcaatcctgcatgggagg

SEQ ID NO: 674245 - DNA, 25 bp, Homo sapien
tcaaacactttgagctcatccatga

SEQ ID NO: 674246 - DNA, 25 bp, Homo sapien
ctgccttgggatgcgatgagttctg

SEQ ID NO: 674247 - DNA, 25 bp, Homo sapien
tggtcctgggaggatacaagcagag

SEQ ID NO: 674248 - DNA, 25 bp, Homo sapien
tcatccatgatggaataggctgcct

SEQ ID NO: 674249 - DNA, 25 bp, Homo sapien
tcagtgtctggtgggagcctgtttc

SEQ ID NO: 674250 - DNA, 25 bp, Homo sapien
tgtctggtgggagcctgtttcttat

SEQ ID NO: 674251 - DNA, 25 bp, Homo sapien
actcagtgtctggtgggagcctgtt

SEQ ID NO: 674252 - DNA, 25 bp, Homo sapien
agtgtctggtgggagcctgtttctt

SEQ ID NO: 674253 - DNA, 25 bp, Homo sapien
ttactgctactgtttaatacataga

SEQ ID NO: 674254 - DNA, 25 bp, Homo sapien
cctacagaaaatattgctagtggag

SEQ ID NO: 674255 - DNA, 25 bp, Homo sapien
atacatgccttttaaggtgaggaac

SEQ ID NO: 674256 - DNA, 25 bp, Homo sapien
ttaatacatagagctggagagctgg

SEQ ID NO: 674257 - DNA, 25 bp, Homo sapien
tcattgtcaaggtctccttgctctg

SEQ ID NO: 674258 - DNA, 25 bp, Homo sapien
attgtcaaggtctccttgctctgct

SEQ ID NO: 674259 - DNA, 25 bp, Homo sapien
cattgtcaaggtctccttgctctgc

SEQ ID NO: 674260 - DNA, 25 bp, Homo sapien
ttcctttcaggaacaactaatcagt

SEQ ID NO: 674261 - DNA, 25 bp, Homo sapien
agtggcttaaaactgttcctttcag

SEQ ID NO: 674262 - DNA, 25 bp, Homo sapien
ctttcaggaacaactaatcagtggc

SEQ ID NO: 674263 - DNA, 25 bp, Homo sapien
tcagagatagaagtggcttaaaact

SEQ ID NO: 674264 - DNA, 25 bp, Homo sapien
ggagaactgtaagtcttccaggctg

SEQ ID NO: 674265 - DNA, 25 bp, Homo sapien
cagaaacacagggacttagtcacca

SEQ ID NO: 674266 - DNA, 25 bp, Homo sapien
cagagggagaactgtaagtcttcca

SEQ ID NO: 674267 - DNA, 25 bp, Homo sapien
gggacttagtcaccacaacatggaa

SEQ ID NO: 674268 - DNA, 25 bp, Homo sapien
ttcgctgggccaggtcttttcatcc

SEQ ID NO: 674269 - DNA, 25 bp, Homo sapien
gatggccaataacctaacgtgaacc

SEQ ID NO: 674270 - DNA, 25 bp, Homo sapien
taacctaacgtgaacctcttcagca

SEQ ID NO: 674271 - DNA, 25 bp, Homo sapien
gtctctgttggatggccaataacct

SEQ ID NO: 674272 - DNA, 25 bp, Homo sapien
gacacaccctccaggtccactaacc

SEQ ID NO: 674273 - DNA, 25 bp, Homo sapien
ctcaaggacacaccctccaggtcca

SEQ ID NO: 674274 - DNA, 25 bp, Homo sapien
caggtccactaacccccctgcctct

SEQ ID NO: 674275 - DNA, 25 bp, Homo sapien
ctgcctctctcagtctctgagacat

SEQ ID NO: 674276 - DNA, 25 bp, Homo sapien
cttagtattgaccaggattccggaa

SEQ ID NO: 674277 - DNA, 25 bp, Homo sapien
tccggaaggagatatgcacatgcac

SEQ ID NO: 674278 - DNA, 25 bp, Homo sapien
atatgcacatgcaccaagccctagg

SEQ ID NO: 674279 - DNA, 25 bp, Homo sapien
ccaggattccggaaggagatatgca

SEQ ID NO: 674280 - DNA, 25 bp, Homo sapien
gtgtttgttcctggttggagagatt

SEQ ID NO: 674281 - DNA, 25 bp, Homo sapien
tgttcctggttggagagatttcctt

SEQ ID NO: 674282 - DNA, 25 bp, Homo sapien
agatttcctttacgtggtgatccgg

SEQ ID NO: 674283 - DNA, 25 bp, Homo sapien
tccgggtgacttccatgttgcagct

SEQ ID NO: 674284 - DNA, 25 bp, Homo sapien
tagacagacagggatggagaagctc

SEQ ID NO: 674285 - DNA, 25 bp, Homo sapien
ctagacagacagggatggagaagct

SEQ ID NO: 674286 - DNA, 25 bp, Homo sapien
tccacaaactcttttcgggctcttg

SEQ ID NO: 674287 - DNA, 25 bp, Homo sapien
tattaaacttactgatgctgttgct

SEQ ID NO: 674288 - DNA, 25 bp, Homo sapien
gctgttgctaaaaatcaggctgagg

SEQ ID NO: 674289 - DNA, 25 bp, Homo sapien
ggtagtggcaccagcacgctgcttc

SEQ ID NO: 674290 - DNA, 25 bp, Homo sapien
gctgctgtcttcgacgcgctcgagt

SEQ ID NO: 674291 - DNA, 25 bp, Homo sapien
ggcgctgctgtcttcgacgcgctcg

SEQ ID NO: 674292 - DNA, 25 bp, Homo sapien
gctcgagtccgaggcggaaagcggc

SEQ ID NO: 674293 - DNA, 25 bp, Homo sapien
gcgctcgagtccgaggcggaaagcg

SEQ ID NO: 674294 - DNA, 25 bp, Homo sapien
cagtaaatcgagtttgccaaaaggc

SEQ ID NO: 674295 - DNA, 25 bp, Homo sapien
cagggacgggaggaatcagtaaatc

SEQ ID NO: 674296 - DNA, 25 bp, Homo sapien
gctctccggaggaagttcggcttct

SEQ ID NO: 674297 - DNA, 25 bp, Homo sapien
gctgagctactttggacgggtcatt

SEQ ID NO: 674298 - DNA, 25 bp, Homo sapien
tacggactccggcaaggtcttctgc

SEQ ID NO: 674299 - DNA, 25 bp, Homo sapien
tgggcgaacggctgaacgcggtggt

SEQ ID NO: 674300 - DNA, 25 bp, Homo sapien
atgttctacgcgctcctgggcatcc

SEQ ID NO: 674301 - DNA, 25 bp, Homo sapien
gcatcccgctgacgctggtcacttt

SEQ ID NO: 674302 - DNA, 25 bp, Homo sapien
catgagctacatggtcatgaacaca

SEQ ID NO: 674303 - DNA, 25 bp, Homo sapien
atttcaacatgagctacatggtcat

SEQ ID NO: 674304 - DNA, 25 bp, Homo sapien
tcaacatgagctacatggtcatgaa

SEQ ID NO: 674305 - DNA, 25 bp, Homo sapien
tggtcatgaacacaatgcaacgcga

SEQ ID NO: 674306 - DNA, 25 bp, Homo sapien
tcgcctgaagaacaatggagcccct

SEQ ID NO: 674307 - DNA, 25 bp, Homo sapien
aacattctttctagtccgccagcgg

SEQ ID NO: 674308 - DNA, 25 bp, Homo sapien
catcccttggtgaggacagaccgta

SEQ ID NO: 674309 - DNA, 25 bp, Homo sapien
aattggcaccatggagatggccggc

SEQ ID NO: 674310 - DNA, 25 bp, Homo sapien
gggaagggagagtggtctgctctgc

SEQ ID NO: 674311 - DNA, 25 bp, Homo sapien
atccaccaggtcaagaaccggccaa

SEQ ID NO: 674312 - DNA, 25 bp, Homo sapien
aaagtgtagccaatcccgttgggag

SEQ ID NO: 674313 - DNA, 25 bp, Homo sapien
ccccgttctgcttccccactgtggg

SEQ ID NO: 674314 - DNA, 25 bp, Homo sapien
aagatcgttctccgcagggccccac

SEQ ID NO: 674315 - DNA, 25 bp, Homo sapien
taagatcgttctccgcagggcccca

SEQ ID NO: 674316 - DNA, 25 bp, Homo sapien
ctaagatcgttctccgcagggcccc

SEQ ID NO: 674317 - DNA, 25 bp, Homo sapien
gacaactgggatgcctgccggagca

SEQ ID NO: 674318 - DNA, 25 bp, Homo sapien
gcgagccacacccatgaactgcttc

SEQ ID NO: 674319 - DNA, 25 bp, Homo sapien
catgaactgcttccgctccatccgc

SEQ ID NO: 674320 - DNA, 25 bp, Homo sapien
gggaagagcttgtaccagcccacgg

SEQ ID NO: 674321 - DNA, 25 bp, Homo sapien
ccattctctagcaggtaggccttga

SEQ ID NO: 674322 - DNA, 25 bp, Homo sapien
gacttgcgagcgactttggtcttct

SEQ ID NO: 674323 - DNA, 25 bp, Homo sapien
tatacagtgggtccagcgacttgcg

SEQ ID NO: 674324 - DNA, 25 bp, Homo sapien
acagcagcacctggttatacagtgg

SEQ ID NO: 674325 - DNA, 25 bp, Homo sapien
ctgtcagtccccgagcctggataat

SEQ ID NO: 674326 - DNA, 25 bp, Homo sapien
gataatgtccacctccaactgaccg

SEQ ID NO: 674327 - DNA, 25 bp, Homo sapien
caactgaccgttccgctcctgcaga

SEQ ID NO: 674328 - DNA, 25 bp, Homo sapien
cgctcctgcagaccgatctccacat

SEQ ID NO: 674329 - DNA, 25 bp, Homo sapien
aggaagtcactgaactgggcgtccg

SEQ ID NO: 674330 - DNA, 25 bp, Homo sapien
cgccaggcaaactcctccatagtta

SEQ ID NO: 674331 - DNA, 25 bp, Homo sapien
ggccagggtctggcggcccacaaac

SEQ ID NO: 674332 - DNA, 25 bp, Homo sapien
tctggcggcccacaaactgtgccgg

SEQ ID NO: 674333 - DNA, 25 bp, Homo sapien
cgcagtgtccggctgggcatctcca

SEQ ID NO: 674334 - DNA, 25 bp, Homo sapien
ctctgagccatagctgttcatgctg

SEQ ID NO: 674335 - DNA, 25 bp, Homo sapien
ccgtctccgtgctcctctggatggc

SEQ ID NO: 674336 - DNA, 25 bp, Homo sapien
tccactgccaggcccgtctccgtgc

SEQ ID NO: 674337 - DNA, 25 bp, Homo sapien
gaaacagactcagacagagatgtcc

SEQ ID NO: 674338 - DNA, 25 bp, Homo sapien
cagaaacagactcagacagagatgt

SEQ ID NO: 674339 - DNA, 25 bp, Homo sapien
gcacattcagaaacagactcagaca

SEQ ID NO: 674340 - DNA, 25 bp, Homo sapien
atgcacattcagaaacagactcaga

SEQ ID NO: 674341 - DNA, 25 bp, Homo sapien
gggccttgcgtctgctgcctctcca

SEQ ID NO: 674342 - DNA, 25 bp, Homo sapien
tctctgggccttgcgtctgctgcct

SEQ ID NO: 674343 - DNA, 25 bp, Homo sapien
tcctctctgggccttgcgtctgctg

SEQ ID NO: 674344 - DNA, 25 bp, Homo sapien
ggccttgcgtctgctgcctctccat

SEQ ID NO: 674345 - DNA, 25 bp, Homo sapien
tgtctccaggagagtaatttgttcc

SEQ ID NO: 674346 - DNA, 25 bp, Homo sapien
ttcgttccagaaatataaagccggc

SEQ ID NO: 674347 - DNA, 25 bp, Homo sapien
aataatgtaacacggcaggaactgg

SEQ ID NO: 674348 - DNA, 25 bp, Homo sapien
gagatatcactatcctggcctgaga

SEQ ID NO: 674349 - DNA, 25 bp, Homo sapien
ttaaaatcctttgtcagacacaaaa

SEQ ID NO: 674350 - DNA, 25 bp, Homo sapien
ttgtcagacacaaaagacttcatgt

SEQ ID NO: 674351 - DNA, 25 bp, Homo sapien
taaaatcctttgtcagacacaaaag

SEQ ID NO: 674352 - DNA, 25 bp, Homo sapien
cctttgtcagacacaaaagacttca

SEQ ID NO: 674353 - DNA, 25 bp, Homo sapien
caataggcgcgggtgaggagggaga

SEQ ID NO: 674354 - DNA, 25 bp, Homo sapien
gggagatgggtcctggcgacccaaa

SEQ ID NO: 674355 - DNA, 25 bp, Homo sapien
gagatgggtcctggcgacccaaagg

SEQ ID NO: 674356 - DNA, 25 bp, Homo sapien
ctccagggacgaggcaaggggcctc

SEQ ID NO: 674357 - DNA, 25 bp, Homo sapien
gggaaaggtgaatgcagacaatctc

SEQ ID NO: 674358 - DNA, 25 bp, Homo sapien
gcgggaaaggtgaatgcagacaatc

SEQ ID NO: 674359 - DNA, 25 bp, Homo sapien
ctgcgggaaaggtgaatgcagacaa

SEQ ID NO: 674360 - DNA, 25 bp, Homo sapien
aaaggtgaatgcagacaatctcggg

SEQ ID NO: 674361 - DNA, 25 bp, Homo sapien
gatggcgagcgcctcgaaggaggcg

SEQ ID NO: 674362 - DNA, 25 bp, Homo sapien
ttcatgcacgggaagtagatggcga

SEQ ID NO: 674363 - DNA, 25 bp, Homo sapien
gaggcggacagactgaggcggctct

SEQ ID NO: 674364 - DNA, 25 bp, Homo sapien
cctcgtcgtcgaaggagttcatgca

SEQ ID NO: 674365 - DNA, 25 bp, Homo sapien
ggcagcttggccgccccattcttga

SEQ ID NO: 674366 - DNA, 25 bp, Homo sapien
ttggccgccccattcttgacgcgga

SEQ ID NO: 674367 - DNA, 25 bp, Homo sapien
attcttgacgcggagtacggcgcgc

SEQ ID NO: 674368 - DNA, 25 bp, Homo sapien
ccccattcttgacgcggagtacggc

SEQ ID NO: 674369 - DNA, 25 bp, Homo sapien
ggacattccaaagccttaaaatggc

SEQ ID NO: 674370 - DNA, 25 bp, Homo sapien
cagttatgtagcaggtcaggggaca

SEQ ID NO: 674371 - DNA, 25 bp, Homo sapien
ctgcaaggagctgtgcagttatgta

SEQ ID NO: 674372 - DNA, 25 bp, Homo sapien
tatgtagcaggtcaggggacattcc

SEQ ID NO: 674373 - DNA, 25 bp, Homo sapien
gcgtatagattttcatggcaggcat

SEQ ID NO: 674374 - DNA, 25 bp, Homo sapien
tgactatcttctggcccatgacctc

SEQ ID NO: 674375 - DNA, 25 bp, Homo sapien
ctggcccatgacctctttgacattc

SEQ ID NO: 674376 - DNA, 25 bp, Homo sapien
cagccagagcttttccaagcaaccc

SEQ ID NO: 674377 - DNA, 25 bp, Homo sapien
tgagggcacagggaccgtgcttgtg

SEQ ID NO: 674378 - DNA, 25 bp, Homo sapien
ttttcagctaaagcttgtgagtatg

SEQ ID NO: 674379 - DNA, 25 bp, Homo sapien
tgcttgtgagtaagcgggccggcat

SEQ ID NO: 674380 - DNA, 25 bp, Homo sapien
agctaaagcttgtgagtatgagggc

SEQ ID NO: 674381 - DNA, 25 bp, Homo sapien
gaaatcttgtttacttgagccaggc

SEQ ID NO: 674382 - DNA, 25 bp, Homo sapien
ccaggcctgccgacatccctggctt

SEQ ID NO: 674383 - DNA, 25 bp, Homo sapien
ggccccttgttcagacctagccttc

SEQ ID NO: 674384 - DNA, 25 bp, Homo sapien
gaggagcctgagctatatttgaact

SEQ ID NO: 674385 - DNA, 25 bp, Homo sapien
tcttcttgccattcctgttgtgtga

SEQ ID NO: 674386 - DNA, 25 bp, Homo sapien
gttgtgtgagcagcagactttgcag

SEQ ID NO: 674387 - DNA, 25 bp, Homo sapien
caccaattggactctgtttccctga

SEQ ID NO: 674388 - DNA, 25 bp, Homo sapien
tccctgatgtaggtggtatgctcct

SEQ ID NO: 674389 - DNA, 25 bp, Homo sapien
atttacatggctaatcgtgtcctca

SEQ ID NO: 674390 - DNA, 25 bp, Homo sapien
gatgtaggagttccgcactgccatg

SEQ ID NO: 674391 - DNA, 25 bp, Homo sapien
gagagcatctgatcaactgagtcca

SEQ ID NO: 674392 - DNA, 25 bp, Homo sapien
cactgccatgtttagaaggtggcga

SEQ ID NO: 674393 - DNA, 25 bp, Homo sapien
gtcacctccttgtcagaccattttg

SEQ ID NO: 674394 - DNA, 25 bp, Homo sapien
acctccttgtcagaccattttggtg

SEQ ID NO: 674395 - DNA, 25 bp, Homo sapien
tgtcacctccttgtcagaccatttt

SEQ ID NO: 674396 - DNA, 25 bp, Homo sapien
tccttgtcagaccattttggtgcca

SEQ ID NO: 674397 - DNA, 25 bp, Homo sapien
cattttacttgctgactttctagag

SEQ ID NO: 674398 - DNA, 25 bp, Homo sapien
caaaagcaggctggtcaagagcaaa

SEQ ID NO: 674399 - DNA, 25 bp, Homo sapien
aatggctaccaagagatggaagtgg

SEQ ID NO: 674400 - DNA, 25 bp, Homo sapien
taactttacacttgatgggtgccaa

SEQ ID NO: 674401 - DNA, 25 bp, Homo sapien
tgaacttagcgcagacgcccaggca

SEQ ID NO: 674402 - DNA, 25 bp, Homo sapien
acttagcgcagacgcccaggcaaca

SEQ ID NO: 674403 - DNA, 25 bp, Homo sapien
gaacttagcgcagacgcccaggcaa

SEQ ID NO: 674404 - DNA, 25 bp, Homo sapien
gctgaacttagcgcagacgcccagg

SEQ ID NO: 674405 - DNA, 25 bp, Homo sapien
ttcagagtcataggcaaggtaaatc

SEQ ID NO: 674406 - DNA, 25 bp, Homo sapien
gctcacatggctgtatagtggcaca

SEQ ID NO: 674407 - DNA, 25 bp, Homo sapien
tcctttgagggcacacacgtgaagc

SEQ ID NO: 674408 - DNA, 25 bp, Homo sapien
gaatggcataaagaagtcctagacc

SEQ ID NO: 674409 - DNA, 25 bp, Homo sapien
ttgcctagcaagcacacccgtggtt

SEQ ID NO: 674410 - DNA, 25 bp, Homo sapien
tagtcaggcctatcagtctcacaga

SEQ ID NO: 674411 - DNA, 25 bp, Homo sapien
taatacttggcgcttgaaaatgcag

SEQ ID NO: 674412 - DNA, 25 bp, Homo sapien
taaagctgcagtgccctgtggttgc

SEQ ID NO: 674413 - DNA, 25 bp, Homo sapien
gaatgcccaataagcaataactttt

SEQ ID NO: 674414 - DNA, 25 bp, Homo sapien
attactacagagttccaggtgcaaa

SEQ ID NO: 674415 - DNA, 25 bp, Homo sapien
tgaatgcccaataagcaataacttt

SEQ ID NO: 674416 - DNA, 25 bp, Homo sapien
attattactacagagttccaggtgc

SEQ ID NO: 674417 - DNA, 25 bp, Homo sapien
tgaagcccggagaaggccactgttg

SEQ ID NO: 674418 - DNA, 25 bp, Homo sapien
gacaaccattcaagggtcagggctc

SEQ ID NO: 674419 - DNA, 25 bp, Homo sapien
tattacaaagaactatgaagcccgg

SEQ ID NO: 674420 - DNA, 25 bp, Homo sapien
tggagaaccagctcaacaggctgct

SEQ ID NO: 674421 - DNA, 25 bp, Homo sapien
tggcttctctgggtaaggtcaggca

SEQ ID NO: 674422 - DNA, 25 bp, Homo sapien
gcttctctgggtaaggtcaggcagg

SEQ ID NO: 674423 - DNA, 25 bp, Homo sapien
catggcttctctgggtaaggtcagg

SEQ ID NO: 674424 - DNA, 25 bp, Homo sapien
tgggtttcaggagcgggcacagagc

SEQ ID NO: 674425 - DNA, 25 bp, Homo sapien
ttagtgtaggttctgcttcacttcc

SEQ ID NO: 674426 - DNA, 25 bp, Homo sapien
ccattcctaggctcaatctgtagga

SEQ ID NO: 674427 - DNA, 25 bp, Homo sapien
tctgtaggaggttgctgatgtctgc

SEQ ID NO: 674428 - DNA, 25 bp, Homo sapien
gccgcaacttctgtgcaggaccatt

SEQ ID NO: 674429 - DNA, 25 bp, Homo sapien
gcttgagcccgtctgtagaatgcct

SEQ ID NO: 674430 - DNA, 25 bp, Homo sapien
atgccttcacgttctttccatccag

SEQ ID NO: 674431 - DNA, 25 bp, Homo sapien
cttgagtgctttgtgggcttgagcc

SEQ ID NO: 674432 - DNA, 25 bp, Homo sapien
tgcttctgtgtactgcttcaggacc

SEQ ID NO: 674433 - DNA, 25 bp, Homo sapien
gacaaaacacagctccaaatatggt

SEQ ID NO: 674434 - DNA, 25 bp, Homo sapien
tagactatgtccaagacgttccagg

SEQ ID NO: 674435 - DNA, 25 bp, Homo sapien
cacagacacctgcatgaagaacagt

SEQ ID NO: 674436 - DNA, 25 bp, Homo sapien
ccaaagtaagccaaagcctgggcat

SEQ ID NO: 674437 - DNA, 25 bp, Homo sapien
cattgccttcttccttcagaactct

SEQ ID NO: 674438 - DNA, 25 bp, Homo sapien
ccttctttacaagctcattgccttc

SEQ ID NO: 674439 - DNA, 25 bp, Homo sapien
caggttactacacaagaggctttca

SEQ ID NO: 674440 - DNA, 25 bp, Homo sapien
caatagctttcttatggtttccctt

SEQ ID NO: 674441 - DNA, 25 bp, Homo sapien
tggttctccgaaggcaaggaattcc

SEQ ID NO: 674442 - DNA, 25 bp, Homo sapien
gctgaaacaggcaccaaggggattg

SEQ ID NO: 674443 - DNA, 25 bp, Homo sapien
actcaggcccaagcgagtccatgag

SEQ ID NO: 674444 - DNA, 25 bp, Homo sapien
caagcgagtccatgagagctctggt

SEQ ID NO: 674445 - DNA, 25 bp, Homo sapien
caacataggccatagggtacttctc

SEQ ID NO: 674446 - DNA, 25 bp, Homo sapien
gccttctacggctgacgtcacatta

SEQ ID NO: 674447 - DNA, 25 bp, Homo sapien
agcacagtcttatagtcaacatagg

SEQ ID NO: 674448 - DNA, 25 bp, Homo sapien
attatcatcaatctgcagcacagtc

SEQ ID NO: 674449 - DNA, 25 bp, Homo sapien
ccgcagcaggggcttaatgctgaag

SEQ ID NO: 674450 - DNA, 25 bp, Homo sapien
cttaatgctgaagggaaccaaggcc

SEQ ID NO: 674451 - DNA, 25 bp, Homo sapien
aatgctgaagggaaccaaggccagt

SEQ ID NO: 674452 - DNA, 25 bp, Homo sapien
gggcttaatgctgaagggaaccaag

SEQ ID NO: 674453 - DNA, 25 bp, Homo sapien
tgacatgctgctcggttggagtaga

SEQ ID NO: 674454 - DNA, 25 bp, Homo sapien
atgcagtctctgcagtttccatcct

SEQ ID NO: 674455 - DNA, 25 bp, Homo sapien
ttcaagtgacatgctgctcggttgg

SEQ ID NO: 674456 - DNA, 25 bp, Homo sapien
caagtgacatgctgctcggttggag

SEQ ID NO: 674457 - DNA, 25 bp, Homo sapien
cacaagaatgcgctgtccttgagag

SEQ ID NO: 674458 - DNA, 25 bp, Homo sapien
tactgactcgcttaagactcacgtc

SEQ ID NO: 674459 - DNA, 25 bp, Homo sapien
gattatcccacaggtctcgtttact

SEQ ID NO: 674460 - DNA, 25 bp, Homo sapien
gtcttgttacacaggcggtatataa

SEQ ID NO: 674461 - DNA, 25 bp, Homo sapien
aagtttctggtaggatgccggagtc

SEQ ID NO: 674462 - DNA, 25 bp, Homo sapien
cgaggcctaaataacttaggatggg

SEQ ID NO: 674463 - DNA, 25 bp, Homo sapien
cgggcggtggttgcgggagttggag

SEQ ID NO: 674464 - DNA, 25 bp, Homo sapien
cttctcagggctcagaacgaggcct

SEQ ID NO: 674465 - DNA, 25 bp, Homo sapien
gtactggccgttgcggaaactctca

SEQ ID NO: 674466 - DNA, 25 bp, Homo sapien
gtagagcgcggaggcctcggcgtac

SEQ ID NO: 674467 - DNA, 25 bp, Homo sapien
gaaactctcattgccggcggcgcgg

SEQ ID NO: 674468 - DNA, 25 bp, Homo sapien
cctcggcgtactggccgttgcggaa

SEQ ID NO: 674469 - DNA, 25 bp, Homo sapien
ccggcgagttgggagctccttcctt

SEQ ID NO: 674470 - DNA, 25 bp, Homo sapien
tgcggcacaccttccgggcgcaagc

SEQ ID NO: 674471 - DNA, 25 bp, Homo sapien
gccggcggcgaatatctccgcccaa

SEQ ID NO: 674472 - DNA, 25 bp, Homo sapien
cccaacagcgaacccgcggcgaggg

SEQ ID NO: 674473 - DNA, 25 bp, Homo sapien
catgtgggtcatgcaaatggcatta

SEQ ID NO: 674474 - DNA, 25 bp, Homo sapien
accagggccttagacaaccacaaat

SEQ ID NO: 674475 - DNA, 25 bp, Homo sapien
gatataactcacatattgaaagtgt

SEQ ID NO: 674476 - DNA, 25 bp, Homo sapien
ttctgaacatctccaaacctgccaa

SEQ ID NO: 674477 - DNA, 25 bp, Homo sapien
tcattgggaacactctgcggaaaaa

SEQ ID NO: 674478 - DNA, 25 bp, Homo sapien
taatggttactatttcggacagcac

SEQ ID NO: 674479 - DNA, 25 bp, Homo sapien
tccttagctgtgtaaaccgtgggtc

SEQ ID NO: 674480 - DNA, 25 bp, Homo sapien
tattggtggacccatgcagctcaaa

SEQ ID NO: 674481 - DNA, 25 bp, Homo sapien
agcacaatagctgaagccggagctc

SEQ ID NO: 674482 - DNA, 25 bp, Homo sapien
agccggagctctgagtggagagaaa

SEQ ID NO: 674483 - DNA, 25 bp, Homo sapien
gaagccggagctctgagtggagaga

SEQ ID NO: 674484 - DNA, 25 bp, Homo sapien
acaatagctgaagccggagctctga

SEQ ID NO: 674485 - DNA, 25 bp, Homo sapien
tcttctaaaggaggcgcttcacgca

SEQ ID NO: 674486 - DNA, 25 bp, Homo sapien
cactgacactctagagaccagcggg

SEQ ID NO: 674487 - DNA, 25 bp, Homo sapien
ccaggtagaggtgcgttctcggcct

SEQ ID NO: 674488 - DNA, 25 bp, Homo sapien
cgagtattttgtgcgctccggtaac

SEQ ID NO: 674489 - DNA, 25 bp, Homo sapien
accacgtgatcagggccgtggctcc

SEQ ID NO: 674490 - DNA, 25 bp, Homo sapien
ggctcaggaggtccgcgggaggatg

SEQ ID NO: 674491 - DNA, 25 bp, Homo sapien
cagtgagcgggtctgggcggctgct

SEQ ID NO: 674492 - DNA, 25 bp, Homo sapien
gcccgaaccacgtgatcagggccgt

SEQ ID NO: 674493 - DNA, 25 bp, Homo sapien
caccgggcccggccatgctcttaac

SEQ ID NO: 674494 - DNA, 25 bp, Homo sapien
accgggcccggccatgctcttaact

SEQ ID NO: 674495 - DNA, 25 bp, Homo sapien
gccaccgggcccggccatgctctta

SEQ ID NO: 674496 - DNA, 25 bp, Homo sapien
cgggcccggccatgctcttaactgc

SEQ ID NO: 674497 - DNA, 25 bp, Homo sapien
tggaatttcaccatattcgtcaggc

SEQ ID NO: 674498 - DNA, 25 bp, Homo sapien
ctcggccaagtcccaaagtactggg

SEQ ID NO: 674499 - DNA, 25 bp, Homo sapien
ctgcctgcctcggccaagtcccaaa

SEQ ID NO: 674500 - DNA, 25 bp, Homo sapien
caaattcctgaccataaatgatctg

SEQ ID NO: 674501 - DNA, 25 bp, Homo sapien
catcaagttcccttatgccctgttt

SEQ ID NO: 674502 - DNA, 25 bp, Homo sapien
gaacatgctccttttaagtgtacag

SEQ ID NO: 674503 - DNA, 25 bp, Homo sapien
cacttagcatactgttctgagattt

SEQ ID NO: 674504 - DNA, 25 bp, Homo sapien
gaatggaattgtgcagtatatagcc

SEQ ID NO: 674505 - DNA, 25 bp, Homo sapien
cattcagtttcagcgagtccttgag

SEQ ID NO: 674506 - DNA, 25 bp, Homo sapien
cagaaacttgctcttgccttggctc

SEQ ID NO: 674507 - DNA, 25 bp, Homo sapien
ccctggacgagccagatcattcagt

SEQ ID NO: 674508 - DNA, 25 bp, Homo sapien
gacctggctgtaaagagattccctg

SEQ ID NO: 674509 - DNA, 25 bp, Homo sapien
gaactcgagcttccagagaaatttg

SEQ ID NO: 674510 - DNA, 25 bp, Homo sapien
taccagtctagcttgatgaagcctt

SEQ ID NO: 674511 - DNA, 25 bp, Homo sapien
cagcttgctgatccaacaaagtcta

SEQ ID NO: 674512 - DNA, 25 bp, Homo sapien
tatgtcagcttgctttcaatgagcc

SEQ ID NO: 674513 - DNA, 25 bp, Homo sapien
tagccttgactccttgagactgtag

SEQ ID NO: 674514 - DNA, 25 bp, Homo sapien
agaagaaatagataccagcctgagc

SEQ ID NO: 674515 - DNA, 25 bp, Homo sapien
gactgtagatttcgatccaggaaac

SEQ ID NO: 674516 - DNA, 25 bp, Homo sapien
gagagaagcgacatcatgatacatc

SEQ ID NO: 674517 - DNA, 25 bp, Homo sapien
ccagtgtcctttctagcataccatg

SEQ ID NO: 674518 - DNA, 25 bp, Homo sapien
aaaaaatctcttttaccagcttgca

SEQ ID NO: 674519 - DNA, 25 bp, Homo sapien
agaagtagataatctgaatagccct

SEQ ID NO: 674520 - DNA, 25 bp, Homo sapien
gaagtaaagtctattgctcaaggtc

SEQ ID NO: 674521 - DNA, 25 bp, Homo sapien
taatgggattgagagtaacgtgtgc

SEQ ID NO: 674522 - DNA, 25 bp, Homo sapien
ctgcatgacaagaaggaaccagcca

SEQ ID NO: 674523 - DNA, 25 bp, Homo sapien
tcatcagtgacagcgatgcttgtga

SEQ ID NO: 674524 - DNA, 25 bp, Homo sapien
gaatgataaacgatgcttctggaga

SEQ ID NO: 674525 - DNA, 25 bp, Homo sapien
cagacactgaagtgagatcagaggc

SEQ ID NO: 674526 - DNA, 25 bp, Homo sapien
tcagctcttcctttggtcgggtgaa

SEQ ID NO: 674527 - DNA, 25 bp, Homo sapien
ttcatgagtcttgctactgaggtcc

SEQ ID NO: 674528 - DNA, 25 bp, Homo sapien
cagatacccttctgtagtgggccag

SEQ ID NO: 674529 - DNA, 25 bp, Homo sapien
gaggactctcacacatgggcctgga

SEQ ID NO: 674530 - DNA, 25 bp, Homo sapien
aatgtcttccatcttgaggctcagg

SEQ ID NO: 674531 - DNA, 25 bp, Homo sapien
ggattggaccactttacacagcagg

SEQ ID NO: 674532 - DNA, 25 bp, Homo sapien
gactaagccgaaacatgactgcagg

SEQ ID NO: 674533 - DNA, 25 bp, Homo sapien
ttaatacatctgagggtgtggaggc

SEQ ID NO: 674534 - DNA, 25 bp, Homo sapien
gtttctcgggatgtctccagagatg

SEQ ID NO: 674535 - DNA, 25 bp, Homo sapien
tagatctgcagactgtccctcctga

SEQ ID NO: 674536 - DNA, 25 bp, Homo sapien
gatggtgttaaagcccacgtcctcc

SEQ ID NO: 674537 - DNA, 25 bp, Homo sapien
aagatgcccacctcacggtagctgt

SEQ ID NO: 674538 - DNA, 25 bp, Homo sapien
gtcgaagtagaattcgcgcgccgcc

SEQ ID NO: 674539 - DNA, 25 bp, Homo sapien
aagaagttgcgcgtactgggcgcca

SEQ ID NO: 674540 - DNA, 25 bp, Homo sapien
gaatggcgcgccaacttgagtacgc

SEQ ID NO: 674541 - DNA, 25 bp, Homo sapien
gatgcagaagtactcgaggcgtcgc

SEQ ID NO: 674542 - DNA, 25 bp, Homo sapien
ctcgctcacaaaggtttcagtgctc

SEQ ID NO: 674543 - DNA, 25 bp, Homo sapien
gctcacaaaggtttcagtgctcctc

SEQ ID NO: 674544 - DNA, 25 bp, Homo sapien
tcgctcacaaaggtttcagtgctcc

SEQ ID NO: 674545 - DNA, 25 bp, Homo sapien
ctcacaaaggtttcagtgctcctcc

SEQ ID NO: 674546 - DNA, 25 bp, Homo sapien
gatggaatcgcaggatgtcctggca

SEQ ID NO: 674547 - DNA, 25 bp, Homo sapien
ctggaaggatatgaaagcgatggaa

SEQ ID NO: 674548 - DNA, 25 bp, Homo sapien
tagtgggtgctcacataggatgtct

SEQ ID NO: 674549 - DNA, 25 bp, Homo sapien
gacaaacttggatttatttacacca

SEQ ID NO: 674550 - DNA, 25 bp, Homo sapien
cactttagaccggaggttctcatag

SEQ ID NO: 674551 - DNA, 25 bp, Homo sapien
tggcagcaccactttagaccggagg

SEQ ID NO: 674552 - DNA, 25 bp, Homo sapien
gaccggaggttctcatagtgtgttc

SEQ ID NO: 674553 - DNA, 25 bp, Homo sapien
caccactttagaccggaggttctca

SEQ ID NO: 674554 - DNA, 25 bp, Homo sapien
tccctgtctgtggaaccgggtagca

SEQ ID NO: 674555 - DNA, 25 bp, Homo sapien
tgtttatcggcagcatggtccctgg

SEQ ID NO: 674556 - DNA, 25 bp, Homo sapien
taaacgtgtgatgtagctccgctcc

SEQ ID NO: 674557 - DNA, 25 bp, Homo sapien
ttgagtgcattcgtcgccctctctg

SEQ ID NO: 674558 - DNA, 25 bp, Homo sapien
ctgggagccgctggctatactcggt

SEQ ID NO: 674559 - DNA, 25 bp, Homo sapien
gggcgcctcgcgtgtctgtcccaaa

SEQ ID NO: 674560 - DNA, 25 bp, Homo sapien
ggctgaaggccgcatcgatcgctgc

SEQ ID NO: 674561 - DNA, 25 bp, Homo sapien
tgtcccaaagccaccgaggctggga

SEQ ID NO: 674562 - DNA, 25 bp, Homo sapien
gaggtgaatgactgatgtttggaaa

SEQ ID NO: 674563 - DNA, 25 bp, Homo sapien
gtggtacaggcagcgtgcaacctat

SEQ ID NO: 674564 - DNA, 25 bp, Homo sapien
cagcatgtacggattggtgtgaaag

SEQ ID NO: 674565 - DNA, 25 bp, Homo sapien
caacctatcatggtgctattttgta

SEQ ID NO: 674566 - DNA, 25 bp, Homo sapien
cgttggtccccagcttaggtgcaga

SEQ ID NO: 674567 - DNA, 25 bp, Homo sapien
gtgtcagcaggccagtgattatcag

SEQ ID NO: 674568 - DNA, 25 bp, Homo sapien
tagagatagtgctgtccagcgggca

SEQ ID NO: 674569 - DNA, 25 bp, Homo sapien
tggaaccaccgctggtagagatagt

SEQ ID NO: 674570 - DNA, 25 bp, Homo sapien
ctgccctgggcacccaggagccgta

SEQ ID NO: 674571 - DNA, 25 bp, Homo sapien
tgccctgggcacccaggagccgtac

SEQ ID NO: 674572 - DNA, 25 bp, Homo sapien
ggcagcgcagttggtcctctgggca

SEQ ID NO: 674573 - DNA, 25 bp, Homo sapien
gcagcatcgctttttgcccgagcag

SEQ ID NO: 674574 - DNA, 25 bp, Homo sapien
ctctggcaggatcccggcaatcccg

SEQ ID NO: 674575 - DNA, 25 bp, Homo sapien
cagtctgagtccttgtgacacaggt

SEQ ID NO: 674576 - DNA, 25 bp, Homo sapien
gcaagctctgtagcagcacttcctg

SEQ ID NO: 674577 - DNA, 25 bp, Homo sapien
cagcacttcctggtcaagggacact

SEQ ID NO: 674578 - DNA, 25 bp, Homo sapien
tggtcaggcaccgataggaggcagg

SEQ ID NO: 674579 - DNA, 25 bp, Homo sapien
gggacacactggcggaagcaagctc

SEQ ID NO: 674580 - DNA, 25 bp, Homo sapien
tcacggttatgtaataagcgctgac

SEQ ID NO: 674581 - DNA, 25 bp, Homo sapien
aggaagctcacggttatgtaataag

SEQ ID NO: 674582 - DNA, 25 bp, Homo sapien
ctgtaagagaatctcctaatattgc

SEQ ID NO: 674583 - DNA, 25 bp, Homo sapien
aatctcctaatattgcagctggagg

SEQ ID NO: 674584 - DNA, 25 bp, Homo sapien
gggactatgccaggctctttgtatc

SEQ ID NO: 674585 - DNA, 25 bp, Homo sapien
caacagctcggcaatgtcttacagg

SEQ ID NO: 674586 - DNA, 25 bp, Homo sapien
ggagagacaagcttgtcacacctgc

SEQ ID NO: 674587 - DNA, 25 bp, Homo sapien
tctttgtatcagagacacccagacg

SEQ ID NO: 674588 - DNA, 25 bp, Homo sapien
ttcttcctgccaaagacagcaggca

SEQ ID NO: 674589 - DNA, 25 bp, Homo sapien
ctcccttcttcctgccaaagacagc

SEQ ID NO: 674590 - DNA, 25 bp, Homo sapien
cttcctgccaaagacagcaggcagc

SEQ ID NO: 674591 - DNA, 25 bp, Homo sapien
ccttcttcctgccaaagacagcagg

SEQ ID NO: 674592 - DNA, 25 bp, Homo sapien
ccccagattaacacctgcagcctca

SEQ ID NO: 674593 - DNA, 25 bp, Homo sapien
agggaagccagagaaacttagtcag

SEQ ID NO: 674594 - DNA, 25 bp, Homo sapien
ggccccccagattaacacctgcagc

SEQ ID NO: 674595 - DNA, 25 bp, Homo sapien
ccagggccccccagattaacacctg

SEQ ID NO: 674596 - DNA, 25 bp, Homo sapien
gttttcggtgtgtacctgaatcctc

SEQ ID NO: 674597 - DNA, 25 bp, Homo sapien
cagattaatgtgttttcggtgtgta

SEQ ID NO: 674598 - DNA, 25 bp, Homo sapien
tgtggagacagattaatgtgttttc

SEQ ID NO: 674599 - DNA, 25 bp, Homo sapien
tcggtgtgtacctgaatcctcaagt

SEQ ID NO: 674600 - DNA, 25 bp, Homo sapien
cttccatattccaagtctcaggacc

SEQ ID NO: 674601 - DNA, 25 bp, Homo sapien
ttctagctgtgatcacacattgcag

SEQ ID NO: 674602 - DNA, 25 bp, Homo sapien
aaaggacttcaagctcaggttttct

SEQ ID NO: 674603 - DNA, 25 bp, Homo sapien
cctggggtctggactttttgtgact

SEQ ID NO: 674604 - DNA, 25 bp, Homo sapien
tggctcagggtatggccttgacaca

SEQ ID NO: 674605 - DNA, 25 bp, Homo sapien
ggagcctggacacttggcctcccat

SEQ ID NO: 674606 - DNA, 25 bp, Homo sapien
gggtatggccttgacacatcttcat

SEQ ID NO: 674607 - DNA, 25 bp, Homo sapien
tcatttctgaggacacctggtagag

SEQ ID NO: 674608 - DNA, 25 bp, Homo sapien
cacaggaatcacacacttgaagcca

SEQ ID NO: 674609 - DNA, 25 bp, Homo sapien
gaggatcggacttgaagcagcgtac

SEQ ID NO: 674610 - DNA, 25 bp, Homo sapien
gtacgttgtcagctgggcaaacccc

SEQ ID NO: 674611 - DNA, 25 bp, Homo sapien
acagtgcaggtaacaacacttcctt

SEQ ID NO: 674612 - DNA, 25 bp, Homo sapien
ggaccaagaagctgctggaccccat

SEQ ID NO: 674613 - DNA, 25 bp, Homo sapien
caccagggtcacaagaacgagagac

SEQ ID NO: 674614 - DNA, 25 bp, Homo sapien
ggtcacaagaacgagagacaccatg

SEQ ID NO: 674615 - DNA, 25 bp, Homo sapien
gagacaccatgaggaccaagaagct

SEQ ID NO: 674616 - DNA, 25 bp, Homo sapien
ccctgggacccaagatgtaatgaag

SEQ ID NO: 674617 - DNA, 25 bp, Homo sapien
gatacacatggctggctagaacaga

SEQ ID NO: 674618 - DNA, 25 bp, Homo sapien
tagaacagagtctgcaagtggctcc

SEQ ID NO: 674619 - DNA, 25 bp, Homo sapien
acagtcaggattgctcagagggccc

SEQ ID NO: 674620 - DNA, 25 bp, Homo sapien
ctaataatcaagtaacccagtgact

SEQ ID NO: 674621 - DNA, 25 bp, Homo sapien
gctctgtggagatactctttaacca

SEQ ID NO: 674622 - DNA, 25 bp, Homo sapien
ccatctgggaattgttctacatgca

SEQ ID NO: 674623 - DNA, 25 bp, Homo sapien
tttgggaagaccacataaaatctac

SEQ ID NO: 674624 - DNA, 25 bp, Homo sapien
tctctttgaagtcctgggtctccaa

SEQ ID NO: 674625 - DNA, 25 bp, Homo sapien
aggctgtcttccctagtaacagcac

SEQ ID NO: 674626 - DNA, 25 bp, Homo sapien
tgtcttccctagtaacagcacctct

SEQ ID NO: 674627 - DNA, 25 bp, Homo sapien
tctttgaagtcctgggtctccaagc

SEQ ID NO: 674628 - DNA, 25 bp, Homo sapien
cagtaccctccttgggtcttctgca

SEQ ID NO: 674629 - DNA, 25 bp, Homo sapien
agtaccctccttgggtcttctgcat

SEQ ID NO: 674630 - DNA, 25 bp, Homo sapien
ccagtaccctccttgggtcttctgc

SEQ ID NO: 674631 - DNA, 25 bp, Homo sapien
gacaaaatcacaacgacatctaggt

SEQ ID NO: 674632 - DNA, 25 bp, Homo sapien
gatttgaatgccctacataagacga

SEQ ID NO: 674633 - DNA, 25 bp, Homo sapien
gaccagtcccgaaaaagtcagcaat

SEQ ID NO: 674634 - DNA, 25 bp, Homo sapien
tctaggtggaagtcaacaactgctc

SEQ ID NO: 674635 - DNA, 25 bp, Homo sapien
gactttggattgaggttaggagccc

SEQ ID NO: 674636 - DNA, 25 bp, Homo sapien
agtcctgctggactttggattgagg

SEQ ID NO: 674637 - DNA, 25 bp, Homo sapien
tcggcattagtgtatggagtcctgc

SEQ ID NO: 674638 - DNA, 25 bp, Homo sapien
ttaaatggtgttgctactacgaacg

SEQ ID NO: 674639 - DNA, 25 bp, Homo sapien
catcccagttgtttcacgttgtctc

SEQ ID NO: 674640 - DNA, 25 bp, Homo sapien
tcccagttgtttcacgttgtctctt

SEQ ID NO: 674641 - DNA, 25 bp, Homo sapien
acatcccagttgtttcacgttgtct

SEQ ID NO: 674642 - DNA, 25 bp, Homo sapien
cccagttgtttcacgttgtctcttc

SEQ ID NO: 674643 - DNA, 25 bp, Homo sapien
aaccttgaaagttgtctatgacgca

SEQ ID NO: 674644 - DNA, 25 bp, Homo sapien
gaagttcaatcccacaaattatcag

SEQ ID NO: 674645 - DNA, 25 bp, Homo sapien
cattaccataccagttgggtggtct

SEQ ID NO: 674646 - DNA, 25 bp, Homo sapien
taaatgcactcaggcactgtaagac

SEQ ID NO: 674647 - DNA, 25 bp, Homo sapien
gaaaaagtgctgatagatgacatgg

SEQ ID NO: 674648 - DNA, 25 bp, Homo sapien
gatgacatggtgaaaaagtgtgatg

SEQ ID NO: 674649 - DNA, 25 bp, Homo sapien
catggtgaaaaagtgtgatgggctt

SEQ ID NO: 674650 - DNA, 25 bp, Homo sapien
aaaaagtgtgatgggcttattgaag

SEQ ID NO: 674651 - DNA, 25 bp, Homo sapien
cagtggtggagccaagtctcagggt

SEQ ID NO: 674652 - DNA, 25 bp, Homo sapien
cccaaaggaggatatcagtggtgga

SEQ ID NO: 674653 - DNA, 25 bp, Homo sapien
tttccccaaaggaggatatcagtgg

SEQ ID NO: 674654 - DNA, 25 bp, Homo sapien
agcctttccccaaaggaggatatca

SEQ ID NO: 674655 - DNA, 25 bp, Homo sapien
gatagcgctatagttgagagagact

SEQ ID NO: 674656 - DNA, 25 bp, Homo sapien
gagcttcagcatagaaaccagccaa

SEQ ID NO: 674657 - DNA, 25 bp, Homo sapien
cccaaggatccttctgagatagaga

SEQ ID NO: 674658 - DNA, 25 bp, Homo sapien
cttagtgtcaggagacaagtctcat

SEQ ID NO: 674659 - DNA, 25 bp, Homo sapien
gggttaagcatcaaacattggccat

SEQ ID NO: 674660 - DNA, 25 bp, Homo sapien
ttggccataagtcactgggcacttc

SEQ ID NO: 674661 - DNA, 25 bp, Homo sapien
gaaacgcaggatttcccacacatgc

SEQ ID NO: 674662 - DNA, 25 bp, Homo sapien
cttcaagtcacgcttgcactggcca

SEQ ID NO: 674663 - DNA, 25 bp, Homo sapien
catttgatgccacaagtgtcaggac

SEQ ID NO: 674664 - DNA, 25 bp, Homo sapien
gatttcttaggaggacagactccag

SEQ ID NO: 674665 - DNA, 25 bp, Homo sapien
tcttgtatctaaggcactgggcaga

SEQ ID NO: 674666 - DNA, 25 bp, Homo sapien
tgccacaagtgtcaggacaacatct

SEQ ID NO: 674667 - DNA, 25 bp, Homo sapien
gattagaccagagtgactccaactt

SEQ ID NO: 674668 - DNA, 25 bp, Homo sapien
ccagattagaccagagtgactccaa

SEQ ID NO: 674669 - DNA, 25 bp, Homo sapien
tgcagcccagattagaccagagtga

SEQ ID NO: 674670 - DNA, 25 bp, Homo sapien
accctgcagcccagattagaccaga

SEQ ID NO: 674671 - DNA, 25 bp, Homo sapien
acagcccaaggtgccagagttccca

SEQ ID NO: 674672 - DNA, 25 bp, Homo sapien
ttccacagcccaaggtgccagagtt

SEQ ID NO: 674673 - DNA, 25 bp, Homo sapien
gagttcccagggcaagcagcaccag

SEQ ID NO: 674674 - DNA, 25 bp, Homo sapien
cagagccttccacagcccaaggtgc

SEQ ID NO: 674675 - DNA, 25 bp, Homo sapien
gattgtttatctttcctatgccagg

SEQ ID NO: 674676 - DNA, 25 bp, Homo sapien
taagcaggaaacgtagccagagacc

SEQ ID NO: 674677 - DNA, 25 bp, Homo sapien
tctttcaccagtgggtgtggcccca

SEQ ID NO: 674678 - DNA, 25 bp, Homo sapien
gctatgaggccaacacagcaactat

SEQ ID NO: 674679 - DNA, 25 bp, Homo sapien
tgcactaggcctagggctacagaaa

SEQ ID NO: 674680 - DNA, 25 bp, Homo sapien
tagggctacagaaaagagcacgccc

SEQ ID NO: 674681 - DNA, 25 bp, Homo sapien
tcaggtattgcactaggcctagggc

SEQ ID NO: 674682 - DNA, 25 bp, Homo sapien
aaagagcacgcccacggagtcgaca

SEQ ID NO: 674683 - DNA, 25 bp, Homo sapien
ccactgaaaaatgagagtgttgctg

SEQ ID NO: 674684 - DNA, 25 bp, Homo sapien
ctttgaacttcagctacctccactg

SEQ ID NO: 674685 - DNA, 25 bp, Homo sapien
tccactgaaaaatgagagtgttgct

SEQ ID NO: 674686 - DNA, 25 bp, Homo sapien
cccgagagagcataggtcaatcaga

SEQ ID NO: 674687 - DNA, 25 bp, Homo sapien
gtcctgcacacaccaagtagcggga

SEQ ID NO: 674688 - DNA, 25 bp, Homo sapien
cacatacttgtggaggagcaacagt

SEQ ID NO: 674689 - DNA, 25 bp, Homo sapien
tatggctcaacactgacccgagaga

SEQ ID NO: 674690 - DNA, 25 bp, Homo sapien
aggcaattgtcagcaatgctggaac

SEQ ID NO: 674691 - DNA, 25 bp, Homo sapien
ctttcttctcacagttgtttggggg

SEQ ID NO: 674692 - DNA, 25 bp, Homo sapien
actggcctttcttctcacagttgtt

SEQ ID NO: 674693 - DNA, 25 bp, Homo sapien
gcctttcttctcacagttgtttggg

SEQ ID NO: 674694 - DNA, 25 bp, Homo sapien
agcactggcctttcttctcacagtt

SEQ ID NO: 674695 - DNA, 25 bp, Homo sapien
ctcaagggcttagaggaaggcatcc

SEQ ID NO: 674696 - DNA, 25 bp, Homo sapien
gggcttagaggaaggcatcccattt

SEQ ID NO: 674697 - DNA, 25 bp, Homo sapien
cttagaggaaggcatcccatttatc

SEQ ID NO: 674698 - DNA, 25 bp, Homo sapien
agaggaaggcatcccatttatcaaa

SEQ ID NO: 674699 - DNA, 25 bp, Homo sapien
tgaggtccaattccacatgctatct

SEQ ID NO: 674700 - DNA, 25 bp, Homo sapien
gcaaatcatggagagccacactcga

SEQ ID NO: 674701 - DNA, 25 bp, Homo sapien
ggctgtctgccccaggtacaaaaag

SEQ ID NO: 674702 - DNA, 25 bp, Homo sapien
gaggcgctgcctgtagccttcctga

SEQ ID NO: 674703 - DNA, 25 bp, Homo sapien
ttcaggaaaaagaaccatcttggac

SEQ ID NO: 674704 - DNA, 25 bp, Homo sapien
agcagttccattcaccgcttcagga

SEQ ID NO: 674705 - DNA, 25 bp, Homo sapien
taaacagcagcagttccattcaccg

SEQ ID NO: 674706 - DNA, 25 bp, Homo sapien
tccattcaccgcttcaggaaaaaga

SEQ ID NO: 674707 - DNA, 25 bp, Homo sapien
caacggcctgcgaaggctctaggac

SEQ ID NO: 674708 - DNA, 25 bp, Homo sapien
taggacccagctccaaatcagtgct

SEQ ID NO: 674709 - DNA, 25 bp, Homo sapien
aagcagcttgtagacttcggtggtg

SEQ ID NO: 674710 - DNA, 25 bp, Homo sapien
agtagcagggctggtcttcaaatcc

SEQ ID NO: 674711 - DNA, 25 bp, Homo sapien
ctgcggaaattccagccaccgttta

SEQ ID NO: 674712 - DNA, 25 bp, Homo sapien
ggcctcctgcggaaattccagccac

SEQ ID NO: 674713 - DNA, 25 bp, Homo sapien
ctcctgcggaaattccagccaccgt

SEQ ID NO: 674714 - DNA, 25 bp, Homo sapien
tgcggaaattccagccaccgtttaa

SEQ ID NO: 674715 - DNA, 25 bp, Homo sapien
ctgacgccgcagtccgcctaatggt

SEQ ID NO: 674716 - DNA, 25 bp, Homo sapien
gaggccaactcagctcaatgccgga

SEQ ID NO: 674717 - DNA, 25 bp, Homo sapien
caacaaagaactgagcgcagcacgc

SEQ ID NO: 674718 - DNA, 25 bp, Homo sapien
aatggtccgggcgaggccaactcag

SEQ ID NO: 674719 - DNA, 25 bp, Homo sapien
tccagatcctccaggcgcgccgtca

SEQ ID NO: 674720 - DNA, 25 bp, Homo sapien
tccaggcgcgccgtcagctgggcca

SEQ ID NO: 674721 - DNA, 25 bp, Homo sapien
agatcctccaggcgcgccgtcagct

SEQ ID NO: 674722 - DNA, 25 bp, Homo sapien
tggttggccagctggttctccagat

SEQ ID NO: 674723 - DNA, 25 bp, Homo sapien
acgaggctttcgcattcgcatgggc

SEQ ID NO: 674724 - DNA, 25 bp, Homo sapien
ttcgcatgggctccgaagctctgtc

SEQ ID NO: 674725 - DNA, 25 bp, Homo sapien
cggccctggaactccacgaggcttt

SEQ ID NO: 674726 - DNA, 25 bp, Homo sapien
ggttcagcgtcaggctctcgagcgc

SEQ ID NO: 674727 - DNA, 25 bp, Homo sapien
taggacacgtgcagttccgctggct

SEQ ID NO: 674728 - DNA, 25 bp, Homo sapien
acgcccacggcgtacatgacgatgc

SEQ ID NO: 674729 - DNA, 25 bp, Homo sapien
caggtgcgtcatggtgccgaagtcc

SEQ ID NO: 674730 - DNA, 25 bp, Homo sapien
tccgaggcgatctcgcgcagctccg

SEQ ID NO: 674731 - DNA, 25 bp, Homo sapien
caacacgaggcacgttaagggcacg

SEQ ID NO: 674732 - DNA, 25 bp, Homo sapien
tttgtggacgcacgctcttggagcc

SEQ ID NO: 674733 - DNA, 25 bp, Homo sapien
gagatgtcatcctgggagcggccat

SEQ ID NO: 674734 - DNA, 25 bp, Homo sapien
tccacaatctggttcacgaagcgct

SEQ ID NO: 674735 - DNA, 25 bp, Homo sapien
ggcagcggtaggagaggccctcgct

SEQ ID NO: 674736 - DNA, 25 bp, Homo sapien
tgaagttgccgcccctcggggcaca

SEQ ID NO: 674737 - DNA, 25 bp, Homo sapien
agcggtaggagaggccctcgctcac

SEQ ID NO: 674738 - DNA, 25 bp, Homo sapien
cctgaagttgccgcccctcggggca

SEQ ID NO: 674739 - DNA, 25 bp, Homo sapien
gtccacgccattgcaaaggtcccgg

SEQ ID NO: 674740 - DNA, 25 bp, Homo sapien
tccacgccattgcaaaggtcccgga

SEQ ID NO: 674741 - DNA, 25 bp, Homo sapien
ggtccacgccattgcaaaggtcccg

SEQ ID NO: 674742 - DNA, 25 bp, Homo sapien
tggtccacgccattgcaaaggtccc

SEQ ID NO: 674743 - DNA, 25 bp, Homo sapien
ccctctctgcagtggcaccgtggcc

SEQ ID NO: 674744 - DNA, 25 bp, Homo sapien
tcaggctgcaagtcatggccctctc

SEQ ID NO: 674745 - DNA, 25 bp, Homo sapien
acagctatggttcccaaagctgcag

SEQ ID NO: 674746 - DNA, 25 bp, Homo sapien
ggcccaccaggggtgctaacacact

SEQ ID NO: 674747 - DNA, 25 bp, Homo sapien
aacagcaagatgttgcctctgattg

SEQ ID NO: 674748 - DNA, 25 bp, Homo sapien
acagcaagatgttgcctctgattgg

SEQ ID NO: 674749 - DNA, 25 bp, Homo sapien
cagcaagatgttgcctctgattgga

SEQ ID NO: 674750 - DNA, 25 bp, Homo sapien
agcaagatgttgcctctgattggag

SEQ ID NO: 674751 - DNA, 25 bp, Homo sapien
gggaattgacgcagtggtgctcaca

SEQ ID NO: 674752 - DNA, 25 bp, Homo sapien
attgacgcagtggtgctcacatcca

SEQ ID NO: 674753 - DNA, 25 bp, Homo sapien
ctggtcctgctggagtacaaagcca

SEQ ID NO: 674754 - DNA, 25 bp, Homo sapien
gtacaaagccaacttggcagtgaca

SEQ ID NO: 674755 - DNA, 25 bp, Homo sapien
gctcttgttatctgctgctagcttg

SEQ ID NO: 674756 - DNA, 25 bp, Homo sapien
tgctagcttgtagcctgggttgcag

SEQ ID NO: 674757 - DNA, 25 bp, Homo sapien
gttgcaggtgcagtggaacatggcc

SEQ ID NO: 674758 - DNA, 25 bp, Homo sapien
gaacatggcccaggcattgacacat

SEQ ID NO: 674759 - DNA, 25 bp, Homo sapien
ttggattgagagttcgagcttcact

SEQ ID NO: 674760 - DNA, 25 bp, Homo sapien
tgggaaaggaatccaagcatttgga

SEQ ID NO: 674761 - DNA, 25 bp, Homo sapien
ggaatccaagcatttggattgagag

SEQ ID NO: 674762 - DNA, 25 bp, Homo sapien
agagttcgagcttcactccagcgcc

SEQ ID NO: 674763 - DNA, 25 bp, Homo sapien
tcgaatactggatcacgccaacgcg

SEQ ID NO: 674764 - DNA, 25 bp, Homo sapien
gaagacgctctgcacttgactcgaa

SEQ ID NO: 674765 - DNA, 25 bp, Homo sapien
tcgaaggactctacgaggaagacgt

SEQ ID NO: 674766 - DNA, 25 bp, Homo sapien
gtaaatttcaatgccgcgggcgcgc

SEQ ID NO: 674767 - DNA, 25 bp, Homo sapien
gatccaggggcccagtgtgacacct

SEQ ID NO: 674768 - DNA, 25 bp, Homo sapien
ctgaagaaggagcagcaacacgggc

SEQ ID NO: 674769 - DNA, 25 bp, Homo sapien
ggctgaagaaggagcagcaacacgg

SEQ ID NO: 674770 - DNA, 25 bp, Homo sapien
tgaagaaggagcagcaacacgggcc

SEQ ID NO: 674771 - DNA, 25 bp, Homo sapien
gaagaaggagcagcaacacgggcca

SEQ ID NO: 674772 - DNA, 25 bp, Homo sapien
ggggacagagaatggaggtgtcaga

SEQ ID NO: 674773 - DNA, 25 bp, Homo sapien
ggacagagaatggaggtgtcagagc

SEQ ID NO: 674774 - DNA, 25 bp, Homo sapien
gggacagagaatggaggtgtcagag

SEQ ID NO: 674775 - DNA, 25 bp, Homo sapien
cacttggaccaggtaacggcggcgt

SEQ ID NO: 674776 - DNA, 25 bp, Homo sapien
ggcgtggcagcgtgccctaggtggg

SEQ ID NO: 674777 - DNA, 25 bp, Homo sapien
agcctcccgggcacttggaccaggt

SEQ ID NO: 674778 - DNA, 25 bp, Homo sapien
agcgaagccgacaggcggagcctcc

SEQ ID NO: 674779 - DNA, 25 bp, Homo sapien
gcacacagaggcaacggccgcattt

SEQ ID NO: 674780 - DNA, 25 bp, Homo sapien
ggaattcagctacagcgggagactg

SEQ ID NO: 674781 - DNA, 25 bp, Homo sapien
gaattcagctacagcgggagactgg

SEQ ID NO: 674782 - DNA, 25 bp, Homo sapien
ggagctgcagacagggctagctgcg

SEQ ID NO: 674783 - DNA, 25 bp, Homo sapien
ctagctgcgggccaggctggaattc

SEQ ID NO: 674784 - DNA, 25 bp, Homo sapien
acttgctccctgcaattgctcgggc

SEQ ID NO: 674785 - DNA, 25 bp, Homo sapien
tacttgctccctgcaattgctcggg

SEQ ID NO: 674786 - DNA, 25 bp, Homo sapien
tctacttgctccctgcaattgctcg

SEQ ID NO: 674787 - DNA, 25 bp, Homo sapien
tgctccctgcaattgctcgggccta

SEQ ID NO: 674788 - DNA, 25 bp, Homo sapien
ttcccacctagagcactgtgtcctg

SEQ ID NO: 674789 - DNA, 25 bp, Homo sapien
gatgaggtcttgccgccttaactgt

SEQ ID NO: 674790 - DNA, 25 bp, Homo sapien
tcctcccgagactctctctgactgc

SEQ ID NO: 674791 - DNA, 25 bp, Homo sapien
ccagtcacttctcccacaggcccag

SEQ ID NO: 674792 - DNA, 25 bp, Homo sapien
gagagaatgaagacacctcggcacc

SEQ ID NO: 674793 - DNA, 25 bp, Homo sapien
tcaaggtgcaggtggttctagttcc

SEQ ID NO: 674794 - DNA, 25 bp, Homo sapien
gaaagagcctagaatggccccaggt

SEQ ID NO: 674795 - DNA, 25 bp, Homo sapien
cacttcaaaggtaatcagagctgga

SEQ ID NO: 674796 - DNA, 25 bp, Homo sapien
ccttcttcttcatacggtacatgag

SEQ ID NO: 674797 - DNA, 25 bp, Homo sapien
cggtacatgagcagtaggatcagga

SEQ ID NO: 674798 - DNA, 25 bp, Homo sapien
agacggcaaagaggatgcccacgat

SEQ ID NO: 674799 - DNA, 25 bp, Homo sapien
tcacgcgtagaactcattggtgggg

SEQ ID NO: 674800 - DNA, 25 bp, Homo sapien
gggtgagagctcctcatcaggacct

SEQ ID NO: 674801 - DNA, 25 bp, Homo sapien
caggacctaaggatgaacccctctt

SEQ ID NO: 674802 - DNA, 25 bp, Homo sapien
gttctcttacaaccagacatcctca

SEQ ID NO: 674803 - DNA, 25 bp, Homo sapien
cactgtcagttctcttacaaccaga

SEQ ID NO: 674804 - DNA, 25 bp, Homo sapien
tcagagccaccccataaggaaggtg

SEQ ID NO: 674805 - DNA, 25 bp, Homo sapien
gaaggagcctccagacttacaaggg

SEQ ID NO: 674806 - DNA, 25 bp, Homo sapien
gaagctaacccaattcgaaggagcc

SEQ ID NO: 674807 - DNA, 25 bp, Homo sapien
tatcaaccccagaaggtatcactgt

SEQ ID NO: 674808 - DNA, 25 bp, Homo sapien
gggataacctcattctcctctagtt

SEQ ID NO: 674809 - DNA, 25 bp, Homo sapien
gcacagtgctggacattgacacctt

SEQ ID NO: 674810 - DNA, 25 bp, Homo sapien
tcttcaacgggtgagattctcttgg

SEQ ID NO: 674811 - DNA, 25 bp, Homo sapien
gacaccttgttggacacatcctcac

SEQ ID NO: 674812 - DNA, 25 bp, Homo sapien
tcagggccgatcatggagtcttcca

SEQ ID NO: 674813 - DNA, 25 bp, Homo sapien
caagggatggacaacttcagggccg

SEQ ID NO: 674814 - DNA, 25 bp, Homo sapien
tggacaacttcagggccgatcatgg

SEQ ID NO: 674815 - DNA, 25 bp, Homo sapien
gccgatcatggagtcttccaagtca

SEQ ID NO: 674816 - DNA, 25 bp, Homo sapien
ggcttcatcagctctaaacccttgc

SEQ ID NO: 674817 - DNA, 25 bp, Homo sapien
ttcatcagctctaaacccttgctct

SEQ ID NO: 674818 - DNA, 25 bp, Homo sapien
tcatcagctctaaacccttgctctg

SEQ ID NO: 674819 - DNA, 25 bp, Homo sapien
gcttcatcagctctaaacccttgct

SEQ ID NO: 674820 - DNA, 25 bp, Homo sapien
agtcatcagattcctgcccgggccc

SEQ ID NO: 674821 - DNA, 25 bp, Homo sapien
tcctcatcgtctggtagggctccgg

SEQ ID NO: 674822 - DNA, 25 bp, Homo sapien
gaagtatcggccttctaggaggtcc

SEQ ID NO: 674823 - DNA, 25 bp, Homo sapien
gggtcgatgacctcagtctctcgga

SEQ ID NO: 674824 - DNA, 25 bp, Homo sapien
caccgagtgggaacaatgtaccctc

SEQ ID NO: 674825 - DNA, 25 bp, Homo sapien
tagctccaccgagtgggaacaatgt

SEQ ID NO: 674826 - DNA, 25 bp, Homo sapien
gggaacaatgtaccctcaagagcac

SEQ ID NO: 674827 - DNA, 25 bp, Homo sapien
catcctgtagctccaccgagtggga

SEQ ID NO: 674828 - DNA, 25 bp, Homo sapien
tctggtgctctggtgcctgaatggt

SEQ ID NO: 674829 - DNA, 25 bp, Homo sapien
gtctggtgctctggtgcctgaatgg

SEQ ID NO: 674830 - DNA, 25 bp, Homo sapien
ctggtgctctggtgcctgaatggtt

SEQ ID NO: 674831 - DNA, 25 bp, Homo sapien
tggtgctctggtgcctgaatggtta

SEQ ID NO: 674832 - DNA, 25 bp, Homo sapien
cactgttcactcaagggtcctagaa

SEQ ID NO: 674833 - DNA, 25 bp, Homo sapien
tgaggacaaaatgcaccagatctgt

SEQ ID NO: 674834 - DNA, 25 bp, Homo sapien
gaaggcagatcagggaatgctccca

SEQ ID NO: 674835 - DNA, 25 bp, Homo sapien
cccacaatgggagggctactagtca

SEQ ID NO: 674836 - DNA, 25 bp, Homo sapien
atcccacgctccgacgaacaaagga

SEQ ID NO: 674837 - DNA, 25 bp, Homo sapien
acaaaggaggcaccggcctgcgccc

SEQ ID NO: 674838 - DNA, 25 bp, Homo sapien
gcacggcgcgtgaagccatcccgga

SEQ ID NO: 674839 - DNA, 25 bp, Homo sapien
ttagtcactaacgagcccgtagccc

SEQ ID NO: 674840 - DNA, 25 bp, Homo sapien
gcgcgaacagacgggcgggggccat

SEQ ID NO: 674841 - DNA, 25 bp, Homo sapien
agcgcgaacagacgggcgggggcca

SEQ ID NO: 674842 - DNA, 25 bp, Homo sapien
gcagcgcgaacagacgggcgggggc

SEQ ID NO: 674843 - DNA, 25 bp, Homo sapien
cagcagcgcgaacagacgggcgggg

SEQ ID NO: 674844 - DNA, 25 bp, Homo sapien
caccgcggactggagaaggcgcgca

SEQ ID NO: 674845 - DNA, 25 bp, Homo sapien
ggcaccgcggactggagaaggcgcg

SEQ ID NO: 674846 - DNA, 25 bp, Homo sapien
gcaccgcggactggagaaggcgcgc

SEQ ID NO: 674847 - DNA, 25 bp, Homo sapien
tcgctggaccagatgttcgacgccg

SEQ ID NO: 674848 - DNA, 25 bp, Homo sapien
gatcgtcctcatgcagaccgtgtat

SEQ ID NO: 674849 - DNA, 25 bp, Homo sapien
cgtgtattacggctcgctgggcctg

SEQ ID NO: 674850 - DNA, 25 bp, Homo sapien
tcagttccgcagctacgtgtgggac

SEQ ID NO: 674851 - DNA, 25 bp, Homo sapien
gagacctgggatggagtccttgctc

SEQ ID NO: 674852 - DNA, 25 bp, Homo sapien
gttctctgtgttagcccttgggcaa

SEQ ID NO: 674853 - DNA, 25 bp, Homo sapien
tgggcaagttattatccaaaaagtg

SEQ ID NO: 674854 - DNA, 25 bp, Homo sapien
gcccggccgagcacagttcttaaag

SEQ ID NO: 674855 - DNA, 25 bp, Homo sapien
ggctctccatgatgtccttcatcct

SEQ ID NO: 674856 - DNA, 25 bp, Homo sapien
ccttcatcctcaacgccctcacctg

SEQ ID NO: 674857 - DNA, 25 bp, Homo sapien
caggccggctctccatgatgtcctt

SEQ ID NO: 674858 - DNA, 25 bp, Homo sapien
tgtccttcatcctcaacgccctcac

SEQ ID NO: 674859 - DNA, 25 bp, Homo sapien
gaaggcaggtagcagtcagcatgac

SEQ ID NO: 674860 - DNA, 25 bp, Homo sapien
catgcggacggagctcaaggagata

SEQ ID NO: 674861 - DNA, 25 bp, Homo sapien
gaattggaaccatgccactcttgag

SEQ ID NO: 674862 - DNA, 25 bp, Homo sapien
tgggcttgctgtacttcatccggcg

SEQ ID NO: 674863 - DNA, 25 bp, Homo sapien
taaccatcataaagacactgcctgt

SEQ ID NO: 674864 - DNA, 25 bp, Homo sapien
tacacacgttcatgtgcacccaaga

SEQ ID NO: 674865 - DNA, 25 bp, Homo sapien
atagcaggccataggacccagagaa

SEQ ID NO: 674866 - DNA, 25 bp, Homo sapien
tgctgccagctctcaacatagcagg

SEQ ID NO: 674867 - DNA, 25 bp, Homo sapien
tcaatggagcggcacacagtctaga

SEQ ID NO: 674868 - DNA, 25 bp, Homo sapien
gagcggcacacagtctagacccact

SEQ ID NO: 674869 - DNA, 25 bp, Homo sapien
tctagacccacttccgcattgaaac

SEQ ID NO: 674870 - DNA, 25 bp, Homo sapien
acagtctagacccacttccgcattg

SEQ ID NO: 674871 - DNA, 25 bp, Homo sapien
gtgatcttggctcatcatagcctca

SEQ ID NO: 674872 - DNA, 25 bp, Homo sapien
tcaatgatcctcctgccgcagcccc

SEQ ID NO: 674873 - DNA, 25 bp, Homo sapien
ggctcaatgatcctcctgccgcagc

SEQ ID NO: 674874 - DNA, 25 bp, Homo sapien
atcttggctcatcatagcctcaacc

SEQ ID NO: 674875 - DNA, 25 bp, Homo sapien
tttcactccgacttcattacccagg

SEQ ID NO: 674876 - DNA, 25 bp, Homo sapien
gtggagactcctacatagctgatgg

SEQ ID NO: 674877 - DNA, 25 bp, Homo sapien
tccaggtgtctgaagttgacctccc

SEQ ID NO: 674878 - DNA, 25 bp, Homo sapien
gagtactagcccactactgagttgg

SEQ ID NO: 674879 - DNA, 25 bp, Homo sapien
cagagggtacttctaacccctcgct

SEQ ID NO: 674880 - DNA, 25 bp, Homo sapien
gaaaaagggatgtctggctcagagg

SEQ ID NO: 674881 - DNA, 25 bp, Homo sapien
cagtgccaaatgagagccacgatgg

SEQ ID NO: 674882 - DNA, 25 bp, Homo sapien
gcagccctgtccatatcagtgccaa

SEQ ID NO: 674883 - DNA, 25 bp, Homo sapien
cctggacaggaatccccttggactc

SEQ ID NO: 674884 - DNA, 25 bp, Homo sapien
tcagggggtacaatgggaagctcca

SEQ ID NO: 674885 - DNA, 25 bp, Homo sapien
ttcctcagcaactcccaggtcagag

SEQ ID NO: 674886 - DNA, 25 bp, Homo sapien
gcatcctggagggtacacagctcaa

SEQ ID NO: 674887 - DNA, 25 bp, Homo sapien
gaaggatgtactgctgggattccct

SEQ ID NO: 674888 - DNA, 25 bp, Homo sapien
caaagttggtaagaagctaggcctg

SEQ ID NO: 674889 - DNA, 25 bp, Homo sapien
gatgtcacgtgtaaagcgcctagcc

SEQ ID NO: 674890 - DNA, 25 bp, Homo sapien
cactatgaggtgctaagcagtcccc

SEQ ID NO: 674891 - DNA, 25 bp, Homo sapien
cgtcttaggtgccatatggaagatc

SEQ ID NO: 674892 - DNA, 25 bp, Homo sapien
ttatttgtagactcgtgaatttcgc

SEQ ID NO: 674893 - DNA, 25 bp, Homo sapien
tctgctcgcacctctggctctcgtc

SEQ ID NO: 674894 - DNA, 25 bp, Homo sapien
ccttcagctgatggcgcgatctcca

SEQ ID NO: 674895 - DNA, 25 bp, Homo sapien
tagactcgtgaatttcgccacccat

SEQ ID NO: 674896 - DNA, 25 bp, Homo sapien
agcctggcagtgttgttgtcacacc

SEQ ID NO: 674897 - DNA, 25 bp, Homo sapien
ctggcagtgttgttgtcacacccac

SEQ ID NO: 674898 - DNA, 25 bp, Homo sapien
tagcctggcagtgttgttgtcacac

SEQ ID NO: 674899 - DNA, 25 bp, Homo sapien
gcctggcagtgttgttgtcacaccc

SEQ ID NO: 674900 - DNA, 25 bp, Homo sapien
tgtatggatgccacataggcatttc

SEQ ID NO: 674901 - DNA, 25 bp, Homo sapien
gtgatgcggagcagaagcgggtgca

SEQ ID NO: 674902 - DNA, 25 bp, Homo sapien
ggtgcagcggcgcttgacccaacgc

SEQ ID NO: 674903 - DNA, 25 bp, Homo sapien
agcggcgcttgacccaacgcagggt

SEQ ID NO: 674904 - DNA, 25 bp, Homo sapien
actggtcggctacatccagctgctt

SEQ ID NO: 674905 - DNA, 25 bp, Homo sapien
gtggattcgtgtgggcagcccctca

SEQ ID NO: 674906 - DNA, 25 bp, Homo sapien
cctgggcgccgggaggtggattcgt

SEQ ID NO: 674907 - DNA, 25 bp, Homo sapien
cagcccctcaaaccagatccactgg

SEQ ID NO: 674908 - DNA, 25 bp, Homo sapien
ggagcacccgatctcctggaactct

SEQ ID NO: 674909 - DNA, 25 bp, Homo sapien
tgtccttggaacctcaggctctata

SEQ ID NO: 674910 - DNA, 25 bp, Homo sapien
gccccatgggagttctattgcggta

SEQ ID NO: 674911 - DNA, 25 bp, Homo sapien
gctatcatccctcgatgtccttgga

SEQ ID NO: 674912 - DNA, 25 bp, Homo sapien
tgagcagtgaatgccaacacctttt

SEQ ID NO: 674913 - DNA, 25 bp, Homo sapien
tatgcagttcttggatccggcggtt

SEQ ID NO: 674914 - DNA, 25 bp, Homo sapien
ggagaatctttggaacactgagcag

SEQ ID NO: 674915 - DNA, 25 bp, Homo sapien
acaccttttggccagcttatgcagt

SEQ ID NO: 674916 - DNA, 25 bp, Homo sapien
ttcaagagcgacaagttttttaaca

SEQ ID NO: 674917 - DNA, 25 bp, Homo sapien
tcaagagcgacaagttttttaacac

SEQ ID NO: 674918 - DNA, 25 bp, Homo sapien
cgtcccgcagtttctcatcttgcat

SEQ ID NO: 674919 - DNA, 25 bp, Homo sapien
tgtctcgtcccgcagtttctcatct

SEQ ID NO: 674920 - DNA, 25 bp, Homo sapien
cgctcaattactttgctcacaggct

SEQ ID NO: 674921 - DNA, 25 bp, Homo sapien
cgttctcagacggttccgctcaatt

SEQ ID NO: 674922 - DNA, 25 bp, Homo sapien
ttcttgggcctcttctttgctgatg

SEQ ID NO: 674923 - DNA, 25 bp, Homo sapien
ctgttcttgggcctcttctttgctg

SEQ ID NO: 674924 - DNA, 25 bp, Homo sapien
cttggaaaccctgctgttcttgggc

SEQ ID NO: 674925 - DNA, 25 bp, Homo sapien
ggcctcttctttgctgatggactca

SEQ ID NO: 674926 - DNA, 25 bp, Homo sapien
agatgaatggagcaacaccagtgcc

SEQ ID NO: 674927 - DNA, 25 bp, Homo sapien
agtgccaggcaccaaccctgttcct

SEQ ID NO: 674928 - DNA, 25 bp, Homo sapien
tctcagttcagccagcactcaggct

SEQ ID NO: 674929 - DNA, 25 bp, Homo sapien
ggtgctggctctgtaccacctgcag

SEQ ID NO: 674930 - DNA, 25 bp, Homo sapien
tacattggatgttgctagattagaa

SEQ ID NO: 674931 - DNA, 25 bp, Homo sapien
cagctggtaagccttgtggactaaa

SEQ ID NO: 674932 - DNA, 25 bp, Homo sapien
gggtaaagagacctacccaatgaca

SEQ ID NO: 674933 - DNA, 25 bp, Homo sapien
ttagaaagcagtagccaagagtggc

SEQ ID NO: 674934 - DNA, 25 bp, Homo sapien
taccggatccgattccacatagagc

SEQ ID NO: 674935 - DNA, 25 bp, Homo sapien
ttatggccaaatgctcaggttgcag

SEQ ID NO: 674936 - DNA, 25 bp, Homo sapien
tcattgtgctgattaagtacccctg

SEQ ID NO: 674937 - DNA, 25 bp, Homo sapien
gccaagatgtttgatgagccctcga

SEQ ID NO: 674938 - DNA, 25 bp, Homo sapien
gctgccttcggagctctgaccgtaa

SEQ ID NO: 674939 - DNA, 25 bp, Homo sapien
tggacacttctagcactggtctgag

SEQ ID NO: 674940 - DNA, 25 bp, Homo sapien
gggcaaacgtttctcctctcgcagt

SEQ ID NO: 674941 - DNA, 25 bp, Homo sapien
gacttgctcgcggatgtttgtcgaa

SEQ ID NO: 674942 - DNA, 25 bp, Homo sapien
cagtctgcggaggatgacgtctgat

SEQ ID NO: 674943 - DNA, 25 bp, Homo sapien
atgggaatgaatgcaccgacctggg

SEQ ID NO: 674944 - DNA, 25 bp, Homo sapien
tagctcaccttcacaagcagggtct

SEQ ID NO: 674945 - DNA, 25 bp, Homo sapien
taagtcagtgagatgtgtcccagga

SEQ ID NO: 674946 - DNA, 25 bp, Homo sapien
gagtatctctcttgtggtgcctgga

SEQ ID NO: 674947 - DNA, 25 bp, Homo sapien
cccactgttgggatgctggctgcag

SEQ ID NO: 674948 - DNA, 25 bp, Homo sapien
cctttgtggagcttagggcaagccc

SEQ ID NO: 674949 - DNA, 25 bp, Homo sapien
cttcgggagcggcaaaaattcttcg

SEQ ID NO: 674950 - DNA, 25 bp, Homo sapien
atgcagcagatgtgttcttgccttg

SEQ ID NO: 674951 - DNA, 25 bp, Homo sapien
ttgccttgcgaagatcctccaccaa

SEQ ID NO: 674952 - DNA, 25 bp, Homo sapien
gacacactggagcaagtagaactta

SEQ ID NO: 674953 - DNA, 25 bp, Homo sapien
cagtcgtctggtatgcccctctgct

SEQ ID NO: 674954 - DNA, 25 bp, Homo sapien
tctttacttgcagtaggcaccagag

SEQ ID NO: 674955 - DNA, 25 bp, Homo sapien
taaggtggtactcaagccatgctgc

SEQ ID NO: 674956 - DNA, 25 bp, Homo sapien
cctgtcgggagaagaccagactctt

SEQ ID NO: 674957 - DNA, 25 bp, Homo sapien
tacgcccttggcacagtcggatgaa

SEQ ID NO: 674958 - DNA, 25 bp, Homo sapien
ttttcagcaccattatttgtaccac

SEQ ID NO: 674959 - DNA, 25 bp, Homo sapien
gttgctctgtcagctatgccggagt

SEQ ID NO: 674960 - DNA, 25 bp, Homo sapien
tctctatttcagacatcctaactgc

SEQ ID NO: 674961 - DNA, 25 bp, Homo sapien
gtaataatcccctgtacacaccctg

SEQ ID NO: 674962 - DNA, 25 bp, Homo sapien
tggcttttgaaccaaagtgccctgg

SEQ ID NO: 674963 - DNA, 25 bp, Homo sapien
caaaagtggtcggtggctgctgtat

SEQ ID NO: 674964 - DNA, 25 bp, Homo sapien
tgtgttgtccagtacaggagccacg

SEQ ID NO: 674965 - DNA, 25 bp, Homo sapien
tgtagtggccacctctatattgagg

SEQ ID NO: 674966 - DNA, 25 bp, Homo sapien
cgtgtggccatggtaagcccattgg

SEQ ID NO: 674967 - DNA, 25 bp, Homo sapien
tttgggcttccaacgatcccgtcgc

SEQ ID NO: 674968 - DNA, 25 bp, Homo sapien
tgccgtgctaggtgctgctgataca

SEQ ID NO: 674969 - DNA, 25 bp, Homo sapien
ccgtcgcccaagcagtgaatatagt

SEQ ID NO: 674970 - DNA, 25 bp, Homo sapien
ccgccgaagggtccaagctttccag

SEQ ID NO: 674971 - DNA, 25 bp, Homo sapien
gatactttcggtttgcagctctcag

SEQ ID NO: 674972 - DNA, 25 bp, Homo sapien
agctgcgtaacacgaccaggccccg

SEQ ID NO: 674973 - DNA, 25 bp, Homo sapien
tctgccggcaaactcgccttatccc

SEQ ID NO: 674974 - DNA, 25 bp, Homo sapien
cacagtgtccaagtcaagggcttca

SEQ ID NO: 674975 - DNA, 25 bp, Homo sapien
tgtgtagaccgctgtgatgaccatc

SEQ ID NO: 674976 - DNA, 25 bp, Homo sapien
gacgtgtcctgtgaaaccgcagact

SEQ ID NO: 674977 - DNA, 25 bp, Homo sapien
caagatctttggatatggccgctgc

SEQ ID NO: 674978 - DNA, 25 bp, Homo sapien
accagctatgccttcgcctccactg

SEQ ID NO: 674979 - DNA, 25 bp, Homo sapien
caccagctatgccttcgcctccact

SEQ ID NO: 674980 - DNA, 25 bp, Homo sapien
cagctatgccttcgcctccactgcc

SEQ ID NO: 674981 - DNA, 25 bp, Homo sapien
ctatgccttcgcctccactgccacc

SEQ ID NO: 674982 - DNA, 25 bp, Homo sapien
gaagttgccagggatctcagtaatg

SEQ ID NO: 674983 - DNA, 25 bp, Homo sapien
gtggaagttgccagggatctcagta

SEQ ID NO: 674984 - DNA, 25 bp, Homo sapien
gttgccagggatctcagtaatgcac

SEQ ID NO: 674985 - DNA, 25 bp, Homo sapien
tcctgcagaagatgaggtggaagtt

SEQ ID NO: 674986 - DNA, 25 bp, Homo sapien
tccctgctttctgaattggaaccag

SEQ ID NO: 674987 - DNA, 25 bp, Homo sapien
acatgtctctccgtcatgactggag

SEQ ID NO: 674988 - DNA, 25 bp, Homo sapien
cctgagctcttagaaaacttgcctt

SEQ ID NO: 674989 - DNA, 25 bp, Homo sapien
taatctgcgatcttctgacccagga

SEQ ID NO: 674990 - DNA, 25 bp, Homo sapien
tgtgctgcatcataatctggctggc

SEQ ID NO: 674991 - DNA, 25 bp, Homo sapien
gaccttcataggtgttgtccatgcc

SEQ ID NO: 674992 - DNA, 25 bp, Homo sapien
cctggattaccaagtgtgtctgagc

SEQ ID NO: 674993 - DNA, 25 bp, Homo sapien
gacaatcatattcccttctgtgtgg

SEQ ID NO: 674994 - DNA, 25 bp, Homo sapien
taatggctcgagctttcccttcttc

SEQ ID NO: 674995 - DNA, 25 bp, Homo sapien
cagctgtaatggctcgagctttccc

SEQ ID NO: 674996 - DNA, 25 bp, Homo sapien
cacttgtcctgtccattgatgcagc

SEQ ID NO: 674997 - DNA, 25 bp, Homo sapien
tgctgcatggttccacttgtcctgt

SEQ ID NO: 674998 - DNA, 25 bp, Homo sapien
aatgtggctttaatgaccgcctcaa

SEQ ID NO: 674999 - DNA, 25 bp, Homo sapien
gaccgcctcaactactgacactgtg

SEQ ID NO: 675000 - DNA, 25 bp, Homo sapien
tctaacagatccagggctagggaat

SEQ ID NO: 675001 - DNA, 25 bp, Homo sapien
tgtggcaactgtctaacagatccag

SEQ ID NO: 675002 - DNA, 25 bp, Homo sapien
gtaggttggtgtgactgctgctctc

SEQ ID NO: 675003 - DNA, 25 bp, Homo sapien
gttggtgtgactgctgctctccaac

SEQ ID NO: 675004 - DNA, 25 bp, Homo sapien
aggttggtgtgactgctgctctcca

SEQ ID NO: 675005 - DNA, 25 bp, Homo sapien
tcagtaggttggtgtgactgctgct

SEQ ID NO: 675006 - DNA, 25 bp, Homo sapien
caatcccgaatccatggagggctgt

SEQ ID NO: 675007 - DNA, 25 bp, Homo sapien
tatagaatttcaggcacagagatga

SEQ ID NO: 675008 - DNA, 25 bp, Homo sapien
aaatgccttctatggccctcagagc

SEQ ID NO: 675009 - DNA, 25 bp, Homo sapien
gaagcacttgtaggagcacatcagg

SEQ ID NO: 675010 - DNA, 25 bp, Homo sapien
tcaggtgaacttgcagaatttctca

SEQ ID NO: 675011 - DNA, 25 bp, Homo sapien
caggtgaacttgcagaatttctcac

SEQ ID NO: 675012 - DNA, 25 bp, Homo sapien
gttgttgctgttgcctccgcagcct

SEQ ID NO: 675013 - DNA, 25 bp, Homo sapien
gcagcctccgtaagcaaataactca

SEQ ID NO: 675014 - DNA, 25 bp, Homo sapien
gttgcctccgcagcctccgtaagca

SEQ ID NO: 675015 - DNA, 25 bp, Homo sapien
ttctttcctcaaaaagttgttgctg

SEQ ID NO: 675016 - DNA, 25 bp, Homo sapien
aaaaaccatcgcgtcatgtaggttt

SEQ ID NO: 675017 - DNA, 25 bp, Homo sapien
aagttgaaaaaccatcgcgtcatgt

SEQ ID NO: 675018 - DNA, 25 bp, Homo sapien
ttgaaaaaccatcgcgtcatgtagg

SEQ ID NO: 675019 - DNA, 25 bp, Homo sapien
gttgaaaaaccatcgcgtcatgtag

SEQ ID NO: 675020 - DNA, 25 bp, Homo sapien
ggcccttttccataggaaaagcgca

SEQ ID NO: 675021 - DNA, 25 bp, Homo sapien
aggaaaagcgcatacatttgggagg

SEQ ID NO: 675022 - DNA, 25 bp, Homo sapien
tttccataggaaaagcgcatacatt

SEQ ID NO: 675023 - DNA, 25 bp, Homo sapien
aagcgcatacatttgggaggagatc

SEQ ID NO: 675024 - DNA, 25 bp, Homo sapien
agtgagaatcaggagaaacgagaga

SEQ ID NO: 675025 - DNA, 25 bp, Homo sapien
ctaggcagagagtgagaatcaggag

SEQ ID NO: 675026 - DNA, 25 bp, Homo sapien
cagagagtgagaatcaggagaaacg

SEQ ID NO: 675027 - DNA, 25 bp, Homo sapien
agagtgagaatcaggagaaacgaga

SEQ ID NO: 675028 - DNA, 25 bp, Homo sapien
atctttatgaaagtccctggggttg

SEQ ID NO: 675029 - DNA, 25 bp, Homo sapien
ggatgagagccaaggaagtgccaca

SEQ ID NO: 675030 - DNA, 25 bp, Homo sapien
tgagagccaaggaagtgccacaggc

SEQ ID NO: 675031 - DNA, 25 bp, Homo sapien
gctaccaccactgatatctttatga

SEQ ID NO: 675032 - DNA, 25 bp, Homo sapien
tcagctcttatggaagcctgttcag

SEQ ID NO: 675033 - DNA, 25 bp, Homo sapien
caagcattcaggtacatgttttatc

SEQ ID NO: 675034 - DNA, 25 bp, Homo sapien
cagaactgcagacatcaagcatggc

SEQ ID NO: 675035 - DNA, 25 bp, Homo sapien
tgtttctaggacacaaacctgtaac

SEQ ID NO: 675036 - DNA, 25 bp, Homo sapien
tattttgatccccacattaaataaa

SEQ ID NO: 675037 - DNA, 25 bp, Homo sapien
tattaatttatatgggttttgtgca

SEQ ID NO: 675038 - DNA, 25 bp, Homo sapien
atagtgctttacagaattgaggtca

SEQ ID NO: 675039 - DNA, 25 bp, Homo sapien
ttgcagctggttgcaatttccctcc

SEQ ID NO: 675040 - DNA, 25 bp, Homo sapien
gagagaggcctggattatgagccaa

SEQ ID NO: 675041 - DNA, 25 bp, Homo sapien
cagtttctggaacagccaaggtttg

SEQ ID NO: 675042 - DNA, 25 bp, Homo sapien
tggagcatcaatcaggcacacgtgg

SEQ ID NO: 675043 - DNA, 25 bp, Homo sapien
gatgctacgctggaagaaagtgtgt

SEQ ID NO: 675044 - DNA, 25 bp, Homo sapien
agctcctccttatggtataaagtaa

SEQ ID NO: 675045 - DNA, 25 bp, Homo sapien
tcaagctcctccttatggtataaag

SEQ ID NO: 675046 - DNA, 25 bp, Homo sapien
tattcaagctcctccttatggtata

SEQ ID NO: 675047 - DNA, 25 bp, Homo sapien
ttattcaagctcctccttatggtat

SEQ ID NO: 675048 - DNA, 25 bp, Homo sapien
tgaccacattaggaaccaaatcttg

SEQ ID NO: 675049 - DNA, 25 bp, Homo sapien
gcagaagaataaagggtgagatgct

SEQ ID NO: 675050 - DNA, 25 bp, Homo sapien
gcttggaccctgaccacattaggaa

SEQ ID NO: 675051 - DNA, 25 bp, Homo sapien
agggtgagatgcttggaccctgacc

SEQ ID NO: 675052 - DNA, 25 bp, Homo sapien
tgagcacaggagaccgggacctctg

SEQ ID NO: 675053 - DNA, 25 bp, Homo sapien
gtgagcacaggagaccgggacctct

SEQ ID NO: 675054 - DNA, 25 bp, Homo sapien
gcaggtgaccagacagatagcttca

SEQ ID NO: 675055 - DNA, 25 bp, Homo sapien
gatgaattcggagcagatcttagtt

SEQ ID NO: 675056 - DNA, 25 bp, Homo sapien
ttattgttcccctggctaccgccat

SEQ ID NO: 675057 - DNA, 25 bp, Homo sapien
gcctcctgtggcatactgcatatat

SEQ ID NO: 675058 - DNA, 25 bp, Homo sapien
tagaacctcaggtctgaagcacgac

SEQ ID NO: 675059 - DNA, 25 bp, Homo sapien
taaataactttcttgaggccacaca

SEQ ID NO: 675060 - DNA, 25 bp, Homo sapien
tgagcaagtggaacccatcatgggt

SEQ ID NO: 675061 - DNA, 25 bp, Homo sapien
ccattgctgttaggatcaagaccag

SEQ ID NO: 675062 - DNA, 25 bp, Homo sapien
atgttttctgggcaatctctgggtt

SEQ ID NO: 675063 - DNA, 25 bp, Homo sapien
gctgaacgggcaacacttcatgttt

SEQ ID NO: 675064 - DNA, 25 bp, Homo sapien
tgaagtctaaacatttctttccacg

SEQ ID NO: 675065 - DNA, 25 bp, Homo sapien
tctgggtttggtacactggtctatt

SEQ ID NO: 675066 - DNA, 25 bp, Homo sapien
ccctcaaggccttaaaggagccagt

SEQ ID NO: 675067 - DNA, 25 bp, Homo sapien
cacccctccagagttagagaacttt

SEQ ID NO: 675068 - DNA, 25 bp, Homo sapien
ggaagatatattccctcaaggcctt

SEQ ID NO: 675069 - DNA, 25 bp, Homo sapien
tatccccagaaggtagtggccctca

SEQ ID NO: 675070 - DNA, 25 bp, Homo sapien
ctggatgtcccccaaaaggatgaat

SEQ ID NO: 675071 - DNA, 25 bp, Homo sapien
caggttcctggatgtcccccaaaag

SEQ ID NO: 675072 - DNA, 25 bp, Homo sapien
atgccttcagcgtgcccaggttcct

SEQ ID NO: 675073 - DNA, 25 bp, Homo sapien
tggtaccaggattggcagaagtcct

SEQ ID NO: 675074 - DNA, 25 bp, Homo sapien
accaaaactaagaactgctcctcag

SEQ ID NO: 675075 - DNA, 25 bp, Homo sapien
ggcctggttgatggcaccaaaacta

SEQ ID NO: 675076 - DNA, 25 bp, Homo sapien
agcagctcctacatctgcactttgc

SEQ ID NO: 675077 - DNA, 25 bp, Homo sapien
tgatggcaccaaaactaagaactgc

SEQ ID NO: 675078 - DNA, 25 bp, Homo sapien
atccttggtataagcccgaaggagg

SEQ ID NO: 675079 - DNA, 25 bp, Homo sapien
caactctgttctccgtttttccctg

SEQ ID NO: 675080 - DNA, 25 bp, Homo sapien
cagctacagcattggattaaaagtc

SEQ ID NO: 675081 - DNA, 25 bp, Homo sapien
caccctgaagcattaacgcttgagc

SEQ ID NO: 675082 - DNA, 25 bp, Homo sapien
ggattgagccacagtagtaaccagc

SEQ ID NO: 675083 - DNA, 25 bp, Homo sapien
ccagggttagtttctagaggatcca

SEQ ID NO: 675084 - DNA, 25 bp, Homo sapien
cagtctggagcatccgtcaggtaca

SEQ ID NO: 675085 - DNA, 25 bp, Homo sapien
gaggatccaaactaaggcactgtcc

SEQ ID NO: 675086 - DNA, 25 bp, Homo sapien
caaataggagtgaatcgctgccaaa

SEQ ID NO: 675087 - DNA, 25 bp, Homo sapien
cagagaacgtaggacagaaacagct

SEQ ID NO: 675088 - DNA, 25 bp, Homo sapien
catcttgggttcagctcatctttgg

SEQ ID NO: 675089 - DNA, 25 bp, Homo sapien
tgtcttaagtttagcgtcctgtgcc

SEQ ID NO: 675090 - DNA, 25 bp, Homo sapien
tggaatggaccagccaacacccaga

SEQ ID NO: 675091 - DNA, 25 bp, Homo sapien
tcttacctcctgatcagagctggtt

SEQ ID NO: 675092 - DNA, 25 bp, Homo sapien
tctgccaaagatgtagctgtcctgg

SEQ ID NO: 675093 - DNA, 25 bp, Homo sapien
tcctcagttcctcatactcagaaag

SEQ ID NO: 675094 - DNA, 25 bp, Homo sapien
tggagaggatgaaagaccggggccc

SEQ ID NO: 675095 - DNA, 25 bp, Homo sapien
ctggagaggatgaaagaccggggcc

SEQ ID NO: 675096 - DNA, 25 bp, Homo sapien
agttgttattgtttccctggcagcc

SEQ ID NO: 675097 - DNA, 25 bp, Homo sapien
tattatctttcttgtcataccacca

SEQ ID NO: 675098 - DNA, 25 bp, Homo sapien
ctttcttgtcataccaccaatgaag

SEQ ID NO: 675099 - DNA, 25 bp, Homo sapien
caccatagacaaacatggagcaagt

SEQ ID NO: 675100 - DNA, 25 bp, Homo sapien
catatgttagggcaacgatggccac

SEQ ID NO: 675101 - DNA, 25 bp, Homo sapien
gaatctaaatcgcaggtctcccaag

SEQ ID NO: 675102 - DNA, 25 bp, Homo sapien
caggttaatttggacagaggcacac

SEQ ID NO: 675103 - DNA, 25 bp, Homo sapien
tgaacctggtcatatgatgccccgc

SEQ ID NO: 675104 - DNA, 25 bp, Homo sapien
taaacatttttttccgcagctgaag

SEQ ID NO: 675105 - DNA, 25 bp, Homo sapien
cagctgaagacacaacacttcttgt

SEQ ID NO: 675106 - DNA, 25 bp, Homo sapien
ttccgcagctgaagacacaacactt

SEQ ID NO: 675107 - DNA, 25 bp, Homo sapien
cgcagctgaagacacaacacttctt

SEQ ID NO: 675108 - DNA, 25 bp, Homo sapien
agagcggttttacacccgtgtgcct

SEQ ID NO: 675109 - DNA, 25 bp, Homo sapien
gttttacacccgtgtgccttagaga

SEQ ID NO: 675110 - DNA, 25 bp, Homo sapien
tacacccgtgtgccttagagagcat

SEQ ID NO: 675111 - DNA, 25 bp, Homo sapien
tttacacccgtgtgccttagagagc

SEQ ID NO: 675112 - DNA, 25 bp, Homo sapien
cacaaggcaattctagagagtcagg

SEQ ID NO: 675113 - DNA, 25 bp, Homo sapien
ccactgatgtaagccaatgcggtct

SEQ ID NO: 675114 - DNA, 25 bp, Homo sapien
ttagtatcacttaccccggagccag

SEQ ID NO: 675115 - DNA, 25 bp, Homo sapien
gtagcacccctgattgtaacaactg

SEQ ID NO: 675116 - DNA, 25 bp, Homo sapien
aaataaccaatcagtcagaccaggt

SEQ ID NO: 675117 - DNA, 25 bp, Homo sapien
tgggaaataaccaatcagtcagacc

SEQ ID NO: 675118 - DNA, 25 bp, Homo sapien
ggaaataaccaatcagtcagaccag

SEQ ID NO: 675119 - DNA, 25 bp, Homo sapien
gaaataaccaatcagtcagaccagg

SEQ ID NO: 675120 - DNA, 25 bp, Homo sapien
ctaagaggacgaatagcaccaggag

SEQ ID NO: 675121 - DNA, 25 bp, Homo sapien
aagaggacgaatagcaccaggaggc

SEQ ID NO: 675122 - DNA, 25 bp, Homo sapien
gaggacgaatagcaccaggaggctc

SEQ ID NO: 675123 - DNA, 25 bp, Homo sapien
taagaggacgaatagcaccaggagg

SEQ ID NO: 675124 - DNA, 25 bp, Homo sapien
ggttcccgaatttggaatgctcagc

SEQ ID NO: 675125 - DNA, 25 bp, Homo sapien
tcccgaatttggaatgctcagctgc

SEQ ID NO: 675126 - DNA, 25 bp, Homo sapien
ctggtggttcccgaatttggaatgc

SEQ ID NO: 675127 - DNA, 25 bp, Homo sapien
ccgaatttggaatgctcagctgctg

SEQ ID NO: 675128 - DNA, 25 bp, Homo sapien
ggctcaccaaagtcagtaaatttct

SEQ ID NO: 675129 - DNA, 25 bp, Homo sapien
taaatcatggttttggccccttctc

SEQ ID NO: 675130 - DNA, 25 bp, Homo sapien
ccagggtccccaattaaggctgcat

SEQ ID NO: 675131 - DNA, 25 bp, Homo sapien
tctttgggacttgggataaatcatg

SEQ ID NO: 675132 - DNA, 25 bp, Homo sapien
cttcatcctttctcattgagggcat

SEQ ID NO: 675133 - DNA, 25 bp, Homo sapien
gaataggccccaaataaacactcag

SEQ ID NO: 675134 - DNA, 25 bp, Homo sapien
caggtctgtgtctagaacgcagtgc

SEQ ID NO: 675135 - DNA, 25 bp, Homo sapien
gcccaagatctgtcacatggactga

SEQ ID NO: 675136 - DNA, 25 bp, Homo sapien
tccaacgagaaccaacaagatcagc

SEQ ID NO: 675137 - DNA, 25 bp, Homo sapien
cttatgtattccaaattcaacaaca

SEQ ID NO: 675138 - DNA, 25 bp, Homo sapien
aaacttatgtattccaaattcaaca

SEQ ID NO: 675139 - DNA, 25 bp, Homo sapien
tatagtgcaggagccattgacttta

SEQ ID NO: 675140 - DNA, 25 bp, Homo sapien
ctttttatagtgcaggagccattga

SEQ ID NO: 675141 - DNA, 25 bp, Homo sapien
gaaaataaagtcatgaagttgaaaa

SEQ ID NO: 675142 - DNA, 25 bp, Homo sapien
ttcattattattttggaggttctac

SEQ ID NO: 675143 - DNA, 25 bp, Homo sapien
tattttggaggttctacacaataca

SEQ ID NO: 675144 - DNA, 25 bp, Homo sapien
cattcaatattgtgatacttaagat

SEQ ID NO: 675145 - DNA, 25 bp, Homo sapien
caagggcttgcgtgggcagaaacct

SEQ ID NO: 675146 - DNA, 25 bp, Homo sapien
tacatttcagtccacaatgtgagca

SEQ ID NO: 675147 - DNA, 25 bp, Homo sapien
ggtttatcaatcttggtacatagca

SEQ ID NO: 675148 - DNA, 25 bp, Homo sapien
aatgtgagcagcacttttccaccaa

SEQ ID NO: 675149 - DNA, 25 bp, Homo sapien
gaagtaaacacctgccttagaggag

SEQ ID NO: 675150 - DNA, 25 bp, Homo sapien
gggaaatgagttgcccaatgccaca

SEQ ID NO: 675151 - DNA, 25 bp, Homo sapien
gagcatctgaggttcaagacacccc

SEQ ID NO: 675152 - DNA, 25 bp, Homo sapien
tataaccccagagtaccacaggtgg

SEQ ID NO: 675153 - DNA, 25 bp, Homo sapien
acaaacaaagccacacctggattca

SEQ ID NO: 675154 - DNA, 25 bp, Homo sapien
gggacaatcgatgtcactgtgacat

SEQ ID NO: 675155 - DNA, 25 bp, Homo sapien
tcacaacatttgtctgtctggggac

SEQ ID NO: 675156 - DNA, 25 bp, Homo sapien
cactccttacgttcagtgaaaggga

SEQ ID NO: 675157 - DNA, 25 bp, Homo sapien
tagggctggagacacaactttgtgg

SEQ ID NO: 675158 - DNA, 25 bp, Homo sapien
caattgttaccgtttagtgagccca

SEQ ID NO: 675159 - DNA, 25 bp, Homo sapien
taatcctgccaacaactcaacgagc

SEQ ID NO: 675160 - DNA, 25 bp, Homo sapien
tctgaggtcgaaattgcaacgctgc

SEQ ID NO: 675161 - DNA, 25 bp, Homo sapien
cagatttccaggatagaggtctcac

SEQ ID NO: 675162 - DNA, 25 bp, Homo sapien
tcagatttccaggatagaggtctca

SEQ ID NO: 675163 - DNA, 25 bp, Homo sapien
aagttgttggcattcccttcgcagc

SEQ ID NO: 675164 - DNA, 25 bp, Homo sapien
gattacagtttccatgcctcacagg

SEQ ID NO: 675165 - DNA, 25 bp, Homo sapien
agtcaaaatgccagcgctgtgcctc

SEQ ID NO: 675166 - DNA, 25 bp, Homo sapien
caattaacatgcaggccgttctgca

SEQ ID NO: 675167 - DNA, 25 bp, Homo sapien
gaagttcagtggtacaggtgagcct

SEQ ID NO: 675168 - DNA, 25 bp, Homo sapien
aatctgtgttacatgagtccggaag

SEQ ID NO: 675169 - DNA, 25 bp, Homo sapien
tgttacatgagtccggaagttcagt

SEQ ID NO: 675170 - DNA, 25 bp, Homo sapien
caggtgagcctctctttgggacata

SEQ ID NO: 675171 - DNA, 25 bp, Homo sapien
gaaagaaatgtccaaactcacattc

SEQ ID NO: 675172 - DNA, 25 bp, Homo sapien
actcacattctttcggaatttcagc

SEQ ID NO: 675173 - DNA, 25 bp, Homo sapien
aatgtccaaactcacattctttcgg

SEQ ID NO: 675174 - DNA, 25 bp, Homo sapien
gtccaaactcacattctttcggaat

SEQ ID NO: 675175 - DNA, 25 bp, Homo sapien
ccaggtctgatcctgcttacctttt

SEQ ID NO: 675176 - DNA, 25 bp, Homo sapien
cagacaagatcaggaattttcaggg

SEQ ID NO: 675177 - DNA, 25 bp, Homo sapien
ccagtgtttccagtcagtctcccat

SEQ ID NO: 675178 - DNA, 25 bp, Homo sapien
aggtctgatcctgcttaccttttga

SEQ ID NO: 675179 - DNA, 25 bp, Homo sapien
cagcaggaaagctacattcctccag

SEQ ID NO: 675180 - DNA, 25 bp, Homo sapien
gcagcaggaaagctacattcctcca

SEQ ID NO: 675181 - DNA, 25 bp, Homo sapien
caggaaagctacattcctccaggag

SEQ ID NO: 675182 - DNA, 25 bp, Homo sapien
ggaaagctacattcctccaggagaa

SEQ ID NO: 675183 - DNA, 25 bp, Homo sapien
tccactacccaatttccaactggta

SEQ ID NO: 675184 - DNA, 25 bp, Homo sapien
aaaaagctgttgctgtgcgcaggtg

SEQ ID NO: 675185 - DNA, 25 bp, Homo sapien
ccaactggtatactgtccacagaaa

SEQ ID NO: 675186 - DNA, 25 bp, Homo sapien
agttcacatcttgtagaggcaaaac

SEQ ID NO: 675187 - DNA, 25 bp, Homo sapien
ccaagtacttgggagctaatgccca

SEQ ID NO: 675188 - DNA, 25 bp, Homo sapien
gaggttatctcccttttcacagagg

SEQ ID NO: 675189 - DNA, 25 bp, Homo sapien
tcatggatggctcaagggtatcttt

SEQ ID NO: 675190 - DNA, 25 bp, Homo sapien
catagcctaagcctgtcatagaggc

SEQ ID NO: 675191 - DNA, 25 bp, Homo sapien
gcaggacagatagcaggtgaaccac

SEQ ID NO: 675192 - DNA, 25 bp, Homo sapien
tatattcctgaattcagtgcggaca

SEQ ID NO: 675193 - DNA, 25 bp, Homo sapien
taaccagagagttcaatgtgacact

SEQ ID NO: 675194 - DNA, 25 bp, Homo sapien
gatggtgacccatgcataaccagag

SEQ ID NO: 675195 - DNA, 25 bp, Homo sapien
ggatatgaaagatctgtacactgaa

SEQ ID NO: 675196 - DNA, 25 bp, Homo sapien
tttaacaaaggatatgaaagatctg

SEQ ID NO: 675197 - DNA, 25 bp, Homo sapien
aaatattagtgaaagaaattggaga

SEQ ID NO: 675198 - DNA, 25 bp, Homo sapien
caaaggatatgaaagatctgtacac

SEQ ID NO: 675199 - DNA, 25 bp, Homo sapien
cctccttcagttcggacagtccaca

SEQ ID NO: 675200 - DNA, 25 bp, Homo sapien
ctccttcagttcggacagtccacat

SEQ ID NO: 675201 - DNA, 25 bp, Homo sapien
gcctcttccctatggagacagcttc

SEQ ID NO: 675202 - DNA, 25 bp, Homo sapien
ggcctcttccctatggagacagctt

SEQ ID NO: 675203 - DNA, 25 bp, Homo sapien
ttgctccagctctaaggctcctccc

SEQ ID NO: 675204 - DNA, 25 bp, Homo sapien
ctttgctccagctctaaggctcctc

SEQ ID NO: 675205 - DNA, 25 bp, Homo sapien
tggagctcggttcacgctgtttcac

SEQ ID NO: 675206 - DNA, 25 bp, Homo sapien
tcccctggtatattcctaggagtgg

SEQ ID NO: 675207 - DNA, 25 bp, Homo sapien
cctaggagtggagctcggttcacgc

SEQ ID NO: 675208 - DNA, 25 bp, Homo sapien
cagctcttcccctggtatattccta

SEQ ID NO: 675209 - DNA, 25 bp, Homo sapien
gaaaggttaccagctagagccagtg

SEQ ID NO: 675210 - DNA, 25 bp, Homo sapien
tgtcccaagaaggaagtaggcagca

SEQ ID NO: 675211 - DNA, 25 bp, Homo sapien
aaagcttcagggtaaagaggtcaag

SEQ ID NO: 675212 - DNA, 25 bp, Homo sapien
gaccagatggtcatccttcagccca

SEQ ID NO: 675213 - DNA, 25 bp, Homo sapien
ggtttagcattgatttaaggggctc

SEQ ID NO: 675214 - DNA, 25 bp, Homo sapien
gtttagcattgatttaaggggctct

SEQ ID NO: 675215 - DNA, 25 bp, Homo sapien
ctaggggtttagcattgatttaagg

SEQ ID NO: 675216 - DNA, 25 bp, Homo sapien
tctcacagtacttatatggaggctg

SEQ ID NO: 675217 - DNA, 25 bp, Homo sapien
tacttatatggaggctgtacccagc

SEQ ID NO: 675218 - DNA, 25 bp, Homo sapien
ggacgtacacaagtcattattttag

SEQ ID NO: 675219 - DNA, 25 bp, Homo sapien
ggtccagcagcatgtatgatttgga

SEQ ID NO: 675220 - DNA, 25 bp, Homo sapien
gatgaacatgacgagtagaagaatc

SEQ ID NO: 675221 - DNA, 25 bp, Homo sapien
agaagcatcacaactccagagatga

SEQ ID NO: 675222 - DNA, 25 bp, Homo sapien
aacatgacgagtagaagaatccagg

SEQ ID NO: 675223 - DNA, 25 bp, Homo sapien
gcatcacaactccagagatgaacat

SEQ ID NO: 675224 - DNA, 25 bp, Homo sapien
gcagaaggcaagtcttttcccaata

SEQ ID NO: 675225 - DNA, 25 bp, Homo sapien
gctctctgtgtgtatttgggttaag

SEQ ID NO: 675226 - DNA, 25 bp, Homo sapien
tgtatttgggttaagttctggcaga

SEQ ID NO: 675227 - DNA, 25 bp, Homo sapien
tggcagaaggcaagtcttttcccaa

SEQ ID NO: 675228 - DNA, 25 bp, Homo sapien
gtctgtagtaactggctgacagctc

SEQ ID NO: 675229 - DNA, 25 bp, Homo sapien
tgagtgtctgtagtaactggctgac

SEQ ID NO: 675230 - DNA, 25 bp, Homo sapien
tgcattgagtgtctgtagtaactgg

SEQ ID NO: 675231 - DNA, 25 bp, Homo sapien
cattgagtgtctgtagtaactggct

SEQ ID NO: 675232 - DNA, 25 bp, Homo sapien
tggcccctacagatgccccacttgt

SEQ ID NO: 675233 - DNA, 25 bp, Homo sapien
ttttgctgccactacagatgatcat

SEQ ID NO: 675234 - DNA, 25 bp, Homo sapien
cactacagatgatcattgagagctc

SEQ ID NO: 675235 - DNA, 25 bp, Homo sapien
agatgatcattgagagctcactgtg

SEQ ID NO: 675236 - DNA, 25 bp, Homo sapien
atgtcatggtattggccagctcctg

SEQ ID NO: 675237 - DNA, 25 bp, Homo sapien
tgatgtcatggtattggccagctcc

SEQ ID NO: 675238 - DNA, 25 bp, Homo sapien
ctctgatgtcatggtattggccagc

SEQ ID NO: 675239 - DNA, 25 bp, Homo sapien
catggtattggccagctcctgcatc

SEQ ID NO: 675240 - DNA, 25 bp, Homo sapien
tctcacgcttaattcactttatttt

SEQ ID NO: 675241 - DNA, 25 bp, Homo sapien
tcacgcttaattcactttatttttc

SEQ ID NO: 675242 - DNA, 25 bp, Homo sapien
taattcactttatttttcttgtata

SEQ ID NO: 675243 - DNA, 25 bp, Homo sapien
cgcttaattcactttatttttcttg

SEQ ID NO: 675244 - DNA, 25 bp, Homo sapien
agcctgagtccgctgcgcggagact

SEQ ID NO: 675245 - DNA, 25 bp, Homo sapien
ttcctcatagagagacttggtaaat

SEQ ID NO: 675246 - DNA, 25 bp, Homo sapien
aattcctcatagagagacttggtaa

SEQ ID NO: 675247 - DNA, 25 bp, Homo sapien
cctgagtccgctgcgcggagactct

SEQ ID NO: 675248 - DNA, 25 bp, Homo sapien
caagcggcccaacttggtgacaggc

SEQ ID NO: 675249 - DNA, 25 bp, Homo sapien
gaccaagcggcccaacttggtgaca

SEQ ID NO: 675250 - DNA, 25 bp, Homo sapien
tgagagacgtccccaggaaaaagtc

SEQ ID NO: 675251 - DNA, 25 bp, Homo sapien
ctcatccttgagagacgtccccagg

SEQ ID NO: 675252 - DNA, 25 bp, Homo sapien
tcgcgagctccgcggccttggcccc

SEQ ID NO: 675253 - DNA, 25 bp, Homo sapien
cttcgcgagctccgcggccttggcc

SEQ ID NO: 675254 - DNA, 25 bp, Homo sapien
ccggccccggatgccactgccgaaa

SEQ ID NO: 675255 - DNA, 25 bp, Homo sapien
gccgcgaccccggccccggatgcca

SEQ ID NO: 675256 - DNA, 25 bp, Homo sapien
gcctccgggcctccccgctgcaccg

SEQ ID NO: 675257 - DNA, 25 bp, Homo sapien
cagggcctccgggcctccccgctgc

SEQ ID NO: 675258 - DNA, 25 bp, Homo sapien
gggcctccgggcctccccgctgcac

SEQ ID NO: 675259 - DNA, 25 bp, Homo sapien
cctccgggcctccccgctgcaccgg

SEQ ID NO: 675260 - DNA, 25 bp, Homo sapien
taagtttatttgtcaagtgtttgct

SEQ ID NO: 675261 - DNA, 25 bp, Homo sapien
tagccacagggtactactatgagac

SEQ ID NO: 675262 - DNA, 25 bp, Homo sapien
gttgtccagctctcagtaaaaatag

SEQ ID NO: 675263 - DNA, 25 bp, Homo sapien
tagactggtgttcctaaaagtagcc

SEQ ID NO: 675264 - DNA, 25 bp, Homo sapien
aggctttagaacacttattggtaca

SEQ ID NO: 675265 - DNA, 25 bp, Homo sapien
aacacttattggtacattctttgac

SEQ ID NO: 675266 - DNA, 25 bp, Homo sapien
acacttattggtacattctttgaca

SEQ ID NO: 675267 - DNA, 25 bp, Homo sapien
cagtagcaccgtacagaagaatgtc

SEQ ID NO: 675268 - DNA, 25 bp, Homo sapien
gaatgtcatgagcatgggtatccag

SEQ ID NO: 675269 - DNA, 25 bp, Homo sapien
tccagagcttcatgaggctgaccat

SEQ ID NO: 675270 - DNA, 25 bp, Homo sapien
tcccagcacagacagtagcaccgta

SEQ ID NO: 675271 - DNA, 25 bp, Homo sapien
tgttgtcagaaggattatttttctt

SEQ ID NO: 675272 - DNA, 25 bp, Homo sapien
ttggaggtgctgaaacctatttgac

SEQ ID NO: 675273 - DNA, 25 bp, Homo sapien
aaacctatttgactggtggctcttc

SEQ ID NO: 675274 - DNA, 25 bp, Homo sapien
tgctgaaacctatttgactggtggc

SEQ ID NO: 675275 - DNA, 25 bp, Homo sapien
gaggtgctgaaacctatttgactgg

SEQ ID NO: 675276 - DNA, 25 bp, Homo sapien
gctggtgccaatcctactgaaatta

SEQ ID NO: 675277 - DNA, 25 bp, Homo sapien
ctggtgccaatcctactgaaattat

SEQ ID NO: 675278 - DNA, 25 bp, Homo sapien
gtgccaatcctactgaaattattcc

SEQ ID NO: 675279 - DNA, 25 bp, Homo sapien
gagctggtgccaatcctactgaaat

SEQ ID NO: 675280 - DNA, 25 bp, Homo sapien
agtatccttctagagtctccccatt

SEQ ID NO: 675281 - DNA, 25 bp, Homo sapien
tggcagtatccttctagagtctccc

SEQ ID NO: 675282 - DNA, 25 bp, Homo sapien
ggcagtatccttctagagtctcccc

SEQ ID NO: 675283 - DNA, 25 bp, Homo sapien
gcagtatccttctagagtctcccca

SEQ ID NO: 675284 - DNA, 25 bp, Homo sapien
taaccaaatgggcactcctttcagc

SEQ ID NO: 675285 - DNA, 25 bp, Homo sapien
tacataatatgagagcacatagatg

SEQ ID NO: 675286 - DNA, 25 bp, Homo sapien
gagagcacatagatgttttcataga

SEQ ID NO: 675287 - DNA, 25 bp, Homo sapien
gagagcacacagtcataaccaaatg

SEQ ID NO: 675288 - DNA, 25 bp, Homo sapien
agcaaaagaggcaggatccatgggc

SEQ ID NO: 675289 - DNA, 25 bp, Homo sapien
cagcaaaagaggcaggatccatggg

SEQ ID NO: 675290 - DNA, 25 bp, Homo sapien
gcagcaaaagaggcaggatccatgg

SEQ ID NO: 675291 - DNA, 25 bp, Homo sapien
gaagggttcagggagcaggatgcac

SEQ ID NO: 675292 - DNA, 25 bp, Homo sapien
tggaagggttcagggagcaggatgc

SEQ ID NO: 675293 - DNA, 25 bp, Homo sapien
cggatggaagggttcagggagcagg

SEQ ID NO: 675294 - DNA, 25 bp, Homo sapien
agggttcagggagcaggatgcacat

SEQ ID NO: 675295 - DNA, 25 bp, Homo sapien
ttttggaaatatgaacagtggtgga

SEQ ID NO: 675296 - DNA, 25 bp, Homo sapien
cagtggtggatgcatagatctatgc

SEQ ID NO: 675297 - DNA, 25 bp, Homo sapien
aatgttcccacagaaggctgaacag

SEQ ID NO: 675298 - DNA, 25 bp, Homo sapien
cataggatgctcatacaaatgttcc

SEQ ID NO: 675299 - DNA, 25 bp, Homo sapien
tgtcacggtatcctccctgggcctg

SEQ ID NO: 675300 - DNA, 25 bp, Homo sapien
cttgtcacggtatcctccctgggcc

SEQ ID NO: 675301 - DNA, 25 bp, Homo sapien
tcttgtcacggtatcctccctgggc

SEQ ID NO: 675302 - DNA, 25 bp, Homo sapien
ttgtcacggtatcctccctgggcct

SEQ ID NO: 675303 - DNA, 25 bp, Homo sapien
tctgaccagagcgtgagccctaagt

SEQ ID NO: 675304 - DNA, 25 bp, Homo sapien
gaccagagcgtgagccctaagtctg

SEQ ID NO: 675305 - DNA, 25 bp, Homo sapien
ctgaccagagcgtgagccctaagtc

SEQ ID NO: 675306 - DNA, 25 bp, Homo sapien
tgaccagagcgtgagccctaagtct

SEQ ID NO: 675307 - DNA, 25 bp, Homo sapien
cggtgaacgtagctacagatagaca

SEQ ID NO: 675308 - DNA, 25 bp, Homo sapien
gcagaaatcatatcatgagcccctt

SEQ ID NO: 675309 - DNA, 25 bp, Homo sapien
ttccacagttgtgaaagcagaaatc

SEQ ID NO: 675310 - DNA, 25 bp, Homo sapien
taccgtctgccacctttatttagtc

SEQ ID NO: 675311 - DNA, 25 bp, Homo sapien
ttgctgaggataacggcttgtagtt

SEQ ID NO: 675312 - DNA, 25 bp, Homo sapien
cctcctatgacaggccccaaggtgt

SEQ ID NO: 675313 - DNA, 25 bp, Homo sapien
taacggcttgtagttccatccatgt

SEQ ID NO: 675314 - DNA, 25 bp, Homo sapien
ccaaggtgtgttgtttacctccctg

SEQ ID NO: 675315 - DNA, 25 bp, Homo sapien
ttcattcgtcttccatcactgatac

SEQ ID NO: 675316 - DNA, 25 bp, Homo sapien
tccattacatttaaagttagtattg

SEQ ID NO: 675317 - DNA, 25 bp, Homo sapien
tcctttaaggatgttgaatattggt

SEQ ID NO: 675318 - DNA, 25 bp, Homo sapien
actctttcctttaaggatgttgaat

SEQ ID NO: 675319 - DNA, 25 bp, Homo sapien
caggaagattgcgagaaaggatttc

SEQ ID NO: 675320 - DNA, 25 bp, Homo sapien
cgagaaaggatttcagtgctgttcc

SEQ ID NO: 675321 - DNA, 25 bp, Homo sapien
gattgcgagaaaggatttcagtgct

SEQ ID NO: 675322 - DNA, 25 bp, Homo sapien
gtacaatgcaggaagattgcgagaa

SEQ ID NO: 675323 - DNA, 25 bp, Homo sapien
tatccaggtctgatcctagagctgc

SEQ ID NO: 675324 - DNA, 25 bp, Homo sapien
ttccttggtggccatgttgccaaca

SEQ ID NO: 675325 - DNA, 25 bp, Homo sapien
agcgcaacaggtaagagatatctca

SEQ ID NO: 675326 - DNA, 25 bp, Homo sapien
ccagcagaagagtcccttaccagca

SEQ ID NO: 675327 - DNA, 25 bp, Homo sapien
gcaaaatttgtcctacacttttgct

SEQ ID NO: 675328 - DNA, 25 bp, Homo sapien
caaagcaaaatttgtcctacacttt

SEQ ID NO: 675329 - DNA, 25 bp, Homo sapien
caaaatttgtcctacacttttgctt

SEQ ID NO: 675330 - DNA, 25 bp, Homo sapien
ttggccaccagtgttcttgggctct

SEQ ID NO: 675331 - DNA, 25 bp, Homo sapien
ctttggccaccagtgttcttgggct

SEQ ID NO: 675332 - DNA, 25 bp, Homo sapien
cctttggccaccagtgttcttgggc

SEQ ID NO: 675333 - DNA, 25 bp, Homo sapien
tttggccaccagtgttcttgggctc

SEQ ID NO: 675334 - DNA, 25 bp, Homo sapien
aactgtacttacttcatagggtgta

SEQ ID NO: 675335 - DNA, 25 bp, Homo sapien
gagtgaccttgtacatgtaacctaa

SEQ ID NO: 675336 - DNA, 25 bp, Homo sapien
taataaataggtctggaaccactga

SEQ ID NO: 675337 - DNA, 25 bp, Homo sapien
taaagggctcagaagcaatcccaca

SEQ ID NO: 675338 - DNA, 25 bp, Homo sapien
gaaacattgagatagaaggcatcct

SEQ ID NO: 675339 - DNA, 25 bp, Homo sapien
caatcttacatggacaaggtcaccc

SEQ ID NO: 675340 - DNA, 25 bp, Homo sapien
gagtggccttgggagtaactagaaa

SEQ ID NO: 675341 - DNA, 25 bp, Homo sapien
gaaggtcaatggtgcctaacagggc

SEQ ID NO: 675342 - DNA, 25 bp, Homo sapien
tagctagggccaacattgtaaacca

SEQ ID NO: 675343 - DNA, 25 bp, Homo sapien
agtgactgtgtttcagctaccaaaa

SEQ ID NO: 675344 - DNA, 25 bp, Homo sapien
ctgaagtaggaaaacctatcctggc

SEQ ID NO: 675345 - DNA, 25 bp, Homo sapien
taatgctacaaggtttggcatggcc

SEQ ID NO: 675346 - DNA, 25 bp, Homo sapien
tttcgagttgtgttattctccccac

SEQ ID NO: 675347 - DNA, 25 bp, Homo sapien
taatgagttgagtaagagcttttga

SEQ ID NO: 675348 - DNA, 25 bp, Homo sapien
cttttgaggctttcgagttgtgtta

SEQ ID NO: 675349 - DNA, 25 bp, Homo sapien
tgagttgagtaagagcttttgaggc

SEQ ID NO: 675350 - DNA, 25 bp, Homo sapien
cacaaaataccagataacatagtgg

SEQ ID NO: 675351 - DNA, 25 bp, Homo sapien
acatagtggtcgttccagagtccag

SEQ ID NO: 675352 - DNA, 25 bp, Homo sapien
aaagatctggatcagtcattgcctg

SEQ ID NO: 675353 - DNA, 25 bp, Homo sapien
cacaaagatctggatcagtcattgc

SEQ ID NO: 675354 - DNA, 25 bp, Homo sapien
cagatataagactcccttgagcagt

SEQ ID NO: 675355 - DNA, 25 bp, Homo sapien
atataagactcccttgagcagttca

SEQ ID NO: 675356 - DNA, 25 bp, Homo sapien
ttgtgtattggctcttctagtgagt

SEQ ID NO: 675357 - DNA, 25 bp, Homo sapien
ctttgtgtattggctcttctagtga

SEQ ID NO: 675358 - DNA, 25 bp, Homo sapien
ggtaattcccctatatgtgacttaa

SEQ ID NO: 675359 - DNA, 25 bp, Homo sapien
ctaatggagattcatagctaatggt

SEQ ID NO: 675360 - DNA, 25 bp, Homo sapien
tttgacaagttaactataatgtgcc

SEQ ID NO: 675361 - DNA, 25 bp, Homo sapien
cctgtttgggctgaatcaatctggg

SEQ ID NO: 675362 - DNA, 25 bp, Homo sapien
caaatactcacagctcccaatcctc

SEQ ID NO: 675363 - DNA, 25 bp, Homo sapien
ccattcatgagttgtttctgtctac

SEQ ID NO: 675364 - DNA, 25 bp, Homo sapien
gacactgtgactgagagtccattac

SEQ ID NO: 675365 - DNA, 25 bp, Homo sapien
gagtccattacatgaaagggcagtt

SEQ ID NO: 675366 - DNA, 25 bp, Homo sapien
aatatagtccttgagttttttgcct

SEQ ID NO: 675367 - DNA, 25 bp, Homo sapien
cacatgaatatttgtctaaagcatg

SEQ ID NO: 675368 - DNA, 25 bp, Homo sapien
tatagtccttgagttttttgcctat

SEQ ID NO: 675369 - DNA, 25 bp, Homo sapien
tagtccttgagttttttgcctatac

SEQ ID NO: 675370 - DNA, 25 bp, Homo sapien
gtggctattcacagtattgtaattt

SEQ ID NO: 675371 - DNA, 25 bp, Homo sapien
cgactgggctttcgtaacttctaag

SEQ ID NO: 675372 - DNA, 25 bp, Homo sapien
tcttgcttcgactgggctttcgtaa

SEQ ID NO: 675373 - DNA, 25 bp, Homo sapien
aagtactacccatctcttgcttcga

SEQ ID NO: 675374 - DNA, 25 bp, Homo sapien
ctctcgccagggaccaggtaccagg

SEQ ID NO: 675375 - DNA, 25 bp, Homo sapien
ccaggtaccagggtgggtgtcctct

SEQ ID NO: 675376 - DNA, 25 bp, Homo sapien
cagggaccaggtaccagggtgggtg

SEQ ID NO: 675377 - DNA, 25 bp, Homo sapien
tcgccagggaccaggtaccagggtg

SEQ ID NO: 675378 - DNA, 25 bp, Homo sapien
atttgggaccctgatgttctgggcc

SEQ ID NO: 675379 - DNA, 25 bp, Homo sapien
caggtttgctctggttttgagtttc

SEQ ID NO: 675380 - DNA, 25 bp, Homo sapien
aacagttcattatttgggaccctga

SEQ ID NO: 675381 - DNA, 25 bp, Homo sapien
tcattttgcatcaagtgatttaaac

SEQ ID NO: 675382 - DNA, 25 bp, Homo sapien
gggcttctccacacaatcccttgag

SEQ ID NO: 675383 - DNA, 25 bp, Homo sapien
tggtgggcagagcatgaagcaccca

SEQ ID NO: 675384 - DNA, 25 bp, Homo sapien
tatattgctgaatctgtgggaagct

SEQ ID NO: 675385 - DNA, 25 bp, Homo sapien
tcgggatccaggagcttagacagct

SEQ ID NO: 675386 - DNA, 25 bp, Homo sapien
atcatgcccccacgggagcagtgga

SEQ ID NO: 675387 - DNA, 25 bp, Homo sapien
gggccaagggcacatatggagtctg

SEQ ID NO: 675388 - DNA, 25 bp, Homo sapien
caataacatcatgcccccacgggag

SEQ ID NO: 675389 - DNA, 25 bp, Homo sapien
gcaggggcccatggtattgctgggg

SEQ ID NO: 675390 - DNA, 25 bp, Homo sapien
ctatttcccatgctctggtcagcgg

SEQ ID NO: 675391 - DNA, 25 bp, Homo sapien
gagggccatgagtgcccctggaaat

SEQ ID NO: 675392 - DNA, 25 bp, Homo sapien
tccagaattaccaaagaagctccag

SEQ ID NO: 675393 - DNA, 25 bp, Homo sapien
tcagcaccagcctttatcgggaaag

SEQ ID NO: 675394 - DNA, 25 bp, Homo sapien
ctaattcggaatcagacctcacagt

SEQ ID NO: 675395 - DNA, 25 bp, Homo sapien
tctccagcttgacaattctcatcca

SEQ ID NO: 675396 - DNA, 25 bp, Homo sapien
gacctcacagtccagttggggttca

SEQ ID NO: 675397 - DNA, 25 bp, Homo sapien
attcggaatcagacctcacagtcca

SEQ ID NO: 675398 - DNA, 25 bp, Homo sapien
caccagaacttttggacaatcaccg

SEQ ID NO: 675399 - DNA, 25 bp, Homo sapien
gcccaccagaacttttggacaatca

SEQ ID NO: 675400 - DNA, 25 bp, Homo sapien
ccaccagaacttttggacaatcacc

SEQ ID NO: 675401 - DNA, 25 bp, Homo sapien
cccaccagaacttttggacaatcac

SEQ ID NO: 675402 - DNA, 25 bp, Homo sapien
atcacacagctcctcacacggaagg

SEQ ID NO: 675403 - DNA, 25 bp, Homo sapien
acagccggtgctgcagcatttatgc

SEQ ID NO: 675404 - DNA, 25 bp, Homo sapien
ccctcaatgtctccgaggcaggtgc

SEQ ID NO: 675405 - DNA, 25 bp, Homo sapien
gccggtgctgcagcatttatgcccc

SEQ ID NO: 675406 - DNA, 25 bp, Homo sapien
cataatcaaagcattggagcccaga

SEQ ID NO: 675407 - DNA, 25 bp, Homo sapien
ctacataatcaaagcattggagccc

SEQ ID NO: 675408 - DNA, 25 bp, Homo sapien
gcattggagcccagagacgctcaca

SEQ ID NO: 675409 - DNA, 25 bp, Homo sapien
ccagagacgctcacaatatgaaaca

SEQ ID NO: 675410 - DNA, 25 bp, Homo sapien
ttccaggccaggcttcctggaggcc

SEQ ID NO: 675411 - DNA, 25 bp, Homo sapien
ccttttccaggccaggcttcctgga

SEQ ID NO: 675412 - DNA, 25 bp, Homo sapien
acccttttccaggccaggcttcctg

SEQ ID NO: 675413 - DNA, 25 bp, Homo sapien
aggccaggcttcctggaggcccaga

SEQ ID NO: 675414 - DNA, 25 bp, Homo sapien
gaaagttctctactgggggctggtc

SEQ ID NO: 675415 - DNA, 25 bp, Homo sapien
tgaaagttctctactgggggctggt

SEQ ID NO: 675416 - DNA, 25 bp, Homo sapien
tccaacctcaaatgaaagcagcctc

SEQ ID NO: 675417 - DNA, 25 bp, Homo sapien
caacctcaaatgaaagcagcctcct

SEQ ID NO: 675418 - DNA, 25 bp, Homo sapien
ctctccaacctcaaatgaaagcagc

SEQ ID NO: 675419 - DNA, 25 bp, Homo sapien
acctcaaatgaaagcagcctccttc

SEQ ID NO: 675420 - DNA, 25 bp, Homo sapien
tcaaacaggattgtttccgaataac

SEQ ID NO: 675421 - DNA, 25 bp, Homo sapien
tttagagattgggactacacagctc

SEQ ID NO: 675422 - DNA, 25 bp, Homo sapien
cagcatttctttacacctggacatg

SEQ ID NO: 675423 - DNA, 25 bp, Homo sapien
cttgttgcagccaagcgtgcagcat

SEQ ID NO: 675424 - DNA, 25 bp, Homo sapien
tactctaggcaagggagacttccag

SEQ ID NO: 675425 - DNA, 25 bp, Homo sapien
gagagtatgcccagattttgcccct

SEQ ID NO: 675426 - DNA, 25 bp, Homo sapien
caatggtgcgctctttcctgatgga

SEQ ID NO: 675427 - DNA, 25 bp, Homo sapien
tatttaagcctctcaaccctggtgc

SEQ ID NO: 675428 - DNA, 25 bp, Homo sapien
gaccacagcctgtggtgcagcactt

SEQ ID NO: 675429 - DNA, 25 bp, Homo sapien
ctctttgcatgggttcttatgggga

SEQ ID NO: 675430 - DNA, 25 bp, Homo sapien
ggaatgtctcggcagatccgaccac

SEQ ID NO: 675431 - DNA, 25 bp, Homo sapien
gacacaattcatcaccctggcacag

SEQ ID NO: 675432 - DNA, 25 bp, Homo sapien
tgcagttatccaggattccagagac

SEQ ID NO: 675433 - DNA, 25 bp, Homo sapien
ccagagacccaagagcaagaagtgc

SEQ ID NO: 675434 - DNA, 25 bp, Homo sapien
ggattccagagacccaagagcaaga

SEQ ID NO: 675435 - DNA, 25 bp, Homo sapien
gcagttatccaggattccagagacc

SEQ ID NO: 675436 - DNA, 25 bp, Homo sapien
cttcagaagaaagaggcagcttaac

SEQ ID NO: 675437 - DNA, 25 bp, Homo sapien
gaagaaagaggcagcttaacatcat

SEQ ID NO: 675438 - DNA, 25 bp, Homo sapien
agaagaaagaggcagcttaacatca

SEQ ID NO: 675439 - DNA, 25 bp, Homo sapien
tcagaagaaagaggcagcttaacat

SEQ ID NO: 675440 - DNA, 25 bp, Homo sapien
gtatcagctgaggtatgagcaggac

SEQ ID NO: 675441 - DNA, 25 bp, Homo sapien
tcagttcaggctagaggtgtacacc

SEQ ID NO: 675442 - DNA, 25 bp, Homo sapien
cacaatactccccaagaatatcttc

SEQ ID NO: 675443 - DNA, 25 bp, Homo sapien
tgagagttgggacaagagctcagtt

SEQ ID NO: 675444 - DNA, 25 bp, Homo sapien
aatcgaggcgcagccctcccgagag

SEQ ID NO: 675445 - DNA, 25 bp, Homo sapien
cgagaggaagccccaacgacctcca

SEQ ID NO: 675446 - DNA, 25 bp, Homo sapien
acaatcgaggcgcagccctcccgag

SEQ ID NO: 675447 - DNA, 25 bp, Homo sapien
actgcacaatcgaggcgcagccctc

SEQ ID NO: 675448 - DNA, 25 bp, Homo sapien
ttcccatggtaaccccgcagctcca

SEQ ID NO: 675449 - DNA, 25 bp, Homo sapien
aggcgcggcggttcggttcccatgg

SEQ ID NO: 675450 - DNA, 25 bp, Homo sapien
aagtgtaactgtcctgggcgaggcg

SEQ ID NO: 675451 - DNA, 25 bp, Homo sapien
tgggcgaggcgcggcggttcggttc

SEQ ID NO: 675452 - DNA, 25 bp, Homo sapien
aagaaggctaagaaagaacggccag

SEQ ID NO: 675453 - DNA, 25 bp, Homo sapien
gaaccagattgagaaggaaaagcca

SEQ ID NO: 675454 - DNA, 25 bp, Homo sapien
aagaacggccagagaagtagaagga

SEQ ID NO: 675455 - DNA, 25 bp, Homo sapien
gggaaaagaaccagattgagaagga

SEQ ID NO: 675456 - DNA, 25 bp, Homo sapien
gaggtcgggtgaacccaattctcca

SEQ ID NO: 675457 - DNA, 25 bp, Homo sapien
cagaggtcgggtgaacccaattctc

SEQ ID NO: 675458 - DNA, 25 bp, Homo sapien
ggcagaggtcgggtgaacccaattc

SEQ ID NO: 675459 - DNA, 25 bp, Homo sapien
gcagaggtcgggtgaacccaattct

SEQ ID NO: 675460 - DNA, 25 bp, Homo sapien
gtaacatatgcctggacatcctgaa

SEQ ID NO: 675461 - DNA, 25 bp, Homo sapien
ggtaacatatgcctggacatcctga

SEQ ID NO: 675462 - DNA, 25 bp, Homo sapien
taacatatgcctggacatcctgaag

SEQ ID NO: 675463 - DNA, 25 bp, Homo sapien
agaacccaacattgatagtcccttg

SEQ ID NO: 675464 - DNA, 25 bp, Homo sapien
gatagtcccttgaacacacatgctg

SEQ ID NO: 675465 - DNA, 25 bp, Homo sapien
ttgatagtcccttgaacacacatgc

SEQ ID NO: 675466 - DNA, 25 bp, Homo sapien
ccaacattgatagtcccttgaacac

SEQ ID NO: 675467 - DNA, 25 bp, Homo sapien
aacctactcaaagcaggtcaccagc

SEQ ID NO: 675468 - DNA, 25 bp, Homo sapien
gtataggactctttatcttgagctg

SEQ ID NO: 675469 - DNA, 25 bp, Homo sapien
taagcctcggttgagcccttgtata

SEQ ID NO: 675470 - DNA, 25 bp, Homo sapien
gcttttaagaagtacctgcaagaaa

SEQ ID NO: 675471 - DNA, 25 bp, Homo sapien
caaagacccacaaggggtcgcgcct

SEQ ID NO: 675472 - DNA, 25 bp, Homo sapien
tattccttccagacaaagacccaca

SEQ ID NO: 675473 - DNA, 25 bp, Homo sapien
tttattccttccagacaaagaccca

SEQ ID NO: 675474 - DNA, 25 bp, Homo sapien
tccttccagacaaagacccacaagg

SEQ ID NO: 675475 - DNA, 25 bp, Homo sapien
cttggtagaggcgactgtccactcc

SEQ ID NO: 675476 - DNA, 25 bp, Homo sapien
ggcggagtctcccacaccctaggga

SEQ ID NO: 675477 - DNA, 25 bp, Homo sapien
caccctagggacacgcgatcttggt

SEQ ID NO: 675478 - DNA, 25 bp, Homo sapien
gacacgcgatcttggtagaggcgac

SEQ ID NO: 675479 - DNA, 25 bp, Homo sapien
tactgcacgccctccatcatcttca

SEQ ID NO: 675480 - DNA, 25 bp, Homo sapien
acgccctccatcatcttcaggaact

SEQ ID NO: 675481 - DNA, 25 bp, Homo sapien
ttactgcacgccctccatcatcttc

SEQ ID NO: 675482 - DNA, 25 bp, Homo sapien
tgcacgccctccatcatcttcagga

SEQ ID NO: 675483 - DNA, 25 bp, Homo sapien
tcttgtcgccgtctttcatcagaga

SEQ ID NO: 675484 - DNA, 25 bp, Homo sapien
ccgggtcgatgtagccgtctgcatt

SEQ ID NO: 675485 - DNA, 25 bp, Homo sapien
cagagattcgatctcctcgtccgtc

SEQ ID NO: 675486 - DNA, 25 bp, Homo sapien
cgtcgaagtcaatgcggccgtcgtt

SEQ ID NO: 675487 - DNA, 25 bp, Homo sapien
tccgagggacagggcagggctcagg

SEQ ID NO: 675488 - DNA, 25 bp, Homo sapien
aggtccgagggacagggcagggctc

SEQ ID NO: 675489 - DNA, 25 bp, Homo sapien
ttcaggtccgagggacagggcaggg

SEQ ID NO: 675490 - DNA, 25 bp, Homo sapien
cttcaggtccgagggacagggcagg

SEQ ID NO: 675491 - DNA, 25 bp, Homo sapien
gtcgaagatgcggaagcactcggcc

SEQ ID NO: 675492 - DNA, 25 bp, Homo sapien
agaactcctcgaagtcgatggtgcc

SEQ ID NO: 675493 - DNA, 25 bp, Homo sapien
tccctttcgcgtcctctttcatctg

SEQ ID NO: 675494 - DNA, 25 bp, Homo sapien
tggcgcaccatcatgaccaagaact

SEQ ID NO: 675495 - DNA, 25 bp, Homo sapien
agcatcctcatcaccgtgcccaact

SEQ ID NO: 675496 - DNA, 25 bp, Homo sapien
gtgcccaactccttgacgctgatgt

SEQ ID NO: 675497 - DNA, 25 bp, Homo sapien
acctcctcgatgatggcgtccagct

SEQ ID NO: 675498 - DNA, 25 bp, Homo sapien
catcagcatcaaacatgtcaaaggc

SEQ ID NO: 675499 - DNA, 25 bp, Homo sapien
tcttcgctgaggtaggacctggcct

SEQ ID NO: 675500 - DNA, 25 bp, Homo sapien
ttcgctgaggtaggacctggcctca

SEQ ID NO: 675501 - DNA, 25 bp, Homo sapien
ctcttcgctgaggtaggacctggcc

SEQ ID NO: 675502 - DNA, 25 bp, Homo sapien
cgctgaggtaggacctggcctcagc

SEQ ID NO: 675503 - DNA, 25 bp, Homo sapien
ctggtgaccgggactcctctgttgc

SEQ ID NO: 675504 - DNA, 25 bp, Homo sapien
tgaccgggactcctctgttgcaggt

SEQ ID NO: 675505 - DNA, 25 bp, Homo sapien
ggactcctctgttgcaggtcgcctc

SEQ ID NO: 675506 - DNA, 25 bp, Homo sapien
accgggactcctctgttgcaggtcg

SEQ ID NO: 675507 - DNA, 25 bp, Homo sapien
ggttcaaatcagattgtgcaagcct

SEQ ID NO: 675508 - DNA, 25 bp, Homo sapien
tcaaatcagattgtgcaagcctgtg

SEQ ID NO: 675509 - DNA, 25 bp, Homo sapien
ttcaaatcagattgtgcaagcctgt

SEQ ID NO: 675510 - DNA, 25 bp, Homo sapien
tgaggttcaaatcagattgtgcaag

SEQ ID NO: 675511 - DNA, 25 bp, Homo sapien
tccctcaggccgacccaggcttccc

SEQ ID NO: 675512 - DNA, 25 bp, Homo sapien
actgggatgactctgcggcaggcct

SEQ ID NO: 675513 - DNA, 25 bp, Homo sapien
tggccggactgggatgactctgcgg

SEQ ID NO: 675514 - DNA, 25 bp, Homo sapien
ccggactgggatgactctgcggcag

SEQ ID NO: 675515 - DNA, 25 bp, Homo sapien
taagcaaacctaactgaccaggagt

SEQ ID NO: 675516 - DNA, 25 bp, Homo sapien
catattcaggttctcagacctggga

SEQ ID NO: 675517 - DNA, 25 bp, Homo sapien
gagtggctagagtattgtcagttcc

SEQ ID NO: 675518 - DNA, 25 bp, Homo sapien
tacactgtgaatcttcaagaggaca

SEQ ID NO: 675519 - DNA, 25 bp, Homo sapien
aaagtactgggattacaggtatgag

SEQ ID NO: 675520 - DNA, 25 bp, Homo sapien
actcctggccttaagctgttctcct

SEQ ID NO: 675521 - DNA, 25 bp, Homo sapien
tcctggccttaagctgttctcctgc

SEQ ID NO: 675522 - DNA, 25 bp, Homo sapien
ccaaagtactgggattacaggtatg

SEQ ID NO: 675523 - DNA, 25 bp, Homo sapien
aatcccagctactcgggagattgag

SEQ ID NO: 675524 - DNA, 25 bp, Homo sapien
gccggatgtggtggtaggcgcctgt

SEQ ID NO: 675525 - DNA, 25 bp, Homo sapien
attagccggatgtggtggtaggcgc

SEQ ID NO: 675526 - DNA, 25 bp, Homo sapien
tagccggatgtggtggtaggcgcct

SEQ ID NO: 675527 - DNA, 25 bp, Homo sapien
gaggtgctggactaacccttgccta

SEQ ID NO: 675528 - DNA, 25 bp, Homo sapien
gaattgctcatcaaggaggtgctgg

SEQ ID NO: 675529 - DNA, 25 bp, Homo sapien
gctgggagcccctagaagttccaaa

SEQ ID NO: 675530 - DNA, 25 bp, Homo sapien
tggacaaacgtcaatcagaggctcg

SEQ ID NO: 675531 - DNA, 25 bp, Homo sapien
gatagatgggaggttcttgaagccc

SEQ ID NO: 675532 - DNA, 25 bp, Homo sapien
ccccaggcgaagctggtacctctgg

SEQ ID NO: 675533 - DNA, 25 bp, Homo sapien
cagtctctttattggatgtgagggc

SEQ ID NO: 675534 - DNA, 25 bp, Homo sapien
gactgtaactcctgtctcaggaatg

SEQ ID NO: 675535 - DNA, 25 bp, Homo sapien
gacctggggcttcactcggatcacg

SEQ ID NO: 675536 - DNA, 25 bp, Homo sapien
tggggcttcactcggatcacgccct

SEQ ID NO: 675537 - DNA, 25 bp, Homo sapien
ggcttcactcggatcacgccctcct

SEQ ID NO: 675538 - DNA, 25 bp, Homo sapien
acctggggcttcactcggatcacgc

SEQ ID NO: 675539 - DNA, 25 bp, Homo sapien
agctaggactccatcctgacgccac

SEQ ID NO: 675540 - DNA, 25 bp, Homo sapien
tcctgacgccacagccgcccatgga

SEQ ID NO: 675541 - DNA, 25 bp, Homo sapien
cgcccatggaccagcccccgagagc

SEQ ID NO: 675542 - DNA, 25 bp, Homo sapien
taggactccatcctgacgccacagc

SEQ ID NO: 675543 - DNA, 25 bp, Homo sapien
tgttaggaaaactatcggctccctg

SEQ ID NO: 675544 - DNA, 25 bp, Homo sapien
gaatgccccgatcccaatcaggtta

SEQ ID NO: 675545 - DNA, 25 bp, Homo sapien
tataataaatcaagccaggtcctcc

SEQ ID NO: 675546 - DNA, 25 bp, Homo sapien
tggtttcccttacacatagcagagc

SEQ ID NO: 675547 - DNA, 25 bp, Homo sapien
gaagtcgggaaatcagcatcaccca

SEQ ID NO: 675548 - DNA, 25 bp, Homo sapien
aggtcagtgcccttgtcccacacgg

SEQ ID NO: 675549 - DNA, 25 bp, Homo sapien
tgccactcaaggtcagtgcccttgt

SEQ ID NO: 675550 - DNA, 25 bp, Homo sapien
ctgtgcagcgccacacaggaagtcg

SEQ ID NO: 675551 - DNA, 25 bp, Homo sapien
tgagaccatgaagtgcaccttgtgc

SEQ ID NO: 675552 - DNA, 25 bp, Homo sapien
cagtgcagtgcccaagaaggcatag

SEQ ID NO: 675553 - DNA, 25 bp, Homo sapien
catagtcggagatataggcggccac

SEQ ID NO: 675554 - DNA, 25 bp, Homo sapien
gcagtgcatcttcatgtcgccctcg

SEQ ID NO: 675555 - DNA, 25 bp, Homo sapien
ctgcaacaggtccccatcagccctg

SEQ ID NO: 675556 - DNA, 25 bp, Homo sapien
gctcctgggctttccagctcaggac

SEQ ID NO: 675557 - DNA, 25 bp, Homo sapien
gcaacaggtccccatcagccctggg

SEQ ID NO: 675558 - DNA, 25 bp, Homo sapien
tgggctcctgggctttccagctcag

SEQ ID NO: 675559 - DNA, 25 bp, Homo sapien
tgcacaagagcgcttggcctacagt

SEQ ID NO: 675560 - DNA, 25 bp, Homo sapien
aacaaccccagcgaggtgccttttg

SEQ ID NO: 675561 - DNA, 25 bp, Homo sapien
cccagagaagggaactcatgtgccc

SEQ ID NO: 675562 - DNA, 25 bp, Homo sapien
caaatgagtggtagaccccttggag

SEQ ID NO: 675563 - DNA, 25 bp, Homo sapien
gttgagcgccaatgggtacctcttt

SEQ ID NO: 675564 - DNA, 25 bp, Homo sapien
cgggctcgcacccagaacatctgtt

SEQ ID NO: 675565 - DNA, 25 bp, Homo sapien
caattcggttgagcgccaatgggta

SEQ ID NO: 675566 - DNA, 25 bp, Homo sapien
ctcctgagcagcaattcggttgagc

SEQ ID NO: 675567 - DNA, 25 bp, Homo sapien
caggcaggatagtgcagcgtttgaa

SEQ ID NO: 675568 - DNA, 25 bp, Homo sapien
gcgtttgaatcccttcttggccact

SEQ ID NO: 675569 - DNA, 25 bp, Homo sapien
tggccacttacgagccatgtggtct

SEQ ID NO: 675570 - DNA, 25 bp, Homo sapien
catgtggtctcgtgctaattagtaa

SEQ ID NO: 675571 - DNA, 25 bp, Homo sapien
gagacaggatttggactcaggcaat

SEQ ID NO: 675572 - DNA, 25 bp, Homo sapien
tcatagtaataaggcataccctgta

SEQ ID NO: 675573 - DNA, 25 bp, Homo sapien
catacaatagtattcctcacaacaa

SEQ ID NO: 675574 - DNA, 25 bp, Homo sapien
ccaggtagcttgcttaaaaattgga

SEQ ID NO: 675575 - DNA, 25 bp, Homo sapien
tgagttaccaaaccctacacagtag

SEQ ID NO: 675576 - DNA, 25 bp, Homo sapien
gggaggagcccattccaaggaactc

SEQ ID NO: 675577 - DNA, 25 bp, Homo sapien
tacacagtagggaacattgcatccc

SEQ ID NO: 675578 - DNA, 25 bp, Homo sapien
cttcattattttaaacactcaagaa

SEQ ID NO: 675579 - DNA, 25 bp, Homo sapien
gctctgcacaggtcctgccattttc

SEQ ID NO: 675580 - DNA, 25 bp, Homo sapien
tctgcacaggtcctgccattttcac

SEQ ID NO: 675581 - DNA, 25 bp, Homo sapien
tgcacaggtcctgccattttcaccc

SEQ ID NO: 675582 - DNA, 25 bp, Homo sapien
agtgctctgcacaggtcctgccatt

SEQ ID NO: 675583 - DNA, 25 bp, Homo sapien
gatggaatgcctatctgcacagcac

SEQ ID NO: 675584 - DNA, 25 bp, Homo sapien
tatgatgatggaatgcctatctgca

SEQ ID NO: 675585 - DNA, 25 bp, Homo sapien
atctgcacagcacactatggtagcc

SEQ ID NO: 675586 - DNA, 25 bp, Homo sapien
cacagcacactatggtagccactag

SEQ ID NO: 675587 - DNA, 25 bp, Homo sapien
taaatactggtcaatgagggtctca

SEQ ID NO: 675588 - DNA, 25 bp, Homo sapien
cttaaatactggtcaatgagggtct

SEQ ID NO: 675589 - DNA, 25 bp, Homo sapien
ttaaatactggtcaatgagggtctc

SEQ ID NO: 675590 - DNA, 25 bp, Homo sapien
gaagctcgaccctgttcgtgtccgc

SEQ ID NO: 675591 - DNA, 25 bp, Homo sapien
tgggcatggagaactggtgctgcat

SEQ ID NO: 675592 - DNA, 25 bp, Homo sapien
acagagcgcaccgagaagctcgacc

SEQ ID NO: 675593 - DNA, 25 bp, Homo sapien
gcagatgaagatgggcttcccatgt

SEQ ID NO: 675594 - DNA, 25 bp, Homo sapien
ttttctctaacagcacaaacagcag

SEQ ID NO: 675595 - DNA, 25 bp, Homo sapien
tcatcatggtgctcatcgcttacag

SEQ ID NO: 675596 - DNA, 25 bp, Homo sapien
tcatcatcacaacgcctgacaggca

SEQ ID NO: 675597 - DNA, 25 bp, Homo sapien
cagtgactactaactgaggtctgct

SEQ ID NO: 675598 - DNA, 25 bp, Homo sapien
agccctgcactagatactttactgg

SEQ ID NO: 675599 - DNA, 25 bp, Homo sapien
aaactagattatgccaagccctgca

SEQ ID NO: 675600 - DNA, 25 bp, Homo sapien
cataaagataagaacctggctgagc

SEQ ID NO: 675601 - DNA, 25 bp, Homo sapien
caggtatttcactaggctggaagga

SEQ ID NO: 675602 - DNA, 25 bp, Homo sapien
aaggtccacaaactcttctcagctg

SEQ ID NO: 675603 - DNA, 25 bp, Homo sapien
acgtggacgtcttcactcacagact

SEQ ID NO: 675604 - DNA, 25 bp, Homo sapien
agcctcttggccggtacccagtaat

SEQ ID NO: 675605 - DNA, 25 bp, Homo sapien
cagggagtgcacgtggacgtcttca

SEQ ID NO: 675606 - DNA, 25 bp, Homo sapien
ggcccacgatctgaccaccaaacag

SEQ ID NO: 675607 - DNA, 25 bp, Homo sapien
ctgcggcgtcggttttaaggctgat

SEQ ID NO: 675608 - DNA, 25 bp, Homo sapien
tgaagacacaaggagctgcggcgtc

SEQ ID NO: 675609 - DNA, 25 bp, Homo sapien
acgcagagccatactagtcccggag

SEQ ID NO: 675610 - DNA, 25 bp, Homo sapien
ggcgagttctctcctaatcgtggca

SEQ ID NO: 675611 - DNA, 25 bp, Homo sapien
ctcgaggttgagcacggtcgtgacc

SEQ ID NO: 675612 - DNA, 25 bp, Homo sapien
tcgtccagcggctcgaggttgagca

SEQ ID NO: 675613 - DNA, 25 bp, Homo sapien
tgagcacggtcgtgaccaagacgct

SEQ ID NO: 675614 - DNA, 25 bp, Homo sapien
caagacgctacggaggtccccaggg

SEQ ID NO: 675615 - DNA, 25 bp, Homo sapien
acccgctccgcggaagacgcggaga

SEQ ID NO: 675616 - DNA, 25 bp, Homo sapien
gcggaagacgcggagacatacacag

SEQ ID NO: 675617 - DNA, 25 bp, Homo sapien
gacgcggagacatacacagaacctg

SEQ ID NO: 675618 - DNA, 25 bp, Homo sapien
ctagttcaatgctgcaggccctgca

SEQ ID NO: 675619 - DNA, 25 bp, Homo sapien
tgttcccagactcctggactaagcg

SEQ ID NO: 675620 - DNA, 25 bp, Homo sapien
gccttcagggattaggtgaaacaac

SEQ ID NO: 675621 - DNA, 25 bp, Homo sapien
tatgcatgctttaccctgcagggct

SEQ ID NO: 675622 - DNA, 25 bp, Homo sapien
gactaagcgatctttcggcgtctca

SEQ ID NO: 675623 - DNA, 25 bp, Homo sapien
ttggcaggacccttgttatcagagt

SEQ ID NO: 675624 - DNA, 25 bp, Homo sapien
tttggcaggacccttgttatcagag

SEQ ID NO: 675625 - DNA, 25 bp, Homo sapien
tccagagcagtaagatgaccgacct

SEQ ID NO: 675626 - DNA, 25 bp, Homo sapien
tctttcgggaacagcagtcgctgct

SEQ ID NO: 675627 - DNA, 25 bp, Homo sapien
gagaatctcttgctacaccgggtgg

SEQ ID NO: 675628 - DNA, 25 bp, Homo sapien
gagttcaactccgattggcccaagg

SEQ ID NO: 675629 - DNA, 25 bp, Homo sapien
gcagctggagggtcatcttgcccga

SEQ ID NO: 675630 - DNA, 25 bp, Homo sapien
gaataattgaagagccaggtccctg

SEQ ID NO: 675631 - DNA, 25 bp, Homo sapien
ttgagagactcaaagccccgtggtc

SEQ ID NO: 675632 - DNA, 25 bp, Homo sapien
tgaccttggcatttggacagctccc

SEQ ID NO: 675633 - DNA, 25 bp, Homo sapien
gagaaggagtctgtctccgtcaccc

SEQ ID NO: 675634 - DNA, 25 bp, Homo sapien
caggtggccacatacagtctctgtt

SEQ ID NO: 675635 - DNA, 25 bp, Homo sapien
tttgagaaggagtctgtctccgtca

SEQ ID NO: 675636 - DNA, 25 bp, Homo sapien
acagtctctgttgtatattcttggt

SEQ ID NO: 675637 - DNA, 25 bp, Homo sapien
ggtcctatgacctgccttcaacatg

SEQ ID NO: 675638 - DNA, 25 bp, Homo sapien
tccacagggtatgttcacagagcag

SEQ ID NO: 675639 - DNA, 25 bp, Homo sapien
cagagcaggcatacctagtgggtgc

SEQ ID NO: 675640 - DNA, 25 bp, Homo sapien
gcaacccctggtctaagataagaga

SEQ ID NO: 675641 - DNA, 25 bp, Homo sapien
acatatctggtgctatttcatccat

SEQ ID NO: 675642 - DNA, 25 bp, Homo sapien
ctacatatctggtgctatttcatcc

SEQ ID NO: 675643 - DNA, 25 bp, Homo sapien
tacatatctggtgctatttcatcca

SEQ ID NO: 675644 - DNA, 25 bp, Homo sapien
cctacatatctggtgctatttcatc

SEQ ID NO: 675645 - DNA, 25 bp, Homo sapien
gagccaggaggctggccccttttag

SEQ ID NO: 675646 - DNA, 25 bp, Homo sapien
gaggctggccccttttagatctcac

SEQ ID NO: 675647 - DNA, 25 bp, Homo sapien
ggaggctggccccttttagatctca

SEQ ID NO: 675648 - DNA, 25 bp, Homo sapien
ccaggaggctggccccttttagatc

SEQ ID NO: 675649 - DNA, 25 bp, Homo sapien
tgcctcagagggtaccggtagaacc

SEQ ID NO: 675650 - DNA, 25 bp, Homo sapien
catcatgaaagcttgagcggcccag

SEQ ID NO: 675651 - DNA, 25 bp, Homo sapien
cagctgcctcacatgcgggaatttg

SEQ ID NO: 675652 - DNA, 25 bp, Homo sapien
ccagcgatcatcatggcgagggtga

SEQ ID NO: 675653 - DNA, 25 bp, Homo sapien
tacagaggccaagggacaagcctgg

SEQ ID NO: 675654 - DNA, 25 bp, Homo sapien
ctacagaggccaagggacaagcctg

SEQ ID NO: 675655 - DNA, 25 bp, Homo sapien
agggacaagcctggagaagcagccc

SEQ ID NO: 675656 - DNA, 25 bp, Homo sapien
gacaagcctggagaagcagccccac

SEQ ID NO: 675657 - DNA, 25 bp, Homo sapien
aaggcagaggacctggatgagtttg

SEQ ID NO: 675658 - DNA, 25 bp, Homo sapien
gtttgtggagtcctgaagtaggaca

SEQ ID NO: 675659 - DNA, 25 bp, Homo sapien
gatgagtttgtggagtcctgaagta

SEQ ID NO: 675660 - DNA, 25 bp, Homo sapien
cagaggacctggatgagtttgtgga

SEQ ID NO: 675661 - DNA, 25 bp, Homo sapien
gtttgtgagggaatagtgatctgcc

SEQ ID NO: 675662 - DNA, 25 bp, Homo sapien
agccccggtttgtgagggaatagtg

SEQ ID NO: 675663 - DNA, 25 bp, Homo sapien
cccggtttgtgagggaatagtgatc

SEQ ID NO: 675664 - DNA, 25 bp, Homo sapien
ttgtgagggaatagtgatctgccgc

SEQ ID NO: 675665 - DNA, 25 bp, Homo sapien
gaagtgactctcataggctgtaggg

SEQ ID NO: 675666 - DNA, 25 bp, Homo sapien
gatgtgggacaccagcactctttac

SEQ ID NO: 675667 - DNA, 25 bp, Homo sapien
caaatcaaatacgaatccctaggga

SEQ ID NO: 675668 - DNA, 25 bp, Homo sapien
cctgcagtgattctaaacgaagtga

SEQ ID NO: 675669 - DNA, 25 bp, Homo sapien
aatgtggccaacttcggaccagcca

SEQ ID NO: 675670 - DNA, 25 bp, Homo sapien
ggatgcagctgtgctctggtgcact

SEQ ID NO: 675671 - DNA, 25 bp, Homo sapien
tgtggccaacttcggaccagccagc

SEQ ID NO: 675672 - DNA, 25 bp, Homo sapien
gtggccaacttcggaccagccagcc

SEQ ID NO: 675673 - DNA, 25 bp, Homo sapien
tccttaagttctttgggcaggtgga

SEQ ID NO: 675674 - DNA, 25 bp, Homo sapien
cggtgcaccatgctcctttgtatca

SEQ ID NO: 675675 - DNA, 25 bp, Homo sapien
atcactaggcggcacagagtctgca

SEQ ID NO: 675676 - DNA, 25 bp, Homo sapien
tggagcccatcaatggccagccggt

SEQ ID NO: 675677 - DNA, 25 bp, Homo sapien
tccagaaggtctaggtcatggtccc

SEQ ID NO: 675678 - DNA, 25 bp, Homo sapien
ggtagtgtctgatttgcctgtgcaa

SEQ ID NO: 675679 - DNA, 25 bp, Homo sapien
gcctgtgcaactgaagcctccagca

SEQ ID NO: 675680 - DNA, 25 bp, Homo sapien
tgaaaggcaaactgaactggagggt

SEQ ID NO: 675681 - DNA, 25 bp, Homo sapien
tgcccaggcttgagctagctagctt

SEQ ID NO: 675682 - DNA, 25 bp, Homo sapien
gtttagaatccctgccctaggtgaa

SEQ ID NO: 675683 - DNA, 25 bp, Homo sapien
caaccaagataggtaccaaggccca

SEQ ID NO: 675684 - DNA, 25 bp, Homo sapien
agggaacttgtagggcatcttaatc

SEQ ID NO: 675685 - DNA, 25 bp, Homo sapien
ggaggcagcacgttcagctcataga

SEQ ID NO: 675686 - DNA, 25 bp, Homo sapien
caaggcgcacgctctttgtggaagc

SEQ ID NO: 675687 - DNA, 25 bp, Homo sapien
gatgatgtgcatgtcggccgtgcca

SEQ ID NO: 675688 - DNA, 25 bp, Homo sapien
caatgcgcagatatggttccacgag

SEQ ID NO: 675689 - DNA, 25 bp, Homo sapien
cgtgcgcccgggctacgatctgcga

SEQ ID NO: 675690 - DNA, 25 bp, Homo sapien
ctctcggccatagggcaggccagct

SEQ ID NO: 675691 - DNA, 25 bp, Homo sapien
gcaatgatggtgaccgcaaggcgac

SEQ ID NO: 675692 - DNA, 25 bp, Homo sapien
tagccgtccacaacaggatcatctg

SEQ ID NO: 675693 - DNA, 25 bp, Homo sapien
ggagtggaacccagctgtctgcctt

SEQ ID NO: 675694 - DNA, 25 bp, Homo sapien
ccaacatccaagtcagtcctagaga

SEQ ID NO: 675695 - DNA, 25 bp, Homo sapien
tctctaccgaagcatgaactcccag

SEQ ID NO: 675696 - DNA, 25 bp, Homo sapien
tcccagtatctgaagctgcttagct

SEQ ID NO: 675697 - DNA, 25 bp, Homo sapien
tgtggattccctcaaccagaaggta

SEQ ID NO: 675698 - DNA, 25 bp, Homo sapien
tggaggaattcccagccctaaggtc

SEQ ID NO: 675699 - DNA, 25 bp, Homo sapien
tttctcacgatcaaggtagggactg

SEQ ID NO: 675700 - DNA, 25 bp, Homo sapien
cgtgttatctagcttggccccttga

SEQ ID NO: 675701 - DNA, 25 bp, Homo sapien
taactgggccggaggcaaaggagca

SEQ ID NO: 675702 - DNA, 25 bp, Homo sapien
tgcccccgagtgagcagttatatgg

SEQ ID NO: 675703 - DNA, 25 bp, Homo sapien
catctggcccctgtatgggcaagtt

SEQ ID NO: 675704 - DNA, 25 bp, Homo sapien
ctgagagataactgggccggaggca

SEQ ID NO: 675705 - DNA, 25 bp, Homo sapien
tcctcagggcgccggccacatggtt

SEQ ID NO: 675706 - DNA, 25 bp, Homo sapien
tgaacaagcagccatactgatgacc

SEQ ID NO: 675707 - DNA, 25 bp, Homo sapien
agagccctgtacatcccagactggg

SEQ ID NO: 675708 - DNA, 25 bp, Homo sapien
aagtgcccctgcaggccgggttctg

SEQ ID NO: 675709 - DNA, 25 bp, Homo sapien
gcactacaggctatgaatgtgggaa

SEQ ID NO: 675710 - DNA, 25 bp, Homo sapien
aaatcccgtcttctctgtggcactg

SEQ ID NO: 675711 - DNA, 25 bp, Homo sapien
gattccatcccaggaacccaacaga

SEQ ID NO: 675712 - DNA, 25 bp, Homo sapien
ggtggacggactgtaattgatagat

SEQ ID NO: 675713 - DNA, 25 bp, Homo sapien
gggcagtggacgccctgacatcagc

SEQ ID NO: 675714 - DNA, 25 bp, Homo sapien
ctgacatcagcaggccggttcttct

SEQ ID NO: 675715 - DNA, 25 bp, Homo sapien
aagtggagatcagccccgatggtga

SEQ ID NO: 675716 - DNA, 25 bp, Homo sapien
ggttcttctcaatcacctctcgcag

SEQ ID NO: 675717 - DNA, 25 bp, Homo sapien
acagagtgtttgtctttcaggaact

SEQ ID NO: 675718 - DNA, 25 bp, Homo sapien
tcaagagacagagtgtttgtctttc

SEQ ID NO: 675719 - DNA, 25 bp, Homo sapien
gagacagagtgtttgtctttcagga

SEQ ID NO: 675720 - DNA, 25 bp, Homo sapien
gagtgtttgtctttcaggaactcaa

SEQ ID NO: 675721 - DNA, 25 bp, Homo sapien
aagttgatgccctcaggtagtggga

SEQ ID NO: 675722 - DNA, 25 bp, Homo sapien
cacctcatgcacaaagttgatgccc

SEQ ID NO: 675723 - DNA, 25 bp, Homo sapien
gttcgtcaccacctcatgcacaaag

SEQ ID NO: 675724 - DNA, 25 bp, Homo sapien
gcatggttcgtcaccacctcatgca

SEQ ID NO: 675725 - DNA, 25 bp, Homo sapien
gcatcaccccaatctgcagcatggt

SEQ ID NO: 675726 - DNA, 25 bp, Homo sapien
catcaccccaatctgcagcatggtc

SEQ ID NO: 675727 - DNA, 25 bp, Homo sapien
agccagcgactccagtgcagaatgg

SEQ ID NO: 675728 - DNA, 25 bp, Homo sapien
tccagtgcagaatggttggaataga

SEQ ID NO: 675729 - DNA, 25 bp, Homo sapien
cagtgcagaatggttggaatagatt

SEQ ID NO: 675730 - DNA, 25 bp, Homo sapien
gtgcagaatggttggaatagattcg

SEQ ID NO: 675731 - DNA, 25 bp, Homo sapien
tagcacagccctagaaggcagatgc

SEQ ID NO: 675732 - DNA, 25 bp, Homo sapien
gctgcctctagaacctagggtccta

SEQ ID NO: 675733 - DNA, 25 bp, Homo sapien
tgaggcctagaaagacaaaatgggc

SEQ ID NO: 675734 - DNA, 25 bp, Homo sapien
gtatctgcaccgtctactatggtag

SEQ ID NO: 675735 - DNA, 25 bp, Homo sapien
ccggagagccatcttggcgctgaga

SEQ ID NO: 675736 - DNA, 25 bp, Homo sapien
cagctgcgtgcgcagggccttcccc

SEQ ID NO: 675737 - DNA, 25 bp, Homo sapien
ggtccagctgcgtgcgcagggcctt

SEQ ID NO: 675738 - DNA, 25 bp, Homo sapien
ccatcttggcgctgagacgggcgtc

SEQ ID NO: 675739 - DNA, 25 bp, Homo sapien
aggtcagtaacccacagcccatttt

SEQ ID NO: 675740 - DNA, 25 bp, Homo sapien
cagaaggtcagtaacccacagccca

SEQ ID NO: 675741 - DNA, 25 bp, Homo sapien
acccagaaggtcagtaacccacagc

SEQ ID NO: 675742 - DNA, 25 bp, Homo sapien
ggaggaggatgttactgacccagaa

SEQ ID NO: 675743 - DNA, 25 bp, Homo sapien
atggtgacgctagcagtgacagaga

SEQ ID NO: 675744 - DNA, 25 bp, Homo sapien
ggtgccagagggcttgatggtgcag

SEQ ID NO: 675745 - DNA, 25 bp, Homo sapien
gaccagggcaatggtgacgctagca

SEQ ID NO: 675746 - DNA, 25 bp, Homo sapien
agatggtggtgccagagggcttgat

SEQ ID NO: 675747 - DNA, 25 bp, Homo sapien
acaatgctcccaaagtaggtggccc

SEQ ID NO: 675748 - DNA, 25 bp, Homo sapien
aatgctcccaaagtaggtggccctc

SEQ ID NO: 675749 - DNA, 25 bp, Homo sapien
ctcccaaagtaggtggccctcagca

SEQ ID NO: 675750 - DNA, 25 bp, Homo sapien
tgctcccaaagtaggtggccctcag

SEQ ID NO: 675751 - DNA, 25 bp, Homo sapien
ccactgcccggttggggaggctcca

SEQ ID NO: 675752 - DNA, 25 bp, Homo sapien
aaggccacatacaccatccgctctt

SEQ ID NO: 675753 - DNA, 25 bp, Homo sapien
cgcccggaagtagctctccatggca

SEQ ID NO: 675754 - DNA, 25 bp, Homo sapien
ccccgcccggaagtagctctccatg

SEQ ID NO: 675755 - DNA, 25 bp, Homo sapien
caatgccaacaagctcgtccacaga

SEQ ID NO: 675756 - DNA, 25 bp, Homo sapien
ggaatagtcaatgccaacaagctcg

SEQ ID NO: 675757 - DNA, 25 bp, Homo sapien
caggatccttcatgagggaatagtc

SEQ ID NO: 675758 - DNA, 25 bp, Homo sapien
ccttcatgagggaatagtcaatgcc

SEQ ID NO: 675759 - DNA, 25 bp, Homo sapien
gaccgtccctgcgtggtagaggaca

SEQ ID NO: 675760 - DNA, 25 bp, Homo sapien
gagggagttgagcaggaccgtccct

SEQ ID NO: 675761 - DNA, 25 bp, Homo sapien
tgagcaggaccgtccctgcgtggta

SEQ ID NO: 675762 - DNA, 25 bp, Homo sapien
gagttgagcaggaccgtccctgcgt

SEQ ID NO: 675763 - DNA, 25 bp, Homo sapien
gggccttctcaaagtgagagcatgc

SEQ ID NO: 675764 - DNA, 25 bp, Homo sapien
cttctcaaagtgagagcatgcccac

SEQ ID NO: 675765 - DNA, 25 bp, Homo sapien
agtcagggccttctcaaagtgagag

SEQ ID NO: 675766 - DNA, 25 bp, Homo sapien
tcagggccttctcaaagtgagagca

SEQ ID NO: 675767 - DNA, 25 bp, Homo sapien
ccaccctgcgacctgtcgctgccca

SEQ ID NO: 675768 - DNA, 25 bp, Homo sapien
ccttgccaccctgcgacctgtcgct

SEQ ID NO: 675769 - DNA, 25 bp, Homo sapien
ttgccaccctgcgacctgtcgctgc

SEQ ID NO: 675770 - DNA, 25 bp, Homo sapien
accctgcgacctgtcgctgcccaca

SEQ ID NO: 675771 - DNA, 25 bp, Homo sapien
ggaagcgcatccctgaggtgatgaa

SEQ ID NO: 675772 - DNA, 25 bp, Homo sapien
atccctgaggtgatgaacgtggaga

SEQ ID NO: 675773 - DNA, 25 bp, Homo sapien
tggttgaggaggaagcgcatccctg

SEQ ID NO: 675774 - DNA, 25 bp, Homo sapien
gcgcatccctgaggtgatgaacgtg

SEQ ID NO: 675775 - DNA, 25 bp, Homo sapien
ctccagaccagtgcggatggacaca

SEQ ID NO: 675776 - DNA, 25 bp, Homo sapien
ggcctggcaggagacattggacact

SEQ ID NO: 675777 - DNA, 25 bp, Homo sapien
tttcatccgtccagcgggatcccgg

SEQ ID NO: 675778 - DNA, 25 bp, Homo sapien
cgaaggccgcgtgcattctggagac

SEQ ID NO: 675779 - DNA, 25 bp, Homo sapien
taggagctcaattgagtcttcagtg

SEQ ID NO: 675780 - DNA, 25 bp, Homo sapien
tcagtgcccccatgcatcaccatac

SEQ ID NO: 675781 - DNA, 25 bp, Homo sapien
gagctcaattgagtcttcagtgccc

SEQ ID NO: 675782 - DNA, 25 bp, Homo sapien
ccaggtaggagctcaattgagtctt

SEQ ID NO: 675783 - DNA, 25 bp, Homo sapien
gagcagctgtctccggaagcgcagc

SEQ ID NO: 675784 - DNA, 25 bp, Homo sapien
gaagcgcagccccaaggaggcattg

SEQ ID NO: 675785 - DNA, 25 bp, Homo sapien
cagtagagcagctgtctccggaagc

SEQ ID NO: 675786 - DNA, 25 bp, Homo sapien
aagaaccagtagagcagctgtctcc

SEQ ID NO: 675787 - DNA, 25 bp, Homo sapien
gatgtcagttgcagctctgtgacct

SEQ ID NO: 675788 - DNA, 25 bp, Homo sapien
gctggaaatcgagctcggaagatgt

SEQ ID NO: 675789 - DNA, 25 bp, Homo sapien
ctgtggctggaaatcgagctcggaa

SEQ ID NO: 675790 - DNA, 25 bp, Homo sapien
atcgagctcggaagatgtcagttgc

SEQ ID NO: 675791 - DNA, 25 bp, Homo sapien
ctacaggaggcctcagggtcagatc

SEQ ID NO: 675792 - DNA, 25 bp, Homo sapien
cccccaacgacaggaaatttgtctg

SEQ ID NO: 675793 - DNA, 25 bp, Homo sapien
cagggtcagatccagggccaagaag

SEQ ID NO: 675794 - DNA, 25 bp, Homo sapien
tgctcccctttcaagtccaggcctg

SEQ ID NO: 675795 - DNA, 25 bp, Homo sapien
attttcaaggccacgcccatctgcc

SEQ ID NO: 675796 - DNA, 25 bp, Homo sapien
gcccatctgcctggtcccgcctatg

SEQ ID NO: 675797 - DNA, 25 bp, Homo sapien
ctttctgttgttcttcgaccacgcc

SEQ ID NO: 675798 - DNA, 25 bp, Homo sapien
gttgttcttcgaccacgcctcacat

SEQ ID NO: 675799 - DNA, 25 bp, Homo sapien
caggtccggaatggtgatagtctcc

SEQ ID NO: 675800 - DNA, 25 bp, Homo sapien
ccgcaggtccggaatggtgatagtc

SEQ ID NO: 675801 - DNA, 25 bp, Homo sapien
tccggaatggtgatagtctccagct

SEQ ID NO: 675802 - DNA, 25 bp, Homo sapien
ctttgccccgcaggtccggaatggt

SEQ ID NO: 675803 - DNA, 25 bp, Homo sapien
ccagctccagcgccttggaggtgac

SEQ ID NO: 675804 - DNA, 25 bp, Homo sapien
ccttggaggtgacgcggatcttgca

SEQ ID NO: 675805 - DNA, 25 bp, Homo sapien
cagcgccttggaggtgacgcggatc

SEQ ID NO: 675806 - DNA, 25 bp, Homo sapien
agctccagcgccttggaggtgacgc

SEQ ID NO: 675807 - DNA, 25 bp, Homo sapien
ctgggaactctgcatgtgcgcctgc

SEQ ID NO: 675808 - DNA, 25 bp, Homo sapien
aactctgcatgtgcgcctgccagca

SEQ ID NO: 675809 - DNA, 25 bp, Homo sapien
tgggaactctgcatgtgcgcctgcc

SEQ ID NO: 675810 - DNA, 25 bp, Homo sapien
ggaactctgcatgtgcgcctgccag

SEQ ID NO: 675811 - DNA, 25 bp, Homo sapien
cattagagattctgcctggagcccc

SEQ ID NO: 675812 - DNA, 25 bp, Homo sapien
tttcctttagcggtgggcccatgca

SEQ ID NO: 675813 - DNA, 25 bp, Homo sapien
cttggacgtccaaccataagtggga

SEQ ID NO: 675814 - DNA, 25 bp, Homo sapien
taccgccgcgtgatgagtttggacc

SEQ ID NO: 675815 - DNA, 25 bp, Homo sapien
tgttccagccgcctttataaagccg

SEQ ID NO: 675816 - DNA, 25 bp, Homo sapien
gcgcggtcacgtgggatggcgggca

SEQ ID NO: 675817 - DNA, 25 bp, Homo sapien
ccgggcgacggggtctggcgggcag

SEQ ID NO: 675818 - DNA, 25 bp, Homo sapien
gcagctcaggggatccgggcgacgg

SEQ ID NO: 675819 - DNA, 25 bp, Homo sapien
tggaacaccaattaccctgcagagg

SEQ ID NO: 675820 - DNA, 25 bp, Homo sapien
cacattctcaggtggtacaactcca

SEQ ID NO: 675821 - DNA, 25 bp, Homo sapien
catgggtgatgctaacccaggctca

SEQ ID NO: 675822 - DNA, 25 bp, Homo sapien
tgactgttcagtaccatggcatggg

SEQ ID NO: 675823 - DNA, 25 bp, Homo sapien
ggttatcccgtaggtcaagagcgac

SEQ ID NO: 675824 - DNA, 25 bp, Homo sapien
aactttagtgaaagcgcgggctagc

SEQ ID NO: 675825 - DNA, 25 bp, Homo sapien
taaccgattcagcacttaggaagcg

SEQ ID NO: 675826 - DNA, 25 bp, Homo sapien
gttcgatgtatatgtagcccgggca

SEQ ID NO: 675827 - DNA, 25 bp, Homo sapien
caaggaaaacaacatctcaggtagg

SEQ ID NO: 675828 - DNA, 25 bp, Homo sapien
gctattacgatgacggcgatgcagt

SEQ ID NO: 675829 - DNA, 25 bp, Homo sapien
cagactgaagtgtagcacctggtgg

SEQ ID NO: 675830 - DNA, 25 bp, Homo sapien
tctctcggtacaaagcatgtggccc

SEQ ID NO: 675831 - DNA, 25 bp, Homo sapien
gatgctggctatccagtatctggag

SEQ ID NO: 675832 - DNA, 25 bp, Homo sapien
acagcacaggtctggctccctggga

SEQ ID NO: 675833 - DNA, 25 bp, Homo sapien
gactccggtccctttattgagactg

SEQ ID NO: 675834 - DNA, 25 bp, Homo sapien
tccatgatctgtgttgggccctcgg

SEQ ID NO: 675835 - DNA, 25 bp, Homo sapien
tcgtctgtaccaaacaggccctggg

SEQ ID NO: 675836 - DNA, 25 bp, Homo sapien
ctgttgaatgtgttcgggcactgtc

SEQ ID NO: 675837 - DNA, 25 bp, Homo sapien
cgggcactgtctcgtctgtaccaaa

SEQ ID NO: 675838 - DNA, 25 bp, Homo sapien
cagggtgatgacgtcgtactcgatg

SEQ ID NO: 675839 - DNA, 25 bp, Homo sapien
cctgtgtgacaagctgctggcctgg

SEQ ID NO: 675840 - DNA, 25 bp, Homo sapien
tgctgcagcctcaagttgagcctgt

SEQ ID NO: 675841 - DNA, 25 bp, Homo sapien
tgtgacagctgagtgtgctgcagcc

SEQ ID NO: 675842 - DNA, 25 bp, Homo sapien
gcctcaagttgagcctgtgtgacaa

SEQ ID NO: 675843 - DNA, 25 bp, Homo sapien
agaagctgataagatgctggcctgg

SEQ ID NO: 675844 - DNA, 25 bp, Homo sapien
gaagctgataagatgctggcctgga

SEQ ID NO: 675845 - DNA, 25 bp, Homo sapien
actcctgaaggaacggggctccttg

SEQ ID NO: 675846 - DNA, 25 bp, Homo sapien
aacggggctccttgttcatactgga

SEQ ID NO: 675847 - DNA, 25 bp, Homo sapien
ctgggactcctgaaggaacggggct

SEQ ID NO: 675848 - DNA, 25 bp, Homo sapien
aggaacggggctccttgttcatact

SEQ ID NO: 675849 - DNA, 25 bp, Homo sapien
gccaagctgtgatcctagggagagg

SEQ ID NO: 675850 - DNA, 25 bp, Homo sapien
caagctgtgatcctagggagaggtc

SEQ ID NO: 675851 - DNA, 25 bp, Homo sapien
ccaagctgtgatcctagggagaggt

SEQ ID NO: 675852 - DNA, 25 bp, Homo sapien
catcctgggagatgatatactgcac

SEQ ID NO: 675853 - DNA, 25 bp, Homo sapien
ggccttcagggaccacaacatattc

SEQ ID NO: 675854 - DNA, 25 bp, Homo sapien
ccacaacatattcctgggggagcag

SEQ ID NO: 675855 - DNA, 25 bp, Homo sapien
gcaggtgctggacaccatcctggga

SEQ ID NO: 675856 - DNA, 25 bp, Homo sapien
tgctgtacggtctggccatctgccg

SEQ ID NO: 675857 - DNA, 25 bp, Homo sapien
tggttgtcggaggtcaccaggtgct

SEQ ID NO: 675858 - DNA, 25 bp, Homo sapien
ggtctggccatctgccgtggtgatc

SEQ ID NO: 675859 - DNA, 25 bp, Homo sapien
tcaccaggtgctgtacggtctggcc

SEQ ID NO: 675860 - DNA, 25 bp, Homo sapien
caacgatgatgtgttcctggctcag

SEQ ID NO: 675861 - DNA, 25 bp, Homo sapien
ctgggcccaggaccccgtgactgga

SEQ ID NO: 675862 - DNA, 25 bp, Homo sapien
tctgttcctgggcaacgatgatgtg

SEQ ID NO: 675863 - DNA, 25 bp, Homo sapien
tgattggtcactgtctgttcctggg

SEQ ID NO: 675864 - DNA, 25 bp, Homo sapien
tgacttcctcccatcaggactgtgc

SEQ ID NO: 675865 - DNA, 25 bp, Homo sapien
ctgacttcctcccatcaggactgtg

SEQ ID NO: 675866 - DNA, 25 bp, Homo sapien
ttcgtcatcactgttcaggatgatg

SEQ ID NO: 675867 - DNA, 25 bp, Homo sapien
ggtggccagtgtttcgtcatcactg

SEQ ID NO: 675868 - DNA, 25 bp, Homo sapien
tgtggaacttgaggtgcccgttacg

SEQ ID NO: 675869 - DNA, 25 bp, Homo sapien
catgtgccgacgcaggtccttcttg

SEQ ID NO: 675870 - DNA, 25 bp, Homo sapien
ctcctttgtgtgagtcagcatgtgc

SEQ ID NO: 675871 - DNA, 25 bp, Homo sapien
tgtgtgagtcagcatgtgccgacgc

SEQ ID NO: 675872 - DNA, 25 bp, Homo sapien
tgagtcagcatgtgccgacgcaggt

SEQ ID NO: 675873 - DNA, 25 bp, Homo sapien
tggtggggccgtaggcttgagtgct

SEQ ID NO: 675874 - DNA, 25 bp, Homo sapien
ggctacactggtggggccgtaggct

SEQ ID NO: 675875 - DNA, 25 bp, Homo sapien
cgtaggcttgagtgctgtgccatgt

SEQ ID NO: 675876 - DNA, 25 bp, Homo sapien
ctggctacactggtggggccgtagg

SEQ ID NO: 675877 - DNA, 25 bp, Homo sapien
ctgcagagagggcagagttgggggc

SEQ ID NO: 675878 - DNA, 25 bp, Homo sapien
cagagagggcagagttgggggcatt

SEQ ID NO: 675879 - DNA, 25 bp, Homo sapien
agagagggcagagttgggggcattg

SEQ ID NO: 675880 - DNA, 25 bp, Homo sapien
gcagagagggcagagttgggggcat

SEQ ID NO: 675881 - DNA, 25 bp, Homo sapien
tagaaaggccaagccggatccgtat

SEQ ID NO: 675882 - DNA, 25 bp, Homo sapien
taacaagaagctgggtagaaaggcc

SEQ ID NO: 675883 - DNA, 25 bp, Homo sapien
tgctgtgtcctaagaatgaaaggcc

SEQ ID NO: 675884 - DNA, 25 bp, Homo sapien
gacagatggcaacaaatccccggat

SEQ ID NO: 675885 - DNA, 25 bp, Homo sapien
acctcgggccactggcgggcactga

SEQ ID NO: 675886 - DNA, 25 bp, Homo sapien
tctgggagtcccctacgcagtgggt

SEQ ID NO: 675887 - DNA, 25 bp, Homo sapien
tgggcccgcttgtgactctccatct

SEQ ID NO: 675888 - DNA, 25 bp, Homo sapien
acttgaaggcaccaggcccagcgtg

SEQ ID NO: 675889 - DNA, 25 bp, Homo sapien
tggtgcaactgggtaccatcagtag

SEQ ID NO: 675890 - DNA, 25 bp, Homo sapien
tgggtaccatcagtagccatgatgt

SEQ ID NO: 675891 - DNA, 25 bp, Homo sapien
cttttagggtgtcactcacaaccac

SEQ ID NO: 675892 - DNA, 25 bp, Homo sapien
ttagggtgtcactcacaaccacagc

SEQ ID NO: 675893 - DNA, 25 bp, Homo sapien
caggcatcaactgaggagtgactgt

SEQ ID NO: 675894 - DNA, 25 bp, Homo sapien
catggagaaggttctaggagaagat

SEQ ID NO: 675895 - DNA, 25 bp, Homo sapien
tcaactgaggagtgactgtcaccac

SEQ ID NO: 675896 - DNA, 25 bp, Homo sapien
gatggactcaagtcagaagggccca

SEQ ID NO: 675897 - DNA, 25 bp, Homo sapien
tgaccacctgtggagtggcaccttc

SEQ ID NO: 675898 - DNA, 25 bp, Homo sapien
gggtgctgtgatgacactgtagcca

SEQ ID NO: 675899 - DNA, 25 bp, Homo sapien
tgatctgcggtaggtcaggagggcc

SEQ ID NO: 675900 - DNA, 25 bp, Homo sapien
tagccagtcccaccaaatggaccag

SEQ ID NO: 675901 - DNA, 25 bp, Homo sapien
tcaacatgctaacagcgctgcagac

SEQ ID NO: 675902 - DNA, 25 bp, Homo sapien
tggagacatttcttatcacagcagg

SEQ ID NO: 675903 - DNA, 25 bp, Homo sapien
tactggcatatagtcgggagaggcc

SEQ ID NO: 675904 - DNA, 25 bp, Homo sapien
tagaccaacaggaatagggcagagc

SEQ ID NO: 675905 - DNA, 25 bp, Homo sapien
tcttaaaaacacactctccatcttc

SEQ ID NO: 675906 - DNA, 25 bp, Homo sapien
tttctagggatgataccaaagggaa

SEQ ID NO: 675907 - DNA, 25 bp, Homo sapien
gggaggtgcatgaaccaagacccct

SEQ ID NO: 675908 - DNA, 25 bp, Homo sapien
ccctaactgccatgaactaaattat

SEQ ID NO: 675909 - DNA, 25 bp, Homo sapien
gtggccatcgctgtcgactcctcag

SEQ ID NO: 675910 - DNA, 25 bp, Homo sapien
ccagttcccgctgagcactcatgtt

SEQ ID NO: 675911 - DNA, 25 bp, Homo sapien
actcatgttcagcagaagatccaag

SEQ ID NO: 675912 - DNA, 25 bp, Homo sapien
aagatccaaggctgtctgcgtggcc

SEQ ID NO: 675913 - DNA, 25 bp, Homo sapien
tagaaaactggcacccaataccacc

SEQ ID NO: 675914 - DNA, 25 bp, Homo sapien
caactcagaggtcctaccctccatg

SEQ ID NO: 675915 - DNA, 25 bp, Homo sapien
tgacaaagtgctagaaaactggcac

SEQ ID NO: 675916 - DNA, 25 bp, Homo sapien
ctgcccaactcagaggtcctaccct

SEQ ID NO: 675917 - DNA, 25 bp, Homo sapien
cttgctggtagatgatggtggcgcc

SEQ ID NO: 675918 - DNA, 25 bp, Homo sapien
agggtgtcagaacagagcaatgagg

SEQ ID NO: 675919 - DNA, 25 bp, Homo sapien
tgctggtagatgatggtggcgccgc

SEQ ID NO: 675920 - DNA, 25 bp, Homo sapien
ctggtagatgatggtggcgccgccc

SEQ ID NO: 675921 - DNA, 25 bp, Homo sapien
ctggaaagttgtcgcctctgggggt

SEQ ID NO: 675922 - DNA, 25 bp, Homo sapien
tggaaagttgtcgcctctgggggta

SEQ ID NO: 675923 - DNA, 25 bp, Homo sapien
ccaggggccgcactgtgctgctgct

SEQ ID NO: 675924 - DNA, 25 bp, Homo sapien
agagaagaaggggcgacggcgggag

SEQ ID NO: 675925 - DNA, 25 bp, Homo sapien
agctgcttgcgtgtcggcaccgtac

SEQ ID NO: 675926 - DNA, 25 bp, Homo sapien
aagctgcttgcgtgtcggcaccgta

SEQ ID NO: 675927 - DNA, 25 bp, Homo sapien
aagtggcagtactcacaggcgaagg

SEQ ID NO: 675928 - DNA, 25 bp, Homo sapien
tgctgaagtggcagtactcacaggc

SEQ ID NO: 675929 - DNA, 25 bp, Homo sapien
gcaggcgcaggttcttcttgtgccg

SEQ ID NO: 675930 - DNA, 25 bp, Homo sapien
ttcttgtgccgtgtgctgaagtggc

SEQ ID NO: 675931 - DNA, 25 bp, Homo sapien
ctgtgtgcttgacagccacatggga

SEQ ID NO: 675932 - DNA, 25 bp, Homo sapien
caagaagtcctctcggaaggtgcgg

SEQ ID NO: 675933 - DNA, 25 bp, Homo sapien
agggacaaaagctgcatttgaaggg

SEQ ID NO: 675934 - DNA, 25 bp, Homo sapien
acgtgggacaactggtggttcagca

SEQ ID NO: 675935 - DNA, 25 bp, Homo sapien
ggcaacagcctggatgtgcgtgagc

SEQ ID NO: 675936 - DNA, 25 bp, Homo sapien
tgcattttgaaggtgtagcgcttct

SEQ ID NO: 675937 - DNA, 25 bp, Homo sapien
aaggtgtagcgcttcttaaaggact

SEQ ID NO: 675938 - DNA, 25 bp, Homo sapien
caacagcctggatgtgcgtgagcag

SEQ ID NO: 675939 - DNA, 25 bp, Homo sapien
gcttctcagtgctgtgcgtcttcat

SEQ ID NO: 675940 - DNA, 25 bp, Homo sapien
gcgtcttcatgtgctgcgtgagtct

SEQ ID NO: 675941 - DNA, 25 bp, Homo sapien
tgtcacacatgtggggcttctcagt

SEQ ID NO: 675942 - DNA, 25 bp, Homo sapien
tcacacatgtggggcttctcagtgc

SEQ ID NO: 675943 - DNA, 25 bp, Homo sapien
ctgcatggggtacacacggccacac

SEQ ID NO: 675944 - DNA, 25 bp, Homo sapien
gggccagatggagaaagaagtggag

SEQ ID NO: 675945 - DNA, 25 bp, Homo sapien
tcttgtcctcacccccataaacaac

SEQ ID NO: 675946 - DNA, 25 bp, Homo sapien
gataaaacctcccctcttgtcctca

SEQ ID NO: 675947 - DNA, 25 bp, Homo sapien
taggaaggcataagaaggggccaga

SEQ ID NO: 675948 - DNA, 25 bp, Homo sapien
caggagcacggtaagtgggaaccat

SEQ ID NO: 675949 - DNA, 25 bp, Homo sapien
tccttcctgaagctcgggatcgaat

SEQ ID NO: 675950 - DNA, 25 bp, Homo sapien
caactgtccccgtttgatgagaaac

SEQ ID NO: 675951 - DNA, 25 bp, Homo sapien
caaggcctggtactgtcctgttcta

SEQ ID NO: 675952 - DNA, 25 bp, Homo sapien
tggtgtagctgcactcgtcacactt

SEQ ID NO: 675953 - DNA, 25 bp, Homo sapien
tgcacagcggcgtgccgaatgacgt

SEQ ID NO: 675954 - DNA, 25 bp, Homo sapien
tagctgcactcgtcacacttgtagg

SEQ ID NO: 675955 - DNA, 25 bp, Homo sapien
tccttccggtagacactggtgtagc

SEQ ID NO: 675956 - DNA, 25 bp, Homo sapien
tgcccacgtggttgaacatgtgctc

SEQ ID NO: 675957 - DNA, 25 bp, Homo sapien
ctgcccacgtggttgaacatgtgct

SEQ ID NO: 675958 - DNA, 25 bp, Homo sapien
tcagtagaatgggactatggacacc

SEQ ID NO: 675959 - DNA, 25 bp, Homo sapien
ttactgcataaaaggctcagggctg

SEQ ID NO: 675960 - DNA, 25 bp, Homo sapien
tatggacacctacgacctcattggg

SEQ ID NO: 675961 - DNA, 25 bp, Homo sapien
cttttcttgagacacatgactgcca

SEQ ID NO: 675962 - DNA, 25 bp, Homo sapien
gccccaagcctctttggctcccgca

SEQ ID NO: 675963 - DNA, 25 bp, Homo sapien
cagcggcgggaacgatagctgcact

SEQ ID NO: 675964 - DNA, 25 bp, Homo sapien
cacaggaagggcctcaaaagtggtt

SEQ ID NO: 675965 - DNA, 25 bp, Homo sapien
ggatcgccagcctcatgggagttga

SEQ ID NO: 675966 - DNA, 25 bp, Homo sapien
agaaagcgagaaccacagatgcggc

SEQ ID NO: 675967 - DNA, 25 bp, Homo sapien
ggtggcttaaccacatgcatgcccc

SEQ ID NO: 675968 - DNA, 25 bp, Homo sapien
gtggcttaaccacatgcatgcccca

SEQ ID NO: 675969 - DNA, 25 bp, Homo sapien
tggcttaaccacatgcatgccccac

SEQ ID NO: 675970 - DNA, 25 bp, Homo sapien
ggcttaaccacatgcatgccccacc

SEQ ID NO: 675971 - DNA, 25 bp, Homo sapien
gcatctgactggctcacaccagctt

SEQ ID NO: 675972 - DNA, 25 bp, Homo sapien
gggctgcgttctctgcatctgactg

SEQ ID NO: 675973 - DNA, 25 bp, Homo sapien
aagcgcctggaaggtcgacctcggc

SEQ ID NO: 675974 - DNA, 25 bp, Homo sapien
tgcggtatttcttgcctaggaagcg

SEQ ID NO: 675975 - DNA, 25 bp, Homo sapien
tgggaactcactagaggctctcctt

SEQ ID NO: 675976 - DNA, 25 bp, Homo sapien
ctctgggaactcactagaggctctc

SEQ ID NO: 675977 - DNA, 25 bp, Homo sapien
gaactcactagaggctctccttcca

SEQ ID NO: 675978 - DNA, 25 bp, Homo sapien
tctgggaactcactagaggctctcc

SEQ ID NO: 675979 - DNA, 25 bp, Homo sapien
tgtgcacctacagacaaagccattc

SEQ ID NO: 675980 - DNA, 25 bp, Homo sapien
tagagggcagcatggatactaccgc

SEQ ID NO: 675981 - DNA, 25 bp, Homo sapien
cagaacaatctaaggctcgggaagc

SEQ ID NO: 675982 - DNA, 25 bp, Homo sapien
cctggattagagcaacggcgagagc

SEQ ID NO: 675983 - DNA, 25 bp, Homo sapien
gcgctggagccgaagctgccggcct

SEQ ID NO: 675984 - DNA, 25 bp, Homo sapien
tcagctggattatagtcgctatcct

SEQ ID NO: 675985 - DNA, 25 bp, Homo sapien
ggtctgagatctccaggcggggcag

SEQ ID NO: 675986 - DNA, 25 bp, Homo sapien
ctcatcctcagctggattatagtcg

SEQ ID NO: 675987 - DNA, 25 bp, Homo sapien
catagggatggcaggcctagaaacc

SEQ ID NO: 675988 - DNA, 25 bp, Homo sapien
gcaacgatcatgatgctacactcca

SEQ ID NO: 675989 - DNA, 25 bp, Homo sapien
caggctgggagaacccgtttctaca

SEQ ID NO: 675990 - DNA, 25 bp, Homo sapien
ggccctccaagtgaaagctcagtga

SEQ ID NO: 675991 - DNA, 25 bp, Homo sapien
tcatcaatggctccagcgtctacaa

SEQ ID NO: 675992 - DNA, 25 bp, Homo sapien
tcctcttggctcttggtggaggtgc

SEQ ID NO: 675993 - DNA, 25 bp, Homo sapien
aggtgctccacttccgtagacgtcc

SEQ ID NO: 675994 - DNA, 25 bp, Homo sapien
tccaggtcatcaatggctccagcgt

SEQ ID NO: 675995 - DNA, 25 bp, Homo sapien
gttcccgcatgtggcgcagcagtgt

SEQ ID NO: 675996 - DNA, 25 bp, Homo sapien
ctggacggaagtggcgttcccgcat

SEQ ID NO: 675997 - DNA, 25 bp, Homo sapien
caggtccggctcttcggcaccggag

SEQ ID NO: 675998 - DNA, 25 bp, Homo sapien
gctctgcaggtccggctcttcggca

SEQ ID NO: 675999 - DNA, 25 bp, Homo sapien
cccagggagtgcagaaccaaattcc

SEQ ID NO: 676000 - DNA, 25 bp, Homo sapien
gccacagacggaatccgcggcagaa

SEQ ID NO: 676001 - DNA, 25 bp, Homo sapien
gcactggccatgagctatagctacc

SEQ ID NO: 676002 - DNA, 25 bp, Homo sapien
caacccgtcagtaggaaaactgaga

SEQ ID NO: 676003 - DNA, 25 bp, Homo sapien
tgggccctgtaggatcaggtaccgt

SEQ ID NO: 676004 - DNA, 25 bp, Homo sapien
taggatcaggtaccgtgtggtctcg

SEQ ID NO: 676005 - DNA, 25 bp, Homo sapien
ccctgtaggatcaggtaccgtgtgg

SEQ ID NO: 676006 - DNA, 25 bp, Homo sapien
tgtaggatcaggtaccgtgtggtct

SEQ ID NO: 676007 - DNA, 25 bp, Homo sapien
tgggtacagcaccatgtgtcacggc

SEQ ID NO: 676008 - DNA, 25 bp, Homo sapien
cccagggctttttgaggtgctatag

SEQ ID NO: 676009 - DNA, 25 bp, Homo sapien
tctagtgtgacatgctgactcagca

SEQ ID NO: 676010 - DNA, 25 bp, Homo sapien
ggttggcttcccagactatcccagg

SEQ ID NO: 676011 - DNA, 25 bp, Homo sapien
ggtgactgttcccactctgcacatt

SEQ ID NO: 676012 - DNA, 25 bp, Homo sapien
tccacatgggaaagtaatctgcctg

SEQ ID NO: 676013 - DNA, 25 bp, Homo sapien
gagagtctgtcatgccaggcgctag

SEQ ID NO: 676014 - DNA, 25 bp, Homo sapien
tggctgccggacactgcaggaaaac

SEQ ID NO: 676015 - DNA, 25 bp, Homo sapien
gaagctgtgcagtcggacaccagca

SEQ ID NO: 676016 - DNA, 25 bp, Homo sapien
gatggtggactcgatgatcttgtcg

SEQ ID NO: 676017 - DNA, 25 bp, Homo sapien
gaggaagctgtgcagtcggacacca

SEQ ID NO: 676018 - DNA, 25 bp, Homo sapien
tctggatgaggtcgggcccgatggt

SEQ ID NO: 676019 - DNA, 25 bp, Homo sapien
ctagagtgcacaagtgctgggggac

SEQ ID NO: 676020 - DNA, 25 bp, Homo sapien
tggcccatgagacacagacgatgaa

SEQ ID NO: 676021 - DNA, 25 bp, Homo sapien
agggggtctgcgctcgagctgctct

SEQ ID NO: 676022 - DNA, 25 bp, Homo sapien
cagacgatgaatcagggaggtagct

SEQ ID NO: 676023 - DNA, 25 bp, Homo sapien
catttagctggtacctcttctagga

SEQ ID NO: 676024 - DNA, 25 bp, Homo sapien
caggaaaaagtcacagggtccctgg

SEQ ID NO: 676025 - DNA, 25 bp, Homo sapien
gcccaaggacatggtcagtggagcc

SEQ ID NO: 676026 - DNA, 25 bp, Homo sapien
acttgctagacagagctctcaggcc

SEQ ID NO: 676027 - DNA, 25 bp, Homo sapien
tggctcacagtaaaccagaaacacc

SEQ ID NO: 676028 - DNA, 25 bp, Homo sapien
tgcactctgtacctcggcatccttt

SEQ ID NO: 676029 - DNA, 25 bp, Homo sapien
ggactgtgggtagtatagtagctaa

SEQ ID NO: 676030 - DNA, 25 bp, Homo sapien
gaaggtatgaagctcaaatgagaaa

SEQ ID NO: 676031 - DNA, 25 bp, Homo sapien
acccacgccgtccagccgggtccat

SEQ ID NO: 676032 - DNA, 25 bp, Homo sapien
ccacgccgtccagccgggtccatac

SEQ ID NO: 676033 - DNA, 25 bp, Homo sapien
ctccacccacgccgtccagccgggt

SEQ ID NO: 676034 - DNA, 25 bp, Homo sapien
tccacccacgccgtccagccgggtc

SEQ ID NO: 676035 - DNA, 25 bp, Homo sapien
tgctgtcggcggacacggcttctga

SEQ ID NO: 676036 - DNA, 25 bp, Homo sapien
acgccagagtcatcggcctctgcct

SEQ ID NO: 676037 - DNA, 25 bp, Homo sapien
ggtccgagctttgccccacgccaga

SEQ ID NO: 676038 - DNA, 25 bp, Homo sapien
gccgcggcgtcgctgctgtcggcgg

SEQ ID NO: 676039 - DNA, 25 bp, Homo sapien
gacagcggggcgtagggtctgggaa

SEQ ID NO: 676040 - DNA, 25 bp, Homo sapien
cagcggggcgtagggtctgggaact

SEQ ID NO: 676041 - DNA, 25 bp, Homo sapien
ctgacagcggggcgtagggtctggg

SEQ ID NO: 676042 - DNA, 25 bp, Homo sapien
tgacagcggggcgtagggtctggga

SEQ ID NO: 676043 - DNA, 25 bp, Homo sapien
gctggaacaagtgggccatctcccc

SEQ ID NO: 676044 - DNA, 25 bp, Homo sapien
cacgattctcgtggagcgttccgct

SEQ ID NO: 676045 - DNA, 25 bp, Homo sapien
gagctcgggaaaaacttgacggaga

SEQ ID NO: 676046 - DNA, 25 bp, Homo sapien
tgtgagccccatccgggcccagtgg

SEQ ID NO: 676047 - DNA, 25 bp, Homo sapien
cattttcagtgttccggaaggtcgc

SEQ ID NO: 676048 - DNA, 25 bp, Homo sapien
cgctggccccgggaaagacacattt

SEQ ID NO: 676049 - DNA, 25 bp, Homo sapien
ggaggaacccatcggcctattgtag

SEQ ID NO: 676050 - DNA, 25 bp, Homo sapien
taatcgggtctcaacagactctggg

SEQ ID NO: 676051 - DNA, 25 bp, Homo sapien
ccatggcggcttccgtggcattcag

SEQ ID NO: 676052 - DNA, 25 bp, Homo sapien
ggtgagcctttccaagagaacccca

SEQ ID NO: 676053 - DNA, 25 bp, Homo sapien
gaaggttggtcaagtggtcgcccat

SEQ ID NO: 676054 - DNA, 25 bp, Homo sapien
gactcagggcttgaagatccaaaag

SEQ ID NO: 676055 - DNA, 25 bp, Homo sapien
gagaatgcagccgccatactggttt

SEQ ID NO: 676056 - DNA, 25 bp, Homo sapien
gaagagaatgcagccgccatactgg

SEQ ID NO: 676057 - DNA, 25 bp, Homo sapien
gcatctttaaggcacccttgcgctt

SEQ ID NO: 676058 - DNA, 25 bp, Homo sapien
atgcagccgccatactggttttgca

SEQ ID NO: 676059 - DNA, 25 bp, Homo sapien
cctcccaagccacatcgtcacagtg

SEQ ID NO: 676060 - DNA, 25 bp, Homo sapien
tcgtcacagtgtaagtagaagccca

SEQ ID NO: 676061 - DNA, 25 bp, Homo sapien
acatcgtcacagtgtaagtagaagc

SEQ ID NO: 676062 - DNA, 25 bp, Homo sapien
acagtgtaagtagaagcccagagag

SEQ ID NO: 676063 - DNA, 25 bp, Homo sapien
gagcaggtggttcacggctgcctcc

SEQ ID NO: 676064 - DNA, 25 bp, Homo sapien
tgagcaggtggttcacggctgcctc

SEQ ID NO: 676065 - DNA, 25 bp, Homo sapien
agcaggtggttcacggctgcctcca

SEQ ID NO: 676066 - DNA, 25 bp, Homo sapien
ttgagcaggtggttcacggctgcct

SEQ ID NO: 676067 - DNA, 25 bp, Homo sapien
agactgtctgactcaaccccctgtt

SEQ ID NO: 676068 - DNA, 25 bp, Homo sapien
ttggatttgaactccagactgtctg

SEQ ID NO: 676069 - DNA, 25 bp, Homo sapien
cagaaatgaaggagcacagttggat

SEQ ID NO: 676070 - DNA, 25 bp, Homo sapien
gcacagattgttatgcccacttcag

SEQ ID NO: 676071 - DNA, 25 bp, Homo sapien
aggcggaccttggggaccacgcgca

SEQ ID NO: 676072 - DNA, 25 bp, Homo sapien
cagtggcccatccaggcggaccttg

SEQ ID NO: 676073 - DNA, 25 bp, Homo sapien
taaagaggactgtccaggttgtcag

SEQ ID NO: 676074 - DNA, 25 bp, Homo sapien
gggctatcggatgccatacaggtga

SEQ ID NO: 676075 - DNA, 25 bp, Homo sapien
tcagttacttgaatgtcattgtggg

SEQ ID NO: 676076 - DNA, 25 bp, Homo sapien
ccatacaggtgatttggaaattggg

SEQ ID NO: 676077 - DNA, 25 bp, Homo sapien
catgtgctccccgtgttttcccatt

SEQ ID NO: 676078 - DNA, 25 bp, Homo sapien
tgggctggaactgctacttccagac

SEQ ID NO: 676079 - DNA, 25 bp, Homo sapien
cgcatcgcctctcatcaggagctgg

SEQ ID NO: 676080 - DNA, 25 bp, Homo sapien
tcccattggagaaatcccgcatcgc

SEQ ID NO: 676081 - DNA, 25 bp, Homo sapien
gaggtggtaggatcgctgaagctca

SEQ ID NO: 676082 - DNA, 25 bp, Homo sapien
aggtggtaggatcgctgaagctcag

SEQ ID NO: 676083 - DNA, 25 bp, Homo sapien
tggtaggatcgctgaagctcaggag

SEQ ID NO: 676084 - DNA, 25 bp, Homo sapien
gttagtccctgctgggcatgacggc

SEQ ID NO: 676085 - DNA, 25 bp, Homo sapien
aggaggatcccttcgtgagacacca

SEQ ID NO: 676086 - DNA, 25 bp, Homo sapien
ggtcaatccccatcagtcaaggagg

SEQ ID NO: 676087 - DNA, 25 bp, Homo sapien
aagtactggcgattctctgagggca

SEQ ID NO: 676088 - DNA, 25 bp, Homo sapien
catcaagtgccgataatgtgccagg

SEQ ID NO: 676089 - DNA, 25 bp, Homo sapien
ctggcctgggcgacagagtgagatt

SEQ ID NO: 676090 - DNA, 25 bp, Homo sapien
aagatcatgacactgtactctggcc

SEQ ID NO: 676091 - DNA, 25 bp, Homo sapien
aggttgcagtgagccaagatcatga

SEQ ID NO: 676092 - DNA, 25 bp, Homo sapien
gagaatttcttgaactgggaggtgg

SEQ ID NO: 676093 - DNA, 25 bp, Homo sapien
catccgatccatcagtgggtcctga

SEQ ID NO: 676094 - DNA, 25 bp, Homo sapien
ccagcagtgtgtgaattgccaggat

SEQ ID NO: 676095 - DNA, 25 bp, Homo sapien
tatggtcacgtgtcacatccgatcc

SEQ ID NO: 676096 - DNA, 25 bp, Homo sapien
tttagttgaaccttcgcccagcagc

SEQ ID NO: 676097 - DNA, 25 bp, Homo sapien
ttgcagccacttgtgcgatcccgga

SEQ ID NO: 676098 - DNA, 25 bp, Homo sapien
attcaggaacccttcgcacagcggg

SEQ ID NO: 676099 - DNA, 25 bp, Homo sapien
tcccagcgaagtggccagattcagg

SEQ ID NO: 676100 - DNA, 25 bp, Homo sapien
aagacgtcaaaggtagaggccgcag

SEQ ID NO: 676101 - DNA, 25 bp, Homo sapien
ttcagggaggatgccgtagggtcgc

SEQ ID NO: 676102 - DNA, 25 bp, Homo sapien
tagggtcgctgatcccgactcttgg

SEQ ID NO: 676103 - DNA, 25 bp, Homo sapien
gggacccacttagctccttgtctgc

SEQ ID NO: 676104 - DNA, 25 bp, Homo sapien
tagtatggatcctgggcagcgagat

SEQ ID NO: 676105 - DNA, 25 bp, Homo sapien
gaatctggcagcatcggtcccccct

SEQ ID NO: 676106 - DNA, 25 bp, Homo sapien
cctcacatggccacgaccacatcct

SEQ ID NO: 676107 - DNA, 25 bp, Homo sapien
ggcagcatcggtcccccctctgtca

SEQ ID NO: 676108 - DNA, 25 bp, Homo sapien
ctctgtcatcatcgccctgctccaa

SEQ ID NO: 676109 - DNA, 25 bp, Homo sapien
ttaggaataagacggccctctctca

SEQ ID NO: 676110 - DNA, 25 bp, Homo sapien
cttaggaataagacggccctctctc

SEQ ID NO: 676111 - DNA, 25 bp, Homo sapien
gcttaggaataagacggccctctct

SEQ ID NO: 676112 - DNA, 25 bp, Homo sapien
taggaataagacggccctctctcat

SEQ ID NO: 676113 - DNA, 25 bp, Homo sapien
tacatacagaccctgtgcccgtgtc

SEQ ID NO: 676114 - DNA, 25 bp, Homo sapien
caggtagtccatgcggcccattcct

SEQ ID NO: 676115 - DNA, 25 bp, Homo sapien
cgccggaggagacgctgcaataaag

SEQ ID NO: 676116 - DNA, 25 bp, Homo sapien
gccgctgtcaccgtttacatacaga

SEQ ID NO: 676117 - DNA, 25 bp, Homo sapien
gcagggcaatgcaatgaagttgaaa

SEQ ID NO: 676118 - DNA, 25 bp, Homo sapien
tgtaagtgttcagtatgccgcatcc

SEQ ID NO: 676119 - DNA, 25 bp, Homo sapien
tagactcccgtctgcacaaaatgca

SEQ ID NO: 676120 - DNA, 25 bp, Homo sapien
gcatcctgcctcagtattgatcttg

SEQ ID NO: 676121 - DNA, 25 bp, Homo sapien
acaacacaagagttccaaagaggaa

SEQ ID NO: 676122 - DNA, 25 bp, Homo sapien
caacacaagagttccaaagaggaaa

SEQ ID NO: 676123 - DNA, 25 bp, Homo sapien
aacaacacaagagttccaaagagga

SEQ ID NO: 676124 - DNA, 25 bp, Homo sapien
ggctctactgagcacaaaccctggg

SEQ ID NO: 676125 - DNA, 25 bp, Homo sapien
gagaacatgtccagctaccagaagt

SEQ ID NO: 676126 - DNA, 25 bp, Homo sapien
caaaggtggtggctactgacatgac

SEQ ID NO: 676127 - DNA, 25 bp, Homo sapien
tccaaacttggctagctgggcctgg

SEQ ID NO: 676128 - DNA, 25 bp, Homo sapien
tgcccccggagatatttattttcta

SEQ ID NO: 676129 - DNA, 25 bp, Homo sapien
ctgcccccggagatatttattttct

SEQ ID NO: 676130 - DNA, 25 bp, Homo sapien
ggtagaaattgatgacactcgatgc

SEQ ID NO: 676131 - DNA, 25 bp, Homo sapien
atgacactcgatgccggcctgggag

SEQ ID NO: 676132 - DNA, 25 bp, Homo sapien
aattgatgacactcgatgccggcct

SEQ ID NO: 676133 - DNA, 25 bp, Homo sapien
caggtggtagaaattgatgacactc

SEQ ID NO: 676134 - DNA, 25 bp, Homo sapien
tagtcatgttgctagcaggtgccag

SEQ ID NO: 676135 - DNA, 25 bp, Homo sapien
taatgcctctggtaagatcccatgg

SEQ ID NO: 676136 - DNA, 25 bp, Homo sapien
gatgcagagctgctattggccgtca

SEQ ID NO: 676137 - DNA, 25 bp, Homo sapien
caaaatgcttggaggctgattgcca

SEQ ID NO: 676138 - DNA, 25 bp, Homo sapien
cacccgaggtcgccccgagtggttg

SEQ ID NO: 676139 - DNA, 25 bp, Homo sapien
cgaggcacccgaggtcgccccgagt

SEQ ID NO: 676140 - DNA, 25 bp, Homo sapien
aggcacccgaggtcgccccgagtgg

SEQ ID NO: 676141 - DNA, 25 bp, Homo sapien
tcagcgaggcacccgaggtcgcccc

SEQ ID NO: 676142 - DNA, 25 bp, Homo sapien
tctttcctgcaggatggcttcatcg

SEQ ID NO: 676143 - DNA, 25 bp, Homo sapien
tccgctctcgcaggtagttgatgat

SEQ ID NO: 676144 - DNA, 25 bp, Homo sapien
ggcactcattcttgtaacgctcata

SEQ ID NO: 676145 - DNA, 25 bp, Homo sapien
aacgctcataatttctggccaccag

SEQ ID NO: 676146 - DNA, 25 bp, Homo sapien
caaaaagccttgagattgagagtgg

SEQ ID NO: 676147 - DNA, 25 bp, Homo sapien
cagcaagaaaatcattttggtgaca

SEQ ID NO: 676148 - DNA, 25 bp, Homo sapien
ttttggtgacaaaaagccttgagat

SEQ ID NO: 676149 - DNA, 25 bp, Homo sapien
tgacaaaaagccttgagattgagag

SEQ ID NO: 676150 - DNA, 25 bp, Homo sapien
ttgactgtgcaggagcggtgaatct

SEQ ID NO: 676151 - DNA, 25 bp, Homo sapien
ccgccccacagactcagcatagtct

SEQ ID NO: 676152 - DNA, 25 bp, Homo sapien
gaagatcaagtccactaccatgccc

SEQ ID NO: 676153 - DNA, 25 bp, Homo sapien
tgacaatagcaaaaggagaacctcc

SEQ ID NO: 676154 - DNA, 25 bp, Homo sapien
gcatcaaagcgtctctggatttcct

SEQ ID NO: 676155 - DNA, 25 bp, Homo sapien
gacgataaagctcttctctacgccg

SEQ ID NO: 676156 - DNA, 25 bp, Homo sapien
caatcacagaacaatcaacgggcct

SEQ ID NO: 676157 - DNA, 25 bp, Homo sapien
tctacgccgttcctcacgtttcaaa

SEQ ID NO: 676158 - DNA, 25 bp, Homo sapien
aagacatgtttgccttcatctaaaa

SEQ ID NO: 676159 - DNA, 25 bp, Homo sapien
aaaagacatgtttgccttcatctaa

SEQ ID NO: 676160 - DNA, 25 bp, Homo sapien
aaagacatgtttgccttcatctaaa

SEQ ID NO: 676161 - DNA, 25 bp, Homo sapien
ggaatagactgtttcagctacttta

SEQ ID NO: 676162 - DNA, 25 bp, Homo sapien
cattttcaagccaaatgctctttac

SEQ ID NO: 676163 - DNA, 25 bp, Homo sapien
tttttatacactgcttggccaaggc

SEQ ID NO: 676164 - DNA, 25 bp, Homo sapien
aaggcactagccctttttcagatgg

SEQ ID NO: 676165 - DNA, 25 bp, Homo sapien
cgtaggtatcggtcataagagcctt

SEQ ID NO: 676166 - DNA, 25 bp, Homo sapien
gagggccccgtccatcaaagctatc

SEQ ID NO: 676167 - DNA, 25 bp, Homo sapien
aaataagagtcatcctttctcctgc

SEQ ID NO: 676168 - DNA, 25 bp, Homo sapien
aaagctatctctgtaacggtcaaaa

SEQ ID NO: 676169 - DNA, 25 bp, Homo sapien
acataggatctcgggagtctctcat

SEQ ID NO: 676170 - DNA, 25 bp, Homo sapien
tgtacataggatctcgggagtctct

SEQ ID NO: 676171 - DNA, 25 bp, Homo sapien
ctgtacataggatctcgggagtctc

SEQ ID NO: 676172 - DNA, 25 bp, Homo sapien
tacataggatctcgggagtctctca

SEQ ID NO: 676173 - DNA, 25 bp, Homo sapien
gggtctcgctgatctcgaaaatccc

SEQ ID NO: 676174 - DNA, 25 bp, Homo sapien
gatctcgaaaatccctagagtctct

SEQ ID NO: 676175 - DNA, 25 bp, Homo sapien
ccctagagtctcttagatcacgaaa

SEQ ID NO: 676176 - DNA, 25 bp, Homo sapien
tagatcacgaaagtctctaagatcc

SEQ ID NO: 676177 - DNA, 25 bp, Homo sapien
gtcgcgcacactcctgctgtctctg

SEQ ID NO: 676178 - DNA, 25 bp, Homo sapien
tctgtgatcccgcaaatctctacta

SEQ ID NO: 676179 - DNA, 25 bp, Homo sapien
cctgctgtctctgtgatcccgcaaa

SEQ ID NO: 676180 - DNA, 25 bp, Homo sapien
cgaacgtcgcgcacactcctgctgt

SEQ ID NO: 676181 - DNA, 25 bp, Homo sapien
tctcgggggtctcgaatgtctctgc

SEQ ID NO: 676182 - DNA, 25 bp, Homo sapien
caagtctcgggggtctcgaatgtct

SEQ ID NO: 676183 - DNA, 25 bp, Homo sapien
tcccgcaagtctcgggggtctcgaa

SEQ ID NO: 676184 - DNA, 25 bp, Homo sapien
gtctcgaatgtctctgctgtcccgg

SEQ ID NO: 676185 - DNA, 25 bp, Homo sapien
gatcgatcacgccttgaatctcgac

SEQ ID NO: 676186 - DNA, 25 bp, Homo sapien
tgaatctcgactgtctccaaagcca

SEQ ID NO: 676187 - DNA, 25 bp, Homo sapien
cctcgaattggggatcgatcacgcc

SEQ ID NO: 676188 - DNA, 25 bp, Homo sapien
gactgtctccaaagccatatggatc

SEQ ID NO: 676189 - DNA, 25 bp, Homo sapien
taatgtgggcaaacactcaagatcc

SEQ ID NO: 676190 - DNA, 25 bp, Homo sapien
cattcctgacttgtgagagcaaaca

SEQ ID NO: 676191 - DNA, 25 bp, Homo sapien
gatcggcagataaacctgccttggg

SEQ ID NO: 676192 - DNA, 25 bp, Homo sapien
agcatgttatttaccaccttcggag

SEQ ID NO: 676193 - DNA, 25 bp, Homo sapien
caaactgaaggcaggtggcaaacac

SEQ ID NO: 676194 - DNA, 25 bp, Homo sapien
tgtatgatgttgatcctccaccagg

SEQ ID NO: 676195 - DNA, 25 bp, Homo sapien
tgtcaaagtccatccctgcaagttg

SEQ ID NO: 676196 - DNA, 25 bp, Homo sapien
caaagcttcctgtgggagacgctgg

SEQ ID NO: 676197 - DNA, 25 bp, Homo sapien
taggatatggacgtgcaatgagata

SEQ ID NO: 676198 - DNA, 25 bp, Homo sapien
gacccaaattttacacatgtccatg

SEQ ID NO: 676199 - DNA, 25 bp, Homo sapien
ggtggaggtaggatatggacgtgca

SEQ ID NO: 676200 - DNA, 25 bp, Homo sapien
aatgagatatcacacctcacagacc

SEQ ID NO: 676201 - DNA, 25 bp, Homo sapien
tctgatgagccgatacccaatgact

SEQ ID NO: 676202 - DNA, 25 bp, Homo sapien
ctttgtggcccacctagagcaaggg

SEQ ID NO: 676203 - DNA, 25 bp, Homo sapien
taactatgcaaggtactcacaggag

SEQ ID NO: 676204 - DNA, 25 bp, Homo sapien
cattagggccctgtggataagcaga

SEQ ID NO: 676205 - DNA, 25 bp, Homo sapien
aacatctgaagaggtgataatcctg

SEQ ID NO: 676206 - DNA, 25 bp, Homo sapien
cgttaagtccagcaaaacaaggtgt

SEQ ID NO: 676207 - DNA, 25 bp, Homo sapien
gataatcctgtaaaactcccaaaga

SEQ ID NO: 676208 - DNA, 25 bp, Homo sapien
tattattgaatagagagcaaagcca

SEQ ID NO: 676209 - DNA, 25 bp, Homo sapien
aaaaggcatacaaaggtgacctgta

SEQ ID NO: 676210 - DNA, 25 bp, Homo sapien
tgaattagcctagctgtccctcctg

SEQ ID NO: 676211 - DNA, 25 bp, Homo sapien
ttcttccctgaagcaaataaacatg

SEQ ID NO: 676212 - DNA, 25 bp, Homo sapien
aacatgactgtatggaacttcatca

SEQ ID NO: 676213 - DNA, 25 bp, Homo sapien
gcaacggctattactgggtttcaac

SEQ ID NO: 676214 - DNA, 25 bp, Homo sapien
cagggaagttggtcattccccaaca

SEQ ID NO: 676215 - DNA, 25 bp, Homo sapien
taatttaatgctctggcaacggcta

SEQ ID NO: 676216 - DNA, 25 bp, Homo sapien
ttctcaatccataacagaaacagga

SEQ ID NO: 676217 - DNA, 25 bp, Homo sapien
tgggtcttgatggagccgtattcat

SEQ ID NO: 676218 - DNA, 25 bp, Homo sapien
tgtggggctgggtcttgatggagcc

SEQ ID NO: 676219 - DNA, 25 bp, Homo sapien
gggctgggtcttgatggagccgtat

SEQ ID NO: 676220 - DNA, 25 bp, Homo sapien
gctgggtcttgatggagccgtattc

SEQ ID NO: 676221 - DNA, 25 bp, Homo sapien
ttcttctttccgctgccttattaat

SEQ ID NO: 676222 - DNA, 25 bp, Homo sapien
tcttctttccgctgccttattaata

SEQ ID NO: 676223 - DNA, 25 bp, Homo sapien
caacccatctgttcaatgctacgga

SEQ ID NO: 676224 - DNA, 25 bp, Homo sapien
gctttaacacgctgccaagacctag

SEQ ID NO: 676225 - DNA, 25 bp, Homo sapien
agttaaggtagtacattgtcacggc

SEQ ID NO: 676226 - DNA, 25 bp, Homo sapien
tgtcacggcttggtaagaaatgtcc

SEQ ID NO: 676227 - DNA, 25 bp, Homo sapien
gaattgctcagattagggtagggct

SEQ ID NO: 676228 - DNA, 25 bp, Homo sapien
gaatgctaaagcaccaactcacggc

SEQ ID NO: 676229 - DNA, 25 bp, Homo sapien
tgcacatagaacttttgggaaatcc

SEQ ID NO: 676230 - DNA, 25 bp, Homo sapien
ctttaaggaactaatcacggagagc

SEQ ID NO: 676231 - DNA, 25 bp, Homo sapien
gaacccagaagcctatactgtttta

SEQ ID NO: 676232 - DNA, 25 bp, Homo sapien
tcttttgacagccacatgaactaca

SEQ ID NO: 676233 - DNA, 25 bp, Homo sapien
tagtgacagtaccaccactagctgt

SEQ ID NO: 676234 - DNA, 25 bp, Homo sapien
cactagctgttcaaagaacccagaa

SEQ ID NO: 676235 - DNA, 25 bp, Homo sapien
gctgagctacgtggtaaacccggga

SEQ ID NO: 676236 - DNA, 25 bp, Homo sapien
gacataaaggtgcaacgcgagactg

SEQ ID NO: 676237 - DNA, 25 bp, Homo sapien
tacccggtttgtgattgaagttgcc

SEQ ID NO: 676238 - DNA, 25 bp, Homo sapien
tgaaacgtgtgcaacgccgtcctaa

SEQ ID NO: 676239 - DNA, 25 bp, Homo sapien
cgccaccaaccgaccggcgcgggca

SEQ ID NO: 676240 - DNA, 25 bp, Homo sapien
tgcccgccgtaggacaaaggcgcca

SEQ ID NO: 676241 - DNA, 25 bp, Homo sapien
gcgcgggcacgaggcaatggcggcc

SEQ ID NO: 676242 - DNA, 25 bp, Homo sapien
cggccgctccttcgcctcaggcccg

SEQ ID NO: 676243 - DNA, 25 bp, Homo sapien
acaggcgaacgccactacatccggt

SEQ ID NO: 676244 - DNA, 25 bp, Homo sapien
ggcgaacgccactacatccggttaa

SEQ ID NO: 676245 - DNA, 25 bp, Homo sapien
caagcaatctccctttttggccttc

SEQ ID NO: 676246 - DNA, 25 bp, Homo sapien
cgaacgccactacatccggttaatt

SEQ ID NO: 676247 - DNA, 25 bp, Homo sapien
gtgcccggccaccagtggtatagta

SEQ ID NO: 676248 - DNA, 25 bp, Homo sapien
tcacaaggcttgagctaaaaacatg

SEQ ID NO: 676249 - DNA, 25 bp, Homo sapien
tgcattggcttacgtatctgattac

SEQ ID NO: 676250 - DNA, 25 bp, Homo sapien
tattaatggaatcagtgcattggct

SEQ ID NO: 676251 - DNA, 25 bp, Homo sapien
gaggcatcatggtggcttccctgcg

SEQ ID NO: 676252 - DNA, 25 bp, Homo sapien
tagtaatatccaccagaccttccga

SEQ ID NO: 676253 - DNA, 25 bp, Homo sapien
gaccttccgatccagcagtttggtg

SEQ ID NO: 676254 - DNA, 25 bp, Homo sapien
caaagagagtcgcatctcagtgcag

SEQ ID NO: 676255 - DNA, 25 bp, Homo sapien
ctgggcatcttccagaggcaccggc

SEQ ID NO: 676256 - DNA, 25 bp, Homo sapien
cggtgggtggatctgggcatcttcc

SEQ ID NO: 676257 - DNA, 25 bp, Homo sapien
gctggcctgcacccagggggcggtg

SEQ ID NO: 676258 - DNA, 25 bp, Homo sapien
ctaatggacagagccaggtgggcag

SEQ ID NO: 676259 - DNA, 25 bp, Homo sapien
caggaaggagttggagggggcagag

SEQ ID NO: 676260 - DNA, 25 bp, Homo sapien
ctgagccacaggaaggagttggagg

SEQ ID NO: 676261 - DNA, 25 bp, Homo sapien
ccacaggaaggagttggagggggca

SEQ ID NO: 676262 - DNA, 25 bp, Homo sapien
tgagccacaggaaggagttggaggg

SEQ ID NO: 676263 - DNA, 25 bp, Homo sapien
ttgaccatgtcactcccctcatctg

SEQ ID NO: 676264 - DNA, 25 bp, Homo sapien
tgtagcctttaatgactcctctccc

SEQ ID NO: 676265 - DNA, 25 bp, Homo sapien
ttcagcctccatcctgcttttcgtg

SEQ ID NO: 676266 - DNA, 25 bp, Homo sapien
tcctgcttttcgtgcccagcctctc

SEQ ID NO: 676267 - DNA, 25 bp, Homo sapien
tgcaaacagccgttcaacaaacgcg

SEQ ID NO: 676268 - DNA, 25 bp, Homo sapien
ggctcttccaccaatcactctcttg

SEQ ID NO: 676269 - DNA, 25 bp, Homo sapien
gcgatgcctgttgcatggtcaggct

SEQ ID NO: 676270 - DNA, 25 bp, Homo sapien
gctcagactggctgcgggtgaaata

SEQ ID NO: 676271 - DNA, 25 bp, Homo sapien
tgtaattccctgagaggtagcaatt

SEQ ID NO: 676272 - DNA, 25 bp, Homo sapien
attccctgagaggtagcaattcaga

SEQ ID NO: 676273 - DNA, 25 bp, Homo sapien
taattccctgagaggtagcaattca

SEQ ID NO: 676274 - DNA, 25 bp, Homo sapien
aactgtaattccctgagaggtagca

SEQ ID NO: 676275 - DNA, 25 bp, Homo sapien
cctgccctgtgactctaagctcttt

SEQ ID NO: 676276 - DNA, 25 bp, Homo sapien
gtcccaggctccggtccttgtgcag

SEQ ID NO: 676277 - DNA, 25 bp, Homo sapien
ttgcgcacctgccctgtgactctaa

SEQ ID NO: 676278 - DNA, 25 bp, Homo sapien
ggaagtttgaggtctgcccttgcgc

SEQ ID NO: 676279 - DNA, 25 bp, Homo sapien
tggaatactaatggcctccggcggg

SEQ ID NO: 676280 - DNA, 25 bp, Homo sapien
tctggaatactaatggcctccggcg

SEQ ID NO: 676281 - DNA, 25 bp, Homo sapien
gggcctctggaatactaatggcctc

SEQ ID NO: 676282 - DNA, 25 bp, Homo sapien
atactaatggcctccggcgggtcct

SEQ ID NO: 676283 - DNA, 25 bp, Homo sapien
cctcgagctgctcctaggcccccac

SEQ ID NO: 676284 - DNA, 25 bp, Homo sapien
tcgagctgctcctaggcccccacag

SEQ ID NO: 676285 - DNA, 25 bp, Homo sapien
ctcgagctgctcctaggcccccaca

SEQ ID NO: 676286 - DNA, 25 bp, Homo sapien
gaacatgtctgcattgtgcccacag

SEQ ID NO: 676287 - DNA, 25 bp, Homo sapien
cctacatggagacaggcagatgcac

SEQ ID NO: 676288 - DNA, 25 bp, Homo sapien
cctgtgcgtgcatacaaatgggcat

SEQ ID NO: 676289 - DNA, 25 bp, Homo sapien
caaagcatggttcatctgtgagccc

SEQ ID NO: 676290 - DNA, 25 bp, Homo sapien
cttgaggacttctacaggctgtgga

SEQ ID NO: 676291 - DNA, 25 bp, Homo sapien
cacagacagggacttttggatacac

SEQ ID NO: 676292 - DNA, 25 bp, Homo sapien
tggacactgtatgtactgctgacgg

SEQ ID NO: 676293 - DNA, 25 bp, Homo sapien
tctcacctgtaaaacgagggctgcc

SEQ ID NO: 676294 - DNA, 25 bp, Homo sapien
gaaactcttcaggtgacttagtcca

SEQ ID NO: 676295 - DNA, 25 bp, Homo sapien
caggagctggaattcatgttggatc

SEQ ID NO: 676296 - DNA, 25 bp, Homo sapien
cttgatgaaggatgcccagctagca

SEQ ID NO: 676297 - DNA, 25 bp, Homo sapien
tccaaagccagacagataaggtccc

SEQ ID NO: 676298 - DNA, 25 bp, Homo sapien
gaatggaagagtccgctcctagcaa

SEQ ID NO: 676299 - DNA, 25 bp, Homo sapien
aaagctgcacccctagaggaggagg

SEQ ID NO: 676300 - DNA, 25 bp, Homo sapien
tttaatgccgttggtcagaatcccg

SEQ ID NO: 676301 - DNA, 25 bp, Homo sapien
gcccggtctcgcctcagttttaatg

SEQ ID NO: 676302 - DNA, 25 bp, Homo sapien
cagtgccaccttgcggctgatgaag

SEQ ID NO: 676303 - DNA, 25 bp, Homo sapien
cggaagcgcggaccccagctgctga

SEQ ID NO: 676304 - DNA, 25 bp, Homo sapien
gctgagataggcgaagtcctgctcg

SEQ ID NO: 676305 - DNA, 25 bp, Homo sapien
tgctcggagcccgacgagccgctgt

SEQ ID NO: 676306 - DNA, 25 bp, Homo sapien
gtggcgctcggagggcaggtgggcc

SEQ ID NO: 676307 - DNA, 25 bp, Homo sapien
cagcgagtggcgctcggagggcagg

SEQ ID NO: 676308 - DNA, 25 bp, Homo sapien
ggcccctgcggcagcgagtggcgct

SEQ ID NO: 676309 - DNA, 25 bp, Homo sapien
tgcggcagcgagtggcgctcggagg

SEQ ID NO: 676310 - DNA, 25 bp, Homo sapien
cgcccttgagctcgccgaagtcgta

SEQ ID NO: 676311 - DNA, 25 bp, Homo sapien
gtcgccgcccttgagctcgccgaag

SEQ ID NO: 676312 - DNA, 25 bp, Homo sapien
agctcgccgaagtcgtagaggctcc

SEQ ID NO: 676313 - DNA, 25 bp, Homo sapien
cttgagctcgccgaagtcgtagagg

SEQ ID NO: 676314 - DNA, 25 bp, Homo sapien
gttgtcccgcatgtcttcatcctcg

SEQ ID NO: 676315 - DNA, 25 bp, Homo sapien
gtaggcttcggtgtcctgctcgccg

SEQ ID NO: 676316 - DNA, 25 bp, Homo sapien
tcgttgtatttgatgacgttgtccc

SEQ ID NO: 676317 - DNA, 25 bp, Homo sapien
aggtggctcttgtggtggcgcctga

SEQ ID NO: 676318 - DNA, 25 bp, Homo sapien
cagaactttgtttgcactgcctcgg

SEQ ID NO: 676319 - DNA, 25 bp, Homo sapien
gcctcggaaaatgaaaccgctgtaa

SEQ ID NO: 676320 - DNA, 25 bp, Homo sapien
gtgcactttcttcgtttgtgggcaa

SEQ ID NO: 676321 - DNA, 25 bp, Homo sapien
cgtcacctttagagcactgatgtgc

SEQ ID NO: 676322 - DNA, 25 bp, Homo sapien
gtgtgggcggcccactgtctaccac

SEQ ID NO: 676323 - DNA, 25 bp, Homo sapien
tgagaacgcagaccaagagggcgat

SEQ ID NO: 676324 - DNA, 25 bp, Homo sapien
tgtcgcagccacagatgcggatggt

SEQ ID NO: 676325 - DNA, 25 bp, Homo sapien
catgacaaaggccgtggtgttgcag

SEQ ID NO: 676326 - DNA, 25 bp, Homo sapien
aaatagaagcggtgcccgccttggg

SEQ ID NO: 676327 - DNA, 25 bp, Homo sapien
ccaggcggaaatagaagcggtgccc

SEQ ID NO: 676328 - DNA, 25 bp, Homo sapien
tgtccaccacgctgatggtctggat

SEQ ID NO: 676329 - DNA, 25 bp, Homo sapien
caggcaccaggcggaaatagaagcg

SEQ ID NO: 676330 - DNA, 25 bp, Homo sapien
tggcttggcatcctcgcatacagct

SEQ ID NO: 676331 - DNA, 25 bp, Homo sapien
cggatccttagggatgcccgggata

SEQ ID NO: 676332 - DNA, 25 bp, Homo sapien
acagctgcctcgtagggtgtggcca

SEQ ID NO: 676333 - DNA, 25 bp, Homo sapien
tcacatccaggattcggatccttag

SEQ ID NO: 676334 - DNA, 25 bp, Homo sapien
tatttttaagagtgcgttgccggag

SEQ ID NO: 676335 - DNA, 25 bp, Homo sapien
cactccagtgattagagggggcttt

SEQ ID NO: 676336 - DNA, 25 bp, Homo sapien
tttccagggcgagagatgggagtcg

SEQ ID NO: 676337 - DNA, 25 bp, Homo sapien
tcgtgactgggaatgccgggtgaac

SEQ ID NO: 676338 - DNA, 25 bp, Homo sapien
taatccagtatgacaggcggtggct

SEQ ID NO: 676339 - DNA, 25 bp, Homo sapien
tgagtgcaacattctccgaggtgct

SEQ ID NO: 676340 - DNA, 25 bp, Homo sapien
ggcatactaagtggctcgggagtct

SEQ ID NO: 676341 - DNA, 25 bp, Homo sapien
agcgccgccgctgtgtataaatatt

SEQ ID NO: 676342 - DNA, 25 bp, Homo sapien
gatctggtccaaatctgattcgcgg

SEQ ID NO: 676343 - DNA, 25 bp, Homo sapien
gccagtcacgatggcgcctgtgtcc

SEQ ID NO: 676344 - DNA, 25 bp, Homo sapien
gatgttgtgccagccggccgtctcg

SEQ ID NO: 676345 - DNA, 25 bp, Homo sapien
gcctgtgtccgcatcgatatcgaag

SEQ ID NO: 676346 - DNA, 25 bp, Homo sapien
acgcgctgggcgagtgccgtgggag

SEQ ID NO: 676347 - DNA, 25 bp, Homo sapien
gcagttgtggcattaggaggcttct

SEQ ID NO: 676348 - DNA, 25 bp, Homo sapien
gcggcgtggacacgcccagggacac

SEQ ID NO: 676349 - DNA, 25 bp, Homo sapien
agggacacgcgctgggcgagtgccg

SEQ ID NO: 676350 - DNA, 25 bp, Homo sapien
tcttcccgggcctttgtgtggcggc

SEQ ID NO: 676351 - DNA, 25 bp, Homo sapien
tgtccaacacatgtctcgggcggcg

SEQ ID NO: 676352 - DNA, 25 bp, Homo sapien
taatctgcagcttttccgttgccgc

SEQ ID NO: 676353 - DNA, 25 bp, Homo sapien
cgttgccgcgtgaaaaagccctttg

SEQ ID NO: 676354 - DNA, 25 bp, Homo sapien
ctacttctcatttggtgacaacaac

SEQ ID NO: 676355 - DNA, 25 bp, Homo sapien
cacatttgagcaggatcaggctggc

SEQ ID NO: 676356 - DNA, 25 bp, Homo sapien
tgtctagcggaacaccaagggagat

SEQ ID NO: 676357 - DNA, 25 bp, Homo sapien
cgagaacgttctaggccgagggatc

SEQ ID NO: 676358 - DNA, 25 bp, Homo sapien
tactccaggcaagagaaaacggtgg

SEQ ID NO: 676359 - DNA, 25 bp, Homo sapien
gtcggtcacggccacgcgcacgatc

SEQ ID NO: 676360 - DNA, 25 bp, Homo sapien
gggctcgtccacgtcggtcacggcc

SEQ ID NO: 676361 - DNA, 25 bp, Homo sapien
acgatcgcctggtcgcggaacgtgc

SEQ ID NO: 676362 - DNA, 25 bp, Homo sapien
ggcctccaggatcacggtgtgcacg

SEQ ID NO: 676363 - DNA, 25 bp, Homo sapien
tgcactacgatgatggcctcctgag

SEQ ID NO: 676364 - DNA, 25 bp, Homo sapien
tgtggtgaccttgaacacatcgccg

SEQ ID NO: 676365 - DNA, 25 bp, Homo sapien
gctgctctcgtccttaaggtggtaa

SEQ ID NO: 676366 - DNA, 25 bp, Homo sapien
cctcctgagtgtcgctgtctgtggt

SEQ ID NO: 676367 - DNA, 25 bp, Homo sapien
tgacgtcggtgactacgatggtgac

SEQ ID NO: 676368 - DNA, 25 bp, Homo sapien
aggtcaggcacagccgtccggatta

SEQ ID NO: 676369 - DNA, 25 bp, Homo sapien
ctggctctcgcggtcaaggtcaggc

SEQ ID NO: 676370 - DNA, 25 bp, Homo sapien
agctgacccgccatgtctgtggcct

SEQ ID NO: 676371 - DNA, 25 bp, Homo sapien
ccactgcacttggtctcaaatacat

SEQ ID NO: 676372 - DNA, 25 bp, Homo sapien
gctcacacacattgcacctgcattt

SEQ ID NO: 676373 - DNA, 25 bp, Homo sapien
tgcacttggtctcaaatacatacac

SEQ ID NO: 676374 - DNA, 25 bp, Homo sapien
cacttgctcacacacattgcacctg

SEQ ID NO: 676375 - DNA, 25 bp, Homo sapien
tacactcactatgctgtcacactca

SEQ ID NO: 676376 - DNA, 25 bp, Homo sapien
gtccacactcatgtacactcactat

SEQ ID NO: 676377 - DNA, 25 bp, Homo sapien
tcatgtacactcactatgctgtcac

SEQ ID NO: 676378 - DNA, 25 bp, Homo sapien
cactcatgtacactcactatgctgt

SEQ ID NO: 676379 - DNA, 25 bp, Homo sapien
ccaggtggagtcatgcaccagcagc

SEQ ID NO: 676380 - DNA, 25 bp, Homo sapien
ccactccaacctgccgagcaccagg

SEQ ID NO: 676381 - DNA, 25 bp, Homo sapien
cactccaacctgccgagcaccaggt

SEQ ID NO: 676382 - DNA, 25 bp, Homo sapien
caggtggagtcatgcaccagcagcc

SEQ ID NO: 676383 - DNA, 25 bp, Homo sapien
cgtcgccttagttccaaaactgtct

SEQ ID NO: 676384 - DNA, 25 bp, Homo sapien
gaaccactcgtataggatttcatct

SEQ ID NO: 676385 - DNA, 25 bp, Homo sapien
taaatgccagcagcactaaccgtcg

SEQ ID NO: 676386 - DNA, 25 bp, Homo sapien
taaaatgggacaaccaccatactga

SEQ ID NO: 676387 - DNA, 25 bp, Homo sapien
tgaaggtcacacgtgtagaaagtgc

SEQ ID NO: 676388 - DNA, 25 bp, Homo sapien
cgtgtagaaagtgcatagccaggac

SEQ ID NO: 676389 - DNA, 25 bp, Homo sapien
tcacacgtgtagaaagtgcatagcc

SEQ ID NO: 676390 - DNA, 25 bp, Homo sapien
tgttgaaggtcacacgtgtagaaag

SEQ ID NO: 676391 - DNA, 25 bp, Homo sapien
aagccttgtggtgtgtaggattcag

SEQ ID NO: 676392 - DNA, 25 bp, Homo sapien
tgactttagccgagcacttgctgtg

SEQ ID NO: 676393 - DNA, 25 bp, Homo sapien
ctaagctttgtgctggtcacttgcc

SEQ ID NO: 676394 - DNA, 25 bp, Homo sapien
cctcagtgaatgtacaggattcgtg

SEQ ID NO: 676395 - DNA, 25 bp, Homo sapien
tgtctgggcttactcacgcatctga

SEQ ID NO: 676396 - DNA, 25 bp, Homo sapien
gatggctcatttacatgtctggcag

SEQ ID NO: 676397 - DNA, 25 bp, Homo sapien
cagtaaacgtgaaagctgcaaggtc

SEQ ID NO: 676398 - DNA, 25 bp, Homo sapien
gcctaaaccggaggagcagctgact

SEQ ID NO: 676399 - DNA, 25 bp, Homo sapien
ggtcatccgcatccgaggccatcac

SEQ ID NO: 676400 - DNA, 25 bp, Homo sapien
agcacgctgtacaccagccgagcgc

SEQ ID NO: 676401 - DNA, 25 bp, Homo sapien
gtgaagtggtgctcgccgtccagca

SEQ ID NO: 676402 - DNA, 25 bp, Homo sapien
cagccgagcgctgctgccgtacgtg

SEQ ID NO: 676403 - DNA, 25 bp, Homo sapien
gggggaccaagcgagacaggggtca

SEQ ID NO: 676404 - DNA, 25 bp, Homo sapien
ggggaccaagcgagacaggggtcat

SEQ ID NO: 676405 - DNA, 25 bp, Homo sapien
ccagagggggcaggaagtcgaccaa

SEQ ID NO: 676406 - DNA, 25 bp, Homo sapien
gtccagagggggcaggaagtcgacc

SEQ ID NO: 676407 - DNA, 25 bp, Homo sapien
agagggggcaggaagtcgaccaagg

SEQ ID NO: 676408 - DNA, 25 bp, Homo sapien
cttggggtccagagggggcaggaag

SEQ ID NO: 676409 - DNA, 25 bp, Homo sapien
ccctgagctaagtggggccttgatg

SEQ ID NO: 676410 - DNA, 25 bp, Homo sapien
gggccttgatggtcagaaacggtct

SEQ ID NO: 676411 - DNA, 25 bp, Homo sapien
ccttgatggtcagaaacggtctggg

SEQ ID NO: 676412 - DNA, 25 bp, Homo sapien
taagtggggccttgatggtcagaaa

SEQ ID NO: 676413 - DNA, 25 bp, Homo sapien
tgtggctgtatgagcatgtccgagg

SEQ ID NO: 676414 - DNA, 25 bp, Homo sapien
ggcttgtgcatgtggcatgtccaga

SEQ ID NO: 676415 - DNA, 25 bp, Homo sapien
agctgtgtctccatacgtgactggg

SEQ ID NO: 676416 - DNA, 25 bp, Homo sapien
cagtgtagtggtgagttgtatgcgg

SEQ ID NO: 676417 - DNA, 25 bp, Homo sapien
ccacatgcgggtccacgttcatggg

SEQ ID NO: 676418 - DNA, 25 bp, Homo sapien
ctgtgtccacatgcgggtccacgtt

SEQ ID NO: 676419 - DNA, 25 bp, Homo sapien
gtgtccacatgcgggtccacgttca

SEQ ID NO: 676420 - DNA, 25 bp, Homo sapien
gtccacatgcgggtccacgttcatg

SEQ ID NO: 676421 - DNA, 25 bp, Homo sapien
tgcaccttgatgatgaactccgact

SEQ ID NO: 676422 - DNA, 25 bp, Homo sapien
ggtccaggcgctccatggcatgaat

SEQ ID NO: 676423 - DNA, 25 bp, Homo sapien
tgagatggtgtacttgatggccccg

SEQ ID NO: 676424 - DNA, 25 bp, Homo sapien
ggcccgcagcgtgtagaaggttttc

SEQ ID NO: 676425 - DNA, 25 bp, Homo sapien
gggtaggcagagaagaaggcaaggt

SEQ ID NO: 676426 - DNA, 25 bp, Homo sapien
ggcagagaagaaggcaaggtggagg

SEQ ID NO: 676427 - DNA, 25 bp, Homo sapien
gtaggcagagaagaaggcaaggtgg

SEQ ID NO: 676428 - DNA, 25 bp, Homo sapien
ctgggtaggcagagaagaaggcaag

SEQ ID NO: 676429 - DNA, 25 bp, Homo sapien
aggcaggaacccttcagttgctgga

SEQ ID NO: 676430 - DNA, 25 bp, Homo sapien
aacccttcagttgctggatcacaga

SEQ ID NO: 676431 - DNA, 25 bp, Homo sapien
gcagtggtactgcagcaggatccct

SEQ ID NO: 676432 - DNA, 25 bp, Homo sapien
caggaacccttcagttgctggatca

SEQ ID NO: 676433 - DNA, 25 bp, Homo sapien
ctttagaattcgacaaggacggatg

SEQ ID NO: 676434 - DNA, 25 bp, Homo sapien
acaaggacggatgctccgagcggct

SEQ ID NO: 676435 - DNA, 25 bp, Homo sapien
aattcgacaaggacggatgctccga

SEQ ID NO: 676436 - DNA, 25 bp, Homo sapien
tagaattcgacaaggacggatgctc

SEQ ID NO: 676437 - DNA, 25 bp, Homo sapien
gatctggagttggagtggggcccca

SEQ ID NO: 676438 - DNA, 25 bp, Homo sapien
cagccgcgtttgacgcggccggctc

SEQ ID NO: 676439 - DNA, 25 bp, Homo sapien
gttccacacccagccgcgtttgacg

SEQ ID NO: 676440 - DNA, 25 bp, Homo sapien
gcccgtgtactcctctaccacgaag

SEQ ID NO: 676441 - DNA, 25 bp, Homo sapien
catacaggggctccgtgcccgtgta

SEQ ID NO: 676442 - DNA, 25 bp, Homo sapien
gctccgggcgccgacggcgagggtg

SEQ ID NO: 676443 - DNA, 25 bp, Homo sapien
tccgggcgccgacggcgagggtgtg

SEQ ID NO: 676444 - DNA, 25 bp, Homo sapien
ggcgccgacggcgagggtgtgcccg

SEQ ID NO: 676445 - DNA, 25 bp, Homo sapien
gagctccgggcgccgacggcgaggg

SEQ ID NO: 676446 - DNA, 25 bp, Homo sapien
ggggacagcgcgactcccgcccgga

SEQ ID NO: 676447 - DNA, 25 bp, Homo sapien
gacagcgcgactcccgcccggagcc

SEQ ID NO: 676448 - DNA, 25 bp, Homo sapien
cgggggacagcgcgactcccgcccg

SEQ ID NO: 676449 - DNA, 25 bp, Homo sapien
gcagcagcagtagcgcgggggacag

SEQ ID NO: 676450 - DNA, 25 bp, Homo sapien
tggggcccaggagcatggacgagag

SEQ ID NO: 676451 - DNA, 25 bp, Homo sapien
gggcccaggagcatggacgagaggc

SEQ ID NO: 676452 - DNA, 25 bp, Homo sapien
gcccaggagcatggacgagaggcac

SEQ ID NO: 676453 - DNA, 25 bp, Homo sapien
gctggggcccaggagcatggacgag

SEQ ID NO: 676454 - DNA, 25 bp, Homo sapien
agggcgccgctgcttggtcgcacaa

SEQ ID NO: 676455 - DNA, 25 bp, Homo sapien
gccgctgcttggtcgcacaacgatg

SEQ ID NO: 676456 - DNA, 25 bp, Homo sapien
tgcttggtcgcacaacgatgcggcg

SEQ ID NO: 676457 - DNA, 25 bp, Homo sapien
tggtcgcacaacgatgcggcgccgt

SEQ ID NO: 676458 - DNA, 25 bp, Homo sapien
ggcccgcggccctgaacgccgccca

SEQ ID NO: 676459 - DNA, 25 bp, Homo sapien
tgaacgccgcccagccgcgggggta

SEQ ID NO: 676460 - DNA, 25 bp, Homo sapien
cgcggccctgaacgccgcccagccg

SEQ ID NO: 676461 - DNA, 25 bp, Homo sapien
gcccgcggccctgaacgccgcccag

SEQ ID NO: 676462 - DNA, 25 bp, Homo sapien
tcgcgtgcggatcaccaggcagcac

SEQ ID NO: 676463 - DNA, 25 bp, Homo sapien
tcgccgcgtcgcgtgcggatcacca

SEQ ID NO: 676464 - DNA, 25 bp, Homo sapien
cgtcgcgtgcggatcaccaggcagc

SEQ ID NO: 676465 - DNA, 25 bp, Homo sapien
ccgcatccggggcatggacagcccc

SEQ ID NO: 676466 - DNA, 25 bp, Homo sapien
aaaggatgcgggttggggccggcag

SEQ ID NO: 676467 - DNA, 25 bp, Homo sapien
cgccatggttcctgcgcagaaagga

SEQ ID NO: 676468 - DNA, 25 bp, Homo sapien
ttggggccggcagatcctgccagga

SEQ ID NO: 676469 - DNA, 25 bp, Homo sapien
tggacagctccagagtcggggaagc

SEQ ID NO: 676470 - DNA, 25 bp, Homo sapien
ccacctccagggatccggctttgat

SEQ ID NO: 676471 - DNA, 25 bp, Homo sapien
agggatccggctttgattccctgca

SEQ ID NO: 676472 - DNA, 25 bp, Homo sapien
cctgcctggtatgacttctatgggc

SEQ ID NO: 676473 - DNA, 25 bp, Homo sapien
tgggcacgaggcttcccaaccctgg

SEQ ID NO: 676474 - DNA, 25 bp, Homo sapien
tggagcgtatggcttccctgcgtgc

SEQ ID NO: 676475 - DNA, 25 bp, Homo sapien
tgcgtgccccatgggaactgttccc

SEQ ID NO: 676476 - DNA, 25 bp, Homo sapien
tcatttcctggagcgtatggcttcc

SEQ ID NO: 676477 - DNA, 25 bp, Homo sapien
gaggtgcagctccaaagccttcatt

SEQ ID NO: 676478 - DNA, 25 bp, Homo sapien
cacttccggagtctggctggatggc

SEQ ID NO: 676479 - DNA, 25 bp, Homo sapien
tctggcaacatcactgccaaggctg

SEQ ID NO: 676480 - DNA, 25 bp, Homo sapien
ccaaggctgtatgactgccagcttg

SEQ ID NO: 676481 - DNA, 25 bp, Homo sapien
cttgcacttccggagtctggctgga

SEQ ID NO: 676482 - DNA, 25 bp, Homo sapien
cccggcacacctggcttgtatgtgt

SEQ ID NO: 676483 - DNA, 25 bp, Homo sapien
ccagtgggagcggtgcctgacagtc

SEQ ID NO: 676484 - DNA, 25 bp, Homo sapien
tcccggcacacctggcttgtatgtg

SEQ ID NO: 676485 - DNA, 25 bp, Homo sapien
tgggagcggtgcctgacagtctggc

SEQ ID NO: 676486 - DNA, 25 bp, Homo sapien
accctgcccgtgtgccggtgccacc

SEQ ID NO: 676487 - DNA, 25 bp, Homo sapien
cccaccctgcccgtgtgccggtgcc

SEQ ID NO: 676488 - DNA, 25 bp, Homo sapien
ccgtgtgccggtgccaccggcagag

SEQ ID NO: 676489 - DNA, 25 bp, Homo sapien
gccaccggcagagccgtgctgtaca

SEQ ID NO: 676490 - DNA, 25 bp, Homo sapien
ttgtggtacgggagaaagctctcta

SEQ ID NO: 676491 - DNA, 25 bp, Homo sapien
attaaagaatctgtccctttgtggt

SEQ ID NO: 676492 - DNA, 25 bp, Homo sapien
taaagaatctgtccctttgtggtac

SEQ ID NO: 676493 - DNA, 25 bp, Homo sapien
gtggtacgggagaaagctctctagg

SEQ ID NO: 676494 - DNA, 25 bp, Homo sapien
agaggactctgcagcttcgaacagt

SEQ ID NO: 676495 - DNA, 25 bp, Homo sapien
gcttcgaacagtcatgcctgatgct

SEQ ID NO: 676496 - DNA, 25 bp, Homo sapien
ctttggctgcgtggaagctttctgg

SEQ ID NO: 676497 - DNA, 25 bp, Homo sapien
taattgctacagaagagtatttccc

SEQ ID NO: 676498 - DNA, 25 bp, Homo sapien
tgctccctcgtcacaagcctccttg

SEQ ID NO: 676499 - DNA, 25 bp, Homo sapien
ttgctccctcgtcacaagcctcctt

SEQ ID NO: 676500 - DNA, 25 bp, Homo sapien
tgctcagagctttgttcaggaaggc

SEQ ID NO: 676501 - DNA, 25 bp, Homo sapien
tcagagctttgttcaggaaggcggg

SEQ ID NO: 676502 - DNA, 25 bp, Homo sapien
cagcggggacggtgtctccggagtc

SEQ ID NO: 676503 - DNA, 25 bp, Homo sapien
ctaagtggcgctctctttggacgtt

SEQ ID NO: 676504 - DNA, 25 bp, Homo sapien
tctctttggacgttaggctgtcggg

SEQ ID NO: 676505 - DNA, 25 bp, Homo sapien
ggcgctctctttggacgttaggctg

SEQ ID NO: 676506 - DNA, 25 bp, Homo sapien
cgggcagcgggcgagtccggagccc

SEQ ID NO: 676507 - DNA, 25 bp, Homo sapien
gcgggagcgagagggggagccgcgg

SEQ ID NO: 676508 - DNA, 25 bp, Homo sapien
gggagagcgggagcgagagggggag

SEQ ID NO: 676509 - DNA, 25 bp, Homo sapien
ctgccgcctcgggacgctgcgtggg

SEQ ID NO: 676510 - DNA, 25 bp, Homo sapien
tcactgtgcattgaggtggacaccg

SEQ ID NO: 676511 - DNA, 25 bp, Homo sapien
tcctctggagagtcccgctggacat

SEQ ID NO: 676512 - DNA, 25 bp, Homo sapien
gaaaggcaccttgcacagaccagat

SEQ ID NO: 676513 - DNA, 25 bp, Homo sapien
gagcaggcttctcgaacagtggccg

SEQ ID NO: 676514 - DNA, 25 bp, Homo sapien
ttgctccagttcccattccttcttt

SEQ ID NO: 676515 - DNA, 25 bp, Homo sapien
ccaggctctggtgtgtgctgttcat

SEQ ID NO: 676516 - DNA, 25 bp, Homo sapien
tcctccaggctctggtgtgtgctgt

SEQ ID NO: 676517 - DNA, 25 bp, Homo sapien
gcctcttcctccaggctctggtgtg

SEQ ID NO: 676518 - DNA, 25 bp, Homo sapien
caccgactctccctgaattattcac

SEQ ID NO: 676519 - DNA, 25 bp, Homo sapien
aacaccgactctccctgaattattc

SEQ ID NO: 676520 - DNA, 25 bp, Homo sapien
tcaaacaccgactctccctgaatta

SEQ ID NO: 676521 - DNA, 25 bp, Homo sapien
caaacaccgactctccctgaattat

SEQ ID NO: 676522 - DNA, 25 bp, Homo sapien
tgctgcagagcgcccagcccaggtg

SEQ ID NO: 676523 - DNA, 25 bp, Homo sapien
gggctgctgcagagcgcccagccca

SEQ ID NO: 676524 - DNA, 25 bp, Homo sapien
cccagggctgctgcagagcgcccag

SEQ ID NO: 676525 - DNA, 25 bp, Homo sapien
ccagggctgctgcagagcgcccagc

SEQ ID NO: 676526 - DNA, 25 bp, Homo sapien
tgctccatcccttgctgtctgttct

SEQ ID NO: 676527 - DNA, 25 bp, Homo sapien
gtggtctctggctgagcagcctctg

SEQ ID NO: 676528 - DNA, 25 bp, Homo sapien
tttgcccatgtggtctctggctgag

SEQ ID NO: 676529 - DNA, 25 bp, Homo sapien
caggcctttgcccatgtggtctctg

SEQ ID NO: 676530 - DNA, 25 bp, Homo sapien
gtgcttcttccttcacccgatagtg

SEQ ID NO: 676531 - DNA, 25 bp, Homo sapien
cttcacccgatagtgctccttactg

SEQ ID NO: 676532 - DNA, 25 bp, Homo sapien
ttcaactcatacctcacccactcag

SEQ ID NO: 676533 - DNA, 25 bp, Homo sapien
caaggcttcagacttcaactcatac

SEQ ID NO: 676534 - DNA, 25 bp, Homo sapien
caaaggtttgtgctctagacgtggg

SEQ ID NO: 676535 - DNA, 25 bp, Homo sapien
taagggtggccatgtacagttgcac

SEQ ID NO: 676536 - DNA, 25 bp, Homo sapien
caaggactgcatgctaagtggccag

SEQ ID NO: 676537 - DNA, 25 bp, Homo sapien
tctgatgggcctttagaaaaacggc

SEQ ID NO: 676538 - DNA, 25 bp, Homo sapien
gaacaactaccatgtacatctctga

SEQ ID NO: 676539 - DNA, 25 bp, Homo sapien
tgtggaccctggttgtggtagacac

SEQ ID NO: 676540 - DNA, 25 bp, Homo sapien
agagatccctggtcatccctgaagc

SEQ ID NO: 676541 - DNA, 25 bp, Homo sapien
acatctctgatcacacggttttgaa

SEQ ID NO: 676542 - DNA, 25 bp, Homo sapien
ctaattcccagggaatccactggat

SEQ ID NO: 676543 - DNA, 25 bp, Homo sapien
gaatccactggattaaaaagccctg

SEQ ID NO: 676544 - DNA, 25 bp, Homo sapien
cagggaatccactggattaaaaagc

SEQ ID NO: 676545 - DNA, 25 bp, Homo sapien
ttcccagggaatccactggattaaa

SEQ ID NO: 676546 - DNA, 25 bp, Homo sapien
tcatctgacatccagaagaggacgg

SEQ ID NO: 676547 - DNA, 25 bp, Homo sapien
caacttgggacaactctgaaaggca

SEQ ID NO: 676548 - DNA, 25 bp, Homo sapien
aatgacttcgatatctccagcagcg

SEQ ID NO: 676549 - DNA, 25 bp, Homo sapien
tgctgtggcgtaaagccatgaacct

SEQ ID NO: 676550 - DNA, 25 bp, Homo sapien
tagaggcagatctcggtctgactcc

SEQ ID NO: 676551 - DNA, 25 bp, Homo sapien
taatcttggcctctgagcttgcgga

SEQ ID NO: 676552 - DNA, 25 bp, Homo sapien
ttctcctgggcttaaccgaacgagc

SEQ ID NO: 676553 - DNA, 25 bp, Homo sapien
tggtaaacttcagccagcaagctgg

SEQ ID NO: 676554 - DNA, 25 bp, Homo sapien
tcaaaaggactctgagatagacatt

SEQ ID NO: 676555 - DNA, 25 bp, Homo sapien
aaaactacggcacagacaggttagg

SEQ ID NO: 676556 - DNA, 25 bp, Homo sapien
gccagtattcaaactaggctgtgaa

SEQ ID NO: 676557 - DNA, 25 bp, Homo sapien
caggttaggtcatttgcttagggtc

SEQ ID NO: 676558 - DNA, 25 bp, Homo sapien
taaacattcatttatttcctgccag

SEQ ID NO: 676559 - DNA, 25 bp, Homo sapien
tcagtaaacattcatttatttcctg

SEQ ID NO: 676560 - DNA, 25 bp, Homo sapien
agtaaacattcatttatttcctgcc

SEQ ID NO: 676561 - DNA, 25 bp, Homo sapien
aacattcatttatttcctgccagca

SEQ ID NO: 676562 - DNA, 25 bp, Homo sapien
gtgttctaacaggagcgagaaaatg

SEQ ID NO: 676563 - DNA, 25 bp, Homo sapien
gcttaagaccagacatttgaagaag

SEQ ID NO: 676564 - DNA, 25 bp, Homo sapien
atgaaggaggcctggcttaagacca

SEQ ID NO: 676565 - DNA, 25 bp, Homo sapien
gggactggtgttctaacaggagcga

SEQ ID NO: 676566 - DNA, 25 bp, Homo sapien
aagaaacctgctctctgagaaaaga

SEQ ID NO: 676567 - DNA, 25 bp, Homo sapien
aaagaaacctgctctctgagaaaag

SEQ ID NO: 676568 - DNA, 25 bp, Homo sapien
gcctgcttctaagccatttgccctg

SEQ ID NO: 676569 - DNA, 25 bp, Homo sapien
tggtgctcgccccttgtgtgaccag

SEQ ID NO: 676570 - DNA, 25 bp, Homo sapien
gaggggcaaaagtcatgagtccctg

SEQ ID NO: 676571 - DNA, 25 bp, Homo sapien
ccagctaccatgatgagccctggcg

SEQ ID NO: 676572 - DNA, 25 bp, Homo sapien
tgctgcccctgggccacaaagtact

SEQ ID NO: 676573 - DNA, 25 bp, Homo sapien
tggctgctccggagcagcagctcca

SEQ ID NO: 676574 - DNA, 25 bp, Homo sapien
ctcattgtcaccttcctcccgctgg

SEQ ID NO: 676575 - DNA, 25 bp, Homo sapien
agcagctccaggtcggggctggagc

SEQ ID NO: 676576 - DNA, 25 bp, Homo sapien
cagttacaggcccagtcgtggtttt

SEQ ID NO: 676577 - DNA, 25 bp, Homo sapien
actctggagatgacccccacatctt

SEQ ID NO: 676578 - DNA, 25 bp, Homo sapien
cactaagagtcacagggagaagaac

SEQ ID NO: 676579 - DNA, 25 bp, Homo sapien
gatgacccccacatcttcctagagg

SEQ ID NO: 676580 - DNA, 25 bp, Homo sapien
tggagggatattcccgagaggcaga

SEQ ID NO: 676581 - DNA, 25 bp, Homo sapien
gtggagggatattcccgagaggcag

SEQ ID NO: 676582 - DNA, 25 bp, Homo sapien
ggagggatattcccgagaggcagag

SEQ ID NO: 676583 - DNA, 25 bp, Homo sapien
caggagggagcatgatcaacaggca

SEQ ID NO: 676584 - DNA, 25 bp, Homo sapien
gaatgctgtgttaccccggactgaa

SEQ ID NO: 676585 - DNA, 25 bp, Homo sapien
gagactccaaacaggactggcaagg

SEQ ID NO: 676586 - DNA, 25 bp, Homo sapien
tccacaaggataaaggacggctgcc

SEQ ID NO: 676587 - DNA, 25 bp, Homo sapien
aaccaaaggcgagaatcccgccaag

SEQ ID NO: 676588 - DNA, 25 bp, Homo sapien
caaaccaaaggcgagaatcccgcca

SEQ ID NO: 676589 - DNA, 25 bp, Homo sapien
ccaaaggcgagaatcccgccaagga

SEQ ID NO: 676590 - DNA, 25 bp, Homo sapien
aaaggcgagaatcccgccaaggaag

SEQ ID NO: 676591 - DNA, 25 bp, Homo sapien
ctggaaacggaagattttctcagat

SEQ ID NO: 676592 - DNA, 25 bp, Homo sapien
aaacggaagattttctcagatgtgg

SEQ ID NO: 676593 - DNA, 25 bp, Homo sapien
ttctcagatgtggacaaatggagac

SEQ ID NO: 676594 - DNA, 25 bp, Homo sapien
ggaagattttctcagatgtggacaa

SEQ ID NO: 676595 - DNA, 25 bp, Homo sapien
cctgagggcattacagacgggactc

SEQ ID NO: 676596 - DNA, 25 bp, Homo sapien
taccaagtgacgaaggaccaacagt

SEQ ID NO: 676597 - DNA, 25 bp, Homo sapien
catggaaagacggatggaagtgccc

SEQ ID NO: 676598 - DNA, 25 bp, Homo sapien
gctttgccaagtgacgactaccagg

SEQ ID NO: 676599 - DNA, 25 bp, Homo sapien
tggaacatggtgtcgatgggattct

SEQ ID NO: 676600 - DNA, 25 bp, Homo sapien
gaacatggtgtcgatgggattctgg

SEQ ID NO: 676601 - DNA, 25 bp, Homo sapien
ggtggaacatggtgtcgatgggatt

SEQ ID NO: 676602 - DNA, 25 bp, Homo sapien
aacatggtgtcgatgggattctgga

SEQ ID NO: 676603 - DNA, 25 bp, Homo sapien
gcgaatgccaccgatgaacgaggcc

SEQ ID NO: 676604 - DNA, 25 bp, Homo sapien
gcaggagcatctgggtgagggtcca

SEQ ID NO: 676605 - DNA, 25 bp, Homo sapien
gaagccctccacgttgaactgtgtg

SEQ ID NO: 676606 - DNA, 25 bp, Homo sapien
gagggtccagcgaatgccaccgatg

SEQ ID NO: 676607 - DNA, 25 bp, Homo sapien
tgaagagacccccggcgatgaggag

SEQ ID NO: 676608 - DNA, 25 bp, Homo sapien
ccccggcgatgaggaggaccaccag

SEQ ID NO: 676609 - DNA, 25 bp, Homo sapien
cttgtaggtgaacatgaagagaccc

SEQ ID NO: 676610 - DNA, 25 bp, Homo sapien
ttgtaggtgaacatgaagagacccc

SEQ ID NO: 676611 - DNA, 25 bp, Homo sapien
ctggtaggatggggagcagtggcag

SEQ ID NO: 676612 - DNA, 25 bp, Homo sapien
gatggggagcagtggcagctaactc

SEQ ID NO: 676613 - DNA, 25 bp, Homo sapien
gggagcagtggcagctaactcgggg

SEQ ID NO: 676614 - DNA, 25 bp, Homo sapien
taggatggggagcagtggcagctaa

SEQ ID NO: 676615 - DNA, 25 bp, Homo sapien
tgacggtcagctggtatgccaacag

SEQ ID NO: 676616 - DNA, 25 bp, Homo sapien
tggtcattaccctgccacactggtt

SEQ ID NO: 676617 - DNA, 25 bp, Homo sapien
tgagtattgcccatgtctaggtccc

SEQ ID NO: 676618 - DNA, 25 bp, Homo sapien
tgtcacacagcaggacaagccactg

SEQ ID NO: 676619 - DNA, 25 bp, Homo sapien
gagagaagatcaagatgaagaggac

SEQ ID NO: 676620 - DNA, 25 bp, Homo sapien
aagaggacagctgaggatttggtca

SEQ ID NO: 676621 - DNA, 25 bp, Homo sapien
agacccatcaccgagaaaggagcag

SEQ ID NO: 676622 - DNA, 25 bp, Homo sapien
gaagcaaaattacccacaatgcact

SEQ ID NO: 676623 - DNA, 25 bp, Homo sapien
ctggaagcaaaattacccacaatgc

SEQ ID NO: 676624 - DNA, 25 bp, Homo sapien
acccatcaccgagaaaggagcagga

SEQ ID NO: 676625 - DNA, 25 bp, Homo sapien
ctgagcgaaatgaccaaacagagct

SEQ ID NO: 676626 - DNA, 25 bp, Homo sapien
gcgaaatgaccaaacagagctgggc

SEQ ID NO: 676627 - DNA, 25 bp, Homo sapien
cgaaatgaccaaacagagctgggct

SEQ ID NO: 676628 - DNA, 25 bp, Homo sapien
atgaccaaacagagctgggctgtca

SEQ ID NO: 676629 - DNA, 25 bp, Homo sapien
cagaaggaatctctgactaagaggc

SEQ ID NO: 676630 - DNA, 25 bp, Homo sapien
gttacaggtctgacgttgagctccc

SEQ ID NO: 676631 - DNA, 25 bp, Homo sapien
gataagcgacctttaatcagaagga

SEQ ID NO: 676632 - DNA, 25 bp, Homo sapien
tgttctttacctaaccctcggcaga

SEQ ID NO: 676633 - DNA, 25 bp, Homo sapien
aggccacatagggctctgctgcggc

SEQ ID NO: 676634 - DNA, 25 bp, Homo sapien
tgctgcggctgcgtgtaccacccac

SEQ ID NO: 676635 - DNA, 25 bp, Homo sapien
ctgggcttacggaagaggctggcga

SEQ ID NO: 676636 - DNA, 25 bp, Homo sapien
ctcctctgcgctgggcttacggaag

SEQ ID NO: 676637 - DNA, 25 bp, Homo sapien
gatgatggggttctgggagagctcc

SEQ ID NO: 676638 - DNA, 25 bp, Homo sapien
tctgcgctgggcttacggaagaggc

SEQ ID NO: 676639 - DNA, 25 bp, Homo sapien
gcagacaccccgctggacagacaga

SEQ ID NO: 676640 - DNA, 25 bp, Homo sapien
agagtggtggagtggctggcctagc

SEQ ID NO: 676641 - DNA, 25 bp, Homo sapien
agccgggtgtgcagacaccccgctg

SEQ ID NO: 676642 - DNA, 25 bp, Homo sapien
ggctggcctagcagccgggtgtgca

SEQ ID NO: 676643 - DNA, 25 bp, Homo sapien
tggacaagcccacgtcaagcgccgt

SEQ ID NO: 676644 - DNA, 25 bp, Homo sapien
aggaagctccagttggacaagccca

SEQ ID NO: 676645 - DNA, 25 bp, Homo sapien
ctccagttggacaagcccacgtcaa

SEQ ID NO: 676646 - DNA, 25 bp, Homo sapien
gttggacaagcccacgtcaagcgcc

SEQ ID NO: 676647 - DNA, 25 bp, Homo sapien
cccctgagcggaggtattaacctga

SEQ ID NO: 676648 - DNA, 25 bp, Homo sapien
agctggcactaaatctccctcgggc

SEQ ID NO: 676649 - DNA, 25 bp, Homo sapien
tatggtttccacaaacactccggcg

SEQ ID NO: 676650 - DNA, 25 bp, Homo sapien
ggaaatcttcctctaccagccatgg

SEQ ID NO: 676651 - DNA, 25 bp, Homo sapien
ctgaggtagtcggcccagctcagca

SEQ ID NO: 676652 - DNA, 25 bp, Homo sapien
aagatcacggccaggtgcagcatcg

SEQ ID NO: 676653 - DNA, 25 bp, Homo sapien
acagggcggagaagaggaagatcac

SEQ ID NO: 676654 - DNA, 25 bp, Homo sapien
aagaggaagatcacggccaggtgca

SEQ ID NO: 676655 - DNA, 25 bp, Homo sapien
cggagaagaggaagatcacggccag

SEQ ID NO: 676656 - DNA, 25 bp, Homo sapien
gaccttgctatgtgtgtagggccct

SEQ ID NO: 676657 - DNA, 25 bp, Homo sapien
aagagactcaatcctagcctggtgc

SEQ ID NO: 676658 - DNA, 25 bp, Homo sapien
gacaccccggcttggtttagacagc

SEQ ID NO: 676659 - DNA, 25 bp, Homo sapien
tcttaggtcacgaagacaggtggca

SEQ ID NO: 676660 - DNA, 25 bp, Homo sapien
gactggcttccagttagactggttg

SEQ ID NO: 676661 - DNA, 25 bp, Homo sapien
tttccctggatccaaacactgaagg

SEQ ID NO: 676662 - DNA, 25 bp, Homo sapien
gggaaccctggcacggcaggcttgg

SEQ ID NO: 676663 - DNA, 25 bp, Homo sapien
tgttccagcccagccgtgactggct

SEQ ID NO: 676664 - DNA, 25 bp, Homo sapien
atggagaagcagtagtagagaagca

SEQ ID NO: 676665 - DNA, 25 bp, Homo sapien
ttgttgtagaaggtgatgccgatgg

SEQ ID NO: 676666 - DNA, 25 bp, Homo sapien
caaaaaggccacatcgagggcccac

SEQ ID NO: 676667 - DNA, 25 bp, Homo sapien
tcaacaccgccttccacaaaaaggc

SEQ ID NO: 676668 - DNA, 25 bp, Homo sapien
tcgtggcggctgcagcaccggagct

SEQ ID NO: 676669 - DNA, 25 bp, Homo sapien
cgtggcggctgcagcaccggagctc

SEQ ID NO: 676670 - DNA, 25 bp, Homo sapien
gaagagccggtggagttagaccaca

SEQ ID NO: 676671 - DNA, 25 bp, Homo sapien
ttcaccaagaacgtctccaggctgg

SEQ ID NO: 676672 - DNA, 25 bp, Homo sapien
cccctcttgaatacaatgtgcagga

SEQ ID NO: 676673 - DNA, 25 bp, Homo sapien
acagctttcaccaagaacgtctcca

SEQ ID NO: 676674 - DNA, 25 bp, Homo sapien
taattggatgcagcgctcacaggtc

SEQ ID NO: 676675 - DNA, 25 bp, Homo sapien
gattcggaaccatcagcagagcccc

SEQ ID NO: 676676 - DNA, 25 bp, Homo sapien
agtcctcacctaaggggctggtggc

SEQ ID NO: 676677 - DNA, 25 bp, Homo sapien
ctgacccttcccatggttaattgga

SEQ ID NO: 676678 - DNA, 25 bp, Homo sapien
tgtcttgtcacctcaagctattctc

SEQ ID NO: 676679 - DNA, 25 bp, Homo sapien
cttctcgtagccatgggtgcctctg

SEQ ID NO: 676680 - DNA, 25 bp, Homo sapien
cagagacccacgtcgtgtctgctgt

SEQ ID NO: 676681 - DNA, 25 bp, Homo sapien
tctgaaggctgcgtgactcagggct

SEQ ID NO: 676682 - DNA, 25 bp, Homo sapien
ataaagaccagcacccttctttcgg

SEQ ID NO: 676683 - DNA, 25 bp, Homo sapien
ccttctttcggctcccatggcctca

SEQ ID NO: 676684 - DNA, 25 bp, Homo sapien
cccactgggcgcctttcagctcccc

SEQ ID NO: 676685 - DNA, 25 bp, Homo sapien
tgggcgcctttcagctccccaaaca

SEQ ID NO: 676686 - DNA, 25 bp, Homo sapien
gatgtcttcccaatatatgccccgg

SEQ ID NO: 676687 - DNA, 25 bp, Homo sapien
cacatctagagtgtctgaaactgac

SEQ ID NO: 676688 - DNA, 25 bp, Homo sapien
tatgagcacatgtcctgaactccac

SEQ ID NO: 676689 - DNA, 25 bp, Homo sapien
tatcaggcatctcactcacatctag

SEQ ID NO: 676690 - DNA, 25 bp, Homo sapien
aggacatgctggcactaacagagct

SEQ ID NO: 676691 - DNA, 25 bp, Homo sapien
ggcactaacagagctttcttctgag

SEQ ID NO: 676692 - DNA, 25 bp, Homo sapien
ctaacagagctttcttctgagcact

SEQ ID NO: 676693 - DNA, 25 bp, Homo sapien
cactaacagagctttcttctgagca

SEQ ID NO: 676694 - DNA, 25 bp, Homo sapien
tggactccttattggtcttttttgc

SEQ ID NO: 676695 - DNA, 25 bp, Homo sapien
aaaaccttctcttgggtgccacgat

SEQ ID NO: 676696 - DNA, 25 bp, Homo sapien
gggtgccacgataccacattctcct

SEQ ID NO: 676697 - DNA, 25 bp, Homo sapien
tctcttgggtgccacgataccacat

SEQ ID NO: 676698 - DNA, 25 bp, Homo sapien
taagatgccctaagaagatttcgta

SEQ ID NO: 676699 - DNA, 25 bp, Homo sapien
ggtagctgcactccaaatatctaaa

SEQ ID NO: 676700 - DNA, 25 bp, Homo sapien
taaattctttacatcagccctgacc

SEQ ID NO: 676701 - DNA, 25 bp, Homo sapien
ggtgcctaaagcttggaacctggct

SEQ ID NO: 676702 - DNA, 25 bp, Homo sapien
gtggcactcccacctctgacgtttc

SEQ ID NO: 676703 - DNA, 25 bp, Homo sapien
acccctcccaatcctcgtggcactc

SEQ ID NO: 676704 - DNA, 25 bp, Homo sapien
ttccgcagacctccgcttggctgaa

SEQ ID NO: 676705 - DNA, 25 bp, Homo sapien
agacctccgcttggctgaatacttt

SEQ ID NO: 676706 - DNA, 25 bp, Homo sapien
tcaggaaataccagatgagccggcg

SEQ ID NO: 676707 - DNA, 25 bp, Homo sapien
cctccacagacggcgaaactgaggc

SEQ ID NO: 676708 - DNA, 25 bp, Homo sapien
gtgccttgcaggagggcgcttggag

SEQ ID NO: 676709 - DNA, 25 bp, Homo sapien
gcacccaggacgtcgcaggtgctca

SEQ ID NO: 676710 - DNA, 25 bp, Homo sapien
tccaggccggaatctccccaccgga

SEQ ID NO: 676711 - DNA, 25 bp, Homo sapien
agctccaggccggaatctccccacc

SEQ ID NO: 676712 - DNA, 25 bp, Homo sapien
tgggagctccaggccggaatctccc

SEQ ID NO: 676713 - DNA, 25 bp, Homo sapien
caggccggaatctccccaccggaag

SEQ ID NO: 676714 - DNA, 25 bp, Homo sapien
taaaacttgggcgatccagaagtaa

SEQ ID NO: 676715 - DNA, 25 bp, Homo sapien
gagaatcctaaaggagggtgagaaa

SEQ ID NO: 676716 - DNA, 25 bp, Homo sapien
ccagaagtaatacgaaacatttgtg

SEQ ID NO: 676717 - DNA, 25 bp, Homo sapien
gagcatcccagatagaggaaatggg

SEQ ID NO: 676718 - DNA, 25 bp, Homo sapien
cagtcaagaacattaggccagggca

SEQ ID NO: 676719 - DNA, 25 bp, Homo sapien
cagaaaacgcttcgtcccagtgcag

SEQ ID NO: 676720 - DNA, 25 bp, Homo sapien
caagctagggttgcacattcagacc

SEQ ID NO: 676721 - DNA, 25 bp, Homo sapien
tgtgaacactcttaaccagcaggtg

SEQ ID NO: 676722 - DNA, 25 bp, Homo sapien
aaacatggttactgacaggaagctc

SEQ ID NO: 676723 - DNA, 25 bp, Homo sapien
attgaaaacatggttactgacagga

SEQ ID NO: 676724 - DNA, 25 bp, Homo sapien
atggttactgacaggaagctcctgg

SEQ ID NO: 676725 - DNA, 25 bp, Homo sapien
aacatggttactgacaggaagctcc

SEQ ID NO: 676726 - DNA, 25 bp, Homo sapien
gaagcagcaacgtcttggcaccata

SEQ ID NO: 676727 - DNA, 25 bp, Homo sapien
gacttaagagggcaggacttggcca

SEQ ID NO: 676728 - DNA, 25 bp, Homo sapien
caatgtgctaacgtatgtccaggga

SEQ ID NO: 676729 - DNA, 25 bp, Homo sapien
tgagcgcttgcagggagaaatttcc

SEQ ID NO: 676730 - DNA, 25 bp, Homo sapien
aaatggctggcatttactggccacc

SEQ ID NO: 676731 - DNA, 25 bp, Homo sapien
agaatgtaagtgtttctcctgggcc

SEQ ID NO: 676732 - DNA, 25 bp, Homo sapien
tgggtaccgtcgtttctggctccag

SEQ ID NO: 676733 - DNA, 25 bp, Homo sapien
tgactcttagtagacagggaccaag

SEQ ID NO: 676734 - DNA, 25 bp, Homo sapien
tcactcttggtcagctcactggaca

SEQ ID NO: 676735 - DNA, 25 bp, Homo sapien
gtccaggtcactcttggtcagctca

SEQ ID NO: 676736 - DNA, 25 bp, Homo sapien
tggtcagctcactggacatgtcctt

SEQ ID NO: 676737 - DNA, 25 bp, Homo sapien
agggtgtccaggtcactcttggtca

SEQ ID NO: 676738 - DNA, 25 bp, Homo sapien
ggtctcatcagggtcatacaggatg

SEQ ID NO: 676739 - DNA, 25 bp, Homo sapien
taggtgcgatgaagtttaaggtctc

SEQ ID NO: 676740 - DNA, 25 bp, Homo sapien
tcatcagggtcatacaggatggaga

SEQ ID NO: 676741 - DNA, 25 bp, Homo sapien
ctcatatttattaggtgcgatgaag

SEQ ID NO: 676742 - DNA, 25 bp, Homo sapien
gagagaccaccagacgttatgtgcc

SEQ ID NO: 676743 - DNA, 25 bp, Homo sapien
gggtctgcacatcaagatcttggcc

SEQ ID NO: 676744 - DNA, 25 bp, Homo sapien
cactgttgcatgataccaaggaact

SEQ ID NO: 676745 - DNA, 25 bp, Homo sapien
aattagagcgatggaacagcctggg

SEQ ID NO: 676746 - DNA, 25 bp, Homo sapien
tttcttcaaagcgataaaggagaga

SEQ ID NO: 676747 - DNA, 25 bp, Homo sapien
aatggcactctccaagtatcactgg

SEQ ID NO: 676748 - DNA, 25 bp, Homo sapien
ggaagatgccaagaatgcacctgga

SEQ ID NO: 676749 - DNA, 25 bp, Homo sapien
gatgaaacagtgtgatacttgggac

SEQ ID NO: 676750 - DNA, 25 bp, Homo sapien
tctttcatgtggggacaatctttcc

SEQ ID NO: 676751 - DNA, 25 bp, Homo sapien
ctttcatgtggggacaatctttccc

SEQ ID NO: 676752 - DNA, 25 bp, Homo sapien
ttcatgtggggacaatctttcccag

SEQ ID NO: 676753 - DNA, 25 bp, Homo sapien
tgtcacctccccttgtgggttgtca

SEQ ID NO: 676754 - DNA, 25 bp, Homo sapien
ggttcagtgccaaccggcagtacca

SEQ ID NO: 676755 - DNA, 25 bp, Homo sapien
ggttgtcatccaagtcaccatagtg

SEQ ID NO: 676756 - DNA, 25 bp, Homo sapien
tagtgaaggaccttgtggttcagtg

SEQ ID NO: 676757 - DNA, 25 bp, Homo sapien
ccggttcaggcgctgctgcttgatc

SEQ ID NO: 676758 - DNA, 25 bp, Homo sapien
gcggttcccaatctttcggaagctg

SEQ ID NO: 676759 - DNA, 25 bp, Homo sapien
tgccctcacagagccggttcaggcg

SEQ ID NO: 676760 - DNA, 25 bp, Homo sapien
gctcaaggatctcgggctggatctt

SEQ ID NO: 676761 - DNA, 25 bp, Homo sapien
cgtagaatctcagagtaactcaggc

SEQ ID NO: 676762 - DNA, 25 bp, Homo sapien
gactcatcctctcagactggcgcag

SEQ ID NO: 676763 - DNA, 25 bp, Homo sapien
gatttgctctcggacgacttgcata

SEQ ID NO: 676764 - DNA, 25 bp, Homo sapien
taactcaggctacgcaatttgctct

SEQ ID NO: 676765 - DNA, 25 bp, Homo sapien
tatcgattaagtacccagggtgtgc

SEQ ID NO: 676766 - DNA, 25 bp, Homo sapien
gatgatcagcttttgagggcctggc

SEQ ID NO: 676767 - DNA, 25 bp, Homo sapien
gtcacagagggagcaacaaccagat

SEQ ID NO: 676768 - DNA, 25 bp, Homo sapien
ggacaggtgctaacttcaatggaca

SEQ ID NO: 676769 - DNA, 25 bp, Homo sapien
cgggtggtagtcattgcgtccttca

SEQ ID NO: 676770 - DNA, 25 bp, Homo sapien
tcatgggtaaagaacatcgggtggt

SEQ ID NO: 676771 - DNA, 25 bp, Homo sapien
aaggctcggtcatgggtaaagaaca

SEQ ID NO: 676772 - DNA, 25 bp, Homo sapien
aagagctcttcaaaggctcggtcat

SEQ ID NO: 676773 - DNA, 25 bp, Homo sapien
cgaccccactgacatgtaactgttt

SEQ ID NO: 676774 - DNA, 25 bp, Homo sapien
actgagctcttgatgacaaggaatg

SEQ ID NO: 676775 - DNA, 25 bp, Homo sapien
cccactgacatgtaactgtttataa

SEQ ID NO: 676776 - DNA, 25 bp, Homo sapien
ttgatgacaaggaatggctgaagaa

SEQ ID NO: 676777 - DNA, 25 bp, Homo sapien
tcccggctactgttctccaagacaa

SEQ ID NO: 676778 - DNA, 25 bp, Homo sapien
cctgcaggatttcacagagcatttt

SEQ ID NO: 676779 - DNA, 25 bp, Homo sapien
ttttggtgagctcaatggcactgcg

SEQ ID NO: 676780 - DNA, 25 bp, Homo sapien
cattcatgtttgtcttcccggctac

SEQ ID NO: 676781 - DNA, 25 bp, Homo sapien
aagggaggattagggagatgaagga

SEQ ID NO: 676782 - DNA, 25 bp, Homo sapien
aaagggaggattagggagatgaagg

SEQ ID NO: 676783 - DNA, 25 bp, Homo sapien
caggactgagaaggccagctcccct

SEQ ID NO: 676784 - DNA, 25 bp, Homo sapien
tgagaaggccagctcccctgccttt

SEQ ID NO: 676785 - DNA, 25 bp, Homo sapien
agaaggccagctcccctgcctttac

SEQ ID NO: 676786 - DNA, 25 bp, Homo sapien
actgagaaggccagctcccctgcct

SEQ ID NO: 676787 - DNA, 25 bp, Homo sapien
agtccatggctggattgatgtggtt

SEQ ID NO: 676788 - DNA, 25 bp, Homo sapien
gactttagccaagtacagcatgttg

SEQ ID NO: 676789 - DNA, 25 bp, Homo sapien
ctggtggactttagccaagtacagc

SEQ ID NO: 676790 - DNA, 25 bp, Homo sapien
caggaggagtctgggtaaagtccat

SEQ ID NO: 676791 - DNA, 25 bp, Homo sapien
attttgtagtcctttgtgtacatgg

SEQ ID NO: 676792 - DNA, 25 bp, Homo sapien
gcgtcaaatgcaatcctcctcagtt

SEQ ID NO: 676793 - DNA, 25 bp, Homo sapien
catggctttgcgtttttcggtccca

SEQ ID NO: 676794 - DNA, 25 bp, Homo sapien
gggcattgctaggatcagactctgc

SEQ ID NO: 676795 - DNA, 25 bp, Homo sapien
catatagctgatgggccatctcagt

SEQ ID NO: 676796 - DNA, 25 bp, Homo sapien
gacttgaaggacatatagctgatgg

SEQ ID NO: 676797 - DNA, 25 bp, Homo sapien
aaggacatatagctgatgggccatc

SEQ ID NO: 676798 - DNA, 25 bp, Homo sapien
ggttaggacttgaaggacatatagc

SEQ ID NO: 676799 - DNA, 25 bp, Homo sapien
tgcaggcctgaaaggcgccatccct

SEQ ID NO: 676800 - DNA, 25 bp, Homo sapien
gcgccatcccttcctctgcattccc

SEQ ID NO: 676801 - DNA, 25 bp, Homo sapien
aaggcgccatcccttcctctgcatt

SEQ ID NO: 676802 - DNA, 25 bp, Homo sapien
gcaggcctgaaaggcgccatccctt

SEQ ID NO: 676803 - DNA, 25 bp, Homo sapien
tgtaccaccactatgtccttcaatt

SEQ ID NO: 676804 - DNA, 25 bp, Homo sapien
gtccttcaatttccctactcagtag

SEQ ID NO: 676805 - DNA, 25 bp, Homo sapien
ttggttctttcttgcccaaatgagg

SEQ ID NO: 676806 - DNA, 25 bp, Homo sapien
gcttagtagtcaccgtggctagcgg

SEQ ID NO: 676807 - DNA, 25 bp, Homo sapien
gcaacaaacagtagagctggccttg

SEQ ID NO: 676808 - DNA, 25 bp, Homo sapien
taaaatacagcatgttccaggaact

SEQ ID NO: 676809 - DNA, 25 bp, Homo sapien
tccctggacgcactgcaattgctgg

SEQ ID NO: 676810 - DNA, 25 bp, Homo sapien
tctgctcacagaggatcgcgggaaa

SEQ ID NO: 676811 - DNA, 25 bp, Homo sapien
attcaggattatagaccggagatgc

SEQ ID NO: 676812 - DNA, 25 bp, Homo sapien
tagaccggagatgcttctgtgcaaa

SEQ ID NO: 676813 - DNA, 25 bp, Homo sapien
gattatagaccggagatgcttctgt

SEQ ID NO: 676814 - DNA, 25 bp, Homo sapien
caggattatagaccggagatgcttc

SEQ ID NO: 676815 - DNA, 25 bp, Homo sapien
gaacgaaaatccactgaccatcaga

SEQ ID NO: 676816 - DNA, 25 bp, Homo sapien
gaccatcagatgtattttacactct

SEQ ID NO: 676817 - DNA, 25 bp, Homo sapien
tttcctttcctaatggcacaatcaa

SEQ ID NO: 676818 - DNA, 25 bp, Homo sapien
tggcacaatcaactccactgtcttc

SEQ ID NO: 676819 - DNA, 25 bp, Homo sapien
caagtaagaaggtgacgcatccatg

SEQ ID NO: 676820 - DNA, 25 bp, Homo sapien
tagatcagaccatgagattcttgcc

SEQ ID NO: 676821 - DNA, 25 bp, Homo sapien
gattcccacggtctagtaagagtcc

SEQ ID NO: 676822 - DNA, 25 bp, Homo sapien
tctggtctgccctagttgaactaca

SEQ ID NO: 676823 - DNA, 25 bp, Homo sapien
ctttccacatggcagtgctacttac

SEQ ID NO: 676824 - DNA, 25 bp, Homo sapien
aggtctagaggattaaggtgcttgt

SEQ ID NO: 676825 - DNA, 25 bp, Homo sapien
caggtctagaggattaaggtgcttg

SEQ ID NO: 676826 - DNA, 25 bp, Homo sapien
gcttacattcaaacaaggaccggga

SEQ ID NO: 676827 - DNA, 25 bp, Homo sapien
caagagctgggtacatacatgatcc

SEQ ID NO: 676828 - DNA, 25 bp, Homo sapien
gcagacggaatgagctttcagctta

SEQ ID NO: 676829 - DNA, 25 bp, Homo sapien
cagagccaagccatccaagaaagac

SEQ ID NO: 676830 - DNA, 25 bp, Homo sapien
cagtgcaatggcgtaggtctgaatc

SEQ ID NO: 676831 - DNA, 25 bp, Homo sapien
taatcagtgcaatggcgtaggtctg

SEQ ID NO: 676832 - DNA, 25 bp, Homo sapien
gcaatggcgtaggtctgaatctcct

SEQ ID NO: 676833 - DNA, 25 bp, Homo sapien
ttaatcagtgcaatggcgtaggtct

SEQ ID NO: 676834 - DNA, 25 bp, Homo sapien
gagactaggttacttgctgatggca

SEQ ID NO: 676835 - DNA, 25 bp, Homo sapien
gagacctagtatgcagaagagcctg

SEQ ID NO: 676836 - DNA, 25 bp, Homo sapien
tcataggtacagagactactgggcc

SEQ ID NO: 676837 - DNA, 25 bp, Homo sapien
gcatcgtcggttcagtgagcattca

SEQ ID NO: 676838 - DNA, 25 bp, Homo sapien
ggtacagactctggctgttcaagac

SEQ ID NO: 676839 - DNA, 25 bp, Homo sapien
gttcaagaccatgctctccaggatg

SEQ ID NO: 676840 - DNA, 25 bp, Homo sapien
gggacctctgaaggattgacacgtc

SEQ ID NO: 676841 - DNA, 25 bp, Homo sapien
ggattgacacgtccaccatgggctg

SEQ ID NO: 676842 - DNA, 25 bp, Homo sapien
aatggcgatattgcctgtatctccc

SEQ ID NO: 676843 - DNA, 25 bp, Homo sapien
cagaatggcgatattgcctgtatct

SEQ ID NO: 676844 - DNA, 25 bp, Homo sapien
ctccccttaagccttgtgaactggc

SEQ ID NO: 676845 - DNA, 25 bp, Homo sapien
cctgtatctccccttaagccttgtg

SEQ ID NO: 676846 - DNA, 25 bp, Homo sapien
tgcttaataaaggtgattgaaacca

SEQ ID NO: 676847 - DNA, 25 bp, Homo sapien
aggcagtcagggtgaatgccagcat

SEQ ID NO: 676848 - DNA, 25 bp, Homo sapien
taataaaggtgattgaaaccatgtc

SEQ ID NO: 676849 - DNA, 25 bp, Homo sapien
ataaaggtgattgaaaccatgtccc

SEQ ID NO: 676850 - DNA, 25 bp, Homo sapien
cacacctagccagtgtagagcagat

SEQ ID NO: 676851 - DNA, 25 bp, Homo sapien
cccatgggaaatcagtcgatgcaac

SEQ ID NO: 676852 - DNA, 25 bp, Homo sapien
gccagtgtagagcagattcagccca

SEQ ID NO: 676853 - DNA, 25 bp, Homo sapien
tcgatgcaactgtaactgtaagtgc

SEQ ID NO: 676854 - DNA, 25 bp, Homo sapien
tgggagactgtagaactatgtcagt

SEQ ID NO: 676855 - DNA, 25 bp, Homo sapien
gactgtagaactatgtcagtgctga

SEQ ID NO: 676856 - DNA, 25 bp, Homo sapien
gcagctgaaggcttcaggacttcaa

SEQ ID NO: 676857 - DNA, 25 bp, Homo sapien
tatgtcagtgctgatggcagctgaa

SEQ ID NO: 676858 - DNA, 25 bp, Homo sapien
tcctccctgtgcaaaagtgtggcag

SEQ ID NO: 676859 - DNA, 25 bp, Homo sapien
ggtatcacaaagttctggtctcctc

SEQ ID NO: 676860 - DNA, 25 bp, Homo sapien
catgcatgtgaactctggggtatga

SEQ ID NO: 676861 - DNA, 25 bp, Homo sapien
gagatggtgaatgggtaggttgaca

SEQ ID NO: 676862 - DNA, 25 bp, Homo sapien
ggtatggactctagtgcttggcaca

SEQ ID NO: 676863 - DNA, 25 bp, Homo sapien
tgtgagagcccaaatagactacacg

SEQ ID NO: 676864 - DNA, 25 bp, Homo sapien
gcaattaacaggtctgtcacgacgt

SEQ ID NO: 676865 - DNA, 25 bp, Homo sapien
gggatgattacaaacagacacctgg

SEQ ID NO: 676866 - DNA, 25 bp, Homo sapien
gtagcgaaagtcacgtcggcagaga

SEQ ID NO: 676867 - DNA, 25 bp, Homo sapien
cgaaagtcacgtcggcagagagctt

SEQ ID NO: 676868 - DNA, 25 bp, Homo sapien
agtcacgtcggcagagagcttggcc

SEQ ID NO: 676869 - DNA, 25 bp, Homo sapien
actttccacgagccttgtcagcaca

SEQ ID NO: 676870 - DNA, 25 bp, Homo sapien
ttaaattaccagagcttaggaggga

SEQ ID NO: 676871 - DNA, 25 bp, Homo sapien
ggaatatgggcctagagtcagacag

SEQ ID NO: 676872 - DNA, 25 bp, Homo sapien
aactacactgtgcaagaggtctgtg

SEQ ID NO: 676873 - DNA, 25 bp, Homo sapien
gccacgggaaaaggtcatagcatag

SEQ ID NO: 676874 - DNA, 25 bp, Homo sapien
aagattgtcccattcttaatgtcac

SEQ ID NO: 676875 - DNA, 25 bp, Homo sapien
gatagccagttgtaagattgtccca

SEQ ID NO: 676876 - DNA, 25 bp, Homo sapien
tagccagttgtaagattgtcccatt

SEQ ID NO: 676877 - DNA, 25 bp, Homo sapien
gggagatagccagttgtaagattgt

SEQ ID NO: 676878 - DNA, 25 bp, Homo sapien
accatctgcataacggagggtataa

SEQ ID NO: 676879 - DNA, 25 bp, Homo sapien
ccatctgcataacggagggtataat

SEQ ID NO: 676880 - DNA, 25 bp, Homo sapien
gaccatctgcataacggagggtata

SEQ ID NO: 676881 - DNA, 25 bp, Homo sapien
ggaccatctgcataacggagggtat

SEQ ID NO: 676882 - DNA, 25 bp, Homo sapien
agctgccactgttgaaaacgaggtc

SEQ ID NO: 676883 - DNA, 25 bp, Homo sapien
tctttcagtcggagctgccactgtt

SEQ ID NO: 676884 - DNA, 25 bp, Homo sapien
tgaaaacgaggtccatttcaaccta

SEQ ID NO: 676885 - DNA, 25 bp, Homo sapien
ctcaaggtgtaggagtgctctttca

SEQ ID NO: 676886 - DNA, 25 bp, Homo sapien
acttccttgataatggatgccaggg

SEQ ID NO: 676887 - DNA, 25 bp, Homo sapien
aaacttccttgataatggatgccag

SEQ ID NO: 676888 - DNA, 25 bp, Homo sapien
caaacttccttgataatggatgcca

SEQ ID NO: 676889 - DNA, 25 bp, Homo sapien
aacttccttgataatggatgccagg

SEQ ID NO: 676890 - DNA, 25 bp, Homo sapien
aaggagctgggcgttagcacctggc

SEQ ID NO: 676891 - DNA, 25 bp, Homo sapien
ggcgttagcacctggccactcaatg

SEQ ID NO: 676892 - DNA, 25 bp, Homo sapien
ggagctgggcgttagcacctggcca

SEQ ID NO: 676893 - DNA, 25 bp, Homo sapien
ctgggcgttagcacctggccactca

SEQ ID NO: 676894 - DNA, 25 bp, Homo sapien
gcgagacaaaaacacagacacggct

SEQ ID NO: 676895 - DNA, 25 bp, Homo sapien
gagacaaaaacacagacacggctgc

SEQ ID NO: 676896 - DNA, 25 bp, Homo sapien
tgcgagacaaaaacacagacacggc

SEQ ID NO: 676897 - DNA, 25 bp, Homo sapien
ctgcgagacaaaaacacagacacgg

SEQ ID NO: 676898 - DNA, 25 bp, Homo sapien
ttacaggtaaggcaactgaagttca

SEQ ID NO: 676899 - DNA, 25 bp, Homo sapien
ctgaagttcagacggattgacaaac

SEQ ID NO: 676900 - DNA, 25 bp, Homo sapien
gttcagacggattgacaaacttgtt

SEQ ID NO: 676901 - DNA, 25 bp, Homo sapien
gcaactgaagttcagacggattgac

SEQ ID NO: 676902 - DNA, 25 bp, Homo sapien
gttccctctgcgtcccaataccctc

SEQ ID NO: 676903 - DNA, 25 bp, Homo sapien
gtgcaggctgtctggtgttccctct

SEQ ID NO: 676904 - DNA, 25 bp, Homo sapien
tctgcgtcccaataccctctaacta

SEQ ID NO: 676905 - DNA, 25 bp, Homo sapien
taccctctaactacacagtatttcc

SEQ ID NO: 676906 - DNA, 25 bp, Homo sapien
cagtccactgaatgacgatcagact

SEQ ID NO: 676907 - DNA, 25 bp, Homo sapien
tcagtccactgaatgacgatcagac

SEQ ID NO: 676908 - DNA, 25 bp, Homo sapien
actggctttcagattcgcttttgca

SEQ ID NO: 676909 - DNA, 25 bp, Homo sapien
tccagttccaccgtggctctgtggt

SEQ ID NO: 676910 - DNA, 25 bp, Homo sapien
tcagattcgcttttgcagatgccat

SEQ ID NO: 676911 - DNA, 25 bp, Homo sapien
ccaccgtggctctgtggtggaactg

SEQ ID NO: 676912 - DNA, 25 bp, Homo sapien
ccttggcaggtggtactgctacatc

SEQ ID NO: 676913 - DNA, 25 bp, Homo sapien
aggctgggccgaggtatggtgacca

SEQ ID NO: 676914 - DNA, 25 bp, Homo sapien
tatggtgaccaggtcaaaggacttg

SEQ ID NO: 676915 - DNA, 25 bp, Homo sapien
ggtactgctacatctggacacatta

SEQ ID NO: 676916 - DNA, 25 bp, Homo sapien
cagggcgcagacctaggcccagctc

SEQ ID NO: 676917 - DNA, 25 bp, Homo sapien
ctcaacagtggggatagctgtggtt

SEQ ID NO: 676918 - DNA, 25 bp, Homo sapien
cactcaacagtggggatagctgtgg

SEQ ID NO: 676919 - DNA, 25 bp, Homo sapien
tcaacagtggggatagctgtggttt

SEQ ID NO: 676920 - DNA, 25 bp, Homo sapien
caacagtggggatagctgtggtttg

SEQ ID NO: 676921 - DNA, 25 bp, Homo sapien
tgacagtcgtgtcagaggctgtgag

SEQ ID NO: 676922 - DNA, 25 bp, Homo sapien
gacagtcgtgtcagaggctgtgagc

SEQ ID NO: 676923 - DNA, 25 bp, Homo sapien
acagtcgtgtcagaggctgtgagca

SEQ ID NO: 676924 - DNA, 25 bp, Homo sapien
gcagaggcagaagggtacaactcag

SEQ ID NO: 676925 - DNA, 25 bp, Homo sapien
gaagggatccgtgggaggtggcatt

SEQ ID NO: 676926 - DNA, 25 bp, Homo sapien
tgggaggtggcattcgtcactgcac

SEQ ID NO: 676927 - DNA, 25 bp, Homo sapien
gaggcagaagggtacaactcagctg

SEQ ID NO: 676928 - DNA, 25 bp, Homo sapien
ccagtctatagcaggagtctttaca

SEQ ID NO: 676929 - DNA, 25 bp, Homo sapien
gtctttacagtcatccaggctatgg

SEQ ID NO: 676930 - DNA, 25 bp, Homo sapien
tgagggctgccttattagttcacag

SEQ ID NO: 676931 - DNA, 25 bp, Homo sapien
ggcgcctatggctgacaaacccttt

SEQ ID NO: 676932 - DNA, 25 bp, Homo sapien
gtttaattatcagacgtcagcctca

SEQ ID NO: 676933 - DNA, 25 bp, Homo sapien
catgagtgatgagtagaattccaac

SEQ ID NO: 676934 - DNA, 25 bp, Homo sapien
ggagtcctaaaccattgccctgtga

SEQ ID NO: 676935 - DNA, 25 bp, Homo sapien
tgtgggagcagacgcatgtacaatc

SEQ ID NO: 676936 - DNA, 25 bp, Homo sapien
gtaacattgctagcagagtgactgt

SEQ ID NO: 676937 - DNA, 25 bp, Homo sapien
ttcccaggtaacattgctagcagag

SEQ ID NO: 676938 - DNA, 25 bp, Homo sapien
ccaggtaacattgctagcagagtga

SEQ ID NO: 676939 - DNA, 25 bp, Homo sapien
gagtgactgtatccatctatatctt

SEQ ID NO: 676940 - DNA, 25 bp, Homo sapien
tgtatgaggccatgatggatgtacg

SEQ ID NO: 676941 - DNA, 25 bp, Homo sapien
ggtcaccatgcctctcatgtatgag

SEQ ID NO: 676942 - DNA, 25 bp, Homo sapien
taagcgatctgagcccttcttggtc

SEQ ID NO: 676943 - DNA, 25 bp, Homo sapien
ggtgtgaccccaaccttcattccta

SEQ ID NO: 676944 - DNA, 25 bp, Homo sapien
catgcagcctggtactctaagaggt

SEQ ID NO: 676945 - DNA, 25 bp, Homo sapien
gagtgcaaactgatgtaacgaaggt

SEQ ID NO: 676946 - DNA, 25 bp, Homo sapien
tcagaaatgtagatgccagagacct

SEQ ID NO: 676947 - DNA, 25 bp, Homo sapien
tccttgagagcaactaggaagagca

SEQ ID NO: 676948 - DNA, 25 bp, Homo sapien
cattcatgtggtttcactcctatgt

SEQ ID NO: 676949 - DNA, 25 bp, Homo sapien
gaaagatgacttctacctaaacatt

SEQ ID NO: 676950 - DNA, 25 bp, Homo sapien
caaaaggatcatgtttcacattcta

SEQ ID NO: 676951 - DNA, 25 bp, Homo sapien
taattcctattcgttataacctaca

SEQ ID NO: 676952 - DNA, 25 bp, Homo sapien
gagggtgttgataatagttttcttc

SEQ ID NO: 676953 - DNA, 25 bp, Homo sapien
tgcacatggagggtgttgataatag

SEQ ID NO: 676954 - DNA, 25 bp, Homo sapien
gtttctgcacatggagggtgttgat

SEQ ID NO: 676955 - DNA, 25 bp, Homo sapien
caggtttctgcacatggagggtgtt

SEQ ID NO: 676956 - DNA, 25 bp, Homo sapien
aattcgctcatgttttgtgagggct

SEQ ID NO: 676957 - DNA, 25 bp, Homo sapien
agggctgacttttcatagaaggttt

SEQ ID NO: 676958 - DNA, 25 bp, Homo sapien
gtgagggctgacttttcatagaagg

SEQ ID NO: 676959 - DNA, 25 bp, Homo sapien
tgagggctgacttttcatagaaggt

SEQ ID NO: 676960 - DNA, 25 bp, Homo sapien
ctcaggacatctgtaggatttttct

SEQ ID NO: 676961 - DNA, 25 bp, Homo sapien
tcaggacatctgtaggatttttctc

SEQ ID NO: 676962 - DNA, 25 bp, Homo sapien
tgatgcacgacaaggttggatttca

SEQ ID NO: 676963 - DNA, 25 bp, Homo sapien
gacaaggttggatttcacatagaaa

SEQ ID NO: 676964 - DNA, 25 bp, Homo sapien
gcacgacaaggttggatttcacata

SEQ ID NO: 676965 - DNA, 25 bp, Homo sapien
agatctccagcactcattacattta

SEQ ID NO: 676966 - DNA, 25 bp, Homo sapien
ttgagtaaggtttgatttcacacag

SEQ ID NO: 676967 - DNA, 25 bp, Homo sapien
cgtgtgtgagtccttcaatgttgag

SEQ ID NO: 676968 - DNA, 25 bp, Homo sapien
gagtccttcaatgttgagtaaggtt

SEQ ID NO: 676969 - DNA, 25 bp, Homo sapien
gtttgatttcacacagaaggttttc

SEQ ID NO: 676970 - DNA, 25 bp, Homo sapien
catgtgagttctccgatgtactgtg

SEQ ID NO: 676971 - DNA, 25 bp, Homo sapien
gcagaaggactttccacgttcatta

SEQ ID NO: 676972 - DNA, 25 bp, Homo sapien
atttctggcagaaggactttccacg

SEQ ID NO: 676973 - DNA, 25 bp, Homo sapien
ttctctgatgttcagcgtagttgga

SEQ ID NO: 676974 - DNA, 25 bp, Homo sapien
cttcacaaagaaggatttttcacat

SEQ ID NO: 676975 - DNA, 25 bp, Homo sapien
acattcatagggttttcttccgtgt

SEQ ID NO: 676976 - DNA, 25 bp, Homo sapien
ttcatagggttttcttccgtgtgtg

SEQ ID NO: 676977 - DNA, 25 bp, Homo sapien
tcattacattcatagggttttcttc

SEQ ID NO: 676978 - DNA, 25 bp, Homo sapien
tattgcagtcataggttttctcttt

SEQ ID NO: 676979 - DNA, 25 bp, Homo sapien
tttttgtgagctctctggctttgtg

SEQ ID NO: 676980 - DNA, 25 bp, Homo sapien
tttcttacagaagctttctccacat

SEQ ID NO: 676981 - DNA, 25 bp, Homo sapien
agctctctggctttgtgtaagttgt

SEQ ID NO: 676982 - DNA, 25 bp, Homo sapien
ttttccccaagtgccttctctgatg

SEQ ID NO: 676983 - DNA, 25 bp, Homo sapien
accccactttcattacgcccattat

SEQ ID NO: 676984 - DNA, 25 bp, Homo sapien
cccactttcattacgcccattattt

SEQ ID NO: 676985 - DNA, 25 bp, Homo sapien
cttgaggcaccccactttcattacg

SEQ ID NO: 676986 - DNA, 25 bp, Homo sapien
ttctcaaagaaaggtttctcacatt

SEQ ID NO: 676987 - DNA, 25 bp, Homo sapien
tcaaagaaaggtttctcacatttat

SEQ ID NO: 676988 - DNA, 25 bp, Homo sapien
ctcaaagaaaggtttctcacattta

SEQ ID NO: 676989 - DNA, 25 bp, Homo sapien
tctcaaagaaaggtttctcacattt

SEQ ID NO: 676990 - DNA, 25 bp, Homo sapien
cagtttttctctcttgttttaatct

SEQ ID NO: 676991 - DNA, 25 bp, Homo sapien
ctgattgggagtgaggcaagattcc

SEQ ID NO: 676992 - DNA, 25 bp, Homo sapien
tctctcattttgagtatggtataac

SEQ ID NO: 676993 - DNA, 25 bp, Homo sapien
tggtataacttcttcaaggctttct

SEQ ID NO: 676994 - DNA, 25 bp, Homo sapien
tcactatcattacacttgctgggtt

SEQ ID NO: 676995 - DNA, 25 bp, Homo sapien
ttgatgttgggtaaagtttgatttc

SEQ ID NO: 676996 - DNA, 25 bp, Homo sapien
tctttgatgttgggtaaagtttgat

SEQ ID NO: 676997 - DNA, 25 bp, Homo sapien
atgttgggtaaagtttgatttcttg

SEQ ID NO: 676998 - DNA, 25 bp, Homo sapien
tgatgttgggtaaagtttgatttct

SEQ ID NO: 676999 - DNA, 25 bp, Homo sapien
aattcattacattcatagtgtttct

SEQ ID NO: 677000 - DNA, 25 bp, Homo sapien
tcattacattcatagtgtttctctc

SEQ ID NO: 677001 - DNA, 25 bp, Homo sapien
taaattttccaaattcattacattc

SEQ ID NO: 677002 - DNA, 25 bp, Homo sapien
ctaaattttccaaattcattacatt

SEQ ID NO: 677003 - DNA, 25 bp, Homo sapien
tgaggcacaattacataaccgctga

SEQ ID NO: 677004 - DNA, 25 bp, Homo sapien
ccccgtactcctataaagtcaagag

SEQ ID NO: 677005 - DNA, 25 bp, Homo sapien
gcatgtccctaaattccagatgtgg

SEQ ID NO: 677006 - DNA, 25 bp, Homo sapien
catttcatagaataggaaagcgagg

SEQ ID NO: 677007 - DNA, 25 bp, Homo sapien
tcttggcaacctccgacatgatgag

SEQ ID NO: 677008 - DNA, 25 bp, Homo sapien
tttcccagacgtccttggtgcagct

SEQ ID NO: 677009 - DNA, 25 bp, Homo sapien
ttatcagagggtgggaacctcccag

SEQ ID NO: 677010 - DNA, 25 bp, Homo sapien
aagaatcgggaattgcttcaagagc

SEQ ID NO: 677011 - DNA, 25 bp, Homo sapien
ttatcttcttcgtggcacctgcaga

SEQ ID NO: 677012 - DNA, 25 bp, Homo sapien
tattctgatcaggaaacctgttccc

SEQ ID NO: 677013 - DNA, 25 bp, Homo sapien
tttcccggagccctttattctgatc

SEQ ID NO: 677014 - DNA, 25 bp, Homo sapien
ttaacatgtgaatgccttttcccgg

SEQ ID NO: 677015 - DNA, 25 bp, Homo sapien
gagcgcatcgttagtgcagcacctg

SEQ ID NO: 677016 - DNA, 25 bp, Homo sapien
cacctggtcgctgagttacgcgtag

SEQ ID NO: 677017 - DNA, 25 bp, Homo sapien
taaggaacaaggaggaagtctgcac

SEQ ID NO: 677018 - DNA, 25 bp, Homo sapien
cgcggaggctccacgctgatcagag

SEQ ID NO: 677019 - DNA, 25 bp, Homo sapien
ccttccttaaggaacgtctgaagag

SEQ ID NO: 677020 - DNA, 25 bp, Homo sapien
ttgggggatttgtggtccaaagtca

SEQ ID NO: 677021 - DNA, 25 bp, Homo sapien
gatccatcaacttccagactccgtt

SEQ ID NO: 677022 - DNA, 25 bp, Homo sapien
aagagtttctggcttacttggcaag

SEQ ID NO: 677023 - DNA, 25 bp, Homo sapien
ttttatttggagccctagttcctca

SEQ ID NO: 677024 - DNA, 25 bp, Homo sapien
agttcctcataacccaccaggtagg

SEQ ID NO: 677025 - DNA, 25 bp, Homo sapien
gccctagttcctcataacccaccag

SEQ ID NO: 677026 - DNA, 25 bp, Homo sapien
cctagttcctcataacccaccaggt

SEQ ID NO: 677027 - DNA, 25 bp, Homo sapien
gccagttcacatgccacgcaaggtg

SEQ ID NO: 677028 - DNA, 25 bp, Homo sapien
taaaaattattaagacagcacctgg

SEQ ID NO: 677029 - DNA, 25 bp, Homo sapien
aggtcacagattgagaagacaggcc

SEQ ID NO: 677030 - DNA, 25 bp, Homo sapien
gaaacatgggcactgtcacaccacc

SEQ ID NO: 677031 - DNA, 25 bp, Homo sapien
tcttccagatcatcatggaacaagt

SEQ ID NO: 677032 - DNA, 25 bp, Homo sapien
gatcatcatggaacaagtcccactc

SEQ ID NO: 677033 - DNA, 25 bp, Homo sapien
attttcaaagtctgtcagttcatcg

SEQ ID NO: 677034 - DNA, 25 bp, Homo sapien
aagtctgtcagttcatcgtccccat

SEQ ID NO: 677035 - DNA, 25 bp, Homo sapien
cattgttgtcaaaggggtcattgtt

SEQ ID NO: 677036 - DNA, 25 bp, Homo sapien
tgttgtcaaaggggtcattgttctc

SEQ ID NO: 677037 - DNA, 25 bp, Homo sapien
ttcattgttgtcaaaggggtcattg

SEQ ID NO: 677038 - DNA, 25 bp, Homo sapien
tcattgttgtcaaaggggtcattgt

SEQ ID NO: 677039 - DNA, 25 bp, Homo sapien
gcctgtctctgtgtatcctttctat

SEQ ID NO: 677040 - DNA, 25 bp, Homo sapien
cctgtctctgtgtatcctttctatg

SEQ ID NO: 677041 - DNA, 25 bp, Homo sapien
gggcccagtatctgtttgcctgtct

SEQ ID NO: 677042 - DNA, 25 bp, Homo sapien
tgcctgtctctgtgtatcctttcta

SEQ ID NO: 677043 - DNA, 25 bp, Homo sapien
ctccttgactttctggatgagtttc

SEQ ID NO: 677044 - DNA, 25 bp, Homo sapien
tggagaggatcccaaagccacgctc

SEQ ID NO: 677045 - DNA, 25 bp, Homo sapien
tcttgctctcaaatagcttagtgcc

SEQ ID NO: 677046 - DNA, 25 bp, Homo sapien
cacttgtgaatatacttgagacagt

SEQ ID NO: 677047 - DNA, 25 bp, Homo sapien
atccggcattctgggtaggacacta

SEQ ID NO: 677048 - DNA, 25 bp, Homo sapien
gatcccacacatcgtatccttgctg

SEQ ID NO: 677049 - DNA, 25 bp, Homo sapien
acacatcgtatccttgctgcactgc

SEQ ID NO: 677050 - DNA, 25 bp, Homo sapien
gcagatcccacacatcgtatccttg

SEQ ID NO: 677051 - DNA, 25 bp, Homo sapien
cccacacatcgtatccttgctgcac

SEQ ID NO: 677052 - DNA, 25 bp, Homo sapien
caagcggtccaactatgaatgagag

SEQ ID NO: 677053 - DNA, 25 bp, Homo sapien
cattggaggtaggacctgcagctta

SEQ ID NO: 677054 - DNA, 25 bp, Homo sapien
tgtacgctgcagtagagttgcccag

SEQ ID NO: 677055 - DNA, 25 bp, Homo sapien
tcagagagggaatgcaagtagcgac

SEQ ID NO: 677056 - DNA, 25 bp, Homo sapien
taaaaatctgcttcaccctcacacg

SEQ ID NO: 677057 - DNA, 25 bp, Homo sapien
ggaatatatgtacgctaatgctgcc

SEQ ID NO: 677058 - DNA, 25 bp, Homo sapien
tataaggtgagatgttaggtaccca

SEQ ID NO: 677059 - DNA, 25 bp, Homo sapien
tagtacagtctatgccaggattttg

SEQ ID NO: 677060 - DNA, 25 bp, Homo sapien
catacacccttaagcaaactgatgg

SEQ ID NO: 677061 - DNA, 25 bp, Homo sapien
tggctcattggctcgccttcagggt

SEQ ID NO: 677062 - DNA, 25 bp, Homo sapien
cctctgggatgcttgggttcacagg

SEQ ID NO: 677063 - DNA, 25 bp, Homo sapien
ggtgctccataaaagacagttaatt

SEQ ID NO: 677064 - DNA, 25 bp, Homo sapien
tttacactttaaccacccaagcatg

SEQ ID NO: 677065 - DNA, 25 bp, Homo sapien
cattcttgtacacaaattctggtga

SEQ ID NO: 677066 - DNA, 25 bp, Homo sapien
tatttcagtatatgagtacactgcc

SEQ ID NO: 677067 - DNA, 25 bp, Homo sapien
caagcatgcattcataaacactcca

SEQ ID NO: 677068 - DNA, 25 bp, Homo sapien
tcaataatgaccctgtcgcacagta

SEQ ID NO: 677069 - DNA, 25 bp, Homo sapien
gtttcgtgccctcaatgaatctggg

SEQ ID NO: 677070 - DNA, 25 bp, Homo sapien
tactagcatgtcaaccagcattggc

SEQ ID NO: 677071 - DNA, 25 bp, Homo sapien
aaatatccaaatagagcatcggccc

SEQ ID NO: 677072 - DNA, 25 bp, Homo sapien
taaatcatgttcatattgggttctc

SEQ ID NO: 677073 - DNA, 25 bp, Homo sapien
gagcaagatcagtatacacatacac

SEQ ID NO: 677074 - DNA, 25 bp, Homo sapien
taaatagcacaatttccccccatct

SEQ ID NO: 677075 - DNA, 25 bp, Homo sapien
aggaaaagagcaagatcagtataca

SEQ ID NO: 677076 - DNA, 25 bp, Homo sapien
gataagcccacttcctcatgcctgg

SEQ ID NO: 677077 - DNA, 25 bp, Homo sapien
gaagactatggagttagcagacaac

SEQ ID NO: 677078 - DNA, 25 bp, Homo sapien
taccatgggtgcatagagtacaatg

SEQ ID NO: 677079 - DNA, 25 bp, Homo sapien
tatacttgcaggtcagcccacaatg

SEQ ID NO: 677080 - DNA, 25 bp, Homo sapien
tcacacctcgtaacatacactatca

SEQ ID NO: 677081 - DNA, 25 bp, Homo sapien
cacacctcgtaacatacactatcaa

SEQ ID NO: 677082 - DNA, 25 bp, Homo sapien
acacctcgtaacatacactatcaag

SEQ ID NO: 677083 - DNA, 25 bp, Homo sapien
aaaagggaggcacatttggcataac

SEQ ID NO: 677084 - DNA, 25 bp, Homo sapien
tcatagttcacaatgaataatacat

SEQ ID NO: 677085 - DNA, 25 bp, Homo sapien
tctgatgttacattgagggttgact

SEQ ID NO: 677086 - DNA, 25 bp, Homo sapien
tcctctatacatactcacagtttag

SEQ ID NO: 677087 - DNA, 25 bp, Homo sapien
aagaaagtttgatttgtggcgaaat

SEQ ID NO: 677088 - DNA, 25 bp, Homo sapien
tgatttgtggcgaaatgttttctca

SEQ ID NO: 677089 - DNA, 25 bp, Homo sapien
agtttgatttgtggcgaaatgtttt

SEQ ID NO: 677090 - DNA, 25 bp, Homo sapien
gatttgtggcgaaatgttttctcac

SEQ ID NO: 677091 - DNA, 25 bp, Homo sapien
cagtgagagtccacaggcgacggta

SEQ ID NO: 677092 - DNA, 25 bp, Homo sapien
tctatggactctgaaggctgactta

SEQ ID NO: 677093 - DNA, 25 bp, Homo sapien
ctgatgttcagtgagagtccacagg

SEQ ID NO: 677094 - DNA, 25 bp, Homo sapien
gactctgaaggctgacttatggcag

SEQ ID NO: 677095 - DNA, 25 bp, Homo sapien
tggtctctcccatatagttctctga

SEQ ID NO: 677096 - DNA, 25 bp, Homo sapien
tgtgagtttttgctgacggcatgcc

SEQ ID NO: 677097 - DNA, 25 bp, Homo sapien
gttcattctcttacactgactgcag

SEQ ID NO: 677098 - DNA, 25 bp, Homo sapien
ttcacaatggagattctaccacatt

SEQ ID NO: 677099 - DNA, 25 bp, Homo sapien
tcttcggtgtcgagtgaggcttgtc

SEQ ID NO: 677100 - DNA, 25 bp, Homo sapien
ggctgactgacagaagaaggttttc

SEQ ID NO: 677101 - DNA, 25 bp, Homo sapien
tctgatgcgcagtaagggctgactg

SEQ ID NO: 677102 - DNA, 25 bp, Homo sapien
tgacttcttcgatgcacattgaggg

SEQ ID NO: 677103 - DNA, 25 bp, Homo sapien
tgagaattgccctcttgaagaaggt

SEQ ID NO: 677104 - DNA, 25 bp, Homo sapien
taagattttcgttttgattgctggc

SEQ ID NO: 677105 - DNA, 25 bp, Homo sapien
ctgtctccccttttgtgtaatgaga

SEQ ID NO: 677106 - DNA, 25 bp, Homo sapien
gattgctggctttcctcattggatt

SEQ ID NO: 677107 - DNA, 25 bp, Homo sapien
tattcatgcccagattaagtgtttt

SEQ ID NO: 677108 - DNA, 25 bp, Homo sapien
attcatgcccagattaagtgttttc

SEQ ID NO: 677109 - DNA, 25 bp, Homo sapien
atttatagggcatttttcttgaggg

SEQ ID NO: 677110 - DNA, 25 bp, Homo sapien
actattcatgcccagattaagtgtt

SEQ ID NO: 677111 - DNA, 25 bp, Homo sapien
agtttgtgtcaaatgtttatcttgg

SEQ ID NO: 677112 - DNA, 25 bp, Homo sapien
cagtttgtgtcaaatgtttatcttg

SEQ ID NO: 677113 - DNA, 25 bp, Homo sapien
acagtttgtgtcaaatgtttatctt

SEQ ID NO: 677114 - DNA, 25 bp, Homo sapien
atttgagaattcctccactatccat

SEQ ID NO: 677115 - DNA, 25 bp, Homo sapien
ggaccaagatctttggacatcagag

SEQ ID NO: 677116 - DNA, 25 bp, Homo sapien
ggaaattacagaacttggaccaaga

SEQ ID NO: 677117 - DNA, 25 bp, Homo sapien
tgttaatgggaaattacagaacttg

SEQ ID NO: 677118 - DNA, 25 bp, Homo sapien
aacttggaccaagatctttggacat

SEQ ID NO: 677119 - DNA, 25 bp, Homo sapien
tgaagaatgaagaaagtacagcttc

SEQ ID NO: 677120 - DNA, 25 bp, Homo sapien
aagaatgaagaaagtacagcttcag

SEQ ID NO: 677121 - DNA, 25 bp, Homo sapien
gaatgaagaaagtacagcttcagaa

SEQ ID NO: 677122 - DNA, 25 bp, Homo sapien
aatgaagaaagtacagcttcagaag

SEQ ID NO: 677123 - DNA, 25 bp, Homo sapien
ccacagagaccaagttgctgtagtt

SEQ ID NO: 677124 - DNA, 25 bp, Homo sapien
ccaagttgctgtagttctccagcat

SEQ ID NO: 677125 - DNA, 25 bp, Homo sapien
agaccaagttgctgtagttctccag

SEQ ID NO: 677126 - DNA, 25 bp, Homo sapien
cacagagaccaagttgctgtagttc

SEQ ID NO: 677127 - DNA, 25 bp, Homo sapien
gggtgaagttcacagtcaggtcctg

SEQ ID NO: 677128 - DNA, 25 bp, Homo sapien
tcaggtcctggaatgaaactggtat

SEQ ID NO: 677129 - DNA, 25 bp, Homo sapien
cagtcaggtcctggaatgaaactgg

SEQ ID NO: 677130 - DNA, 25 bp, Homo sapien
gctgccattcctcttgggtgaagtt

SEQ ID NO: 677131 - DNA, 25 bp, Homo sapien
cataaactataagaagaccactgcc

SEQ ID NO: 677132 - DNA, 25 bp, Homo sapien
gaccactgccatggctaatggaaag

SEQ ID NO: 677133 - DNA, 25 bp, Homo sapien
taatcttgggtgaccaaaattgagt

SEQ ID NO: 677134 - DNA, 25 bp, Homo sapien
gagtgatatcaaatgtatggtaaca

SEQ ID NO: 677135 - DNA, 25 bp, Homo sapien
aatgtgctgagcttataccatgtcc

SEQ ID NO: 677136 - DNA, 25 bp, Homo sapien
ctatagagagatgtaattgtgggag

SEQ ID NO: 677137 - DNA, 25 bp, Homo sapien
ttataccatgtcctggagctattcc

SEQ ID NO: 677138 - DNA, 25 bp, Homo sapien
ccaattgcctggattactaatcaca

SEQ ID NO: 677139 - DNA, 25 bp, Homo sapien
gaaatttagatagtacggcacatca

SEQ ID NO: 677140 - DNA, 25 bp, Homo sapien
tacacaagatgaagggtgatcacaa

SEQ ID NO: 677141 - DNA, 25 bp, Homo sapien
caagaatagaagtccagtgaattgc

SEQ ID NO: 677142 - DNA, 25 bp, Homo sapien
gagcaatgctggacatatacacaag

SEQ ID NO: 677143 - DNA, 25 bp, Homo sapien
tcagtccgtgggcaaaatctaggcc

SEQ ID NO: 677144 - DNA, 25 bp, Homo sapien
tcagtcctacataacgggaggcaag

SEQ ID NO: 677145 - DNA, 25 bp, Homo sapien
tattatttcacatgatcagctgggc

SEQ ID NO: 677146 - DNA, 25 bp, Homo sapien
tacaggacatgagcacaggtagttc

SEQ ID NO: 677147 - DNA, 25 bp, Homo sapien
ttgaggtaggctgatcgctggagct

SEQ ID NO: 677148 - DNA, 25 bp, Homo sapien
gaggttgaggtaggctgatcgctgg

SEQ ID NO: 677149 - DNA, 25 bp, Homo sapien
ggttgaggtaggctgatcgctggag

SEQ ID NO: 677150 - DNA, 25 bp, Homo sapien
gaggtaggctgatcgctggagctca

SEQ ID NO: 677151 - DNA, 25 bp, Homo sapien
tggtggcatgtgctactcgggtggc

SEQ ID NO: 677152 - DNA, 25 bp, Homo sapien
gacagacggaaagaatggacggatg

SEQ ID NO: 677153 - DNA, 25 bp, Homo sapien
aaggatacaccagaaactcatgaaa

SEQ ID NO: 677154 - DNA, 25 bp, Homo sapien
aaactggttacattcaggggagagg

SEQ ID NO: 677155 - DNA, 25 bp, Homo sapien
ggtgagttaacttgcgcacacttcc

SEQ ID NO: 677156 - DNA, 25 bp, Homo sapien
gtaccacacctcatggtgtgtggtt

SEQ ID NO: 677157 - DNA, 25 bp, Homo sapien
gcgcacacttccaggttgcatcatc

SEQ ID NO: 677158 - DNA, 25 bp, Homo sapien
tcaaggttcacccacggtgagttaa

SEQ ID NO: 677159 - DNA, 25 bp, Homo sapien
ttctcttgagaaagggccaagagtg

SEQ ID NO: 677160 - DNA, 25 bp, Homo sapien
gttctcttgagaaagggccaagagt

SEQ ID NO: 677161 - DNA, 25 bp, Homo sapien
caagcgccttcttcgggcaaatcag

SEQ ID NO: 677162 - DNA, 25 bp, Homo sapien
taaactcagtaaatcccaggtgagg

SEQ ID NO: 677163 - DNA, 25 bp, Homo sapien
tgtggtagatgacaaaagccctgac

SEQ ID NO: 677164 - DNA, 25 bp, Homo sapien
tctcgcagatacctccagtgaagtg

SEQ ID NO: 677165 - DNA, 25 bp, Homo sapien
ctccgacgcccgagtgctcagagct

SEQ ID NO: 677166 - DNA, 25 bp, Homo sapien
gagtgctcagagctcgccgccagcc

SEQ ID NO: 677167 - DNA, 25 bp, Homo sapien
cgttccctccgacgcccgagtgctc

SEQ ID NO: 677168 - DNA, 25 bp, Homo sapien
gtgctcagagctcgccgccagccct

SEQ ID NO: 677169 - DNA, 25 bp, Homo sapien
taggttgtgggtgcacccgcttcgc

SEQ ID NO: 677170 - DNA, 25 bp, Homo sapien
ggttgtgggtgcacccgcttcgcct

SEQ ID NO: 677171 - DNA, 25 bp, Homo sapien
ctataggttgtgggtgcacccgctt

SEQ ID NO: 677172 - DNA, 25 bp, Homo sapien
tataggttgtgggtgcacccgcttc

SEQ ID NO: 677173 - DNA, 25 bp, Homo sapien
taaaaaacaggaacagcacatgcgc

SEQ ID NO: 677174 - DNA, 25 bp, Homo sapien
agagcctggcgaaccggaagggcgt

SEQ ID NO: 677175 - DNA, 25 bp, Homo sapien
caggtccaagtctcggcgggaccag

SEQ ID NO: 677176 - DNA, 25 bp, Homo sapien
gaccagggattcacgggctgcagga

SEQ ID NO: 677177 - DNA, 25 bp, Homo sapien
agtccccagaaggcgtcgcggccac

SEQ ID NO: 677178 - DNA, 25 bp, Homo sapien
ctttccggaccacagtccccagaag

SEQ ID NO: 677179 - DNA, 25 bp, Homo sapien
acagtccccagaaggcgtcgcggcc

SEQ ID NO: 677180 - DNA, 25 bp, Homo sapien
tccccagaaggcgtcgcggccaccg

SEQ ID NO: 677181 - DNA, 25 bp, Homo sapien
tcctgagctggcttatttagtccat

SEQ ID NO: 677182 - DNA, 25 bp, Homo sapien
ctgaccttgttggggcaactcttcc

SEQ ID NO: 677183 - DNA, 25 bp, Homo sapien
tgaccttgttggggcaactcttcct

SEQ ID NO: 677184 - DNA, 25 bp, Homo sapien
tcatataactaggaaggacaagggt

SEQ ID NO: 677185 - DNA, 25 bp, Homo sapien
caaacaaggttgtcagaattcccag

SEQ ID NO: 677186 - DNA, 25 bp, Homo sapien
tagaccagtgatgctatccagggaa

SEQ ID NO: 677187 - DNA, 25 bp, Homo sapien
caataaaggtcactaactgggctga

SEQ ID NO: 677188 - DNA, 25 bp, Homo sapien
gacattgttgccatagccagcaagt

SEQ ID NO: 677189 - DNA, 25 bp, Homo sapien
cagccacgctcggacttaggcatca

SEQ ID NO: 677190 - DNA, 25 bp, Homo sapien
cggacttaggcatcaggacctgcag

SEQ ID NO: 677191 - DNA, 25 bp, Homo sapien
gcagctgaggaacgtgctgacattg

SEQ ID NO: 677192 - DNA, 25 bp, Homo sapien
gaggcagaggaataacgtaatctaa

SEQ ID NO: 677193 - DNA, 25 bp, Homo sapien
ggcagaggaataacgtaatctaaga

SEQ ID NO: 677194 - DNA, 25 bp, Homo sapien
gaaaggccctgaaggaatttgaggc

SEQ ID NO: 677195 - DNA, 25 bp, Homo sapien
ttgaggcagaggaataacgtaatct

SEQ ID NO: 677196 - DNA, 25 bp, Homo sapien
tctaacaagtagagcagttggtgca

SEQ ID NO: 677197 - DNA, 25 bp, Homo sapien
gatgagatgagcctgatcgccaacc

SEQ ID NO: 677198 - DNA, 25 bp, Homo sapien
tcgcctttgcatggttctttaccgg

SEQ ID NO: 677199 - DNA, 25 bp, Homo sapien
gaaattcatgatgcaaggtctccat

SEQ ID NO: 677200 - DNA, 25 bp, Homo sapien
gcggcacaggaccaaggttacaact

SEQ ID NO: 677201 - DNA, 25 bp, Homo sapien
ccctgcgtgggaagtaggtcacatc

SEQ ID NO: 677202 - DNA, 25 bp, Homo sapien
tatccatgccggaggcttgcaggca

SEQ ID NO: 677203 - DNA, 25 bp, Homo sapien
tgctctcggttcttaaggcatccag

SEQ ID NO: 677204 - DNA, 25 bp, Homo sapien
aggcggcgggcgtaggcctccagga

SEQ ID NO: 677205 - DNA, 25 bp, Homo sapien
ctgtgaagaaggaagcggcgatggc

SEQ ID NO: 677206 - DNA, 25 bp, Homo sapien
cggcgatggcatgccgcaggcggcg

SEQ ID NO: 677207 - DNA, 25 bp, Homo sapien
cagcgggcggaggtgaggcggagct

SEQ ID NO: 677208 - DNA, 25 bp, Homo sapien
ggaggcccaacataaacagccctgt

SEQ ID NO: 677209 - DNA, 25 bp, Homo sapien
tagatattgtcaaaccgcaggtctg

SEQ ID NO: 677210 - DNA, 25 bp, Homo sapien
tagcaatggaggtaccatgccgact

SEQ ID NO: 677211 - DNA, 25 bp, Homo sapien
tacttgaccgtgagcgtgatgggca

SEQ ID NO: 677212 - DNA, 25 bp, Homo sapien
aacaggctgggagaaggcgtcccag

SEQ ID NO: 677213 - DNA, 25 bp, Homo sapien
ttccagaaccccaagtgccaggacc

SEQ ID NO: 677214 - DNA, 25 bp, Homo sapien
tgcacacaaggaaattgaagggcat

SEQ ID NO: 677215 - DNA, 25 bp, Homo sapien
ctgcacacaaggaaattgaagggca

SEQ ID NO: 677216 - DNA, 25 bp, Homo sapien
aatggcagtggtttcaggcgggcgg

SEQ ID NO: 677217 - DNA, 25 bp, Homo sapien
gcagtggtttcaggcgggcggtcgc

SEQ ID NO: 677218 - DNA, 25 bp, Homo sapien
cggtcttgacaagttgctcagctgc

SEQ ID NO: 677219 - DNA, 25 bp, Homo sapien
ccggtcttgacaagttgctcagctg

SEQ ID NO: 677220 - DNA, 25 bp, Homo sapien
gggaatcgctgggacttgggaatcc

SEQ ID NO: 677221 - DNA, 25 bp, Homo sapien
ggaatcgctgggacttgggaatccc

SEQ ID NO: 677222 - DNA, 25 bp, Homo sapien
gaagtgggggaatcgctgggacttg

SEQ ID NO: 677223 - DNA, 25 bp, Homo sapien
tgggggaatcgctgggacttgggaa

SEQ ID NO: 677224 - DNA, 25 bp, Homo sapien
caggctgtcctgaaagccagttcct

SEQ ID NO: 677225 - DNA, 25 bp, Homo sapien
cctctccagcatctctgtaccccat

SEQ ID NO: 677226 - DNA, 25 bp, Homo sapien
gacacctctccagcatctctgtacc

SEQ ID NO: 677227 - DNA, 25 bp, Homo sapien
cacctctccagcatctctgtacccc

SEQ ID NO: 677228 - DNA, 25 bp, Homo sapien
ctggaatgcagacacctctccagca

SEQ ID NO: 677229 - DNA, 25 bp, Homo sapien
gaaccagacatatacttgggagaga

SEQ ID NO: 677230 - DNA, 25 bp, Homo sapien
gaggtcaactctgtggaatccccag

SEQ ID NO: 677231 - DNA, 25 bp, Homo sapien
tgttctaggaactggagttacagca

SEQ ID NO: 677232 - DNA, 25 bp, Homo sapien
agggtgacattttagacaggaggtc

SEQ ID NO: 677233 - DNA, 25 bp, Homo sapien
gttcagcctcaagggagtcctccag

SEQ ID NO: 677234 - DNA, 25 bp, Homo sapien
gatacctgggctttgaactgcatga

SEQ ID NO: 677235 - DNA, 25 bp, Homo sapien
ccaatactgggctaatgctgggcca

SEQ ID NO: 677236 - DNA, 25 bp, Homo sapien
gcttgcctgagacattttaccctgg

SEQ ID NO: 677237 - DNA, 25 bp, Homo sapien
ggtattcatagccaaactgagcagc

SEQ ID NO: 677238 - DNA, 25 bp, Homo sapien
tcagagggtccgaaatgtgtcattg

SEQ ID NO: 677239 - DNA, 25 bp, Homo sapien
ttgaccgagtacatatcagcccagt

SEQ ID NO: 677240 - DNA, 25 bp, Homo sapien
tgggtggcaatgctgtgacattgac

SEQ ID NO: 677241 - DNA, 25 bp, Homo sapien
aggattagagggagtcgggccgaca

SEQ ID NO: 677242 - DNA, 25 bp, Homo sapien
ggaagccctggcaccttcggaggat

SEQ ID NO: 677243 - DNA, 25 bp, Homo sapien
ccctggcaccttcggaggattagag

SEQ ID NO: 677244 - DNA, 25 bp, Homo sapien
aagccctggcaccttcggaggatta

SEQ ID NO: 677245 - DNA, 25 bp, Homo sapien
aggcaaaggagcagccgactgtgcc

SEQ ID NO: 677246 - DNA, 25 bp, Homo sapien
tgtgcccggaatcatcagatacagg

SEQ ID NO: 677247 - DNA, 25 bp, Homo sapien
ttgagaccgggagcatgaaggcaaa

SEQ ID NO: 677248 - DNA, 25 bp, Homo sapien
ctttgaccagcaagtgtccagaggc

SEQ ID NO: 677249 - DNA, 25 bp, Homo sapien
gagggacacaaagacgtagagacag

SEQ ID NO: 677250 - DNA, 25 bp, Homo sapien
acgcagagcgaccacagcaagaggg

SEQ ID NO: 677251 - DNA, 25 bp, Homo sapien
acccggagagagaccaacgcagagc

SEQ ID NO: 677252 - DNA, 25 bp, Homo sapien
gaaagagggacacaaagacgtagag

SEQ ID NO: 677253 - DNA, 25 bp, Homo sapien
tatcagcgtgggttacattaaggta

SEQ ID NO: 677254 - DNA, 25 bp, Homo sapien
tgcaaatctgctagctctcacccag

SEQ ID NO: 677255 - DNA, 25 bp, Homo sapien
gctataaattgagtggccatgtcta

SEQ ID NO: 677256 - DNA, 25 bp, Homo sapien
gtataaaagctacctgatcatgtgt

SEQ ID NO: 677257 - DNA, 25 bp, Homo sapien
ctagaaaactctccatgtcaccatg

SEQ ID NO: 677258 - DNA, 25 bp, Homo sapien
tgctggcaaactcagtgaagaaggc

SEQ ID NO: 677259 - DNA, 25 bp, Homo sapien
aagatgatgatggtcgccgtgttgc

SEQ ID NO: 677260 - DNA, 25 bp, Homo sapien
tgaagaaggcgatgaccacagtgat

SEQ ID NO: 677261 - DNA, 25 bp, Homo sapien
ccaggaccggcaggaagatgatgat

SEQ ID NO: 677262 - DNA, 25 bp, Homo sapien
cggcaaagctgaggatgtcaaaata

SEQ ID NO: 677263 - DNA, 25 bp, Homo sapien
cattataaccacaaaacggcaaagc

SEQ ID NO: 677264 - DNA, 25 bp, Homo sapien
aatgcatccttaaataactgaccca

SEQ ID NO: 677265 - DNA, 25 bp, Homo sapien
taactgacccaacacatcattataa

SEQ ID NO: 677266 - DNA, 25 bp, Homo sapien
caaagagtctgacctgacagctctg

SEQ ID NO: 677267 - DNA, 25 bp, Homo sapien
ctctgtgcgcaattaaagggagagg

SEQ ID NO: 677268 - DNA, 25 bp, Homo sapien
tgacagctctgtgcgcaattaaagg

SEQ ID NO: 677269 - DNA, 25 bp, Homo sapien
ctggcaaagagtctgacctgacagc

SEQ ID NO: 677270 - DNA, 25 bp, Homo sapien
tggattgcatccagggacctccgat

SEQ ID NO: 677271 - DNA, 25 bp, Homo sapien
aagcattctggtcgctcctgggcca

SEQ ID NO: 677272 - DNA, 25 bp, Homo sapien
ggaaccaggatgtgccataagcatt

SEQ ID NO: 677273 - DNA, 25 bp, Homo sapien
gggacctccgatcctcaggaggctg

SEQ ID NO: 677274 - DNA, 25 bp, Homo sapien
acagcctttggccatggcgaagccc

SEQ ID NO: 677275 - DNA, 25 bp, Homo sapien
gaaggatgatgttccagggcactgt

SEQ ID NO: 677276 - DNA, 25 bp, Homo sapien
caagggctctgtctctgtgttggga

SEQ ID NO: 677277 - DNA, 25 bp, Homo sapien
ggtcagcaagggctctgtctctgtg

SEQ ID NO: 677278 - DNA, 25 bp, Homo sapien
tcagcacacactcagggccgctcag

SEQ ID NO: 677279 - DNA, 25 bp, Homo sapien
gagagggattcagcacacactcagg

SEQ ID NO: 677280 - DNA, 25 bp, Homo sapien
gcagagagagggattcagcacacac

SEQ ID NO: 677281 - DNA, 25 bp, Homo sapien
agggattcagcacacactcagggcc

SEQ ID NO: 677282 - DNA, 25 bp, Homo sapien
caggaagccaaagtgtggatccagc

SEQ ID NO: 677283 - DNA, 25 bp, Homo sapien
gccaaagtgtggatccagcatttga

SEQ ID NO: 677284 - DNA, 25 bp, Homo sapien
agtgtggatccagcatttgacttgg

SEQ ID NO: 677285 - DNA, 25 bp, Homo sapien
tgtggatccagcatttgacttggag

SEQ ID NO: 677286 - DNA, 25 bp, Homo sapien
gcaggtgtatgaagcccacaggtgt

SEQ ID NO: 677287 - DNA, 25 bp, Homo sapien
gcaagcatgcagtccacaagtgtat

SEQ ID NO: 677288 - DNA, 25 bp, Homo sapien
tatgcagcccgcaggtgtatgaagc

SEQ ID NO: 677289 - DNA, 25 bp, Homo sapien
catgcaacccacaggtgtatgcagc

SEQ ID NO: 677290 - DNA, 25 bp, Homo sapien
tcttgttatgtggcccaggctcttc

SEQ ID NO: 677291 - DNA, 25 bp, Homo sapien
accacacaggctaatttcttaaatt

SEQ ID NO: 677292 - DNA, 25 bp, Homo sapien
aaccttgaactcctcaatcttcctg

SEQ ID NO: 677293 - DNA, 25 bp, Homo sapien
ttcttaaatttctggagacaggctc

SEQ ID NO: 677294 - DNA, 25 bp, Homo sapien
tgaagactgtagttgctaacccctg

SEQ ID NO: 677295 - DNA, 25 bp, Homo sapien
ttttccatgtgtggctccctgggca

SEQ ID NO: 677296 - DNA, 25 bp, Homo sapien
caccttctggtagacatctgctgga

SEQ ID NO: 677297 - DNA, 25 bp, Homo sapien
agggagtcgcaagctggcaatctga

SEQ ID NO: 677298 - DNA, 25 bp, Homo sapien
gagaccccagccttgaccaccttac

SEQ ID NO: 677299 - DNA, 25 bp, Homo sapien
cgagaccccagccttgaccacctta

SEQ ID NO: 677300 - DNA, 25 bp, Homo sapien
gaacaagatggtgacaatagccacg

SEQ ID NO: 677301 - DNA, 25 bp, Homo sapien
tagccacgccggtgacagcatcaga

SEQ ID NO: 677302 - DNA, 25 bp, Homo sapien
gaagtcaaaccaccacttgagagag

SEQ ID NO: 677303 - DNA, 25 bp, Homo sapien
tgggacgggaagaagaacaagatgg

SEQ ID NO: 677304 - DNA, 25 bp, Homo sapien
tctgtagaccctggcctgaaactca

SEQ ID NO: 677305 - DNA, 25 bp, Homo sapien
tctctgggcagtgggacataaagtg

SEQ ID NO: 677306 - DNA, 25 bp, Homo sapien
ggtataccattcatttgccaacagg

SEQ ID NO: 677307 - DNA, 25 bp, Homo sapien
tgtatgcagtccgataacagcgtga

SEQ ID NO: 677308 - DNA, 25 bp, Homo sapien
aatgcttataatgcccattttgcat

SEQ ID NO: 677309 - DNA, 25 bp, Homo sapien
tgaaatgcttataatgcccattttg

SEQ ID NO: 677310 - DNA, 25 bp, Homo sapien
acattttctgtattgttgaaatgct

SEQ ID NO: 677311 - DNA, 25 bp, Homo sapien
cattttctgtattgttgaaatgctt

SEQ ID NO: 677312 - DNA, 25 bp, Homo sapien
agccagggatgaacttcgggtcccg

SEQ ID NO: 677313 - DNA, 25 bp, Homo sapien
cagccagggatgaacttcgggtccc

SEQ ID NO: 677314 - DNA, 25 bp, Homo sapien
ccagccagggatgaacttcgggtcc

SEQ ID NO: 677315 - DNA, 25 bp, Homo sapien
cccagccagggatgaacttcgggtc

SEQ ID NO: 677316 - DNA, 25 bp, Homo sapien
cgaattacagctcgagccctatctt

SEQ ID NO: 677317 - DNA, 25 bp, Homo sapien
tattcttcccgaattacagctcgag

SEQ ID NO: 677318 - DNA, 25 bp, Homo sapien
ttcttcccgaattacagctcgagcc

SEQ ID NO: 677319 - DNA, 25 bp, Homo sapien
tcccgaattacagctcgagccctat

SEQ ID NO: 677320 - DNA, 25 bp, Homo sapien
gcattggttcttatctcagatttat

SEQ ID NO: 677321 - DNA, 25 bp, Homo sapien
ttggttcttatctcagatttattct

SEQ ID NO: 677322 - DNA, 25 bp, Homo sapien
ctgcattggttcttatctcagattt

SEQ ID NO: 677323 - DNA, 25 bp, Homo sapien
gttcttatctcagatttattcttcc

SEQ ID NO: 677324 - DNA, 25 bp, Homo sapien
ctgaagctcagtcccccgtacagga

SEQ ID NO: 677325 - DNA, 25 bp, Homo sapien
gtcccccgtacaggaaggagatcca

SEQ ID NO: 677326 - DNA, 25 bp, Homo sapien
aagctcagtcccccgtacaggaagg

SEQ ID NO: 677327 - DNA, 25 bp, Homo sapien
ctcagtcccccgtacaggaaggaga

SEQ ID NO: 677328 - DNA, 25 bp, Homo sapien
caacagcataagagggaaggcgaaa

SEQ ID NO: 677329 - DNA, 25 bp, Homo sapien
tcaccacgtcacactgcggaaagaa

SEQ ID NO: 677330 - DNA, 25 bp, Homo sapien
gaaggcgaaaatgaaccaggagccg

SEQ ID NO: 677331 - DNA, 25 bp, Homo sapien
ctgccaacaggaacaacagcataag

SEQ ID NO: 677332 - DNA, 25 bp, Homo sapien
ccaaatgttctttagtgtgccaata

SEQ ID NO: 677333 - DNA, 25 bp, Homo sapien
taaaatgtattttggcaacaagggc

SEQ ID NO: 677334 - DNA, 25 bp, Homo sapien
cgacagtgggattggaggtatttca

SEQ ID NO: 677335 - DNA, 25 bp, Homo sapien
taagagcatagtggcaaaaacgtta

SEQ ID NO: 677336 - DNA, 25 bp, Homo sapien
tagatcctccccacacctgaagcag

SEQ ID NO: 677337 - DNA, 25 bp, Homo sapien
ggcagaacgctaaagggctgagcct

SEQ ID NO: 677338 - DNA, 25 bp, Homo sapien
ccccttggcagaacgctaaagggct

SEQ ID NO: 677339 - DNA, 25 bp, Homo sapien
tgagcctagatcctccccacacctg

SEQ ID NO: 677340 - DNA, 25 bp, Homo sapien
cctgcctcggaatcctggaacctaa

SEQ ID NO: 677341 - DNA, 25 bp, Homo sapien
tgtggccaaacatgggtgtactaaa

SEQ ID NO: 677342 - DNA, 25 bp, Homo sapien
tgcaaggaatcttagaaaccctgcc

SEQ ID NO: 677343 - DNA, 25 bp, Homo sapien
gaagtcagctagtatttgcagccac

SEQ ID NO: 677344 - DNA, 25 bp, Homo sapien
tcttttatcctcgtgccctgaccgg

SEQ ID NO: 677345 - DNA, 25 bp, Homo sapien
aaagctggagtccttagacaacact

SEQ ID NO: 677346 - DNA, 25 bp, Homo sapien
cacttaccgctataaccttttgtct

SEQ ID NO: 677347 - DNA, 25 bp, Homo sapien
gttataaagcaggaacatctttctt

SEQ ID NO: 677348 - DNA, 25 bp, Homo sapien
gattttgtgcattgctgtgttccca

SEQ ID NO: 677349 - DNA, 25 bp, Homo sapien
acattccctggatgttgaatgaagg

SEQ ID NO: 677350 - DNA, 25 bp, Homo sapien
tctcactggattttgtgcattgctg

SEQ ID NO: 677351 - DNA, 25 bp, Homo sapien
ccgccggtggggactctcgctttca

SEQ ID NO: 677352 - DNA, 25 bp, Homo sapien
gttccgacgatattcatcctccttc

SEQ ID NO: 677353 - DNA, 25 bp, Homo sapien
gcccttccagatgttccgacgatat

SEQ ID NO: 677354 - DNA, 25 bp, Homo sapien
gagtgtggctgtgcccccaatactg

SEQ ID NO: 677355 - DNA, 25 bp, Homo sapien
ccagatgttccgacgatattcatcc

SEQ ID NO: 677356 - DNA, 25 bp, Homo sapien
ggagtcagccggcagatccagtgga

SEQ ID NO: 677357 - DNA, 25 bp, Homo sapien
tggagtcagccggcagatccagtgg

SEQ ID NO: 677358 - DNA, 25 bp, Homo sapien
caagtgtctcaggtgtgggtacaag

SEQ ID NO: 677359 - DNA, 25 bp, Homo sapien
tcctaaaggaatagacaagtgtctc

SEQ ID NO: 677360 - DNA, 25 bp, Homo sapien
aacaaggtgcaactcttcagctcag

SEQ ID NO: 677361 - DNA, 25 bp, Homo sapien
tgggtacaagggaattcaccatgcc

SEQ ID NO: 677362 - DNA, 25 bp, Homo sapien
taaccatcctgagtatcgaaaagag

SEQ ID NO: 677363 - DNA, 25 bp, Homo sapien
tgacttcttaggagtggcaggcctg

SEQ ID NO: 677364 - DNA, 25 bp, Homo sapien
cagaagcaggtggaaactaccgtca

SEQ ID NO: 677365 - DNA, 25 bp, Homo sapien
caaataccctctggcctgaatcact

SEQ ID NO: 677366 - DNA, 25 bp, Homo sapien
ctgtatctccatccttagaatagtg

SEQ ID NO: 677367 - DNA, 25 bp, Homo sapien
agcccataagggctgggctttctgt

SEQ ID NO: 677368 - DNA, 25 bp, Homo sapien
tgctgtatctccatccttagaatag

SEQ ID NO: 677369 - DNA, 25 bp, Homo sapien
gtaagcccataagggctgggctttc

SEQ ID NO: 677370 - DNA, 25 bp, Homo sapien
tctgtgctggcgagaaactgcatct

SEQ ID NO: 677371 - DNA, 25 bp, Homo sapien
tctccgtgggcacagtgtgtaggcc

SEQ ID NO: 677372 - DNA, 25 bp, Homo sapien
gtgtaggccgtttctccgcacagca

SEQ ID NO: 677373 - DNA, 25 bp, Homo sapien
ttctgtgctggcgagaaactgcatc

SEQ ID NO: 677374 - DNA, 25 bp, Homo sapien
agcagccattgccaaagttgtgaaa

SEQ ID NO: 677375 - DNA, 25 bp, Homo sapien
ctgagcagccattgccaaagttgtg

SEQ ID NO: 677376 - DNA, 25 bp, Homo sapien
gcagccattgccaaagttgtgaaag

SEQ ID NO: 677377 - DNA, 25 bp, Homo sapien
tgagcagccattgccaaagttgtga

SEQ ID NO: 677378 - DNA, 25 bp, Homo sapien
gccgctctcgtggtacaccgttggt

SEQ ID NO: 677379 - DNA, 25 bp, Homo sapien
cccctgagcacgagtgctgggaaca

SEQ ID NO: 677380 - DNA, 25 bp, Homo sapien
gggaacaggtccacaagccatgcac

SEQ ID NO: 677381 - DNA, 25 bp, Homo sapien
taccatgagggaacaggattccatg

SEQ ID NO: 677382 - DNA, 25 bp, Homo sapien
ggagacagattataaaccaggaagc

SEQ ID NO: 677383 - DNA, 25 bp, Homo sapien
caatgcctggaagtctcataggtag

SEQ ID NO: 677384 - DNA, 25 bp, Homo sapien
tgtacctggctctcgtttctcacgt

SEQ ID NO: 677385 - DNA, 25 bp, Homo sapien
gataggcccttcacggagcttggaa

SEQ ID NO: 677386 - DNA, 25 bp, Homo sapien
gacaaagtttgttaatccatgctat

SEQ ID NO: 677387 - DNA, 25 bp, Homo sapien
gtcacattgccacgcctgcttgttt

SEQ ID NO: 677388 - DNA, 25 bp, Homo sapien
tcgtggaagactctgccgttgcata

SEQ ID NO: 677389 - DNA, 25 bp, Homo sapien
cactttgccaatgctatgatcctca

SEQ ID NO: 677390 - DNA, 25 bp, Homo sapien
gggcagatctgccatctatctctca

SEQ ID NO: 677391 - DNA, 25 bp, Homo sapien
gccacaggggcagatctgccatcta

SEQ ID NO: 677392 - DNA, 25 bp, Homo sapien
tcactgaggtaaatgatccaaagcc

SEQ ID NO: 677393 - DNA, 25 bp, Homo sapien
gaactagcacacaaaacctatggtt

SEQ ID NO: 677394 - DNA, 25 bp, Homo sapien
gactcagttatctgaccaagtctta

SEQ ID NO: 677395 - DNA, 25 bp, Homo sapien
ggaaggacagaacccggaagttgca

SEQ ID NO: 677396 - DNA, 25 bp, Homo sapien
tcacattccacccggcaggaaggac

SEQ ID NO: 677397 - DNA, 25 bp, Homo sapien
tcatattccattgaccagactcagt

SEQ ID NO: 677398 - DNA, 25 bp, Homo sapien
gggttaaactagccatttctgccca

SEQ ID NO: 677399 - DNA, 25 bp, Homo sapien
gttaaactagccatttctgcccaca

SEQ ID NO: 677400 - DNA, 25 bp, Homo sapien
tcaatgccggggttaaactagccat

SEQ ID NO: 677401 - DNA, 25 bp, Homo sapien
gaatcaatgccggggttaaactagc

SEQ ID NO: 677402 - DNA, 25 bp, Homo sapien
tcttggagactgtatgtagtcacct

SEQ ID NO: 677403 - DNA, 25 bp, Homo sapien
gaaaaatcatgacgtcattgtgcct

SEQ ID NO: 677404 - DNA, 25 bp, Homo sapien
gccactttgcaaccataagaccagg

SEQ ID NO: 677405 - DNA, 25 bp, Homo sapien
tgtgcctctgaattgatcctggact

SEQ ID NO: 677406 - DNA, 25 bp, Homo sapien
ctttcgaacctccttctggccaaag

SEQ ID NO: 677407 - DNA, 25 bp, Homo sapien
tgctcagccacatggacaagaacga

SEQ ID NO: 677408 - DNA, 25 bp, Homo sapien
caatgggaagcatcatggcagtgga

SEQ ID NO: 677409 - DNA, 25 bp, Homo sapien
cagtggaggcggtgttgctcagcca

SEQ ID NO: 677410 - DNA, 25 bp, Homo sapien
cttggcattggaattagttccatag

SEQ ID NO: 677411 - DNA, 25 bp, Homo sapien
ccttggagatcaaattccacttggc

SEQ ID NO: 677412 - DNA, 25 bp, Homo sapien
gtgccccttggagatcaaattccac

SEQ ID NO: 677413 - DNA, 25 bp, Homo sapien
ttccatagatggagtctgtcccaca

SEQ ID NO: 677414 - DNA, 25 bp, Homo sapien
gcgattcgccggtgcaggttccact

SEQ ID NO: 677415 - DNA, 25 bp, Homo sapien
gactccaacaagcatcaggatcttg

SEQ ID NO: 677416 - DNA, 25 bp, Homo sapien
tcaggatcttgagggcgattcgccg

SEQ ID NO: 677417 - DNA, 25 bp, Homo sapien
aggttccactcctcaatggcgctgg

SEQ ID NO: 677418 - DNA, 25 bp, Homo sapien
gaggaagttggtgtcgaggaagtac

SEQ ID NO: 677419 - DNA, 25 bp, Homo sapien
gggaagaggacgatgggcagcagcg

SEQ ID NO: 677420 - DNA, 25 bp, Homo sapien
agcagcgccgtcactgagagcggca

SEQ ID NO: 677421 - DNA, 25 bp, Homo sapien
cagaccttgttggagggcaagatgc

SEQ ID NO: 677422 - DNA, 25 bp, Homo sapien
agcaggatgacaaacaagcagcggc

SEQ ID NO: 677423 - DNA, 25 bp, Homo sapien
gagcaggatgacaaacaagcagcgg

SEQ ID NO: 677424 - DNA, 25 bp, Homo sapien
aaatcaccttcccaggctctttctg

SEQ ID NO: 677425 - DNA, 25 bp, Homo sapien
ttgaacaattggctctctgaaaaac

SEQ ID NO: 677426 - DNA, 25 bp, Homo sapien
tggccatgccaaccaataaacagtt

SEQ ID NO: 677427 - DNA, 25 bp, Homo sapien
caaggaaaatgactaagacatagcc

SEQ ID NO: 677428 - DNA, 25 bp, Homo sapien
aagtcctctctctgcgcagagggct

SEQ ID NO: 677429 - DNA, 25 bp, Homo sapien
agcctcccaggtgtcggcactttct

SEQ ID NO: 677430 - DNA, 25 bp, Homo sapien
ggagctgagtacagtggaaatcgaa

SEQ ID NO: 677431 - DNA, 25 bp, Homo sapien
caggtgtcggcactttcttgtaggg

SEQ ID NO: 677432 - DNA, 25 bp, Homo sapien
tcatcagtccagagagcactgtcct

SEQ ID NO: 677433 - DNA, 25 bp, Homo sapien
tgggtcaggaaacacgatcttgctc

SEQ ID NO: 677434 - DNA, 25 bp, Homo sapien
gaagtcacgccagcctgtttacaca

SEQ ID NO: 677435 - DNA, 25 bp, Homo sapien
gacttcgtgtcttcaaggtctggcg

SEQ ID NO: 677436 - DNA, 25 bp, Homo sapien
ctggctctcgaattagcctctgatt

SEQ ID NO: 677437 - DNA, 25 bp, Homo sapien
ggctctcgaattagcctctgattat

SEQ ID NO: 677438 - DNA, 25 bp, Homo sapien
aattagcctctgattattcccggag

SEQ ID NO: 677439 - DNA, 25 bp, Homo sapien
cctctgattattcccggagtgtcca

SEQ ID NO: 677440 - DNA, 25 bp, Homo sapien
gcgaagaccaccggcagcagcgcga

SEQ ID NO: 677441 - DNA, 25 bp, Homo sapien
acaccttcttggccgctgctgccag

SEQ ID NO: 677442 - DNA, 25 bp, Homo sapien
ggcgggagggcgaagaccaccggca

SEQ ID NO: 677443 - DNA, 25 bp, Homo sapien
gcagcagcgcgagcggcgtgaacag

SEQ ID NO: 677444 - DNA, 25 bp, Homo sapien
gcgatcgcctggcggtacgggccgg

SEQ ID NO: 677445 - DNA, 25 bp, Homo sapien
gcgcgatcgcctggcggtacgggcc

SEQ ID NO: 677446 - DNA, 25 bp, Homo sapien
cagcgcgatcgcctggcggtacggg

SEQ ID NO: 677447 - DNA, 25 bp, Homo sapien
gatcgcctggcggtacgggccggcc

SEQ ID NO: 677448 - DNA, 25 bp, Homo sapien
cggtgggcctgggttggattccctg

SEQ ID NO: 677449 - DNA, 25 bp, Homo sapien
cttgtctcctagaaggtgcactggg

SEQ ID NO: 677450 - DNA, 25 bp, Homo sapien
tcctttggaccttagtgccacttcc

SEQ ID NO: 677451 - DNA, 25 bp, Homo sapien
gctggtgtagcagggaccacccata

SEQ ID NO: 677452 - DNA, 25 bp, Homo sapien
gaccacccatatgtagcttcctttg

SEQ ID NO: 677453 - DNA, 25 bp, Homo sapien
tttacaaacccaatccacccacata

SEQ ID NO: 677454 - DNA, 25 bp, Homo sapien
ccagcatcaagctcaagaaatagaa

SEQ ID NO: 677455 - DNA, 25 bp, Homo sapien
aaacccaatccacccacataaccag

SEQ ID NO: 677456 - DNA, 25 bp, Homo sapien
taaccagcatcaagctcaagaaata

SEQ ID NO: 677457 - DNA, 25 bp, Homo sapien
ggcagccacgctcccaaccttttaa

SEQ ID NO: 677458 - DNA, 25 bp, Homo sapien
taaagctggcaggatcttttgctgg

SEQ ID NO: 677459 - DNA, 25 bp, Homo sapien
gagttttgggatgcccgtgaggccc

SEQ ID NO: 677460 - DNA, 25 bp, Homo sapien
tagaacttgtccatccccctagaag

SEQ ID NO: 677461 - DNA, 25 bp, Homo sapien
cttgaataggctgggtctcagtgcc

SEQ ID NO: 677462 - DNA, 25 bp, Homo sapien
tagagaggctctaacctgacagtaa

SEQ ID NO: 677463 - DNA, 25 bp, Homo sapien
agctttggagacgtttacctgtgca

SEQ ID NO: 677464 - DNA, 25 bp, Homo sapien
tatgaacaagtatggctttggcggc

SEQ ID NO: 677465 - DNA, 25 bp, Homo sapien
aggaaccgatctgacctttcctgag

SEQ ID NO: 677466 - DNA, 25 bp, Homo sapien
tgcccattcctaatcaggaaccgat

SEQ ID NO: 677467 - DNA, 25 bp, Homo sapien
cctgagatgaagctatcttcgccta

SEQ ID NO: 677468 - DNA, 25 bp, Homo sapien
tgtggtaatctctgagtgagccctg

SEQ ID NO: 677469 - DNA, 25 bp, Homo sapien
tctacagagacctgaggcggcacat

SEQ ID NO: 677470 - DNA, 25 bp, Homo sapien
aaattggcaaactatcgcccacggg

SEQ ID NO: 677471 - DNA, 25 bp, Homo sapien
ccggtggacgtcaagggatctgaaa

SEQ ID NO: 677472 - DNA, 25 bp, Homo sapien
taagtgtgcagatggacgattctcc

SEQ ID NO: 677473 - DNA, 25 bp, Homo sapien
gaaacagacagggtactggtcctac

SEQ ID NO: 677474 - DNA, 25 bp, Homo sapien
aaagtacctcttgctacctgtgacg

SEQ ID NO: 677475 - DNA, 25 bp, Homo sapien
taagctcagcgagtatcagcaactg

SEQ ID NO: 677476 - DNA, 25 bp, Homo sapien
tgttgacttaatgcacacgagccaa

SEQ ID NO: 677477 - DNA, 25 bp, Homo sapien
tagtggactgaatataatctcgaac

SEQ ID NO: 677478 - DNA, 25 bp, Homo sapien
gaaactcagcccaaagtctatgagc

SEQ ID NO: 677479 - DNA, 25 bp, Homo sapien
gaaggccttctccaggacatagagg

SEQ ID NO: 677480 - DNA, 25 bp, Homo sapien
tgtcttggctaagttggagagaccc

SEQ ID NO: 677481 - DNA, 25 bp, Homo sapien
agcagttggaagcatagtccacaaa

SEQ ID NO: 677482 - DNA, 25 bp, Homo sapien
gaagcatagtccacaaaaaagacaa

SEQ ID NO: 677483 - DNA, 25 bp, Homo sapien
gttggaagcatagtccacaaaaaag

SEQ ID NO: 677484 - DNA, 25 bp, Homo sapien
atagtccacaaaaaagacaactggg

SEQ ID NO: 677485 - DNA, 25 bp, Homo sapien
gaagcggtgcttgatcaccgccgcg

SEQ ID NO: 677486 - DNA, 25 bp, Homo sapien
agctccaggccgctcaagaagcggc

SEQ ID NO: 677487 - DNA, 25 bp, Homo sapien
ccagcgccgggtgccggtagccctt

SEQ ID NO: 677488 - DNA, 25 bp, Homo sapien
gcggcgacagcggaggagcgcccgg

SEQ ID NO: 677489 - DNA, 25 bp, Homo sapien
catcggccggcgtagtagctctggc

SEQ ID NO: 677490 - DNA, 25 bp, Homo sapien
tcgccatcggccggcgtagtagctc

SEQ ID NO: 677491 - DNA, 25 bp, Homo sapien
ggcgtagtagctctggccgccgcca

SEQ ID NO: 677492 - DNA, 25 bp, Homo sapien
gggctcctcgccatcggccggcgta

SEQ ID NO: 677493 - DNA, 25 bp, Homo sapien
ttcggctcgcttcggaaatcctggg

SEQ ID NO: 677494 - DNA, 25 bp, Homo sapien
ggacttcttcggcaatcctgggact

SEQ ID NO: 677495 - DNA, 25 bp, Homo sapien
aaaactgtcgcgatgcttcggctcg

SEQ ID NO: 677496 - DNA, 25 bp, Homo sapien
ggaaatcttcggtgactctcgcagc

SEQ ID NO: 677497 - DNA, 25 bp, Homo sapien
catctttagccaatggtccatttgg

SEQ ID NO: 677498 - DNA, 25 bp, Homo sapien
aacctcacattgtaagatacggaag

SEQ ID NO: 677499 - DNA, 25 bp, Homo sapien
tagttgggtcatggcgtgctttcct

SEQ ID NO: 677500 - DNA, 25 bp, Homo sapien
tgtgctcgctcgtcatgtactcagg

SEQ ID NO: 677501 - DNA, 25 bp, Homo sapien
tgttgcctaagggtctctccacaca

SEQ ID NO: 677502 - DNA, 25 bp, Homo sapien
cataaaggcataacaccaggaggca

SEQ ID NO: 677503 - DNA, 25 bp, Homo sapien
tgactggcctggtgtcacactgcaa

SEQ ID NO: 677504 - DNA, 25 bp, Homo sapien
gaaattgctcaaggtttagacccag

SEQ ID NO: 677505 - DNA, 25 bp, Homo sapien
atgaggccaaagaccaggtggtagt

SEQ ID NO: 677506 - DNA, 25 bp, Homo sapien
gataatgaggccaaagaccaggtgg

SEQ ID NO: 677507 - DNA, 25 bp, Homo sapien
taaggataatgaggccaaagaccag

SEQ ID NO: 677508 - DNA, 25 bp, Homo sapien
ttaggtaaggataatgaggccaaag

SEQ ID NO: 677509 - DNA, 25 bp, Homo sapien
gcacaaaactgaactgcgagaggag

SEQ ID NO: 677510 - DNA, 25 bp, Homo sapien
tcatgacctgatcgaggatcatggg

SEQ ID NO: 677511 - DNA, 25 bp, Homo sapien
tatttgtggtcttggtcatgacctg

SEQ ID NO: 677512 - DNA, 25 bp, Homo sapien
agtcactaccgagccagacaggctg

SEQ ID NO: 677513 - DNA, 25 bp, Homo sapien
ctggtccattgagtatagccttgtc

SEQ ID NO: 677514 - DNA, 25 bp, Homo sapien
tggtccattgagtatagccttgtca

SEQ ID NO: 677515 - DNA, 25 bp, Homo sapien
ggtccattgagtatagccttgtcat

SEQ ID NO: 677516 - DNA, 25 bp, Homo sapien
aatccattttcctgcagaggctgag

SEQ ID NO: 677517 - DNA, 25 bp, Homo sapien
gctaattctgccgatggaaacagtg

SEQ ID NO: 677518 - DNA, 25 bp, Homo sapien
tccaggcatgggtttggcactagtc

SEQ ID NO: 677519 - DNA, 25 bp, Homo sapien
gagcggccatggtccctaacttcta

SEQ ID NO: 677520 - DNA, 25 bp, Homo sapien
cacacttctaagcaatcagatctga

SEQ ID NO: 677521 - DNA, 25 bp, Homo sapien
ctaagcaatcagatctgatgagaac

SEQ ID NO: 677522 - DNA, 25 bp, Homo sapien
gcactggggtaaggatcacaaacca

SEQ ID NO: 677523 - DNA, 25 bp, Homo sapien
caaaccatatcaaaaccagtcctct

SEQ ID NO: 677524 - DNA, 25 bp, Homo sapien
gctttttgcaattcctgcagaggtg

SEQ ID NO: 677525 - DNA, 25 bp, Homo sapien
ctttttgcaattcctgcagaggtgg

SEQ ID NO: 677526 - DNA, 25 bp, Homo sapien
gcatctgttgcttggacgccatcca

SEQ ID NO: 677527 - DNA, 25 bp, Homo sapien
gagagtcccatagactttccgtaag

SEQ ID NO: 677528 - DNA, 25 bp, Homo sapien
ttacggatctgctcctcagggaccc

SEQ ID NO: 677529 - DNA, 25 bp, Homo sapien
tactcctggcgtttggagcttcagc

SEQ ID NO: 677530 - DNA, 25 bp, Homo sapien
caccttggatctttattgaggactc

SEQ ID NO: 677531 - DNA, 25 bp, Homo sapien
tgcttggttaatgcacagggtcagc

SEQ ID NO: 677532 - DNA, 25 bp, Homo sapien
cacatttctcttggcggcccttggc

SEQ ID NO: 677533 - DNA, 25 bp, Homo sapien
tttatgctattagggacgcaggagg

SEQ ID NO: 677534 - DNA, 25 bp, Homo sapien
ccgaggaaatggagatgcggagatg

SEQ ID NO: 677535 - DNA, 25 bp, Homo sapien
aatggagatgcggagatggccatga

SEQ ID NO: 677536 - DNA, 25 bp, Homo sapien
aggaaatggagatgcggagatggcc

SEQ ID NO: 677537 - DNA, 25 bp, Homo sapien
agatgcggagatggccatgagcttg

SEQ ID NO: 677538 - DNA, 25 bp, Homo sapien
ctggggcagcaaggtcgccgttata

SEQ ID NO: 677539 - DNA, 25 bp, Homo sapien
agcaaggtcgccgttatatagatca

SEQ ID NO: 677540 - DNA, 25 bp, Homo sapien
caaggtcgccgttatatagatcagc

SEQ ID NO: 677541 - DNA, 25 bp, Homo sapien
gggcagcaaggtcgccgttatatag

SEQ ID NO: 677542 - DNA, 25 bp, Homo sapien
ctggacaccgcaggtggaaaagctg

SEQ ID NO: 677543 - DNA, 25 bp, Homo sapien
tggacaccgcaggtggaaaagctgg

SEQ ID NO: 677544 - DNA, 25 bp, Homo sapien
tattaatatatctgttcccacttca

SEQ ID NO: 677545 - DNA, 25 bp, Homo sapien
ggaagcatagtcattggatataagt

SEQ ID NO: 677546 - DNA, 25 bp, Homo sapien
taagtattaatatatctgttcccac

SEQ ID NO: 677547 - DNA, 25 bp, Homo sapien
aactgtgaccaggaagcatagtcat

SEQ ID NO: 677548 - DNA, 25 bp, Homo sapien
tgaccacaggaaatgcccagcttgg

SEQ ID NO: 677549 - DNA, 25 bp, Homo sapien
cccagcttgggtggatccgatttca

SEQ ID NO: 677550 - DNA, 25 bp, Homo sapien
tgtctatgccaaagcaagccagctc

SEQ ID NO: 677551 - DNA, 25 bp, Homo sapien
gactccttccggtcagctgagctgg

SEQ ID NO: 677552 - DNA, 25 bp, Homo sapien
aacgctgtgacgaagaatccccagg

SEQ ID NO: 677553 - DNA, 25 bp, Homo sapien
tgtgacgaagaatccccaggaaaaa

SEQ ID NO: 677554 - DNA, 25 bp, Homo sapien
gctgtgacgaagaatccccaggaaa

SEQ ID NO: 677555 - DNA, 25 bp, Homo sapien
tcaacgctgtgacgaagaatcccca

SEQ ID NO: 677556 - DNA, 25 bp, Homo sapien
actgctgccctcctccggaattccc

SEQ ID NO: 677557 - DNA, 25 bp, Homo sapien
tgctgccctcctccggaattcccca

SEQ ID NO: 677558 - DNA, 25 bp, Homo sapien
gccactgctgccctcctccggaatt

SEQ ID NO: 677559 - DNA, 25 bp, Homo sapien
cactgctgccctcctccggaattcc

SEQ ID NO: 677560 - DNA, 25 bp, Homo sapien
aatgtcaccctgtcaagaagatccc

SEQ ID NO: 677561 - DNA, 25 bp, Homo sapien
ggaggaacagcattacggaggctct

SEQ ID NO: 677562 - DNA, 25 bp, Homo sapien
gaatggtgctctgttccctatgaca

SEQ ID NO: 677563 - DNA, 25 bp, Homo sapien
cctcgctgagatggaaggtccctga

SEQ ID NO: 677564 - DNA, 25 bp, Homo sapien
agacctaagctgcttatagcagcag

SEQ ID NO: 677565 - DNA, 25 bp, Homo sapien
tggtcctgcagacctaagctgctta

SEQ ID NO: 677566 - DNA, 25 bp, Homo sapien
caagttcactaaagaggcctgaccc

SEQ ID NO: 677567 - DNA, 25 bp, Homo sapien
ggagttaagcaacctgagctggtcc

SEQ ID NO: 677568 - DNA, 25 bp, Homo sapien
gtctttgcagtctgttgcttcactc

SEQ ID NO: 677569 - DNA, 25 bp, Homo sapien
ttgcagtctgttgcttcactcgtac

SEQ ID NO: 677570 - DNA, 25 bp, Homo sapien
gcgctctaaggtcctggccagtgga

SEQ ID NO: 677571 - DNA, 25 bp, Homo sapien
ctaaggggccccctggcgctctaag

SEQ ID NO: 677572 - DNA, 25 bp, Homo sapien
cccctggcgctctaaggtcctggcc

SEQ ID NO: 677573 - DNA, 25 bp, Homo sapien
ctctaaggtcctggccagtggagac

SEQ ID NO: 677574 - DNA, 25 bp, Homo sapien
tcgcgggggccacaatcggcccagt

SEQ ID NO: 677575 - DNA, 25 bp, Homo sapien
gcagatggcagctcgggcgcagctg

SEQ ID NO: 677576 - DNA, 25 bp, Homo sapien
ccgcgctcgcagatggcagctcggg

SEQ ID NO: 677577 - DNA, 25 bp, Homo sapien
ccagtgttcgcagcccccaggttgg

SEQ ID NO: 677578 - DNA, 25 bp, Homo sapien
gggcggacagcaggcaccaaagtct

SEQ ID NO: 677579 - DNA, 25 bp, Homo sapien
ggacagcaggcaccaaagtctcctc

SEQ ID NO: 677580 - DNA, 25 bp, Homo sapien
tgcgcggcgcagatggcgccggggg

SEQ ID NO: 677581 - DNA, 25 bp, Homo sapien
cgccggggggcggacagcaggcacc

SEQ ID NO: 677582 - DNA, 25 bp, Homo sapien
ctgtggccagcaagacctgctccat

SEQ ID NO: 677583 - DNA, 25 bp, Homo sapien
ttgggtagctggtccaaagctgacc

SEQ ID NO: 677584 - DNA, 25 bp, Homo sapien
cagatcttgacgttggggagccttc

SEQ ID NO: 677585 - DNA, 25 bp, Homo sapien
cagaacctggaacgtcttgggtagc

SEQ ID NO: 677586 - DNA, 25 bp, Homo sapien
tccagaatgtactgcacgcagaacc

SEQ ID NO: 677587 - DNA, 25 bp, Homo sapien
tgcacaccacgaggacaaagacatg

SEQ ID NO: 677588 - DNA, 25 bp, Homo sapien
caaagacatgtcgtgctggtttcca

SEQ ID NO: 677589 - DNA, 25 bp, Homo sapien
ttgagtgcctgaacacctctagact

SEQ ID NO: 677590 - DNA, 25 bp, Homo sapien
ctctagactgtgcacaccacgagga

SEQ ID NO: 677591 - DNA, 25 bp, Homo sapien
tactgatgctactaagcatggtagg

SEQ ID NO: 677592 - DNA, 25 bp, Homo sapien
ggaaggagtggccactcagacacca

SEQ ID NO: 677593 - DNA, 25 bp, Homo sapien
tcccctgctaagtccaagagactag

SEQ ID NO: 677594 - DNA, 25 bp, Homo sapien
tctttgtacctcctctactgatgct

SEQ ID NO: 677595 - DNA, 25 bp, Homo sapien
ctgttcccaactgatcaatggtctt

SEQ ID NO: 677596 - DNA, 25 bp, Homo sapien
ccagggaacgatcgtcgctgggcat

SEQ ID NO: 677597 - DNA, 25 bp, Homo sapien
caatggtcttagtttcaatttcaaa

SEQ ID NO: 677598 - DNA, 25 bp, Homo sapien
cattcaagactgaattgaacaattt

SEQ ID NO: 677599 - DNA, 25 bp, Homo sapien
tacagcagtactccttcagccattg

SEQ ID NO: 677600 - DNA, 25 bp, Homo sapien
cagtctaccttcttatggatgccag

SEQ ID NO: 677601 - DNA, 25 bp, Homo sapien
tgaagactggcaaatactatgacgt

SEQ ID NO: 677602 - DNA, 25 bp, Homo sapien
tcctggcaaagaggataagcttaca

SEQ ID NO: 677603 - DNA, 25 bp, Homo sapien
gccagctcatactttggtgtgatac

SEQ ID NO: 677604 - DNA, 25 bp, Homo sapien
tgccagctcatactttggtgtgata

SEQ ID NO: 677605 - DNA, 25 bp, Homo sapien
ctgccagctcatactttggtgtgat

SEQ ID NO: 677606 - DNA, 25 bp, Homo sapien
cagggcatgcttttgcttgcctgga

SEQ ID NO: 677607 - DNA, 25 bp, Homo sapien
tggggcatcttactacgggctggat

SEQ ID NO: 677608 - DNA, 25 bp, Homo sapien
ccagatgcagggcatgcttttgctt

SEQ ID NO: 677609 - DNA, 25 bp, Homo sapien
ggcatcttactacgggctggatggg

SEQ ID NO: 677610 - DNA, 25 bp, Homo sapien
gctgccaatccttatggaagtgagt

SEQ ID NO: 677611 - DNA, 25 bp, Homo sapien
aatccttatggaagtgagtcttcag

SEQ ID NO: 677612 - DNA, 25 bp, Homo sapien
tgaaccaagtagccacacactgctg

SEQ ID NO: 677613 - DNA, 25 bp, Homo sapien
ctgctgccaatccttatggaagtga

SEQ ID NO: 677614 - DNA, 25 bp, Homo sapien
tacaggctgctattacgagaagaga

SEQ ID NO: 677615 - DNA, 25 bp, Homo sapien
tcttgacccaaaatgagaaaacacg

SEQ ID NO: 677616 - DNA, 25 bp, Homo sapien
tcatgccagagacagccgggtctgt

SEQ ID NO: 677617 - DNA, 25 bp, Homo sapien
cctatgaaggtcaccaaacagggtg

SEQ ID NO: 677618 - DNA, 25 bp, Homo sapien
tccgagcccgtggttgaaagatctc

SEQ ID NO: 677619 - DNA, 25 bp, Homo sapien
aatttgacttgggtcctcaaggcgt

SEQ ID NO: 677620 - DNA, 25 bp, Homo sapien
tcaaggcgtccttgtggtaaaggga

SEQ ID NO: 677621 - DNA, 25 bp, Homo sapien
cacagaaagcgggtttccgagcccg

SEQ ID NO: 677622 - DNA, 25 bp, Homo sapien
ggctccctctcacggttccggagaa

SEQ ID NO: 677623 - DNA, 25 bp, Homo sapien
ctctcacggttccggagaaaaagca

SEQ ID NO: 677624 - DNA, 25 bp, Homo sapien
ctcacggttccggagaaaaagcagg

SEQ ID NO: 677625 - DNA, 25 bp, Homo sapien
gtattcggatatgcggaagtcagaa

SEQ ID NO: 677626 - DNA, 25 bp, Homo sapien
gacttttgtttcagggtgttctaga

SEQ ID NO: 677627 - DNA, 25 bp, Homo sapien
tgagtttggtaccaacccaggtgct

SEQ ID NO: 677628 - DNA, 25 bp, Homo sapien
atacagagtcagagagcgtgtccac

SEQ ID NO: 677629 - DNA, 25 bp, Homo sapien
gggtgtcagcgcaaagaggttattt

SEQ ID NO: 677630 - DNA, 25 bp, Homo sapien
ctctgccagtgttacacttgccatc

SEQ ID NO: 677631 - DNA, 25 bp, Homo sapien
tgttacacttgccatccctgcgtgc

SEQ ID NO: 677632 - DNA, 25 bp, Homo sapien
gccagtgttacacttgccatccctg

SEQ ID NO: 677633 - DNA, 25 bp, Homo sapien
agtgttacacttgccatccctgcgt

SEQ ID NO: 677634 - DNA, 25 bp, Homo sapien
gagcagaggctcataaacactgggc

SEQ ID NO: 677635 - DNA, 25 bp, Homo sapien
taaactgctatagtcctgtggaagc

SEQ ID NO: 677636 - DNA, 25 bp, Homo sapien
cagctttaagataggacacaggact

SEQ ID NO: 677637 - DNA, 25 bp, Homo sapien
cacagggctattgatggatgagtcc

SEQ ID NO: 677638 - DNA, 25 bp, Homo sapien
aagagattaattcgtgtggccacaa

SEQ ID NO: 677639 - DNA, 25 bp, Homo sapien
ttgagcgtccagaggagaagccgtc

SEQ ID NO: 677640 - DNA, 25 bp, Homo sapien
gaagccgtccaagctgatcaagcat

SEQ ID NO: 677641 - DNA, 25 bp, Homo sapien
tcggattttcgctgaccactgagca

SEQ ID NO: 677642 - DNA, 25 bp, Homo sapien
caagatgcatacgttattgtgtttc

SEQ ID NO: 677643 - DNA, 25 bp, Homo sapien
tcaagatgcatacgttattgtgttt

SEQ ID NO: 677644 - DNA, 25 bp, Homo sapien
gatgcatacgttattgtgtttctct

SEQ ID NO: 677645 - DNA, 25 bp, Homo sapien
agatgcatacgttattgtgtttctc

SEQ ID NO: 677646 - DNA, 25 bp, Homo sapien
aaactctccaagtagccactgaagt

SEQ ID NO: 677647 - DNA, 25 bp, Homo sapien
tgaaactctccaagtagccactgaa

SEQ ID NO: 677648 - DNA, 25 bp, Homo sapien
actctccaagtagccactgaagtca

SEQ ID NO: 677649 - DNA, 25 bp, Homo sapien
gaaactctccaagtagccactgaag

SEQ ID NO: 677650 - DNA, 25 bp, Homo sapien
cagctggcccgttatgcatcagcca

SEQ ID NO: 677651 - DNA, 25 bp, Homo sapien
tgtgggttcattctcaagccctggg

SEQ ID NO: 677652 - DNA, 25 bp, Homo sapien
tcagaaggaaatagaggaggcactc

SEQ ID NO: 677653 - DNA, 25 bp, Homo sapien
tctgttgggcgccaggtcattagag

SEQ ID NO: 677654 - DNA, 25 bp, Homo sapien
tattggctgtctgttgttgacaccc

SEQ ID NO: 677655 - DNA, 25 bp, Homo sapien
ttgttgacaccctctctgaaatcca

SEQ ID NO: 677656 - DNA, 25 bp, Homo sapien
ttcacgagcaccttttcggaggcct

SEQ ID NO: 677657 - DNA, 25 bp, Homo sapien
agtggaacttgcagatagttcacga

SEQ ID NO: 677658 - DNA, 25 bp, Homo sapien
ccctttatataagctgctaaaaatt

SEQ ID NO: 677659 - DNA, 25 bp, Homo sapien
ggtggctgtaattatggggatcccc

SEQ ID NO: 677660 - DNA, 25 bp, Homo sapien
atgctcatctccactcttttaccat

SEQ ID NO: 677661 - DNA, 25 bp, Homo sapien
ccccttgggagcatgctggagttga

SEQ ID NO: 677662 - DNA, 25 bp, Homo sapien
acagaggttgaaatggagacccggt

SEQ ID NO: 677663 - DNA, 25 bp, Homo sapien
cagaggttgaaatggagacccggtc

SEQ ID NO: 677664 - DNA, 25 bp, Homo sapien
cacagaggttgaaatggagacccgg

SEQ ID NO: 677665 - DNA, 25 bp, Homo sapien
cattccccttgaaatggacaaaact

SEQ ID NO: 677666 - DNA, 25 bp, Homo sapien
cttgaattttggttgctgcagccat

SEQ ID NO: 677667 - DNA, 25 bp, Homo sapien
gtctccctttgtggcaaccagggcc

SEQ ID NO: 677668 - DNA, 25 bp, Homo sapien
ttgctgtccccgtatgtgtctccct

SEQ ID NO: 677669 - DNA, 25 bp, Homo sapien
tcacagctgcagggggccagaagca

SEQ ID NO: 677670 - DNA, 25 bp, Homo sapien
cacagctgcagggggccagaagcac

SEQ ID NO: 677671 - DNA, 25 bp, Homo sapien
acagctgcagggggccagaagcacc

SEQ ID NO: 677672 - DNA, 25 bp, Homo sapien
agcagtttttgagtagttctttcac

SEQ ID NO: 677673 - DNA, 25 bp, Homo sapien
tttagtgatcaagaggatattgata

SEQ ID NO: 677674 - DNA, 25 bp, Homo sapien
caagaggatattgataggatataga

SEQ ID NO: 677675 - DNA, 25 bp, Homo sapien
tgagcagtttttgagtagttctttc

SEQ ID NO: 677676 - DNA, 25 bp, Homo sapien
tatgcacggtgcacgtggctggcat

SEQ ID NO: 677677 - DNA, 25 bp, Homo sapien
cacgttctgcatcgcttcgccattg

SEQ ID NO: 677678 - DNA, 25 bp, Homo sapien
caaggactcatcacagcacgttctg

SEQ ID NO: 677679 - DNA, 25 bp, Homo sapien
tatgccggactttccctctcgttga

SEQ ID NO: 677680 - DNA, 25 bp, Homo sapien
atcagaagtatgtgcaccacataca

SEQ ID NO: 677681 - DNA, 25 bp, Homo sapien
tacttcatacctcacatgacacaca

SEQ ID NO: 677682 - DNA, 25 bp, Homo sapien
aaaaaatcgtggaacaactgattat

SEQ ID NO: 677683 - DNA, 25 bp, Homo sapien
cagttttgtgactttgatttaggca

SEQ ID NO: 677684 - DNA, 25 bp, Homo sapien
gattatctatacttcatacctcaca

SEQ ID NO: 677685 - DNA, 25 bp, Homo sapien
ttatttgacacctgccccttgcctc

SEQ ID NO: 677686 - DNA, 25 bp, Homo sapien
catttatttgacacctgccccttgc

SEQ ID NO: 677687 - DNA, 25 bp, Homo sapien
tttatttgacacctgccccttgcct

SEQ ID NO: 677688 - DNA, 25 bp, Homo sapien
atttatttgacacctgccccttgcc

SEQ ID NO: 677689 - DNA, 25 bp, Homo sapien
cagagactctgatggggtcttgaca

SEQ ID NO: 677690 - DNA, 25 bp, Homo sapien
tgatggggtcttgacaaggtagtca

SEQ ID NO: 677691 - DNA, 25 bp, Homo sapien
gactctgatggggtcttgacaaggt

SEQ ID NO: 677692 - DNA, 25 bp, Homo sapien
tctgatggggtcttgacaaggtagt

SEQ ID NO: 677693 - DNA, 25 bp, Homo sapien
ggtgaagtttcccagggtggcagtg

SEQ ID NO: 677694 - DNA, 25 bp, Homo sapien
cttggtgaagtttcccagggtggca

SEQ ID NO: 677695 - DNA, 25 bp, Homo sapien
cagaggttgggggtcgggtagctgt

SEQ ID NO: 677696 - DNA, 25 bp, Homo sapien
ccagaggttgggggtcgggtagctg

SEQ ID NO: 677697 - DNA, 25 bp, Homo sapien
gggcatggggactgagacgatgcca

SEQ ID NO: 677698 - DNA, 25 bp, Homo sapien
gcagcttttgggcatggggactgag

SEQ ID NO: 677699 - DNA, 25 bp, Homo sapien
gcttttgggcatggggactgagacg

SEQ ID NO: 677700 - DNA, 25 bp, Homo sapien
tgggcatggggactgagacgatgcc

SEQ ID NO: 677701 - DNA, 25 bp, Homo sapien
acagtggcctgtcaccttacaaggg

SEQ ID NO: 677702 - DNA, 25 bp, Homo sapien
cacagtggcctgtcaccttacaagg

SEQ ID NO: 677703 - DNA, 25 bp, Homo sapien
gagccacagtggcctgtcaccttac

SEQ ID NO: 677704 - DNA, 25 bp, Homo sapien
gccacagtggcctgtcaccttacaa

SEQ ID NO: 677705 - DNA, 25 bp, Homo sapien
atgatggccccgcggatggcgtggc

SEQ ID NO: 677706 - DNA, 25 bp, Homo sapien
ggatgatggccccgcggatggcgtg

SEQ ID NO: 677707 - DNA, 25 bp, Homo sapien
atggccccgcggatggcgtggccac

SEQ ID NO: 677708 - DNA, 25 bp, Homo sapien
gatggccccgcggatggcgtggcca

SEQ ID NO: 677709 - DNA, 25 bp, Homo sapien
gcacttaacacccagaccgacatac

SEQ ID NO: 677710 - DNA, 25 bp, Homo sapien
ggagcacttaacacccagaccgaca

SEQ ID NO: 677711 - DNA, 25 bp, Homo sapien
gagcacttaacacccagaccgacat

SEQ ID NO: 677712 - DNA, 25 bp, Homo sapien
agcacttaacacccagaccgacata

SEQ ID NO: 677713 - DNA, 25 bp, Homo sapien
atcccttgagcctggtgcgctggct

SEQ ID NO: 677714 - DNA, 25 bp, Homo sapien
cgatgacaataaatcccttgagcct

SEQ ID NO: 677715 - DNA, 25 bp, Homo sapien
gtcaccgatgacaataaatcccttg

SEQ ID NO: 677716 - DNA, 25 bp, Homo sapien
tatagtcaccgatgacaataaatcc

SEQ ID NO: 677717 - DNA, 25 bp, Homo sapien
cccgggccctgtccgcggctatgac

SEQ ID NO: 677718 - DNA, 25 bp, Homo sapien
cagcttggggatagacgtccactcc

SEQ ID NO: 677719 - DNA, 25 bp, Homo sapien
ctgtccgcggctatgaccccagccc

SEQ ID NO: 677720 - DNA, 25 bp, Homo sapien
tagacgtccactccttgtccttggt

SEQ ID NO: 677721 - DNA, 25 bp, Homo sapien
agaggtgtccaccatatggccaggg

SEQ ID NO: 677722 - DNA, 25 bp, Homo sapien
caaatgtctggccatacttgggaag

SEQ ID NO: 677723 - DNA, 25 bp, Homo sapien
tgtgaccagatccacgttgatgacg

SEQ ID NO: 677724 - DNA, 25 bp, Homo sapien
gaagagcacagggtttactaagcag

SEQ ID NO: 677725 - DNA, 25 bp, Homo sapien
aaaagcatatagtgtgagtctactg

SEQ ID NO: 677726 - DNA, 25 bp, Homo sapien
aagcatatagtgtgagtctactggc

SEQ ID NO: 677727 - DNA, 25 bp, Homo sapien
caaaaaagcatatagtgtgagtcta

SEQ ID NO: 677728 - DNA, 25 bp, Homo sapien
catatagtgtgagtctactggctca

SEQ ID NO: 677729 - DNA, 25 bp, Homo sapien
tacggacagcatgacgggccttgct

SEQ ID NO: 677730 - DNA, 25 bp, Homo sapien
tacagacacacgagcgaaaacggtt

SEQ ID NO: 677731 - DNA, 25 bp, Homo sapien
acgtgagtatgaaagtggtccccgg

SEQ ID NO: 677732 - DNA, 25 bp, Homo sapien
taacgtagtagctgaaaggagccaa

SEQ ID NO: 677733 - DNA, 25 bp, Homo sapien
gggaaagtcctctagattcaatgac

SEQ ID NO: 677734 - DNA, 25 bp, Homo sapien
gaacagtctgcagtcaaagccgatg

SEQ ID NO: 677735 - DNA, 25 bp, Homo sapien
gctcaactgagggttttgtcatttt

SEQ ID NO: 677736 - DNA, 25 bp, Homo sapien
ccgatgctgggtgtcctgtagtgta

SEQ ID NO: 677737 - DNA, 25 bp, Homo sapien
tcctggcgtctgggtttttctccca

SEQ ID NO: 677738 - DNA, 25 bp, Homo sapien
gggtggtttgtgtcccgattcactg

SEQ ID NO: 677739 - DNA, 25 bp, Homo sapien
tgggtggtttgtgtcccgattcact

SEQ ID NO: 677740 - DNA, 25 bp, Homo sapien
ggtgggtggtttgtgtcccgattca

SEQ ID NO: 677741 - DNA, 25 bp, Homo sapien
gactctttcgggaggaggctcttcg

SEQ ID NO: 677742 - DNA, 25 bp, Homo sapien
gctcttcgtgctggtactggtgttg

SEQ ID NO: 677743 - DNA, 25 bp, Homo sapien
ggaacgtgtcgatcccctcttctca

SEQ ID NO: 677744 - DNA, 25 bp, Homo sapien
cagaaggtgtccagccgagactctt

SEQ ID NO: 677745 - DNA, 25 bp, Homo sapien
attgatggttcaaacactgccaccg

SEQ ID NO: 677746 - DNA, 25 bp, Homo sapien
tgagcacaactatcctgcaatctga

SEQ ID NO: 677747 - DNA, 25 bp, Homo sapien
aatgtgtttagcgtgcctgcccacc

SEQ ID NO: 677748 - DNA, 25 bp, Homo sapien
gaaaaaacggtagggtgtcatgctc

SEQ ID NO: 677749 - DNA, 25 bp, Homo sapien
catgtactaagttcagacagactgg

SEQ ID NO: 677750 - DNA, 25 bp, Homo sapien
caatactatggtaggcagagctggg

SEQ ID NO: 677751 - DNA, 25 bp, Homo sapien
tcagtgaccaaaagggagcaatact

SEQ ID NO: 677752 - DNA, 25 bp, Homo sapien
caagggcggagtcttcttaacaatc

SEQ ID NO: 677753 - DNA, 25 bp, Homo sapien
tatgaaaagagcgaggacgatctcc

SEQ ID NO: 677754 - DNA, 25 bp, Homo sapien
cctaatgcagtttgtgatggcgacc

SEQ ID NO: 677755 - DNA, 25 bp, Homo sapien
gaaacgttgcaaaggaagacccaca

SEQ ID NO: 677756 - DNA, 25 bp, Homo sapien
gacgatctccatcaagaagccaggc

SEQ ID NO: 677757 - DNA, 25 bp, Homo sapien
gctttcgtaagacaggttcatactt

SEQ ID NO: 677758 - DNA, 25 bp, Homo sapien
cccggcagctttcgtaagacaggtt

SEQ ID NO: 677759 - DNA, 25 bp, Homo sapien
aagaagccccggcagctttcgtaag

SEQ ID NO: 677760 - DNA, 25 bp, Homo sapien
gcagctttcgtaagacaggttcata

SEQ ID NO: 677761 - DNA, 25 bp, Homo sapien
gcataggcaggttgcttgtcacacc

SEQ ID NO: 677762 - DNA, 25 bp, Homo sapien
ttggggcataggcaggttgcttgtc

SEQ ID NO: 677763 - DNA, 25 bp, Homo sapien
ggtgcggctggtggtctgtggtggt

SEQ ID NO: 677764 - DNA, 25 bp, Homo sapien
tggttggggcataggcaggttgctt

SEQ ID NO: 677765 - DNA, 25 bp, Homo sapien
ttgtccaactttaatgcaagcacag

SEQ ID NO: 677766 - DNA, 25 bp, Homo sapien
gcacaaccccaagtgcttactattt

SEQ ID NO: 677767 - DNA, 25 bp, Homo sapien
ccgcacaaccccaagtgcttactat

SEQ ID NO: 677768 - DNA, 25 bp, Homo sapien
caaccccaagtgcttactatttttg

SEQ ID NO: 677769 - DNA, 25 bp, Homo sapien
cgtaaacagctgataccgtgagaag

SEQ ID NO: 677770 - DNA, 25 bp, Homo sapien
aaggcacacgtgatgaggaggacta

SEQ ID NO: 677771 - DNA, 25 bp, Homo sapien
cagtgatatgaaaggagtctccgta

SEQ ID NO: 677772 - DNA, 25 bp, Homo sapien
taattcaaccatgggaaacggaggc

SEQ ID NO: 677773 - DNA, 25 bp, Homo sapien
tttctgccactttctgaccatgggc

SEQ ID NO: 677774 - DNA, 25 bp, Homo sapien
cgggtgcacctcaatctttatccaa

SEQ ID NO: 677775 - DNA, 25 bp, Homo sapien
tatccaaaccctggagaggaggccc

SEQ ID NO: 677776 - DNA, 25 bp, Homo sapien
tctcttttagtgtagccccgggtgc

SEQ ID NO: 677777 - DNA, 25 bp, Homo sapien
tgaagagacatctaactaactgggt

SEQ ID NO: 677778 - DNA, 25 bp, Homo sapien
acatggccattgtcacagaacgttc

SEQ ID NO: 677779 - DNA, 25 bp, Homo sapien
ttcagcagcgacacgtggctagtgg

SEQ ID NO: 677780 - DNA, 25 bp, Homo sapien
tacaggtgggccctagctctagaat

SEQ ID NO: 677781 - DNA, 25 bp, Homo sapien
gaaatagccatcatggacgatggaa

SEQ ID NO: 677782 - DNA, 25 bp, Homo sapien
aatagccatcatggacgatggaatc

SEQ ID NO: 677783 - DNA, 25 bp, Homo sapien
ttgagaaatagccatcatggacgat

SEQ ID NO: 677784 - DNA, 25 bp, Homo sapien
agagatgcagggaggtccaaaacag

SEQ ID NO: 677785 - DNA, 25 bp, Homo sapien
gtaatcccagctactcaggaggctg

SEQ ID NO: 677786 - DNA, 25 bp, Homo sapien
tactcaggaggctgaggcaggagaa

SEQ ID NO: 677787 - DNA, 25 bp, Homo sapien
tagttgggcatggtgatgcacacct

SEQ ID NO: 677788 - DNA, 25 bp, Homo sapien
catattgggaagacgatccggcaga

SEQ ID NO: 677789 - DNA, 25 bp, Homo sapien
cccagatttgcgtgtgtgatgagag

SEQ ID NO: 677790 - DNA, 25 bp, Homo sapien
gaggctcaggtgcaggtaaatcaaa

SEQ ID NO: 677791 - DNA, 25 bp, Homo sapien
tgtattagcaacagtactccatgga

SEQ ID NO: 677792 - DNA, 25 bp, Homo sapien
tacctgacatatggttgcaagcatg

SEQ ID NO: 677793 - DNA, 25 bp, Homo sapien
tattagcagagccacgcacaagtgc

SEQ ID NO: 677794 - DNA, 25 bp, Homo sapien
gcacgctgacgtttcctagagatca

SEQ ID NO: 677795 - DNA, 25 bp, Homo sapien
tgcatatggttgcaaagctcagtcc

SEQ ID NO: 677796 - DNA, 25 bp, Homo sapien
aaatcatcatcaggcagaaaggtcc

SEQ ID NO: 677797 - DNA, 25 bp, Homo sapien
cttctggaatgacccaaaactgctt

SEQ ID NO: 677798 - DNA, 25 bp, Homo sapien
tggtgccaggcaaaaaccttgaatg

SEQ ID NO: 677799 - DNA, 25 bp, Homo sapien
gaatgacccaaaactgctttaagaa

SEQ ID NO: 677800 - DNA, 25 bp, Homo sapien
gagccttggttggagcctaagagaa

SEQ ID NO: 677801 - DNA, 25 bp, Homo sapien
agagccttggttggagcctaagaga

SEQ ID NO: 677802 - DNA, 25 bp, Homo sapien
cagagccttggttggagcctaagag

SEQ ID NO: 677803 - DNA, 25 bp, Homo sapien
cttttctcagctgacgtctccttct

SEQ ID NO: 677804 - DNA, 25 bp, Homo sapien
gattgtgtgctcgaggagctcccct

SEQ ID NO: 677805 - DNA, 25 bp, Homo sapien
cagctgacgtctccttctctttgga

SEQ ID NO: 677806 - DNA, 25 bp, Homo sapien
ttctgaaggtgctgattgtgtgctc

SEQ ID NO: 677807 - DNA, 25 bp, Homo sapien
agcatccgcttcctgctgaggagca

SEQ ID NO: 677808 - DNA, 25 bp, Homo sapien
tccgcttcctgctgaggagcagtag

SEQ ID NO: 677809 - DNA, 25 bp, Homo sapien
ctcagcatccgcttcctgctgagga

SEQ ID NO: 677810 - DNA, 25 bp, Homo sapien
gcatccgcttcctgctgaggagcag

SEQ ID NO: 677811 - DNA, 25 bp, Homo sapien
tcacagtagctagtgttccaacagc

SEQ ID NO: 677812 - DNA, 25 bp, Homo sapien
tagctagtgttccaacagcagtaaa

SEQ ID NO: 677813 - DNA, 25 bp, Homo sapien
caggggtagtcacagtagctagtgt

SEQ ID NO: 677814 - DNA, 25 bp, Homo sapien
tgcttcttcacctcggcgatgagcc

SEQ ID NO: 677815 - DNA, 25 bp, Homo sapien
tgcccatgggcaataacctagcccg

SEQ ID NO: 677816 - DNA, 25 bp, Homo sapien
catgggcaataacctagcccgagtc

SEQ ID NO: 677817 - DNA, 25 bp, Homo sapien
ggcaataacctagcccgagtcttca

SEQ ID NO: 677818 - DNA, 25 bp, Homo sapien
tgtgcccatgggcaataacctagcc

SEQ ID NO: 677819 - DNA, 25 bp, Homo sapien
ttctctatctcgatcctcagcctgc

SEQ ID NO: 677820 - DNA, 25 bp, Homo sapien
tctatctcgatcctcagcctgcgaa

SEQ ID NO: 677821 - DNA, 25 bp, Homo sapien
atttcggagagctcttgctggtgca

SEQ ID NO: 677822 - DNA, 25 bp, Homo sapien
cggagagctcttgctggtgcagcca

SEQ ID NO: 677823 - DNA, 25 bp, Homo sapien
gaaatactggcacgagggaaagcca

SEQ ID NO: 677824 - DNA, 25 bp, Homo sapien
cacttaaagtgacaaggaccagact

SEQ ID NO: 677825 - DNA, 25 bp, Homo sapien
aacaacatttaggtggtgggatcca

SEQ ID NO: 677826 - DNA, 25 bp, Homo sapien
ggcaatttcgagtactctcccctgt

SEQ ID NO: 677827 - DNA, 25 bp, Homo sapien
caccagtaggttaactgaagctctg

SEQ ID NO: 677828 - DNA, 25 bp, Homo sapien
aatgaattgatcacacaaagcaggg

SEQ ID NO: 677829 - DNA, 25 bp, Homo sapien
tgacaatcagtagagccagcttagt

SEQ ID NO: 677830 - DNA, 25 bp, Homo sapien
aaagcagggcatgtctccacagccc

SEQ ID NO: 677831 - DNA, 25 bp, Homo sapien
gcttccagtagtgtttttagaaaga

SEQ ID NO: 677832 - DNA, 25 bp, Homo sapien
gctattgtgcttccagtagtgtttt

SEQ ID NO: 677833 - DNA, 25 bp, Homo sapien
ctcagctattgtgcttccagtagtg

SEQ ID NO: 677834 - DNA, 25 bp, Homo sapien
tgtttttagaaagatcgttgtatat

SEQ ID NO: 677835 - DNA, 25 bp, Homo sapien
tcccctcgggagaccaagattctgg

SEQ ID NO: 677836 - DNA, 25 bp, Homo sapien
taagcccacttggagtaagattcag

SEQ ID NO: 677837 - DNA, 25 bp, Homo sapien
taaagactgcaaggttaagacgctc

SEQ ID NO: 677838 - DNA, 25 bp, Homo sapien
gtgttccagtgccttaatgagtgac

SEQ ID NO: 677839 - DNA, 25 bp, Homo sapien
tatcagcggcgacatcagctgaggc

SEQ ID NO: 677840 - DNA, 25 bp, Homo sapien
aagggtgctcatggaccccgagctg

SEQ ID NO: 677841 - DNA, 25 bp, Homo sapien
tgtacttggcaatatcagcggcgac

SEQ ID NO: 677842 - DNA, 25 bp, Homo sapien
cagcgttgactgaggacacaagggt

SEQ ID NO: 677843 - DNA, 25 bp, Homo sapien
ctgtggtgtagaagcaaagccccta

SEQ ID NO: 677844 - DNA, 25 bp, Homo sapien
caactaggccctaaccttggcctgg

SEQ ID NO: 677845 - DNA, 25 bp, Homo sapien
gaccaaactctatccaggtttctca

SEQ ID NO: 677846 - DNA, 25 bp, Homo sapien
gcatcctgattaccccacgtgggaa

SEQ ID NO: 677847 - DNA, 25 bp, Homo sapien
cttggtagcaattaaactcccctgg

SEQ ID NO: 677848 - DNA, 25 bp, Homo sapien
aacccagcctttgaggatctagatg

SEQ ID NO: 677849 - DNA, 25 bp, Homo sapien
agaagacaggaagccgcaatcccaa

SEQ ID NO: 677850 - DNA, 25 bp, Homo sapien
aaatatcctagactcggctttgccc

SEQ ID NO: 677851 - DNA, 25 bp, Homo sapien
tacaatggcccggaaacaaacgaga

SEQ ID NO: 677852 - DNA, 25 bp, Homo sapien
ccaaatggaatgtgcaaggccttca

SEQ ID NO: 677853 - DNA, 25 bp, Homo sapien
ttacaacggttgatactggccactg

SEQ ID NO: 677854 - DNA, 25 bp, Homo sapien
catcttgtgtgtgtgacgaatctcc

SEQ ID NO: 677855 - DNA, 25 bp, Homo sapien
ctggtctgatatctcgtcccctggg

SEQ ID NO: 677856 - DNA, 25 bp, Homo sapien
catgtgccacttttgggaggacgtt

SEQ ID NO: 677857 - DNA, 25 bp, Homo sapien
tgctgctgacgctgcatcttctgca

SEQ ID NO: 677858 - DNA, 25 bp, Homo sapien
tcacagcctgtctggtctgatatct

SEQ ID NO: 677859 - DNA, 25 bp, Homo sapien
ttgatgagttccacacgacccgctg

SEQ ID NO: 677860 - DNA, 25 bp, Homo sapien
cagtctccttcggtaaaagcggcct

SEQ ID NO: 677861 - DNA, 25 bp, Homo sapien
acccgctgcacggccggggcagtct

SEQ ID NO: 677862 - DNA, 25 bp, Homo sapien
ggcagtctccttcggtaaaagcggc

SEQ ID NO: 677863 - DNA, 25 bp, Homo sapien
gctgtggcgccagccgcggaagttt

SEQ ID NO: 677864 - DNA, 25 bp, Homo sapien
tttgggcggaagagcgggtgagcac

SEQ ID NO: 677865 - DNA, 25 bp, Homo sapien
ccgtgacggtgaccgtggaggacgt

SEQ ID NO: 677866 - DNA, 25 bp, Homo sapien
gagcgggtgagcaccggtgtttccg

SEQ ID NO: 677867 - DNA, 25 bp, Homo sapien
caccgtcgtggatggtggagtttta

SEQ ID NO: 677868 - DNA, 25 bp, Homo sapien
ccaccgtcgtggatggtggagtttt

SEQ ID NO: 677869 - DNA, 25 bp, Homo sapien
agcagcggcctcctttactgagcgc

SEQ ID NO: 677870 - DNA, 25 bp, Homo sapien
acatctgagatacaagtcaagacct

SEQ ID NO: 677871 - DNA, 25 bp, Homo sapien
tgaggccacttctgcggcgtcttcc

SEQ ID NO: 677872 - DNA, 25 bp, Homo sapien
gcgtcttccatctccgcgagcagcg

SEQ ID NO: 677873 - DNA, 25 bp, Homo sapien
tgaaaagatgctctctagcggagtc

SEQ ID NO: 677874 - DNA, 25 bp, Homo sapien
taagctgcatccctagtggaaggta

SEQ ID NO: 677875 - DNA, 25 bp, Homo sapien
taggaagctgctctaactgaactgt

SEQ ID NO: 677876 - DNA, 25 bp, Homo sapien
tggaaggtaagctggaggtcacaac

SEQ ID NO: 677877 - DNA, 25 bp, Homo sapien
tggaagaggtaggggcacaaaacca

SEQ ID NO: 677878 - DNA, 25 bp, Homo sapien
agaggtaggggcacaaaaccaatca

SEQ ID NO: 677879 - DNA, 25 bp, Homo sapien
gaatggtcttctcctaaatctatga

SEQ ID NO: 677880 - DNA, 25 bp, Homo sapien
tacggccgtatagacatcttccgag

SEQ ID NO: 677881 - DNA, 25 bp, Homo sapien
tgacaagttcgctctctgaatcaga

SEQ ID NO: 677882 - DNA, 25 bp, Homo sapien
tcagaatcctccgaatcgctgtgct

SEQ ID NO: 677883 - DNA, 25 bp, Homo sapien
taatgataacaatgatactgctgga

SEQ ID NO: 677884 - DNA, 25 bp, Homo sapien
gataacaatgatactgctggaaaaa

SEQ ID NO: 677885 - DNA, 25 bp, Homo sapien
tgataacaatgatactgctggaaaa

SEQ ID NO: 677886 - DNA, 25 bp, Homo sapien
cagtaatgataacaatgatactgct

SEQ ID NO: 677887 - DNA, 25 bp, Homo sapien
actgttgctggaccgactcgctcag

SEQ ID NO: 677888 - DNA, 25 bp, Homo sapien
agctggaacctgctacgaatctggc

SEQ ID NO: 677889 - DNA, 25 bp, Homo sapien
caactctctatggtcttgtcaagat

SEQ ID NO: 677890 - DNA, 25 bp, Homo sapien
aattgtgctttgcaactctctatgg

SEQ ID NO: 677891 - DNA, 25 bp, Homo sapien
agggctttgggctgccggataaact

SEQ ID NO: 677892 - DNA, 25 bp, Homo sapien
tttgtccgttttcgtcgtgatagga

SEQ ID NO: 677893 - DNA, 25 bp, Homo sapien
tccgttttcgtcgtgataggagctg

SEQ ID NO: 677894 - DNA, 25 bp, Homo sapien
cctgcttgtcccgtcttggtggagg

SEQ ID NO: 677895 - DNA, 25 bp, Homo sapien
gagggcatattgctccatcacctaa

SEQ ID NO: 677896 - DNA, 25 bp, Homo sapien
cagggttttattttggagcgatgga

SEQ ID NO: 677897 - DNA, 25 bp, Homo sapien
ggcaacactgccctgcctatcattt

SEQ ID NO: 677898 - DNA, 25 bp, Homo sapien
tcccatggagaccccgtaagcactt

SEQ ID NO: 677899 - DNA, 25 bp, Homo sapien
tctgaacagaactccacaagatttc

SEQ ID NO: 677900 - DNA, 25 bp, Homo sapien
tctacttctaggtataacctccagg

SEQ ID NO: 677901 - DNA, 25 bp, Homo sapien
tactagcagcaagaactccactggt

SEQ ID NO: 677902 - DNA, 25 bp, Homo sapien
caaaatgcagcgacatctgaacaga

SEQ ID NO: 677903 - DNA, 25 bp, Homo sapien
gcttgggcccaccaagtgtgcaccc

SEQ ID NO: 677904 - DNA, 25 bp, Homo sapien
cttgggcccaccaagtgtgcaccca

SEQ ID NO: 677905 - DNA, 25 bp, Homo sapien
ctgcttgggcccaccaagtgtgcac

SEQ ID NO: 677906 - DNA, 25 bp, Homo sapien
tgcttgggcccaccaagtgtgcacc

SEQ ID NO: 677907 - DNA, 25 bp, Homo sapien
cactgaagtggctcgacgtggcctt

SEQ ID NO: 677908 - DNA, 25 bp, Homo sapien
tcggagcccgtgtgcacagaagagt

SEQ ID NO: 677909 - DNA, 25 bp, Homo sapien
tatccgacaaggaaatccggcggcc

SEQ ID NO: 677910 - DNA, 25 bp, Homo sapien
ggatgccgtcatgtcaaagttgagc

SEQ ID NO: 677911 - DNA, 25 bp, Homo sapien
aacctccatctcttgcatggcactg

SEQ ID NO: 677912 - DNA, 25 bp, Homo sapien
ttctttagacatgaggtagcaatta

SEQ ID NO: 677913 - DNA, 25 bp, Homo sapien
gtgtgtagggtgtcctaaatggaga

SEQ ID NO: 677914 - DNA, 25 bp, Homo sapien
gcggatgttctccacgtaaacctcc

SEQ ID NO: 677915 - DNA, 25 bp, Homo sapien
caaggcagatggatcggttgaatcc

SEQ ID NO: 677916 - DNA, 25 bp, Homo sapien
gggcttcgaaactggtgaccatcag

SEQ ID NO: 677917 - DNA, 25 bp, Homo sapien
aacaagcccaacaacacggtgcact

SEQ ID NO: 677918 - DNA, 25 bp, Homo sapien
tgtggaaggtcctgaacaactccct

SEQ ID NO: 677919 - DNA, 25 bp, Homo sapien
gctgagagactacagccatcaacca

SEQ ID NO: 677920 - DNA, 25 bp, Homo sapien
ttcagtcgctgtctgacgggtgaga

SEQ ID NO: 677921 - DNA, 25 bp, Homo sapien
tgagagactacagccatcaaccata

SEQ ID NO: 677922 - DNA, 25 bp, Homo sapien
tgctctgtaagccaccttcagtcgc

SEQ ID NO: 677923 - DNA, 25 bp, Homo sapien
ctgggaatattgggtgcaagggggt

SEQ ID NO: 677924 - DNA, 25 bp, Homo sapien
cccatcctgcctgtgtcctaagtat

SEQ ID NO: 677925 - DNA, 25 bp, Homo sapien
catcctgcctgtgtcctaagtatat

SEQ ID NO: 677926 - DNA, 25 bp, Homo sapien
atattgggtgcaagggggtaggtat

SEQ ID NO: 677927 - DNA, 25 bp, Homo sapien
tctgacagtggaccattgggattcc

SEQ ID NO: 677928 - DNA, 25 bp, Homo sapien
tggcacgcagcagtcatcaaatatg

SEQ ID NO: 677929 - DNA, 25 bp, Homo sapien
taggatgtcagccttcacatgggca

SEQ ID NO: 677930 - DNA, 25 bp, Homo sapien
tctacagggaactgctattagctgg

SEQ ID NO: 677931 - DNA, 25 bp, Homo sapien
gtcatgttgtccaaagaatcgggca

SEQ ID NO: 677932 - DNA, 25 bp, Homo sapien
agagcttttgcaggccagaatggaa

SEQ ID NO: 677933 - DNA, 25 bp, Homo sapien
gacctgcccgtctttatcccttaga

SEQ ID NO: 677934 - DNA, 25 bp, Homo sapien
gtttggcccagaccaaaggatgtgg

SEQ ID NO: 677935 - DNA, 25 bp, Homo sapien
taaagtttggtatgtgaggatgaag

SEQ ID NO: 677936 - DNA, 25 bp, Homo sapien
aagtttggtatgtgaggatgaagca

SEQ ID NO: 677937 - DNA, 25 bp, Homo sapien
tttggtatgtgaggatgaagcagga

SEQ ID NO: 677938 - DNA, 25 bp, Homo sapien
agtttggtatgtgaggatgaagcag

SEQ ID NO: 677939 - DNA, 25 bp, Homo sapien
tttggcaagcagctagataacattc

SEQ ID NO: 677940 - DNA, 25 bp, Homo sapien
cacaaaaccagttatctcgtttttg

SEQ ID NO: 677941 - DNA, 25 bp, Homo sapien
tagataacattctggacatacttcg

SEQ ID NO: 677942 - DNA, 25 bp, Homo sapien
tctggacatacttcgatttcattca

SEQ ID NO: 677943 - DNA, 25 bp, Homo sapien
agtgacttcccattatacccagtag

SEQ ID NO: 677944 - DNA, 25 bp, Homo sapien
attatacccagtagttctctgtcag

SEQ ID NO: 677945 - DNA, 25 bp, Homo sapien
cacccacagggatcacatagcaatg

SEQ ID NO: 677946 - DNA, 25 bp, Homo sapien
aacccagagccaccttttatagaca

SEQ ID NO: 677947 - DNA, 25 bp, Homo sapien
tgtaaagtgcttcaagtgacagagt

SEQ ID NO: 677948 - DNA, 25 bp, Homo sapien
tgactttagggtaagctgcttctct

SEQ ID NO: 677949 - DNA, 25 bp, Homo sapien
catttactgaagacttagagtgtgc

SEQ ID NO: 677950 - DNA, 25 bp, Homo sapien
cattgtagcttagagccaaagatcc

SEQ ID NO: 677951 - DNA, 25 bp, Homo sapien
tcagcctctcagtttagctaggatt

SEQ ID NO: 677952 - DNA, 25 bp, Homo sapien
ctcagcctctcagtttagctaggat

SEQ ID NO: 677953 - DNA, 25 bp, Homo sapien
gaatgaatgggagcacactgacagg

SEQ ID NO: 677954 - DNA, 25 bp, Homo sapien
tataaaaagacatggatgggtccca

SEQ ID NO: 677955 - DNA, 25 bp, Homo sapien
cactgacaggttgaaggtcattcca

SEQ ID NO: 677956 - DNA, 25 bp, Homo sapien
gaaaagctccctcataccattttgg

SEQ ID NO: 677957 - DNA, 25 bp, Homo sapien
cgccatcacaattatgggcatttgc

SEQ ID NO: 677958 - DNA, 25 bp, Homo sapien
aagaggtctgttccatccacgccat

SEQ ID NO: 677959 - DNA, 25 bp, Homo sapien
tgcaagaaaacaggttctcctggac

SEQ ID NO: 677960 - DNA, 25 bp, Homo sapien
tcacacgcctaagaggtctgttcca

SEQ ID NO: 677961 - DNA, 25 bp, Homo sapien
cttctgcaagaggaccaaaagggac

SEQ ID NO: 677962 - DNA, 25 bp, Homo sapien
cccagatatcaaatcctcttctgca

SEQ ID NO: 677963 - DNA, 25 bp, Homo sapien
atgcccccagatatcaaatcctctt

SEQ ID NO: 677964 - DNA, 25 bp, Homo sapien
ctctcccagaagcagtcaaggccat

SEQ ID NO: 677965 - DNA, 25 bp, Homo sapien
tacgaattctatctaggcaatcagg

SEQ ID NO: 677966 - DNA, 25 bp, Homo sapien
ctgaaacaataccaggctgtggggc

SEQ ID NO: 677967 - DNA, 25 bp, Homo sapien
gccaaggtcagaaattacgaattct

SEQ ID NO: 677968 - DNA, 25 bp, Homo sapien
gaggcccggtgcttactggtgactc

SEQ ID NO: 677969 - DNA, 25 bp, Homo sapien
ttttgatgactactttcgctatttg

SEQ ID NO: 677970 - DNA, 25 bp, Homo sapien
gctatttgcgtcaatttgtgatttc

SEQ ID NO: 677971 - DNA, 25 bp, Homo sapien
gactactttcgctatttgcgtcaat

SEQ ID NO: 677972 - DNA, 25 bp, Homo sapien
tcgctatttgcgtcaatttgtgatt

SEQ ID NO: 677973 - DNA, 25 bp, Homo sapien
gagtgcaggggcgcagatctcagct

SEQ ID NO: 677974 - DNA, 25 bp, Homo sapien
ggagtgcaggggcgcagatctcagc

SEQ ID NO: 677975 - DNA, 25 bp, Homo sapien
tggagtgcaggggcgcagatctcag

SEQ ID NO: 677976 - DNA, 25 bp, Homo sapien
agtgcaggggcgcagatctcagctc

SEQ ID NO: 677977 - DNA, 25 bp, Homo sapien
accactgatcattaggaaaaggcaa

SEQ ID NO: 677978 - DNA, 25 bp, Homo sapien
agcctgtgcgattcagtgagactct

SEQ ID NO: 677979 - DNA, 25 bp, Homo sapien
aataaaatcctactcactgagctgg

SEQ ID NO: 677980 - DNA, 25 bp, Homo sapien
tatcaacccttatagtgtgtggagc

SEQ ID NO: 677981 - DNA, 25 bp, Homo sapien
atgcagttgtgcaaaatccactttg

SEQ ID NO: 677982 - DNA, 25 bp, Homo sapien
gatgcagttgtgcaaaatccacttt

SEQ ID NO: 677983 - DNA, 25 bp, Homo sapien
ctgggaagaaaagcgatggagcata

SEQ ID NO: 677984 - DNA, 25 bp, Homo sapien
taatcacagtgagtctagacaagcc

SEQ ID NO: 677985 - DNA, 25 bp, Homo sapien
tattcatttcccaagatgcttcttt

SEQ ID NO: 677986 - DNA, 25 bp, Homo sapien
agtgactcttgtgtccccacataat

SEQ ID NO: 677987 - DNA, 25 bp, Homo sapien
caggtaaaaagctagaatcatcgca

SEQ ID NO: 677988 - DNA, 25 bp, Homo sapien
tccaacttgtgatagagcataggca

SEQ ID NO: 677989 - DNA, 25 bp, Homo sapien
tttattgctaatctggaggcttccc

SEQ ID NO: 677990 - DNA, 25 bp, Homo sapien
gcgcccggccaaacagggtatttca

SEQ ID NO: 677991 - DNA, 25 bp, Homo sapien
gatgtattccgcatagtcagggtgc

SEQ ID NO: 677992 - DNA, 25 bp, Homo sapien
tgttccaatggaacgggcttctgga

SEQ ID NO: 677993 - DNA, 25 bp, Homo sapien
cttttccaatgtacaaaggtccatt

SEQ ID NO: 677994 - DNA, 25 bp, Homo sapien
tggaagatgtattccgcatagtcag

SEQ ID NO: 677995 - DNA, 25 bp, Homo sapien
agaagatatgcagaggaacgaaccc

SEQ ID NO: 677996 - DNA, 25 bp, Homo sapien
aattataagcccaattgtgatccaa

SEQ ID NO: 677997 - DNA, 25 bp, Homo sapien
agctccaaattggtctaccttctaa

SEQ ID NO: 677998 - DNA, 25 bp, Homo sapien
cactcaagaaacagatcctgtcctc

SEQ ID NO: 677999 - DNA, 25 bp, Homo sapien
caggtaggataactgttcaatggtg

SEQ ID NO: 678000 - DNA, 25 bp, Homo sapien
tgaatggcaaacttgagcaggtagg

SEQ ID NO: 678001 - DNA, 25 bp, Homo sapien
acttgagcaggtaggataactgttc

SEQ ID NO: 678002 - DNA, 25 bp, Homo sapien
taactgttcaatggtgagcattgtc

SEQ ID NO: 678003 - DNA, 25 bp, Homo sapien
gggtctcgatgcattctgctactgt

SEQ ID NO: 678004 - DNA, 25 bp, Homo sapien
gctttactctgggtctcgatgcatt

SEQ ID NO: 678005 - DNA, 25 bp, Homo sapien
tcgatgcattctgctactgtaattt

SEQ ID NO: 678006 - DNA, 25 bp, Homo sapien
tactctgggtctcgatgcattctgc

SEQ ID NO: 678007 - DNA, 25 bp, Homo sapien
gatgattcaatgatgcggcaggcaa

SEQ ID NO: 678008 - DNA, 25 bp, Homo sapien
gatgacgactacagatctccaagga

SEQ ID NO: 678009 - DNA, 25 bp, Homo sapien
catagaagatgcagagatgacgact

SEQ ID NO: 678010 - DNA, 25 bp, Homo sapien
cagggaacatgcaaccaaacgtggt

SEQ ID NO: 678011 - DNA, 25 bp, Homo sapien
agacacttagcgtgataaacccggg

SEQ ID NO: 678012 - DNA, 25 bp, Homo sapien
tcacattcaggacaaaaccagtccc

SEQ ID NO: 678013 - DNA, 25 bp, Homo sapien
cttcccggtgacaaacccagcagta

SEQ ID NO: 678014 - DNA, 25 bp, Homo sapien
ctctggttccgatgtcagtctcaga

SEQ ID NO: 678015 - DNA, 25 bp, Homo sapien
tatagtaaaacggaccatgtcttag

SEQ ID NO: 678016 - DNA, 25 bp, Homo sapien
aaaacggaccatgtcttagttctga

SEQ ID NO: 678017 - DNA, 25 bp, Homo sapien
gtggctgcttcatatagtaaaacgg

SEQ ID NO: 678018 - DNA, 25 bp, Homo sapien
gcttcatatagtaaaacggaccatg

SEQ ID NO: 678019 - DNA, 25 bp, Homo sapien
ccaatttacaaagccaataaaagca

SEQ ID NO: 678020 - DNA, 25 bp, Homo sapien
tgggattcttcaaatggcagacatt

SEQ ID NO: 678021 - DNA, 25 bp, Homo sapien
ctgggattcttcaaatggcagacat

SEQ ID NO: 678022 - DNA, 25 bp, Homo sapien
ttatggaagtcccaatttacaaagc

SEQ ID NO: 678023 - DNA, 25 bp, Homo sapien
tgagaactagtcctgtgggcatggc

SEQ ID NO: 678024 - DNA, 25 bp, Homo sapien
aagcaaccgcttccagacagagctg

SEQ ID NO: 678025 - DNA, 25 bp, Homo sapien
cactggaaatttctacacaggccca

SEQ ID NO: 678026 - DNA, 25 bp, Homo sapien
gctctgtccccgaaacagatctgaa

SEQ ID NO: 678027 - DNA, 25 bp, Homo sapien
tgaggacaccgttcccagcggctgc

SEQ ID NO: 678028 - DNA, 25 bp, Homo sapien
aggacaccgttcccagcggctgctt

SEQ ID NO: 678029 - DNA, 25 bp, Homo sapien
agtgaggacaccgttcccagcggct

SEQ ID NO: 678030 - DNA, 25 bp, Homo sapien
cagtgaggacaccgttcccagcggc

SEQ ID NO: 678031 - DNA, 25 bp, Homo sapien
gttactgttcagtaagccaggtttc

SEQ ID NO: 678032 - DNA, 25 bp, Homo sapien
gtgtcctgcggcgagtggccattgg

SEQ ID NO: 678033 - DNA, 25 bp, Homo sapien
ttttaatggggcttgttgatgtgtc

SEQ ID NO: 678034 - DNA, 25 bp, Homo sapien
cttgttgatgtgtcctgcggcgagt

SEQ ID NO: 678035 - DNA, 25 bp, Homo sapien
caggaccacaggttttaaagcagtc

SEQ ID NO: 678036 - DNA, 25 bp, Homo sapien
ggaccacaggttttaaagcagtcag

SEQ ID NO: 678037 - DNA, 25 bp, Homo sapien
ccacaggttttaaagcagtcaggga

SEQ ID NO: 678038 - DNA, 25 bp, Homo sapien
ccccaactcccgaagccacttcagt

SEQ ID NO: 678039 - DNA, 25 bp, Homo sapien
gccccactcttgttcatgcacccct

SEQ ID NO: 678040 - DNA, 25 bp, Homo sapien
cagccccactcttgttcatgcaccc

SEQ ID NO: 678041 - DNA, 25 bp, Homo sapien
agccccactcttgttcatgcacccc

SEQ ID NO: 678042 - DNA, 25 bp, Homo sapien
cctcaagggaaagggccgcagctga

SEQ ID NO: 678043 - DNA, 25 bp, Homo sapien
cagggaattgtctcctccctcaagg

SEQ ID NO: 678044 - DNA, 25 bp, Homo sapien
taatgatgtcgacagcaagcctgct

SEQ ID NO: 678045 - DNA, 25 bp, Homo sapien
tgaaaggccgggagcttcttgtgtt

SEQ ID NO: 678046 - DNA, 25 bp, Homo sapien
ctgaacgaaaagagaagcttggtcc

SEQ ID NO: 678047 - DNA, 25 bp, Homo sapien
ctccagaggactgcactggcctgaa

SEQ ID NO: 678048 - DNA, 25 bp, Homo sapien
cttagacccacagaaactcgaggac

SEQ ID NO: 678049 - DNA, 25 bp, Homo sapien
ccagaggactgcactggcctgaact

SEQ ID NO: 678050 - DNA, 25 bp, Homo sapien
actcgaggaccggtctgcaccctgg

SEQ ID NO: 678051 - DNA, 25 bp, Homo sapien
ggcctagcctctcttgttcaaaaga

SEQ ID NO: 678052 - DNA, 25 bp, Homo sapien
ccattgagaaagtgcggctgctcag

SEQ ID NO: 678053 - DNA, 25 bp, Homo sapien
cattgagaaagtgcggctgctcaga

SEQ ID NO: 678054 - DNA, 25 bp, Homo sapien
gagggcctagcctctcttgttcaaa

SEQ ID NO: 678055 - DNA, 25 bp, Homo sapien
ctgcttccggatcctcagcggcctc

SEQ ID NO: 678056 - DNA, 25 bp, Homo sapien
cctgcttccggatcctcagcggcct

SEQ ID NO: 678057 - DNA, 25 bp, Homo sapien
tcctgcttccggatcctcagcggcc

SEQ ID NO: 678058 - DNA, 25 bp, Homo sapien
tgcttccggatcctcagcggcctct

SEQ ID NO: 678059 - DNA, 25 bp, Homo sapien
agctgaaagtctccggtgcagtgca

SEQ ID NO: 678060 - DNA, 25 bp, Homo sapien
cagttgttctgctggccgaggtgac

SEQ ID NO: 678061 - DNA, 25 bp, Homo sapien
gtgcagtgcaccgaagagccattga

SEQ ID NO: 678062 - DNA, 25 bp, Homo sapien
gaataaatacgaggaactgcagttg

SEQ ID NO: 678063 - DNA, 25 bp, Homo sapien
taaagcggctattaagtacagaatg

SEQ ID NO: 678064 - DNA, 25 bp, Homo sapien
ccagcctccctgtttcattgataag

SEQ ID NO: 678065 - DNA, 25 bp, Homo sapien
aaaccaggcccatggtaaagcggct

SEQ ID NO: 678066 - DNA, 25 bp, Homo sapien
tgagaaactgattacagatggacaa

SEQ ID NO: 678067 - DNA, 25 bp, Homo sapien
tcaagacaagcagatcgacacagca

SEQ ID NO: 678068 - DNA, 25 bp, Homo sapien
tggcattggccaacgtcaacacagc

SEQ ID NO: 678069 - DNA, 25 bp, Homo sapien
tcccaagtagctaacaccacggtgt

SEQ ID NO: 678070 - DNA, 25 bp, Homo sapien
catcaagctagggagagagctggtc

SEQ ID NO: 678071 - DNA, 25 bp, Homo sapien
catgaaatgccagtcccttgttagt

SEQ ID NO: 678072 - DNA, 25 bp, Homo sapien
tctactaaggctacggaacagtgtg

SEQ ID NO: 678073 - DNA, 25 bp, Homo sapien
tcagacacttgacacgtggccaggg

SEQ ID NO: 678074 - DNA, 25 bp, Homo sapien
aaagaataggcaagctcaggaggca

SEQ ID NO: 678075 - DNA, 25 bp, Homo sapien
tttaaagagccacgtacagctagtg

SEQ ID NO: 678076 - DNA, 25 bp, Homo sapien
tagttgaattcaaggcaccggatgc

SEQ ID NO: 678077 - DNA, 25 bp, Homo sapien
tggtcctcacgaaggtcagtctgga

SEQ ID NO: 678078 - DNA, 25 bp, Homo sapien
ccaagtgtgtctcagcaaggtgcac

SEQ ID NO: 678079 - DNA, 25 bp, Homo sapien
aaggaaatgaactacagaccctcct

SEQ ID NO: 678080 - DNA, 25 bp, Homo sapien
cagtcataaaaggaaatgaactaca

SEQ ID NO: 678081 - DNA, 25 bp, Homo sapien
ttcagtcataaaaggaaatgaacta

SEQ ID NO: 678082 - DNA, 25 bp, Homo sapien
cataaaaggaaatgaactacagacc

SEQ ID NO: 678083 - DNA, 25 bp, Homo sapien
agctgagatagtgccactgcactcc

SEQ ID NO: 678084 - DNA, 25 bp, Homo sapien
aaccaggaagcagaggggtgcagtg

SEQ ID NO: 678085 - DNA, 25 bp, Homo sapien
ttgaaccaggaagcagaggggtgca

SEQ ID NO: 678086 - DNA, 25 bp, Homo sapien
agcctgggtgacaaagtgagactcc

SEQ ID NO: 678087 - DNA, 25 bp, Homo sapien
ttcagcaggatcattaccctcggac

SEQ ID NO: 678088 - DNA, 25 bp, Homo sapien
acatcttgaaagctcgaaagctttg

SEQ ID NO: 678089 - DNA, 25 bp, Homo sapien
cccattgatgtaggagcatctttca

SEQ ID NO: 678090 - DNA, 25 bp, Homo sapien
ggacacaaatgtcaacctgacatct

SEQ ID NO: 678091 - DNA, 25 bp, Homo sapien
caaggccaacagtgatagatcttat

SEQ ID NO: 678092 - DNA, 25 bp, Homo sapien
agccactgcacaaggccaacagtga

SEQ ID NO: 678093 - DNA, 25 bp, Homo sapien
cctctgctttcgaggaggtggagca

SEQ ID NO: 678094 - DNA, 25 bp, Homo sapien
tgtgggtgatgccttgtgacttcct

SEQ ID NO: 678095 - DNA, 25 bp, Homo sapien
gcacgtgctcctgcaacatcaaaaa

SEQ ID NO: 678096 - DNA, 25 bp, Homo sapien
agaaggtaccttccttgctctgaag

SEQ ID NO: 678097 - DNA, 25 bp, Homo sapien
ttttgaagcgcattctggctgctga

SEQ ID NO: 678098 - DNA, 25 bp, Homo sapien
gtcactcagcttggtcatgcttgga

SEQ ID NO: 678099 - DNA, 25 bp, Homo sapien
gagaatctccttccggcagtatgca

SEQ ID NO: 678100 - DNA, 25 bp, Homo sapien
gcagtatgcagtaaccctgtccagc

SEQ ID NO: 678101 - DNA, 25 bp, Homo sapien
tcatttgtgaaagcaccctgaaggt

SEQ ID NO: 678102 - DNA, 25 bp, Homo sapien
tgtgcgacactctgcagccaaatga

SEQ ID NO: 678103 - DNA, 25 bp, Homo sapien
taaaatcagaaaacgagcagcagct

SEQ ID NO: 678104 - DNA, 25 bp, Homo sapien
tccaagaagagttacaacgtcggct

SEQ ID NO: 678105 - DNA, 25 bp, Homo sapien
tcctgaaagtcaccctgcggagagg

SEQ ID NO: 678106 - DNA, 25 bp, Homo sapien
cactttccagtgaagcgggctgact

SEQ ID NO: 678107 - DNA, 25 bp, Homo sapien
tgtttttatttcctcttcagccaag

SEQ ID NO: 678108 - DNA, 25 bp, Homo sapien
cctctaccacctcctgttctgtttt

SEQ ID NO: 678109 - DNA, 25 bp, Homo sapien
tctaccacctcctgttctgttttta

SEQ ID NO: 678110 - DNA, 25 bp, Homo sapien
gccctctaccacctcctgttctgtt

SEQ ID NO: 678111 - DNA, 25 bp, Homo sapien
tgttcatgtttaggaaggctgagaa

SEQ ID NO: 678112 - DNA, 25 bp, Homo sapien
tgaaacagagcaaattatgttcatg

SEQ ID NO: 678113 - DNA, 25 bp, Homo sapien
ctgaaacagagcaaattatgttcat

SEQ ID NO: 678114 - DNA, 25 bp, Homo sapien
caaattatgttcatgtttaggaagg

SEQ ID NO: 678115 - DNA, 25 bp, Homo sapien
gacattccctcatccttatccaggg

SEQ ID NO: 678116 - DNA, 25 bp, Homo sapien
aagacattccctcatccttatccag

SEQ ID NO: 678117 - DNA, 25 bp, Homo sapien
taaagacattccctcatccttatcc

SEQ ID NO: 678118 - DNA, 25 bp, Homo sapien
cttaaagacattccctcatccttat

SEQ ID NO: 678119 - DNA, 25 bp, Homo sapien
ctgggggaggaaacccacacctgat

SEQ ID NO: 678120 - DNA, 25 bp, Homo sapien
tcaaaacactgaaccgaggagcact

SEQ ID NO: 678121 - DNA, 25 bp, Homo sapien
ttggaagactcaacgccaggacagg

SEQ ID NO: 678122 - DNA, 25 bp, Homo sapien
cgttccacaggaagaaatgggtgca

SEQ ID NO: 678123 - DNA, 25 bp, Homo sapien
tcatgtctcgaaccctagtataagg

SEQ ID NO: 678124 - DNA, 25 bp, Homo sapien
aatctacagtggtgagggaaacaat

SEQ ID NO: 678125 - DNA, 25 bp, Homo sapien
ggctgcattcaagggaaccattatt

SEQ ID NO: 678126 - DNA, 25 bp, Homo sapien
cctcggagatgggtagacagttaac

SEQ ID NO: 678127 - DNA, 25 bp, Homo sapien
gaaaacgctaatctgtgatccaact

SEQ ID NO: 678128 - DNA, 25 bp, Homo sapien
tattacatcaaaagtaggcgcaaga

SEQ ID NO: 678129 - DNA, 25 bp, Homo sapien
ggcgcaagaaaagatctgtacctgt

SEQ ID NO: 678130 - DNA, 25 bp, Homo sapien
tgtacctgtctgaattgccccactg

SEQ ID NO: 678131 - DNA, 25 bp, Homo sapien
tccaagtattacaagtgggcaccat

SEQ ID NO: 678132 - DNA, 25 bp, Homo sapien
tagctaagctatttatgcaggattc

SEQ ID NO: 678133 - DNA, 25 bp, Homo sapien
aacaggcagagtcatcggtagctaa

SEQ ID NO: 678134 - DNA, 25 bp, Homo sapien
aaatggtagcagtttgttcaatagc

SEQ ID NO: 678135 - DNA, 25 bp, Homo sapien
taaaatggcgtctggcaacactgcc

SEQ ID NO: 678136 - DNA, 25 bp, Homo sapien
gcatccataccaaaaaggcgctagg

SEQ ID NO: 678137 - DNA, 25 bp, Homo sapien
gccccgtggcacaaactgcagacgg

SEQ ID NO: 678138 - DNA, 25 bp, Homo sapien
cagtctattagaaaccagctttgca

SEQ ID NO: 678139 - DNA, 25 bp, Homo sapien
tgcagacggacaggtgtctgtgcaa

SEQ ID NO: 678140 - DNA, 25 bp, Homo sapien
agatttctgaccacccccaacagag

SEQ ID NO: 678141 - DNA, 25 bp, Homo sapien
tttctgaccacccccaacagagcct

SEQ ID NO: 678142 - DNA, 25 bp, Homo sapien
attagatttctgaccacccccaaca

SEQ ID NO: 678143 - DNA, 25 bp, Homo sapien
ttagatttctgaccacccccaacag

SEQ ID NO: 678144 - DNA, 25 bp, Homo sapien
agcaaccgtctcatttttccacagt

SEQ ID NO: 678145 - DNA, 25 bp, Homo sapien
aaatgttcaagcaaccgtctcattt

SEQ ID NO: 678146 - DNA, 25 bp, Homo sapien
aatgttcaagcaaccgtctcatttt

SEQ ID NO: 678147 - DNA, 25 bp, Homo sapien
caaatgttcaagcaaccgtctcatt

SEQ ID NO: 678148 - DNA, 25 bp, Homo sapien
gaggagcctgtttgcttaccttcca

SEQ ID NO: 678149 - DNA, 25 bp, Homo sapien
ggcataccaggatctagcttcaaac

SEQ ID NO: 678150 - DNA, 25 bp, Homo sapien
tcagaaacatttgctggctgtaggc

SEQ ID NO: 678151 - DNA, 25 bp, Homo sapien
taagagaagaccgtgtacagacacc

SEQ ID NO: 678152 - DNA, 25 bp, Homo sapien
cttataaaacatggaggacaggctc

SEQ ID NO: 678153 - DNA, 25 bp, Homo sapien
aaaagggtttggcacttcggctgat

SEQ ID NO: 678154 - DNA, 25 bp, Homo sapien
ggctgatgatctggccgcctaataa

SEQ ID NO: 678155 - DNA, 25 bp, Homo sapien
gttaacactgtgtaatgtcaatact

SEQ ID NO: 678156 - DNA, 25 bp, Homo sapien
gcaaatcggagtgtaaagccgcccc

SEQ ID NO: 678157 - DNA, 25 bp, Homo sapien
aagccgccccggattggctgaaaca

SEQ ID NO: 678158 - DNA, 25 bp, Homo sapien
ttatctttgtgaggctcgggtgagc

SEQ ID NO: 678159 - DNA, 25 bp, Homo sapien
gaaacacttcctgagcgattatctt

SEQ ID NO: 678160 - DNA, 25 bp, Homo sapien
tagtcattgtccccatgcctccttg

SEQ ID NO: 678161 - DNA, 25 bp, Homo sapien
aatcaacgtgggttcctgtcgccct

SEQ ID NO: 678162 - DNA, 25 bp, Homo sapien
cagagtggtcaagtttgcatagtca

SEQ ID NO: 678163 - DNA, 25 bp, Homo sapien
cagaggagcgaggagtagctgctga

SEQ ID NO: 678164 - DNA, 25 bp, Homo sapien
cagctctgctctgtttgaggaatgc

SEQ ID NO: 678165 - DNA, 25 bp, Homo sapien
taggtctgaggttatctggaaaaca

SEQ ID NO: 678166 - DNA, 25 bp, Homo sapien
cacaaaagtatggtggcagatggaa

SEQ ID NO: 678167 - DNA, 25 bp, Homo sapien
aatgctgttggcattcgggtaggtc

SEQ ID NO: 678168 - DNA, 25 bp, Homo sapien
cctgaaatggctcgcccgttccgct

SEQ ID NO: 678169 - DNA, 25 bp, Homo sapien
aatggctcgcccgttccgctggcct

SEQ ID NO: 678170 - DNA, 25 bp, Homo sapien
tgaaatggctcgcccgttccgctgg

SEQ ID NO: 678171 - DNA, 25 bp, Homo sapien
tccctgaaatggctcgcccgttccg

SEQ ID NO: 678172 - DNA, 25 bp, Homo sapien
tgagcctccttggaagataaactgg

SEQ ID NO: 678173 - DNA, 25 bp, Homo sapien
gagtcttgagcctccttggaagata

SEQ ID NO: 678174 - DNA, 25 bp, Homo sapien
gctcagagtcttgagcctccttgga

SEQ ID NO: 678175 - DNA, 25 bp, Homo sapien
ttggaagataaactggccccctgtg

SEQ ID NO: 678176 - DNA, 25 bp, Homo sapien
cttagcaaggcctgtgagtttagtc

SEQ ID NO: 678177 - DNA, 25 bp, Homo sapien
tatggacagtcaagcagcagtgtca

SEQ ID NO: 678178 - DNA, 25 bp, Homo sapien
ttcatggtctccacggacaggaccg

SEQ ID NO: 678179 - DNA, 25 bp, Homo sapien
tgtacacagtgggaacttagcaagg

SEQ ID NO: 678180 - DNA, 25 bp, Homo sapien
gaaccagggctcagttgattactag

SEQ ID NO: 678181 - DNA, 25 bp, Homo sapien
tggatgaggttaccacggctgcaac

SEQ ID NO: 678182 - DNA, 25 bp, Homo sapien
tcaaacgccatcagaatttagcagg

SEQ ID NO: 678183 - DNA, 25 bp, Homo sapien
taattacaagcaggagagaacctgg

SEQ ID NO: 678184 - DNA, 25 bp, Homo sapien
ctataaggggttgagagctatttgg

SEQ ID NO: 678185 - DNA, 25 bp, Homo sapien
ccatttagtagtccatctataaggg

SEQ ID NO: 678186 - DNA, 25 bp, Homo sapien
gcttccaccttagggaccaagagag

SEQ ID NO: 678187 - DNA, 25 bp, Homo sapien
cttagggaccaagagagtcactcca

SEQ ID NO: 678188 - DNA, 25 bp, Homo sapien
tggcggaacaataccagtgctggct

SEQ ID NO: 678189 - DNA, 25 bp, Homo sapien
cagtgctggctattctgtgatcatc

SEQ ID NO: 678190 - DNA, 25 bp, Homo sapien
gctccaggtatcatgtgagtattca

SEQ ID NO: 678191 - DNA, 25 bp, Homo sapien
tctggaggtaagtatctgctgtcgc

SEQ ID NO: 678192 - DNA, 25 bp, Homo sapien
cttggctgagtcgaacttgtgctgc

SEQ ID NO: 678193 - DNA, 25 bp, Homo sapien
ttcgtgcttgggatgtccttcctct

SEQ ID NO: 678194 - DNA, 25 bp, Homo sapien
gtttcttggctgagtcgaacttgtg

SEQ ID NO: 678195 - DNA, 25 bp, Homo sapien
cacttcgtgcttgggatgtccttcc

SEQ ID NO: 678196 - DNA, 25 bp, Homo sapien
gacagctcttaggttaagagacaca

SEQ ID NO: 678197 - DNA, 25 bp, Homo sapien
tggagacagctcttaggttaagaga

SEQ ID NO: 678198 - DNA, 25 bp, Homo sapien
cattggttaagaaaagcttctggtg

SEQ ID NO: 678199 - DNA, 25 bp, Homo sapien
gagacagctcttaggttaagagaca

SEQ ID NO: 678200 - DNA, 25 bp, Homo sapien
aggcagtagaatgccgaaataggct

SEQ ID NO: 678201 - DNA, 25 bp, Homo sapien
tgccgaaataggcttgtccctgctc

SEQ ID NO: 678202 - DNA, 25 bp, Homo sapien
tgtagagaataaccttgcttgtgct

SEQ ID NO: 678203 - DNA, 25 bp, Homo sapien
gaatgtagagaataaccttgcttgt

SEQ ID NO: 678204 - DNA, 25 bp, Homo sapien
ctttgcttgtctgcatagagcctgc

SEQ ID NO: 678205 - DNA, 25 bp, Homo sapien
gttcctgatcaagaaggccacttca

SEQ ID NO: 678206 - DNA, 25 bp, Homo sapien
gaaggccacttcaaaccagatgact

SEQ ID NO: 678207 - DNA, 25 bp, Homo sapien
gggtggttcctgatcaagaaggcca

SEQ ID NO: 678208 - DNA, 25 bp, Homo sapien
gaacccactgggcagttatgtacct

SEQ ID NO: 678209 - DNA, 25 bp, Homo sapien
caatgcgcccgaagtagttgattct

SEQ ID NO: 678210 - DNA, 25 bp, Homo sapien
ggatcgctaaaacctgggacgtgga

SEQ ID NO: 678211 - DNA, 25 bp, Homo sapien
gattctgctctctagggatattggg

SEQ ID NO: 678212 - DNA, 25 bp, Homo sapien
gctgctggaattaaaccagtggttt

SEQ ID NO: 678213 - DNA, 25 bp, Homo sapien
aggtgtggatttcagcccatccctg

SEQ ID NO: 678214 - DNA, 25 bp, Homo sapien
cctttgaaagcataagctgctggaa

SEQ ID NO: 678215 - DNA, 25 bp, Homo sapien
gctgaagataaagtcctgtttgcac

SEQ ID NO: 678216 - DNA, 25 bp, Homo sapien
gccactgggccaagcccaatcactt

SEQ ID NO: 678217 - DNA, 25 bp, Homo sapien
cactgggccaagcccaatcacttct

SEQ ID NO: 678218 - DNA, 25 bp, Homo sapien
ccactgggccaagcccaatcacttc

SEQ ID NO: 678219 - DNA, 25 bp, Homo sapien
gcccataattccatgggtctgagtt

SEQ ID NO: 678220 - DNA, 25 bp, Homo sapien
ccataattccatgggtctgagttac

SEQ ID NO: 678221 - DNA, 25 bp, Homo sapien
agaggggtataacatcacatggaat

SEQ ID NO: 678222 - DNA, 25 bp, Homo sapien
gggtataacatcacatggaatcttt

SEQ ID NO: 678223 - DNA, 25 bp, Homo sapien
gttcagtttgctgccgggagtcact

SEQ ID NO: 678224 - DNA, 25 bp, Homo sapien
tttgttcagtttgctgccgggagtc

SEQ ID NO: 678225 - DNA, 25 bp, Homo sapien
tttgctgccgggagtcactgtcctg

SEQ ID NO: 678226 - DNA, 25 bp, Homo sapien
gtttgctgccgggagtcactgtcct

SEQ ID NO: 678227 - DNA, 25 bp, Homo sapien
gctgtgtactccctttggttcaaga

SEQ ID NO: 678228 - DNA, 25 bp, Homo sapien
aataggattcagtttcatctcaggc

SEQ ID NO: 678229 - DNA, 25 bp, Homo sapien
tttcatctcaggcataaatgccttc

SEQ ID NO: 678230 - DNA, 25 bp, Homo sapien
aaatgccttcaatgttaagaagagc

SEQ ID NO: 678231 - DNA, 25 bp, Homo sapien
tagtatatgtactgcagcagggagc

SEQ ID NO: 678232 - DNA, 25 bp, Homo sapien
tagtgtatgtgctgccaacatgagc

SEQ ID NO: 678233 - DNA, 25 bp, Homo sapien
tgtgcagggaccacactaatcttct

SEQ ID NO: 678234 - DNA, 25 bp, Homo sapien
agtgtatgtgctgccaacatgagca

SEQ ID NO: 678235 - DNA, 25 bp, Homo sapien
caaaactggaatgcttcacagaatt

SEQ ID NO: 678236 - DNA, 25 bp, Homo sapien
gaaccctaggccggccgcgcaaggc

SEQ ID NO: 678237 - DNA, 25 bp, Homo sapien
ccctgggaccggtagtgctgggcgt

SEQ ID NO: 678238 - DNA, 25 bp, Homo sapien
aggccccctgggaccggtagtgctg

SEQ ID NO: 678239 - DNA, 25 bp, Homo sapien
gccctccgccgcggaagccagggtg

SEQ ID NO: 678240 - DNA, 25 bp, Homo sapien
tcgtgactttaggtgatgcacttgc

SEQ ID NO: 678241 - DNA, 25 bp, Homo sapien
actcgtgactttaggtgatgcactt

SEQ ID NO: 678242 - DNA, 25 bp, Homo sapien
ctcgtgactttaggtgatgcacttg

SEQ ID NO: 678243 - DNA, 25 bp, Homo sapien
agtccaggagttcattacaagtctg

SEQ ID NO: 678244 - DNA, 25 bp, Homo sapien
tgcacacgaacaattaagattcatc

SEQ ID NO: 678245 - DNA, 25 bp, Homo sapien
tctaagaaatgactggtgcggtggc

SEQ ID NO: 678246 - DNA, 25 bp, Homo sapien
gaatccacgctaccaatcaagaagt

SEQ ID NO: 678247 - DNA, 25 bp, Homo sapien
gaagtactgactcacatgcacacga

SEQ ID NO: 678248 - DNA, 25 bp, Homo sapien
agttaggtgtaggatggatgttcat

SEQ ID NO: 678249 - DNA, 25 bp, Homo sapien
ccttatgtaatagacttagtgcccc

SEQ ID NO: 678250 - DNA, 25 bp, Homo sapien
tttgaatactattgaaattacctag

SEQ ID NO: 678251 - DNA, 25 bp, Homo sapien
tttaagcggtccttctgtgtagctg

SEQ ID NO: 678252 - DNA, 25 bp, Homo sapien
ccttgtgttcccctatgtttgagaa

SEQ ID NO: 678253 - DNA, 25 bp, Homo sapien
gtgtcacttagaaccctcattcagg

SEQ ID NO: 678254 - DNA, 25 bp, Homo sapien
cctcaggaagagcttatgggaacag

SEQ ID NO: 678255 - DNA, 25 bp, Homo sapien
tctggcacagagcatagctgttaca

SEQ ID NO: 678256 - DNA, 25 bp, Homo sapien
gacacattcccatctttcaagcagt

SEQ ID NO: 678257 - DNA, 25 bp, Homo sapien
tcccatctttcaagcagtagacttt

SEQ ID NO: 678258 - DNA, 25 bp, Homo sapien
gacacgttccctgaattgacacatt

SEQ ID NO: 678259 - DNA, 25 bp, Homo sapien
ggtgatgtaatgacacgttccctga

SEQ ID NO: 678260 - DNA, 25 bp, Homo sapien
aggttggcccttttgctgaggatga

SEQ ID NO: 678261 - DNA, 25 bp, Homo sapien
caggttggcccttttgctgaggatg

SEQ ID NO: 678262 - DNA, 25 bp, Homo sapien
atgaggcacttctgtggcagtgttg

SEQ ID NO: 678263 - DNA, 25 bp, Homo sapien
ctgaggatgaggcacttctgtggca

SEQ ID NO: 678264 - DNA, 25 bp, Homo sapien
ttgtgactaactccacaaggttaga

SEQ ID NO: 678265 - DNA, 25 bp, Homo sapien
ctgtgccaagcctattaaagttatt

SEQ ID NO: 678266 - DNA, 25 bp, Homo sapien
gtttatgtggcaagtaattagcagt

SEQ ID NO: 678267 - DNA, 25 bp, Homo sapien
gggaagagtttttatgatggaactg

SEQ ID NO: 678268 - DNA, 25 bp, Homo sapien
cttcaactaaggcagtcttctcacc

SEQ ID NO: 678269 - DNA, 25 bp, Homo sapien
tcaactaaggcagtcttctcacctt

SEQ ID NO: 678270 - DNA, 25 bp, Homo sapien
aaactcttcaactaaggcagtcttc

SEQ ID NO: 678271 - DNA, 25 bp, Homo sapien
ctcttcaactaaggcagtcttctca

SEQ ID NO: 678272 - DNA, 25 bp, Homo sapien
attataggtgtgcgctatcatggcc

SEQ ID NO: 678273 - DNA, 25 bp, Homo sapien
tataggtgtgcgctatcatggccgg

SEQ ID NO: 678274 - DNA, 25 bp, Homo sapien
gtgcgctatcatggccggctttttg

SEQ ID NO: 678275 - DNA, 25 bp, Homo sapien
ggtgtgcgctatcatggccggcttt

SEQ ID NO: 678276 - DNA, 25 bp, Homo sapien
tgtaatatactgttgttggatgtcc

SEQ ID NO: 678277 - DNA, 25 bp, Homo sapien
gcaaagaactattgagtacctgtca

SEQ ID NO: 678278 - DNA, 25 bp, Homo sapien
ttcaattattgtagcatgggcatcc

SEQ ID NO: 678279 - DNA, 25 bp, Homo sapien
tacctgtcatgtgcaagttactggg

SEQ ID NO: 678280 - DNA, 25 bp, Homo sapien
tcaccttgaacttattgtgttcttt

SEQ ID NO: 678281 - DNA, 25 bp, Homo sapien
caccttgaacttattgtgttctttg

SEQ ID NO: 678282 - DNA, 25 bp, Homo sapien
tcctggtatatagtagtactccttt

SEQ ID NO: 678283 - DNA, 25 bp, Homo sapien
agtagtactcctttccaggttcctg

SEQ ID NO: 678284 - DNA, 25 bp, Homo sapien
aggatcctggtatatagtagtactc

SEQ ID NO: 678285 - DNA, 25 bp, Homo sapien
gatcctggtatatagtagtactcct

SEQ ID NO: 678286 - DNA, 25 bp, Homo sapien
ccttgaactaatctttttagatgac

SEQ ID NO: 678287 - DNA, 25 bp, Homo sapien
gaaagtatgtctgtggttactcaac

SEQ ID NO: 678288 - DNA, 25 bp, Homo sapien
tagcggatgctacttaattaacaac

SEQ ID NO: 678289 - DNA, 25 bp, Homo sapien
tcctgaagtcagtaataccttgaac

SEQ ID NO: 678290 - DNA, 25 bp, Homo sapien
tgatgaatttcttgactatcttcct

SEQ ID NO: 678291 - DNA, 25 bp, Homo sapien
tcttttgatattgatgaatttcttg

SEQ ID NO: 678292 - DNA, 25 bp, Homo sapien
tgactatcttccttagttcagttat

SEQ ID NO: 678293 - DNA, 25 bp, Homo sapien
atgccactacccccggccaatcttt

SEQ ID NO: 678294 - DNA, 25 bp, Homo sapien
gttgccttcatacatttacaccatg

SEQ ID NO: 678295 - DNA, 25 bp, Homo sapien
cctgccacctatacctctgtttttg

SEQ ID NO: 678296 - DNA, 25 bp, Homo sapien
tctacaactgcctgtggcagtttga

SEQ ID NO: 678297 - DNA, 25 bp, Homo sapien
tgttggtgatatgcattacttaggt

SEQ ID NO: 678298 - DNA, 25 bp, Homo sapien
cctttcactatgaagccccatgagt

SEQ ID NO: 678299 - DNA, 25 bp, Homo sapien
ttattggactggtggtttatttctg

SEQ ID NO: 678300 - DNA, 25 bp, Homo sapien
cagattattggactggtggtttatt

SEQ ID NO: 678301 - DNA, 25 bp, Homo sapien
gtgccttttaaatctccagtagctt

SEQ ID NO: 678302 - DNA, 25 bp, Homo sapien
tatggcttggatcattctgtctgca

SEQ ID NO: 678303 - DNA, 25 bp, Homo sapien
tgctgagcataagagattgcccaag

SEQ ID NO: 678304 - DNA, 25 bp, Homo sapien
tgttaccaattaaacacagctggtg

SEQ ID NO: 678305 - DNA, 25 bp, Homo sapien
tattggcaatcttgacatcagcagg

SEQ ID NO: 678306 - DNA, 25 bp, Homo sapien
gtgttagccactgtagctggctggt

SEQ ID NO: 678307 - DNA, 25 bp, Homo sapien
cactgtagctggctggttttttaaa

SEQ ID NO: 678308 - DNA, 25 bp, Homo sapien
ctagagatgtgtgtcactatgcctg

SEQ ID NO: 678309 - DNA, 25 bp, Homo sapien
gattaaaagctttcatgcatgctta

SEQ ID NO: 678310 - DNA, 25 bp, Homo sapien
ccagtggagagttcaatgtgtcagt

SEQ ID NO: 678311 - DNA, 25 bp, Homo sapien
tattgcgaccaaaatccagtggaga

SEQ ID NO: 678312 - DNA, 25 bp, Homo sapien
ggccccaaattggataactctccca

SEQ ID NO: 678313 - DNA, 25 bp, Homo sapien
caagtaaagtaagcaatcaggattc

SEQ ID NO: 678314 - DNA, 25 bp, Homo sapien
aaggagtagttttatgagaatattc

SEQ ID NO: 678315 - DNA, 25 bp, Homo sapien
ttaccactggtgcaatctatccctg

SEQ ID NO: 678316 - DNA, 25 bp, Homo sapien
tgtacaaatggctccttgttaagga

SEQ ID NO: 678317 - DNA, 25 bp, Homo sapien
ctttgtagtcttaaaggtagataag

SEQ ID NO: 678318 - DNA, 25 bp, Homo sapien
tctaatctctgaatgcttggtcaag

SEQ ID NO: 678319 - DNA, 25 bp, Homo sapien
tgccccttcttgtatgttccagtat

SEQ ID NO: 678320 - DNA, 25 bp, Homo sapien
acactgcaaagttgtccccttgccc

SEQ ID NO: 678321 - DNA, 25 bp, Homo sapien
tgcttggtcaagtcagtgagaggaa

SEQ ID NO: 678322 - DNA, 25 bp, Homo sapien
gcagatacctcttcatttcagcctt

SEQ ID NO: 678323 - DNA, 25 bp, Homo sapien
ggttccaggaacatggtgggaataa

SEQ ID NO: 678324 - DNA, 25 bp, Homo sapien
ttattattacagtgatgcagatacc

SEQ ID NO: 678325 - DNA, 25 bp, Homo sapien
tacctcttcatttcagcctttgaga

SEQ ID NO: 678326 - DNA, 25 bp, Homo sapien
agttgagtgatacggagtccctttt

SEQ ID NO: 678327 - DNA, 25 bp, Homo sapien
gccctttaaagaaggatggagtgat

SEQ ID NO: 678328 - DNA, 25 bp, Homo sapien
atgtgagttgagtgatacggagtcc

SEQ ID NO: 678329 - DNA, 25 bp, Homo sapien
cctgccctttaaagaaggatggagt

SEQ ID NO: 678330 - DNA, 25 bp, Homo sapien
tctagtcgtcatcttggtgagaatc

SEQ ID NO: 678331 - DNA, 25 bp, Homo sapien
agaatctagaatacctgggggggca

SEQ ID NO: 678332 - DNA, 25 bp, Homo sapien
tgtagtaagcctgttactctagtcg

SEQ ID NO: 678333 - DNA, 25 bp, Homo sapien
tcttatagcactctgtatcttacac

SEQ ID NO: 678334 - DNA, 25 bp, Homo sapien
ctaaggagaaggcatttgggcattt

SEQ ID NO: 678335 - DNA, 25 bp, Homo sapien
gagaaggcatttgggcatttttatt

SEQ ID NO: 678336 - DNA, 25 bp, Homo sapien
ttctaaggagaaggcatttgggcat

SEQ ID NO: 678337 - DNA, 25 bp, Homo sapien
aggagaaggcatttgggcattttta

SEQ ID NO: 678338 - DNA, 25 bp, Homo sapien
tgagagtccttcaagcacgcacata

SEQ ID NO: 678339 - DNA, 25 bp, Homo sapien
gatgtcgtcaagaatgggtccctcc

SEQ ID NO: 678340 - DNA, 25 bp, Homo sapien
gatccagcctttggtcgagtgtcta

SEQ ID NO: 678341 - DNA, 25 bp, Homo sapien
gtgtctagtcctcccaatgcaatga

SEQ ID NO: 678342 - DNA, 25 bp, Homo sapien
ctgaaaacccaaggccaggtactgc

SEQ ID NO: 678343 - DNA, 25 bp, Homo sapien
caccctttgcctatatggtagagca

SEQ ID NO: 678344 - DNA, 25 bp, Homo sapien
catcccttgacttttgtggcctggg

SEQ ID NO: 678345 - DNA, 25 bp, Homo sapien
gagatctcgagtagaatccttggtg

SEQ ID NO: 678346 - DNA, 25 bp, Homo sapien
ggagatacatgtttcttcctttaaa

SEQ ID NO: 678347 - DNA, 25 bp, Homo sapien
taacagtgctacttagttatcagta

SEQ ID NO: 678348 - DNA, 25 bp, Homo sapien
tctggattgaaaggtgtaaatatca

SEQ ID NO: 678349 - DNA, 25 bp, Homo sapien
gaagataattggcttgatgtcctag

SEQ ID NO: 678350 - DNA, 25 bp, Homo sapien
gaaagtaaacagaatggattgccag

SEQ ID NO: 678351 - DNA, 25 bp, Homo sapien
cctaggagcaaaacctcaaggattg

SEQ ID NO: 678352 - DNA, 25 bp, Homo sapien
caaggcacactgttaataaacgagc

SEQ ID NO: 678353 - DNA, 25 bp, Homo sapien
gccagttacatgtatgcctgcccag

SEQ ID NO: 678354 - DNA, 25 bp, Homo sapien
gggattatctccgtcatctgttaaa

SEQ ID NO: 678355 - DNA, 25 bp, Homo sapien
agactacctgatacacaaagaaggg

SEQ ID NO: 678356 - DNA, 25 bp, Homo sapien
aaaaacgccactagggagttgctag

SEQ ID NO: 678357 - DNA, 25 bp, Homo sapien
caaagaagggttggccaaggcgaat

SEQ ID NO: 678358 - DNA, 25 bp, Homo sapien
gatgttgactggtagtatcttgaat

SEQ ID NO: 678359 - DNA, 25 bp, Homo sapien
ccaaaaagatgttgactggtagtat

SEQ ID NO: 678360 - DNA, 25 bp, Homo sapien
tagtcaatctacaaccatctactcc

SEQ ID NO: 678361 - DNA, 25 bp, Homo sapien
ctgtagtcccttgaagtatggtaga

SEQ ID NO: 678362 - DNA, 25 bp, Homo sapien
catcagttctgggacataacaaaga

SEQ ID NO: 678363 - DNA, 25 bp, Homo sapien
ttcataccaactgctggtcattggc

SEQ ID NO: 678364 - DNA, 25 bp, Homo sapien
cagaaatgtccacaactgcgaggga

SEQ ID NO: 678365 - DNA, 25 bp, Homo sapien
tactaggagaaatggtatctggaca

SEQ ID NO: 678366 - DNA, 25 bp, Homo sapien
ggccacagagcgtttattgacacca

SEQ ID NO: 678367 - DNA, 25 bp, Homo sapien
taagaggatttagaacaggactgct

SEQ ID NO: 678368 - DNA, 25 bp, Homo sapien
tccaatgactttcgcccttgggaga

SEQ ID NO: 678369 - DNA, 25 bp, Homo sapien
tgcagctggtgaggtataatccaaa

SEQ ID NO: 678370 - DNA, 25 bp, Homo sapien
aaccttcccagccttcccacagttg

SEQ ID NO: 678371 - DNA, 25 bp, Homo sapien
cttcccagccttcccacagttgtcc

SEQ ID NO: 678372 - DNA, 25 bp, Homo sapien
ttcccagccttcccacagttgtccc

SEQ ID NO: 678373 - DNA, 25 bp, Homo sapien
accttcccagccttcccacagttgt

SEQ ID NO: 678374 - DNA, 25 bp, Homo sapien
tggccactttcgacgctgaaactgc

SEQ ID NO: 678375 - DNA, 25 bp, Homo sapien
tttctggccactttcgacgctgaaa

SEQ ID NO: 678376 - DNA, 25 bp, Homo sapien
tctggccactttcgacgctgaaact

SEQ ID NO: 678377 - DNA, 25 bp, Homo sapien
ttctggccactttcgacgctgaaac

SEQ ID NO: 678378 - DNA, 25 bp, Homo sapien
caaagaaggtctcctaggtgacacc

SEQ ID NO: 678379 - DNA, 25 bp, Homo sapien
cacctatctttggtgggtgatcctg

SEQ ID NO: 678380 - DNA, 25 bp, Homo sapien
cagtttctcaagataacaggtgcag

SEQ ID NO: 678381 - DNA, 25 bp, Homo sapien
ggtgcagactcacagagatgagact

SEQ ID NO: 678382 - DNA, 25 bp, Homo sapien
ctgtattgctcatagcttcctccat

SEQ ID NO: 678383 - DNA, 25 bp, Homo sapien
gaaatccatcatctttactgctccc

SEQ ID NO: 678384 - DNA, 25 bp, Homo sapien
tatctggttggcattctaaacttaa

SEQ ID NO: 678385 - DNA, 25 bp, Homo sapien
tttacctgggactcctaatcccgca

SEQ ID NO: 678386 - DNA, 25 bp, Homo sapien
aactcaggatttacctgggactcct

SEQ ID NO: 678387 - DNA, 25 bp, Homo sapien
catctttagtcaacatggtttcagg

SEQ ID NO: 678388 - DNA, 25 bp, Homo sapien
cggaattccgtgtgtttcctgggca

SEQ ID NO: 678389 - DNA, 25 bp, Homo sapien
cagttggtgcaggtgttcctctctc

SEQ ID NO: 678390 - DNA, 25 bp, Homo sapien
gacaatgaaatgagacggaattccg

SEQ ID NO: 678391 - DNA, 25 bp, Homo sapien
gtacgtgtagctggttgaggacatc

SEQ ID NO: 678392 - DNA, 25 bp, Homo sapien
ccaggtccatgtttcgagtccgggg

SEQ ID NO: 678393 - DNA, 25 bp, Homo sapien
ctccatgagctgtacgtgtagctgg

SEQ ID NO: 678394 - DNA, 25 bp, Homo sapien
catgagctgtacgtgtagctggttg

SEQ ID NO: 678395 - DNA, 25 bp, Homo sapien
cccatccctctagctcgggttgcct

SEQ ID NO: 678396 - DNA, 25 bp, Homo sapien
atccctctagctcgggttgcctgta

SEQ ID NO: 678397 - DNA, 25 bp, Homo sapien
catccctctagctcgggttgcctgt

SEQ ID NO: 678398 - DNA, 25 bp, Homo sapien
tccctctagctcgggttgcctgtac

SEQ ID NO: 678399 - DNA, 25 bp, Homo sapien
gagtctcattgatggtcctcatgca

SEQ ID NO: 678400 - DNA, 25 bp, Homo sapien
tctaggaagccagttgcaaattcac

SEQ ID NO: 678401 - DNA, 25 bp, Homo sapien
tctgtgttgagatcaaagtactcta

SEQ ID NO: 678402 - DNA, 25 bp, Homo sapien
cagtacgtgttattgttggcgctgg

SEQ ID NO: 678403 - DNA, 25 bp, Homo sapien
ggaagagagagcatgtcctgagtgc

SEQ ID NO: 678404 - DNA, 25 bp, Homo sapien
agagagagcatgtcctgagtgcctg

SEQ ID NO: 678405 - DNA, 25 bp, Homo sapien
ccaaggaagagagagcatgtcctga

SEQ ID NO: 678406 - DNA, 25 bp, Homo sapien
agagagcatgtcctgagtgcctgcg

SEQ ID NO: 678407 - DNA, 25 bp, Homo sapien
gccgtctgccagtgctggttgtcgt

SEQ ID NO: 678408 - DNA, 25 bp, Homo sapien
tcgtgggtgaagcacgtgaggcctg

SEQ ID NO: 678409 - DNA, 25 bp, Homo sapien
tggttgtcgtgggtgaagcacgtga

SEQ ID NO: 678410 - DNA, 25 bp, Homo sapien
gtgtccagaaaggcgccgtctgcca

SEQ ID NO: 678411 - DNA, 25 bp, Homo sapien
gtgtcgttgttctgcaggcgcttga

SEQ ID NO: 678412 - DNA, 25 bp, Homo sapien
gctgcacgtgtcgttgttctgcagg

SEQ ID NO: 678413 - DNA, 25 bp, Homo sapien
cgttgttctgcaggcgcttgagcag

SEQ ID NO: 678414 - DNA, 25 bp, Homo sapien
tcgttgttctgcaggcgcttgagca

SEQ ID NO: 678415 - DNA, 25 bp, Homo sapien
tgcgcttctgctcccgcaacagcca

SEQ ID NO: 678416 - DNA, 25 bp, Homo sapien
tcttgcgcttctgctcccgcaacag

SEQ ID NO: 678417 - DNA, 25 bp, Homo sapien
cttctgctcccgcaacagccacacc

SEQ ID NO: 678418 - DNA, 25 bp, Homo sapien
ttcttgcgcttctgctcccgcaaca

SEQ ID NO: 678419 - DNA, 25 bp, Homo sapien
tccccaggacctcaagctgctctta

SEQ ID NO: 678420 - DNA, 25 bp, Homo sapien
ttccccaggacctcaagctgctctt

SEQ ID NO: 678421 - DNA, 25 bp, Homo sapien
ccccaggacctcaagctgctcttac

SEQ ID NO: 678422 - DNA, 25 bp, Homo sapien
cttccccaggacctcaagctgctct

SEQ ID NO: 678423 - DNA, 25 bp, Homo sapien
tgaaaggatgcagactggagcctct

SEQ ID NO: 678424 - DNA, 25 bp, Homo sapien
ctctgtgcttgaggcggcctttgtg

SEQ ID NO: 678425 - DNA, 25 bp, Homo sapien
cctctgtgcttgaggcggcctttgt

SEQ ID NO: 678426 - DNA, 25 bp, Homo sapien
ctgaaaggatgcagactggagcctc

SEQ ID NO: 678427 - DNA, 25 bp, Homo sapien
gcttcaggagtggctcagagggctc

SEQ ID NO: 678428 - DNA, 25 bp, Homo sapien
cagccccaggcttcaggagtggctc

SEQ ID NO: 678429 - DNA, 25 bp, Homo sapien
cttcaggagtggctcagagggctcc

SEQ ID NO: 678430 - DNA, 25 bp, Homo sapien
ccccaggcttcaggagtggctcaga

SEQ ID NO: 678431 - DNA, 25 bp, Homo sapien
tagcagtactggaatctgggcgcca

SEQ ID NO: 678432 - DNA, 25 bp, Homo sapien
tctagagttcagtcctttgggccag

SEQ ID NO: 678433 - DNA, 25 bp, Homo sapien
aaattttaagtatgcaccagccacg

SEQ ID NO: 678434 - DNA, 25 bp, Homo sapien
ctaagccgggaacatggacctcaaa

SEQ ID NO: 678435 - DNA, 25 bp, Homo sapien
cttagggaggtccctttgctactgc

SEQ ID NO: 678436 - DNA, 25 bp, Homo sapien
ggaggtccctttgctactgcctcac

SEQ ID NO: 678437 - DNA, 25 bp, Homo sapien
gggaggtccctttgctactgcctca

SEQ ID NO: 678438 - DNA, 25 bp, Homo sapien
tagggaggtccctttgctactgcct

SEQ ID NO: 678439 - DNA, 25 bp, Homo sapien
tgacagtcacattcttctggccgct

SEQ ID NO: 678440 - DNA, 25 bp, Homo sapien
ttgtgacagtcacattcttctggcc

SEQ ID NO: 678441 - DNA, 25 bp, Homo sapien
gtcacattcttctggccgctttttc

SEQ ID NO: 678442 - DNA, 25 bp, Homo sapien
gacagtcacattcttctggccgctt

SEQ ID NO: 678443 - DNA, 25 bp, Homo sapien
ccctcaggttcttaattttgttctg

SEQ ID NO: 678444 - DNA, 25 bp, Homo sapien
tcaggttcttaattttgttctgcag

SEQ ID NO: 678445 - DNA, 25 bp, Homo sapien
aggttcttaattttgttctgcaggg

SEQ ID NO: 678446 - DNA, 25 bp, Homo sapien
ctcggacttccctcaggttcttaat

SEQ ID NO: 678447 - DNA, 25 bp, Homo sapien
caaagacttggcctggtgactgccc

SEQ ID NO: 678448 - DNA, 25 bp, Homo sapien
ccagggcaagcaccggcatgtctgg

SEQ ID NO: 678449 - DNA, 25 bp, Homo sapien
gccccagggcaagcaccggcatgtc

SEQ ID NO: 678450 - DNA, 25 bp, Homo sapien
aggaggtacttgttctgcctgaagg

SEQ ID NO: 678451 - DNA, 25 bp, Homo sapien
ggaggaggtacttgttctgcctgaa

SEQ ID NO: 678452 - DNA, 25 bp, Homo sapien
gggacaacgtggctaagccatcgtc

SEQ ID NO: 678453 - DNA, 25 bp, Homo sapien
cctcctgtagcgtagacttcttgta

SEQ ID NO: 678454 - DNA, 25 bp, Homo sapien
cgagtcatttttccggcctggcctg

SEQ ID NO: 678455 - DNA, 25 bp, Homo sapien
aggaacccgctgagcccactgaggc

SEQ ID NO: 678456 - DNA, 25 bp, Homo sapien
gcctcttccctgggtctggcctcac

SEQ ID NO: 678457 - DNA, 25 bp, Homo sapien
ccagcctcttccctgggtctggcct

SEQ ID NO: 678458 - DNA, 25 bp, Homo sapien
ctccagcctcttccctgggtctggc

SEQ ID NO: 678459 - DNA, 25 bp, Homo sapien
ctctccagcctcttccctgggtctg

SEQ ID NO: 678460 - DNA, 25 bp, Homo sapien
gtggccgagagcatgctcctctccc

SEQ ID NO: 678461 - DNA, 25 bp, Homo sapien
tggccgagagcatgctcctctcccg

SEQ ID NO: 678462 - DNA, 25 bp, Homo sapien
ctcccactgtgaaccgggggtcctg

SEQ ID NO: 678463 - DNA, 25 bp, Homo sapien
gtcctgccaggcccgtggtggccga

SEQ ID NO: 678464 - DNA, 25 bp, Homo sapien
acactggactgtgtcgttctctagg

SEQ ID NO: 678465 - DNA, 25 bp, Homo sapien
cactggactgtgtcgttctctagga

SEQ ID NO: 678466 - DNA, 25 bp, Homo sapien
cttgtacaggtccaggtcacactgg

SEQ ID NO: 678467 - DNA, 25 bp, Homo sapien
cctgcagggacttgtacaggtccag

SEQ ID NO: 678468 - DNA, 25 bp, Homo sapien
cactttaatggggttggcggctgaa

SEQ ID NO: 678469 - DNA, 25 bp, Homo sapien
aatagtcgggaaggcctccagtgcc

SEQ ID NO: 678470 - DNA, 25 bp, Homo sapien
cggctgaatagtcgggaaggcctcc

SEQ ID NO: 678471 - DNA, 25 bp, Homo sapien
ccatccttgtcatcttggtcctcag

SEQ ID NO: 678472 - DNA, 25 bp, Homo sapien
gccagtgccgcttggtgaggtttcg

SEQ ID NO: 678473 - DNA, 25 bp, Homo sapien
aggcctacgtggtacaccctgccgt

SEQ ID NO: 678474 - DNA, 25 bp, Homo sapien
ggccactgagcggatggagcgactg

SEQ ID NO: 678475 - DNA, 25 bp, Homo sapien
cgactgcggacatagctggccttgt

SEQ ID NO: 678476 - DNA, 25 bp, Homo sapien
cccgtagtacttgggcacgaggttg

SEQ ID NO: 678477 - DNA, 25 bp, Homo sapien
ggccaggctgagcttgtagtccccg

SEQ ID NO: 678478 - DNA, 25 bp, Homo sapien
cccttgcacttatgcagcttcagct

SEQ ID NO: 678479 - DNA, 25 bp, Homo sapien
gtagtccccgctgtcacaggtgcag

SEQ ID NO: 678480 - DNA, 25 bp, Homo sapien
tctcttgcaatcaattcacttttta

SEQ ID NO: 678481 - DNA, 25 bp, Homo sapien
gttcctggccataatttccttaata

SEQ ID NO: 678482 - DNA, 25 bp, Homo sapien
agaggatactgtcaaagtgaatatg

SEQ ID NO: 678483 - DNA, 25 bp, Homo sapien
catgtcttattactcctataaaagg

SEQ ID NO: 678484 - DNA, 25 bp, Homo sapien
tggtactcagcacgctgacacaggt

SEQ ID NO: 678485 - DNA, 25 bp, Homo sapien
tgacacaggtccttcacacgctggt

SEQ ID NO: 678486 - DNA, 25 bp, Homo sapien
tgctcacacgccgtctggtactcag

SEQ ID NO: 678487 - DNA, 25 bp, Homo sapien
gcagaaagttctcctcctgggcgtc

SEQ ID NO: 678488 - DNA, 25 bp, Homo sapien
aggagtcccgccagaccctcatctt

SEQ ID NO: 678489 - DNA, 25 bp, Homo sapien
agaaggagtcccgccagaccctcat

SEQ ID NO: 678490 - DNA, 25 bp, Homo sapien
aagaaggagtcccgccagaccctca

SEQ ID NO: 678491 - DNA, 25 bp, Homo sapien
ccaagaaggagtcccgccagaccct

SEQ ID NO: 678492 - DNA, 25 bp, Homo sapien
cagcttgaggatggatttcccgtcc

SEQ ID NO: 678493 - DNA, 25 bp, Homo sapien
caggtatgtccaggcctgcaatgtc

SEQ ID NO: 678494 - DNA, 25 bp, Homo sapien
gccaggtcaatgttgaggacgatgt

SEQ ID NO: 678495 - DNA, 25 bp, Homo sapien
gatttcccgtccatatccgcaggta

SEQ ID NO: 678496 - DNA, 25 bp, Homo sapien
ggacttatacccttagaacacagag

SEQ ID NO: 678497 - DNA, 25 bp, Homo sapien
tattgcccagttagactctaagctg

SEQ ID NO: 678498 - DNA, 25 bp, Homo sapien
ttgtctattgcccagttagactcta

SEQ ID NO: 678499 - DNA, 25 bp, Homo sapien
tactcagtaaatattggctaagtga

SEQ ID NO: 678500 - DNA, 25 bp, Homo sapien
caaactggccgatgtggtaaccgtg

SEQ ID NO: 678501 - DNA, 25 bp, Homo sapien
gaacgggaccctgatgtcaaactca

SEQ ID NO: 678502 - DNA, 25 bp, Homo sapien
tcggcggtgtatacgatgtacgtgt

SEQ ID NO: 678503 - DNA, 25 bp, Homo sapien
atgtacgtgttgtccagctcgcccg

SEQ ID NO: 678504 - DNA, 25 bp, Homo sapien
caacacgggcgaggaggcaagggac

SEQ ID NO: 678505 - DNA, 25 bp, Homo sapien
tgcaacacgggcgaggaggcaaggg

SEQ ID NO: 678506 - DNA, 25 bp, Homo sapien
ctgcaacacgggcgaggaggcaagg

SEQ ID NO: 678507 - DNA, 25 bp, Homo sapien
gcaacacgggcgaggaggcaaggga

SEQ ID NO: 678508 - DNA, 25 bp, Homo sapien
caagaggcatgcagcgggcgcctac

SEQ ID NO: 678509 - DNA, 25 bp, Homo sapien
aagcgcttccgctggagcatgttgg

SEQ ID NO: 678510 - DNA, 25 bp, Homo sapien
cccgtgtagcgcatgatccagtgtt

SEQ ID NO: 678511 - DNA, 25 bp, Homo sapien
gtctccatggagtcgtccaccgaca

SEQ ID NO: 678512 - DNA, 25 bp, Homo sapien
cgacatgagggtctgcaagcgcttc

SEQ ID NO: 678513 - DNA, 25 bp, Homo sapien
cgtgcggaagaagctcacgctgtca

SEQ ID NO: 678514 - DNA, 25 bp, Homo sapien
cacgctgtcattggtgatgaggtct

SEQ ID NO: 678515 - DNA, 25 bp, Homo sapien
tgtgcgggtacatcttcttggacgt

SEQ ID NO: 678516 - DNA, 25 bp, Homo sapien
gctgcatggctgatgaccatgagga

SEQ ID NO: 678517 - DNA, 25 bp, Homo sapien
tcacttactaggctatgtggcccgg

SEQ ID NO: 678518 - DNA, 25 bp, Homo sapien
gggccatacaaaaaccaccagtctg

SEQ ID NO: 678519 - DNA, 25 bp, Homo sapien
tgtggcccggttacattacttagcc

SEQ ID NO: 678520 - DNA, 25 bp, Homo sapien
catctgacagttgggaatagacaca

SEQ ID NO: 678521 - DNA, 25 bp, Homo sapien
cacttttgccagctacctggaagcc

SEQ ID NO: 678522 - DNA, 25 bp, Homo sapien
ggtggactcaactctaggtcattct

SEQ ID NO: 678523 - DNA, 25 bp, Homo sapien
ctggaagcctcttttcgggtggact

SEQ ID NO: 678524 - DNA, 25 bp, Homo sapien
cagagaagtgtacacgctgcggcaa

SEQ ID NO: 678525 - DNA, 25 bp, Homo sapien
cagcgtgtagttataaaagcgggag

SEQ ID NO: 678526 - DNA, 25 bp, Homo sapien
tcattaagatacttcccgaagaaag

SEQ ID NO: 678527 - DNA, 25 bp, Homo sapien
ccttccagccgggtggcacgtagga

SEQ ID NO: 678528 - DNA, 25 bp, Homo sapien
taggagccgttgtattcattaagat

SEQ ID NO: 678529 - DNA, 25 bp, Homo sapien
gaaacttgaacgaaagacctagtgc

SEQ ID NO: 678530 - DNA, 25 bp, Homo sapien
catatttacagaacggaaggctaca

SEQ ID NO: 678531 - DNA, 25 bp, Homo sapien
gacagcacatttgtaatagtaaata

SEQ ID NO: 678532 - DNA, 25 bp, Homo sapien
gacctagtgctacattcaagaacag

SEQ ID NO: 678533 - DNA, 25 bp, Homo sapien
cacgtgagtgcttggccgagaagcc

SEQ ID NO: 678534 - DNA, 25 bp, Homo sapien
gatcttgctaacagacagctcagcg

SEQ ID NO: 678535 - DNA, 25 bp, Homo sapien
tctgacgagtattgctgagagcaca

SEQ ID NO: 678536 - DNA, 25 bp, Homo sapien
cagaatatgagcgttccaggaggtt

SEQ ID NO: 678537 - DNA, 25 bp, Homo sapien
tcaccagattcatcagagtgcagtg

SEQ ID NO: 678538 - DNA, 25 bp, Homo sapien
caaatggagggcctggttaggtcca

SEQ ID NO: 678539 - DNA, 25 bp, Homo sapien
cactctggagtttagtcaggaagcc

SEQ ID NO: 678540 - DNA, 25 bp, Homo sapien
tgcatcagtgggaagtctgtcacac

SEQ ID NO: 678541 - DNA, 25 bp, Homo sapien
ctcctggaacattgcatgccagatt

SEQ ID NO: 678542 - DNA, 25 bp, Homo sapien
acattgcatgccagattttgccttt

SEQ ID NO: 678543 - DNA, 25 bp, Homo sapien
cctggaacattgcatgccagatttt

SEQ ID NO: 678544 - DNA, 25 bp, Homo sapien
ggaacattgcatgccagattttgcc

SEQ ID NO: 678545 - DNA, 25 bp, Homo sapien
agcaggtcggccacttcccctgcag

SEQ ID NO: 678546 - DNA, 25 bp, Homo sapien
gcagctctacggtggaggctccacg

SEQ ID NO: 678547 - DNA, 25 bp, Homo sapien
tgcaggcagctctacggtggaggct

SEQ ID NO: 678548 - DNA, 25 bp, Homo sapien
ctctacggtggaggctccacgcggc

SEQ ID NO: 678549 - DNA, 25 bp, Homo sapien
ggagacagagggctcctgcaaccag

SEQ ID NO: 678550 - DNA, 25 bp, Homo sapien
ggcatcactggggatactaagcaag

SEQ ID NO: 678551 - DNA, 25 bp, Homo sapien
gatactaagcaagccacggacaatg

SEQ ID NO: 678552 - DNA, 25 bp, Homo sapien
agacagagggctcctgcaaccagaa

SEQ ID NO: 678553 - DNA, 25 bp, Homo sapien
agggcccttctgagtccaagagcca

SEQ ID NO: 678554 - DNA, 25 bp, Homo sapien
acagccaacttccaactggacttct

SEQ ID NO: 678555 - DNA, 25 bp, Homo sapien
gccatcaggccgtctcccttcaggg

SEQ ID NO: 678556 - DNA, 25 bp, Homo sapien
ggcccttctgagtccaagagccatc

SEQ ID NO: 678557 - DNA, 25 bp, Homo sapien
tctgctgctcggagaacaggaacct

SEQ ID NO: 678558 - DNA, 25 bp, Homo sapien
tggattcccaaaggactcgctgtgt

SEQ ID NO: 678559 - DNA, 25 bp, Homo sapien
agaccctgacccgagacccaggaag

SEQ ID NO: 678560 - DNA, 25 bp, Homo sapien
caaatcccctgcgacacggatggat

SEQ ID NO: 678561 - DNA, 25 bp, Homo sapien
tcacagctagcacctaggagaggac

SEQ ID NO: 678562 - DNA, 25 bp, Homo sapien
tccctgtggctagtggcaacggtac

SEQ ID NO: 678563 - DNA, 25 bp, Homo sapien
tacctgaaccatggctagtgcacct

SEQ ID NO: 678564 - DNA, 25 bp, Homo sapien
tatccagtacagaacccatgtgcgc

SEQ ID NO: 678565 - DNA, 25 bp, Homo sapien
ccactgcaggtggagattccttgag

SEQ ID NO: 678566 - DNA, 25 bp, Homo sapien
tgtttcaacgcccactgcaggtgga

SEQ ID NO: 678567 - DNA, 25 bp, Homo sapien
cttgagagaaaccatggttgggaag

SEQ ID NO: 678568 - DNA, 25 bp, Homo sapien
gctacgcatggagctgatcttcagg

SEQ ID NO: 678569 - DNA, 25 bp, Homo sapien
gaagaaatttcgcttgaagatgtgc

SEQ ID NO: 678570 - DNA, 25 bp, Homo sapien
gaaggctgggtgttcgctgcagaga

SEQ ID NO: 678571 - DNA, 25 bp, Homo sapien
aaatccgtgcctctcgaggacacgc

SEQ ID NO: 678572 - DNA, 25 bp, Homo sapien
tgtgcaattcccgtggatactcgga

SEQ ID NO: 678573 - DNA, 25 bp, Homo sapien
actgtgtatctgagaggaagctgcc

SEQ ID NO: 678574 - DNA, 25 bp, Homo sapien
aagctgcccagcctcgagggctgca

SEQ ID NO: 678575 - DNA, 25 bp, Homo sapien
ttactggcttgctccccacaccaaa

SEQ ID NO: 678576 - DNA, 25 bp, Homo sapien
cccacaccaaagcatccctgccagc

SEQ ID NO: 678577 - DNA, 25 bp, Homo sapien
aaaggtgcggctctcgtgctgtgcc

SEQ ID NO: 678578 - DNA, 25 bp, Homo sapien
tattgaggtacacggcaaaggtgcg

SEQ ID NO: 678579 - DNA, 25 bp, Homo sapien
gatgcgccgggtcttgttcatcacc

SEQ ID NO: 678580 - DNA, 25 bp, Homo sapien
tcacgaaggcgttgatgaagtgcgc

SEQ ID NO: 678581 - DNA, 25 bp, Homo sapien
gggtcccgagtccacctggacactc

SEQ ID NO: 678582 - DNA, 25 bp, Homo sapien
gacactcctgaggtccaggtctgga

SEQ ID NO: 678583 - DNA, 25 bp, Homo sapien
ctgtcctgcataatcaggaaggacc

SEQ ID NO: 678584 - DNA, 25 bp, Homo sapien
ggccactgctgcacggtgggactgt

SEQ ID NO: 678585 - DNA, 25 bp, Homo sapien
gaaggctgtgatcccaatcacctag

SEQ ID NO: 678586 - DNA, 25 bp, Homo sapien
ggtctaccaggcatgtgaaggctgt

SEQ ID NO: 678587 - DNA, 25 bp, Homo sapien
ccagtttgtgatctgttaggacagc

SEQ ID NO: 678588 - DNA, 25 bp, Homo sapien
cccctgaggtcccagtattgcacat

SEQ ID NO: 678589 - DNA, 25 bp, Homo sapien
gcggaggagcgctgtgtcaatccac

SEQ ID NO: 678590 - DNA, 25 bp, Homo sapien
gctgtgtcaatccacgagtaaagga

SEQ ID NO: 678591 - DNA, 25 bp, Homo sapien
acagtgccccggaatgacagcagca

SEQ ID NO: 678592 - DNA, 25 bp, Homo sapien
cacgagtaaaggacaacagtgcccc

SEQ ID NO: 678593 - DNA, 25 bp, Homo sapien
gaccatgcagttaattttttctccg

SEQ ID NO: 678594 - DNA, 25 bp, Homo sapien
ataagcatcgggttgtcagagagac

SEQ ID NO: 678595 - DNA, 25 bp, Homo sapien
tcagctacgaaaagccaaggctcca

SEQ ID NO: 678596 - DNA, 25 bp, Homo sapien
ggcaggactgagattctattaataa

SEQ ID NO: 678597 - DNA, 25 bp, Homo sapien
accagtgtgggtccgaatgagcctc

SEQ ID NO: 678598 - DNA, 25 bp, Homo sapien
tgcttggcaagctgaacaccagtgt

SEQ ID NO: 678599 - DNA, 25 bp, Homo sapien
tgggtccgaatgagcctctcttctt

SEQ ID NO: 678600 - DNA, 25 bp, Homo sapien
ttcttcctgagataacctgcatcca

SEQ ID NO: 678601 - DNA, 25 bp, Homo sapien
ccagtggaaggctggttcccatggc

SEQ ID NO: 678602 - DNA, 25 bp, Homo sapien
atcagcagaggcagtaatggcagaa

SEQ ID NO: 678603 - DNA, 25 bp, Homo sapien
gccaaacttgattgacaagtgtcac

SEQ ID NO: 678604 - DNA, 25 bp, Homo sapien
cagccatgatggtgcaactctgttc

SEQ ID NO: 678605 - DNA, 25 bp, Homo sapien
gttgctgttcagtgccatgagacat

SEQ ID NO: 678606 - DNA, 25 bp, Homo sapien
gtgccatgagacatttagattttaa

SEQ ID NO: 678607 - DNA, 25 bp, Homo sapien
taatgtcgttttgatatgcaaagct

SEQ ID NO: 678608 - DNA, 25 bp, Homo sapien
gctgggaggagactctaatgttgct

SEQ ID NO: 678609 - DNA, 25 bp, Homo sapien
cagcaaaagtccgttggtctcagag

SEQ ID NO: 678610 - DNA, 25 bp, Homo sapien
cagagggccattgagacacagggat

SEQ ID NO: 678611 - DNA, 25 bp, Homo sapien
gaagtccagcaaaagtccgttggtc

SEQ ID NO: 678612 - DNA, 25 bp, Homo sapien
tattcttttggagcggaagtccagc

SEQ ID NO: 678613 - DNA, 25 bp, Homo sapien
acctgcctttcaggcggtggtgcga

SEQ ID NO: 678614 - DNA, 25 bp, Homo sapien
gggagaacacagttgcggacagcaa

SEQ ID NO: 678615 - DNA, 25 bp, Homo sapien
gtggtgcgacaggaaggccgagctt

SEQ ID NO: 678616 - DNA, 25 bp, Homo sapien
gttcctgcggtccctctgaaacctg

SEQ ID NO: 678617 - DNA, 25 bp, Homo sapien
tcttttccctcgtccctcttcactc

SEQ ID NO: 678618 - DNA, 25 bp, Homo sapien
ccctcgtccctcttcactcgcagat

SEQ ID NO: 678619 - DNA, 25 bp, Homo sapien
atgcgggagtctcaagttgcgtctg

SEQ ID NO: 678620 - DNA, 25 bp, Homo sapien
tgggatgcgggagtctcaagttgcg

SEQ ID NO: 678621 - DNA, 25 bp, Homo sapien
tctacatggctcagaggcgtccatc

SEQ ID NO: 678622 - DNA, 25 bp, Homo sapien
ttgagttctgcagagtgagggaagc

SEQ ID NO: 678623 - DNA, 25 bp, Homo sapien
cagggccgtgccatagcttgggtct

SEQ ID NO: 678624 - DNA, 25 bp, Homo sapien
gaggcgtccatcactgatgccttgc

SEQ ID NO: 678625 - DNA, 25 bp, Homo sapien
tcgatttctgatgaattcccctggc

SEQ ID NO: 678626 - DNA, 25 bp, Homo sapien
cttctcgtggcctcatgccagtttc

SEQ ID NO: 678627 - DNA, 25 bp, Homo sapien
tcaagtcatcagtgggtcgatttct

SEQ ID NO: 678628 - DNA, 25 bp, Homo sapien
gctcagacttctcgtggcctcatgc

SEQ ID NO: 678629 - DNA, 25 bp, Homo sapien
gaagtgaaacccgatctgatccctg

SEQ ID NO: 678630 - DNA, 25 bp, Homo sapien
tgaaacccgatctgatccctggctg

SEQ ID NO: 678631 - DNA, 25 bp, Homo sapien
aacccgatctgatccctggctgtcg

SEQ ID NO: 678632 - DNA, 25 bp, Homo sapien
ctaggaagtgaaacccgatctgatc

SEQ ID NO: 678633 - DNA, 25 bp, Homo sapien
taaagccacgatgtcaggtccaggg

SEQ ID NO: 678634 - DNA, 25 bp, Homo sapien
cttctcacatgacccaagggtgtta

SEQ ID NO: 678635 - DNA, 25 bp, Homo sapien
gggtgttaaagccacgatgtcaggt

SEQ ID NO: 678636 - DNA, 25 bp, Homo sapien
tgtgagcctcggaaagtcctgggtg

SEQ ID NO: 678637 - DNA, 25 bp, Homo sapien
ttgaagaccataaaggaggagttca

SEQ ID NO: 678638 - DNA, 25 bp, Homo sapien
gaccataaaggaggagttcacgcga

SEQ ID NO: 678639 - DNA, 25 bp, Homo sapien
gttcacgcgattccctccttgatga

SEQ ID NO: 678640 - DNA, 25 bp, Homo sapien
taaaggaggagttcacgcgattccc

SEQ ID NO: 678641 - DNA, 25 bp, Homo sapien
agaagtctggatgttgtctggtgac

SEQ ID NO: 678642 - DNA, 25 bp, Homo sapien
tggaggccaccggtctggcacaaga

SEQ ID NO: 678643 - DNA, 25 bp, Homo sapien
cgtggacggctaagatgaagactac

SEQ ID NO: 678644 - DNA, 25 bp, Homo sapien
tccagtcaatgggacctggttggtg

SEQ ID NO: 678645 - DNA, 25 bp, Homo sapien
ggttgaggtggtagtgaactgagac

SEQ ID NO: 678646 - DNA, 25 bp, Homo sapien
ttgaggtggtagtgaactgagactg

SEQ ID NO: 678647 - DNA, 25 bp, Homo sapien
gtggtagtgaactgagactgtgcca

SEQ ID NO: 678648 - DNA, 25 bp, Homo sapien
aggtggtagtgaactgagactgtgc

SEQ ID NO: 678649 - DNA, 25 bp, Homo sapien
ccgggccgctgggcgcaggggactc

SEQ ID NO: 678650 - DNA, 25 bp, Homo sapien
ggccgctgggcgcaggggactccgc

SEQ ID NO: 678651 - DNA, 25 bp, Homo sapien
ggccgggccgctgggcgcaggggac

SEQ ID NO: 678652 - DNA, 25 bp, Homo sapien
ccggccgggccgctgggcgcagggg

SEQ ID NO: 678653 - DNA, 25 bp, Homo sapien
atgcctccggactcggctggccgcg

SEQ ID NO: 678654 - DNA, 25 bp, Homo sapien
ggctctcgacctcccgatgcctccg

SEQ ID NO: 678655 - DNA, 25 bp, Homo sapien
cctcgccgggacacacagacgcaca

SEQ ID NO: 678656 - DNA, 25 bp, Homo sapien
tccagctccggacggggcagtgaac

SEQ ID NO: 678657 - DNA, 25 bp, Homo sapien
gagccagagccttgtgtgcacgtgt

SEQ ID NO: 678658 - DNA, 25 bp, Homo sapien
cacttggctggaaacgacgtgaatc

SEQ ID NO: 678659 - DNA, 25 bp, Homo sapien
tcgtgataaattcaggagggccatc

SEQ ID NO: 678660 - DNA, 25 bp, Homo sapien
atttgccattggagaggccggcgcc

SEQ ID NO: 678661 - DNA, 25 bp, Homo sapien
gaattctcgcaactgccctgtgtgg

SEQ ID NO: 678662 - DNA, 25 bp, Homo sapien
aaatacttacatcgagcttgccgtg

SEQ ID NO: 678663 - DNA, 25 bp, Homo sapien
tgtgctcgtaaaagccacgggtcaa

SEQ ID NO: 678664 - DNA, 25 bp, Homo sapien
gtggcccgagatgaaccctcagatg

SEQ ID NO: 678665 - DNA, 25 bp, Homo sapien
tgcatgaaggtcctcctctcaggat

SEQ ID NO: 678666 - DNA, 25 bp, Homo sapien
tggtgcagatcctagatccagtcct

SEQ ID NO: 678667 - DNA, 25 bp, Homo sapien
tccagtccttgcatgaaggtcctcc

SEQ ID NO: 678668 - DNA, 25 bp, Homo sapien
ttctcgtcttctctggtgcagatcc

SEQ ID NO: 678669 - DNA, 25 bp, Homo sapien
tagaatcttattgtaaccccagtgt

SEQ ID NO: 678670 - DNA, 25 bp, Homo sapien
tgagttacccgtggctgttattttc

SEQ ID NO: 678671 - DNA, 25 bp, Homo sapien
gcaattccggcttgaaaggaccata

SEQ ID NO: 678672 - DNA, 25 bp, Homo sapien
gggggacctgacttgcctgagttac

SEQ ID NO: 678673 - DNA, 25 bp, Homo sapien
gcatctccagccatgagggccgcag

SEQ ID NO: 678674 - DNA, 25 bp, Homo sapien
tgcagtgacagtcagcggtgatgtc

SEQ ID NO: 678675 - DNA, 25 bp, Homo sapien
gccatgagggccgcagacaggccct

SEQ ID NO: 678676 - DNA, 25 bp, Homo sapien
tttccgaggcatctccagccatgag

SEQ ID NO: 678677 - DNA, 25 bp, Homo sapien
tgcgatggacttgtacgtgtgccat

SEQ ID NO: 678678 - DNA, 25 bp, Homo sapien
ctgcgatggacttgtacgtgtgcca

SEQ ID NO: 678679 - DNA, 25 bp, Homo sapien
ggtctgcgatggacttgtacgtgtg

SEQ ID NO: 678680 - DNA, 25 bp, Homo sapien
tctgcgatggacttgtacgtgtgcc

SEQ ID NO: 678681 - DNA, 25 bp, Homo sapien
ccatgagttggagggattctgccag

SEQ ID NO: 678682 - DNA, 25 bp, Homo sapien
gagccatgagttggagggattctgc

SEQ ID NO: 678683 - DNA, 25 bp, Homo sapien
gccatgagttggagggattctgcca

SEQ ID NO: 678684 - DNA, 25 bp, Homo sapien
agccatgagttggagggattctgcc

SEQ ID NO: 678685 - DNA, 25 bp, Homo sapien
tgggagctgcttccttgaaaactct

SEQ ID NO: 678686 - DNA, 25 bp, Homo sapien
ttgaaaactctgaacgggctgggac

SEQ ID NO: 678687 - DNA, 25 bp, Homo sapien
gcagtagcctgggagctgcttcctt

SEQ ID NO: 678688 - DNA, 25 bp, Homo sapien
tgcttccttgaaaactctgaacggg

SEQ ID NO: 678689 - DNA, 25 bp, Homo sapien
aaccctggcctaaaggcgcgcagct

SEQ ID NO: 678690 - DNA, 25 bp, Homo sapien
ccggcagaaccctggcctaaaggcg

SEQ ID NO: 678691 - DNA, 25 bp, Homo sapien
ggggtgggcgtcacccccacagaca

SEQ ID NO: 678692 - DNA, 25 bp, Homo sapien
agttgctgtgtgtccagcagctggc

SEQ ID NO: 678693 - DNA, 25 bp, Homo sapien
cctgccagtacactcgatcctgcat

SEQ ID NO: 678694 - DNA, 25 bp, Homo sapien
tacctgccagtacactcgatcctgc

SEQ ID NO: 678695 - DNA, 25 bp, Homo sapien
ttacctgccagtacactcgatcctg

SEQ ID NO: 678696 - DNA, 25 bp, Homo sapien
gttacctgccagtacactcgatcct

SEQ ID NO: 678697 - DNA, 25 bp, Homo sapien
gctcgtctcttggtagacactgtcc

SEQ ID NO: 678698 - DNA, 25 bp, Homo sapien
gtcccacgcatctctgtcatttgca

SEQ ID NO: 678699 - DNA, 25 bp, Homo sapien
tggtagacactgtcccacgcatctc

SEQ ID NO: 678700 - DNA, 25 bp, Homo sapien
ctggctcgtctcttggtagacactg

SEQ ID NO: 678701 - DNA, 25 bp, Homo sapien
gtcatttctgtaattagagcacaga

SEQ ID NO: 678702 - DNA, 25 bp, Homo sapien
gccgcctggcaatgtggtcctgttt

SEQ ID NO: 678703 - DNA, 25 bp, Homo sapien
tttgtgtgaggacctgtgcccagcg

SEQ ID NO: 678704 - DNA, 25 bp, Homo sapien
tacttggcgtctctggccatgagcc

SEQ ID NO: 678705 - DNA, 25 bp, Homo sapien
ggtctccatagggatagagacagca

SEQ ID NO: 678706 - DNA, 25 bp, Homo sapien
tggacactgaccgtagctcgagtgt

SEQ ID NO: 678707 - DNA, 25 bp, Homo sapien
ccagtcatcgtggacactgaccgta

SEQ ID NO: 678708 - DNA, 25 bp, Homo sapien
caggtttctgctgggccagcaattg

SEQ ID NO: 678709 - DNA, 25 bp, Homo sapien
tcactgacaggtgtgtttgtggctc

SEQ ID NO: 678710 - DNA, 25 bp, Homo sapien
cctttggaattcactgacaggtgtg

SEQ ID NO: 678711 - DNA, 25 bp, Homo sapien
cactgacaggtgtgtttgtggctct

SEQ ID NO: 678712 - DNA, 25 bp, Homo sapien
ggaattcactgacaggtgtgtttgt

SEQ ID NO: 678713 - DNA, 25 bp, Homo sapien
agatggttgaagctgcgcacaccct

SEQ ID NO: 678714 - DNA, 25 bp, Homo sapien
ttgaatccacccttgatcagatggt

SEQ ID NO: 678715 - DNA, 25 bp, Homo sapien
tccccatcgagacgtcgctggagct

SEQ ID NO: 678716 - DNA, 25 bp, Homo sapien
cttatccccatcgagacgtcgctgg

SEQ ID NO: 678717 - DNA, 25 bp, Homo sapien
caaagcaagtgacggagacgccttc

SEQ ID NO: 678718 - DNA, 25 bp, Homo sapien
ccaaggggagacaaagcaagtgacg

SEQ ID NO: 678719 - DNA, 25 bp, Homo sapien
gagacaaagcaagtgacggagacgc

SEQ ID NO: 678720 - DNA, 25 bp, Homo sapien
tgaccaaggggagacaaagcaagtg

SEQ ID NO: 678721 - DNA, 25 bp, Homo sapien
tccacgacaaggctggtctttgcat

SEQ ID NO: 678722 - DNA, 25 bp, Homo sapien
gcatccacgacaaggctggtctttg

SEQ ID NO: 678723 - DNA, 25 bp, Homo sapien
ctcgcatccacgacaaggctggtct

SEQ ID NO: 678724 - DNA, 25 bp, Homo sapien
cacgacaaggctggtctttgcattt

SEQ ID NO: 678725 - DNA, 25 bp, Homo sapien
tcatctacttgcatgatgtgcacag

SEQ ID NO: 678726 - DNA, 25 bp, Homo sapien
taatttcactttcatgaagttcacg

SEQ ID NO: 678727 - DNA, 25 bp, Homo sapien
gatttgcatttccattcggcactgg

SEQ ID NO: 678728 - DNA, 25 bp, Homo sapien
gaagttcacgaaatcccatagtctt

SEQ ID NO: 678729 - DNA, 25 bp, Homo sapien
ttcctttagtggaggtgtcacaatt

SEQ ID NO: 678730 - DNA, 25 bp, Homo sapien
tgttttggaagttgtccaagtgccc

SEQ ID NO: 678731 - DNA, 25 bp, Homo sapien
agaccccggtcacagactcgaccat

SEQ ID NO: 678732 - DNA, 25 bp, Homo sapien
gaaacaacagatacgtgtattttca

SEQ ID NO: 678733 - DNA, 25 bp, Homo sapien
ggacggaggctgcagtcacaatgca

SEQ ID NO: 678734 - DNA, 25 bp, Homo sapien
ctagcagcccagggggacggaggct

SEQ ID NO: 678735 - DNA, 25 bp, Homo sapien
gaggctgcagtcacaatgcagtgga

SEQ ID NO: 678736 - DNA, 25 bp, Homo sapien
cggaggctgcagtcacaatgcagtg

SEQ ID NO: 678737 - DNA, 25 bp, Homo sapien
ctcgagctacggtcagtgtccacga

SEQ ID NO: 678738 - DNA, 25 bp, Homo sapien
cgagctacggtcagtgtccacgatg

SEQ ID NO: 678739 - DNA, 25 bp, Homo sapien
tcgagctacggtcagtgtccacgat

SEQ ID NO: 678740 - DNA, 25 bp, Homo sapien
tcatgagtgcccggtgtcaacggga

SEQ ID NO: 678741 - DNA, 25 bp, Homo sapien
ctctaagccaaagcgtccgggcaca

SEQ ID NO: 678742 - DNA, 25 bp, Homo sapien
cggtgtcaacgggagaagcagcact

SEQ ID NO: 678743 - DNA, 25 bp, Homo sapien
gcctctaagccaaagcgtccgggca

SEQ ID NO: 678744 - DNA, 25 bp, Homo sapien
cattgttctctagccgctgcattcc

SEQ ID NO: 678745 - DNA, 25 bp, Homo sapien
ggtctgaattggataggagcagaaa

SEQ ID NO: 678746 - DNA, 25 bp, Homo sapien
gcttcattgttctctagccgctgca

SEQ ID NO: 678747 - DNA, 25 bp, Homo sapien
ggaaggtctgaattggataggagca

SEQ ID NO: 678748 - DNA, 25 bp, Homo sapien
ctagcttgagtttcgtggagctgga

SEQ ID NO: 678749 - DNA, 25 bp, Homo sapien
tctagcttgagtttcgtggagctgg

SEQ ID NO: 678750 - DNA, 25 bp, Homo sapien
tttaaggatcgtgaaacagaagacc

SEQ ID NO: 678751 - DNA, 25 bp, Homo sapien
tctaatttaaggatcgtgaaacaga

SEQ ID NO: 678752 - DNA, 25 bp, Homo sapien
cattttgttgtagttcaagggtccg

SEQ ID NO: 678753 - DNA, 25 bp, Homo sapien
gttgaaggtccggtagctggcaccc

SEQ ID NO: 678754 - DNA, 25 bp, Homo sapien
tgttgtcgttcgagtgtcaggaagc

SEQ ID NO: 678755 - DNA, 25 bp, Homo sapien
ctagtttcagggtcgtggagcttct

SEQ ID NO: 678756 - DNA, 25 bp, Homo sapien
tgcctcactgctccggtgagtgcgg

SEQ ID NO: 678757 - DNA, 25 bp, Homo sapien
actgctccggtgagtgcggcctctg

SEQ ID NO: 678758 - DNA, 25 bp, Homo sapien
tagttctgcctcactgctccggtga

SEQ ID NO: 678759 - DNA, 25 bp, Homo sapien
agttagttctgcctcactgctccgg

SEQ ID NO: 678760 - DNA, 25 bp, Homo sapien
tgcttatctttggtgttggtatcac

SEQ ID NO: 678761 - DNA, 25 bp, Homo sapien
tatctttggtgttggtatcacgtgt

SEQ ID NO: 678762 - DNA, 25 bp, Homo sapien
ttggtatcacgtgtgatttaaaatc

SEQ ID NO: 678763 - DNA, 25 bp, Homo sapien
ctttggtgttggtatcacgtgtgat

SEQ ID NO: 678764 - DNA, 25 bp, Homo sapien
cctggtgtgaggtcgtacagacagt

SEQ ID NO: 678765 - DNA, 25 bp, Homo sapien
tgcctggtgtgaggtcgtacagaca

SEQ ID NO: 678766 - DNA, 25 bp, Homo sapien
cacaagccagatgtgtctctttccc

SEQ ID NO: 678767 - DNA, 25 bp, Homo sapien
tgaggtcgtacagacagtgagcatc

SEQ ID NO: 678768 - DNA, 25 bp, Homo sapien
tccccgtctctgaacacgtttagcg

SEQ ID NO: 678769 - DNA, 25 bp, Homo sapien
gtctctgaacacgtttagcgggagg

SEQ ID NO: 678770 - DNA, 25 bp, Homo sapien
agcgtccccgtctctgaacacgttt

SEQ ID NO: 678771 - DNA, 25 bp, Homo sapien
ccgtctctgaacacgtttagcggga

SEQ ID NO: 678772 - DNA, 25 bp, Homo sapien
caaaatggcgaaagtgagctgctgg

SEQ ID NO: 678773 - DNA, 25 bp, Homo sapien
aggctgatgacgtggaatcctggag

SEQ ID NO: 678774 - DNA, 25 bp, Homo sapien
ccaagtcacccaaaatggcgaaagt

SEQ ID NO: 678775 - DNA, 25 bp, Homo sapien
gctgctgggaaaccttcgggccaga

SEQ ID NO: 678776 - DNA, 25 bp, Homo sapien
ttatttcatccttttctttctccat

SEQ ID NO: 678777 - DNA, 25 bp, Homo sapien
tgcattctttccttgtctcttattt

SEQ ID NO: 678778 - DNA, 25 bp, Homo sapien
tctcttatttcatccttttctttct

SEQ ID NO: 678779 - DNA, 25 bp, Homo sapien
tcttatttcatccttttctttctcc

SEQ ID NO: 678780 - DNA, 25 bp, Homo sapien
cagttaagagggtggctgtcagcac

SEQ ID NO: 678781 - DNA, 25 bp, Homo sapien
atgccagtggtgttctcatctccag

SEQ ID NO: 678782 - DNA, 25 bp, Homo sapien
tcatctccagttaagagggtggctg

SEQ ID NO: 678783 - DNA, 25 bp, Homo sapien
caggtggaatgtggatgccagtggt

SEQ ID NO: 678784 - DNA, 25 bp, Homo sapien
tggccattagttttgacagcgcctc

SEQ ID NO: 678785 - DNA, 25 bp, Homo sapien
attagttttgacagcgcctcagcca

SEQ ID NO: 678786 - DNA, 25 bp, Homo sapien
gccattagttttgacagcgcctcag

SEQ ID NO: 678787 - DNA, 25 bp, Homo sapien
cattagttttgacagcgcctcagcc

SEQ ID NO: 678788 - DNA, 25 bp, Homo sapien
aggactcgctgtgtgtcgagggcat

SEQ ID NO: 678789 - DNA, 25 bp, Homo sapien
tcacaccatcacagcaacgattatt

SEQ ID NO: 678790 - DNA, 25 bp, Homo sapien
cagcaacgattattttccaaaggca

SEQ ID NO: 678791 - DNA, 25 bp, Homo sapien
ccatcacagcaacgattattttcca

SEQ ID NO: 678792 - DNA, 25 bp, Homo sapien
agctctcacaccatcacagcaacga

SEQ ID NO: 678793 - DNA, 25 bp, Homo sapien
catggtcagtactcatacatagaca

SEQ ID NO: 678794 - DNA, 25 bp, Homo sapien
aagagcacgctgtccagggtcggca

SEQ ID NO: 678795 - DNA, 25 bp, Homo sapien
aatggataggcagtcaccaggctca

SEQ ID NO: 678796 - DNA, 25 bp, Homo sapien
ggttgtgagtgtgagtcacttcagc

SEQ ID NO: 678797 - DNA, 25 bp, Homo sapien
gagaaagtcactccatcttctttgg

SEQ ID NO: 678798 - DNA, 25 bp, Homo sapien
ccttgctgcattgtcataaggatgg

SEQ ID NO: 678799 - DNA, 25 bp, Homo sapien
gcattgtcataaggatggaaacagg

SEQ ID NO: 678800 - DNA, 25 bp, Homo sapien
agctttggtatgagcaaagccctga

SEQ ID NO: 678801 - DNA, 25 bp, Homo sapien
tctcagaaactcagggcggtccccg

SEQ ID NO: 678802 - DNA, 25 bp, Homo sapien
aactcagggcggtccccgagcagct

SEQ ID NO: 678803 - DNA, 25 bp, Homo sapien
gaaactcagggcggtccccgagcag

SEQ ID NO: 678804 - DNA, 25 bp, Homo sapien
caggactctcagaaactcagggcgg

SEQ ID NO: 678805 - DNA, 25 bp, Homo sapien
cagctgatcccgcagggagctttgg

SEQ ID NO: 678806 - DNA, 25 bp, Homo sapien
gattcccagacccagctgatcccgc

SEQ ID NO: 678807 - DNA, 25 bp, Homo sapien
cagacccagctgatcccgcagggag

SEQ ID NO: 678808 - DNA, 25 bp, Homo sapien
caaacaccggcctcatccgaaaagt

SEQ ID NO: 678809 - DNA, 25 bp, Homo sapien
gtgactcggtctgccttgccctgcc

SEQ ID NO: 678810 - DNA, 25 bp, Homo sapien
gtgtgactcggtctgccttgccctg

SEQ ID NO: 678811 - DNA, 25 bp, Homo sapien
tgtgactcggtctgccttgccctgc

SEQ ID NO: 678812 - DNA, 25 bp, Homo sapien
cgtgtgactcggtctgccttgccct

SEQ ID NO: 678813 - DNA, 25 bp, Homo sapien
ccagtgacccgtggtggctgtagga

SEQ ID NO: 678814 - DNA, 25 bp, Homo sapien
tggctgctgttagcaaatccaccat

SEQ ID NO: 678815 - DNA, 25 bp, Homo sapien
gtgatgtggctgttccccaacttgc

SEQ ID NO: 678816 - DNA, 25 bp, Homo sapien
tgctctctgcagtttcgatgtcgcc

SEQ ID NO: 678817 - DNA, 25 bp, Homo sapien
cgaggaatcggttccaaacatggca

SEQ ID NO: 678818 - DNA, 25 bp, Homo sapien
tgtgcatcgggagacggatttcgca

SEQ ID NO: 678819 - DNA, 25 bp, Homo sapien
tagacgccactcttcaggcaggttc

SEQ ID NO: 678820 - DNA, 25 bp, Homo sapien
gttgtgctcacacccacgcggttag

SEQ ID NO: 678821 - DNA, 25 bp, Homo sapien
gttcactcctgagtctgcactccgg

SEQ ID NO: 678822 - DNA, 25 bp, Homo sapien
ggttgtccctgtccaaggaagatag

SEQ ID NO: 678823 - DNA, 25 bp, Homo sapien
agaccctcagtacagcagacctgga

SEQ ID NO: 678824 - DNA, 25 bp, Homo sapien
tggctcagatgtgatgaaccccatc

SEQ ID NO: 678825 - DNA, 25 bp, Homo sapien
gcattggccaatgggacgtcagcag

SEQ ID NO: 678826 - DNA, 25 bp, Homo sapien
gtcagggccatcttctccggacaca

SEQ ID NO: 678827 - DNA, 25 bp, Homo sapien
ctgccgtcagggccatcttctccgg

SEQ ID NO: 678828 - DNA, 25 bp, Homo sapien
tgccgtcagggccatcttctccgga

SEQ ID NO: 678829 - DNA, 25 bp, Homo sapien
gggccatcttctccggacacaccat

SEQ ID NO: 678830 - DNA, 25 bp, Homo sapien
actccaatttggcttactctgtagc

SEQ ID NO: 678831 - DNA, 25 bp, Homo sapien
ttaacaagacgtccagaaaaggcaa

SEQ ID NO: 678832 - DNA, 25 bp, Homo sapien
tttggcttactctgtagctctagga

SEQ ID NO: 678833 - DNA, 25 bp, Homo sapien
agacgtccagaaaaggcaactccaa

SEQ ID NO: 678834 - DNA, 25 bp, Homo sapien
acattagcaagtgttccccggaggg

SEQ ID NO: 678835 - DNA, 25 bp, Homo sapien
tccagacattagcaagtgttccccg

SEQ ID NO: 678836 - DNA, 25 bp, Homo sapien
tgtgtccagacattagcaagtgttc

SEQ ID NO: 678837 - DNA, 25 bp, Homo sapien
cagacattagcaagtgttccccgga

SEQ ID NO: 678838 - DNA, 25 bp, Homo sapien
ctctcagcagcaggtccaaattatc

SEQ ID NO: 678839 - DNA, 25 bp, Homo sapien
tgttggcatgaattggcagcatgga

SEQ ID NO: 678840 - DNA, 25 bp, Homo sapien
cagcatggaattcactaggaagcat

SEQ ID NO: 678841 - DNA, 25 bp, Homo sapien
cagcagcaggtccaaattatccatg

SEQ ID NO: 678842 - DNA, 25 bp, Homo sapien
cttctcccgacacttttgccccagg

SEQ ID NO: 678843 - DNA, 25 bp, Homo sapien
ggtttccactactctggttccatcc

SEQ ID NO: 678844 - DNA, 25 bp, Homo sapien
ttccactactctggttccatccaga

SEQ ID NO: 678845 - DNA, 25 bp, Homo sapien
tgccaggtttccactactctggttc

SEQ ID NO: 678846 - DNA, 25 bp, Homo sapien
caggtttccactactctggttccat

SEQ ID NO: 678847 - DNA, 25 bp, Homo sapien
gtccagggcaagtcctccaaaggcc

SEQ ID NO: 678848 - DNA, 25 bp, Homo sapien
taaatccaccaggttcttcggtcca

SEQ ID NO: 678849 - DNA, 25 bp, Homo sapien
tatttacgtccagggcaagtcctcc

SEQ ID NO: 678850 - DNA, 25 bp, Homo sapien
ggcaaatccactatttacgtccagg

SEQ ID NO: 678851 - DNA, 25 bp, Homo sapien
ctgcttggtgctggtaggcatttag

SEQ ID NO: 678852 - DNA, 25 bp, Homo sapien
gctggtaggcatttaggagttgttt

SEQ ID NO: 678853 - DNA, 25 bp, Homo sapien
ctgccaggacttgagggtccacgat

SEQ ID NO: 678854 - DNA, 25 bp, Homo sapien
gccaggacttgagggtccacgatcc

SEQ ID NO: 678855 - DNA, 25 bp, Homo sapien
tctcaataagatcgatggaagtgga

SEQ ID NO: 678856 - DNA, 25 bp, Homo sapien
gggaacatcttaaacacaaccagag

SEQ ID NO: 678857 - DNA, 25 bp, Homo sapien
agtaaacggcgaatttctcaataag

SEQ ID NO: 678858 - DNA, 25 bp, Homo sapien
caaagattcaagcactcctagcata

SEQ ID NO: 678859 - DNA, 25 bp, Homo sapien
tagatactctgtagaggtagatgtc

SEQ ID NO: 678860 - DNA, 25 bp, Homo sapien
ctctttagatactctgtagaggtag

SEQ ID NO: 678861 - DNA, 25 bp, Homo sapien
gatgtcattgtgaagcataatgaca

SEQ ID NO: 678862 - DNA, 25 bp, Homo sapien
tagaggtagatgtcattgtgaagca

SEQ ID NO: 678863 - DNA, 25 bp, Homo sapien
cagactcggaaagtgagggcatttc

SEQ ID NO: 678864 - DNA, 25 bp, Homo sapien
aactcctcatgccagggatcttctg

SEQ ID NO: 678865 - DNA, 25 bp, Homo sapien
aggagccaactcctcatgccaggga

SEQ ID NO: 678866 - DNA, 25 bp, Homo sapien
ctgtggcatgaccagactcggaaag

SEQ ID NO: 678867 - DNA, 25 bp, Homo sapien
tgtgctgaagtcaacagctatctca

SEQ ID NO: 678868 - DNA, 25 bp, Homo sapien
gtttctgagttgaatctcctttgac

SEQ ID NO: 678869 - DNA, 25 bp, Homo sapien
cattaaagcgtttttctccaatgtc

SEQ ID NO: 678870 - DNA, 25 bp, Homo sapien
atcagattcagtattggagcagcaa

SEQ ID NO: 678871 - DNA, 25 bp, Homo sapien
ctggaggaagttgagaactgataat

SEQ ID NO: 678872 - DNA, 25 bp, Homo sapien
ttgggatgtaggtttagaagaagtc

SEQ ID NO: 678873 - DNA, 25 bp, Homo sapien
gggatgtaggtttagaagaagtcat

SEQ ID NO: 678874 - DNA, 25 bp, Homo sapien
tgggatgtaggtttagaagaagtca

SEQ ID NO: 678875 - DNA, 25 bp, Homo sapien
gagggaatcttctttgcagacgctg

SEQ ID NO: 678876 - DNA, 25 bp, Homo sapien
tctgccgcaggcttgttatctgttt

SEQ ID NO: 678877 - DNA, 25 bp, Homo sapien
gacttagggccacataaatctttcc

SEQ ID NO: 678878 - DNA, 25 bp, Homo sapien
gctgacacttcgattctcactgtgg

SEQ ID NO: 678879 - DNA, 25 bp, Homo sapien
gctggttgcctccattctcttgtgc

SEQ ID NO: 678880 - DNA, 25 bp, Homo sapien
tctcttgtgcctcacttggccagtt

SEQ ID NO: 678881 - DNA, 25 bp, Homo sapien
tgctggttgcctccattctcttgtg

SEQ ID NO: 678882 - DNA, 25 bp, Homo sapien
tgtgcctcacttggccagttctcca

SEQ ID NO: 678883 - DNA, 25 bp, Homo sapien
tcttatttgatagtgaatgttgatg

SEQ ID NO: 678884 - DNA, 25 bp, Homo sapien
aatgttgatggacaccaggcctgct

SEQ ID NO: 678885 - DNA, 25 bp, Homo sapien
ctgcttatgcacaagagcttctgac

SEQ ID NO: 678886 - DNA, 25 bp, Homo sapien
caggcctgcttatgcacaagagctt

SEQ ID NO: 678887 - DNA, 25 bp, Homo sapien
catggtttagggagctcagatgctt

SEQ ID NO: 678888 - DNA, 25 bp, Homo sapien
tggccctccgcaagctgatgtccaa

SEQ ID NO: 678889 - DNA, 25 bp, Homo sapien
ctcagatgcttgaactgtgacgcag

SEQ ID NO: 678890 - DNA, 25 bp, Homo sapien
caagacgacagacacatggtttagg

SEQ ID NO: 678891 - DNA, 25 bp, Homo sapien
ttccagtagaaaggtgcactgtgag
